United States Patent Application Publication US 2018/0305689 A1 - sequence listing, part 55

SEQ ID NO: 774040 - RNA, 19 nt, Artificial Sequence
  Description of Artificial Sequence: Synthetic oligonucleotide
  Sense strand starting at position 222 of SEQ ID NO: 587198
ccuguaugucuucaguggu

SEQ ID NO: 774041 - RNA, 19 nt, Artificial Sequence
  Description of Artificial Sequence: Synthetic oligonucleotide
  Antisense strand to SEQ ID NO: 774040
accacugaagacauacagg

SEQ ID NO: 774042 - RNA, 19 nt, Artificial Sequence
  Description of Artificial Sequence: Synthetic oligonucleotide
  Sense strand starting at position 225 of SEQ ID NO: 587198
guaugucuucagugguaga

SEQ ID NO: 774043 - RNA, 19 nt, Artificial Sequence
  Description of Artificial Sequence: Synthetic oligonucleotide
  Antisense strand to SEQ ID NO: 774042
ucuaccacugaagacauac

SEQ ID NO: 774044 - RNA, 19 nt, Artificial Sequence
  Description of Artificial Sequence: Synthetic oligonucleotide
  Sense strand starting at position 276 of SEQ ID NO: 587198
ugaaauaugaugcggcuau

SEQ ID NO: 774045 - RNA, 19 nt, Artificial Sequence
  Description of Artificial Sequence: Synthetic oligonucleotide
  Antisense strand to SEQ ID NO: 774044
auagccgcaucauauuuca

SEQ ID NO: 774046 - RNA, 19 nt, Artificial Sequence
  Description of Artificial Sequence: Synthetic oligonucleotide
  Sense strand starting at position 280 of SEQ ID NO: 587198
auaugaugcggcuauaaga

SEQ ID NO: 774047 - RNA, 19 nt, Artificial Sequence
  Description of Artificial Sequence: Synthetic oligonucleotide
  Antisense strand to SEQ ID NO: 774046
ucuuauagccgcaucauau

SEQ ID NO: 774048 - RNA, 19 nt, Artificial Sequence
  Description of Artificial Sequence: Synthetic oligonucleotide
  Sense strand starting at position 395 of SEQ ID NO: 587198
gucacuuguaagugggagu

SEQ ID NO: 774049 - RNA, 19 nt, Artificial Sequence
  Description of Artificial Sequence: Synthetic oligonucleotide
  Antisense strand to SEQ ID NO: 774048
acucccacuuacaagugac

SEQ ID NO: 774050 - RNA, 19 nt, Artificial Sequence
  Description of Artificial Sequence: Synthetic oligonucleotide
  Sense strand starting at position 398 of SEQ ID NO: 587198
acuuguaagugggagugaa

SEQ ID NO: 774051 - RNA, 19 nt, Artificial Sequence
  Description of Artificial Sequence: Synthetic oligonucleotide
  Antisense strand to SEQ ID NO: 774050
uucacucccacuuacaagu

SEQ ID NO: 774052 - RNA, 19 nt, Artificial Sequence
  Description of Artificial Sequence: Synthetic oligonucleotide
  Sense strand starting at position 525 of SEQ ID NO: 587198
augcuuaguacgugaguga

SEQ ID NO: 774053 - RNA, 19 nt, Artificial Sequence
  Description of Artificial Sequence: Synthetic oligonucleotide
  Antisense strand to SEQ ID NO: 774052
ucacucacguacuaagcau

SEQ ID NO: 774054 - RNA, 19 nt, Artificial Sequence
  Description of Artificial Sequence: Synthetic oligonucleotide
  Sense strand starting at position 528 of SEQ ID NO: 587198
cuuaguacgugagugauaa

SEQ ID NO: 774055 - RNA, 19 nt, Artificial Sequence
  Description of Artificial Sequence: Synthetic oligonucleotide
  Antisense strand to SEQ ID NO: 774054
uuaucacucacguacuaag

SEQ ID NO: 774056 - RNA, 19 nt, Artificial Sequence
  Description of Artificial Sequence: Synthetic oligonucleotide
  Sense strand starting at position 529 of SEQ ID NO: 587198
uuaguacgugagugauaau

SEQ ID NO: 774057 - RNA, 19 nt, Artificial Sequence
  Description of Artificial Sequence: Synthetic oligonucleotide
  Antisense strand to SEQ ID NO: 774056
auuaucacucacguacuaa

SEQ ID NO: 774058 - RNA, 19 nt, Artificial Sequence
  Description of Artificial Sequence: Synthetic oligonucleotide
  Sense strand starting at position 530 of SEQ ID NO: 587198
uaguacgugagugauaaua

SEQ ID NO: 774059 - RNA, 19 nt, Artificial Sequence
  Description of Artificial Sequence: Synthetic oligonucleotide
  Antisense strand to SEQ ID NO: 774058
uauuaucacucacguacua

SEQ ID NO: 774060 - RNA, 19 nt, Artificial Sequence
  Description of Artificial Sequence: Synthetic oligonucleotide
  Sense strand starting at position 532 of SEQ ID NO: 587198
guacgugagugauaauaua

SEQ ID NO: 774061 - RNA, 19 nt, Artificial Sequence
  Description of Artificial Sequence: Synthetic oligonucleotide
  Antisense strand to SEQ ID NO: 774060
uauauuaucacucacguac

SEQ ID NO: 774062 - RNA, 19 nt, Artificial Sequence
  Description of Artificial Sequence: Synthetic oligonucleotide
  Sense strand starting at position 865 of SEQ ID NO: 587198
guuguaaagaggugagauu

SEQ ID NO: 774063 - RNA, 19 nt, Artificial Sequence
  Description of Artificial Sequence: Synthetic oligonucleotide
  Antisense strand to SEQ ID NO: 774062
aaucucaccucuuuacaac

SEQ ID NO: 774064 - RNA, 19 nt, Artificial Sequence
  Description of Artificial Sequence: Synthetic oligonucleotide
  Sense strand starting at position 970 of SEQ ID NO: 587198
agauuacuaucuugaagaa

SEQ ID NO: 774065 - RNA, 19 nt, Artificial Sequence
  Description of Artificial Sequence: Synthetic oligonucleotide
  Antisense strand to SEQ ID NO: 774064
uucuucaagauaguaaucu

SEQ ID NO: 774066 - RNA, 19 nt, Artificial Sequence
  Description of Artificial Sequence: Synthetic oligonucleotide
  Sense strand starting at position 1017 of SEQ ID NO: 587198
gccaaugaaucucugauga

SEQ ID NO: 774067 - RNA, 19 nt, Artificial Sequence
  Description of Artificial Sequence: Synthetic oligonucleotide
  Antisense strand to SEQ ID NO: 774066
ucaucagagauucauuggc

SEQ ID NO: 774068 - RNA, 19 nt, Artificial Sequence
  Description of Artificial Sequence: Synthetic oligonucleotide
  Sense strand starting at position 1021 of SEQ ID NO: 587198
augaaucucugaugacaua

SEQ ID NO: 774069 - RNA, 19 nt, Artificial Sequence
  Description of Artificial Sequence: Synthetic oligonucleotide
  Antisense strand to SEQ ID NO: 774068
uaugucaucagagauucau

SEQ ID NO: 774070 - RNA, 19 nt, Artificial Sequence
  Description of Artificial Sequence: Synthetic oligonucleotide
  Sense strand starting at position 1499 of SEQ ID NO: 587198
gcucuaugauucuugaauc

SEQ ID NO: 774071 - RNA, 19 nt, Artificial Sequence
  Description of Artificial Sequence: Synthetic oligonucleotide
  Antisense strand to SEQ ID NO: 774070
gauucaagaaucauagagc

SEQ ID NO: 774072 - RNA, 19 nt, Artificial Sequence
  Description of Artificial Sequence: Synthetic oligonucleotide
  Sense strand starting at position 1867 of SEQ ID NO: 587198
gcugacugcgaggaaguau

SEQ ID NO: 774073 - RNA, 19 nt, Artificial Sequence
  Description of Artificial Sequence: Synthetic oligonucleotide
  Antisense strand to SEQ ID NO: 774072
auacuuccucgcagucagc

SEQ ID NO: 774074 - RNA, 19 nt, Artificial Sequence
  Description of Artificial Sequence: Synthetic oligonucleotide
  Sense strand starting at position 2150 of SEQ ID NO: 587198
agcugcaugccugauuaua

SEQ ID NO: 774075 - RNA, 19 nt, Artificial Sequence
  Description of Artificial Sequence: Synthetic oligonucleotide
  Antisense strand to SEQ ID NO: 774074
uauaaucaggcaugcagcu

SEQ ID NO: 774076 - RNA, 19 nt, Artificial Sequence
  Description of Artificial Sequence: Synthetic oligonucleotide
  Sense strand starting at position 2152 of SEQ ID NO: 587198
cugcaugccugauuauaca

SEQ ID NO: 774077 - RNA, 19 nt, Artificial Sequence
  Description of Artificial Sequence: Synthetic oligonucleotide
  Antisense strand to SEQ ID NO: 774076
uguauaaucaggcaugcag

SEQ ID NO: 774078 - RNA, 19 nt, Artificial Sequence
  Description of Artificial Sequence: Synthetic oligonucleotide
  Sense strand starting at position 2224 of SEQ ID NO: 587198
cccugagugacggaauauu

SEQ ID NO: 774079 - RNA, 19 nt, Artificial Sequence
  Description of Artificial Sequence: Synthetic oligonucleotide
  Antisense strand to SEQ ID NO: 774078
aauauuccgucacucaggg

SEQ ID NO: 774080 - RNA, 19 nt, Artificial Sequence
  Description of Artificial Sequence: Synthetic oligonucleotide
  Sense strand starting at position 2232 of SEQ ID NO: 587198
gacggaauauuugaucaga

SEQ ID NO: 774081 - RNA, 19 nt, Artificial Sequence
  Description of Artificial Sequence: Synthetic oligonucleotide
  Antisense strand to SEQ ID NO: 774080
ucugaucaaauauuccguc

SEQ ID NO: 774082 - RNA, 19 nt, Artificial Sequence
  Description of Artificial Sequence: Synthetic oligonucleotide
  Sense strand starting at position 2861 of SEQ ID NO: 587198
gacuguguaagaggugauu

SEQ ID NO: 774083 - RNA, 19 nt, Artificial Sequence
  Description of Artificial Sequence: Synthetic oligonucleotide
  Antisense strand to SEQ ID NO: 774082
aaucaccucuuacacaguc

SEQ ID NO: 774084 - RNA, 19 nt, Artificial Sequence
  Description of Artificial Sequence: Synthetic oligonucleotide
  Sense strand starting at position 2890 of SEQ ID NO: 587198
gguggauuauccucauccu

SEQ ID NO: 774085 - RNA, 19 nt, Artificial Sequence
  Description of Artificial Sequence: Synthetic oligonucleotide
  Antisense strand to SEQ ID NO: 774084
aggaugaggauaauccacc

SEQ ID NO: 774086 - RNA, 19 nt, Artificial Sequence
  Description of Artificial Sequence: Synthetic oligonucleotide
  Sense strand starting at position 2893 of SEQ ID NO: 587198
ggauuauccucauccuguu

SEQ ID NO: 774087 - RNA, 19 nt, Artificial Sequence
  Description of Artificial Sequence: Synthetic oligonucleotide
  Antisense strand to SEQ ID NO: 774086
aacaggaugaggauaaucc

SEQ ID NO: 774088 - RNA, 19 nt, Artificial Sequence
  Description of Artificial Sequence: Synthetic oligonucleotide
  Sense strand starting at position 2903 of SEQ ID NO: 587198
cauccuguucuugggauaa

SEQ ID NO: 774089 - RNA, 19 nt, Artificial Sequence
  Description of Artificial Sequence: Synthetic oligonucleotide
  Antisense strand to SEQ ID NO: 774088
uuaucccaagaacaggaug

SEQ ID NO: 774090 - RNA, 19 nt, Artificial Sequence
  Description of Artificial Sequence: Synthetic oligonucleotide
  Sense strand starting at position 2905 of SEQ ID NO: 587198
uccuguucuugggauaaua

SEQ ID NO: 774091 - RNA, 19 nt, Artificial Sequence
  Description of Artificial Sequence: Synthetic oligonucleotide
  Antisense strand to SEQ ID NO: 774090
uauuaucccaagaacagga

SEQ ID NO: 774092 - RNA, 19 nt, Artificial Sequence
  Description of Artificial Sequence: Synthetic oligonucleotide
  Sense strand starting at position 2934 of SEQ ID NO: 587198
caagauacccgaugguuua

SEQ ID NO: 774093 - RNA, 19 nt, Artificial Sequence
  Description of Artificial Sequence: Synthetic oligonucleotide
  Antisense strand to SEQ ID NO: 774092
uaaaccaucggguaucuug

SEQ ID NO: 774094 - RNA, 19 nt, Artificial Sequence
  Description of Artificial Sequence: Synthetic oligonucleotide
  Sense strand starting at position 2935 of SEQ ID NO: 587198
aagauacccgaugguuuaa

SEQ ID NO: 774095 - RNA, 19 nt, Artificial Sequence
  Description of Artificial Sequence: Synthetic oligonucleotide
  Antisense strand to SEQ ID NO: 774094
uuaaaccaucggguaucuu

SEQ ID NO: 774096 - RNA, 19 nt, Artificial Sequence
  Description of Artificial Sequence: Synthetic oligonucleotide
  Sense strand starting at position 3122 of SEQ ID NO: 587198
cgcagugugagguauuugu

SEQ ID NO: 774097 - RNA, 19 nt, Artificial Sequence
  Description of Artificial Sequence: Synthetic oligonucleotide
  Antisense strand to SEQ ID NO: 774096
acaaauaccucacacugcg

SEQ ID NO: 774098 - RNA, 19 nt, Artificial Sequence
  Description of Artificial Sequence: Synthetic oligonucleotide
  Sense strand starting at position 3126 of SEQ ID NO: 587198
gugugagguauuuguuuau

SEQ ID NO: 774099 - RNA, 19 nt, Artificial Sequence
  Description of Artificial Sequence: Synthetic oligonucleotide
  Antisense strand to SEQ ID NO: 774098
auaaacaaauaccucacac

SEQ ID NO: 774100 - RNA, 19 nt, Artificial Sequence
  Description of Artificial Sequence: Synthetic oligonucleotide
  Sense strand starting at position 3470 of SEQ ID NO: 587198
acaggagaauuguuugauc

SEQ ID NO: 774101 - RNA, 19 nt, Artificial Sequence
  Description of Artificial Sequence: Synthetic oligonucleotide
  Antisense strand to SEQ ID NO: 774100
gaucaaacaauucuccugu

SEQ ID NO: 774102 - RNA, 19 nt, Artificial Sequence
  Description of Artificial Sequence: Synthetic oligonucleotide
  Sense strand starting at position 3596 of SEQ ID NO: 587198
gguggaauugacuguaaca

SEQ ID NO: 774103 - RNA, 19 nt, Artificial Sequence
  Description of Artificial Sequence: Synthetic oligonucleotide
  Antisense strand to SEQ ID NO: 774102
uguuacagucaauuccacc

SEQ ID NO: 774104 - RNA, 19 nt, Artificial Sequence
  Description of Artificial Sequence: Synthetic oligonucleotide
  Sense strand starting at position 3651 of SEQ ID NO: 587198
uuacuaugugauuaguaug

SEQ ID NO: 774105 - RNA, 19 nt, Artificial Sequence
  Description of Artificial Sequence: Synthetic oligonucleotide
  Antisense strand to SEQ ID NO: 774104
cauacuaaucacauaguaa

SEQ ID NO: 774106 - RNA, 19 nt, Artificial Sequence
  Description of Artificial Sequence: Synthetic oligonucleotide
  Sense strand starting at position 3654 of SEQ ID NO: 587198
cuaugugauuaguauguaa

SEQ ID NO: 774107 - RNA, 19 nt, Artificial Sequence
  Description of Artificial Sequence: Synthetic oligonucleotide
  Antisense strand to SEQ ID NO: 774106
uuacauacuaaucacauag

SEQ ID NO: 774108 - RNA, 19 nt, Artificial Sequence
  Description of Artificial Sequence: Synthetic oligonucleotide
  Sense strand starting at position 3700 of SEQ ID NO: 587198
agcuaaaucuuugaaugua

SEQ ID NO: 774109 - RNA, 19 nt, Artificial Sequence
  Description of Artificial Sequence: Synthetic oligonucleotide
  Antisense strand to SEQ ID NO: 774108
uacauucaaagauuuagcu

SEQ ID NO: 774110 - RNA, 19 nt, Artificial Sequence
  Description of Artificial Sequence: Synthetic oligonucleotide
  Sense strand starting at position 3708 of SEQ ID NO: 587198
cuuugaauguacucuugua

SEQ ID NO: 774111 - RNA, 19 nt, Artificial Sequence
  Description of Artificial Sequence: Synthetic oligonucleotide
  Antisense strand to SEQ ID NO: 774110
uacaagaguacauucaaag

SEQ ID NO: 774112 - RNA, 19 nt, Artificial Sequence
  Description of Artificial Sequence: Synthetic oligonucleotide
  Sense strand starting at position 3780 of SEQ ID NO: 587198
ggccauaucagaggcguuu

SEQ ID NO: 774113 - RNA, 19 nt, Artificial Sequence
  Description of Artificial Sequence: Synthetic oligonucleotide
  Antisense strand to SEQ ID NO: 774112
aaacgccucugauauggcc

SEQ ID NO: 774114 - RNA, 19 nt, Artificial Sequence
  Description of Artificial Sequence: Synthetic oligonucleotide
  Sense strand starting at position 3782 of SEQ ID NO: 587198
ccauaucagaggcguuuga

SEQ ID NO: 774115 - RNA, 19 nt, Artificial Sequence
  Description of Artificial Sequence: Synthetic oligonucleotide
  Antisense strand to SEQ ID NO: 774114
ucaaacgccucugauaugg

SEQ ID NO: 774116 - RNA, 19 nt, Artificial Sequence
  Description of Artificial Sequence: Synthetic oligonucleotide
  Sense strand starting at position 72 of SEQ ID NO: 587199
uugggaaugugggaaagaa

SEQ ID NO: 774117 - RNA, 19 nt, Artificial Sequence
  Description of Artificial Sequence: Synthetic oligonucleotide
  Antisense strand to SEQ ID NO: 774116
uucuuucccacauucccaa

SEQ ID NO: 774118 - RNA, 19 nt, Artificial Sequence
  Description of Artificial Sequence: Synthetic oligonucleotide
  Sense strand starting at position 200 of SEQ ID NO: 587199
gacccuguggagcauuaaa

SEQ ID NO: 774119 - RNA, 19 nt, Artificial Sequence
  Description of Artificial Sequence: Synthetic oligonucleotide
  Antisense strand to SEQ ID NO: 774118
uuuaaugcuccacaggguc

SEQ ID NO: 774120 - RNA, 19 nt, Artificial Sequence
  Description of Artificial Sequence: Synthetic oligonucleotide
  Sense strand starting at position 295 of SEQ ID NO: 587199
gaaggaauuucugguaaau

SEQ ID NO: 774121 - RNA, 19 nt, Artificial Sequence
  Description of Artificial Sequence: Synthetic oligonucleotide
  Antisense strand to SEQ ID NO: 774120
auuuaccagaaauuccuuc

SEQ ID NO: 774122 - RNA, 19 nt, Artificial Sequence
  Description of Artificial Sequence: Synthetic oligonucleotide
  Sense strand starting at position 297 of SEQ ID NO: 587199
aggaauuucugguaaauua

SEQ ID NO: 774123 - RNA, 19 nt, Artificial Sequence
  Description of Artificial Sequence: Synthetic oligonucleotide
  Antisense strand to SEQ ID NO: 774122
uaauuuaccagaaauuccu

SEQ ID NO: 774124 - RNA, 19 nt, Artificial Sequence
  Description of Artificial Sequence: Synthetic oligonucleotide
  Sense strand starting at position 425 of SEQ ID NO: 587199
cugcaaaugcaauacguaa

SEQ ID NO: 774125 - RNA, 19 nt, Artificial Sequence
  Description of Artificial Sequence: Synthetic oligonucleotide
  Antisense strand to SEQ ID NO: 774124
uuacguauugcauuugcag

SEQ ID NO: 774126 - RNA, 19 nt, Artificial Sequence
  Description of Artificial Sequence: Synthetic oligonucleotide
  Sense strand starting at position 554 of SEQ ID NO: 587199
cuggguguucucugauuga

SEQ ID NO: 774127 - RNA, 19 nt, Artificial Sequence
  Description of Artificial Sequence: Synthetic oligonucleotide
  Antisense strand to SEQ ID NO: 774126
ucaaucagagaacacccag

SEQ ID NO: 774128 - RNA, 19 nt, Artificial Sequence
  Description of Artificial Sequence: Synthetic oligonucleotide
  Sense strand starting at position 557 of SEQ ID NO: 587199
gguguucucugauugauaa

SEQ ID NO: 774129 - RNA, 19 nt, Artificial Sequence
  Description of Artificial Sequence: Synthetic oligonucleotide
  Antisense strand to SEQ ID NO: 774128
uuaucaaucagagaacacc

SEQ ID NO: 774130 - RNA, 19 nt, Artificial Sequence
  Description of Artificial Sequence: Synthetic oligonucleotide
  Sense strand starting at position 558 of SEQ ID NO: 587199
guguucucugauugauaaa

SEQ ID NO: 774131 - RNA, 19 nt, Artificial Sequence
  Description of Artificial Sequence: Synthetic oligonucleotide
  Antisense strand to SEQ ID NO: 774130
uuuaucaaucagagaacac

SEQ ID NO: 774132 - RNA, 19 nt, Artificial Sequence
  Description of Artificial Sequence: Synthetic oligonucleotide
  Sense strand starting at position 572 of SEQ ID NO: 587199
auaaauuacuguuugugca

SEQ ID NO: 774133 - RNA, 19 nt, Artificial Sequence
  Description of Artificial Sequence: Synthetic oligonucleotide
  Antisense strand to SEQ ID NO: 774132
ugcacaaacaguaauuuau

SEQ ID NO: 774134 - RNA, 19 nt, Artificial Sequence
  Description of Artificial Sequence: Synthetic oligonucleotide
  Sense strand starting at position 575 of SEQ ID NO: 587199
aauuacuguuugugcaagu

SEQ ID NO: 774135 - RNA, 19 nt, Artificial Sequence
  Description of Artificial Sequence: Synthetic oligonucleotide
  Antisense strand to SEQ ID NO: 774134
acuugcacaaacaguaauu

SEQ ID NO: 774136 - RNA, 19 nt, Artificial Sequence
  Description of Artificial Sequence: Synthetic oligonucleotide
  Sense strand starting at position 576 of SEQ ID NO: 587199
auuacuguuugugcaagua

SEQ ID NO: 774137 - RNA, 19 nt, Artificial Sequence
  Description of Artificial Sequence: Synthetic oligonucleotide
  Antisense strand to SEQ ID NO: 774136
uacuugcacaaacaguaau

SEQ ID NO: 774138 - RNA, 19 nt, Artificial Sequence
  Description of Artificial Sequence: Synthetic oligonucleotide
  Sense strand starting at position 611 of SEQ ID NO: 587199
cgcuucuggcauuacuaua

SEQ ID NO: 774139 - RNA, 19 nt, Artificial Sequence
  Description of Artificial Sequence: Synthetic oligonucleotide
  Antisense strand to SEQ ID NO: 774138
uauaguaaugccagaagcg

SEQ ID NO: 774140 - RNA, 19 nt, Artificial Sequence
  Description of Artificial Sequence: Synthetic oligonucleotide
  Sense strand starting at position 644 of SEQ ID NO: 587199
gguaauuuauaagaggauu

SEQ ID NO: 774141 - RNA, 19 nt, Artificial Sequence
  Description of Artificial Sequence: Synthetic oligonucleotide
  Antisense strand to SEQ ID NO: 774140
aauccucuuauaaauuacc

SEQ ID NO: 774142 - RNA, 19 nt, Artificial Sequence
  Description of Artificial Sequence: Synthetic oligonucleotide
  Sense strand starting at position 795 of SEQ ID NO: 587199
gcuguacacuucuaaauga

SEQ ID NO: 774143 - RNA, 19 nt, Artificial Sequence
  Description of Artificial Sequence: Synthetic oligonucleotide
  Antisense strand to SEQ ID NO: 774142
ucauuuagaaguguacagc

SEQ ID NO: 774144 - RNA, 19 nt, Artificial Sequence
  Description of Artificial Sequence: Synthetic oligonucleotide
  Sense strand starting at position 1021 of SEQ ID NO: 587199
gcacguaaucccggcacuu

SEQ ID NO: 774145 - RNA, 19 nt, Artificial Sequence
  Description of Artificial Sequence: Synthetic oligonucleotide
  Antisense strand to SEQ ID NO: 774144
aagugccgggauuacgugc

SEQ ID NO: 774146 - RNA, 19 nt, Artificial Sequence
  Description of Artificial Sequence: Synthetic oligonucleotide
  Sense strand starting at position 1023 of SEQ ID NO: 587199
acguaaucccggcacuuua

SEQ ID NO: 774147 - RNA, 19 nt, Artificial Sequence
  Description of Artificial Sequence: Synthetic oligonucleotide
  Antisense strand to SEQ ID NO: 774146
uaaagugccgggauuacgu

SEQ ID NO: 774148 - RNA, 19 nt, Artificial Sequence
  Description of Artificial Sequence: Synthetic oligonucleotide
  Sense strand starting at position 1392 of SEQ ID NO: 587199
aaaugagaauucccgucuu

SEQ ID NO: 774149 - RNA, 19 nt, Artificial Sequence
  Description of Artificial Sequence: Synthetic oligonucleotide
  Antisense strand to SEQ ID NO: 774148
aagacgggaauucucauuu

SEQ ID NO: 774150 - RNA, 19 nt, Artificial Sequence
  Description of Artificial Sequence: Synthetic oligonucleotide
  Sense strand starting at position 1398 of SEQ ID NO: 587199
gaauucccgucuuaugaca

SEQ ID NO: 774151 - RNA, 19 nt, Artificial Sequence
  Description of Artificial Sequence: Synthetic oligonucleotide
  Antisense strand to SEQ ID NO: 774150
ugucauaagacgggaauuc

SEQ ID NO: 774152 - RNA, 19 nt, Artificial Sequence
  Description of Artificial Sequence: Synthetic oligonucleotide
  Sense strand starting at position 1496 of SEQ ID NO: 587199
gggagaaauucgaguuuag

SEQ ID NO: 774153 - RNA, 19 nt, Artificial Sequence
  Description of Artificial Sequence: Synthetic oligonucleotide
  Antisense strand to SEQ ID NO: 774152
cuaaacucgaauuucuccc

SEQ ID NO: 774154 - RNA, 19 nt, Artificial Sequence
  Description of Artificial Sequence: Synthetic oligonucleotide
  Sense strand starting at position 1503 of SEQ ID NO: 587199
auucgaguuuagggacaaa

SEQ ID NO: 774155 - RNA, 19 nt, Artificial Sequence
  Description of Artificial Sequence: Synthetic oligonucleotide
  Antisense strand to SEQ ID NO: 774154
uuugucccuaaacucgaau

SEQ ID NO: 774156 - RNA, 19 nt, Artificial Sequence
  Description of Artificial Sequence: Synthetic oligonucleotide
  Sense strand starting at position 2105 of SEQ ID NO: 587199
ggcccugccugagagacau

SEQ ID NO: 774157 - RNA, 19 nt, Artificial Sequence
  Description of Artificial Sequence: Synthetic oligonucleotide
  Antisense strand to SEQ ID NO: 774156
augucucucaggcagggcc

SEQ ID NO: 774158 - RNA, 19 nt, Artificial Sequence
  Description of Artificial Sequence: Synthetic oligonucleotide
  Sense strand starting at position 2536 of SEQ ID NO: 587199
gguaaagucagcuagguca

SEQ ID NO: 774159 - RNA, 19 nt, Artificial Sequence
  Description of Artificial Sequence: Synthetic oligonucleotide
  Antisense strand to SEQ ID NO: 774158
ugaccuagcugacuuuacc

SEQ ID NO: 774160 - RNA, 19 nt, Artificial Sequence
  Description of Artificial Sequence: Synthetic oligonucleotide
  Sense strand starting at position 2729 of SEQ ID NO: 587199
gagagaugaugaugagaac

SEQ ID NO: 774161 - RNA, 19 nt, Artificial Sequence
  Description of Artificial Sequence: Synthetic oligonucleotide
  Antisense strand to SEQ ID NO: 774160
guucucaucaucaucucuc

SEQ ID NO: 774162 - RNA, 19 nt, Artificial Sequence
  Description of Artificial Sequence: Synthetic oligonucleotide
  Sense strand starting at position 2748 of SEQ ID NO: 587199
aauggugacggcuacauau

SEQ ID NO: 774163 - RNA, 19 nt, Artificial Sequence
  Description of Artificial Sequence: Synthetic oligonucleotide
  Antisense strand to SEQ ID NO: 774162
auauguagccgucaccauu

SEQ ID NO: 774164 - RNA, 19 nt, Artificial Sequence
  Description of Artificial Sequence: Synthetic oligonucleotide
  Sense strand starting at position 2750 of SEQ ID NO: 587199
uggugacggcuacauauaa

SEQ ID NO: 774165 - RNA, 19 nt, Artificial Sequence
  Description of Artificial Sequence: Synthetic oligonucleotide
  Antisense strand to SEQ ID NO: 774164
uuauauguagccgucacca

SEQ ID NO: 774166 - RNA, 19 nt, Artificial Sequence
  Description of Artificial Sequence: Synthetic oligonucleotide
  Sense strand starting at position 2796 of SEQ ID NO: 587199
aggugugguucccaucaca

SEQ ID NO: 774167 - RNA, 19 nt, Artificial Sequence
  Description of Artificial Sequence: Synthetic oligonucleotide
  Antisense strand to SEQ ID NO: 774166
ugugaugggaaccacaccu

SEQ ID NO: 774168 - RNA, 19 nt, Artificial Sequence
  Description of Artificial Sequence: Synthetic oligonucleotide
  Sense strand starting at position 2905 of SEQ ID NO: 587199
aucagaguuuacuggaggu

SEQ ID NO: 774169 - RNA, 19 nt, Artificial Sequence
  Description of Artificial Sequence: Synthetic oligonucleotide
  Antisense strand to SEQ ID NO: 774168
accuccaguaaacucugau

SEQ ID NO: 774170 - RNA, 19 nt, Artificial Sequence
  Description of Artificial Sequence: Synthetic oligonucleotide
  Sense strand starting at position 2943 of SEQ ID NO: 587199
cuugacucacaccaguuau

SEQ ID NO: 774171 - RNA, 19 nt, Artificial Sequence
  Description of Artificial Sequence: Synthetic oligonucleotide
  Antisense strand to SEQ ID NO: 774170
auaacuggugugagucaag

SEQ ID NO: 774172 - RNA, 19 nt, Artificial Sequence
  Description of Artificial Sequence: Synthetic oligonucleotide
  Sense strand starting at position 2954 of SEQ ID NO: 587199
ccaguuauccaggguacca

SEQ ID NO: 774173 - RNA, 19 nt, Artificial Sequence
  Description of Artificial Sequence: Synthetic oligonucleotide
  Antisense strand to SEQ ID NO: 774172
ugguacccuggauaacugg

SEQ ID NO: 774174 - RNA, 19 nt, Artificial Sequence
  Description of Artificial Sequence: Synthetic oligonucleotide
  Sense strand starting at position 2967 of SEQ ID NO: 587199
guaccaggucaauguaacu

SEQ ID NO: 774175 - RNA, 19 nt, Artificial Sequence
  Description of Artificial Sequence: Synthetic oligonucleotide
  Antisense strand to SEQ ID NO: 774174
aguuacauugaccugguac

SEQ ID NO: 774176 - RNA, 19 nt, Artificial Sequence
  Description of Artificial Sequence: Synthetic oligonucleotide
  Sense strand starting at position 2974 of SEQ ID NO: 587199
gucaauguaacugggcaua

SEQ ID NO: 774177 - RNA, 19 nt, Artificial Sequence
  Description of Artificial Sequence: Synthetic oligonucleotide
  Antisense strand to SEQ ID NO: 774176
uaugcccaguuacauugac

SEQ ID NO: 774178 - RNA, 19 nt, Artificial Sequence
  Description of Artificial Sequence: Synthetic oligonucleotide
  Sense strand starting at position 3133 of SEQ ID NO: 587199
ggaagagcuccagggauuc

SEQ ID NO: 774179 - RNA, 19 nt, Artificial Sequence
  Description of Artificial Sequence: Synthetic oligonucleotide
  Antisense strand to SEQ ID NO: 774178
gaaucccuggagcucuucc

SEQ ID NO: 774180 - RNA, 19 nt, Artificial Sequence
  Description of Artificial Sequence: Synthetic oligonucleotide
  Sense strand starting at position 3252 of SEQ ID NO: 587199
augccucuauaagagaaau

SEQ ID NO: 774181 - RNA, 19 nt, Artificial Sequence
  Description of Artificial Sequence: Synthetic oligonucleotide
  Antisense strand to SEQ ID NO: 774180
auuucucuuauagaggcau

SEQ ID NO: 774182 - RNA, 19 nt, Artificial Sequence
  Description of Artificial Sequence: Synthetic oligonucleotide
  Sense strand starting at position 3334 of SEQ ID NO: 587199
auaacauugugacuuguua

SEQ ID NO: 774183 - RNA, 19 nt, Artificial Sequence
  Description of Artificial Sequence: Synthetic oligonucleotide
  Antisense strand to SEQ ID NO: 774182
uaacaagucacaauguuau

SEQ ID NO: 774184 - RNA, 19 nt, Artificial Sequence
  Description of Artificial Sequence: Synthetic oligonucleotide
  Sense strand starting at position 3636 of SEQ ID NO: 587199
uuucuuucuggguguuaca

SEQ ID NO: 774185 - RNA, 19 nt, Artificial Sequence
  Description of Artificial Sequence: Synthetic oligonucleotide
  Antisense strand to SEQ ID NO: 774184
uguaacacccagaaagaaa

SEQ ID NO: 774186 - RNA, 19 nt, Artificial Sequence
  Description of Artificial Sequence: Synthetic oligonucleotide
  Sense strand starting at position 3639 of SEQ ID NO: 587199
cuuucuggguguuacauuu

SEQ ID NO: 774187 - RNA, 19 nt, Artificial Sequence
  Description of Artificial Sequence: Synthetic oligonucleotide
  Antisense strand to SEQ ID NO: 774186
aaauguaacacccagaaag

SEQ ID NO: 774188 - RNA, 19 nt, Artificial Sequence
  Description of Artificial Sequence: Synthetic oligonucleotide
  Sense strand starting at position 3660 of SEQ ID NO: 587199
cuagaagucagccaauggu

SEQ ID NO: 774189 - RNA, 19 nt, Artificial Sequence
  Description of Artificial Sequence: Synthetic oligonucleotide
  Antisense strand to SEQ ID NO: 774188
accauuggcugacuucuag

SEQ ID NO: 774190 - RNA, 19 nt, Artificial Sequence
  Description of Artificial Sequence: Synthetic oligonucleotide
  Sense strand starting at position 3663 of SEQ ID NO: 587199
gaagucagccaauggucau

SEQ ID NO: 774191 - RNA, 19 nt, Artificial Sequence
  Description of Artificial Sequence: Synthetic oligonucleotide
  Antisense strand to SEQ ID NO: 774190
augaccauuggcugacuuc

SEQ ID NO: 774192 - RNA, 19 nt, Artificial Sequence
  Description of Artificial Sequence: Synthetic oligonucleotide
  Sense strand starting at position 3669 of SEQ ID NO: 587199
agccaauggucaucagaaa

SEQ ID NO: 774193 - RNA, 19 nt, Artificial Sequence
  Description of Artificial Sequence: Synthetic oligonucleotide
  Antisense strand to SEQ ID NO: 774192
uuucugaugaccauuggcu

SEQ ID NO: 774194 - RNA, 19 nt, Artificial Sequence
  Description of Artificial Sequence: Synthetic oligonucleotide
  Sense strand starting at position 3855 of SEQ ID NO: 587199
ucucuuugaugacagacau

SEQ ID NO: 774195 - RNA, 19 nt, Artificial Sequence
  Description of Artificial Sequence: Synthetic oligonucleotide
  Antisense strand to SEQ ID NO: 774194
augucugucaucaaagaga

SEQ ID NO: 774196 - RNA, 19 nt, Artificial Sequence
  Description of Artificial Sequence: Synthetic oligonucleotide
  Sense strand starting at position 103 of SEQ ID NO: 587200
gugggagucuugcucucaa

SEQ ID NO: 774197 - RNA, 19 nt, Artificial Sequence
  Description of Artificial Sequence: Synthetic oligonucleotide
  Antisense strand to SEQ ID NO: 774196
uugagagcaagacucccac

SEQ ID NO: 774198 - RNA, 19 nt, Artificial Sequence
  Description of Artificial Sequence: Synthetic oligonucleotide
  Sense strand starting at position 332 of SEQ ID NO: 587200
gcauuauuaugggcuuugu

SEQ ID NO: 774199 - RNA, 19 nt, Artificial Sequence
  Description of Artificial Sequence: Synthetic oligonucleotide
  Antisense strand to SEQ ID NO: 774198
acaaagcccauaauaaugc

SEQ ID NO: 774200 - RNA, 19 nt, Artificial Sequence
  Description of Artificial Sequence: Synthetic oligonucleotide
  Sense strand starting at position 584 of SEQ ID NO: 587200
gcugaaacucuuugcuuga

SEQ ID NO: 774201 - RNA, 19 nt, Artificial Sequence
  Description of Artificial Sequence: Synthetic oligonucleotide
  Antisense strand to SEQ ID NO: 774200
ucaagcaaagaguuucagc

SEQ ID NO: 774202 - RNA, 19 nt, Artificial Sequence
  Description of Artificial Sequence: Synthetic oligonucleotide
  Sense strand starting at position 586 of SEQ ID NO: 587200
ugaaacucuuugcuugaga

SEQ ID NO: 774203 - RNA, 19 nt, Artificial Sequence
  Description of Artificial Sequence: Synthetic oligonucleotide
  Antisense strand to SEQ ID NO: 774202
ucucaagcaaagaguuuca

SEQ ID NO: 774204 - RNA, 19 nt, Artificial Sequence
  Description of Artificial Sequence: Synthetic oligonucleotide
  Sense strand starting at position 1217 of SEQ ID NO: 587200
aagugcguggcucuauauu

SEQ ID NO: 774205 - RNA, 19 nt, Artificial Sequence
  Description of Artificial Sequence: Synthetic oligonucleotide
  Antisense strand to SEQ ID NO: 774204
aauauagagccacgcacuu

SEQ ID NO: 774206 - RNA, 19 nt, Artificial Sequence
  Description of Artificial Sequence: Synthetic oligonucleotide
  Sense strand starting at position 2206 of SEQ ID NO: 587200
cgaggacucgguuauugaa

SEQ ID NO: 774207 - RNA, 19 nt, Artificial Sequence
  Description of Artificial Sequence: Synthetic oligonucleotide
  Antisense strand to SEQ ID NO: 774206
uucaauaaccgaguccucg

SEQ ID NO: 774208 - RNA, 19 nt, Artificial Sequence
  Description of Artificial Sequence: Synthetic oligonucleotide
  Sense strand starting at position 2431 of SEQ ID NO: 587200
gcccaccuguguuugaaau

SEQ ID NO: 774209 - RNA, 19 nt, Artificial Sequence
  Description of Artificial Sequence: Synthetic oligonucleotide
  Antisense strand to SEQ ID NO: 774208
auuucaaacacaggugggc

SEQ ID NO: 774210 - RNA, 19 nt, Artificial Sequence
  Description of Artificial Sequence: Synthetic oligonucleotide
  Sense strand starting at position 2437 of SEQ ID NO: 587200
cuguguuugaaauggaaua

SEQ ID NO: 774211 - RNA, 19 nt, Artificial Sequence
  Description of Artificial Sequence: Synthetic oligonucleotide
  Antisense strand to SEQ ID NO: 774210
uauuccauuucaaacacag

SEQ ID NO: 774212 - RNA, 19 nt, Artificial Sequence
  Description of Artificial Sequence: Synthetic oligonucleotide
  Sense strand starting at position 2438 of SEQ ID NO: 587200
uguguuugaaauggaauaa

SEQ ID NO: 774213 - RNA, 19 nt, Artificial Sequence
  Description of Artificial Sequence: Synthetic oligonucleotide
  Antisense strand to SEQ ID NO: 774212
uuauuccauuucaaacaca

SEQ ID NO: 774214 - RNA, 19 nt, Artificial Sequence
  Description of Artificial Sequence: Synthetic oligonucleotide
  Sense strand starting at position 2469 of SEQ ID NO: 587200
acaggaauauaguucggua

SEQ ID NO: 774215 - RNA, 19 nt, Artificial Sequence
  Description of Artificial Sequence: Synthetic oligonucleotide
  Antisense strand to SEQ ID NO: 774214
uaccgaacuauauuccugu

SEQ ID NO: 774216 - RNA, 19 nt, Artificial Sequence
  Description of Artificial Sequence: Synthetic oligonucleotide
  Sense strand starting at position 2471 of SEQ ID NO: 587200
aggaauauaguucgguaaa

SEQ ID NO: 774217 - RNA, 19 nt, Artificial Sequence
  Description of Artificial Sequence: Synthetic oligonucleotide
  Antisense strand to SEQ ID NO: 774216
uuuaccgaacuauauuccu

SEQ ID NO: 774218 - RNA, 19 nt, Artificial Sequence
  Description of Artificial Sequence: Synthetic oligonucleotide
  Sense strand starting at position 2473 of SEQ ID NO: 587200
gaauauaguucgguaaacc

SEQ ID NO: 774219 - RNA, 19 nt, Artificial Sequence
  Description of Artificial Sequence: Synthetic oligonucleotide
  Antisense strand to SEQ ID NO: 774218
gguuuaccgaacuauauuc

SEQ ID NO: 774220 - RNA, 19 nt, Artificial Sequence
  Description of Artificial Sequence: Synthetic oligonucleotide
  Sense strand starting at position 2517 of SEQ ID NO: 587200
cuguaauggguuuauuaca

SEQ ID NO: 774221 - RNA, 19 nt, Artificial Sequence
  Description of Artificial Sequence: Synthetic oligonucleotide
  Antisense strand to SEQ ID NO: 774220
uguaauaaacccauuacag

SEQ ID NO: 774222 - RNA, 19 nt, Artificial Sequence
  Description of Artificial Sequence: Synthetic oligonucleotide
  Sense strand starting at position 2555 of SEQ ID NO: 587200
ugagcaaugggacgcaaua

SEQ ID NO: 774223 - RNA, 19 nt, Artificial Sequence
  Description of Artificial Sequence: Synthetic oligonucleotide
  Antisense strand to SEQ ID NO: 774222
uauugcgucccauugcuca

SEQ ID NO: 774224 - RNA, 19 nt, Artificial Sequence
  Description of Artificial Sequence: Synthetic oligonucleotide
  Sense strand starting at position 2594 of SEQ ID NO: 587200
ggugaaggucuugguagga

SEQ ID NO: 774225 - RNA, 19 nt, Artificial Sequence
  Description of Artificial Sequence: Synthetic oligonucleotide
  Antisense strand to SEQ ID NO: 774224
uccuaccaagaccuucacc

SEQ ID NO: 774226 - RNA, 19 nt, Artificial Sequence
  Description of Artificial Sequence: Synthetic oligonucleotide
  Sense strand starting at position 2652 of SEQ ID NO: 587200
ggacgauccugucuuuguu

SEQ ID NO: 774227 - RNA, 19 nt, Artificial Sequence
  Description of Artificial Sequence: Synthetic oligonucleotide
  Antisense strand to SEQ ID NO: 774226
aacaaagacaggaucgucc

SEQ ID NO: 774228 - RNA, 19 nt, Artificial Sequence
  Description of Artificial Sequence: Synthetic oligonucleotide
  Sense strand starting at position 2709 of SEQ ID NO: 587200
gcgucauauacugcguaca

SEQ ID NO: 774229 - RNA, 19 nt, Artificial Sequence
  Description of Artificial Sequence: Synthetic oligonucleotide
  Antisense strand to SEQ ID NO: 774228
uguacgcaguauaugacgc

SEQ ID NO: 774230 - RNA, 19 nt, Artificial Sequence
  Description of Artificial Sequence: Synthetic oligonucleotide
  Sense strand starting at position 2711 of SEQ ID NO: 587200
gucauauacugcguacaug

SEQ ID NO: 774231 - RNA, 19 nt, Artificial Sequence
  Description of Artificial Sequence: Synthetic oligonucleotide
  Antisense strand to SEQ ID NO: 774230
cauguacgcaguauaugac

SEQ ID NO: 774232 - RNA, 19 nt, Artificial Sequence
  Description of Artificial Sequence: Synthetic oligonucleotide
  Sense strand starting at position 2723 of SEQ ID NO: 587200
guacauguauaauuacagu

SEQ ID NO: 774233 - RNA, 19 nt, Artificial Sequence
  Description of Artificial Sequence: Synthetic oligonucleotide
  Antisense strand to SEQ ID NO: 774232
acuguaauuauacauguac

SEQ ID NO: 774234 - RNA, 19 nt, Artificial Sequence
  Description of Artificial Sequence: Synthetic oligonucleotide
  Sense strand starting at position 2767 of SEQ ID NO: 587200
ucaacauggccucaguagu

SEQ ID NO: 774235 - RNA, 19 nt, Artificial Sequence
  Description of Artificial Sequence: Synthetic oligonucleotide
  Antisense strand to SEQ ID NO: 774234
acuacugaggccauguuga

SEQ ID NO: 774236 - RNA, 19 nt, Artificial Sequence
  Description of Artificial Sequence: Synthetic oligonucleotide
  Sense strand starting at position 2773 of SEQ ID NO: 587200
uggccucaguaguucuauu

SEQ ID NO: 774237 - RNA, 19 nt, Artificial Sequence
  Description of Artificial Sequence: Synthetic oligonucleotide
  Antisense strand to SEQ ID NO: 774236
aauagaacuacugaggcca

SEQ ID NO: 774238 - RNA, 19 nt, Artificial Sequence
  Description of Artificial Sequence: Synthetic oligonucleotide
  Sense strand starting at position 2795 of SEQ ID NO: 587200
ggucuauuccuuuaauaga

SEQ ID NO: 774239 - RNA, 19 nt, Artificial Sequence
  Description of Artificial Sequence: Synthetic oligonucleotide
  Antisense strand to SEQ ID NO: 774238
ucuauuaaaggaauagacc

SEQ ID NO: 774240 - RNA, 19 nt, Artificial Sequence
  Description of Artificial Sequence: Synthetic oligonucleotide
  Sense strand starting at position 2866 of SEQ ID NO: 587200
uuuccaugacaaggauagu

SEQ ID NO: 774241 - RNA, 19 nt, Artificial Sequence
  Description of Artificial Sequence: Synthetic oligonucleotide
  Antisense strand to SEQ ID NO: 774240
acuauccuugucauggaaa

SEQ ID NO: 774242 - RNA, 19 nt, Artificial Sequence
  Description of Artificial Sequence: Synthetic oligonucleotide
  Sense strand starting at position 3058 of SEQ ID NO: 587200
agcacacacugauaagaaa

SEQ ID NO: 774243 - RNA, 19 nt, Artificial Sequence
  Description of Artificial Sequence: Synthetic oligonucleotide
  Antisense strand to SEQ ID NO: 774242
uuucuuaucagugugugcu

SEQ ID NO: 774244 - RNA, 19 nt, Artificial Sequence
  Description of Artificial Sequence: Synthetic oligonucleotide
  Sense strand starting at position 3079 of SEQ ID NO: 587200
augugagagaucuguaauc

SEQ ID NO: 774245 - RNA, 19 nt, Artificial Sequence
  Description of Artificial Sequence: Synthetic oligonucleotide
  Antisense strand to SEQ ID NO: 774244
gauuacagaucucucacau

SEQ ID NO: 774246 - RNA, 19 nt, Artificial Sequence
  Description of Artificial Sequence: Synthetic oligonucleotide
  Sense strand starting at position 3081 of SEQ ID NO: 587200
gugagagaucuguaaucuu

SEQ ID NO: 774247 - RNA, 19 nt, Artificial Sequence
  Description of Artificial Sequence: Synthetic oligonucleotide
  Antisense strand to SEQ ID NO: 774246
aagauuacagaucucucac

SEQ ID NO: 774248 - RNA, 19 nt, Artificial Sequence
  Description of Artificial Sequence: Synthetic oligonucleotide
  Sense strand starting at position 3206 of SEQ ID NO: 587200
agaggugugagcuggauga

SEQ ID NO: 774249 - RNA, 19 nt, Artificial Sequence
  Description of Artificial Sequence: Synthetic oligonucleotide
  Antisense strand to SEQ ID NO: 774248
ucauccagcucacaccucu

SEQ ID NO: 774250 - RNA, 19 nt, Artificial Sequence
  Description of Artificial Sequence: Synthetic oligonucleotide
  Sense strand starting at position 3208 of SEQ ID NO: 587200
aggugugagcuggaugaca

SEQ ID NO: 774251 - RNA, 19 nt, Artificial Sequence
  Description of Artificial Sequence: Synthetic oligonucleotide
  Antisense strand to SEQ ID NO: 774250
ugucauccagcucacaccu

SEQ ID NO: 774252 - RNA, 19 nt, Artificial Sequence
  Description of Artificial Sequence: Synthetic oligonucleotide
  Sense strand starting at position 3509 of SEQ ID NO: 587200
accacugggugacagaaau

SEQ ID NO: 774253 - RNA, 19 nt, Artificial Sequence
  Description of Artificial Sequence: Synthetic oligonucleotide
  Antisense strand to SEQ ID NO: 774252
auuucugucacccaguggu

SEQ ID NO: 774254 - RNA, 19 nt, Artificial Sequence
  Description of Artificial Sequence: Synthetic oligonucleotide
  Sense strand starting at position 3520 of SEQ ID NO: 587200
acagaaauacagugcauua

SEQ ID NO: 774255 - RNA, 19 nt, Artificial Sequence
  Description of Artificial Sequence: Synthetic oligonucleotide
  Antisense strand to SEQ ID NO: 774254
uaaugcacuguauuucugu

SEQ ID NO: 774256 - RNA, 19 nt, Artificial Sequence
  Description of Artificial Sequence: Synthetic oligonucleotide
  Sense strand starting at position 3596 of SEQ ID NO: 587200
ucggauaugccagggucau

SEQ ID NO: 774257 - RNA, 19 nt, Artificial Sequence
  Description of Artificial Sequence: Synthetic oligonucleotide
  Antisense strand to SEQ ID NO: 774256
augacccuggcauauccga

SEQ ID NO: 774258 - RNA, 19 nt, Artificial Sequence
  Description of Artificial Sequence: Synthetic oligonucleotide
  Sense strand starting at position 3597 of SEQ ID NO: 587200
cggauaugccagggucauc

SEQ ID NO: 774259 - RNA, 19 nt, Artificial Sequence
  Description of Artificial Sequence: Synthetic oligonucleotide
  Antisense strand to SEQ ID NO: 774258
gaugacccuggcauauccg

SEQ ID NO: 774260 - RNA, 19 nt, Artificial Sequence
  Description of Artificial Sequence: Synthetic oligonucleotide
  Sense strand starting at position 3608 of SEQ ID NO: 587200
gggucaucucuagguagua

SEQ ID NO: 774261 - RNA, 19 nt, Artificial Sequence
  Description of Artificial Sequence: Synthetic oligonucleotide
  Antisense strand to SEQ ID NO: 774260
uacuaccuagagaugaccc

SEQ ID NO: 774262 - RNA, 19 nt, Artificial Sequence
  Description of Artificial Sequence: Synthetic oligonucleotide
  Sense strand starting at position 3609 of SEQ ID NO: 587200
ggucaucucuagguaguaa

SEQ ID NO: 774263 - RNA, 19 nt, Artificial Sequence
  Description of Artificial Sequence: Synthetic oligonucleotide
  Antisense strand to SEQ ID NO: 774262
uuacuaccuagagaugacc

SEQ ID NO: 774264 - RNA, 19 nt, Artificial Sequence
  Description of Artificial Sequence: Synthetic oligonucleotide
  Sense strand starting at position 3610 of SEQ ID NO: 587200
gucaucucuagguaguaau

SEQ ID NO: 774265 - RNA, 19 nt, Artificial Sequence
  Description of Artificial Sequence: Synthetic oligonucleotide
  Antisense strand to SEQ ID NO: 774264
auuacuaccuagagaugac

SEQ ID NO: 774266 - RNA, 19 nt, Artificial Sequence
  Description of Artificial Sequence: Synthetic oligonucleotide
  Sense strand starting at position 3670 of SEQ ID NO: 587200
gaagcuugugaaggauaug

SEQ ID NO: 774267 - RNA, 19 nt, Artificial Sequence
  Description of Artificial Sequence: Synthetic oligonucleotide
  Antisense strand to SEQ ID NO: 774266
cauauccuucacaagcuuc

SEQ ID NO: 774268 - RNA, 19 nt, Artificial Sequence
  Description of Artificial Sequence: Synthetic oligonucleotide
  Sense strand starting at position 3673 of SEQ ID NO: 587200
gcuugugaaggauauggau

SEQ ID NO: 774269 - RNA, 19 nt, Artificial Sequence
  Description of Artificial Sequence: Synthetic oligonucleotide
  Antisense strand to SEQ ID NO: 774268
auccauauccuucacaagc

SEQ ID NO: 774270 - RNA, 19 nt, Artificial Sequence
  Description of Artificial Sequence: Synthetic oligonucleotide
  Sense strand starting at position 3741 of SEQ ID NO: 587200
uccugaguaauguggagaa

SEQ ID NO: 774271 - RNA, 19 nt, Artificial Sequence
  Description of Artificial Sequence: Synthetic oligonucleotide
  Antisense strand to SEQ ID NO: 774270
uucuccacauuacucagga

SEQ ID NO: 774272 - RNA, 19 nt, Artificial Sequence
  Description of Artificial Sequence: Synthetic oligonucleotide
  Sense strand starting at position 3954 of SEQ ID NO: 587200
accuccuuggauugauaua

SEQ ID NO: 774273 - RNA, 19 nt, Artificial Sequence
  Description of Artificial Sequence: Synthetic oligonucleotide
  Antisense strand to SEQ ID NO: 774272
uauaucaauccaaggaggu

SEQ ID NO: 774274 - RNA, 19 nt, Artificial Sequence
  Description of Artificial Sequence: Synthetic oligonucleotide
  Sense strand starting at position 3961 of SEQ ID NO: 587200
uggauugauauaugaggcu

SEQ ID NO: 774275 - RNA, 19 nt, Artificial Sequence
  Description of Artificial Sequence: Synthetic oligonucleotide
  Antisense strand to SEQ ID NO: 774274
agccucauauaucaaucca

SEQ ID NO: 774276 - RNA, 19 nt, Artificial Sequence
  Description of Artificial Sequence: Synthetic oligonucleotide
  Sense strand starting at position 264 of SEQ ID NO: 587201
ugcuaacaaucucugaaga

SEQ ID NO: 774277 - RNA, 19 nt, Artificial Sequence
  Description of Artificial Sequence: Synthetic oligonucleotide
  Antisense strand to SEQ ID NO: 774276
ucuucagagauuguuagca

SEQ ID NO: 774278 - RNA, 19 nt, Artificial Sequence
  Description of Artificial Sequence: Synthetic oligonucleotide
  Sense strand starting at position 265 of SEQ ID NO: 587201
gcuaacaaucucugaagag

SEQ ID NO: 774279 - RNA, 19 nt, Artificial Sequence
  Description of Artificial Sequence: Synthetic oligonucleotide
  Antisense strand to SEQ ID NO: 774278
cucuucagagauuguuagc

SEQ ID NO: 774280 - RNA, 19 nt, Artificial Sequence
  Description of Artificial Sequence: Synthetic oligonucleotide
  Sense strand starting at position 383 of SEQ ID NO: 587201
ugcugugcccuccaaucau

SEQ ID NO: 774281 - RNA, 19 nt, Artificial Sequence
  Description of Artificial Sequence: Synthetic oligonucleotide
  Antisense strand to SEQ ID NO: 774280
augauuggagggcacagca

SEQ ID NO: 774282 - RNA, 19 nt, Artificial Sequence
  Description of Artificial Sequence: Synthetic oligonucleotide
  Sense strand starting at position 421 of SEQ ID NO: 587201
gaguucuuuccagggaaau

SEQ ID NO: 774283 - RNA, 19 nt, Artificial Sequence
  Description of Artificial Sequence: Synthetic oligonucleotide
  Antisense strand to SEQ ID NO: 774282
auuucccuggaaagaacuc

SEQ ID NO: 774284 - RNA, 19 nt, Artificial Sequence
  Description of Artificial Sequence: Synthetic oligonucleotide
  Sense strand starting at position 422 of SEQ ID NO: 587201
aguucuuuccagggaaauu

SEQ ID NO: 774285 - RNA, 19 nt, Artificial Sequence
  Description of Artificial Sequence: Synthetic oligonucleotide
  Antisense strand to SEQ ID NO: 774284
aauuucccuggaaagaacu

SEQ ID NO: 774286 - RNA, 19 nt, Artificial Sequence
  Description of Artificial Sequence: Synthetic oligonucleotide
  Sense strand starting at position 449 of SEQ ID NO: 587201
cuagcugguccugagaagu

SEQ ID NO: 774287 - RNA, 19 nt, Artificial Sequence
  Description of Artificial Sequence: Synthetic oligonucleotide
  Antisense strand to SEQ ID NO: 774286
acuucucaggaccagcuag

SEQ ID NO: 774288 - RNA, 19 nt, Artificial Sequence
  Description of Artificial Sequence: Synthetic oligonucleotide
  Sense strand starting at position 455 of SEQ ID NO: 587201
gguccugagaaguaaaugu

SEQ ID NO: 774289 - RNA, 19 nt, Artificial Sequence
  Description of Artificial Sequence: Synthetic oligonucleotide
  Antisense strand to SEQ ID NO: 774288
acauuuacuucucaggacc

SEQ ID NO: 774290 - RNA, 19 nt, Artificial Sequence
  Description of Artificial Sequence: Synthetic oligonucleotide
  Sense strand starting at position 459 of SEQ ID NO: 587201
cugagaaguaaaugugcaa

SEQ ID NO: 774291 - RNA, 19 nt, Artificial Sequence
  Description of Artificial Sequence: Synthetic oligonucleotide
  Antisense strand to SEQ ID NO: 774290
uugcacauuuacuucucag

SEQ ID NO: 774292 - RNA, 19 nt, Artificial Sequence
  Description of Artificial Sequence: Synthetic oligonucleotide
  Sense strand starting at position 847 of SEQ ID NO: 587201
ggaaucccuucucuguuua

SEQ ID NO: 774293 - RNA, 19 nt, Artificial Sequence
  Description of Artificial Sequence: Synthetic oligonucleotide
  Antisense strand to SEQ ID NO: 774292
uaaacagagaagggauucc

SEQ ID NO: 774294 - RNA, 19 nt, Artificial Sequence
  Description of Artificial Sequence: Synthetic oligonucleotide
  Sense strand starting at position 890 of SEQ ID NO: 587201
auggaaucaucauugucau

SEQ ID NO: 774295 - RNA, 19 nt, Artificial Sequence
  Description of Artificial Sequence: Synthetic oligonucleotide
  Antisense strand to SEQ ID NO: 774294
augacaaugaugauuccau

SEQ ID NO: 774296 - RNA, 19 nt, Artificial Sequence
  Description of Artificial Sequence: Synthetic oligonucleotide
  Sense strand starting at position 904 of SEQ ID NO: 587201
gucaucaauuuguuagucu

SEQ ID NO: 774297 - RNA, 19 nt, Artificial Sequence
  Description of Artificial Sequence: Synthetic oligonucleotide
  Antisense strand to SEQ ID NO: 774296
agacuaacaaauugaugac

SEQ ID NO: 774298 - RNA, 19 nt, Artificial Sequence
  Description of Artificial Sequence: Synthetic oligonucleotide
  Sense strand starting at position 911 of SEQ ID NO: 587201
auuuguuagucugcacaag

SEQ ID NO: 774299 - RNA, 19 nt, Artificial Sequence
  Description of Artificial Sequence: Synthetic oligonucleotide
  Antisense strand to SEQ ID NO: 774298
cuugugcagacuaacaaau

SEQ ID NO: 774300 - RNA, 19 nt, Artificial Sequence
  Description of Artificial Sequence: Synthetic oligonucleotide
  Sense strand starting at position 912 of SEQ ID NO: 587201
uuuguuagucugcacaaga

SEQ ID NO: 774301 - RNA, 19 nt, Artificial Sequence
  Description of Artificial Sequence: Synthetic oligonucleotide
  Antisense strand to SEQ ID NO: 774300
ucuugugcagacuaacaaa

SEQ ID NO: 774302 - RNA, 19 nt, Artificial Sequence
  Description of Artificial Sequence: Synthetic oligonucleotide
  Sense strand starting at position 1138 of SEQ ID NO: 587201
gggaacaguuagcugugaa

SEQ ID NO: 774303 - RNA, 19 nt, Artificial Sequence
  Description of Artificial Sequence: Synthetic oligonucleotide
  Antisense strand to SEQ ID NO: 774302
uucacagcuaacuguuccc

SEQ ID NO: 774304 - RNA, 19 nt, Artificial Sequence
  Description of Artificial Sequence: Synthetic oligonucleotide
  Sense strand starting at position 1139 of SEQ ID NO: 587201
ggaacaguuagcugugaag

SEQ ID NO: 774305 - RNA, 19 nt, Artificial Sequence
  Description of Artificial Sequence: Synthetic oligonucleotide
  Antisense strand to SEQ ID NO: 774304
cuucacagcuaacuguucc

SEQ ID NO: 774306 - RNA, 19 nt, Artificial Sequence
  Description of Artificial Sequence: Synthetic oligonucleotide
  Sense strand starting at position 1268 of SEQ ID NO: 587201
uguagauauccucaacguu

SEQ ID NO: 774307 - RNA, 19 nt, Artificial Sequence
  Description of Artificial Sequence: Synthetic oligonucleotide
  Antisense strand to SEQ ID NO: 774306
aacguugaggauaucuaca

SEQ ID NO: 774308 - RNA, 19 nt, Artificial Sequence
  Description of Artificial Sequence: Synthetic oligonucleotide
  Sense strand starting at position 1271 of SEQ ID NO: 587201
agauauccucaacguucuu

SEQ ID NO: 774309 - RNA, 19 nt, Artificial Sequence
  Description of Artificial Sequence: Synthetic oligonucleotide
  Antisense strand to SEQ ID NO: 774308
aagaacguugaggauaucu

SEQ ID NO: 774310 - RNA, 19 nt, Artificial Sequence
  Description of Artificial Sequence: Synthetic oligonucleotide
  Sense strand starting at position 1336 of SEQ ID NO: 587201
gugcccaucuuccuagaga

SEQ ID NO: 774311 - RNA, 19 nt, Artificial Sequence
  Description of Artificial Sequence: Synthetic oligonucleotide
  Antisense strand to SEQ ID NO: 774310
ucucuaggaagaugggcac

SEQ ID NO: 774312 - RNA, 19 nt, Artificial Sequence
  Description of Artificial Sequence: Synthetic oligonucleotide
  Sense strand starting at position 1352 of SEQ ID NO: 587201
agaggaguucuccgccaca

SEQ ID NO: 774313 - RNA, 19 nt, Artificial Sequence
  Description of Artificial Sequence: Synthetic oligonucleotide
  Antisense strand to SEQ ID NO: 774312
uguggcggagaacuccucu

SEQ ID NO: 774314 - RNA, 19 nt, Artificial Sequence
  Description of Artificial Sequence: Synthetic oligonucleotide
  Sense strand starting at position 1525 of SEQ ID NO: 587201
ugaucuaucagggaggcga

SEQ ID NO: 774315 - RNA, 19 nt, Artificial Sequence
  Description of Artificial Sequence: Synthetic oligonucleotide
  Antisense strand to SEQ ID NO: 774314
ucgccucccugauagauca

SEQ ID NO: 774316 - RNA, 19 nt, Artificial Sequence
  Description of Artificial Sequence: Synthetic oligonucleotide
  Sense strand starting at position 2142 of SEQ ID NO: 587201
cuuuguucucuggagccaa

SEQ ID NO: 774317 - RNA, 19 nt, Artificial Sequence
  Description of Artificial Sequence: Synthetic oligonucleotide
  Antisense strand to SEQ ID NO: 774316
uuggcuccagagaacaaag

SEQ ID NO: 774318 - RNA, 19 nt, Artificial Sequence
  Description of Artificial Sequence: Synthetic oligonucleotide
  Sense strand starting at position 2326 of SEQ ID NO: 587201
guuguaacgccugaacuca

SEQ ID NO: 774319 - RNA, 19 nt, Artificial Sequence
  Description of Artificial Sequence: Synthetic oligonucleotide
  Antisense strand to SEQ ID NO: 774318
ugaguucaggcguuacaac

SEQ ID NO: 774320 - RNA, 19 nt, Artificial Sequence
  Description of Artificial Sequence: Synthetic oligonucleotide
  Sense strand starting at position 2784 of SEQ ID NO: 587201
gaggaacggcucugagguu

SEQ ID NO: 774321 - RNA, 19 nt, Artificial Sequence
  Description of Artificial Sequence: Synthetic oligonucleotide
  Antisense strand to SEQ ID NO: 774320
aaccucagagccguuccuc

SEQ ID NO: 774322 - RNA, 19 nt, Artificial Sequence
  Description of Artificial Sequence: Synthetic oligonucleotide
  Sense strand starting at position 2793 of SEQ ID NO: 587201
cucugagguuacguuacua

SEQ ID NO: 774323 - RNA, 19 nt, Artificial Sequence
  Description of Artificial Sequence: Synthetic oligonucleotide
  Antisense strand to SEQ ID NO: 774322
uaguaacguaaccucagag

SEQ ID NO: 774324 - RNA, 19 nt, Artificial Sequence
  Description of Artificial Sequence: Synthetic oligonucleotide
  Sense strand starting at position 2843 of SEQ ID NO: 587201
ggaaucaucuccgcccagu

SEQ ID NO: 774325 - RNA, 19 nt, Artificial Sequence
  Description of Artificial Sequence: Synthetic oligonucleotide
  Antisense strand to SEQ ID NO: 774324
acugggcggagaugauucc

SEQ ID NO: 774326 - RNA, 19 nt, Artificial Sequence
  Description of Artificial Sequence: Synthetic oligonucleotide
  Sense strand starting at position 2894 of SEQ ID NO: 587201
gaaggaguaucuucgcaac

SEQ ID NO: 774327 - RNA, 19 nt, Artificial Sequence
  Description of Artificial Sequence: Synthetic oligonucleotide
  Antisense strand to SEQ ID NO: 774326
guugcgaagauacuccuuc

SEQ ID NO: 774328 - RNA, 19 nt, Artificial Sequence
  Description of Artificial Sequence: Synthetic oligonucleotide
  Sense strand starting at position 2896 of SEQ ID NO: 587201
aggaguaucuucgcaacuc

SEQ ID NO: 774329 - RNA, 19 nt, Artificial Sequence
  Description of Artificial Sequence: Synthetic oligonucleotide
  Antisense strand to SEQ ID NO: 774328
gaguugcgaagauacuccu

SEQ ID NO: 774330 - RNA, 19 nt, Artificial Sequence
  Description of Artificial Sequence: Synthetic oligonucleotide
  Sense strand starting at position 3107 of SEQ ID NO: 587201
gucaacagcugauuaaaca

SEQ ID NO: 774331 - RNA, 19 nt, Artificial Sequence
  Description of Artificial Sequence: Synthetic oligonucleotide
  Antisense strand to SEQ ID NO: 774330
uguuuaaucagcuguugac

SEQ ID NO: 774332 - RNA, 19 nt, Artificial Sequence
  Description of Artificial Sequence: Synthetic oligonucleotide
  Sense strand starting at position 3242 of SEQ ID NO: 587201
uggacuuugacuuauucgu

SEQ ID NO: 774333 - RNA, 19 nt, Artificial Sequence
  Description of Artificial Sequence: Synthetic oligonucleotide
  Antisense strand to SEQ ID NO: 774332
acgaauaagucaaagucca

SEQ ID NO: 774334 - RNA, 19 nt, Artificial Sequence
  Description of Artificial Sequence: Synthetic oligonucleotide
  Sense strand starting at position 3247 of SEQ ID NO: 587201
uuugacuuauucgucuaua

SEQ ID NO: 774335 - RNA, 19 nt, Artificial Sequence
  Description of Artificial Sequence: Synthetic oligonucleotide
  Antisense strand to SEQ ID NO: 774334
uauagacgaauaagucaaa

SEQ ID NO: 774336 - RNA, 19 nt, Artificial Sequence
  Description of Artificial Sequence: Synthetic oligonucleotide
  Sense strand starting at position 3248 of SEQ ID NO: 587201
uugacuuauucgucuauaa

SEQ ID NO: 774337 - RNA, 19 nt, Artificial Sequence
  Description of Artificial Sequence: Synthetic oligonucleotide
  Antisense strand to SEQ ID NO: 774336
uuauagacgaauaagucaa

SEQ ID NO: 774338 - RNA, 19 nt, Artificial Sequence
  Description of Artificial Sequence: Synthetic oligonucleotide
  Sense strand starting at position 3315 of SEQ ID NO: 587201
accguuaauuugguuauau

SEQ ID NO: 774339 - RNA, 19 nt, Artificial Sequence
  Description of Artificial Sequence: Synthetic oligonucleotide
  Antisense strand to SEQ ID NO: 774338
auauaaccaaauuaacggu

SEQ ID NO: 774340 - RNA, 19 nt, Artificial Sequence
  Description of Artificial Sequence: Synthetic oligonucleotide
  Sense strand starting at position 3316 of SEQ ID NO: 587201
ccguuaauuugguuauauu

SEQ ID NO: 774341 - RNA, 19 nt, Artificial Sequence
  Description of Artificial Sequence: Synthetic oligonucleotide
  Antisense strand to SEQ ID NO: 774340
aauauaaccaaauuaacgg

SEQ ID NO: 774342 - RNA, 19 nt, Artificial Sequence
  Description of Artificial Sequence: Synthetic oligonucleotide
  Sense strand starting at position 3456 of SEQ ID NO: 587201
cuauguuucccagguuaaa

SEQ ID NO: 774343 - RNA, 19 nt, Artificial Sequence
  Description of Artificial Sequence: Synthetic oligonucleotide
  Antisense strand to SEQ ID NO: 774342
uuuaaccugggaaacauag

SEQ ID NO: 774344 - RNA, 19 nt, Artificial Sequence
  Description of Artificial Sequence: Synthetic oligonucleotide
  Sense strand starting at position 3650 of SEQ ID NO: 587201
uguugcugagaccaguauu

SEQ ID NO: 774345 - RNA, 19 nt, Artificial Sequence
  Description of Artificial Sequence: Synthetic oligonucleotide
  Antisense strand to SEQ ID NO: 774344
aauacuggucucagcaaca

SEQ ID NO: 774346 - RNA, 19 nt, Artificial Sequence
  Description of Artificial Sequence: Synthetic oligonucleotide
  Sense strand starting at position 3653 of SEQ ID NO: 587201
ugcugagaccaguauucua

SEQ ID NO: 774347 - RNA, 19 nt, Artificial Sequence
  Description of Artificial Sequence: Synthetic oligonucleotide
  Antisense strand to SEQ ID NO: 774346
uagaauacuggucucagca

SEQ ID NO: 774348 - RNA, 19 nt, Artificial Sequence
  Description of Artificial Sequence: Synthetic oligonucleotide
  Sense strand starting at position 3656 of SEQ ID NO: 587201
ugagaccaguauucuaguu

SEQ ID NO: 774349 - RNA, 19 nt, Artificial Sequence
  Description of Artificial Sequence: Synthetic oligonucleotide
  Antisense strand to SEQ ID NO: 774348
aacuagaauacuggucuca

SEQ ID NO: 774350 - RNA, 19 nt, Artificial Sequence
  Description of Artificial Sequence: Synthetic oligonucleotide
  Sense strand starting at position 3661 of SEQ ID NO: 587201
ccaguauucuaguuccaga

SEQ ID NO: 774351 - RNA, 19 nt, Artificial Sequence
  Description of Artificial Sequence: Synthetic oligonucleotide
  Antisense strand to SEQ ID NO: 774350
ucuggaacuagaauacugg

SEQ ID NO: 774352 - RNA, 19 nt, Artificial Sequence
  Description of Artificial Sequence: Synthetic oligonucleotide
  Sense strand starting at position 3664 of SEQ ID NO: 587201
guauucuaguuccagauuu

SEQ ID NO: 774353 - RNA, 19 nt, Artificial Sequence
  Description of Artificial Sequence: Synthetic oligonucleotide
  Antisense strand to SEQ ID NO: 774352
aaaucuggaacuagaauac

SEQ ID NO: 774354 - RNA, 19 nt, Artificial Sequence
  Description of Artificial Sequence: Synthetic oligonucleotide
  Sense strand starting at position 3906 of SEQ ID NO: 587201
acguuagcuuccuuauaga

SEQ ID NO: 774355 - RNA, 19 nt, Artificial Sequence
  Description of Artificial Sequence: Synthetic oligonucleotide
  Antisense strand to SEQ ID NO: 774354
ucuauaaggaagcuaacgu

SEQ ID NO: 774356 - RNA, 19 nt, Artificial Sequence
  Description of Artificial Sequence: Synthetic oligonucleotide
  Sense strand starting at position 27 of SEQ ID NO: 587202
guaucugacuuauuaagaa

SEQ ID NO: 774357 - RNA, 19 nt, Artificial Sequence
  Description of Artificial Sequence: Synthetic oligonucleotide
  Antisense strand to SEQ ID NO: 774356
uucuuaauaagucagauac

SEQ ID NO: 774358 - RNA, 19 nt, Artificial Sequence
  Description of Artificial Sequence: Synthetic oligonucleotide
  Sense strand starting at position 123 of SEQ ID NO: 587202
cccagaguaaggcauguaa

SEQ ID NO: 774359 - RNA, 19 nt, Artificial Sequence
  Description of Artificial Sequence: Synthetic oligonucleotide
  Antisense strand to SEQ ID NO: 774358
uuacaugccuuacucuggg

SEQ ID NO: 774360 - RNA, 19 nt, Artificial Sequence
  Description of Artificial Sequence: Synthetic oligonucleotide
  Sense strand starting at position 125 of SEQ ID NO: 587202
cagaguaaggcauguaaac

SEQ ID NO: 774361 - RNA, 19 nt, Artificial Sequence
  Description of Artificial Sequence: Synthetic oligonucleotide
  Antisense strand to SEQ ID NO: 774360
guuuacaugccuuacucug

SEQ ID NO: 774362 - RNA, 19 nt, Artificial Sequence
  Description of Artificial Sequence: Synthetic oligonucleotide
  Sense strand starting at position 137 of SEQ ID NO: 587202
uguaaacaucuucguuuga

SEQ ID NO: 774363 - RNA, 19 nt, Artificial Sequence
  Description of Artificial Sequence: Synthetic oligonucleotide
  Antisense strand to SEQ ID NO: 774362
ucaaacgaagauguuuaca

SEQ ID NO: 774364 - RNA, 19 nt, Artificial Sequence
  Description of Artificial Sequence: Synthetic oligonucleotide
  Sense strand starting at position 138 of SEQ ID NO: 587202
guaaacaucuucguuugau

SEQ ID NO: 774365 - RNA, 19 nt, Artificial Sequence
  Description of Artificial Sequence: Synthetic oligonucleotide
  Antisense strand to SEQ ID NO: 774364
aucaaacgaagauguuuac

SEQ ID NO: 774366 - RNA, 19 nt, Artificial Sequence
  Description of Artificial Sequence: Synthetic oligonucleotide
  Sense strand starting at position 329 of SEQ ID NO: 587202
gggaggaucugagggauga

SEQ ID NO: 774367 - RNA, 19 nt, Artificial Sequence
  Description of Artificial Sequence: Synthetic oligonucleotide
  Antisense strand to SEQ ID NO: 774366
ucaucccucagauccuccc

SEQ ID NO: 774368 - RNA, 19 nt, Artificial Sequence
  Description of Artificial Sequence: Synthetic oligonucleotide
  Sense strand starting at position 352 of SEQ ID NO: 587202
uuaagagugucuuccugaa

SEQ ID NO: 774369 - RNA, 19 nt, Artificial Sequence
  Description of Artificial Sequence: Synthetic oligonucleotide
  Antisense strand to SEQ ID NO: 774368
uucaggaagacacucuuaa

SEQ ID NO: 774370 - RNA, 19 nt, Artificial Sequence
  Description of Artificial Sequence: Synthetic oligonucleotide
  Sense strand starting at position 354 of SEQ ID NO: 587202
aagagugucuuccugaaga

SEQ ID NO: 774371 - RNA, 19 nt, Artificial Sequence
  Description of Artificial Sequence: Synthetic oligonucleotide
  Antisense strand to SEQ ID NO: 774370
ucuucaggaagacacucuu

SEQ ID NO: 774372 - RNA, 19 nt, Artificial Sequence
  Description of Artificial Sequence: Synthetic oligonucleotide
  Sense strand starting at position 356 of SEQ ID NO: 587202
gagugucuuccugaagagg

SEQ ID NO: 774373 - RNA, 19 nt, Artificial Sequence
  Description of Artificial Sequence: Synthetic oligonucleotide
  Antisense strand to SEQ ID NO: 774372
ccucuucaggaagacacuc

SEQ ID NO: 774374 - RNA, 19 nt, Artificial Sequence
  Description of Artificial Sequence: Synthetic oligonucleotide
  Sense strand starting at position 2079 of SEQ ID NO: 587202
agagaaagcccggaguuca

SEQ ID NO: 774375 - RNA, 19 nt, Artificial Sequence
  Description of Artificial Sequence: Synthetic oligonucleotide
  Antisense strand to SEQ ID NO: 774374
ugaacuccgggcuuucucu

SEQ ID NO: 774376 - RNA, 19 nt, Artificial Sequence
  Description of Artificial Sequence: Synthetic oligonucleotide
  Sense strand starting at position 2176 of SEQ ID NO: 587202
gugaaaugcccgaguguug

SEQ ID NO: 774377 - RNA, 19 nt, Artificial Sequence
  Description of Artificial Sequence: Synthetic oligonucleotide
  Antisense strand to SEQ ID NO: 774376
caacacucgggcauuucac

SEQ ID NO: 774378 - RNA, 19 nt, Artificial Sequence
  Description of Artificial Sequence: Synthetic oligonucleotide
  Sense strand starting at position 2208 of SEQ ID NO: 587202
aggaccgaauuccuagaau

SEQ ID NO: 774379 - RNA, 19 nt, Artificial Sequence
  Description of Artificial Sequence: Synthetic oligonucleotide
  Antisense strand to SEQ ID NO: 774378
auucuaggaauucgguccu

SEQ ID NO: 774380 - RNA, 19 nt, Artificial Sequence
  Description of Artificial Sequence: Synthetic oligonucleotide
  Sense strand starting at position 2256 of SEQ ID NO: 587202
acgggucauuuaggaggaa

SEQ ID NO: 774381 - RNA, 19 nt, Artificial Sequence
  Description of Artificial Sequence: Synthetic oligonucleotide
  Antisense strand to SEQ ID NO: 774380
uuccuccuaaaugacccgu

SEQ ID NO: 774382 - RNA, 19 nt, Artificial Sequence
  Description of Artificial Sequence: Synthetic oligonucleotide
  Sense strand starting at position 2257 of SEQ ID NO: 587202
cgggucauuuaggaggaaa

SEQ ID NO: 774383 - RNA, 19 nt, Artificial Sequence
  Description of Artificial Sequence: Synthetic oligonucleotide
  Antisense strand to SEQ ID NO: 774382
uuuccuccuaaaugacccg

SEQ ID NO: 774384 - RNA, 19 nt, Artificial Sequence
  Description of Artificial Sequence: Synthetic oligonucleotide
  Sense strand starting at position 2319 of SEQ ID NO: 587202
augaaugaaugcucuuugu

SEQ ID NO: 774385 - RNA, 19 nt, Artificial Sequence
  Description of Artificial Sequence: Synthetic oligonucleotide
  Antisense strand to SEQ ID NO: 774384
acaaagagcauucauucau

SEQ ID NO: 774386 - RNA, 19 nt, Artificial Sequence
  Description of Artificial Sequence: Synthetic oligonucleotide
  Sense strand starting at position 2332 of SEQ ID NO: 587202
cuuuguaaccaugagaagu

SEQ ID NO: 774387 - RNA, 19 nt, Artificial Sequence
  Description of Artificial Sequence: Synthetic oligonucleotide
  Antisense strand to SEQ ID NO: 774386
acuucucaugguuacaaag

SEQ ID NO: 774388 - RNA, 19 nt, Artificial Sequence
  Description of Artificial Sequence: Synthetic oligonucleotide
  Sense strand starting at position 2366 of SEQ ID NO: 587202
ggagcuuagaguugagaac

SEQ ID NO: 774389 - RNA, 19 nt, Artificial Sequence
  Description of Artificial Sequence: Synthetic oligonucleotide
  Antisense strand to SEQ ID NO: 774388
guucucaacucuaagcucc

SEQ ID NO: 774390 - RNA, 19 nt, Artificial Sequence
  Description of Artificial Sequence: Synthetic oligonucleotide
  Sense strand starting at position 2489 of SEQ ID NO: 587202
gcaggcguccugguuacua

SEQ ID NO: 774391 - RNA, 19 nt, Artificial Sequence
  Description of Artificial Sequence: Synthetic oligonucleotide
  Antisense strand to SEQ ID NO: 774390
uaguaaccaggacgccugc

SEQ ID NO: 774392 - RNA, 19 nt, Artificial Sequence
  Description of Artificial Sequence: Synthetic oligonucleotide
  Sense strand starting at position 2498 of SEQ ID NO: 587202
cugguuacuagcgaugaag

SEQ ID NO: 774393 - RNA, 19 nt, Artificial Sequence
  Description of Artificial Sequence: Synthetic oligonucleotide
  Antisense strand to SEQ ID NO: 774392
cuucaucgcuaguaaccag

SEQ ID NO: 774394 - RNA, 19 nt, Artificial Sequence
  Description of Artificial Sequence: Synthetic oligonucleotide
  Sense strand starting at position 2559 of SEQ ID NO: 587202
agcagaggacauuguguuu

SEQ ID NO: 774395 - RNA, 19 nt, Artificial Sequence
  Description of Artificial Sequence: Synthetic oligonucleotide
  Antisense strand to SEQ ID NO: 774394
aaacacaauguccucugcu

SEQ ID NO: 774396 - RNA, 19 nt, Artificial Sequence
  Description of Artificial Sequence: Synthetic oligonucleotide
  Sense strand starting at position 2564 of SEQ ID NO: 587202
aggacauuguguuuaccua

SEQ ID NO: 774397 - RNA, 19 nt, Artificial Sequence
  Description of Artificial Sequence: Synthetic oligonucleotide
  Antisense strand to SEQ ID NO: 774396
uagguaaacacaauguccu

SEQ ID NO: 774398 - RNA, 19 nt, Artificial Sequence
  Description of Artificial Sequence: Synthetic oligonucleotide
  Sense strand starting at position 2565 of SEQ ID NO: 587202
ggacauuguguuuaccuaa

SEQ ID NO: 774399 - RNA, 19 nt, Artificial Sequence
  Description of Artificial Sequence: Synthetic oligonucleotide
  Antisense strand to SEQ ID NO: 774398
uuagguaaacacaaugucc

SEQ ID NO: 774400 - RNA, 19 nt, Artificial Sequence
  Description of Artificial Sequence: Synthetic oligonucleotide
  Sense strand starting at position 2639 of SEQ ID NO: 587202
agcucagauaauggaaagu

SEQ ID NO: 774401 - RNA, 19 nt, Artificial Sequence
  Description of Artificial Sequence: Synthetic oligonucleotide
  Antisense strand to SEQ ID NO: 774400
acuuuccauuaucugagcu

SEQ ID NO: 774402 - RNA, 19 nt, Artificial Sequence
  Description of Artificial Sequence: Synthetic oligonucleotide
  Sense strand starting at position 2652 of SEQ ID NO: 587202
gaaaguuauggccagacgu

SEQ ID NO: 774403 - RNA, 19 nt, Artificial Sequence
  Description of Artificial Sequence: Synthetic oligonucleotide
  Antisense strand to SEQ ID NO: 774402
acgucuggccauaacuuuc

SEQ ID NO: 774404 - RNA, 19 nt, Artificial Sequence
  Description of Artificial Sequence: Synthetic oligonucleotide
  Sense strand starting at position 2971 of SEQ ID NO: 587202
gagguaaggccagagcuau

SEQ ID NO: 774405 - RNA, 19 nt, Artificial Sequence
  Description of Artificial Sequence: Synthetic oligonucleotide
  Antisense strand to SEQ ID NO: 774404
auagcucuggccuuaccuc

SEQ ID NO: 774406 - RNA, 19 nt, Artificial Sequence
  Description of Artificial Sequence: Synthetic oligonucleotide
  Sense strand starting at position 3014 of SEQ ID NO: 587202
aggcuagaguucucaccca

SEQ ID NO: 774407 - RNA, 19 nt, Artificial Sequence
  Description of Artificial Sequence: Synthetic oligonucleotide
  Antisense strand to SEQ ID NO: 774406
ugggugagaacucuagccu

SEQ ID NO: 774408 - RNA, 19 nt, Artificial Sequence
  Description of Artificial Sequence: Synthetic oligonucleotide
  Sense strand starting at position 3030 of SEQ ID NO: 587202
ccaggucuuuaugcauuaa

SEQ ID NO: 774409 - RNA, 19 nt, Artificial Sequence
  Description of Artificial Sequence: Synthetic oligonucleotide
  Antisense strand to SEQ ID NO: 774408
uuaaugcauaaagaccugg

SEQ ID NO: 774410 - RNA, 19 nt, Artificial Sequence
  Description of Artificial Sequence: Synthetic oligonucleotide
  Sense strand starting at position 3339 of SEQ ID NO: 587202
uaaagugcgucucuagaga

SEQ ID NO: 774411 - RNA, 19 nt, Artificial Sequence
  Description of Artificial Sequence: Synthetic oligonucleotide
  Antisense strand to SEQ ID NO: 774410
ucucuagagacgcacuuua

SEQ ID NO: 774412 - RNA, 19 nt, Artificial Sequence
  Description of Artificial Sequence: Synthetic oligonucleotide
  Sense strand starting at position 3350 of SEQ ID NO: 587202
ucuagagacgccuagacau

SEQ ID NO: 774413 - RNA, 19 nt, Artificial Sequence
  Description of Artificial Sequence: Synthetic oligonucleotide
  Antisense strand to SEQ ID NO: 774412
augucuaggcgucucuaga

SEQ ID NO: 774414 - RNA, 19 nt, Artificial Sequence
  Description of Artificial Sequence: Synthetic oligonucleotide
  Sense strand starting at position 3410 of SEQ ID NO: 587202
ucccgaacugcucacugaa

SEQ ID NO: 774415 - RNA, 19 nt, Artificial Sequence
  Description of Artificial Sequence: Synthetic oligonucleotide
  Antisense strand to SEQ ID NO: 774414
uucagugagcaguucggga

SEQ ID NO: 774416 - RNA, 19 nt, Artificial Sequence
  Description of Artificial Sequence: Synthetic oligonucleotide
  Sense strand starting at position 3427 of SEQ ID NO: 587202
aagggauggugccuacuua

SEQ ID NO: 774417 - RNA, 19 nt, Artificial Sequence
  Description of Artificial Sequence: Synthetic oligonucleotide
  Antisense strand to SEQ ID NO: 774416
uaaguaggcaccaucccuu

SEQ ID NO: 774418 - RNA, 19 nt, Artificial Sequence
  Description of Artificial Sequence: Synthetic oligonucleotide
  Sense strand starting at position 3431 of SEQ ID NO: 587202
gauggugccuacuuacaca

SEQ ID NO: 774419 - RNA, 19 nt, Artificial Sequence
  Description of Artificial Sequence: Synthetic oligonucleotide
  Antisense strand to SEQ ID NO: 774418
uguguaaguaggcaccauc

SEQ ID NO: 774420 - RNA, 19 nt, Artificial Sequence
  Description of Artificial Sequence: Synthetic oligonucleotide
  Sense strand starting at position 3484 of SEQ ID NO: 587202
ggcucauacuuacugauaa

SEQ ID NO: 774421 - RNA, 19 nt, Artificial Sequence
  Description of Artificial Sequence: Synthetic oligonucleotide
  Antisense strand to SEQ ID NO: 774420
uuaucaguaaguaugagcc

SEQ ID NO: 774422 - RNA, 19 nt, Artificial Sequence
  Description of Artificial Sequence: Synthetic oligonucleotide
  Sense strand starting at position 3512 of SEQ ID NO: 587202
aacguuugccgacaugaug

SEQ ID NO: 774423 - RNA, 19 nt, Artificial Sequence
  Description of Artificial Sequence: Synthetic oligonucleotide
  Antisense strand to SEQ ID NO: 774422
caucaugucggcaaacguu

SEQ ID NO: 774424 - RNA, 19 nt, Artificial Sequence
  Description of Artificial Sequence: Synthetic oligonucleotide
  Sense strand starting at position 3520 of SEQ ID NO: 587202
ccgacaugaugacugugaa

SEQ ID NO: 774425 - RNA, 19 nt, Artificial Sequence
  Description of Artificial Sequence: Synthetic oligonucleotide
  Antisense strand to SEQ ID NO: 774424
uucacagucaucaugucgg

SEQ ID NO: 774426 - RNA, 19 nt, Artificial Sequence
  Description of Artificial Sequence: Synthetic oligonucleotide
  Sense strand starting at position 3521 of SEQ ID NO: 587202
cgacaugaugacugugaaa

SEQ ID NO: 774427 - RNA, 19 nt, Artificial Sequence
  Description of Artificial Sequence: Synthetic oligonucleotide
  Antisense strand to SEQ ID NO: 774426
uuucacagucaucaugucg

SEQ ID NO: 774428 - RNA, 19 nt, Artificial Sequence
  Description of Artificial Sequence: Synthetic oligonucleotide
  Sense strand starting at position 3534 of SEQ ID NO: 587202
gugaaaugguagcucauua

SEQ ID NO: 774429 - RNA, 19 nt, Artificial Sequence
  Description of Artificial Sequence: Synthetic oligonucleotide
  Antisense strand to SEQ ID NO: 774428
uaaugagcuaccauuucac

SEQ ID NO: 774430 - RNA, 19 nt, Artificial Sequence
  Description of Artificial Sequence: Synthetic oligonucleotide
  Sense strand starting at position 3682 of SEQ ID NO: 587202
uucuuauuggcuuauaggu

SEQ ID NO: 774431 - RNA, 19 nt, Artificial Sequence
  Description of Artificial Sequence: Synthetic oligonucleotide
  Antisense strand to SEQ ID NO: 774430
accuauaagccaauaagaa

SEQ ID NO: 774432 - RNA, 19 nt, Artificial Sequence
  Description of Artificial Sequence: Synthetic oligonucleotide
  Sense strand starting at position 3759 of SEQ ID NO: 587202
cuaauacgauugcauuuaa

SEQ ID NO: 774433 - RNA, 19 nt, Artificial Sequence
  Description of Artificial Sequence: Synthetic oligonucleotide
  Antisense strand to SEQ ID NO: 774432
uuaaaugcaaucguauuag

SEQ ID NO: 774434 - RNA, 19 nt, Artificial Sequence
  Description of Artificial Sequence: Synthetic oligonucleotide
  Sense strand starting at position 3808 of SEQ ID NO: 587202
guuccagguguucagugau

SEQ ID NO: 774435 - RNA, 19 nt, Artificial Sequence
  Description of Artificial Sequence: Synthetic oligonucleotide
  Antisense strand to SEQ ID NO: 774434
aucacugaacaccuggaac

SEQ ID NO: 774436 - RNA, 19 nt, Artificial Sequence
  Description of Artificial Sequence: Synthetic oligonucleotide
  Sense strand starting at position 50 of SEQ ID NO: 587203
gugugauaggaugggcuaa

SEQ ID NO: 774437 - RNA, 19 nt, Artificial Sequence
  Description of Artificial Sequence: Synthetic oligonucleotide
  Antisense strand to SEQ ID NO: 774436
uuagcccauccuaucacac

SEQ ID NO: 774438 - RNA, 19 nt, Artificial Sequence
  Description of Artificial Sequence: Synthetic oligonucleotide
  Sense strand starting at position 68 of SEQ ID NO: 587203
acaagaguccagggcaaau

SEQ ID NO: 774439 - RNA, 19 nt, Artificial Sequence
  Description of Artificial Sequence: Synthetic oligonucleotide
  Antisense strand to SEQ ID NO: 774438
auuugcccuggacucuugu

SEQ ID NO: 774440 - RNA, 19 nt, Artificial Sequence
  Description of Artificial Sequence: Synthetic oligonucleotide
  Sense strand starting at position 408 of SEQ ID NO: 587203
guagguaucaucuauugag

SEQ ID NO: 774441 - RNA, 19 nt, Artificial Sequence
  Description of Artificial Sequence: Synthetic oligonucleotide
  Antisense strand to SEQ ID NO: 774440
cucaauagaugauaccuac

SEQ ID NO: 774442 - RNA, 19 nt, Artificial Sequence
  Description of Artificial Sequence: Synthetic oligonucleotide
  Sense strand starting at position 524 of SEQ ID NO: 587203
gcuaaacuggccuaacuua

SEQ ID NO: 774443 - RNA, 19 nt, Artificial Sequence
  Description of Artificial Sequence: Synthetic oligonucleotide
  Antisense strand to SEQ ID NO: 774442
uaaguuaggccaguuuagc

SEQ ID NO: 774444 - RNA, 19 nt, Artificial Sequence
  Description of Artificial Sequence: Synthetic oligonucleotide
  Sense strand starting at position 567 of SEQ ID NO: 587203
ugaugugauucuuccuucu

SEQ ID NO: 774445 - RNA, 19 nt, Artificial Sequence
  Description of Artificial Sequence: Synthetic oligonucleotide
  Antisense strand to SEQ ID NO: 774444
agaaggaagaaucacauca

SEQ ID NO: 774446 - RNA, 19 nt, Artificial Sequence
  Description of Artificial Sequence: Synthetic oligonucleotide
  Sense strand starting at position 570 of SEQ ID NO: 587203
ugugauucuuccuucucca

SEQ ID NO: 774447 - RNA, 19 nt, Artificial Sequence
  Description of Artificial Sequence: Synthetic oligonucleotide
  Antisense strand to SEQ ID NO: 774446
uggagaaggaagaaucaca

SEQ ID NO: 774448 - RNA, 19 nt, Artificial Sequence
  Description of Artificial Sequence: Synthetic oligonucleotide
  Sense strand starting at position 613 of SEQ ID NO: 587203
cuuauaguguauucuuaug

SEQ ID NO: 774449 - RNA, 19 nt, Artificial Sequence
  Description of Artificial Sequence: Synthetic oligonucleotide
  Antisense strand to SEQ ID NO: 774448
cauaagaauacacuauaag

SEQ ID NO: 774450 - RNA, 19 nt, Artificial Sequence
  Description of Artificial Sequence: Synthetic oligonucleotide
  Sense strand starting at position 647 of SEQ ID NO: 587203
auagauauguaucuggaca

SEQ ID NO: 774451 - RNA, 19 nt, Artificial Sequence
  Description of Artificial Sequence: Synthetic oligonucleotide
  Antisense strand to SEQ ID NO: 774450
uguccagauacauaucuau

SEQ ID NO: 774452 - RNA, 19 nt, Artificial Sequence
  Description of Artificial Sequence: Synthetic oligonucleotide
  Sense strand starting at position 788 of SEQ ID NO: 587203
augagaucccgccacuaca

SEQ ID NO: 774453 - RNA, 19 nt, Artificial Sequence
  Description of Artificial Sequence: Synthetic oligonucleotide
  Antisense strand to SEQ ID NO: 774452
uguaguggcgggaucucau

SEQ ID NO: 774454 - RNA, 19 nt, Artificial Sequence
  Description of Artificial Sequence: Synthetic oligonucleotide
  Sense strand starting at position 954 of SEQ ID NO: 587203
gcgguagcucucgucugua

SEQ ID NO: 774455 - RNA, 19 nt, Artificial Sequence
  Description of Artificial Sequence: Synthetic oligonucleotide
  Antisense strand to SEQ ID NO: 774454
uacagacgagagcuaccgc

SEQ ID NO: 774456 - RNA, 19 nt, Artificial Sequence
  Description of Artificial Sequence: Synthetic oligonucleotide
  Sense strand starting at position 956 of SEQ ID NO: 587203
gguagcucucgucuguaau

SEQ ID NO: 774457 - RNA, 19 nt, Artificial Sequence
  Description of Artificial Sequence: Synthetic oligonucleotide
  Antisense strand to SEQ ID NO: 774456
auuacagacgagagcuacc

SEQ ID NO: 774458 - RNA, 19 nt, Artificial Sequence
  Description of Artificial Sequence: Synthetic oligonucleotide
  Sense strand starting at position 1387 of SEQ ID NO: 587203
gccucuaauagaugcguga

SEQ ID NO: 774459 - RNA, 19 nt, Artificial Sequence
  Description of Artificial Sequence: Synthetic oligonucleotide
  Antisense strand to SEQ ID NO: 774458
ucacgcaucuauuagaggc

SEQ ID NO: 774460 - RNA, 19 nt, Artificial Sequence
  Description of Artificial Sequence: Synthetic oligonucleotide
  Sense strand starting at position 1499 of SEQ ID NO: 587203
ggccucaaaugggacaaua

SEQ ID NO: 774461 - RNA, 19 nt, Artificial Sequence
  Description of Artificial Sequence: Synthetic oligonucleotide
  Antisense strand to SEQ ID NO: 774460
uauugucccauuugaggcc

SEQ ID NO: 774462 - RNA, 19 nt, Artificial Sequence
  Description of Artificial Sequence: Synthetic oligonucleotide
  Sense strand starting at position 2311 of SEQ ID NO: 587203
gcgaaaccucgcgagggaa

SEQ ID NO: 774463 - RNA, 19 nt, Artificial Sequence
  Description of Artificial Sequence: Synthetic oligonucleotide
  Antisense strand to SEQ ID NO: 774462
uucccucgcgagguuucgc

SEQ ID NO: 774464 - RNA, 19 nt, Artificial Sequence
  Description of Artificial Sequence: Synthetic oligonucleotide
  Sense strand starting at position 2464 of SEQ ID NO: 587203
gggaaacuuacaugaacgu

SEQ ID NO: 774465 - RNA, 19 nt, Artificial Sequence
  Description of Artificial Sequence: Synthetic oligonucleotide
  Antisense strand to SEQ ID NO: 774464
acguucauguaaguuuccc

SEQ ID NO: 774466 - RNA, 19 nt, Artificial Sequence
  Description of Artificial Sequence: Synthetic oligonucleotide
  Sense strand starting at position 2608 of SEQ ID NO: 587203
uggugaaaguccucagcca

SEQ ID NO: 774467 - RNA, 19 nt, Artificial Sequence
  Description of Artificial Sequence: Synthetic oligonucleotide
  Antisense strand to SEQ ID NO: 774466
uggcugaggacuuucacca

SEQ ID NO: 774468 - RNA, 19 nt, Artificial Sequence
  Description of Artificial Sequence: Synthetic oligonucleotide
  Sense strand starting at position 2660 of SEQ ID NO: 587203
cugagaucacagcaagugu

SEQ ID NO: 774469 - RNA, 19 nt, Artificial Sequence
  Description of Artificial Sequence: Synthetic oligonucleotide
  Antisense strand to SEQ ID NO: 774468
acacuugcugugaucucag

SEQ ID NO: 774470 - RNA, 19 nt, Artificial Sequence
  Description of Artificial Sequence: Synthetic oligonucleotide
  Sense strand starting at position 2743 of SEQ ID NO: 587203
cggccugugcugaggcaua

SEQ ID NO: 774471 - RNA, 19 nt, Artificial Sequence
  Description of Artificial Sequence: Synthetic oligonucleotide
  Antisense strand to SEQ ID NO: 774470
uaugccucagcacaggccg

SEQ ID NO: 774472 - RNA, 19 nt, Artificial Sequence
  Description of Artificial Sequence: Synthetic oligonucleotide
  Sense strand starting at position 2748 of SEQ ID NO: 587203
ugugcugaggcauauugaa

SEQ ID NO: 774473 - RNA, 19 nt, Artificial Sequence
  Description of Artificial Sequence: Synthetic oligonucleotide
  Antisense strand to SEQ ID NO: 774472
uucaauaugccucagcaca

SEQ ID NO: 774474 - RNA, 19 nt, Artificial Sequence
  Description of Artificial Sequence: Synthetic oligonucleotide
  Sense strand starting at position 2763 of SEQ ID NO: 587203
ugaacuaaaugugcuguau

SEQ ID NO: 774475 - RNA, 19 nt, Artificial Sequence
  Description of Artificial Sequence: Synthetic oligonucleotide
  Antisense strand to SEQ ID NO: 774474
auacagcacauuuaguuca

SEQ ID NO: 774476 - RNA, 19 nt, Artificial Sequence
  Description of Artificial Sequence: Synthetic oligonucleotide
  Sense strand starting at position 2863 of SEQ ID NO: 587203
ccgcuagaaaucugcaguu

SEQ ID NO: 774477 - RNA, 19 nt, Artificial Sequence
  Description of Artificial Sequence: Synthetic oligonucleotide
  Antisense strand to SEQ ID NO: 774476
aacugcagauuucuagcgg

SEQ ID NO: 774478 - RNA, 19 nt, Artificial Sequence
  Description of Artificial Sequence: Synthetic oligonucleotide
  Sense strand starting at position 2955 of SEQ ID NO: 587203
gggugagggugagaaguua

SEQ ID NO: 774479 - RNA, 19 nt, Artificial Sequence
  Description of Artificial Sequence: Synthetic oligonucleotide
  Antisense strand to SEQ ID NO: 774478
uaacuucucacccucaccc

SEQ ID NO: 774480 - RNA, 19 nt, Artificial Sequence
  Description of Artificial Sequence: Synthetic oligonucleotide
  Sense strand starting at position 3031 of SEQ ID NO: 587203
cugauauccuaaguaaggu

SEQ ID NO: 774481 - RNA, 19 nt, Artificial Sequence
  Description of Artificial Sequence: Synthetic oligonucleotide
  Antisense strand to SEQ ID NO: 774480
accuuacuuaggauaucag

SEQ ID NO: 774482 - RNA, 19 nt, Artificial Sequence
  Description of Artificial Sequence: Synthetic oligonucleotide
  Sense strand starting at position 3069 of SEQ ID NO: 587203
aagguuaggacguguuacu

SEQ ID NO: 774483 - RNA, 19 nt, Artificial Sequence
  Description of Artificial Sequence: Synthetic oligonucleotide
  Antisense strand to SEQ ID NO: 774482
aguaacacguccuaaccuu

SEQ ID NO: 774484 - RNA, 19 nt, Artificial Sequence
  Description of Artificial Sequence: Synthetic oligonucleotide
  Sense strand starting at position 3129 of SEQ ID NO: 587203
uggaaauucuuguugaacu

SEQ ID NO: 774485 - RNA, 19 nt, Artificial Sequence
  Description of Artificial Sequence: Synthetic oligonucleotide
  Antisense strand to SEQ ID NO: 774484
aguucaacaagaauuucca

SEQ ID NO: 774486 - RNA, 19 nt, Artificial Sequence
  Description of Artificial Sequence: Synthetic oligonucleotide
  Sense strand starting at position 3170 of SEQ ID NO: 587203
gcaaguaugcacuaaagac

SEQ ID NO: 774487 - RNA, 19 nt, Artificial Sequence
  Description of Artificial Sequence: Synthetic oligonucleotide
  Antisense strand to SEQ ID NO: 774486
gucuuuagugcauacuugc

SEQ ID NO: 774488 - RNA, 19 nt, Artificial Sequence
  Description of Artificial Sequence: Synthetic oligonucleotide
  Sense strand starting at position 3190 of SEQ ID NO: 587203
uuaagagcaucccuaggau

SEQ ID NO: 774489 - RNA, 19 nt, Artificial Sequence
  Description of Artificial Sequence: Synthetic oligonucleotide
  Antisense strand to SEQ ID NO: 774488
auccuagggaugcucuuaa

SEQ ID NO: 774490 - RNA, 19 nt, Artificial Sequence
  Description of Artificial Sequence: Synthetic oligonucleotide
  Sense strand starting at position 3193 of SEQ ID NO: 587203
agagcaucccuaggaucuu

SEQ ID NO: 774491 - RNA, 19 nt, Artificial Sequence
  Description of Artificial Sequence: Synthetic oligonucleotide
  Antisense strand to SEQ ID NO: 774490
aagauccuagggaugcucu

SEQ ID NO: 774492 - RNA, 19 nt, Artificial Sequence
  Description of Artificial Sequence: Synthetic oligonucleotide
  Sense strand starting at position 3202 of SEQ ID NO: 587203
cuaggaucuuaucagggau

SEQ ID NO: 774493 - RNA, 19 nt, Artificial Sequence
  Description of Artificial Sequence: Synthetic oligonucleotide
  Antisense strand to SEQ ID NO: 774492
aucccugauaagauccuag

SEQ ID NO: 774494 - RNA, 19 nt, Artificial Sequence
  Description of Artificial Sequence: Synthetic oligonucleotide
  Sense strand starting at position 3204 of SEQ ID NO: 587203
aggaucuuaucagggauca

SEQ ID NO: 774495 - RNA, 19 nt, Artificial Sequence
  Description of Artificial Sequence: Synthetic oligonucleotide
  Antisense strand to SEQ ID NO: 774494
ugaucccugauaagauccu

SEQ ID NO: 774496 - RNA, 19 nt, Artificial Sequence
  Description of Artificial Sequence: Synthetic oligonucleotide
  Sense strand starting at position 3250 of SEQ ID NO: 587203
ccaguaaauggugacguua

SEQ ID NO: 774497 - RNA, 19 nt, Artificial Sequence
  Description of Artificial Sequence: Synthetic oligonucleotide
  Antisense strand to SEQ ID NO: 774496
uaacgucaccauuuacugg

SEQ ID NO: 774498 - RNA, 19 nt, Artificial Sequence
  Description of Artificial Sequence: Synthetic oligonucleotide
  Sense strand starting at position 3259 of SEQ ID NO: 587203
ggugacguuauagaauaac

SEQ ID NO: 774499 - RNA, 19 nt, Artificial Sequence
  Description of Artificial Sequence: Synthetic oligonucleotide
  Antisense strand to SEQ ID NO: 774498
guuauucuauaacgucacc

SEQ ID NO: 774500 - RNA, 19 nt, Artificial Sequence
  Description of Artificial Sequence: Synthetic oligonucleotide
  Sense strand starting at position 3262 of SEQ ID NO: 587203
gacguuauagaauaacagu

SEQ ID NO: 774501 - RNA, 19 nt, Artificial Sequence
  Description of Artificial Sequence: Synthetic oligonucleotide
  Antisense strand to SEQ ID NO: 774500
acuguuauucuauaacguc

SEQ ID NO: 774502 - RNA, 19 nt, Artificial Sequence
  Description of Artificial Sequence: Synthetic oligonucleotide
  Sense strand starting at position 3653 of SEQ ID NO: 587203
uuuaaugagcucuguugag

SEQ ID NO: 774503 - RNA, 19 nt, Artificial Sequence
  Description of Artificial Sequence: Synthetic oligonucleotide
  Antisense strand to SEQ ID NO: 774502
cucaacagagcucauuaaa

SEQ ID NO: 774504 - RNA, 19 nt, Artificial Sequence
  Description of Artificial Sequence: Synthetic oligonucleotide
  Sense strand starting at position 3670 of SEQ ID NO: 587203
aggaaagagugcuauaaug

SEQ ID NO: 774505 - RNA, 19 nt, Artificial Sequence
  Description of Artificial Sequence: Synthetic oligonucleotide
  Antisense strand to SEQ ID NO: 774504
cauuauagcacucuuuccu

SEQ ID NO: 774506 - RNA, 19 nt, Artificial Sequence
  Description of Artificial Sequence: Synthetic oligonucleotide
  Sense strand starting at position 3672 of SEQ ID NO: 587203
gaaagagugcuauaauguu

SEQ ID NO: 774507 - RNA, 19 nt, Artificial Sequence
  Description of Artificial Sequence: Synthetic oligonucleotide
  Antisense strand to SEQ ID NO: 774506
aacauuauagcacucuuuc

SEQ ID NO: 774508 - RNA, 19 nt, Artificial Sequence
  Description of Artificial Sequence: Synthetic oligonucleotide
  Sense strand starting at position 3678 of SEQ ID NO: 587203
gugcuauaauguuugacag

SEQ ID NO: 774509 - RNA, 19 nt, Artificial Sequence
  Description of Artificial Sequence: Synthetic oligonucleotide
  Antisense strand to SEQ ID NO: 774508
cugucaaacauuauagcac

SEQ ID NO: 774510 - RNA, 19 nt, Artificial Sequence
  Description of Artificial Sequence: Synthetic oligonucleotide
  Sense strand starting at position 3725 of SEQ ID NO: 587203
ucucuaagucagugguacu

SEQ ID NO: 774511 - RNA, 19 nt, Artificial Sequence
  Description of Artificial Sequence: Synthetic oligonucleotide
  Antisense strand to SEQ ID NO: 774510
aguaccacugacuuagaga

SEQ ID NO: 774512 - RNA, 19 nt, Artificial Sequence
  Description of Artificial Sequence: Synthetic oligonucleotide
  Sense strand starting at position 3767 of SEQ ID NO: 587203
cacugaggguucuuguuaa

SEQ ID NO: 774513 - RNA, 19 nt, Artificial Sequence
  Description of Artificial Sequence: Synthetic oligonucleotide
  Antisense strand to SEQ ID NO: 774512
uuaacaagaacccucagug

SEQ ID NO: 774514 - RNA, 19 nt, Artificial Sequence
  Description of Artificial Sequence: Synthetic oligonucleotide
  Sense strand starting at position 3890 of SEQ ID NO: 587203
auucuauuggucuggugau

SEQ ID NO: 774515 - RNA, 19 nt, Artificial Sequence
  Description of Artificial Sequence: Synthetic oligonucleotide
  Antisense strand to SEQ ID NO: 774514
aucaccagaccaauagaau

SEQ ID NO: 774516 - RNA, 19 nt, Artificial Sequence
  Description of Artificial Sequence: Synthetic oligonucleotide
  Sense strand starting at position 91 of SEQ ID NO: 587204
ucaguauuacuuugugucu

SEQ ID NO: 774517 - RNA, 19 nt, Artificial Sequence
  Description of Artificial Sequence: Synthetic oligonucleotide
  Antisense strand to SEQ ID NO: 774516
agacacaaaguaauacuga

SEQ ID NO: 774518 - RNA, 19 nt, Artificial Sequence
  Description of Artificial Sequence: Synthetic oligonucleotide
  Sense strand starting at position 92 of SEQ ID NO: 587204
caguauuacuuugugucuu

SEQ ID NO: 774519 - RNA, 19 nt, Artificial Sequence
  Description of Artificial Sequence: Synthetic oligonucleotide
  Antisense strand to SEQ ID NO: 774518
aagacacaaaguaauacug

SEQ ID NO: 774520 - RNA, 19 nt, Artificial Sequence
  Description of Artificial Sequence: Synthetic oligonucleotide
  Sense strand starting at position 470 of SEQ ID NO: 587204
cggcccuguugaucauaua

SEQ ID NO: 774521 - RNA, 19 nt, Artificial Sequence
  Description of Artificial Sequence: Synthetic oligonucleotide
  Antisense strand to SEQ ID NO: 774520
uauaugaucaacagggccg

SEQ ID NO: 774522 - RNA, 19 nt, Artificial Sequence
  Description of Artificial Sequence: Synthetic oligonucleotide
  Sense strand starting at position 471 of SEQ ID NO: 587204
ggcccuguugaucauauau

SEQ ID NO: 774523 - RNA, 19 nt, Artificial Sequence
  Description of Artificial Sequence: Synthetic oligonucleotide
  Antisense strand to SEQ ID NO: 774522
auauaugaucaacagggcc

SEQ ID NO: 774524 - RNA, 19 nt, Artificial Sequence
  Description of Artificial Sequence: Synthetic oligonucleotide
  Sense strand starting at position 473 of SEQ ID NO: 587204
cccuguugaucauauaugu

SEQ ID NO: 774525 - RNA, 19 nt, Artificial Sequence
  Description of Artificial Sequence: Synthetic oligonucleotide
  Antisense strand to SEQ ID NO: 774524
acauauaugaucaacaggg

SEQ ID NO: 774526 - RNA, 19 nt, Artificial Sequence
  Description of Artificial Sequence: Synthetic oligonucleotide
  Sense strand starting at position 527 of SEQ ID NO: 587204
gucugaaugucacaaguuu

SEQ ID NO: 774527 - RNA, 19 nt, Artificial Sequence
  Description of Artificial Sequence: Synthetic oligonucleotide
  Antisense strand to SEQ ID NO: 774526
aaacuugugacauucagac

SEQ ID NO: 774528 - RNA, 19 nt, Artificial Sequence
  Description of Artificial Sequence: Synthetic oligonucleotide
  Sense strand starting at position 535 of SEQ ID NO: 587204
gucacaaguuuguuuguuu

SEQ ID NO: 774529 - RNA, 19 nt, Artificial Sequence
  Description of Artificial Sequence: Synthetic oligonucleotide
  Antisense strand to SEQ ID NO: 774528
aaacaaacaaacuugugac

SEQ ID NO: 774530 - RNA, 19 nt, Artificial Sequence
  Description of Artificial Sequence: Synthetic oligonucleotide
  Sense strand starting at position 837 of SEQ ID NO: 587204
gccugaaugucacaaguuu

SEQ ID NO: 774531 - RNA, 19 nt, Artificial Sequence
  Description of Artificial Sequence: Synthetic oligonucleotide
  Antisense strand to SEQ ID NO: 774530
aaacuugugacauucaggc

SEQ ID NO: 774532 - RNA, 19 nt, Artificial Sequence
  Description of Artificial Sequence: Synthetic oligonucleotide
  Sense strand starting at position 895 of SEQ ID NO: 587204
gucugugauuuggcuguuu

SEQ ID NO: 774533 - RNA, 19 nt, Artificial Sequence
  Description of Artificial Sequence: Synthetic oligonucleotide
  Antisense strand to SEQ ID NO: 774532
aaacagccaaaucacagac

SEQ ID NO: 774534 - RNA, 19 nt, Artificial Sequence
  Description of Artificial Sequence: Synthetic oligonucleotide
  Sense strand starting at position 897 of SEQ ID NO: 587204
cugugauuuggcuguuuau

SEQ ID NO: 774535 - RNA, 19 nt, Artificial Sequence
  Description of Artificial Sequence: Synthetic oligonucleotide
  Antisense strand to SEQ ID NO: 774534
auaaacagccaaaucacag

SEQ ID NO: 774536 - RNA, 19 nt, Artificial Sequence
  Description of Artificial Sequence: Synthetic oligonucleotide
  Sense strand starting at position 900 of SEQ ID NO: 587204
ugauuuggcuguuuauauc

SEQ ID NO: 774537 - RNA, 19 nt, Artificial Sequence
  Description of Artificial Sequence: Synthetic oligonucleotide
  Antisense strand to SEQ ID NO: 774536
gauauaaacagccaaauca

SEQ ID NO: 774538 - RNA, 19 nt, Artificial Sequence
  Description of Artificial Sequence: Synthetic oligonucleotide
  Sense strand starting at position 1380 of SEQ ID NO: 587204
cccaaaucacgcuagacaa

SEQ ID NO: 774539 - RNA, 19 nt, Artificial Sequence
  Description of Artificial Sequence: Synthetic oligonucleotide
  Antisense strand to SEQ ID NO: 774538
uugucuagcgugauuuggg

SEQ ID NO: 774540 - RNA, 19 nt, Artificial Sequence
  Description of Artificial Sequence: Synthetic oligonucleotide
  Sense strand starting at position 1460 of SEQ ID NO: 587204
uuggaacaguuguucugau

SEQ ID NO: 774541 - RNA, 19 nt, Artificial Sequence
  Description of Artificial Sequence: Synthetic oligonucleotide
  Antisense strand to SEQ ID NO: 774540
aucagaacaacuguuccaa

SEQ ID NO: 774542 - RNA, 19 nt, Artificial Sequence
  Description of Artificial Sequence: Synthetic oligonucleotide
  Sense strand starting at position 1461 of SEQ ID NO: 587204
uggaacaguuguucugauu

SEQ ID NO: 774543 - RNA, 19 nt, Artificial Sequence
  Description of Artificial Sequence: Synthetic oligonucleotide
  Antisense strand to SEQ ID NO: 774542
aaucagaacaacuguucca

SEQ ID NO: 774544 - RNA, 19 nt, Artificial Sequence
  Description of Artificial Sequence: Synthetic oligonucleotide
  Sense strand starting at position 1470 of SEQ ID NO: 587204
uguucugauuucggugacu

SEQ ID NO: 774545 - RNA, 19 nt, Artificial Sequence
  Description of Artificial Sequence: Synthetic oligonucleotide
  Antisense strand to SEQ ID NO: 774544
agucaccgaaaucagaaca

SEQ ID NO: 774546 - RNA, 19 nt, Artificial Sequence
  Description of Artificial Sequence: Synthetic oligonucleotide
  Sense strand starting at position 1479 of SEQ ID NO: 587204
uucggugacuaugauguaa

SEQ ID NO: 774547 - RNA, 19 nt, Artificial Sequence
  Description of Artificial Sequence: Synthetic oligonucleotide
  Antisense strand to SEQ ID NO: 774546
uuacaucauagucaccgaa

SEQ ID NO: 774548 - RNA, 19 nt, Artificial Sequence
  Description of Artificial Sequence: Synthetic oligonucleotide
  Sense strand starting at position 1500 of SEQ ID NO: 587204
cugguugaccuguaacauc

SEQ ID NO: 774549 - RNA, 19 nt, Artificial Sequence
  Description of Artificial Sequence: Synthetic oligonucleotide
  Antisense strand to SEQ ID NO: 774548
gauguuacaggucaaccag

SEQ ID NO: 774550 - RNA, 19 nt, Artificial Sequence
  Description of Artificial Sequence: Synthetic oligonucleotide
  Sense strand starting at position 2612 of SEQ ID NO: 587204
gcuccuuccuuagcagaga

SEQ ID NO: 774551 - RNA, 19 nt, Artificial Sequence
  Description of Artificial Sequence: Synthetic oligonucleotide
  Antisense strand to SEQ ID NO: 774550
ucucugcuaaggaaggagc

SEQ ID NO: 774552 - RNA, 19 nt, Artificial Sequence
  Description of Artificial Sequence: Synthetic oligonucleotide
  Sense strand starting at position 2613 of SEQ ID NO: 587204
cuccuuccuuagcagagaa

SEQ ID NO: 774553 - RNA, 19 nt, Artificial Sequence
  Description of Artificial Sequence: Synthetic oligonucleotide
  Antisense strand to SEQ ID NO: 774552
uucucugcuaaggaaggag

SEQ ID NO: 774554 - RNA, 19 nt, Artificial Sequence
  Description of Artificial Sequence: Synthetic oligonucleotide
  Sense strand starting at position 2870 of SEQ ID NO: 587204
uggcgauugucuccagaaa

SEQ ID NO: 774555 - RNA, 19 nt, Artificial Sequence
  Description of Artificial Sequence: Synthetic oligonucleotide
  Antisense strand to SEQ ID NO: 774554
uuucuggagacaaucgcca

SEQ ID NO: 774556 - RNA, 19 nt, Artificial Sequence
  Description of Artificial Sequence: Synthetic oligonucleotide
  Sense strand starting at position 2894 of SEQ ID NO: 587204
ccucgcauucugucuuagu

SEQ ID NO: 774557 - RNA, 19 nt, Artificial Sequence
  Description of Artificial Sequence: Synthetic oligonucleotide
  Antisense strand to SEQ ID NO: 774556
acuaagacagaaugcgagg

SEQ ID NO: 774558 - RNA, 19 nt, Artificial Sequence
  Description of Artificial Sequence: Synthetic oligonucleotide
  Sense strand starting at position 2908 of SEQ ID NO: 587204
uuagucaugucuuaggugu

SEQ ID NO: 774559 - RNA, 19 nt, Artificial Sequence
  Description of Artificial Sequence: Synthetic oligonucleotide
  Antisense strand to SEQ ID NO: 774558
acaccuaagacaugacuaa

SEQ ID NO: 774560 - RNA, 19 nt, Artificial Sequence
  Description of Artificial Sequence: Synthetic oligonucleotide
  Sense strand starting at position 2910 of SEQ ID NO: 587204
agucaugucuuagguguca

SEQ ID NO: 774561 - RNA, 19 nt, Artificial Sequence
  Description of Artificial Sequence: Synthetic oligonucleotide
  Antisense strand to SEQ ID NO: 774560
ugacaccuaagacaugacu

SEQ ID NO: 774562 - RNA, 19 nt, Artificial Sequence
  Description of Artificial Sequence: Synthetic oligonucleotide
  Sense strand starting at position 2950 of SEQ ID NO: 587204
guguguaguuuggagagga

SEQ ID NO: 774563 - RNA, 19 nt, Artificial Sequence
  Description of Artificial Sequence: Synthetic oligonucleotide
  Antisense strand to SEQ ID NO: 774562
uccucuccaaacuacacac

SEQ ID NO: 774564 - RNA, 19 nt, Artificial Sequence
  Description of Artificial Sequence: Synthetic oligonucleotide
  Sense strand starting at position 2951 of SEQ ID NO: 587204
uguguaguuuggagaggau

SEQ ID NO: 774565 - RNA, 19 nt, Artificial Sequence
  Description of Artificial Sequence: Synthetic oligonucleotide
  Antisense strand to SEQ ID NO: 774564
auccucuccaaacuacaca

SEQ ID NO: 774566 - RNA, 19 nt, Artificial Sequence
  Description of Artificial Sequence: Synthetic oligonucleotide
  Sense strand starting at position 2966 of SEQ ID NO: 587204
ggaugugcauaagaaauaa

SEQ ID NO: 774567 - RNA, 19 nt, Artificial Sequence
  Description of Artificial Sequence: Synthetic oligonucleotide
  Antisense strand to SEQ ID NO: 774566
uuauuucuuaugcacaucc

SEQ ID NO: 774568 - RNA, 19 nt, Artificial Sequence
  Description of Artificial Sequence: Synthetic oligonucleotide
  Sense strand starting at position 3009 of SEQ ID NO: 587204
gcauauacgcaucuguguu

SEQ ID NO: 774569 - RNA, 19 nt, Artificial Sequence
  Description of Artificial Sequence: Synthetic oligonucleotide
  Antisense strand to SEQ ID NO: 774568
aacacagaugcguauaugc

SEQ ID NO: 774570 - RNA, 19 nt, Artificial Sequence
  Description of Artificial Sequence: Synthetic oligonucleotide
  Sense strand starting at position 3016 of SEQ ID NO: 587204
cgcaucuguguuugccaca

SEQ ID NO: 774571 - RNA, 19 nt, Artificial Sequence
  Description of Artificial Sequence: Synthetic oligonucleotide
  Antisense strand to SEQ ID NO: 774570
uguggcaaacacagaugcg

SEQ ID NO: 774572 - RNA, 19 nt, Artificial Sequence
  Description of Artificial Sequence: Synthetic oligonucleotide
  Sense strand starting at position 3019 of SEQ ID NO: 587204
aucuguguuugccacagaa

SEQ ID NO: 774573 - RNA, 19 nt, Artificial Sequence
  Description of Artificial Sequence: Synthetic oligonucleotide
  Antisense strand to SEQ ID NO: 774572
uucuguggcaaacacagau

SEQ ID NO: 774574 - RNA, 19 nt, Artificial Sequence
  Description of Artificial Sequence: Synthetic oligonucleotide
  Sense strand starting at position 3021 of SEQ ID NO: 587204
cuguguuugccacagaauc

SEQ ID NO: 774575 - RNA, 19 nt, Artificial Sequence
  Description of Artificial Sequence: Synthetic oligonucleotide
  Antisense strand to SEQ ID NO: 774574
gauucuguggcaaacacag

SEQ ID NO: 774576 - RNA, 19 nt, Artificial Sequence
  Description of Artificial Sequence: Synthetic oligonucleotide
  Sense strand starting at position 3023 of SEQ ID NO: 587204
guguuugccacagaaucgu

SEQ ID NO: 774577 - RNA, 19 nt, Artificial Sequence
  Description of Artificial Sequence: Synthetic oligonucleotide
  Antisense strand to SEQ ID NO: 774576
acgauucuguggcaaacac

SEQ ID NO: 774578 - RNA, 19 nt, Artificial Sequence
  Description of Artificial Sequence: Synthetic oligonucleotide
  Sense strand starting at position 3027 of SEQ ID NO: 587204
uugccacagaaucgugaaa

SEQ ID NO: 774579 - RNA, 19 nt, Artificial Sequence
  Description of Artificial Sequence: Synthetic oligonucleotide
  Antisense strand to SEQ ID NO: 774578
uuucacgauucuguggcaa

SEQ ID NO: 774580 - RNA, 19 nt, Artificial Sequence
  Description of Artificial Sequence: Synthetic oligonucleotide
  Sense strand starting at position 3029 of SEQ ID NO: 587204
gccacagaaucgugaaaug

SEQ ID NO: 774581 - RNA, 19 nt, Artificial Sequence
  Description of Artificial Sequence: Synthetic oligonucleotide
  Antisense strand to SEQ ID NO: 774580
cauuucacgauucuguggc

SEQ ID NO: 774582 - RNA, 19 nt, Artificial Sequence
  Description of Artificial Sequence: Synthetic oligonucleotide
  Sense strand starting at position 3034 of SEQ ID NO: 587204
agaaucgugaaauguacau

SEQ ID NO: 774583 - RNA, 19 nt, Artificial Sequence
  Description of Artificial Sequence: Synthetic oligonucleotide
  Antisense strand to SEQ ID NO: 774582
auguacauuucacgauucu

SEQ ID NO: 774584 - RNA, 19 nt, Artificial Sequence
  Description of Artificial Sequence: Synthetic oligonucleotide
  Sense strand starting at position 3053 of SEQ ID NO: 587204
gcaccuuacuguuuaacgu

SEQ ID NO: 774585 - RNA, 19 nt, Artificial Sequence
  Description of Artificial Sequence: Synthetic oligonucleotide
  Antisense strand to SEQ ID NO: 774584
acguuaaacaguaaggugc

SEQ ID NO: 774586 - RNA, 19 nt, Artificial Sequence
  Description of Artificial Sequence: Synthetic oligonucleotide
  Sense strand starting at position 3081 of SEQ ID NO: 587204
uuacaacuguuauacagua

SEQ ID NO: 774587 - RNA, 19 nt, Artificial Sequence
  Description of Artificial Sequence: Synthetic oligonucleotide
  Antisense strand to SEQ ID NO: 774586
uacuguauaacaguuguaa

SEQ ID NO: 774588 - RNA, 19 nt, Artificial Sequence
  Description of Artificial Sequence: Synthetic oligonucleotide
  Sense strand starting at position 3086 of SEQ ID NO: 587204
acuguuauacaguacaauu

SEQ ID NO: 774589 - RNA, 19 nt, Artificial Sequence
  Description of Artificial Sequence: Synthetic oligonucleotide
  Antisense strand to SEQ ID NO: 774588
aauuguacuguauaacagu

SEQ ID NO: 774590 - RNA, 19 nt, Artificial Sequence
  Description of Artificial Sequence: Synthetic oligonucleotide
  Sense strand starting at position 3663 of SEQ ID NO: 587204
ucccgaaguguauacagua

SEQ ID NO: 774591 - RNA, 19 nt, Artificial Sequence
  Description of Artificial Sequence: Synthetic oligonucleotide
  Antisense strand to SEQ ID NO: 774590
uacuguauacacuucggga

SEQ ID NO: 774592 - RNA, 19 nt, Artificial Sequence
  Description of Artificial Sequence: Synthetic oligonucleotide
  Sense strand starting at position 3693 of SEQ ID NO: 587204
uguauacugcuaugaacuu

SEQ ID NO: 774593 - RNA, 19 nt, Artificial Sequence
  Description of Artificial Sequence: Synthetic oligonucleotide
  Antisense strand to SEQ ID NO: 774592
aaguucauagcaguauaca

SEQ ID NO: 774594 - RNA, 19 nt, Artificial Sequence
  Description of Artificial Sequence: Synthetic oligonucleotide
  Sense strand starting at position 3694 of SEQ ID NO: 587204
guauacugcuaugaacuuu

SEQ ID NO: 774595 - RNA, 19 nt, Artificial Sequence
  Description of Artificial Sequence: Synthetic oligonucleotide
  Antisense strand to SEQ ID NO: 774594
aaaguucauagcaguauac

SEQ ID NO: 774596 - RNA, 19 nt, Artificial Sequence
  Description of Artificial Sequence: Synthetic oligonucleotide
  Sense strand starting at position 47 of SEQ ID NO: 587205
cgcccaguuguuuguaguu

SEQ ID NO: 774597 - RNA, 19 nt, Artificial Sequence
  Description of Artificial Sequence: Synthetic oligonucleotide
  Antisense strand to SEQ ID NO: 774596
aacuacaaacaacugggcg

SEQ ID NO: 774598 - RNA, 19 nt, Artificial Sequence
  Description of Artificial Sequence: Synthetic oligonucleotide
  Sense strand starting at position 737 of SEQ ID NO: 587205
uacugaauguguuugugaa

SEQ ID NO: 774599 - RNA, 19 nt, Artificial Sequence
  Description of Artificial Sequence: Synthetic oligonucleotide
  Antisense strand to SEQ ID NO: 774598
uucacaaacacauucagua

SEQ ID NO: 774600 - RNA, 19 nt, Artificial Sequence
  Description of Artificial Sequence: Synthetic oligonucleotide
  Sense strand starting at position 738 of SEQ ID NO: 587205
acugaauguguuugugaag

SEQ ID NO: 774601 - RNA, 19 nt, Artificial Sequence
  Description of Artificial Sequence: Synthetic oligonucleotide
  Antisense strand to SEQ ID NO: 774600
cuucacaaacacauucagu

SEQ ID NO: 774602 - RNA, 19 nt, Artificial Sequence
  Description of Artificial Sequence: Synthetic oligonucleotide
  Sense strand starting at position 741 of SEQ ID NO: 587205
gaauguguuugugaaggcu

SEQ ID NO: 774603 - RNA, 19 nt, Artificial Sequence
  Description of Artificial Sequence: Synthetic oligonucleotide
  Antisense strand to SEQ ID NO: 774602
agccuucacaaacacauuc

SEQ ID NO: 774604 - RNA, 19 nt, Artificial Sequence
  Description of Artificial Sequence: Synthetic oligonucleotide
  Sense strand starting at position 743 of SEQ ID NO: 587205
auguguuugugaaggcugu

SEQ ID NO: 774605 - RNA, 19 nt, Artificial Sequence
  Description of Artificial Sequence: Synthetic oligonucleotide
  Antisense strand to SEQ ID NO: 774604
acagccuucacaaacacau

SEQ ID NO: 774606 - RNA, 19 nt, Artificial Sequence
  Description of Artificial Sequence: Synthetic oligonucleotide
  Sense strand starting at position 759 of SEQ ID NO: 587205
ugugcaucugaaugucaga

SEQ ID NO: 774607 - RNA, 19 nt, Artificial Sequence
  Description of Artificial Sequence: Synthetic oligonucleotide
  Antisense strand to SEQ ID NO: 774606
ucugacauucagaugcaca

SEQ ID NO: 774608 - RNA, 19 nt, Artificial Sequence
  Description of Artificial Sequence: Synthetic oligonucleotide
  Sense strand starting at position 762 of SEQ ID NO: 587205
gcaucugaaugucagacuu

SEQ ID NO: 774609 - RNA, 19 nt, Artificial Sequence
  Description of Artificial Sequence: Synthetic oligonucleotide
  Antisense strand to SEQ ID NO: 774608
aagucugacauucagaugc

SEQ ID NO: 774610 - RNA, 19 nt, Artificial Sequence
  Description of Artificial Sequence: Synthetic oligonucleotide
  Sense strand starting at position 770 of SEQ ID NO: 587205
augucagacuugcuaauga

SEQ ID NO: 774611 - RNA, 19 nt, Artificial Sequence
  Description of Artificial Sequence: Synthetic oligonucleotide
  Antisense strand to SEQ ID NO: 774610
ucauuagcaagucugacau

SEQ ID NO: 774612 - RNA, 19 nt, Artificial Sequence
  Description of Artificial Sequence: Synthetic oligonucleotide
  Sense strand starting at position 1202 of SEQ ID NO: 587205
ucgagauuggcccauugua

SEQ ID NO: 774613 - RNA, 19 nt, Artificial Sequence
  Description of Artificial Sequence: Synthetic oligonucleotide
  Antisense strand to SEQ ID NO: 774612
uacaaugggccaaucucga

SEQ ID NO: 774614 - RNA, 19 nt, Artificial Sequence
  Description of Artificial Sequence: Synthetic oligonucleotide
  Sense strand starting at position 1210 of SEQ ID NO: 587205
ggcccauuguacuccaaac

SEQ ID NO: 774615 - RNA, 19 nt, Artificial Sequence
  Description of Artificial Sequence: Synthetic oligonucleotide
  Antisense strand to SEQ ID NO: 774614
guuuggaguacaaugggcc

SEQ ID NO: 774616 - RNA, 19 nt, Artificial Sequence
  Description of Artificial Sequence: Synthetic oligonucleotide
  Sense strand starting at position 1237 of SEQ ID NO: 587205
agaguaacacuucgucuca

SEQ ID NO: 774617 - RNA, 19 nt, Artificial Sequence
  Description of Artificial Sequence: Synthetic oligonucleotide
  Antisense strand to SEQ ID NO: 774616
ugagacgaaguguuacucu

SEQ ID NO: 774618 - RNA, 19 nt, Artificial Sequence
  Description of Artificial Sequence: Synthetic oligonucleotide
  Sense strand starting at position 1238 of SEQ ID NO: 587205
gaguaacacuucgucucaa

SEQ ID NO: 774619 - RNA, 19 nt, Artificial Sequence
  Description of Artificial Sequence: Synthetic oligonucleotide
  Antisense strand to SEQ ID NO: 774618
uugagacgaaguguuacuc

SEQ ID NO: 774620 - RNA, 19 nt, Artificial Sequence
  Description of Artificial Sequence: Synthetic oligonucleotide
  Sense strand starting at position 1239 of SEQ ID NO: 587205
aguaacacuucgucucaaa

SEQ ID NO: 774621 - RNA, 19 nt, Artificial Sequence
  Description of Artificial Sequence: Synthetic oligonucleotide
  Antisense strand to SEQ ID NO: 774620
uuugagacgaaguguuacu

SEQ ID NO: 774622 - RNA, 19 nt, Artificial Sequence
  Description of Artificial Sequence: Synthetic oligonucleotide
  Sense strand starting at position 1367 of SEQ ID NO: 587205
gcugauccagcucgacuua

SEQ ID NO: 774623 - RNA, 19 nt, Artificial Sequence
  Description of Artificial Sequence: Synthetic oligonucleotide
  Antisense strand to SEQ ID NO: 774622
uaagucgagcuggaucagc

SEQ ID NO: 774624 - RNA, 19 nt, Artificial Sequence
  Description of Artificial Sequence: Synthetic oligonucleotide
  Sense strand starting at position 1393 of SEQ ID NO: 587205
aggaaugcaaguugauaau

SEQ ID NO: 774625 - RNA, 19 nt, Artificial Sequence
  Description of Artificial Sequence: Synthetic oligonucleotide
  Antisense strand to SEQ ID NO: 774624
auuaucaacuugcauuccu

SEQ ID NO: 774626 - RNA, 19 nt, Artificial Sequence
  Description of Artificial Sequence: Synthetic oligonucleotide
  Sense strand starting at position 1402 of SEQ ID NO: 587205
aguugauaauggccaauua

SEQ ID NO: 774627 - RNA, 19 nt, Artificial Sequence
  Description of Artificial Sequence: Synthetic oligonucleotide
  Antisense strand to SEQ ID NO: 774626
uaauuggccauuaucaacu

SEQ ID NO: 774628 - RNA, 19 nt, Artificial Sequence
  Description of Artificial Sequence: Synthetic oligonucleotide
  Sense strand starting at position 1468 of SEQ ID NO: 587205
ggaacaauuugccagcugu

SEQ ID NO: 774629 - RNA, 19 nt, Artificial Sequence
  Description of Artificial Sequence: Synthetic oligonucleotide
  Antisense strand to SEQ ID NO: 774628
acagcuggcaaauuguucc

SEQ ID NO: 774630 - RNA, 19 nt, Artificial Sequence
  Description of Artificial Sequence: Synthetic oligonucleotide
  Sense strand starting at position 1478 of SEQ ID NO: 587205
gccagcuguuccucugcau

SEQ ID NO: 774631 - RNA, 19 nt, Artificial Sequence
  Description of Artificial Sequence: Synthetic oligonucleotide
  Antisense strand to SEQ ID NO: 774630
augcagaggaacagcuggc

SEQ ID NO: 774632 - RNA, 19 nt, Artificial Sequence
  Description of Artificial Sequence: Synthetic oligonucleotide
  Sense strand starting at position 2068 of SEQ ID NO: 587205
ucacgacucucuugucaga

SEQ ID NO: 774633 - RNA, 19 nt, Artificial Sequence
  Description of Artificial Sequence: Synthetic oligonucleotide
  Antisense strand to SEQ ID NO: 774632
ucugacaagagagucguga

SEQ ID NO: 774634 - RNA, 19 nt, Artificial Sequence
  Description of Artificial Sequence: Synthetic oligonucleotide
  Sense strand starting at position 2070 of SEQ ID NO: 587205
acgacucucuugucagaca

SEQ ID NO: 774635 - RNA, 19 nt, Artificial Sequence
  Description of Artificial Sequence: Synthetic oligonucleotide
  Antisense strand to SEQ ID NO: 774634
ugucugacaagagagucgu

SEQ ID NO: 774636 - RNA, 19 nt, Artificial Sequence
  Description of Artificial Sequence: Synthetic oligonucleotide
  Sense strand starting at position 2071 of SEQ ID NO: 587205
cgacucucuugucagacaa

SEQ ID NO: 774637 - RNA, 19 nt, Artificial Sequence
  Description of Artificial Sequence: Synthetic oligonucleotide
  Antisense strand to SEQ ID NO: 774636
uugucugacaagagagucg

SEQ ID NO: 774638 - RNA, 19 nt, Artificial Sequence
  Description of Artificial Sequence: Synthetic oligonucleotide
  Sense strand starting at position 2073 of SEQ ID NO: 587205
acucucuugucagacaaag

SEQ ID NO: 774639 - RNA, 19 nt, Artificial Sequence
  Description of Artificial Sequence: Synthetic oligonucleotide
  Antisense strand to SEQ ID NO: 774638
cuuugucugacaagagagu

SEQ ID NO: 774640 - RNA, 19 nt, Artificial Sequence
  Description of Artificial Sequence: Synthetic oligonucleotide
  Sense strand starting at position 2175 of SEQ ID NO: 587205
gagagagucacgugaugga

SEQ ID NO: 774641 - RNA, 19 nt, Artificial Sequence
  Description of Artificial Sequence: Synthetic oligonucleotide
  Antisense strand to SEQ ID NO: 774640
uccaucacgugacucucuc

SEQ ID NO: 774642 - RNA, 19 nt, Artificial Sequence
  Description of Artificial Sequence: Synthetic oligonucleotide
  Sense strand starting at position 2209 of SEQ ID NO: 587205
ccuguuuaaucguaacaua

SEQ ID NO: 774643 - RNA, 19 nt, Artificial Sequence
  Description of Artificial Sequence: Synthetic oligonucleotide
  Antisense strand to SEQ ID NO: 774642
uauguuacgauuaaacagg

SEQ ID NO: 774644 - RNA, 19 nt, Artificial Sequence
  Description of Artificial Sequence: Synthetic oligonucleotide
  Sense strand starting at position 2255 of SEQ ID NO: 587205
cgacacaauucguuucuuu

SEQ ID NO: 774645 - RNA, 19 nt, Artificial Sequence
  Description of Artificial Sequence: Synthetic oligonucleotide
  Antisense strand to SEQ ID NO: 774644
aaagaaacgaauugugucg

SEQ ID NO: 774646 - RNA, 19 nt, Artificial Sequence
  Description of Artificial Sequence: Synthetic oligonucleotide
  Sense strand starting at position 2293 of SEQ ID NO: 587205
ggaguaagguuaucagaua

SEQ ID NO: 774647 - RNA, 19 nt, Artificial Sequence
  Description of Artificial Sequence: Synthetic oligonucleotide
  Antisense strand to SEQ ID NO: 774646
uaucugauaaccuuacucc

SEQ ID NO: 774648 - RNA, 19 nt, Artificial Sequence
  Description of Artificial Sequence: Synthetic oligonucleotide
  Sense strand starting at position 2294 of SEQ ID NO: 587205
gaguaagguuaucagauaa

SEQ ID NO: 774649 - RNA, 19 nt, Artificial Sequence
  Description of Artificial Sequence: Synthetic oligonucleotide
  Antisense strand to SEQ ID NO: 774648
uuaucugauaaccuuacuc

SEQ ID NO: 774650 - RNA, 19 nt, Artificial Sequence
  Description of Artificial Sequence: Synthetic oligonucleotide
  Sense strand starting at position 2380 of SEQ ID NO: 587205
ggcggaucaggucaagaga

SEQ ID NO: 774651 - RNA, 19 nt, Artificial Sequence
  Description of Artificial Sequence: Synthetic oligonucleotide
  Antisense strand to SEQ ID NO: 774650
ucucuugaccugauccgcc

SEQ ID NO: 774652 - RNA, 19 nt, Artificial Sequence
  Description of Artificial Sequence: Synthetic oligonucleotide
  Sense strand starting at position 2399 of SEQ ID NO: 587205
uuuagaucauccuggccaa

SEQ ID NO: 774653 - RNA, 19 nt, Artificial Sequence
  Description of Artificial Sequence: Synthetic oligonucleotide
  Antisense strand to SEQ ID NO: 774652
uuggccaggaugaucuaaa

SEQ ID NO: 774654 - RNA, 19 nt, Artificial Sequence
  Description of Artificial Sequence: Synthetic oligonucleotide
  Sense strand starting at position 2951 of SEQ ID NO: 587205
aggauaauuguguggcuua

SEQ ID NO: 774655 - RNA, 19 nt, Artificial Sequence
  Description of Artificial Sequence: Synthetic oligonucleotide
  Antisense strand to SEQ ID NO: 774654
uaagccacacaauuauccu

SEQ ID NO: 774656 - RNA, 19 nt, Artificial Sequence
  Description of Artificial Sequence: Synthetic oligonucleotide
  Sense strand starting at position 2952 of SEQ ID NO: 587205
ggauaauuguguggcuuau

SEQ ID NO: 774657 - RNA, 19 nt, Artificial Sequence
  Description of Artificial Sequence: Synthetic oligonucleotide
  Antisense strand to SEQ ID NO: 774656
auaagccacacaauuaucc

SEQ ID NO: 774658 - RNA, 19 nt, Artificial Sequence
  Description of Artificial Sequence: Synthetic oligonucleotide
  Sense strand starting at position 2954 of SEQ ID NO: 587205
auaauuguguggcuuaugu

SEQ ID NO: 774659 - RNA, 19 nt, Artificial Sequence
  Description of Artificial Sequence: Synthetic oligonucleotide
  Antisense strand to SEQ ID NO: 774658
acauaagccacacaauuau

SEQ ID NO: 774660 - RNA, 19 nt, Artificial Sequence
  Description of Artificial Sequence: Synthetic oligonucleotide
  Sense strand starting at position 2956 of SEQ ID NO: 587205
aauuguguggcuuauguaa

SEQ ID NO: 774661 - RNA, 19 nt, Artificial Sequence
  Description of Artificial Sequence: Synthetic oligonucleotide
  Antisense strand to SEQ ID NO: 774660
uuacauaagccacacaauu

SEQ ID NO: 774662 - RNA, 19 nt, Artificial Sequence
  Description of Artificial Sequence: Synthetic oligonucleotide
  Sense strand starting at position 2958 of SEQ ID NO: 587205
uuguguggcuuauguaaau

SEQ ID NO: 774663 - RNA, 19 nt, Artificial Sequence
  Description of Artificial Sequence: Synthetic oligonucleotide
  Antisense strand to SEQ ID NO: 774662
auuuacauaagccacacaa

SEQ ID NO: 774664 - RNA, 19 nt, Artificial Sequence
  Description of Artificial Sequence: Synthetic oligonucleotide
  Sense strand starting at position 3464 of SEQ ID NO: 587205
guccaugcguucucaauau

SEQ ID NO: 774665 - RNA, 19 nt, Artificial Sequence
  Description of Artificial Sequence: Synthetic oligonucleotide
  Antisense strand to SEQ ID NO: 774664
auauugagaacgcauggac

SEQ ID NO: 774666 - RNA, 19 nt, Artificial Sequence
  Description of Artificial Sequence: Synthetic oligonucleotide
  Sense strand starting at position 3722 of SEQ ID NO: 587205
acauauguguguuggcuga

SEQ ID NO: 774667 - RNA, 19 nt, Artificial Sequence
  Description of Artificial Sequence: Synthetic oligonucleotide
  Antisense strand to SEQ ID NO: 774666
ucagccaacacacauaugu

SEQ ID NO: 774668 - RNA, 19 nt, Artificial Sequence
  Description of Artificial Sequence: Synthetic oligonucleotide
  Sense strand starting at position 3724 of SEQ ID NO: 587205
auauguguguuggcugagu

SEQ ID NO: 774669 - RNA, 19 nt, Artificial Sequence
  Description of Artificial Sequence: Synthetic oligonucleotide
  Antisense strand to SEQ ID NO: 774668
acucagccaacacacauau

SEQ ID NO: 774670 - RNA, 19 nt, Artificial Sequence
  Description of Artificial Sequence: Synthetic oligonucleotide
  Sense strand starting at position 254 of SEQ ID NO: 587206
auaauauguucugcccaag

SEQ ID NO: 774671 - RNA, 19 nt, Artificial Sequence
  Description of Artificial Sequence: Synthetic oligonucleotide
  Antisense strand to SEQ ID NO: 774670
cuugggcagaacauauuau

SEQ ID NO: 774672 - RNA, 19 nt, Artificial Sequence
  Description of Artificial Sequence: Synthetic oligonucleotide
  Sense strand starting at position 257 of SEQ ID NO: 587206
auauguucugcccaagaua

SEQ ID NO: 774673 - RNA, 19 nt, Artificial Sequence
  Description of Artificial Sequence: Synthetic oligonucleotide
  Antisense strand to SEQ ID NO: 774672
uaucuugggcagaacauau

SEQ ID NO: 774674 - RNA, 19 nt, Artificial Sequence
  Description of Artificial Sequence: Synthetic oligonucleotide
  Sense strand starting at position 283 of SEQ ID NO: 587206
aaagguugcgcuuagcaaa

SEQ ID NO: 774675 - RNA, 19 nt, Artificial Sequence
  Description of Artificial Sequence: Synthetic oligonucleotide
  Antisense strand to SEQ ID NO: 774674
uuugcuaagcgcaaccuuu

SEQ ID NO: 774676 - RNA, 19 nt, Artificial Sequence
  Description of Artificial Sequence: Synthetic oligonucleotide
  Sense strand starting at position 305 of SEQ ID NO: 587206
ugauucucccaaugaguuc

SEQ ID NO: 774677 - RNA, 19 nt, Artificial Sequence
  Description of Artificial Sequence: Synthetic oligonucleotide
  Antisense strand to SEQ ID NO: 774676
gaacucauugggagaauca

SEQ ID NO: 774678 - RNA, 19 nt, Artificial Sequence
  Description of Artificial Sequence: Synthetic oligonucleotide
  Sense strand starting at position 614 of SEQ ID NO: 587206
gagaccucuuguuuguaca

SEQ ID NO: 774679 - RNA, 19 nt, Artificial Sequence
  Description of Artificial Sequence: Synthetic oligonucleotide
  Antisense strand to SEQ ID NO: 774678
uguacaaacaagaggucuc

SEQ ID NO: 774680 - RNA, 19 nt, Artificial Sequence
  Description of Artificial Sequence: Synthetic oligonucleotide
  Sense strand starting at position 615 of SEQ ID NO: 587206
agaccucuuguuuguacaa

SEQ ID NO: 774681 - RNA, 19 nt, Artificial Sequence
  Description of Artificial Sequence: Synthetic oligonucleotide
  Antisense strand to SEQ ID NO: 774680
uuguacaaacaagaggucu

SEQ ID NO: 774682 - RNA, 19 nt, Artificial Sequence
  Description of Artificial Sequence: Synthetic oligonucleotide
  Sense strand starting at position 644 of SEQ ID NO: 587206
ucauaacuggcuuaugcua

SEQ ID NO: 774683 - RNA, 19 nt, Artificial Sequence
  Description of Artificial Sequence: Synthetic oligonucleotide
  Antisense strand to SEQ ID NO: 774682
uagcauaagccaguuauga

SEQ ID NO: 774684 - RNA, 19 nt, Artificial Sequence
  Description of Artificial Sequence: Synthetic oligonucleotide
  Sense strand starting at position 651 of SEQ ID NO: 587206
uggcuuaugcuagggaaua

SEQ ID NO: 774685 - RNA, 19 nt, Artificial Sequence
  Description of Artificial Sequence: Synthetic oligonucleotide
  Antisense strand to SEQ ID NO: 774684
uauucccuagcauaagcca

SEQ ID NO: 774686 - RNA, 19 nt, Artificial Sequence
  Description of Artificial Sequence: Synthetic oligonucleotide
  Sense strand starting at position 653 of SEQ ID NO: 587206
gcuuaugcuagggaauauc

SEQ ID NO: 774687 - RNA, 19 nt, Artificial Sequence
  Description of Artificial Sequence: Synthetic oligonucleotide
  Antisense strand to SEQ ID NO: 774686
gauauucccuagcauaagc

SEQ ID NO: 774688 - RNA, 19 nt, Artificial Sequence
  Description of Artificial Sequence: Synthetic oligonucleotide
  Sense strand starting at position 664 of SEQ ID NO: 587206
ggaauaucauagccugcuu

SEQ ID NO: 774689 - RNA, 19 nt, Artificial Sequence
  Description of Artificial Sequence: Synthetic oligonucleotide
  Antisense strand to SEQ ID NO: 774688
aagcaggcuaugauauucc

SEQ ID NO: 774690 - RNA, 19 nt, Artificial Sequence
  Description of Artificial Sequence: Synthetic oligonucleotide
  Sense strand starting at position 669 of SEQ ID NO: 587206
aucauagccugcuuaagaa

SEQ ID NO: 774691 - RNA, 19 nt, Artificial Sequence
  Description of Artificial Sequence: Synthetic oligonucleotide
  Antisense strand to SEQ ID NO: 774690
uucuuaagcaggcuaugau

SEQ ID NO: 774692 - RNA, 19 nt, Artificial Sequence
  Description of Artificial Sequence: Synthetic oligonucleotide
  Sense strand starting at position 801 of SEQ ID NO: 587206
ugaugaugguggucagucu

SEQ ID NO: 774693 - RNA, 19 nt, Artificial Sequence
  Description of Artificial Sequence: Synthetic oligonucleotide
  Antisense strand to SEQ ID NO: 774692
agacugaccaccaucauca

SEQ ID NO: 774694 - RNA, 19 nt, Artificial Sequence
  Description of Artificial Sequence: Synthetic oligonucleotide
  Sense strand starting at position 967 of SEQ ID NO: 587206
ccagauacguucccaucau

SEQ ID NO: 774695 - RNA, 19 nt, Artificial Sequence
  Description of Artificial Sequence: Synthetic oligonucleotide
  Antisense strand to SEQ ID NO: 774694
augaugggaacguaucugg

SEQ ID NO: 774696 - RNA, 19 nt, Artificial Sequence
  Description of Artificial Sequence: Synthetic oligonucleotide
  Sense strand starting at position 1491 of SEQ ID NO: 587206
cgacgcgcucccaaagagu

SEQ ID NO: 774697 - RNA, 19 nt, Artificial Sequence
  Description of Artificial Sequence: Synthetic oligonucleotide
  Antisense strand to SEQ ID NO: 774696
acucuuugggagcgcgucg

SEQ ID NO: 774698 - RNA, 19 nt, Artificial Sequence
  Description of Artificial Sequence: Synthetic oligonucleotide
  Sense strand starting at position 2402 of SEQ ID NO: 587206
gcagauguaugagccauaa

SEQ ID NO: 774699 - RNA, 19 nt, Artificial Sequence
  Description of Artificial Sequence: Synthetic oligonucleotide
  Antisense strand to SEQ ID NO: 774698
uuauggcucauacaucugc

SEQ ID NO: 774700 - RNA, 19 nt, Artificial Sequence
  Description of Artificial Sequence: Synthetic oligonucleotide
  Sense strand starting at position 2404 of SEQ ID NO: 587206
agauguaugagccauaagu

SEQ ID NO: 774701 - RNA, 19 nt, Artificial Sequence
  Description of Artificial Sequence: Synthetic oligonucleotide
  Antisense strand to SEQ ID NO: 774700
acuuauggcucauacaucu

SEQ ID NO: 774702 - RNA, 19 nt, Artificial Sequence
  Description of Artificial Sequence: Synthetic oligonucleotide
  Sense strand starting at position 2406 of SEQ ID NO: 587206
auguaugagccauaaguag

SEQ ID NO: 774703 - RNA, 19 nt, Artificial Sequence
  Description of Artificial Sequence: Synthetic oligonucleotide
  Antisense strand to SEQ ID NO: 774702
cuacuuauggcucauacau

SEQ ID NO: 774704 - RNA, 19 nt, Artificial Sequence
  Description of Artificial Sequence: Synthetic oligonucleotide
  Sense strand starting at position 2414 of SEQ ID NO: 587206
gccauaaguagugaugauc

SEQ ID NO: 774705 - RNA, 19 nt, Artificial Sequence
  Description of Artificial Sequence: Synthetic oligonucleotide
  Antisense strand to SEQ ID NO: 774704
gaucaucacuacuuauggc

SEQ ID NO: 774706 - RNA, 19 nt, Artificial Sequence
  Description of Artificial Sequence: Synthetic oligonucleotide
  Sense strand starting at position 2441 of SEQ ID NO: 587206
gcugucagugcauugcuaa

SEQ ID NO: 774707 - RNA, 19 nt, Artificial Sequence
  Description of Artificial Sequence: Synthetic oligonucleotide
  Antisense strand to SEQ ID NO: 774706
uuagcaaugcacugacagc

SEQ ID NO: 774708 - RNA, 19 nt, Artificial Sequence
  Description of Artificial Sequence: Synthetic oligonucleotide
  Sense strand starting at position 2574 of SEQ ID NO: 587206
gguauuuauccuggcagcu

SEQ ID NO: 774709 - RNA, 19 nt, Artificial Sequence
  Description of Artificial Sequence: Synthetic oligonucleotide
  Antisense strand to SEQ ID NO: 774708
agcugccaggauaaauacc

SEQ ID NO: 774710 - RNA, 19 nt, Artificial Sequence
  Description of Artificial Sequence: Synthetic oligonucleotide
  Sense strand starting at position 2781 of SEQ ID NO: 587206
auucuugcucuuggugaca

SEQ ID NO: 774711 - RNA, 19 nt, Artificial Sequence
  Description of Artificial Sequence: Synthetic oligonucleotide
  Antisense strand to SEQ ID NO: 774710
ugucaccaagagcaagaau

SEQ ID NO: 774712 - RNA, 19 nt, Artificial Sequence
  Description of Artificial Sequence: Synthetic oligonucleotide
  Sense strand starting at position 2954 of SEQ ID NO: 587206
guagauagacuuuguuuag

SEQ ID NO: 774713 - RNA, 19 nt, Artificial Sequence
  Description of Artificial Sequence: Synthetic oligonucleotide
  Antisense strand to SEQ ID NO: 774712
cuaaacaaagucuaucuac

SEQ ID NO: 774714 - RNA, 19 nt, Artificial Sequence
  Description of Artificial Sequence: Synthetic oligonucleotide
  Sense strand starting at position 2955 of SEQ ID NO: 587206
uagauagacuuuguuuaga

SEQ ID NO: 774715 - RNA, 19 nt, Artificial Sequence
  Description of Artificial Sequence: Synthetic oligonucleotide
  Antisense strand to SEQ ID NO: 774714
ucuaaacaaagucuaucua

SEQ ID NO: 774716 - RNA, 19 nt, Artificial Sequence
  Description of Artificial Sequence: Synthetic oligonucleotide
  Sense strand starting at position 2957 of SEQ ID NO: 587206
gauagacuuuguuuagaag

SEQ ID NO: 774717 - RNA, 19 nt, Artificial Sequence
  Description of Artificial Sequence: Synthetic oligonucleotide
  Antisense strand to SEQ ID NO: 774716
cuucuaaacaaagucuauc

SEQ ID NO: 774718 - RNA, 19 nt, Artificial Sequence
  Description of Artificial Sequence: Synthetic oligonucleotide
  Sense strand starting at position 3325 of SEQ ID NO: 587206
gggauagaaacgugaucuu

SEQ ID NO: 774719 - RNA, 19 nt, Artificial Sequence
  Description of Artificial Sequence: Synthetic oligonucleotide
  Antisense strand to SEQ ID NO: 774718
aagaucacguuucuauccc

SEQ ID NO: 774720 - RNA, 19 nt, Artificial Sequence
  Description of Artificial Sequence: Synthetic oligonucleotide
  Sense strand starting at position 3328 of SEQ ID NO: 587206
auagaaacgugaucuuuaa

SEQ ID NO: 774721 - RNA, 19 nt, Artificial Sequence
  Description of Artificial Sequence: Synthetic oligonucleotide
  Antisense strand to SEQ ID NO: 774720
uuaaagaucacguuucuau

SEQ ID NO: 774722 - RNA, 19 nt, Artificial Sequence
  Description of Artificial Sequence: Synthetic oligonucleotide
  Sense strand starting at position 3332 of SEQ ID NO: 587206
aaacgugaucuuuaacuag

SEQ ID NO: 774723 - RNA, 19 nt, Artificial Sequence
  Description of Artificial Sequence: Synthetic oligonucleotide
  Antisense strand to SEQ ID NO: 774722
cuaguuaaagaucacguuu

SEQ ID NO: 774724 - RNA, 19 nt, Artificial Sequence
  Description of Artificial Sequence: Synthetic oligonucleotide
  Sense strand starting at position 3335 of SEQ ID NO: 587206
cgugaucuuuaacuaguca

SEQ ID NO: 774725 - RNA, 19 nt, Artificial Sequence
  Description of Artificial Sequence: Synthetic oligonucleotide
  Antisense strand to SEQ ID NO: 774724
ugacuaguuaaagaucacg

SEQ ID NO: 774726 - RNA, 19 nt, Artificial Sequence
  Description of Artificial Sequence: Synthetic oligonucleotide
  Sense strand starting at position 3353 of SEQ ID NO: 587206
acauaagugguaugaucau

SEQ ID NO: 774727 - RNA, 19 nt, Artificial Sequence
  Description of Artificial Sequence: Synthetic oligonucleotide
  Antisense strand to SEQ ID NO: 774726
augaucauaccacuuaugu

SEQ ID NO: 774728 - RNA, 19 nt, Artificial Sequence
  Description of Artificial Sequence: Synthetic oligonucleotide
  Sense strand starting at position 3374 of SEQ ID NO: 587206
auaucugucccauaguuaa

SEQ ID NO: 774729 - RNA, 19 nt, Artificial Sequence
  Description of Artificial Sequence: Synthetic oligonucleotide
  Antisense strand to SEQ ID NO: 774728
uuaacuaugggacagauau

SEQ ID NO: 774730 - RNA, 19 nt, Artificial Sequence
  Description of Artificial Sequence: Synthetic oligonucleotide
  Sense strand starting at position 3395 of SEQ ID NO: 587206
ggcaucacccaacgugaaa

SEQ ID NO: 774731 - RNA, 19 nt, Artificial Sequence
  Description of Artificial Sequence: Synthetic oligonucleotide
  Antisense strand to SEQ ID NO: 774730
uuucacguugggugaugcc

SEQ ID NO: 774732 - RNA, 19 nt, Artificial Sequence
  Description of Artificial Sequence: Synthetic oligonucleotide
  Sense strand starting at position 3459 of SEQ ID NO: 587206
uaugauacuucugugauag

SEQ ID NO: 774733 - RNA, 19 nt, Artificial Sequence
  Description of Artificial Sequence: Synthetic oligonucleotide
  Antisense strand to SEQ ID NO: 774732
cuaucacagaaguaucaua

SEQ ID NO: 774734 - RNA, 19 nt, Artificial Sequence
  Description of Artificial Sequence: Synthetic oligonucleotide
  Sense strand starting at position 3460 of SEQ ID NO: 587206
augauacuucugugauagu

SEQ ID NO: 774735 - RNA, 19 nt, Artificial Sequence
  Description of Artificial Sequence: Synthetic oligonucleotide
  Antisense strand to SEQ ID NO: 774734
acuaucacagaaguaucau

SEQ ID NO: 774736 - RNA, 19 nt, Artificial Sequence
  Description of Artificial Sequence: Synthetic oligonucleotide
  Sense strand starting at position 3519 of SEQ ID NO: 587206
uuuaguuguauggaauaug

SEQ ID NO: 774737 - RNA, 19 nt, Artificial Sequence
  Description of Artificial Sequence: Synthetic oligonucleotide
  Antisense strand to SEQ ID NO: 774736
cauauuccauacaacuaaa

SEQ ID NO: 774738 - RNA, 19 nt, Artificial Sequence
  Description of Artificial Sequence: Synthetic oligonucleotide
  Sense strand starting at position 3528 of SEQ ID NO: 587206
auggaauaugcuuaagcaa

SEQ ID NO: 774739 - RNA, 19 nt, Artificial Sequence
  Description of Artificial Sequence: Synthetic oligonucleotide
  Antisense strand to SEQ ID NO: 774738
uugcuuaagcauauuccau

SEQ ID NO: 774740 - RNA, 19 nt, Artificial Sequence
  Description of Artificial Sequence: Synthetic oligonucleotide
  Sense strand starting at position 3587 of SEQ ID NO: 587206
gcuguaacagugcaauuau

SEQ ID NO: 774741 - RNA, 19 nt, Artificial Sequence
  Description of Artificial Sequence: Synthetic oligonucleotide
  Antisense strand to SEQ ID NO: 774740
auaauugcacuguuacagc

SEQ ID NO: 774742 - RNA, 19 nt, Artificial Sequence
  Description of Artificial Sequence: Synthetic oligonucleotide
  Sense strand starting at position 3695 of SEQ ID NO: 587206
caguaagaaggcuguaaua

SEQ ID NO: 774743 - RNA, 19 nt, Artificial Sequence
  Description of Artificial Sequence: Synthetic oligonucleotide
  Antisense strand to SEQ ID NO: 774742
uauuacagccuucuuacug

SEQ ID NO: 774744 - RNA, 19 nt, Artificial Sequence
  Description of Artificial Sequence: Synthetic oligonucleotide
  Sense strand starting at position 3697 of SEQ ID NO: 587206
guaagaaggcuguaauaau

SEQ ID NO: 774745 - RNA, 19 nt, Artificial Sequence
  Description of Artificial Sequence: Synthetic oligonucleotide
  Antisense strand to SEQ ID NO: 774744
auuauuacagccuucuuac

SEQ ID NO: 774746 - RNA, 19 nt, Artificial Sequence
  Description of Artificial Sequence: Synthetic oligonucleotide
  Sense strand starting at position 3805 of SEQ ID NO: 587206
gagaccucugcgugguaaa

SEQ ID NO: 774747 - RNA, 19 nt, Artificial Sequence
  Description of Artificial Sequence: Synthetic oligonucleotide
  Antisense strand to SEQ ID NO: 774746
uuuaccacgcagaggucuc

SEQ ID NO: 774748 - RNA, 19 nt, Artificial Sequence
  Description of Artificial Sequence: Synthetic oligonucleotide
  Sense strand starting at position 3952 of SEQ ID NO: 587206
ucagauauaucaguuguuu

SEQ ID NO: 774749 - RNA, 19 nt, Artificial Sequence
  Description of Artificial Sequence: Synthetic oligonucleotide
  Antisense strand to SEQ ID NO: 774748
aaacaacugauauaucuga

SEQ ID NO: 774750 - RNA, 19 nt, Artificial Sequence
  Description of Artificial Sequence: Synthetic oligonucleotide
  Sense strand starting at position 3 of SEQ ID NO: 587207
gacugaaugugggcuuuau

SEQ ID NO: 774751 - RNA, 19 nt, Artificial Sequence
  Description of Artificial Sequence: Synthetic oligonucleotide
  Antisense strand to SEQ ID NO: 774750
auaaagcccacauucaguc

SEQ ID NO: 774752 - RNA, 19 nt, Artificial Sequence
  Description of Artificial Sequence: Synthetic oligonucleotide
  Sense strand starting at position 7 of SEQ ID NO: 587207
gaaugugggcuuuauuaaa

SEQ ID NO: 774753 - RNA, 19 nt, Artificial Sequence
  Description of Artificial Sequence: Synthetic oligonucleotide
  Antisense strand to SEQ ID NO: 774752
uuuaauaaagcccacauuc

SEQ ID NO: 774754 - RNA, 19 nt, Artificial Sequence
  Description of Artificial Sequence: Synthetic oligonucleotide
  Sense strand starting at position 47 of SEQ ID NO: 587207
cuaacccugugaguuuaau

SEQ ID NO: 774755 - RNA, 19 nt, Artificial Sequence
  Description of Artificial Sequence: Synthetic oligonucleotide
  Antisense strand to SEQ ID NO: 774754
auuaaacucacaggguuag

SEQ ID NO: 774756 - RNA, 19 nt, Artificial Sequence
  Description of Artificial Sequence: Synthetic oligonucleotide
  Sense strand starting at position 109 of SEQ ID NO: 587207
gacucaguacuguauacag

SEQ ID NO: 774757 - RNA, 19 nt, Artificial Sequence
  Description of Artificial Sequence: Synthetic oligonucleotide
  Antisense strand to SEQ ID NO: 774756
cuguauacaguacugaguc

SEQ ID NO: 774758 - RNA, 19 nt, Artificial Sequence
  Description of Artificial Sequence: Synthetic oligonucleotide
  Sense strand starting at position 182 of SEQ ID NO: 587207
gaaggaauaguuugucaug

SEQ ID NO: 774759 - RNA, 19 nt, Artificial Sequence
  Description of Artificial Sequence: Synthetic oligonucleotide
  Antisense strand to SEQ ID NO: 774758
caugacaaacuauuccuuc

SEQ ID NO: 774760 - RNA, 19 nt, Artificial Sequence
  Description of Artificial Sequence: Synthetic oligonucleotide
  Sense strand starting at position 183 of SEQ ID NO: 587207
aaggaauaguuugucauga

SEQ ID NO: 774761 - RNA, 19 nt, Artificial Sequence
  Description of Artificial Sequence: Synthetic oligonucleotide
  Antisense strand to SEQ ID NO: 774760
ucaugacaaacuauuccuu

SEQ ID NO: 774762 - RNA, 19 nt, Artificial Sequence
  Description of Artificial Sequence: Synthetic oligonucleotide
  Sense strand starting at position 184 of SEQ ID NO: 587207
aggaauaguuugucaugag

SEQ ID NO: 774763 - RNA, 19 nt, Artificial Sequence
  Description of Artificial Sequence: Synthetic oligonucleotide
  Antisense strand to SEQ ID NO: 774762
cucaugacaaacuauuccu

SEQ ID NO: 774764 - RNA, 19 nt, Artificial Sequence
  Description of Artificial Sequence: Synthetic oligonucleotide
  Sense strand starting at position 191 of SEQ ID NO: 587207
guuugucaugaggaauccu

SEQ ID NO: 774765 - RNA, 19 nt, Artificial Sequence
  Description of Artificial Sequence: Synthetic oligonucleotide
  Antisense strand to SEQ ID NO: 774764
aggauuccucaugacaaac

SEQ ID NO: 774766 - RNA, 19 nt, Artificial Sequence
  Description of Artificial Sequence: Synthetic oligonucleotide
  Sense strand starting at position 333 of SEQ ID NO: 587207
agcauuaaaccaugaugga

SEQ ID NO: 774767 - RNA, 19 nt, Artificial Sequence
  Description of Artificial Sequence: Synthetic oligonucleotide
  Antisense strand to SEQ ID NO: 774766
uccaucaugguuuaaugcu

SEQ ID NO: 774768 - RNA, 19 nt, Artificial Sequence
  Description of Artificial Sequence: Synthetic oligonucleotide
  Sense strand starting at position 446 of SEQ ID NO: 587207
aaaguuggucuuuaaguuu

SEQ ID NO: 774769 - RNA, 19 nt, Artificial Sequence
  Description of Artificial Sequence: Synthetic oligonucleotide
  Antisense strand to SEQ ID NO: 774768
aaacuuaaagaccaacuuu

SEQ ID NO: 774770 - RNA, 19 nt, Artificial Sequence
  Description of Artificial Sequence: Synthetic oligonucleotide
  Sense strand starting at position 452 of SEQ ID NO: 587207
ggucuuuaaguuuggauac

SEQ ID NO: 774771 - RNA, 19 nt, Artificial Sequence
  Description of Artificial Sequence: Synthetic oligonucleotide
  Antisense strand to SEQ ID NO: 774770
guauccaaacuuaaagacc

SEQ ID NO: 774772 - RNA, 19 nt, Artificial Sequence
  Description of Artificial Sequence: Synthetic oligonucleotide
  Sense strand starting at position 462 of SEQ ID NO: 587207
uuuggauacuuagucacua

SEQ ID NO: 774773 - RNA, 19 nt, Artificial Sequence
  Description of Artificial Sequence: Synthetic oligonucleotide
  Antisense strand to SEQ ID NO: 774772
uagugacuaaguauccaaa

SEQ ID NO: 774774 - RNA, 19 nt, Artificial Sequence
  Description of Artificial Sequence: Synthetic oligonucleotide
  Sense strand starting at position 466 of SEQ ID NO: 587207
gauacuuagucacuaguag

SEQ ID NO: 774775 - RNA, 19 nt, Artificial Sequence
  Description of Artificial Sequence: Synthetic oligonucleotide
  Antisense strand to SEQ ID NO: 774774
cuacuagugacuaaguauc

SEQ ID NO: 774776 - RNA, 19 nt, Artificial Sequence
  Description of Artificial Sequence: Synthetic oligonucleotide
  Sense strand starting at position 467 of SEQ ID NO: 587207
auacuuagucacuaguagu

SEQ ID NO: 774777 - RNA, 19 nt, Artificial Sequence
  Description of Artificial Sequence: Synthetic oligonucleotide
  Antisense strand to SEQ ID NO: 774776
acuacuagugacuaaguau

SEQ ID NO: 774778 - RNA, 19 nt, Artificial Sequence
  Description of Artificial Sequence: Synthetic oligonucleotide
  Sense strand starting at position 834 of SEQ ID NO: 587207
cuuaaagaaugugcauagu

SEQ ID NO: 774779 - RNA, 19 nt, Artificial Sequence
  Description of Artificial Sequence: Synthetic oligonucleotide
  Antisense strand to SEQ ID NO: 774778
acuaugcacauucuuuaag

SEQ ID NO: 774780 - RNA, 19 nt, Artificial Sequence
  Description of Artificial Sequence: Synthetic oligonucleotide
  Sense strand starting at position 837 of SEQ ID NO: 587207
aaagaaugugcauaguuga

SEQ ID NO: 774781 - RNA, 19 nt, Artificial Sequence
  Description of Artificial Sequence: Synthetic oligonucleotide
  Antisense strand to SEQ ID NO: 774780
ucaacuaugcacauucuuu

SEQ ID NO: 774782 - RNA, 19 nt, Artificial Sequence
  Description of Artificial Sequence: Synthetic oligonucleotide
  Sense strand starting at position 845 of SEQ ID NO: 587207
ugcauaguugagcauuaga

SEQ ID NO: 774783 - RNA, 19 nt, Artificial Sequence
  Description of Artificial Sequence: Synthetic oligonucleotide
  Antisense strand to SEQ ID NO: 774782
ucuaaugcucaacuaugca

SEQ ID NO: 774784 - RNA, 19 nt, Artificial Sequence
  Description of Artificial Sequence: Synthetic oligonucleotide
  Sense strand starting at position 848 of SEQ ID NO: 587207
auaguugagcauuagauau

SEQ ID NO: 774785 - RNA, 19 nt, Artificial Sequence
  Description of Artificial Sequence: Synthetic oligonucleotide
  Antisense strand to SEQ ID NO: 774784
auaucuaaugcucaacuau

SEQ ID NO: 774786 - RNA, 19 nt, Artificial Sequence
  Description of Artificial Sequence: Synthetic oligonucleotide
  Sense strand starting at position 899 of SEQ ID NO: 587207
ugccaaugauuugagggaa

SEQ ID NO: 774787 - RNA, 19 nt, Artificial Sequence
  Description of Artificial Sequence: Synthetic oligonucleotide
  Antisense strand to SEQ ID NO: 774786
uucccucaaaucauuggca

SEQ ID NO: 774788 - RNA, 19 nt, Artificial Sequence
  Description of Artificial Sequence: Synthetic oligonucleotide
  Sense strand starting at position 1035 of SEQ ID NO: 587207
agauucguaaguugacaua

SEQ ID NO: 774789 - RNA, 19 nt, Artificial Sequence
  Description of Artificial Sequence: Synthetic oligonucleotide
  Antisense strand to SEQ ID NO: 774788
uaugucaacuuacgaaucu

SEQ ID NO: 774790 - RNA, 19 nt, Artificial Sequence
  Description of Artificial Sequence: Synthetic oligonucleotide
  Sense strand starting at position 1180 of SEQ ID NO: 587207
acagucugucaauaaauug

SEQ ID NO: 774791 - RNA, 19 nt, Artificial Sequence
  Description of Artificial Sequence: Synthetic oligonucleotide
  Antisense strand to SEQ ID NO: 774790
caauuuauugacagacugu

SEQ ID NO: 774792 - RNA, 19 nt, Artificial Sequence
  Description of Artificial Sequence: Synthetic oligonucleotide
  Sense strand starting at position 2570 of SEQ ID NO: 587207
acgagacaugcauacguau

SEQ ID NO: 774793 - RNA, 19 nt, Artificial Sequence
  Description of Artificial Sequence: Synthetic oligonucleotide
  Antisense strand to SEQ ID NO: 774792
auacguaugcaugucucgu

SEQ ID NO: 774794 - RNA, 19 nt, Artificial Sequence
  Description of Artificial Sequence: Synthetic oligonucleotide
  Sense strand starting at position 2740 of SEQ ID NO: 587207
ccuuauuucguuuaccgua

SEQ ID NO: 774795 - RNA, 19 nt, Artificial Sequence
  Description of Artificial Sequence: Synthetic oligonucleotide
  Antisense strand to SEQ ID NO: 774794
uacgguaaacgaaauaagg

SEQ ID NO: 774796 - RNA, 19 nt, Artificial Sequence
  Description of Artificial Sequence: Synthetic oligonucleotide
  Sense strand starting at position 2742 of SEQ ID NO: 587207
uuauuucguuuaccguaau

SEQ ID NO: 774797 - RNA, 19 nt, Artificial Sequence
  Description of Artificial Sequence: Synthetic oligonucleotide
  Antisense strand to SEQ ID NO: 774796
auuacgguaaacgaaauaa

SEQ ID NO: 774798 - RNA, 19 nt, Artificial Sequence
  Description of Artificial Sequence: Synthetic oligonucleotide
  Sense strand starting at position 2745 of SEQ ID NO: 587207
uuucguuuaccguaauuua

SEQ ID NO: 774799 - RNA, 19 nt, Artificial Sequence
  Description of Artificial Sequence: Synthetic oligonucleotide
  Antisense strand to SEQ ID NO: 774798
uaaauuacgguaaacgaaa

SEQ ID NO: 774800 - RNA, 19 nt, Artificial Sequence
  Description of Artificial Sequence: Synthetic oligonucleotide
  Sense strand starting at position 2808 of SEQ ID NO: 587207
agaaaugugcucugaaagg

SEQ ID NO: 774801 - RNA, 19 nt, Artificial Sequence
  Description of Artificial Sequence: Synthetic oligonucleotide
  Antisense strand to SEQ ID NO: 774800
ccuuucagagcacauuucu

SEQ ID NO: 774802 - RNA, 19 nt, Artificial Sequence
  Description of Artificial Sequence: Synthetic oligonucleotide
  Sense strand starting at position 2884 of SEQ ID NO: 587207
gcuuaaugcgguucugcaa

SEQ ID NO: 774803 - RNA, 19 nt, Artificial Sequence
  Description of Artificial Sequence: Synthetic oligonucleotide
  Antisense strand to SEQ ID NO: 774802
uugcagaaccgcauuaagc

SEQ ID NO: 774804 - RNA, 19 nt, Artificial Sequence
  Description of Artificial Sequence: Synthetic oligonucleotide
  Sense strand starting at position 2970 of SEQ ID NO: 587207
guugcuucagcgcuggaau

SEQ ID NO: 774805 - RNA, 19 nt, Artificial Sequence
  Description of Artificial Sequence: Synthetic oligonucleotide
  Antisense strand to SEQ ID NO: 774804
auuccagcgcugaagcaac

SEQ ID NO: 774806 - RNA, 19 nt, Artificial Sequence
  Description of Artificial Sequence: Synthetic oligonucleotide
  Sense strand starting at position 3063 of SEQ ID NO: 587207
cccgguugacauugacaca

SEQ ID NO: 774807 - RNA, 19 nt, Artificial Sequence
  Description of Artificial Sequence: Synthetic oligonucleotide
  Antisense strand to SEQ ID NO: 774806
ugugucaaugucaaccggg

SEQ ID NO: 774808 - RNA, 19 nt, Artificial Sequence
  Description of Artificial Sequence: Synthetic oligonucleotide
  Sense strand starting at position 3064 of SEQ ID NO: 587207
ccgguugacauugacacaa

SEQ ID NO: 774809 - RNA, 19 nt, Artificial Sequence
  Description of Artificial Sequence: Synthetic oligonucleotide
  Antisense strand to SEQ ID NO: 774808
uugugucaaugucaaccgg

SEQ ID NO: 774810 - RNA, 19 nt, Artificial Sequence
  Description of Artificial Sequence: Synthetic oligonucleotide
  Sense strand starting at position 3400 of SEQ ID NO: 587207
gggauagugcaauguaaau

SEQ ID NO: 774811 - RNA, 19 nt, Artificial Sequence
  Description of Artificial Sequence: Synthetic oligonucleotide
  Antisense strand to SEQ ID NO: 774810
auuuacauugcacuauccc

SEQ ID NO: 774812 - RNA, 19 nt, Artificial Sequence
  Description of Artificial Sequence: Synthetic oligonucleotide
  Sense strand starting at position 3412 of SEQ ID NO: 587207
uguaaaucucaggaauugu

SEQ ID NO: 774813 - RNA, 19 nt, Artificial Sequence
  Description of Artificial Sequence: Synthetic oligonucleotide
  Antisense strand to SEQ ID NO: 774812
acaauuccugagauuuaca

SEQ ID NO: 774814 - RNA, 19 nt, Artificial Sequence
  Description of Artificial Sequence: Synthetic oligonucleotide
  Sense strand starting at position 3543 of SEQ ID NO: 587207
acaacaauggcauguuuaa

SEQ ID NO: 774815 - RNA, 19 nt, Artificial Sequence
  Description of Artificial Sequence: Synthetic oligonucleotide
  Antisense strand to SEQ ID NO: 774814
uuaaacaugccauuguugu

SEQ ID NO: 774816 - RNA, 19 nt, Artificial Sequence
  Description of Artificial Sequence: Synthetic oligonucleotide
  Sense strand starting at position 3621 of SEQ ID NO: 587207
auauuacuaguguauagac

SEQ ID NO: 774817 - RNA, 19 nt, Artificial Sequence
  Description of Artificial Sequence: Synthetic oligonucleotide
  Antisense strand to SEQ ID NO: 774816
gucuauacacuaguaauau

SEQ ID NO: 774818 - RNA, 19 nt, Artificial Sequence
  Description of Artificial Sequence: Synthetic oligonucleotide
  Sense strand starting at position 3623 of SEQ ID NO: 587207
auuacuaguguauagacau

SEQ ID NO: 774819 - RNA, 19 nt, Artificial Sequence
  Description of Artificial Sequence: Synthetic oligonucleotide
  Antisense strand to SEQ ID NO: 774818
augucuauacacuaguaau

SEQ ID NO: 774820 - RNA, 19 nt, Artificial Sequence
  Description of Artificial Sequence: Synthetic oligonucleotide
  Sense strand starting at position 3630 of SEQ ID NO: 587207
guguauagacauuagaugu

SEQ ID NO: 774821 - RNA, 19 nt, Artificial Sequence
  Description of Artificial Sequence: Synthetic oligonucleotide
  Antisense strand to SEQ ID NO: 774820
acaucuaaugucuauacac

SEQ ID NO: 774822 - RNA, 19 nt, Artificial Sequence
  Description of Artificial Sequence: Synthetic oligonucleotide
  Sense strand starting at position 3756 of SEQ ID NO: 587207
cucaguugauaguuacuau

SEQ ID NO: 774823 - RNA, 19 nt, Artificial Sequence
  Description of Artificial Sequence: Synthetic oligonucleotide
  Antisense strand to SEQ ID NO: 774822
auaguaacuaucaacugag

SEQ ID NO: 774824 - RNA, 19 nt, Artificial Sequence
  Description of Artificial Sequence: Synthetic oligonucleotide
  Sense strand starting at position 3782 of SEQ ID NO: 587207
uggauaaauaaauguaggu

SEQ ID NO: 774825 - RNA, 19 nt, Artificial Sequence
  Description of Artificial Sequence: Synthetic oligonucleotide
  Antisense strand to SEQ ID NO: 774824
accuacauuuauuuaucca

SEQ ID NO: 774826 - RNA, 19 nt, Artificial Sequence
  Description of Artificial Sequence: Synthetic oligonucleotide
  Sense strand starting at position 3829 of SEQ ID NO: 587207
agcaacuuagaauggauua

SEQ ID NO: 774827 - RNA, 19 nt, Artificial Sequence
  Description of Artificial Sequence: Synthetic oligonucleotide
  Antisense strand to SEQ ID NO: 774826
uaauccauucuaaguugcu

SEQ ID NO: 774828 - RNA, 19 nt, Artificial Sequence
  Description of Artificial Sequence: Synthetic oligonucleotide
  Sense strand starting at position 3852 of SEQ ID NO: 587207
gaugaaugaugucauuucu

SEQ ID NO: 774829 - RNA, 19 nt, Artificial Sequence
  Description of Artificial Sequence: Synthetic oligonucleotide
  Antisense strand to SEQ ID NO: 774828
agaaaugacaucauucauc

SEQ ID NO: 774830 - RNA, 19 nt, Artificial Sequence
  Description of Artificial Sequence: Synthetic oligonucleotide
  Sense strand starting at position 15 of SEQ ID NO: 587208
gaguguggccaccagagaa

SEQ ID NO: 774831 - RNA, 19 nt, Artificial Sequence
  Description of Artificial Sequence: Synthetic oligonucleotide
  Antisense strand to SEQ ID NO: 774830
uucucugguggccacacuc

SEQ ID NO: 774832 - RNA, 19 nt, Artificial Sequence
  Description of Artificial Sequence: Synthetic oligonucleotide
  Sense strand starting at position 58 of SEQ ID NO: 587208
ggaagaggucuuggaaggu

SEQ ID NO: 774833 - RNA, 19 nt, Artificial Sequence
  Description of Artificial Sequence: Synthetic oligonucleotide
  Antisense strand to SEQ ID NO: 774832
accuuccaagaccucuucc

SEQ ID NO: 774834 - RNA, 19 nt, Artificial Sequence
  Description of Artificial Sequence: Synthetic oligonucleotide
  Sense strand starting at position 223 of SEQ ID NO: 587208
gccuauuaguaccugaauc

SEQ ID NO: 774835 - RNA, 19 nt, Artificial Sequence
  Description of Artificial Sequence: Synthetic oligonucleotide
  Antisense strand to SEQ ID NO: 774834
gauucagguacuaauaggc

SEQ ID NO: 774836 - RNA, 19 nt, Artificial Sequence
  Description of Artificial Sequence: Synthetic oligonucleotide
  Sense strand starting at position 236 of SEQ ID NO: 587208
ugaaucggauccgggaaau

SEQ ID NO: 774837 - RNA, 19 nt, Artificial Sequence
  Description of Artificial Sequence: Synthetic oligonucleotide
  Antisense strand to SEQ ID NO: 774836
auuucccggauccgauuca

SEQ ID NO: 774838 - RNA, 19 nt, Artificial Sequence
  Description of Artificial Sequence: Synthetic oligonucleotide
  Sense strand starting at position 247 of SEQ ID NO: 587208
cgggaaauugaguggaaau

SEQ ID NO: 774839 - RNA, 19 nt, Artificial Sequence
  Description of Artificial Sequence: Synthetic oligonucleotide
  Antisense strand to SEQ ID NO: 774838
auuuccacucaauuucccg

SEQ ID NO: 774840 - RNA, 19 nt, Artificial Sequence
  Description of Artificial Sequence: Synthetic oligonucleotide
  Sense strand starting at position 348 of SEQ ID NO: 587208
gcgcgugugaguguuaagu

SEQ ID NO: 774841 - RNA, 19 nt, Artificial Sequence
  Description of Artificial Sequence: Synthetic oligonucleotide
  Antisense strand to SEQ ID NO: 774840
acuuaacacucacacgcgc

SEQ ID NO: 774842 - RNA, 19 nt, Artificial Sequence
  Description of Artificial Sequence: Synthetic oligonucleotide
  Sense strand starting at position 352 of SEQ ID NO: 587208
gugugaguguuaaguccag

SEQ ID NO: 774843 - RNA, 19 nt, Artificial Sequence
  Description of Artificial Sequence: Synthetic oligonucleotide
  Antisense strand to SEQ ID NO: 774842
cuggacuuaacacucacac

SEQ ID NO: 774844 - RNA, 19 nt, Artificial Sequence
  Description of Artificial Sequence: Synthetic oligonucleotide
  Sense strand starting at position 452 of SEQ ID NO: 587208
gggagagcugcugguguua

SEQ ID NO: 774845 - RNA, 19 nt, Artificial Sequence
  Description of Artificial Sequence: Synthetic oligonucleotide
  Antisense strand to SEQ ID NO: 774844
uaacaccagcagcucuccc

SEQ ID NO: 774846 - RNA, 19 nt, Artificial Sequence
  Description of Artificial Sequence: Synthetic oligonucleotide
  Sense strand starting at position 454 of SEQ ID NO: 587208
gagagcugcugguguuacu

SEQ ID NO: 774847 - RNA, 19 nt, Artificial Sequence
  Description of Artificial Sequence: Synthetic oligonucleotide
  Antisense strand to SEQ ID NO: 774846
aguaacaccagcagcucuc

SEQ ID NO: 774848 - RNA, 19 nt, Artificial Sequence
  Description of Artificial Sequence: Synthetic oligonucleotide
  Sense strand starting at position 461 of SEQ ID NO: 587208
gcugguguuacucaaugca

SEQ ID NO: 774849 - RNA, 19 nt, Artificial Sequence
  Description of Artificial Sequence: Synthetic oligonucleotide
  Antisense strand to SEQ ID NO: 774848
ugcauugaguaacaccagc

SEQ ID NO: 774850 - RNA, 19 nt, Artificial Sequence
  Description of Artificial Sequence: Synthetic oligonucleotide
  Sense strand starting at position 464 of SEQ ID NO: 587208
gguguuacucaaugcagcu

SEQ ID NO: 774851 - RNA, 19 nt, Artificial Sequence
  Description of Artificial Sequence: Synthetic oligonucleotide
  Antisense strand to SEQ ID NO: 774850
agcugcauugaguaacacc

SEQ ID NO: 774852 - RNA, 19 nt, Artificial Sequence
  Description of Artificial Sequence: Synthetic oligonucleotide
  Sense strand starting at position 699 of SEQ ID NO: 587208
gggagucggcugugcugaa

SEQ ID NO: 774853 - RNA, 19 nt, Artificial Sequence
  Description of Artificial Sequence: Synthetic oligonucleotide
  Antisense strand to SEQ ID NO: 774852
uucagcacagccgacuccc

SEQ ID NO: 774854 - RNA, 19 nt, Artificial Sequence
  Description of Artificial Sequence: Synthetic oligonucleotide
  Sense strand starting at position 700 of SEQ ID NO: 587208
ggagucggcugugcugaaa

SEQ ID NO: 774855 - RNA, 19 nt, Artificial Sequence
  Description of Artificial Sequence: Synthetic oligonucleotide
  Antisense strand to SEQ ID NO: 774854
uuucagcacagccgacucc

SEQ ID NO: 774856 - RNA, 19 nt, Artificial Sequence
  Description of Artificial Sequence: Synthetic oligonucleotide
  Sense strand starting at position 2672 of SEQ ID NO: 587208
ggugcaaauuguggcuaau

SEQ ID NO: 774857 - RNA, 19 nt, Artificial Sequence
  Description of Artificial Sequence: Synthetic oligonucleotide
  Antisense strand to SEQ ID NO: 774856
auuagccacaauuugcacc

SEQ ID NO: 774858 - RNA, 19 nt, Artificial Sequence
  Description of Artificial Sequence: Synthetic oligonucleotide
  Sense strand starting at position 2674 of SEQ ID NO: 587208
ugcaaauuguggcuaauua

SEQ ID NO: 774859 - RNA, 19 nt, Artificial Sequence
  Description of Artificial Sequence: Synthetic oligonucleotide
  Antisense strand to SEQ ID NO: 774858
uaauuagccacaauuugca

SEQ ID NO: 774860 - RNA, 19 nt, Artificial Sequence
  Description of Artificial Sequence: Synthetic oligonucleotide
  Sense strand starting at position 2675 of SEQ ID NO: 587208
gcaaauuguggcuaauuag

SEQ ID NO: 774861 - RNA, 19 nt, Artificial Sequence
  Description of Artificial Sequence: Synthetic oligonucleotide
  Antisense strand to SEQ ID NO: 774860
cuaauuagccacaauuugc

SEQ ID NO: 774862 - RNA, 19 nt, Artificial Sequence
  Description of Artificial Sequence: Synthetic oligonucleotide
  Sense strand starting at position 2684 of SEQ ID NO: 587208
ggcuaauuagcacacaauu

SEQ ID NO: 774863 - RNA, 19 nt, Artificial Sequence
  Description of Artificial Sequence: Synthetic oligonucleotide
  Antisense strand to SEQ ID NO: 774862
aauugugugcuaauuagcc

SEQ ID NO: 774864 - RNA, 19 nt, Artificial Sequence
  Description of Artificial Sequence: Synthetic oligonucleotide
  Sense strand starting at position 2859 of SEQ ID NO: 587208
gacugugaccugcauagau

SEQ ID NO: 774865 - RNA, 19 nt, Artificial Sequence
  Description of Artificial Sequence: Synthetic oligonucleotide
  Antisense strand to SEQ ID NO: 774864
aucuaugcaggucacaguc

SEQ ID NO: 774866 - RNA, 19 nt, Artificial Sequence
  Description of Artificial Sequence: Synthetic oligonucleotide
  Sense strand starting at position 2861 of SEQ ID NO: 587208
cugugaccugcauagauca

SEQ ID NO: 774867 - RNA, 19 nt, Artificial Sequence
  Description of Artificial Sequence: Synthetic oligonucleotide
  Antisense strand to SEQ ID NO: 774866
ugaucuaugcaggucacag

SEQ ID NO: 774868 - RNA, 19 nt, Artificial Sequence
  Description of Artificial Sequence: Synthetic oligonucleotide
  Sense strand starting at position 3018 of SEQ ID NO: 587208
uggauuccugccuggguca

SEQ ID NO: 774869 - RNA, 19 nt, Artificial Sequence
  Description of Artificial Sequence: Synthetic oligonucleotide
  Antisense strand to SEQ ID NO: 774868
ugacccaggcaggaaucca

SEQ ID NO: 774870 - RNA, 19 nt, Artificial Sequence
  Description of Artificial Sequence: Synthetic oligonucleotide
  Sense strand starting at position 3096 of SEQ ID NO: 587208
uccuguucucggugcacaa

SEQ ID NO: 774871 - RNA, 19 nt, Artificial Sequence
  Description of Artificial Sequence: Synthetic oligonucleotide
  Antisense strand to SEQ ID NO: 774870
uugugcaccgagaacagga

SEQ ID NO: 774872 - RNA, 19 nt, Artificial Sequence
  Description of Artificial Sequence: Synthetic oligonucleotide
  Sense strand starting at position 3116 of SEQ ID NO: 587208
ccucucuaaccuggagaau

SEQ ID NO: 774873 - RNA, 19 nt, Artificial Sequence
  Description of Artificial Sequence: Synthetic oligonucleotide
  Antisense strand to SEQ ID NO: 774872
auucuccagguuagagagg

SEQ ID NO: 774874 - RNA, 19 nt, Artificial Sequence
  Description of Artificial Sequence: Synthetic oligonucleotide
  Sense strand starting at position 3952 of SEQ ID NO: 587208
gacagagucaucuaggguc

SEQ ID NO: 774875 - RNA, 19 nt, Artificial Sequence
  Description of Artificial Sequence: Synthetic oligonucleotide
  Antisense strand to SEQ ID NO: 774874
gacccuagaugacucuguc

SEQ ID NO: 774876 - RNA, 19 nt, Artificial Sequence
  Description of Artificial Sequence: Synthetic oligonucleotide
  Sense strand starting at position 3954 of SEQ ID NO: 587208
cagagucaucuagggucau

SEQ ID NO: 774877 - RNA, 19 nt, Artificial Sequence
  Description of Artificial Sequence: Synthetic oligonucleotide
  Antisense strand to SEQ ID NO: 774876
augacccuagaugacucug

SEQ ID NO: 774878 - RNA, 19 nt, Artificial Sequence
  Description of Artificial Sequence: Synthetic oligonucleotide
  Sense strand starting at position 79 of SEQ ID NO: 587209
auuguacaccuguacaaua

SEQ ID NO: 774879 - RNA, 19 nt, Artificial Sequence
  Description of Artificial Sequence: Synthetic oligonucleotide
  Antisense strand to SEQ ID NO: 774878
uauuguacagguguacaau

SEQ ID NO: 774880 - RNA, 19 nt, Artificial Sequence
  Description of Artificial Sequence: Synthetic oligonucleotide
  Sense strand starting at position 170 of SEQ ID NO: 587209
auucuaauucuaugagguu

SEQ ID NO: 774881 - RNA, 19 nt, Artificial Sequence
  Description of Artificial Sequence: Synthetic oligonucleotide
  Antisense strand to SEQ ID NO: 774880
aaccucauagaauuagaau

SEQ ID NO: 774882 - RNA, 19 nt, Artificial Sequence
  Description of Artificial Sequence: Synthetic oligonucleotide
  Sense strand starting at position 381 of SEQ ID NO: 587209
auggaaaccuuguuauaca

SEQ ID NO: 774883 - RNA, 19 nt, Artificial Sequence
  Description of Artificial Sequence: Synthetic oligonucleotide
  Antisense strand to SEQ ID NO: 774882
uguauaacaagguuuccau

SEQ ID NO: 774884 - RNA, 19 nt, Artificial Sequence
  Description of Artificial Sequence: Synthetic oligonucleotide
  Sense strand starting at position 423 of SEQ ID NO: 587209
cccguuaaaggcuaagaaa

SEQ ID NO: 774885 - RNA, 19 nt, Artificial Sequence
  Description of Artificial Sequence: Synthetic oligonucleotide
  Antisense strand to SEQ ID NO: 774884
uuucuuagccuuuaacggg

SEQ ID NO: 774886 - RNA, 19 nt, Artificial Sequence
  Description of Artificial Sequence: Synthetic oligonucleotide
  Sense strand starting at position 454 of SEQ ID NO: 587209
acagaauagcuuggaaauc

SEQ ID NO: 774887 - RNA, 19 nt, Artificial Sequence
  Description of Artificial Sequence: Synthetic oligonucleotide
  Antisense strand to SEQ ID NO: 774886
gauuuccaagcuauucugu

SEQ ID NO: 774888 - RNA, 19 nt, Artificial Sequence
  Description of Artificial Sequence: Synthetic oligonucleotide
  Sense strand starting at position 601 of SEQ ID NO: 587209
ggccauaagcuccaucuuu

SEQ ID NO: 774889 - RNA, 19 nt, Artificial Sequence
  Description of Artificial Sequence: Synthetic oligonucleotide
  Antisense strand to SEQ ID NO: 774888
aaagauggagcuuauggcc

SEQ ID NO: 774890 - RNA, 19 nt, Artificial Sequence
  Description of Artificial Sequence: Synthetic oligonucleotide
  Sense strand starting at position 636 of SEQ ID NO: 587209
gcuuuauuggcuuggacca

SEQ ID NO: 774891 - RNA, 19 nt, Artificial Sequence
  Description of Artificial Sequence: Synthetic oligonucleotide
  Antisense strand to SEQ ID NO: 774890
ugguccaagccaauaaagc

SEQ ID NO: 774892 - RNA, 19 nt, Artificial Sequence
  Description of Artificial Sequence: Synthetic oligonucleotide
  Sense strand starting at position 717 of SEQ ID NO: 587209
ggaagagaugcucaugcga

SEQ ID NO: 774893 - RNA, 19 nt, Artificial Sequence
  Description of Artificial Sequence: Synthetic oligonucleotide
  Antisense strand to SEQ ID NO: 774892
ucgcaugagcaucucuucc

SEQ ID NO: 774894 - RNA, 19 nt, Artificial Sequence
  Description of Artificial Sequence: Synthetic oligonucleotide
  Sense strand starting at position 724 of SEQ ID NO: 587209
augcucaugcgagaaauca

SEQ ID NO: 774895 - RNA, 19 nt, Artificial Sequence
  Description of Artificial Sequence: Synthetic oligonucleotide
  Antisense strand to SEQ ID NO: 774894
ugauuucucgcaugagcau

SEQ ID NO: 774896 - RNA, 19 nt, Artificial Sequence
  Description of Artificial Sequence: Synthetic oligonucleotide
  Sense strand starting at position 765 of SEQ ID NO: 587209
uuccuagucuucccaggaa

SEQ ID NO: 774897 - RNA, 19 nt, Artificial Sequence
  Description of Artificial Sequence: Synthetic oligonucleotide
  Antisense strand to SEQ ID NO: 774896
uuccugggaagacuaggaa

SEQ ID NO: 774898 - RNA, 19 nt, Artificial Sequence
  Description of Artificial Sequence: Synthetic oligonucleotide
  Sense strand starting at position 851 of SEQ ID NO: 587209
guguccaaguuauugaagu

SEQ ID NO: 774899 - RNA, 19 nt, Artificial Sequence
  Description of Artificial Sequence: Synthetic oligonucleotide
  Antisense strand to SEQ ID NO: 774898
acuucaauaacuuggacac

SEQ ID NO: 774900 - RNA, 19 nt, Artificial Sequence
  Description of Artificial Sequence: Synthetic oligonucleotide
  Sense strand starting at position 853 of SEQ ID NO: 587209
guccaaguuauugaaguga

SEQ ID NO: 774901 - RNA, 19 nt, Artificial Sequence
  Description of Artificial Sequence: Synthetic oligonucleotide
  Antisense strand to SEQ ID NO: 774900
ucacuucaauaacuuggac

SEQ ID NO: 774902 - RNA, 19 nt, Artificial Sequence
  Description of Artificial Sequence: Synthetic oligonucleotide
  Sense strand starting at position 888 of SEQ ID NO: 587209
ccuugagaaaggugaucau

SEQ ID NO: 774903 - RNA, 19 nt, Artificial Sequence
  Description of Artificial Sequence: Synthetic oligonucleotide
  Antisense strand to SEQ ID NO: 774902
augaucaccuuucucaagg

SEQ ID NO: 774904 - RNA, 19 nt, Artificial Sequence
  Description of Artificial Sequence: Synthetic oligonucleotide
  Sense strand starting at position 899 of SEQ ID NO: 587209
gugaucauuuccuauuuau

SEQ ID NO: 774905 - RNA, 19 nt, Artificial Sequence
  Description of Artificial Sequence: Synthetic oligonucleotide
  Antisense strand to SEQ ID NO: 774904
auaaauaggaaaugaucac

SEQ ID NO: 774906 - RNA, 19 nt, Artificial Sequence
  Description of Artificial Sequence: Synthetic oligonucleotide
  Sense strand starting at position 1022 of SEQ ID NO: 587209
agagaauucuccucugugc

SEQ ID NO: 774907 - RNA, 19 nt, Artificial Sequence
  Description of Artificial Sequence: Synthetic oligonucleotide
  Antisense strand to SEQ ID NO: 774906
gcacagaggagaauucucu

SEQ ID NO: 774908 - RNA, 19 nt, Artificial Sequence
  Description of Artificial Sequence: Synthetic oligonucleotide
  Sense strand starting at position 1024 of SEQ ID NO: 587209
agaauucuccucugugcca

SEQ ID NO: 774909 - RNA, 19 nt, Artificial Sequence
  Description of Artificial Sequence: Synthetic oligonucleotide
  Antisense strand to SEQ ID NO: 774908
uggcacagaggagaauucu

SEQ ID NO: 774910 - RNA, 19 nt, Artificial Sequence
  Description of Artificial Sequence: Synthetic oligonucleotide
  Sense strand starting at position 1182 of SEQ ID NO: 587209
ccgucaaaucccugaacuc

SEQ ID NO: 774911 - RNA, 19 nt, Artificial Sequence
  Description of Artificial Sequence: Synthetic oligonucleotide
  Antisense strand to SEQ ID NO: 774910
gaguucagggauuugacgg

SEQ ID NO: 774912 - RNA, 19 nt, Artificial Sequence
  Description of Artificial Sequence: Synthetic oligonucleotide
  Sense strand starting at position 1278 of SEQ ID NO: 587209
cuaagcaaugcccagauau

SEQ ID NO: 774913 - RNA, 19 nt, Artificial Sequence
  Description of Artificial Sequence: Synthetic oligonucleotide
  Antisense strand to SEQ ID NO: 774912
auaucugggcauugcuuag

SEQ ID NO: 774914 - RNA, 19 nt, Artificial Sequence
  Description of Artificial Sequence: Synthetic oligonucleotide
  Sense strand starting at position 1289 of SEQ ID NO: 587209
ccagauauuccaugaagua

SEQ ID NO: 774915 - RNA, 19 nt, Artificial Sequence
  Description of Artificial Sequence: Synthetic oligonucleotide
  Antisense strand to SEQ ID NO: 774914
uacuucauggaauaucugg

SEQ ID NO: 774916 - RNA, 19 nt, Artificial Sequence
  Description of Artificial Sequence: Synthetic oligonucleotide
  Sense strand starting at position 1360 of SEQ ID NO: 587209
agcccuuucuugguaagga

SEQ ID NO: 774917 - RNA, 19 nt, Artificial Sequence
  Description of Artificial Sequence: Synthetic oligonucleotide
  Antisense strand to SEQ ID NO: 774916
uccuuaccaagaaagggcu

SEQ ID NO: 774918 - RNA, 19 nt, Artificial Sequence
  Description of Artificial Sequence: Synthetic oligonucleotide
  Sense strand starting at position 2078 of SEQ ID NO: 587209
aguguaguccgcucuaggu

SEQ ID NO: 774919 - RNA, 19 nt, Artificial Sequence
  Description of Artificial Sequence: Synthetic oligonucleotide
  Antisense strand to SEQ ID NO: 774918
accuagagcggacuacacu

SEQ ID NO: 774920 - RNA, 19 nt, Artificial Sequence
  Description of Artificial Sequence: Synthetic oligonucleotide
  Sense strand starting at position 2272 of SEQ ID NO: 587209
caaugucagccuugaaguu

SEQ ID NO: 774921 - RNA, 19 nt, Artificial Sequence
  Description of Artificial Sequence: Synthetic oligonucleotide
  Antisense strand to SEQ ID NO: 774920
aacuucaaggcugacauug

SEQ ID NO: 774922 - RNA, 19 nt, Artificial Sequence
  Description of Artificial Sequence: Synthetic oligonucleotide
  Sense strand starting at position 2302 of SEQ ID NO: 587209
uuuauuaaggagggcaaua

SEQ ID NO: 774923 - RNA, 19 nt, Artificial Sequence
  Description of Artificial Sequence: Synthetic oligonucleotide
  Antisense strand to SEQ ID NO: 774922
uauugcccuccuuaauaaa

SEQ ID NO: 774924 - RNA, 19 nt, Artificial Sequence
  Description of Artificial Sequence: Synthetic oligonucleotide
  Sense strand starting at position 2343 of SEQ ID NO: 587209
aaguaucauugguugccua

SEQ ID NO: 774925 - RNA, 19 nt, Artificial Sequence
  Description of Artificial Sequence: Synthetic oligonucleotide
  Antisense strand to SEQ ID NO: 774924
uaggcaaccaaugauacuu

SEQ ID NO: 774926 - RNA, 19 nt, Artificial Sequence
  Description of Artificial Sequence: Synthetic oligonucleotide
  Sense strand starting at position 2377 of SEQ ID NO: 587209
uguucuaggguuugggaga

SEQ ID NO: 774927 - RNA, 19 nt, Artificial Sequence
  Description of Artificial Sequence: Synthetic oligonucleotide
  Antisense strand to SEQ ID NO: 774926
ucucccaaacccuagaaca

SEQ ID NO: 774928 - RNA, 19 nt, Artificial Sequence
  Description of Artificial Sequence: Synthetic oligonucleotide
  Sense strand starting at position 2518 of SEQ ID NO: 587209
gaauuaaagcccgcguugu

SEQ ID NO: 774929 - RNA, 19 nt, Artificial Sequence
  Description of Artificial Sequence: Synthetic oligonucleotide
  Antisense strand to SEQ ID NO: 774928
acaacgcgggcuuuaauuc

SEQ ID NO: 774930 - RNA, 19 nt, Artificial Sequence
  Description of Artificial Sequence: Synthetic oligonucleotide
  Sense strand starting at position 2529 of SEQ ID NO: 587209
cgcguugucaccuuagagu

SEQ ID NO: 774931 - RNA, 19 nt, Artificial Sequence
  Description of Artificial Sequence: Synthetic oligonucleotide
  Antisense strand to SEQ ID NO: 774930
acucuaaggugacaacgcg

SEQ ID NO: 774932 - RNA, 19 nt, Artificial Sequence
  Description of Artificial Sequence: Synthetic oligonucleotide
  Sense strand starting at position 2561 of SEQ ID NO: 587209
auaugaggugcuuagucaa

SEQ ID NO: 774933 - RNA, 19 nt, Artificial Sequence
  Description of Artificial Sequence: Synthetic oligonucleotide
  Antisense strand to SEQ ID NO: 774932
uugacuaagcaccucauau

SEQ ID NO: 774934 - RNA, 19 nt, Artificial Sequence
  Description of Artificial Sequence: Synthetic oligonucleotide
  Sense strand starting at position 2564 of SEQ ID NO: 587209
ugaggugcuuagucaagga

SEQ ID NO: 774935 - RNA, 19 nt, Artificial Sequence
  Description of Artificial Sequence: Synthetic oligonucleotide
  Antisense strand to SEQ ID NO: 774934
uccuugacuaagcaccuca

SEQ ID NO: 774936 - RNA, 19 nt, Artificial Sequence
  Description of Artificial Sequence: Synthetic oligonucleotide
  Sense strand starting at position 2568 of SEQ ID NO: 587209
gugcuuagucaaggauuuc

SEQ ID NO: 774937 - RNA, 19 nt, Artificial Sequence
  Description of Artificial Sequence: Synthetic oligonucleotide
  Antisense strand to SEQ ID NO: 774936
gaaauccuugacuaagcac

SEQ ID NO: 774938 - RNA, 19 nt, Artificial Sequence
  Description of Artificial Sequence: Synthetic oligonucleotide
  Sense strand starting at position 2594 of SEQ ID NO: 587209
agugaugccucagcagaau

SEQ ID NO: 774939 - RNA, 19 nt, Artificial Sequence
  Description of Artificial Sequence: Synthetic oligonucleotide
  Antisense strand to SEQ ID NO: 774938
auucugcugaggcaucacu

SEQ ID NO: 774940 - RNA, 19 nt, Artificial Sequence
  Description of Artificial Sequence: Synthetic oligonucleotide
  Sense strand starting at position 2627 of SEQ ID NO: 587209
gggucugccagguaaagga

SEQ ID NO: 774941 - RNA, 19 nt, Artificial Sequence
  Description of Artificial Sequence: Synthetic oligonucleotide
  Antisense strand to SEQ ID NO: 774940
uccuuuaccuggcagaccc

SEQ ID NO: 774942 - RNA, 19 nt, Artificial Sequence
  Description of Artificial Sequence: Synthetic oligonucleotide
  Sense strand starting at position 2722 of SEQ ID NO: 587209
ggcccuuauggugggauua

SEQ ID NO: 774943 - RNA, 19 nt, Artificial Sequence
  Description of Artificial Sequence: Synthetic oligonucleotide
  Antisense strand to SEQ ID NO: 774942
uaaucccaccauaagggcc

SEQ ID NO: 774944 - RNA, 19 nt, Artificial Sequence
  Description of Artificial Sequence: Synthetic oligonucleotide
  Sense strand starting at position 3048 of SEQ ID NO: 587209
gaagguguuagugaccaca

SEQ ID NO: 774945 - RNA, 19 nt, Artificial Sequence
  Description of Artificial Sequence: Synthetic oligonucleotide
  Antisense strand to SEQ ID NO: 774944
uguggucacuaacaccuuc

SEQ ID NO: 774946 - RNA, 19 nt, Artificial Sequence
  Description of Artificial Sequence: Synthetic oligonucleotide
  Sense strand starting at position 3050 of SEQ ID NO: 587209
agguguuagugaccacaug

SEQ ID NO: 774947 - RNA, 19 nt, Artificial Sequence
  Description of Artificial Sequence: Synthetic oligonucleotide
  Antisense strand to SEQ ID NO: 774946
cauguggucacuaacaccu

SEQ ID NO: 774948 - RNA, 19 nt, Artificial Sequence
  Description of Artificial Sequence: Synthetic oligonucleotide
  Sense strand starting at position 3449 of SEQ ID NO: 587209
gggagucugcauuacugaa

SEQ ID NO: 774949 - RNA, 19 nt, Artificial Sequence
  Description of Artificial Sequence: Synthetic oligonucleotide
  Antisense strand to SEQ ID NO: 774948
uucaguaaugcagacuccc

SEQ ID NO: 774950 - RNA, 19 nt, Artificial Sequence
  Description of Artificial Sequence: Synthetic oligonucleotide
  Sense strand starting at position 3508 of SEQ ID NO: 587209
gagugaggacucuguggau

SEQ ID NO: 774951 - RNA, 19 nt, Artificial Sequence
  Description of Artificial Sequence: Synthetic oligonucleotide
  Antisense strand to SEQ ID NO: 774950
auccacagaguccucacuc

SEQ ID NO: 774952 - RNA, 19 nt, Artificial Sequence
  Description of Artificial Sequence: Synthetic oligonucleotide
  Sense strand starting at position 3591 of SEQ ID NO: 587209
augaguuauccaugucuuu

SEQ ID NO: 774953 - RNA, 19 nt, Artificial Sequence
  Description of Artificial Sequence: Synthetic oligonucleotide
  Antisense strand to SEQ ID NO: 774952
aaagacauggauaacucau

SEQ ID NO: 774954 - RNA, 19 nt, Artificial Sequence
  Description of Artificial Sequence: Synthetic oligonucleotide
  Sense strand starting at position 3594 of SEQ ID NO: 587209
aguuauccaugucuuuaua

SEQ ID NO: 774955 - RNA, 19 nt, Artificial Sequence
  Description of Artificial Sequence: Synthetic oligonucleotide
  Antisense strand to SEQ ID NO: 774954
uauaaagacauggauaacu

SEQ ID NO: 774956 - RNA, 19 nt, Artificial Sequence
  Description of Artificial Sequence: Synthetic oligonucleotide
  Sense strand starting at position 3882 of SEQ ID NO: 587209
gcccuuccuagggauagga

SEQ ID NO: 774957 - RNA, 19 nt, Artificial Sequence
  Description of Artificial Sequence: Synthetic oligonucleotide
  Antisense strand to SEQ ID NO: 774956
uccuaucccuaggaagggc

SEQ ID NO: 774958 - RNA, 19 nt, Artificial Sequence
  Description of Artificial Sequence: Synthetic oligonucleotide
  Sense strand starting at position 282 of SEQ ID NO: 587210
agcaauguuucuccaagaa

SEQ ID NO: 774959 - RNA, 19 nt, Artificial Sequence
  Description of Artificial Sequence: Synthetic oligonucleotide
  Antisense strand to SEQ ID NO: 774958
uucuuggagaaacauugcu

SEQ ID NO: 774960 - RNA, 19 nt, Artificial Sequence
  Description of Artificial Sequence: Synthetic oligonucleotide
  Sense strand starting at position 300 of SEQ ID NO: 587210
aaugaaagcuggguugagu

SEQ ID NO: 774961 - RNA, 19 nt, Artificial Sequence
  Description of Artificial Sequence: Synthetic oligonucleotide
  Antisense strand to SEQ ID NO: 774960
acucaacccagcuuucauu

SEQ ID NO: 774962 - RNA, 19 nt, Artificial Sequence
  Description of Artificial Sequence: Synthetic oligonucleotide
  Sense strand starting at position 433 of SEQ ID NO: 587210
cagguuauucuacgagaga

SEQ ID NO: 774963 - RNA, 19 nt, Artificial Sequence
  Description of Artificial Sequence: Synthetic oligonucleotide
  Antisense strand to SEQ ID NO: 774962
ucucucguagaauaaccug

SEQ ID NO: 774964 - RNA, 19 nt, Artificial Sequence
  Description of Artificial Sequence: Synthetic oligonucleotide
  Sense strand starting at position 434 of SEQ ID NO: 587210
agguuauucuacgagagaa

SEQ ID NO: 774965 - RNA, 19 nt, Artificial Sequence
  Description of Artificial Sequence: Synthetic oligonucleotide
  Antisense strand to SEQ ID NO: 774964
uucucucguagaauaaccu

SEQ ID NO: 774966 - RNA, 19 nt, Artificial Sequence
  Description of Artificial Sequence: Synthetic oligonucleotide
  Sense strand starting at position 625 of SEQ ID NO: 587210
auaagaucucugugccuaa

SEQ ID NO: 774967 - RNA, 19 nt, Artificial Sequence
  Description of Artificial Sequence: Synthetic oligonucleotide
  Antisense strand to SEQ ID NO: 774966
uuaggcacagagaucuuau

SEQ ID NO: 774968 - RNA, 19 nt, Artificial Sequence
  Description of Artificial Sequence: Synthetic oligonucleotide
  Sense strand starting at position 626 of SEQ ID NO: 587210
uaagaucucugugccuaag

SEQ ID NO: 774969 - RNA, 19 nt, Artificial Sequence
  Description of Artificial Sequence: Synthetic oligonucleotide
  Antisense strand to SEQ ID NO: 774968
cuuaggcacagagaucuua

SEQ ID NO: 774970 - RNA, 19 nt, Artificial Sequence
  Description of Artificial Sequence: Synthetic oligonucleotide
  Sense strand starting at position 628 of SEQ ID NO: 587210
agaucucugugccuaagga

SEQ ID NO: 774971 - RNA, 19 nt, Artificial Sequence
  Description of Artificial Sequence: Synthetic oligonucleotide
  Antisense strand to SEQ ID NO: 774970
uccuuaggcacagagaucu

SEQ ID NO: 774972 - RNA, 19 nt, Artificial Sequence
  Description of Artificial Sequence: Synthetic oligonucleotide
  Sense strand starting at position 629 of SEQ ID NO: 587210
gaucucugugccuaaggaa

SEQ ID NO: 774973 - RNA, 19 nt, Artificial Sequence
  Description of Artificial Sequence: Synthetic oligonucleotide
  Antisense strand to SEQ ID NO: 774972
uuccuuaggcacagagauc

SEQ ID NO: 774974 - RNA, 19 nt, Artificial Sequence
  Description of Artificial Sequence: Synthetic oligonucleotide
  Sense strand starting at position 834 of SEQ ID NO: 587210
augcgaauuagggagggua

SEQ ID NO: 774975 - RNA, 19 nt, Artificial Sequence
  Description of Artificial Sequence: Synthetic oligonucleotide
  Antisense strand to SEQ ID NO: 774974
uacccucccuaauucgcau

SEQ ID NO: 774976 - RNA, 19 nt, Artificial Sequence
  Description of Artificial Sequence: Synthetic oligonucleotide
  Sense strand starting at position 837 of SEQ ID NO: 587210
cgaauuagggaggguaagu

SEQ ID NO: 774977 - RNA, 19 nt, Artificial Sequence
  Description of Artificial Sequence: Synthetic oligonucleotide
  Antisense strand to SEQ ID NO: 774976
acuuacccucccuaauucg

SEQ ID NO: 774978 - RNA, 19 nt, Artificial Sequence
  Description of Artificial Sequence: Synthetic oligonucleotide
  Sense strand starting at position 1344 of SEQ ID NO: 587210
cugaaucgcucuuugauua

SEQ ID NO: 774979 - RNA, 19 nt, Artificial Sequence
  Description of Artificial Sequence: Synthetic oligonucleotide
  Antisense strand to SEQ ID NO: 774978
uaaucaaagagcgauucag

SEQ ID NO: 774980 - RNA, 19 nt, Artificial Sequence
  Description of Artificial Sequence: Synthetic oligonucleotide
  Sense strand starting at position 1345 of SEQ ID NO: 587210
ugaaucgcucuuugauuaa

SEQ ID NO: 774981 - RNA, 19 nt, Artificial Sequence
  Description of Artificial Sequence: Synthetic oligonucleotide
  Antisense strand to SEQ ID NO: 774980
uuaaucaaagagcgauuca

SEQ ID NO: 774982 - RNA, 19 nt, Artificial Sequence
  Description of Artificial Sequence: Synthetic oligonucleotide
  Sense strand starting at position 1348 of SEQ ID NO: 587210
aucgcucuuugauuaaauu

SEQ ID NO: 774983 - RNA, 19 nt, Artificial Sequence
  Description of Artificial Sequence: Synthetic oligonucleotide
  Antisense strand to SEQ ID NO: 774982
aauuuaaucaaagagcgau

SEQ ID NO: 774984 - RNA, 19 nt, Artificial Sequence
  Description of Artificial Sequence: Synthetic oligonucleotide
  Sense strand starting at position 1470 of SEQ ID NO: 587210
gagucaggauucuucucuu

SEQ ID NO: 774985 - RNA, 19 nt, Artificial Sequence
  Description of Artificial Sequence: Synthetic oligonucleotide
  Antisense strand to SEQ ID NO: 774984
aagagaagaauccugacuc

SEQ ID NO: 774986 - RNA, 19 nt, Artificial Sequence
  Description of Artificial Sequence: Synthetic oligonucleotide
  Sense strand starting at position 1509 of SEQ ID NO: 587210
ugcacacucggcgagagau

SEQ ID NO: 774987 - RNA, 19 nt, Artificial Sequence
  Description of Artificial Sequence: Synthetic oligonucleotide
  Antisense strand to SEQ ID NO: 774986
aucucucgccgagugugca

SEQ ID NO: 774988 - RNA, 19 nt, Artificial Sequence
  Description of Artificial Sequence: Synthetic oligonucleotide
  Sense strand starting at position 2017 of SEQ ID NO: 587210
cagcguuccugauuggaua

SEQ ID NO: 774989 - RNA, 19 nt, Artificial Sequence
  Description of Artificial Sequence: Synthetic oligonucleotide
  Antisense strand to SEQ ID NO: 774988
uauccaaucaggaacgcug

SEQ ID NO: 774990 - RNA, 19 nt, Artificial Sequence
  Description of Artificial Sequence: Synthetic oligonucleotide
  Sense strand starting at position 2018 of SEQ ID NO: 587210
agcguuccugauuggauaa

SEQ ID NO: 774991 - RNA, 19 nt, Artificial Sequence
  Description of Artificial Sequence: Synthetic oligonucleotide
  Antisense strand to SEQ ID NO: 774990
uuauccaaucaggaacgcu

SEQ ID NO: 774992 - RNA, 19 nt, Artificial Sequence
  Description of Artificial Sequence: Synthetic oligonucleotide
  Sense strand starting at position 2184 of SEQ ID NO: 587210
auuuaaccuugugaauaag

SEQ ID NO: 774993 - RNA, 19 nt, Artificial Sequence
  Description of Artificial Sequence: Synthetic oligonucleotide
  Antisense strand to SEQ ID NO: 774992
cuuauucacaagguuaaau

SEQ ID NO: 774994 - RNA, 19 nt, Artificial Sequence
  Description of Artificial Sequence: Synthetic oligonucleotide
  Sense strand starting at position 2195 of SEQ ID NO: 587210
ugaauaaggccauaugcau

SEQ ID NO: 774995 - RNA, 19 nt, Artificial Sequence
  Description of Artificial Sequence: Synthetic oligonucleotide
  Antisense strand to SEQ ID NO: 774994
augcauauggccuuauuca

SEQ ID NO: 774996 - RNA, 19 nt, Artificial Sequence
  Description of Artificial Sequence: Synthetic oligonucleotide
  Sense strand starting at position 2695 of SEQ ID NO: 587210
cgacacgugaauuguacau

SEQ ID NO: 774997 - RNA, 19 nt, Artificial Sequence
  Description of Artificial Sequence: Synthetic oligonucleotide
  Antisense strand to SEQ ID NO: 774996
auguacaauucacgugucg

SEQ ID NO: 774998 - RNA, 19 nt, Artificial Sequence
  Description of Artificial Sequence: Synthetic oligonucleotide
  Sense strand starting at position 2697 of SEQ ID NO: 587210
acacgugaauuguacauuu

SEQ ID NO: 774999 - RNA, 19 nt, Artificial Sequence
  Description of Artificial Sequence: Synthetic oligonucleotide
  Antisense strand to SEQ ID NO: 774998
aaauguacaauucacgugu

SEQ ID NO: 775000 - RNA, 19 nt, Artificial Sequence
  Description of Artificial Sequence: Synthetic oligonucleotide
  Sense strand starting at position 2796 of SEQ ID NO: 587210
auucuaauaugugagugau

SEQ ID NO: 775001 - RNA, 19 nt, Artificial Sequence
  Description of Artificial Sequence: Synthetic oligonucleotide
  Antisense strand to SEQ ID NO: 775000
aucacucacauauuagaau

SEQ ID NO: 775002 - RNA, 19 nt, Artificial Sequence
  Description of Artificial Sequence: Synthetic oligonucleotide
  Sense strand starting at position 2798 of SEQ ID NO: 587210
ucuaauaugugagugauau

SEQ ID NO: 775003 - RNA, 19 nt, Artificial Sequence
  Description of Artificial Sequence: Synthetic oligonucleotide
  Antisense strand to SEQ ID NO: 775002
auaucacucacauauuaga

SEQ ID NO: 775004 - RNA, 19 nt, Artificial Sequence
  Description of Artificial Sequence: Synthetic oligonucleotide
  Sense strand starting at position 2799 of SEQ ID NO: 587210
cuaauaugugagugauaug

SEQ ID NO: 775005 - RNA, 19 nt, Artificial Sequence
  Description of Artificial Sequence: Synthetic oligonucleotide
  Antisense strand to SEQ ID NO: 775004
cauaucacucacauauuag

SEQ ID NO: 775006 - RNA, 19 nt, Artificial Sequence
  Description of Artificial Sequence: Synthetic oligonucleotide
  Sense strand starting at position 2804 of SEQ ID NO: 587210
augugagugauauguaauu

SEQ ID NO: 775007 - RNA, 19 nt, Artificial Sequence
  Description of Artificial Sequence: Synthetic oligonucleotide
  Antisense strand to SEQ ID NO: 775006
aauuacauaucacucacau

SEQ ID NO: 775008 - RNA, 19 nt, Artificial Sequence
  Description of Artificial Sequence: Synthetic oligonucleotide
  Sense strand starting at position 2806 of SEQ ID NO: 587210
gugagugauauguaauuau

SEQ ID NO: 775009 - RNA, 19 nt, Artificial Sequence
  Description of Artificial Sequence: Synthetic oligonucleotide
  Antisense strand to SEQ ID NO: 775008
auaauuacauaucacucac

SEQ ID NO: 775010 - RNA, 19 nt, Artificial Sequence
  Description of Artificial Sequence: Synthetic oligonucleotide
  Sense strand starting at position 3199 of SEQ ID NO: 587210
gagauuaaacgcuaugucu

SEQ ID NO: 775011 - RNA, 19 nt, Artificial Sequence
  Description of Artificial Sequence: Synthetic oligonucleotide
  Antisense strand to SEQ ID NO: 775010
agacauagcguuuaaucuc

SEQ ID NO: 775012 - RNA, 19 nt, Artificial Sequence
  Description of Artificial Sequence: Synthetic oligonucleotide
  Sense strand starting at position 3201 of SEQ ID NO: 587210
gauuaaacgcuaugucuuc

SEQ ID NO: 775013 - RNA, 19 nt, Artificial Sequence
  Description of Artificial Sequence: Synthetic oligonucleotide
  Antisense strand to SEQ ID NO: 775012
gaagacauagcguuuaauc

SEQ ID NO: 775014 - RNA, 19 nt, Artificial Sequence
  Description of Artificial Sequence: Synthetic oligonucleotide
  Sense strand starting at position 3239 of SEQ ID NO: 587210
acuuccaguguuuaaguau

SEQ ID NO: 775015 - RNA, 19 nt, Artificial Sequence
  Description of Artificial Sequence: Synthetic oligonucleotide
  Antisense strand to SEQ ID NO: 775014
auacuuaaacacuggaagu

SEQ ID NO: 775016 - RNA, 19 nt, Artificial Sequence
  Description of Artificial Sequence: Synthetic oligonucleotide
  Sense strand starting at position 3242 of SEQ ID NO: 587210
uccaguguuuaaguauaga

SEQ ID NO: 775017 - RNA, 19 nt, Artificial Sequence
  Description of Artificial Sequence: Synthetic oligonucleotide
  Antisense strand to SEQ ID NO: 775016
ucuauacuuaaacacugga

SEQ ID NO: 775018 - RNA, 19 nt, Artificial Sequence
  Description of Artificial Sequence: Synthetic oligonucleotide
  Sense strand starting at position 3308 of SEQ ID NO: 587210
guggccagaguguguuuau

SEQ ID NO: 775019 - RNA, 19 nt, Artificial Sequence
  Description of Artificial Sequence: Synthetic oligonucleotide
  Antisense strand to SEQ ID NO: 775018
auaaacacacucuggccac

SEQ ID NO: 775020 - RNA, 19 nt, Artificial Sequence
  Description of Artificial Sequence: Synthetic oligonucleotide
  Sense strand starting at position 3311 of SEQ ID NO: 587210
gccagaguguguuuaucug

SEQ ID NO: 775021 - RNA, 19 nt, Artificial Sequence
  Description of Artificial Sequence: Synthetic oligonucleotide
  Antisense strand to SEQ ID NO: 775020
cagauaaacacacucuggc

SEQ ID NO: 775022 - RNA, 19 nt, Artificial Sequence
  Description of Artificial Sequence: Synthetic oligonucleotide
  Sense strand starting at position 3347 of SEQ ID NO: 587210
gggauugugugaguacaag

SEQ ID NO: 775023 - RNA, 19 nt, Artificial Sequence
  Description of Artificial Sequence: Synthetic oligonucleotide
  Antisense strand to SEQ ID NO: 775022
cuuguacucacacaauccc

SEQ ID NO: 775024 - RNA, 19 nt, Artificial Sequence
  Description of Artificial Sequence: Synthetic oligonucleotide
  Sense strand starting at position 3547 of SEQ ID NO: 587210
gcacguauuaguuagguau

SEQ ID NO: 775025 - RNA, 19 nt, Artificial Sequence
  Description of Artificial Sequence: Synthetic oligonucleotide
  Antisense strand to SEQ ID NO: 775024
auaccuaacuaauacgugc

SEQ ID NO: 775026 - RNA, 19 nt, Artificial Sequence
  Description of Artificial Sequence: Synthetic oligonucleotide
  Sense strand starting at position 3551 of SEQ ID NO: 587210
guauuaguuagguauugca

SEQ ID NO: 775027 - RNA, 19 nt, Artificial Sequence
  Description of Artificial Sequence: Synthetic oligonucleotide
  Antisense strand to SEQ ID NO: 775026
ugcaauaccuaacuaauac

SEQ ID NO: 775028 - RNA, 19 nt, Artificial Sequence
  Description of Artificial Sequence: Synthetic oligonucleotide
  Sense strand starting at position 3559 of SEQ ID NO: 587210
uagguauugcagcauaaca

SEQ ID NO: 775029 - RNA, 19 nt, Artificial Sequence
  Description of Artificial Sequence: Synthetic oligonucleotide
  Antisense strand to SEQ ID NO: 775028
uguuaugcugcaauaccua

SEQ ID NO: 775030 - RNA, 19 nt, Artificial Sequence
  Description of Artificial Sequence: Synthetic oligonucleotide
  Sense strand starting at position 3561 of SEQ ID NO: 587210
gguauugcagcauaacaaa

SEQ ID NO: 775031 - RNA, 19 nt, Artificial Sequence
  Description of Artificial Sequence: Synthetic oligonucleotide
  Antisense strand to SEQ ID NO: 775030
uuuguuaugcugcaauacc

SEQ ID NO: 775032 - RNA, 19 nt, Artificial Sequence
  Description of Artificial Sequence: Synthetic oligonucleotide
  Sense strand starting at position 3895 of SEQ ID NO: 587210
ggcuucuuagcucacaauu

SEQ ID NO: 775033 - RNA, 19 nt, Artificial Sequence
  Description of Artificial Sequence: Synthetic oligonucleotide
  Antisense strand to SEQ ID NO: 775032
aauugugagcuaagaagcc

SEQ ID NO: 775034 - RNA, 19 nt, Artificial Sequence
  Description of Artificial Sequence: Synthetic oligonucleotide
  Sense strand starting at position 3907 of SEQ ID NO: 587210
cacaauugagauggucagu

SEQ ID NO: 775035 - RNA, 19 nt, Artificial Sequence
  Description of Artificial Sequence: Synthetic oligonucleotide
  Antisense strand to SEQ ID NO: 775034
acugaccaucucaauugug

SEQ ID NO: 775036 - RNA, 19 nt, Artificial Sequence
  Description of Artificial Sequence: Synthetic oligonucleotide
  Sense strand starting at position 3944 of SEQ ID NO: 587210
uggagcaauucuucugauc

SEQ ID NO: 775037 - RNA, 19 nt, Artificial Sequence
  Description of Artificial Sequence: Synthetic oligonucleotide
  Antisense strand to SEQ ID NO: 775036
gaucagaagaauugcucca

SEQ ID NO: 775038 - RNA, 19 nt, Artificial Sequence
  Description of Artificial Sequence: Synthetic oligonucleotide
  Sense strand starting at position 520 of SEQ ID NO: 587211
gcugcagugaguuauauag

SEQ ID NO: 775039 - RNA, 19 nt, Artificial Sequence
  Description of Artificial Sequence: Synthetic oligonucleotide
  Antisense strand to SEQ ID NO: 775038
cuauauaacucacugcagc

SEQ ID NO: 775040 - RNA, 19 nt, Artificial Sequence
  Description of Artificial Sequence: Synthetic oligonucleotide
  Sense strand starting at position 522 of SEQ ID NO: 587211
ugcagugaguuauauagaa

SEQ ID NO: 775041 - RNA, 19 nt, Artificial Sequence
  Description of Artificial Sequence: Synthetic oligonucleotide
  Antisense strand to SEQ ID NO: 775040
uucuauauaacucacugca

SEQ ID NO: 775042 - RNA, 19 nt, Artificial Sequence
  Description of Artificial Sequence: Synthetic oligonucleotide
  Sense strand starting at position 607 of SEQ ID NO: 587211
uccaguguuucccuacaga

SEQ ID NO: 775043 - RNA, 19 nt, Artificial Sequence
  Description of Artificial Sequence: Synthetic oligonucleotide
  Antisense strand to SEQ ID NO: 775042
ucuguagggaaacacugga

SEQ ID NO: 775044 - RNA, 19 nt, Artificial Sequence
  Description of Artificial Sequence: Synthetic oligonucleotide
  Sense strand starting at position 610 of SEQ ID NO: 587211
aguguuucccuacagaguu

SEQ ID NO: 775045 - RNA, 19 nt, Artificial Sequence
  Description of Artificial Sequence: Synthetic oligonucleotide
  Antisense strand to SEQ ID NO: 775044
aacucuguagggaaacacu

SEQ ID NO: 775046 - RNA, 19 nt, Artificial Sequence
  Description of Artificial Sequence: Synthetic oligonucleotide
  Sense strand starting at position 679 of SEQ ID NO: 587211
agccuucgauccuuucuua

SEQ ID NO: 775047 - RNA, 19 nt, Artificial Sequence
  Description of Artificial Sequence: Synthetic oligonucleotide
  Antisense strand to SEQ ID NO: 775046
uaagaaaggaucgaaggcu

SEQ ID NO: 775048 - RNA, 19 nt, Artificial Sequence
  Description of Artificial Sequence: Synthetic oligonucleotide
  Sense strand starting at position 708 of SEQ ID NO: 587211
agauccaaacugugaacuu

SEQ ID NO: 775049 - RNA, 19 nt, Artificial Sequence
  Description of Artificial Sequence: Synthetic oligonucleotide
  Antisense strand to SEQ ID NO: 775048
aaguucacaguuuggaucu

SEQ ID NO: 775050 - RNA, 19 nt, Artificial Sequence
  Description of Artificial Sequence: Synthetic oligonucleotide
  Sense strand starting at position 717 of SEQ ID NO: 587211
cugugaacuuggcuuccua

SEQ ID NO: 775051 - RNA, 19 nt, Artificial Sequence
  Description of Artificial Sequence: Synthetic oligonucleotide
  Antisense strand to SEQ ID NO: 775050
uaggaagccaaguucacag

SEQ ID NO: 775052 - RNA, 19 nt, Artificial Sequence
  Description of Artificial Sequence: Synthetic oligonucleotide
  Sense strand starting at position 761 of SEQ ID NO: 587211
ugccuuugcacgugagguu

SEQ ID NO: 775053 - RNA, 19 nt, Artificial Sequence
  Description of Artificial Sequence: Synthetic oligonucleotide
  Antisense strand to SEQ ID NO: 775052
aaccucacgugcaaaggca

SEQ ID NO: 775054 - RNA, 19 nt, Artificial Sequence
  Description of Artificial Sequence: Synthetic oligonucleotide
  Sense strand starting at position 773 of SEQ ID NO: 587211
ugagguucccacugagaga

SEQ ID NO: 775055 - RNA, 19 nt, Artificial Sequence
  Description of Artificial Sequence: Synthetic oligonucleotide
  Antisense strand to SEQ ID NO: 775054
ucucucagugggaaccuca

SEQ ID NO: 775056 - RNA, 19 nt, Artificial Sequence
  Description of Artificial Sequence: Synthetic oligonucleotide
  Sense strand starting at position 909 of SEQ ID NO: 587211
ugugcuucccucugccaua

SEQ ID NO: 775057 - RNA, 19 nt, Artificial Sequence
  Description of Artificial Sequence: Synthetic oligonucleotide
  Antisense strand to SEQ ID NO: 775056
uauggcagagggaagcaca

SEQ ID NO: 775058 - RNA, 19 nt, Artificial Sequence
  Description of Artificial Sequence: Synthetic oligonucleotide
  Sense strand starting at position 955 of SEQ ID NO: 587211
caguguuaggucugcguuu

SEQ ID NO: 775059 - RNA, 19 nt, Artificial Sequence
  Description of Artificial Sequence: Synthetic oligonucleotide
  Antisense strand to SEQ ID NO: 775058
aaacgcagaccuaacacug

SEQ ID NO: 775060 - RNA, 19 nt, Artificial Sequence
  Description of Artificial Sequence: Synthetic oligonucleotide
  Sense strand starting at position 957 of SEQ ID NO: 587211
guguuaggucugcguuucu

SEQ ID NO: 775061 - RNA, 19 nt, Artificial Sequence
  Description of Artificial Sequence: Synthetic oligonucleotide
  Antisense strand to SEQ ID NO: 775060
agaaacgcagaccuaacac

SEQ ID NO: 775062 - RNA, 19 nt, Artificial Sequence
  Description of Artificial Sequence: Synthetic oligonucleotide
  Sense strand starting at position 993 of SEQ ID NO: 587211
agccaaugcuuggauaaga

SEQ ID NO: 775063 - RNA, 19 nt, Artificial Sequence
  Description of Artificial Sequence: Synthetic oligonucleotide
  Antisense strand to SEQ ID NO: 775062
ucuuauccaagcauuggcu

SEQ ID NO: 775064 - RNA, 19 nt, Artificial Sequence
  Description of Artificial Sequence: Synthetic oligonucleotide
  Sense strand starting at position 1190 of SEQ ID NO: 587211
ucgcuuugaggccaagagu

SEQ ID NO: 775065 - RNA, 19 nt, Artificial Sequence
  Description of Artificial Sequence: Synthetic oligonucleotide
  Antisense strand to SEQ ID NO: 775064
acucuuggccucaaagcga

SEQ ID NO: 775066 - RNA, 19 nt, Artificial Sequence
  Description of Artificial Sequence: Synthetic oligonucleotide
  Sense strand starting at position 1326 of SEQ ID NO: 587211
augguuugaucccaggaaa

SEQ ID NO: 775067 - RNA, 19 nt, Artificial Sequence
  Description of Artificial Sequence: Synthetic oligonucleotide
  Antisense strand to SEQ ID NO: 775066
uuuccugggaucaaaccau

SEQ ID NO: 775068 - RNA, 19 nt, Artificial Sequence
  Description of Artificial Sequence: Synthetic oligonucleotide
  Sense strand starting at position 1329 of SEQ ID NO: 587211
guuugaucccaggaaaucg

SEQ ID NO: 775069 - RNA, 19 nt, Artificial Sequence
  Description of Artificial Sequence: Synthetic oligonucleotide
  Antisense strand to SEQ ID NO: 775068
cgauuuccugggaucaaac

SEQ ID NO: 775070 - RNA, 19 nt, Artificial Sequence
  Description of Artificial Sequence: Synthetic oligonucleotide
  Sense strand starting at position 1478 of SEQ ID NO: 587211
gcucacauacccgaaguuu

SEQ ID NO: 775071 - RNA, 19 nt, Artificial Sequence
  Description of Artificial Sequence: Synthetic oligonucleotide
  Antisense strand to SEQ ID NO: 775070
aaacuucggguaugugagc

SEQ ID NO: 775072 - RNA, 19 nt, Artificial Sequence
  Description of Artificial Sequence: Synthetic oligonucleotide
  Sense strand starting at position 2727 of SEQ ID NO: 587211
ugcaaagggacucggaauu

SEQ ID NO: 775073 - RNA, 19 nt, Artificial Sequence
  Description of Artificial Sequence: Synthetic oligonucleotide
  Antisense strand to SEQ ID NO: 775072
aauuccgagucccuuugca

SEQ ID NO: 775074 - RNA, 19 nt, Artificial Sequence
  Description of Artificial Sequence: Synthetic oligonucleotide
  Sense strand starting at position 2783 of SEQ ID NO: 587211
gaguguuccugggugagaa

SEQ ID NO: 775075 - RNA, 19 nt, Artificial Sequence
  Description of Artificial Sequence: Synthetic oligonucleotide
  Antisense strand to SEQ ID NO: 775074
uucucacccaggaacacuc

SEQ ID NO: 775076 - RNA, 19 nt, Artificial Sequence
  Description of Artificial Sequence: Synthetic oligonucleotide
  Sense strand starting at position 2784 of SEQ ID NO: 587211
aguguuccugggugagaag

SEQ ID NO: 775077 - RNA, 19 nt, Artificial Sequence
  Description of Artificial Sequence: Synthetic oligonucleotide
  Antisense strand to SEQ ID NO: 775076
cuucucacccaggaacacu

SEQ ID NO: 775078 - RNA, 19 nt, Artificial Sequence
  Description of Artificial Sequence: Synthetic oligonucleotide
  Sense strand starting at position 2804 of SEQ ID NO: 587211
guuuaagaaugggaaggaa

SEQ ID NO: 775079 - RNA, 19 nt, Artificial Sequence
  Description of Artificial Sequence: Synthetic oligonucleotide
  Antisense strand to SEQ ID NO: 775078
uuccuucccauucuuaaac

SEQ ID NO: 775080 - RNA, 19 nt, Artificial Sequence
  Description of Artificial Sequence: Synthetic oligonucleotide
  Sense strand starting at position 2885 of SEQ ID NO: 587211
guggaucucaagugccauu

SEQ ID NO: 775081 - RNA, 19 nt, Artificial Sequence
  Description of Artificial Sequence: Synthetic oligonucleotide
  Antisense strand to SEQ ID NO: 775080
aauggcacuugagauccac

SEQ ID NO: 775082 - RNA, 19 nt, Artificial Sequence
  Description of Artificial Sequence: Synthetic oligonucleotide
  Sense strand starting at position 2898 of SEQ ID NO: 587211
gccauuucccucugguaac

SEQ ID NO: 775083 - RNA, 19 nt, Artificial Sequence
  Description of Artificial Sequence: Synthetic oligonucleotide
  Antisense strand to SEQ ID NO: 775082
guuaccagagggaaauggc

SEQ ID NO: 775084 - RNA, 19 nt, Artificial Sequence
  Description of Artificial Sequence: Synthetic oligonucleotide
  Sense strand starting at position 2916 of SEQ ID NO: 587211
cagagaagcugcuggugau

SEQ ID NO: 775085 - RNA, 19 nt, Artificial Sequence
  Description of Artificial Sequence: Synthetic oligonucleotide
  Antisense strand to SEQ ID NO: 775084
aucaccagcagcuucucug

SEQ ID NO: 775086 - RNA, 19 nt, Artificial Sequence
  Description of Artificial Sequence: Synthetic oligonucleotide
  Sense strand starting at position 3141 of SEQ ID NO: 587211
gggcaaucuucuccacaga

SEQ ID NO: 775087 - RNA, 19 nt, Artificial Sequence
  Description of Artificial Sequence: Synthetic oligonucleotide
  Antisense strand to SEQ ID NO: 775086
ucuguggagaagauugccc

SEQ ID NO: 775088 - RNA, 19 nt, Artificial Sequence
  Description of Artificial Sequence: Synthetic oligonucleotide
  Sense strand starting at position 3189 of SEQ ID NO: 587211
ggugauguggcucgaacag

SEQ ID NO: 775089 - RNA, 19 nt, Artificial Sequence
  Description of Artificial Sequence: Synthetic oligonucleotide
  Antisense strand to SEQ ID NO: 775088
cuguucgagccacaucacc

SEQ ID NO: 775090 - RNA, 19 nt, Artificial Sequence
  Description of Artificial Sequence: Synthetic oligonucleotide
  Sense strand starting at position 3268 of SEQ ID NO: 587211
aggauaugaucaucauguu

SEQ ID NO: 775091 - RNA, 19 nt, Artificial Sequence
  Description of Artificial Sequence: Synthetic oligonucleotide
  Antisense strand to SEQ ID NO: 775090
aacaugaugaucauauccu

SEQ ID NO: 775092 - RNA, 19 nt, Artificial Sequence
  Description of Artificial Sequence: Synthetic oligonucleotide
  Sense strand starting at position 3271 of SEQ ID NO: 587211
auaugaucaucauguuugu

SEQ ID NO: 775093 - RNA, 19 nt, Artificial Sequence
  Description of Artificial Sequence: Synthetic oligonucleotide
  Antisense strand to SEQ ID NO: 775092
acaaacaugaugaucauau

SEQ ID NO: 775094 - RNA, 19 nt, Artificial Sequence
  Description of Artificial Sequence: Synthetic oligonucleotide
  Sense strand starting at position 3274 of SEQ ID NO: 587211
ugaucaucauguuugugga

SEQ ID NO: 775095 - RNA, 19 nt, Artificial Sequence
  Description of Artificial Sequence: Synthetic oligonucleotide
  Antisense strand to SEQ ID NO: 775094
uccacaaacaugaugauca

SEQ ID NO: 775096 - RNA, 19 nt, Artificial Sequence
  Description of Artificial Sequence: Synthetic oligonucleotide
  Sense strand starting at position 3275 of SEQ ID NO: 587211
gaucaucauguuuguggau

SEQ ID NO: 775097 - RNA, 19 nt, Artificial Sequence
  Description of Artificial Sequence: Synthetic oligonucleotide
  Antisense strand to SEQ ID NO: 775096
auccacaaacaugaugauc

SEQ ID NO: 775098 - RNA, 19 nt, Artificial Sequence
  Description of Artificial Sequence: Synthetic oligonucleotide
  Sense strand starting at position 3276 of SEQ ID NO: 587211
aucaucauguuuguggaua

SEQ ID NO: 775099 - RNA, 19 nt, Artificial Sequence
  Description of Artificial Sequence: Synthetic oligonucleotide
  Antisense strand to SEQ ID NO: 775098
uauccacaaacaugaugau

SEQ ID NO: 775100 - RNA, 19 nt, Artificial Sequence
  Description of Artificial Sequence: Synthetic oligonucleotide
  Sense strand starting at position 3277 of SEQ ID NO: 587211
ucaucauguuuguggauag

SEQ ID NO: 775101 - RNA, 19 nt, Artificial Sequence
  Description of Artificial Sequence: Synthetic oligonucleotide
  Antisense strand to SEQ ID NO: 775100
cuauccacaaacaugauga

SEQ ID NO: 775102 - RNA, 19 nt, Artificial Sequence
  Description of Artificial Sequence: Synthetic oligonucleotide
  Sense strand starting at position 3321 of SEQ ID NO: 587211
ggguaaggaugcugagguu

SEQ ID NO: 775103 - RNA, 19 nt, Artificial Sequence
  Description of Artificial Sequence: Synthetic oligonucleotide
  Antisense strand to SEQ ID NO: 775102
aaccucagcauccuuaccc

SEQ ID NO: 775104 - RNA, 19 nt, Artificial Sequence
  Description of Artificial Sequence: Synthetic oligonucleotide
  Sense strand starting at position 3417 of SEQ ID NO: 587211
ugaagaaguucguccagag

SEQ ID NO: 775105 - RNA, 19 nt, Artificial Sequence
  Description of Artificial Sequence: Synthetic oligonucleotide
  Antisense strand to SEQ ID NO: 775104
cucuggacgaacuucuuca

SEQ ID NO: 775106 - RNA, 19 nt, Artificial Sequence
  Description of Artificial Sequence: Synthetic oligonucleotide
  Sense strand starting at position 3444 of SEQ ID NO: 587211
gccugcucuucucugcaga

SEQ ID NO: 775107 - RNA, 19 nt, Artificial Sequence
  Description of Artificial Sequence: Synthetic oligonucleotide
  Antisense strand to SEQ ID NO: 775106
ucugcagagaagagcaggc

SEQ ID NO: 775108 - RNA, 19 nt, Artificial Sequence
  Description of Artificial Sequence: Synthetic oligonucleotide
  Sense strand starting at position 3446 of SEQ ID NO: 587211
cugcucuucucugcagaga

SEQ ID NO: 775109 - RNA, 19 nt, Artificial Sequence
  Description of Artificial Sequence: Synthetic oligonucleotide
  Antisense strand to SEQ ID NO: 775108
ucucugcagagaagagcag

SEQ ID NO: 775110 - RNA, 19 nt, Artificial Sequence
  Description of Artificial Sequence: Synthetic oligonucleotide
  Sense strand starting at position 3529 of SEQ ID NO: 587211
ccucaauucugguggugag

SEQ ID NO: 775111 - RNA, 19 nt, Artificial Sequence
  Description of Artificial Sequence: Synthetic oligonucleotide
  Antisense strand to SEQ ID NO: 775110
cucaccaccagaauugagg

SEQ ID NO: 775112 - RNA, 19 nt, Artificial Sequence
  Description of Artificial Sequence: Synthetic oligonucleotide
  Sense strand starting at position 3530 of SEQ ID NO: 587211
cucaauucugguggugagu

SEQ ID NO: 775113 - RNA, 19 nt, Artificial Sequence
  Description of Artificial Sequence: Synthetic oligonucleotide
  Antisense strand to SEQ ID NO: 775112
acucaccaccagaauugag

SEQ ID NO: 775114 - RNA, 19 nt, Artificial Sequence
  Description of Artificial Sequence: Synthetic oligonucleotide
  Sense strand starting at position 3592 of SEQ ID NO: 587211
gaguguuaaaggcgccuga

SEQ ID NO: 775115 - RNA, 19 nt, Artificial Sequence
  Description of Artificial Sequence: Synthetic oligonucleotide
  Antisense strand to SEQ ID NO: 775114
ucaggcgccuuuaacacuc

SEQ ID NO: 775116 - RNA, 19 nt, Artificial Sequence
  Description of Artificial Sequence: Synthetic oligonucleotide
  Sense strand starting at position 3647 of SEQ ID NO: 587211
cugggagucucgaggucaa

SEQ ID NO: 775117 - RNA, 19 nt, Artificial Sequence
  Description of Artificial Sequence: Synthetic oligonucleotide
  Antisense strand to SEQ ID NO: 775116
uugaccucgagacucccag

SEQ ID NO: 775118 - RNA, 19 nt, Artificial Sequence
  Description of Artificial Sequence: Synthetic oligonucleotide
  Sense strand starting at position 251 of SEQ ID NO: 587212
gagggugcucaggauguuu

SEQ ID NO: 775119 - RNA, 19 nt, Artificial Sequence
  Description of Artificial Sequence: Synthetic oligonucleotide
  Antisense strand to SEQ ID NO: 775118
aaacauccugagcacccuc

SEQ ID NO: 775120 - RNA, 19 nt, Artificial Sequence
  Description of Artificial Sequence: Synthetic oligonucleotide
  Sense strand starting at position 2096 of SEQ ID NO: 587212
guugguguuacacacugau

SEQ ID NO: 775121 - RNA, 19 nt, Artificial Sequence
  Description of Artificial Sequence: Synthetic oligonucleotide
  Antisense strand to SEQ ID NO: 775120
aucaguguguaacaccaac

SEQ ID NO: 775122 - RNA, 19 nt, Artificial Sequence
  Description of Artificial Sequence: Synthetic oligonucleotide
  Sense strand starting at position 2099 of SEQ ID NO: 587212
gguguuacacacugauuaa

SEQ ID NO: 775123 - RNA, 19 nt, Artificial Sequence
  Description of Artificial Sequence: Synthetic oligonucleotide
  Antisense strand to SEQ ID NO: 775122
uuaaucaguguguaacacc

SEQ ID NO: 775124 - RNA, 19 nt, Artificial Sequence
  Description of Artificial Sequence: Synthetic oligonucleotide
  Sense strand starting at position 2194 of SEQ ID NO: 587212
guuggaagaacucgggaua

SEQ ID NO: 775125 - RNA, 19 nt, Artificial Sequence
  Description of Artificial Sequence: Synthetic oligonucleotide
  Antisense strand to SEQ ID NO: 775124
uaucccgaguucuuccaac

SEQ ID NO: 775126 - RNA, 19 nt, Artificial Sequence
  Description of Artificial Sequence: Synthetic oligonucleotide
  Sense strand starting at position 2206 of SEQ ID NO: 587212
cgggauaauccagguugac

SEQ ID NO: 775127 - RNA, 19 nt, Artificial Sequence
  Description of Artificial Sequence: Synthetic oligonucleotide
  Antisense strand to SEQ ID NO: 775126
gucaaccuggauuaucccg

SEQ ID NO: 775128 - RNA, 19 nt, Artificial Sequence
  Description of Artificial Sequence: Synthetic oligonucleotide
  Sense strand starting at position 2305 of SEQ ID NO: 587212
acuaaauuaucuguaguga

SEQ ID NO: 775129 - RNA, 19 nt, Artificial Sequence
  Description of Artificial Sequence: Synthetic oligonucleotide
  Antisense strand to SEQ ID NO: 775128
ucacuacagauaauuuagu

SEQ ID NO: 775130 - RNA, 19 nt, Artificial Sequence
  Description of Artificial Sequence: Synthetic oligonucleotide
  Sense strand starting at position 2313 of SEQ ID NO: 587212
aucuguagugagcaaauua

SEQ ID NO: 775131 - RNA, 19 nt, Artificial Sequence
  Description of Artificial Sequence: Synthetic oligonucleotide
  Antisense strand to SEQ ID NO: 775130
uaauuugcucacuacagau

SEQ ID NO: 775132 - RNA, 19 nt, Artificial Sequence
  Description of Artificial Sequence: Synthetic oligonucleotide
  Sense strand starting at position 2661 of SEQ ID NO: 587212
uuagguuucuuaccugaac

SEQ ID NO: 775133 - RNA, 19 nt, Artificial Sequence
  Description of Artificial Sequence: Synthetic oligonucleotide
  Antisense strand to SEQ ID NO: 775132
guucagguaagaaaccuaa

SEQ ID NO: 775134 - RNA, 19 nt, Artificial Sequence
  Description of Artificial Sequence: Synthetic oligonucleotide
  Sense strand starting at position 2664 of SEQ ID NO: 587212
gguuucuuaccugaacugu

SEQ ID NO: 775135 - RNA, 19 nt, Artificial Sequence
  Description of Artificial Sequence: Synthetic oligonucleotide
  Antisense strand to SEQ ID NO: 775134
acaguucagguaagaaacc

SEQ ID NO: 775136 - RNA, 19 nt, Artificial Sequence
  Description of Artificial Sequence: Synthetic oligonucleotide
  Sense strand starting at position 2672 of SEQ ID NO: 587212
accugaacuguuuguguua

SEQ ID NO: 775137 - RNA, 19 nt, Artificial Sequence
  Description of Artificial Sequence: Synthetic oligonucleotide
  Antisense strand to SEQ ID NO: 775136
uaacacaaacaguucaggu

SEQ ID NO: 775138 - RNA, 19 nt, Artificial Sequence
  Description of Artificial Sequence: Synthetic oligonucleotide
  Sense strand starting at position 2673 of SEQ ID NO: 587212
ccugaacuguuuguguuaa

SEQ ID NO: 775139 - RNA, 19 nt, Artificial Sequence
  Description of Artificial Sequence: Synthetic oligonucleotide
  Antisense strand to SEQ ID NO: 775138
uuaacacaaacaguucagg

SEQ ID NO: 775140 - RNA, 19 nt, Artificial Sequence
  Description of Artificial Sequence: Synthetic oligonucleotide
  Sense strand starting at position 2675 of SEQ ID NO: 587212
ugaacuguuuguguuaaau

SEQ ID NO: 775141 - RNA, 19 nt, Artificial Sequence
  Description of Artificial Sequence: Synthetic oligonucleotide
  Antisense strand to SEQ ID NO: 775140
auuuaacacaaacaguuca

SEQ ID NO: 775142 - RNA, 19 nt, Artificial Sequence
  Description of Artificial Sequence: Synthetic oligonucleotide
  Sense strand starting at position 2825 of SEQ ID NO: 587212
cucugagacucccauuaug

SEQ ID NO: 775143 - RNA, 19 nt, Artificial Sequence
  Description of Artificial Sequence: Synthetic oligonucleotide
  Antisense strand to SEQ ID NO: 775142
cauaaugggagucucagag

SEQ ID NO: 775144 - RNA, 19 nt, Artificial Sequence
  Description of Artificial Sequence: Synthetic oligonucleotide
  Sense strand starting at position 2847 of SEQ ID NO: 587212
augucuagucucuacuuga

SEQ ID NO: 775145 - RNA, 19 nt, Artificial Sequence
  Description of Artificial Sequence: Synthetic oligonucleotide
  Antisense strand to SEQ ID NO: 775144
ucaaguagagacuagacau

SEQ ID NO: 775146 - RNA, 19 nt, Artificial Sequence
  Description of Artificial Sequence: Synthetic oligonucleotide
  Sense strand starting at position 2961 of SEQ ID NO: 587212
acucuuaggguaugggaau

SEQ ID NO: 775147 - RNA, 19 nt, Artificial Sequence
  Description of Artificial Sequence: Synthetic oligonucleotide
  Antisense strand to SEQ ID NO: 775146
auucccauacccuaagagu

SEQ ID NO: 775148 - RNA, 19 nt, Artificial Sequence
  Description of Artificial Sequence: Synthetic oligonucleotide
  Sense strand starting at position 3015 of SEQ ID NO: 587212
uauaaagacguguaucugu

SEQ ID NO: 775149 - RNA, 19 nt, Artificial Sequence
  Description of Artificial Sequence: Synthetic oligonucleotide
  Antisense strand to SEQ ID NO: 775148
acagauacacgucuuuaua

SEQ ID NO: 775150 - RNA, 19 nt, Artificial Sequence
  Description of Artificial Sequence: Synthetic oligonucleotide
  Sense strand starting at position 3020 of SEQ ID NO: 587212
agacguguaucuguguaca

SEQ ID NO: 775151 - RNA, 19 nt, Artificial Sequence
  Description of Artificial Sequence: Synthetic oligonucleotide
  Antisense strand to SEQ ID NO: 775150
uguacacagauacacgucu

SEQ ID NO: 775152 - RNA, 19 nt, Artificial Sequence
  Description of Artificial Sequence: Synthetic oligonucleotide
  Sense strand starting at position 3022 of SEQ ID NO: 587212
acguguaucuguguacaca

SEQ ID NO: 775153 - RNA, 19 nt, Artificial Sequence
  Description of Artificial Sequence: Synthetic oligonucleotide
  Antisense strand to SEQ ID NO: 775152
uguguacacagauacacgu

SEQ ID NO: 775154 - RNA, 19 nt, Artificial Sequence
  Description of Artificial Sequence: Synthetic oligonucleotide
  Sense strand starting at position 3023 of SEQ ID NO: 587212
cguguaucuguguacacaa

SEQ ID NO: 775155 - RNA, 19 nt, Artificial Sequence
  Description of Artificial Sequence: Synthetic oligonucleotide
  Antisense strand to SEQ ID NO: 775154
uuguguacacagauacacg

SEQ ID NO: 775156 - RNA, 19 nt, Artificial Sequence
  Description of Artificial Sequence: Synthetic oligonucleotide
  Sense strand starting at position 3066 of SEQ ID NO: 587212
aaagguacccagugcuuua

SEQ ID NO: 775157 - RNA, 19 nt, Artificial Sequence
  Description of Artificial Sequence: Synthetic oligonucleotide
  Antisense strand to SEQ ID NO: 775156
uaaagcacuggguaccuuu

SEQ ID NO: 775158 - RNA, 19 nt, Artificial Sequence
  Description of Artificial Sequence: Synthetic oligonucleotide
  Sense strand starting at position 3069 of SEQ ID NO: 587212
gguacccagugcuuuauau

SEQ ID NO: 775159 - RNA, 19 nt, Artificial Sequence
  Description of Artificial Sequence: Synthetic oligonucleotide
  Antisense strand to SEQ ID NO: 775158
auauaaagcacuggguacc

SEQ ID NO: 775160 - RNA, 19 nt, Artificial Sequence
  Description of Artificial Sequence: Synthetic oligonucleotide
  Sense strand starting at position 3080 of SEQ ID NO: 587212
cuuuauaugcaguaucaug

SEQ ID NO: 775161 - RNA, 19 nt, Artificial Sequence
  Description of Artificial Sequence: Synthetic oligonucleotide
  Antisense strand to SEQ ID NO: 775160
caugauacugcauauaaag

SEQ ID NO: 775162 - RNA, 19 nt, Artificial Sequence
  Description of Artificial Sequence: Synthetic oligonucleotide
  Sense strand starting at position 3125 of SEQ ID NO: 587212
agugcccucuccuuauaga

SEQ ID NO: 775163 - RNA, 19 nt, Artificial Sequence
  Description of Artificial Sequence: Synthetic oligonucleotide
  Antisense strand to SEQ ID NO: 775162
ucuauaaggagagggcacu

SEQ ID NO: 775164 - RNA, 19 nt, Artificial Sequence
  Description of Artificial Sequence: Synthetic oligonucleotide
  Sense strand starting at position 3126 of SEQ ID NO: 587212
gugcccucuccuuauagau

SEQ ID NO: 775165 - RNA, 19 nt, Artificial Sequence
  Description of Artificial Sequence: Synthetic oligonucleotide
  Antisense strand to SEQ ID NO: 775164
aucuauaaggagagggcac

SEQ ID NO: 775166 - RNA, 19 nt, Artificial Sequence
  Description of Artificial Sequence: Synthetic oligonucleotide
  Sense strand starting at position 3253 of SEQ ID NO: 587212
uuagauaucuugcuuguca

SEQ ID NO: 775167 - RNA, 19 nt, Artificial Sequence
  Description of Artificial Sequence: Synthetic oligonucleotide
  Antisense strand to SEQ ID NO: 775166
ugacaagcaagauaucuaa

SEQ ID NO: 775168 - RNA, 19 nt, Artificial Sequence
  Description of Artificial Sequence: Synthetic oligonucleotide
  Sense strand starting at position 3255 of SEQ ID NO: 587212
agauaucuugcuugucacu

SEQ ID NO: 775169 - RNA, 19 nt, Artificial Sequence
  Description of Artificial Sequence: Synthetic oligonucleotide
  Antisense strand to SEQ ID NO: 775168
agugacaagcaagauaucu

SEQ ID NO: 775170 - RNA, 19 nt, Artificial Sequence
  Description of Artificial Sequence: Synthetic oligonucleotide
  Sense strand starting at position 3260 of SEQ ID NO: 587212
ucuugcuugucacuacuca

SEQ ID NO: 775171 - RNA, 19 nt, Artificial Sequence
  Description of Artificial Sequence: Synthetic oligonucleotide
  Antisense strand to SEQ ID NO: 775170
ugaguagugacaagcaaga

SEQ ID NO: 775172 - RNA, 19 nt, Artificial Sequence
  Description of Artificial Sequence: Synthetic oligonucleotide
  Sense strand starting at position 3264 of SEQ ID NO: 587212
gcuugucacuacucaauug

SEQ ID NO: 775173 - RNA, 19 nt, Artificial Sequence
  Description of Artificial Sequence: Synthetic oligonucleotide
  Antisense strand to SEQ ID NO: 775172
caauugaguagugacaagc

SEQ ID NO: 775174 - RNA, 19 nt, Artificial Sequence
  Description of Artificial Sequence: Synthetic oligonucleotide
  Sense strand starting at position 3275 of SEQ ID NO: 587212
cucaauuggcuccaugaua

SEQ ID NO: 775175 - RNA, 19 nt, Artificial Sequence
  Description of Artificial Sequence: Synthetic oligonucleotide
  Antisense strand to SEQ ID NO: 775174
uaucauggagccaauugag

SEQ ID NO: 775176 - RNA, 19 nt, Artificial Sequence
  Description of Artificial Sequence: Synthetic oligonucleotide
  Sense strand starting at position 3304 of SEQ ID NO: 587212
cuguaccuccaguguuuaa

SEQ ID NO: 775177 - RNA, 19 nt, Artificial Sequence
  Description of Artificial Sequence: Synthetic oligonucleotide
  Antisense strand to SEQ ID NO: 775176
uuaaacacuggagguacag

SEQ ID NO: 775178 - RNA, 19 nt, Artificial Sequence
  Description of Artificial Sequence: Synthetic oligonucleotide
  Sense strand starting at position 3308 of SEQ ID NO: 587212
accuccaguguuuaacaca

SEQ ID NO: 775179 - RNA, 19 nt, Artificial Sequence
  Description of Artificial Sequence: Synthetic oligonucleotide
  Antisense strand to SEQ ID NO: 775178
uguguuaaacacuggaggu

SEQ ID NO: 775180 - RNA, 19 nt, Artificial Sequence
  Description of Artificial Sequence: Synthetic oligonucleotide
  Sense strand starting at position 3332 of SEQ ID NO: 587212
uggucuugccauggugcaa

SEQ ID NO: 775181 - RNA, 19 nt, Artificial Sequence
  Description of Artificial Sequence: Synthetic oligonucleotide
  Antisense strand to SEQ ID NO: 775180
uugcaccauggcaagacca

SEQ ID NO: 775182 - RNA, 19 nt, Artificial Sequence
  Description of Artificial Sequence: Synthetic oligonucleotide
  Sense strand starting at position 3336 of SEQ ID NO: 587212
cuugccauggugcaauaaa

SEQ ID NO: 775183 - RNA, 19 nt, Artificial Sequence
  Description of Artificial Sequence: Synthetic oligonucleotide
  Antisense strand to SEQ ID NO: 775182
uuuauugcaccauggcaag

SEQ ID NO: 775184 - RNA, 19 nt, Artificial Sequence
  Description of Artificial Sequence: Synthetic oligonucleotide
  Sense strand starting at position 3469 of SEQ ID NO: 587212
ugacauuucgcuuguggug

SEQ ID NO: 775185 - RNA, 19 nt, Artificial Sequence
  Description of Artificial Sequence: Synthetic oligonucleotide
  Antisense strand to SEQ ID NO: 775184
caccacaagcgaaauguca

SEQ ID NO: 775186 - RNA, 19 nt, Artificial Sequence
  Description of Artificial Sequence: Synthetic oligonucleotide
  Sense strand starting at position 3510 of SEQ ID NO: 587212
uggugagccuuguuucuuu

SEQ ID NO: 775187 - RNA, 19 nt, Artificial Sequence
  Description of Artificial Sequence: Synthetic oligonucleotide
  Antisense strand to SEQ ID NO: 775186
aaagaaacaaggcucacca

SEQ ID NO: 775188 - RNA, 19 nt, Artificial Sequence
  Description of Artificial Sequence: Synthetic oligonucleotide
  Sense strand starting at position 3633 of SEQ ID NO: 587212
agcugucaauguguguuau

SEQ ID NO: 775189 - RNA, 19 nt, Artificial Sequence
  Description of Artificial Sequence: Synthetic oligonucleotide
  Antisense strand to SEQ ID NO: 775188
auaacacacauugacagcu

SEQ ID NO: 775190 - RNA, 19 nt, Artificial Sequence
  Description of Artificial Sequence: Synthetic oligonucleotide
  Sense strand starting at position 3639 of SEQ ID NO: 587212
caauguguguuauugucaa

SEQ ID NO: 775191 - RNA, 19 nt, Artificial Sequence
  Description of Artificial Sequence: Synthetic oligonucleotide
  Antisense strand to SEQ ID NO: 775190
uugacaauaacacacauug

SEQ ID NO: 775192 - RNA, 19 nt, Artificial Sequence
  Description of Artificial Sequence: Synthetic oligonucleotide
  Sense strand starting at position 3663 of SEQ ID NO: 587212
caguucugacuucguugaa

SEQ ID NO: 775193 - RNA, 19 nt, Artificial Sequence
  Description of Artificial Sequence: Synthetic oligonucleotide
  Antisense strand to SEQ ID NO: 775192
uucaacgaagucagaacug

SEQ ID NO: 775194 - RNA, 19 nt, Artificial Sequence
  Description of Artificial Sequence: Synthetic oligonucleotide
  Sense strand starting at position 3664 of SEQ ID NO: 587212
aguucugacuucguugaaa

SEQ ID NO: 775195 - RNA, 19 nt, Artificial Sequence
  Description of Artificial Sequence: Synthetic oligonucleotide
  Antisense strand to SEQ ID NO: 775194
uuucaacgaagucagaacu

SEQ ID NO: 775196 - RNA, 19 nt, Artificial Sequence
  Description of Artificial Sequence: Synthetic oligonucleotide
  Sense strand starting at position 3681 of SEQ ID NO: 587212
aaaugugucgcuuauuuau

SEQ ID NO: 775197 - RNA, 19 nt, Artificial Sequence
  Description of Artificial Sequence: Synthetic oligonucleotide
  Antisense strand to SEQ ID NO: 775196
auaaauaagcgacacauuu

SEQ ID NO: 775198 - RNA, 19 nt, Artificial Sequence
  Description of Artificial Sequence: Synthetic oligonucleotide
  Sense strand starting at position 77 of SEQ ID NO: 587213
gugugguguuugguagaga

SEQ ID NO: 775199 - RNA, 19 nt, Artificial Sequence
  Description of Artificial Sequence: Synthetic oligonucleotide
  Antisense strand to SEQ ID NO: 775198
ucucuaccaaacaccacac

SEQ ID NO: 775200 - RNA, 19 nt, Artificial Sequence
  Description of Artificial Sequence: Synthetic oligonucleotide
  Sense strand starting at position 176 of SEQ ID NO: 587213
ugggauuauaggcgccauu

SEQ ID NO: 775201 - RNA, 19 nt, Artificial Sequence
  Description of Artificial Sequence: Synthetic oligonucleotide
  Antisense strand to SEQ ID NO: 775200
aauggcgccuauaauccca

SEQ ID NO: 775202 - RNA, 19 nt, Artificial Sequence
  Description of Artificial Sequence: Synthetic oligonucleotide
  Sense strand starting at position 342 of SEQ ID NO: 587213
acauguuugugagccucua

SEQ ID NO: 775203 - RNA, 19 nt, Artificial Sequence
  Description of Artificial Sequence: Synthetic oligonucleotide
  Antisense strand to SEQ ID NO: 775202
uagaggcucacaaacaugu

SEQ ID NO: 775204 - RNA, 19 nt, Artificial Sequence
  Description of Artificial Sequence: Synthetic oligonucleotide
  Sense strand starting at position 363 of SEQ ID NO: 587213
cuggaauaauuccucaagu

SEQ ID NO: 775205 - RNA, 19 nt, Artificial Sequence
  Description of Artificial Sequence: Synthetic oligonucleotide
  Antisense strand to SEQ ID NO: 775204
acuugaggaauuauuccag

SEQ ID NO: 775206 - RNA, 19 nt, Artificial Sequence
  Description of Artificial Sequence: Synthetic oligonucleotide
  Sense strand starting at position 364 of SEQ ID NO: 587213
uggaauaauuccucaagua

SEQ ID NO: 775207 - RNA, 19 nt, Artificial Sequence
  Description of Artificial Sequence: Synthetic oligonucleotide
  Antisense strand to SEQ ID NO: 775206
uacuugaggaauuauucca

SEQ ID NO: 775208 - RNA, 19 nt, Artificial Sequence
  Description of Artificial Sequence: Synthetic oligonucleotide
  Sense strand starting at position 423 of SEQ ID NO: 587213
ggccucgaguccucaaaga

SEQ ID NO: 775209 - RNA, 19 nt, Artificial Sequence
  Description of Artificial Sequence: Synthetic oligonucleotide
  Antisense strand to SEQ ID NO: 775208
ucuuugaggacucgaggcc

SEQ ID NO: 775210 - RNA, 19 nt, Artificial Sequence
  Description of Artificial Sequence: Synthetic oligonucleotide
  Sense strand starting at position 599 of SEQ ID NO: 587213
gaacuugguccagggauca

SEQ ID NO: 775211 - RNA, 19 nt, Artificial Sequence
  Description of Artificial Sequence: Synthetic oligonucleotide
  Antisense strand to SEQ ID NO: 775210
ugaucccuggaccaaguuc

SEQ ID NO: 775212 - RNA, 19 nt, Artificial Sequence
  Description of Artificial Sequence: Synthetic oligonucleotide
  Sense strand starting at position 801 of SEQ ID NO: 587213
ggucuuuaacaccaagguu

SEQ ID NO: 775213 - RNA, 19 nt, Artificial Sequence
  Description of Artificial Sequence: Synthetic oligonucleotide
  Antisense strand to SEQ ID NO: 775212
aaccuugguguuaaagacc

SEQ ID NO: 775214 - RNA, 19 nt, Artificial Sequence
  Description of Artificial Sequence: Synthetic oligonucleotide
  Sense strand starting at position 839 of SEQ ID NO: 587213
accacuuaucuauguggaa

SEQ ID NO: 775215 - RNA, 19 nt, Artificial Sequence
  Description of Artificial Sequence: Synthetic oligonucleotide
  Antisense strand to SEQ ID NO: 775214
uuccacauagauaaguggu

SEQ ID NO: 775216 - RNA, 19 nt, Artificial Sequence
  Description of Artificial Sequence: Synthetic oligonucleotide
  Sense strand starting at position 840 of SEQ ID NO: 587213
ccacuuaucuauguggaau

SEQ ID NO: 775217 - RNA, 19 nt, Artificial Sequence
  Description of Artificial Sequence: Synthetic oligonucleotide
  Antisense strand to SEQ ID NO: 775216
auuccacauagauaagugg

SEQ ID NO: 775218 - RNA, 19 nt, Artificial Sequence
  Description of Artificial Sequence: Synthetic oligonucleotide
  Sense strand starting at position 842 of SEQ ID NO: 587213
acuuaucuauguggaauuu

SEQ ID NO: 775219 - RNA, 19 nt, Artificial Sequence
  Description of Artificial Sequence: Synthetic oligonucleotide
  Antisense strand to SEQ ID NO: 775218
aaauuccacauagauaagu

SEQ ID NO: 775220 - RNA, 19 nt, Artificial Sequence
  Description of Artificial Sequence: Synthetic oligonucleotide
  Sense strand starting at position 1305 of SEQ ID NO: 587213
gggucucuucaggaugagu

SEQ ID NO: 775221 - RNA, 19 nt, Artificial Sequence
  Description of Artificial Sequence: Synthetic oligonucleotide
  Antisense strand to SEQ ID NO: 775220
acucauccugaagagaccc

SEQ ID NO: 775222 - RNA, 19 nt, Artificial Sequence
  Description of Artificial Sequence: Synthetic oligonucleotide
  Sense strand starting at position 1478 of SEQ ID NO: 587213
cccaaugucgggcaucaga

SEQ ID NO: 775223 - RNA, 19 nt, Artificial Sequence
  Description of Artificial Sequence: Synthetic oligonucleotide
  Antisense strand to SEQ ID NO: 775222
ucugaugcccgacauuggg

SEQ ID NO: 775224 - RNA, 19 nt, Artificial Sequence
  Description of Artificial Sequence: Synthetic oligonucleotide
  Sense strand starting at position 2025 of SEQ ID NO: 587213
ccaucuuauacccguggga

SEQ ID NO: 775225 - RNA, 19 nt, Artificial Sequence
  Description of Artificial Sequence: Synthetic oligonucleotide
  Antisense strand to SEQ ID NO: 775224
ucccacggguauaagaugg

SEQ ID NO: 775226 - RNA, 19 nt, Artificial Sequence
  Description of Artificial Sequence: Synthetic oligonucleotide
  Sense strand starting at position 2027 of SEQ ID NO: 587213
aucuuauacccgugggaug

SEQ ID NO: 775227 - RNA, 19 nt, Artificial Sequence
  Description of Artificial Sequence: Synthetic oligonucleotide
  Antisense strand to SEQ ID NO: 775226
caucccacggguauaagau

SEQ ID NO: 775228 - RNA, 19 nt, Artificial Sequence
  Description of Artificial Sequence: Synthetic oligonucleotide
  Sense strand starting at position 2113 of SEQ ID NO: 587213
ugcauaaaguggucuccau

SEQ ID NO: 775229 - RNA, 19 nt, Artificial Sequence
  Description of Artificial Sequence: Synthetic oligonucleotide
  Antisense strand to SEQ ID NO: 775228
auggagaccacuuuaugca

SEQ ID NO: 775230 - RNA, 19 nt, Artificial Sequence
  Description of Artificial Sequence: Synthetic oligonucleotide
  Sense strand starting at position 2123 of SEQ ID NO: 587213
ggucuccauccagaagcau

SEQ ID NO: 775231 - RNA, 19 nt, Artificial Sequence
  Description of Artificial Sequence: Synthetic oligonucleotide
  Antisense strand to SEQ ID NO: 775230
augcuucuggauggagacc

SEQ ID NO: 775232 - RNA, 19 nt, Artificial Sequence
  Description of Artificial Sequence: Synthetic oligonucleotide
  Sense strand starting at position 2193 of SEQ ID NO: 587213
gcaugaccacagcagaauu

SEQ ID NO: 775233 - RNA, 19 nt, Artificial Sequence
  Description of Artificial Sequence: Synthetic oligonucleotide
  Antisense strand to SEQ ID NO: 775232
aauucugcuguggucaugc

SEQ ID NO: 775234 - RNA, 19 nt, Artificial Sequence
  Description of Artificial Sequence: Synthetic oligonucleotide
  Sense strand starting at position 2238 of SEQ ID NO: 587213
guguauccacauuaaaguu

SEQ ID NO: 775235 - RNA, 19 nt, Artificial Sequence
  Description of Artificial Sequence: Synthetic oligonucleotide
  Antisense strand to SEQ ID NO: 775234
aacuuuaauguggauacac

SEQ ID NO: 775236 - RNA, 19 nt, Artificial Sequence
  Description of Artificial Sequence: Synthetic oligonucleotide
  Sense strand starting at position 2794 of SEQ ID NO: 587213
ggagaaagcccuugauuga

SEQ ID NO: 775237 - RNA, 19 nt, Artificial Sequence
  Description of Artificial Sequence: Synthetic oligonucleotide
  Antisense strand to SEQ ID NO: 775236
ucaaucaagggcuuucucc

SEQ ID NO: 775238 - RNA, 19 nt, Artificial Sequence
  Description of Artificial Sequence: Synthetic oligonucleotide
  Sense strand starting at position 2797 of SEQ ID NO: 587213
gaaagcccuugauugaaga

SEQ ID NO: 775239 - RNA, 19 nt, Artificial Sequence
  Description of Artificial Sequence: Synthetic oligonucleotide
  Antisense strand to SEQ ID NO: 775238
ucuucaaucaagggcuuuc

SEQ ID NO: 775240 - RNA, 19 nt, Artificial Sequence
  Description of Artificial Sequence: Synthetic oligonucleotide
  Sense strand starting at position 2822 of SEQ ID NO: 587213
gggauuagaucugagacau

SEQ ID NO: 775241 - RNA, 19 nt, Artificial Sequence
  Description of Artificial Sequence: Synthetic oligonucleotide
  Antisense strand to SEQ ID NO: 775240
augucucagaucuaauccc

SEQ ID NO: 775242 - RNA, 19 nt, Artificial Sequence
  Description of Artificial Sequence: Synthetic oligonucleotide
  Sense strand starting at position 2846 of SEQ ID NO: 587213
gcucauuccaagugugaga

SEQ ID NO: 775243 - RNA, 19 nt, Artificial Sequence
  Description of Artificial Sequence: Synthetic oligonucleotide
  Antisense strand to SEQ ID NO: 775242
ucucacacuuggaaugagc

SEQ ID NO: 775244 - RNA, 19 nt, Artificial Sequence
  Description of Artificial Sequence: Synthetic oligonucleotide
  Sense strand starting at position 2848 of SEQ ID NO: 587213
ucauuccaagugugagaaa

SEQ ID NO: 775245 - RNA, 19 nt, Artificial Sequence
  Description of Artificial Sequence: Synthetic oligonucleotide
  Antisense strand to SEQ ID NO: 775244
uuucucacacuuggaauga

SEQ ID NO: 775246 - RNA, 19 nt, Artificial Sequence
  Description of Artificial Sequence: Synthetic oligonucleotide
  Sense strand starting at position 2872 of SEQ ID NO: 587213
ggcgguaucaauuaggaga

SEQ ID NO: 775247 - RNA, 19 nt, Artificial Sequence
  Description of Artificial Sequence: Synthetic oligonucleotide
  Antisense strand to SEQ ID NO: 775246
ucuccuaauugauaccgcc

SEQ ID NO: 775248 - RNA, 19 nt, Artificial Sequence
  Description of Artificial Sequence: Synthetic oligonucleotide
  Sense strand starting at position 2893 of SEQ ID NO: 587213
ggaggaauuucaugggucu

SEQ ID NO: 775249 - RNA, 19 nt, Artificial Sequence
  Description of Artificial Sequence: Synthetic oligonucleotide
  Antisense strand to SEQ ID NO: 775248
agacccaugaaauuccucc

SEQ ID NO: 775250 - RNA, 19 nt, Artificial Sequence
  Description of Artificial Sequence: Synthetic oligonucleotide
  Sense strand starting at position 2904 of SEQ ID NO: 587213
augggucucugccuuauuu

SEQ ID NO: 775251 - RNA, 19 nt, Artificial Sequence
  Description of Artificial Sequence: Synthetic oligonucleotide
  Antisense strand to SEQ ID NO: 775250
aaauaaggcagagacccau

SEQ ID NO: 775252 - RNA, 19 nt, Artificial Sequence
  Description of Artificial Sequence: Synthetic oligonucleotide
  Sense strand starting at position 3335 of SEQ ID NO: 587213
cugcauucccagugaucac

SEQ ID NO: 775253 - RNA, 19 nt, Artificial Sequence
  Description of Artificial Sequence: Synthetic oligonucleotide
  Antisense strand to SEQ ID NO: 775252
gugaucacugggaaugcag

SEQ ID NO: 775254 - RNA, 19 nt, Artificial Sequence
  Description of Artificial Sequence: Synthetic oligonucleotide
  Sense strand starting at position 3378 of SEQ ID NO: 587213
acaucaucauguggaaaca

SEQ ID NO: 775255 - RNA, 19 nt, Artificial Sequence
  Description of Artificial Sequence: Synthetic oligonucleotide
  Antisense strand to SEQ ID NO: 775254
uguuuccacaugaugaugu

SEQ ID NO: 775256 - RNA, 19 nt, Artificial Sequence
  Description of Artificial Sequence: Synthetic oligonucleotide
  Sense strand starting at position 3389 of SEQ ID NO: 587213
uggaaacaugccuauuacu

SEQ ID NO: 775257 - RNA, 19 nt, Artificial Sequence
  Description of Artificial Sequence: Synthetic oligonucleotide
  Antisense strand to SEQ ID NO: 775256
aguaauaggcauguuucca

SEQ ID NO: 775258 - RNA, 19 nt, Artificial Sequence
  Description of Artificial Sequence: Synthetic oligonucleotide
  Sense strand starting at position 3613 of SEQ ID NO: 587213
augcccuaucccugaugua

SEQ ID NO: 775259 - RNA, 19 nt, Artificial Sequence
  Description of Artificial Sequence: Synthetic oligonucleotide
  Antisense strand to SEQ ID NO: 775258
uacaucagggauagggcau

SEQ ID NO: 775260 - RNA, 19 nt, Artificial Sequence
  Description of Artificial Sequence: Synthetic oligonucleotide
  Sense strand starting at position 3614 of SEQ ID NO: 587213
ugcccuaucccugauguaa

SEQ ID NO: 775261 - RNA, 19 nt, Artificial Sequence
  Description of Artificial Sequence: Synthetic oligonucleotide
  Antisense strand to SEQ ID NO: 775260
uuacaucagggauagggca

SEQ ID NO: 775262 - RNA, 19 nt, Artificial Sequence
  Description of Artificial Sequence: Synthetic oligonucleotide
  Sense strand starting at position 3628 of SEQ ID NO: 587213
uguaaauucccaugcuuug

SEQ ID NO: 775263 - RNA, 19 nt, Artificial Sequence
  Description of Artificial Sequence: Synthetic oligonucleotide
  Antisense strand to SEQ ID NO: 775262
caaagcaugggaauuuaca

SEQ ID NO: 775264 - RNA, 19 nt, Artificial Sequence
  Description of Artificial Sequence: Synthetic oligonucleotide
  Sense strand starting at position 3674 of SEQ ID NO: 587213
uuuggagagucagauagaa

SEQ ID NO: 775265 - RNA, 19 nt, Artificial Sequence
  Description of Artificial Sequence: Synthetic oligonucleotide
  Antisense strand to SEQ ID NO: 775264
uucuaucugacucuccaaa

SEQ ID NO: 775266 - RNA, 19 nt, Artificial Sequence
  Description of Artificial Sequence: Synthetic oligonucleotide
  Sense strand starting at position 3797 of SEQ ID NO: 587213
cuccuuuaugucugggcau

SEQ ID NO: 775267 - RNA, 19 nt, Artificial Sequence
  Description of Artificial Sequence: Synthetic oligonucleotide
  Antisense strand to SEQ ID NO: 775266
augcccagacauaaaggag

SEQ ID NO: 775268 - RNA, 19 nt, Artificial Sequence
  Description of Artificial Sequence: Synthetic oligonucleotide
  Sense strand starting at position 3799 of SEQ ID NO: 587213
ccuuuaugucugggcauaa

SEQ ID NO: 775269 - RNA, 19 nt, Artificial Sequence
  Description of Artificial Sequence: Synthetic oligonucleotide
  Antisense strand to SEQ ID NO: 775268
uuaugcccagacauaaagg

SEQ ID NO: 775270 - RNA, 19 nt, Artificial Sequence
  Description of Artificial Sequence: Synthetic oligonucleotide
  Sense strand starting at position 3800 of SEQ ID NO: 587213
cuuuaugucugggcauaag

SEQ ID NO: 775271 - RNA, 19 nt, Artificial Sequence
  Description of Artificial Sequence: Synthetic oligonucleotide
  Antisense strand to SEQ ID NO: 775270
cuuaugcccagacauaaag

SEQ ID NO: 775272 - RNA, 19 nt, Artificial Sequence
  Description of Artificial Sequence: Synthetic oligonucleotide
  Sense strand starting at position 3810 of SEQ ID NO: 587213
gggcauaagcuccaaugaa

SEQ ID NO: 775273 - RNA, 19 nt, Artificial Sequence
  Description of Artificial Sequence: Synthetic oligonucleotide
  Antisense strand to SEQ ID NO: 775272
uucauuggagcuuaugccc

SEQ ID NO: 775274 - RNA, 19 nt, Artificial Sequence
  Description of Artificial Sequence: Synthetic oligonucleotide
  Sense strand starting at position 3823 of SEQ ID NO: 587213
aaugaagcuuugucuagga

SEQ ID NO: 775275 - RNA, 19 nt, Artificial Sequence
  Description of Artificial Sequence: Synthetic oligonucleotide
  Antisense strand to SEQ ID NO: 775274
uccuagacaaagcuucauu

SEQ ID NO: 775276 - RNA, 19 nt, Artificial Sequence
  Description of Artificial Sequence: Synthetic oligonucleotide
  Sense strand starting at position 3825 of SEQ ID NO: 587213
ugaagcuuugucuaggaaa

SEQ ID NO: 775277 - RNA, 19 nt, Artificial Sequence
  Description of Artificial Sequence: Synthetic oligonucleotide
  Antisense strand to SEQ ID NO: 775276
uuuccuagacaaagcuuca

SEQ ID NO: 775278 - RNA, 19 nt, Artificial Sequence
  Description of Artificial Sequence: Synthetic oligonucleotide
  Sense strand starting at position 153 of SEQ ID NO: 587214
gagaaucugcaucgcuaac

SEQ ID NO: 775279 - RNA, 19 nt, Artificial Sequence
  Description of Artificial Sequence: Synthetic oligonucleotide
  Antisense strand to SEQ ID NO: 775278
guuagcgaugcagauucuc

SEQ ID NO: 775280 - RNA, 19 nt, Artificial Sequence
  Description of Artificial Sequence: Synthetic oligonucleotide
  Sense strand starting at position 185 of SEQ ID NO: 587214
ggugaacugcuuuaagaac

SEQ ID NO: 775281 - RNA, 19 nt, Artificial Sequence
  Description of Artificial Sequence: Synthetic oligonucleotide
  Antisense strand to SEQ ID NO: 775280
guucuuaaagcaguucacc

SEQ ID NO: 775282 - RNA, 19 nt, Artificial Sequence
  Description of Artificial Sequence: Synthetic oligonucleotide
  Sense strand starting at position 403 of SEQ ID NO: 587214
ggcaaauugcuuuaaccag

SEQ ID NO: 775283 - RNA, 19 nt, Artificial Sequence
  Description of Artificial Sequence: Synthetic oligonucleotide
  Antisense strand to SEQ ID NO: 775282
cugguuaaagcaauuugcc

SEQ ID NO: 775284 - RNA, 19 nt, Artificial Sequence
  Description of Artificial Sequence: Synthetic oligonucleotide
  Sense strand starting at position 672 of SEQ ID NO: 587214
guggugugaggauggagaa

SEQ ID NO: 775285 - RNA, 19 nt, Artificial Sequence
  Description of Artificial Sequence: Synthetic oligonucleotide
  Antisense strand to SEQ ID NO: 775284
uucuccauccucacaccac

SEQ ID NO: 775286 - RNA, 19 nt, Artificial Sequence
  Description of Artificial Sequence: Synthetic oligonucleotide
  Sense strand starting at position 755 of SEQ ID NO: 587214
ggaagauguuaaccaguag

SEQ ID NO: 775287 - RNA, 19 nt, Artificial Sequence
  Description of Artificial Sequence: Synthetic oligonucleotide
  Antisense strand to SEQ ID NO: 775286
cuacugguuaacaucuucc

SEQ ID NO: 775288 - RNA, 19 nt, Artificial Sequence
  Description of Artificial Sequence: Synthetic oligonucleotide
  Sense strand starting at position 759 of SEQ ID NO: 587214
gauguuaaccaguagagca

SEQ ID NO: 775289 - RNA, 19 nt, Artificial Sequence
  Description of Artificial Sequence: Synthetic oligonucleotide
  Antisense strand to SEQ ID NO: 775288
ugcucuacugguuaacauc

SEQ ID NO: 775290 - RNA, 19 nt, Artificial Sequence
  Description of Artificial Sequence: Synthetic oligonucleotide
  Sense strand starting at position 1220 of SEQ ID NO: 587214
aaaugaaugggcggugaga

SEQ ID NO: 775291 - RNA, 19 nt, Artificial Sequence
  Description of Artificial Sequence: Synthetic oligonucleotide
  Antisense strand to SEQ ID NO: 775290
ucucaccgcccauucauuu

SEQ ID NO: 775292 - RNA, 19 nt, Artificial Sequence
  Description of Artificial Sequence: Synthetic oligonucleotide
  Sense strand starting at position 1231 of SEQ ID NO: 587214
cggugagacuggagcuuaa

SEQ ID NO: 775293 - RNA, 19 nt, Artificial Sequence
  Description of Artificial Sequence: Synthetic oligonucleotide
  Antisense strand to SEQ ID NO: 775292
uuaagcuccagucucaccg

SEQ ID NO: 775294 - RNA, 19 nt, Artificial Sequence
  Description of Artificial Sequence: Synthetic oligonucleotide
  Sense strand starting at position 1277 of SEQ ID NO: 587214
gaaugaugaucaugacuag

SEQ ID NO: 775295 - RNA, 19 nt, Artificial Sequence
  Description of Artificial Sequence: Synthetic oligonucleotide
  Antisense strand to SEQ ID NO: 775294
cuagucaugaucaucauuc

SEQ ID NO: 775296 - RNA, 19 nt, Artificial Sequence
  Description of Artificial Sequence: Synthetic oligonucleotide
  Sense strand starting at position 1418 of SEQ ID NO: 587214
cuguaucuugaggauguca

SEQ ID NO: 775297 - RNA, 19 nt, Artificial Sequence
  Description of Artificial Sequence: Synthetic oligonucleotide
  Antisense strand to SEQ ID NO: 775296
ugacauccucaagauacag

SEQ ID NO: 775298 - RNA, 19 nt, Artificial Sequence
  Description of Artificial Sequence: Synthetic oligonucleotide
  Sense strand starting at position 1420 of SEQ ID NO: 587214
guaucuugaggaugucauu

SEQ ID NO: 775299 - RNA, 19 nt, Artificial Sequence
  Description of Artificial Sequence: Synthetic oligonucleotide
  Antisense strand to SEQ ID NO: 775298
aaugacauccucaagauac

SEQ ID NO: 775300 - RNA, 19 nt, Artificial Sequence
  Description of Artificial Sequence: Synthetic oligonucleotide
  Sense strand starting at position 1429 of SEQ ID NO: 587214
ggaugucauuugcaguaga

SEQ ID NO: 775301 - RNA, 19 nt, Artificial Sequence
  Description of Artificial Sequence: Synthetic oligonucleotide
  Antisense strand to SEQ ID NO: 775300
ucuacugcaaaugacaucc

SEQ ID NO: 775302 - RNA, 19 nt, Artificial Sequence
  Description of Artificial Sequence: Synthetic oligonucleotide
  Sense strand starting at position 2200 of SEQ ID NO: 587214
cccagaacuccuuguggua

SEQ ID NO: 775303 - RNA, 19 nt, Artificial Sequence
  Description of Artificial Sequence: Synthetic oligonucleotide
  Antisense strand to SEQ ID NO: 775302
uaccacaaggaguucuggg

SEQ ID NO: 775304 - RNA, 19 nt, Artificial Sequence
  Description of Artificial Sequence: Synthetic oligonucleotide
  Sense strand starting at position 2468 of SEQ ID NO: 587214
ucgagaauucuauagcaau

SEQ ID NO: 775305 - RNA, 19 nt, Artificial Sequence
  Description of Artificial Sequence: Synthetic oligonucleotide
  Antisense strand to SEQ ID NO: 775304
auugcuauagaauucucga

SEQ ID NO: 775306 - RNA, 19 nt, Artificial Sequence
  Description of Artificial Sequence: Synthetic oligonucleotide
  Sense strand starting at position 2543 of SEQ ID NO: 587214
guaacacucuaggauaaca

SEQ ID NO: 775307 - RNA, 19 nt, Artificial Sequence
  Description of Artificial Sequence: Synthetic oligonucleotide
  Antisense strand to SEQ ID NO: 775306
uguuauccuagaguguuac

SEQ ID NO: 775308 - RNA, 19 nt, Artificial Sequence
  Description of Artificial Sequence: Synthetic oligonucleotide
  Sense strand starting at position 2553 of SEQ ID NO: 587214
aggauaacacucggaguaa

SEQ ID NO: 775309 - RNA, 19 nt, Artificial Sequence
  Description of Artificial Sequence: Synthetic oligonucleotide
  Antisense strand to SEQ ID NO: 775308
uuacuccgaguguuauccu

SEQ ID NO: 775310 - RNA, 19 nt, Artificial Sequence
  Description of Artificial Sequence: Synthetic oligonucleotide
  Sense strand starting at position 2750 of SEQ ID NO: 587214
gauggacucugcucuguaa

SEQ ID NO: 775311 - RNA, 19 nt, Artificial Sequence
  Description of Artificial Sequence: Synthetic oligonucleotide
  Antisense strand to SEQ ID NO: 775310
uuacagagcagaguccauc

SEQ ID NO: 775312 - RNA, 19 nt, Artificial Sequence
  Description of Artificial Sequence: Synthetic oligonucleotide
  Sense strand starting at position 2752 of SEQ ID NO: 587214
uggacucugcucuguaaga

SEQ ID NO: 775313 - RNA, 19 nt, Artificial Sequence
  Description of Artificial Sequence: Synthetic oligonucleotide
  Antisense strand to SEQ ID NO: 775312
ucuuacagagcagagucca

SEQ ID NO: 775314 - RNA, 19 nt, Artificial Sequence
  Description of Artificial Sequence: Synthetic oligonucleotide
  Sense strand starting at position 2753 of SEQ ID NO: 587214
ggacucugcucuguaagag

SEQ ID NO: 775315 - RNA, 19 nt, Artificial Sequence
  Description of Artificial Sequence: Synthetic oligonucleotide
  Antisense strand to SEQ ID NO: 775314
cucuuacagagcagagucc

SEQ ID NO: 775316 - RNA, 19 nt, Artificial Sequence
  Description of Artificial Sequence: Synthetic oligonucleotide
  Sense strand starting at position 2754 of SEQ ID NO: 587214
gacucugcucuguaagaga

SEQ ID NO: 775317 - RNA, 19 nt, Artificial Sequence
  Description of Artificial Sequence: Synthetic oligonucleotide
  Antisense strand to SEQ ID NO: 775316
ucucuuacagagcagaguc

SEQ ID NO: 775318 - RNA, 19 nt, Artificial Sequence
  Description of Artificial Sequence: Synthetic oligonucleotide
  Sense strand starting at position 2769 of SEQ ID NO: 587214
gagauaaagugguugccca

SEQ ID NO: 775319 - RNA, 19 nt, Artificial Sequence
  Description of Artificial Sequence: Synthetic oligonucleotide
  Antisense strand to SEQ ID NO: 775318
ugggcaaccacuuuaucuc

SEQ ID NO: 775320 - RNA, 19 nt, Artificial Sequence
  Description of Artificial Sequence: Synthetic oligonucleotide
  Sense strand starting at position 2776 of SEQ ID NO: 587214
agugguugcccacaacuca

SEQ ID NO: 775321 - RNA, 19 nt, Artificial Sequence
  Description of Artificial Sequence: Synthetic oligonucleotide
  Antisense strand to SEQ ID NO: 775320
ugaguugugggcaaccacu

SEQ ID NO: 775322 - RNA, 19 nt, Artificial Sequence
  Description of Artificial Sequence: Synthetic oligonucleotide
  Sense strand starting at position 2813 of SEQ ID NO: 587214
gggcuaucauucccagugu

SEQ ID NO: 775323 - RNA, 19 nt, Artificial Sequence
  Description of Artificial Sequence: Synthetic oligonucleotide
  Antisense strand to SEQ ID NO: 775322
acacugggaaugauagccc

SEQ ID NO: 775324 - RNA, 19 nt, Artificial Sequence
  Description of Artificial Sequence: Synthetic oligonucleotide
  Sense strand starting at position 2857 of SEQ ID NO: 587214
gagucagagccuugcccau

SEQ ID NO: 775325 - RNA, 19 nt, Artificial Sequence
  Description of Artificial Sequence: Synthetic oligonucleotide
  Antisense strand to SEQ ID NO: 775324
augggcaaggcucugacuc

SEQ ID NO: 775326 - RNA, 19 nt, Artificial Sequence
  Description of Artificial Sequence: Synthetic oligonucleotide
  Sense strand starting at position 2936 of SEQ ID NO: 587214
uuuggcuucccucagcaaa

SEQ ID NO: 775327 - RNA, 19 nt, Artificial Sequence
  Description of Artificial Sequence: Synthetic oligonucleotide
  Antisense strand to SEQ ID NO: 775326
uuugcugagggaagccaaa

SEQ ID NO: 775328 - RNA, 19 nt, Artificial Sequence
  Description of Artificial Sequence: Synthetic oligonucleotide
  Sense strand starting at position 2938 of SEQ ID NO: 587214
uggcuucccucagcaaaga

SEQ ID NO: 775329 - RNA, 19 nt, Artificial Sequence
  Description of Artificial Sequence: Synthetic oligonucleotide
  Antisense strand to SEQ ID NO: 775328
ucuuugcugagggaagcca

SEQ ID NO: 775330 - RNA, 19 nt, Artificial Sequence
  Description of Artificial Sequence: Synthetic oligonucleotide
  Sense strand starting at position 2939 of SEQ ID NO: 587214
ggcuucccucagcaaagaa

SEQ ID NO: 775331 - RNA, 19 nt, Artificial Sequence
  Description of Artificial Sequence: Synthetic oligonucleotide
  Antisense strand to SEQ ID NO: 775330
uucuuugcugagggaagcc

SEQ ID NO: 775332 - RNA, 19 nt, Artificial Sequence
  Description of Artificial Sequence: Synthetic oligonucleotide
  Sense strand starting at position 3081 of SEQ ID NO: 587214
gcaggucugcagucguaau

SEQ ID NO: 775333 - RNA, 19 nt, Artificial Sequence
  Description of Artificial Sequence: Synthetic oligonucleotide
  Antisense strand to SEQ ID NO: 775332
auuacgacugcagaccugc

SEQ ID NO: 775334 - RNA, 19 nt, Artificial Sequence
  Description of Artificial Sequence: Synthetic oligonucleotide
  Sense strand starting at position 3302 of SEQ ID NO: 587214
ucaauuuggcccgguaucu

SEQ ID NO: 775335 - RNA, 19 nt, Artificial Sequence
  Description of Artificial Sequence: Synthetic oligonucleotide
  Antisense strand to SEQ ID NO: 775334
agauaccgggccaaauuga

SEQ ID NO: 775336 - RNA, 19 nt, Artificial Sequence
  Description of Artificial Sequence: Synthetic oligonucleotide
  Sense strand starting at position 3432 of SEQ ID NO: 587214
gcagaagucugucucagug

SEQ ID NO: 775337 - RNA, 19 nt, Artificial Sequence
  Description of Artificial Sequence: Synthetic oligonucleotide
  Antisense strand to SEQ ID NO: 775336
cacugagacagacuucugc

SEQ ID NO: 775338 - RNA, 19 nt, Artificial Sequence
  Description of Artificial Sequence: Synthetic oligonucleotide
  Sense strand starting at position 3444 of SEQ ID NO: 587214
cucagugagcccugacaga

SEQ ID NO: 775339 - RNA, 19 nt, Artificial Sequence
  Description of Artificial Sequence: Synthetic oligonucleotide
  Antisense strand to SEQ ID NO: 775338
ucugucagggcucacugag

SEQ ID NO: 775340 - RNA, 19 nt, Artificial Sequence
  Description of Artificial Sequence: Synthetic oligonucleotide
  Sense strand starting at position 3832 of SEQ ID NO: 587214
ggaggauaaugagaacuca

SEQ ID NO: 775341 - RNA, 19 nt, Artificial Sequence
  Description of Artificial Sequence: Synthetic oligonucleotide
  Antisense strand to SEQ ID NO: 775340
ugaguucucauuauccucc

SEQ ID NO: 775342 - RNA, 19 nt, Artificial Sequence
  Description of Artificial Sequence: Synthetic oligonucleotide
  Sense strand starting at position 3843 of SEQ ID NO: 587214
agaacucaggccuguguau

SEQ ID NO: 775343 - RNA, 19 nt, Artificial Sequence
  Description of Artificial Sequence: Synthetic oligonucleotide
  Antisense strand to SEQ ID NO: 775342
auacacaggccugaguucu

SEQ ID NO: 775344 - RNA, 19 nt, Artificial Sequence
  Description of Artificial Sequence: Synthetic oligonucleotide
  Sense strand starting at position 3855 of SEQ ID NO: 587214
uguguaugguccucccuga

SEQ ID NO: 775345 - RNA, 19 nt, Artificial Sequence
  Description of Artificial Sequence: Synthetic oligonucleotide
  Antisense strand to SEQ ID NO: 775344
ucagggaggaccauacaca

SEQ ID NO: 775346 - RNA, 19 nt, Artificial Sequence
  Description of Artificial Sequence: Synthetic oligonucleotide
  Sense strand starting at position 3912 of SEQ ID NO: 587214
gaggacuucugaugagaac

SEQ ID NO: 775347 - RNA, 19 nt, Artificial Sequence
  Description of Artificial Sequence: Synthetic oligonucleotide
  Antisense strand to SEQ ID NO: 775346
guucucaucagaaguccuc

SEQ ID NO: 775348 - RNA, 19 nt, Artificial Sequence
  Description of Artificial Sequence: Synthetic oligonucleotide
  Sense strand starting at position 3915 of SEQ ID NO: 587214
gacuucugaugagaacaug

SEQ ID NO: 775349 - RNA, 19 nt, Artificial Sequence
  Description of Artificial Sequence: Synthetic oligonucleotide
  Antisense strand to SEQ ID NO: 775348
cauguucucaucagaaguc

SEQ ID NO: 775350 - RNA, 19 nt, Artificial Sequence
  Description of Artificial Sequence: Synthetic oligonucleotide
  Sense strand starting at position 3923 of SEQ ID NO: 587214
augagaacaugggacauua

SEQ ID NO: 775351 - RNA, 19 nt, Artificial Sequence
  Description of Artificial Sequence: Synthetic oligonucleotide
  Antisense strand to SEQ ID NO: 775350
uaaugucccauguucucau

SEQ ID NO: 775352 - RNA, 19 nt, Artificial Sequence
  Description of Artificial Sequence: Synthetic oligonucleotide
  Sense strand starting at position 3951 of SEQ ID NO: 587214
gaaagcgugucuguugaca

SEQ ID NO: 775353 - RNA, 19 nt, Artificial Sequence
  Description of Artificial Sequence: Synthetic oligonucleotide
  Antisense strand to SEQ ID NO: 775352
ugucaacagacacgcuuuc

SEQ ID NO: 775354 - RNA, 19 nt, Artificial Sequence
  Description of Artificial Sequence: Synthetic oligonucleotide
  Sense strand starting at position 3962 of SEQ ID NO: 587214
uguugacagcccuguauaa

SEQ ID NO: 775355 - RNA, 19 nt, Artificial Sequence
  Description of Artificial Sequence: Synthetic oligonucleotide
  Antisense strand to SEQ ID NO: 775354
uuauacagggcugucaaca

SEQ ID NO: 775356 - RNA, 19 nt, Artificial Sequence
  Description of Artificial Sequence: Synthetic oligonucleotide
  Sense strand starting at position 3964 of SEQ ID NO: 587214
uugacagcccuguauaaac

SEQ ID NO: 775357 - RNA, 19 nt, Artificial Sequence
  Description of Artificial Sequence: Synthetic oligonucleotide
  Antisense strand to SEQ ID NO: 775356
guuuauacagggcugucaa

SEQ ID NO: 775358 - RNA, 19 nt, Artificial Sequence
  Description of Artificial Sequence: Synthetic oligonucleotide
  Sense strand starting at position 66 of SEQ ID NO: 587215
uuuaauuaaguccgacaua

SEQ ID NO: 775359 - RNA, 19 nt, Artificial Sequence
  Description of Artificial Sequence: Synthetic oligonucleotide
  Antisense strand to SEQ ID NO: 775358
uaugucggacuuaauuaaa

SEQ ID NO: 775360 - RNA, 19 nt, Artificial Sequence
  Description of Artificial Sequence: Synthetic oligonucleotide
  Sense strand starting at position 77 of SEQ ID NO: 587215
ccgacauauuuguccuugu

SEQ ID NO: 775361 - RNA, 19 nt, Artificial Sequence
  Description of Artificial Sequence: Synthetic oligonucleotide
  Antisense strand to SEQ ID NO: 775360
acaaggacaaauaugucgg

SEQ ID NO: 775362 - RNA, 19 nt, Artificial Sequence
  Description of Artificial Sequence: Synthetic oligonucleotide
  Sense strand starting at position 78 of SEQ ID NO: 587215
cgacauauuuguccuuguu

SEQ ID NO: 775363 - RNA, 19 nt, Artificial Sequence
  Description of Artificial Sequence: Synthetic oligonucleotide
  Antisense strand to SEQ ID NO: 775362
aacaaggacaaauaugucg

SEQ ID NO: 775364 - RNA, 19 nt, Artificial Sequence
  Description of Artificial Sequence: Synthetic oligonucleotide
  Sense strand starting at position 299 of SEQ ID NO: 587215
uagacaucggcuuauacua

SEQ ID NO: 775365 - RNA, 19 nt, Artificial Sequence
  Description of Artificial Sequence: Synthetic oligonucleotide
  Antisense strand to SEQ ID NO: 775364
uaguauaagccgaugucua

SEQ ID NO: 775366 - RNA, 19 nt, Artificial Sequence
  Description of Artificial Sequence: Synthetic oligonucleotide
  Sense strand starting at position 312 of SEQ ID NO: 587215
auacuauaguucuugauac

SEQ ID NO: 775367 - RNA, 19 nt, Artificial Sequence
  Description of Artificial Sequence: Synthetic oligonucleotide
  Antisense strand to SEQ ID NO: 775366
guaucaagaacuauaguau

SEQ ID NO: 775368 - RNA, 19 nt, Artificial Sequence
  Description of Artificial Sequence: Synthetic oligonucleotide
  Sense strand starting at position 363 of SEQ ID NO: 587215
uccauugauagugggauca

SEQ ID NO: 775369 - RNA, 19 nt, Artificial Sequence
  Description of Artificial Sequence: Synthetic oligonucleotide
  Antisense strand to SEQ ID NO: 775368
ugaucccacuaucaaugga

SEQ ID NO: 775370 - RNA, 19 nt, Artificial Sequence
  Description of Artificial Sequence: Synthetic oligonucleotide
  Sense strand starting at position 375 of SEQ ID NO: 587215
gggaucaauguuuauguua

SEQ ID NO: 775371 - RNA, 19 nt, Artificial Sequence
  Description of Artificial Sequence: Synthetic oligonucleotide
  Antisense strand to SEQ ID NO: 775370
uaacauaaacauugauccc

SEQ ID NO: 775372 - RNA, 19 nt, Artificial Sequence
  Description of Artificial Sequence: Synthetic oligonucleotide
  Sense strand starting at position 480 of SEQ ID NO: 587215
uuguuaaaugagcaaaugu

SEQ ID NO: 775373 - RNA, 19 nt, Artificial Sequence
  Description of Artificial Sequence: Synthetic oligonucleotide
  Antisense strand to SEQ ID NO: 775372
acauuugcucauuuaacaa

SEQ ID NO: 775374 - RNA, 19 nt, Artificial Sequence
  Description of Artificial Sequence: Synthetic oligonucleotide
  Sense strand starting at position 495 of SEQ ID NO: 587215
augugaugggcauaauagu

SEQ ID NO: 775375 - RNA, 19 nt, Artificial Sequence
  Description of Artificial Sequence: Synthetic oligonucleotide
  Antisense strand to SEQ ID NO: 775374
acuauuaugcccaucacau

SEQ ID NO: 775376 - RNA, 19 nt, Artificial Sequence
  Description of Artificial Sequence: Synthetic oligonucleotide
  Sense strand starting at position 551 of SEQ ID NO: 587215
ccaaauagccuuuagcaga

SEQ ID NO: 775377 - RNA, 19 nt, Artificial Sequence
  Description of Artificial Sequence: Synthetic oligonucleotide
  Antisense strand to SEQ ID NO: 775376
ucugcuaaaggcuauuugg

SEQ ID NO: 775378 - RNA, 19 nt, Artificial Sequence
  Description of Artificial Sequence: Synthetic oligonucleotide
  Sense strand starting at position 558 of SEQ ID NO: 587215
gccuuuagcagacaggaau

SEQ ID NO: 775379 - RNA, 19 nt, Artificial Sequence
  Description of Artificial Sequence: Synthetic oligonucleotide
  Antisense strand to SEQ ID NO: 775378
auuccugucugcuaaaggc

SEQ ID NO: 775380 - RNA, 19 nt, Artificial Sequence
  Description of Artificial Sequence: Synthetic oligonucleotide
  Sense strand starting at position 610 of SEQ ID NO: 587215
gccagaggacuugaguuua

SEQ ID NO: 775381 - RNA, 19 nt, Artificial Sequence
  Description of Artificial Sequence: Synthetic oligonucleotide
  Antisense strand to SEQ ID NO: 775380
uaaacucaaguccucuggc

SEQ ID NO: 775382 - RNA, 19 nt, Artificial Sequence
  Description of Artificial Sequence: Synthetic oligonucleotide
  Sense strand starting at position 667 of SEQ ID NO: 587215
cuuuaaacucuaggagcuu

SEQ ID NO: 775383 - RNA, 19 nt, Artificial Sequence
  Description of Artificial Sequence: Synthetic oligonucleotide
  Antisense strand to SEQ ID NO: 775382
aagcuccuagaguuuaaag

SEQ ID NO: 775384 - RNA, 19 nt, Artificial Sequence
  Description of Artificial Sequence: Synthetic oligonucleotide
  Sense strand starting at position 1170 of SEQ ID NO: 587215
ugaagcaaaucucugugau

SEQ ID NO: 775385 - RNA, 19 nt, Artificial Sequence
  Description of Artificial Sequence: Synthetic oligonucleotide
  Antisense strand to SEQ ID NO: 775384
aucacagagauuugcuuca

SEQ ID NO: 775386 - RNA, 19 nt, Artificial Sequence
  Description of Artificial Sequence: Synthetic oligonucleotide
  Sense strand starting at position 1366 of SEQ ID NO: 587215
aucgcauuauuuccuguau

SEQ ID NO: 775387 - RNA, 19 nt, Artificial Sequence
  Description of Artificial Sequence: Synthetic oligonucleotide
  Antisense strand to SEQ ID NO: 775386
auacaggaaauaaugcgau

SEQ ID NO: 775388 - RNA, 19 nt, Artificial Sequence
  Description of Artificial Sequence: Synthetic oligonucleotide
  Sense strand starting at position 1367 of SEQ ID NO: 587215
ucgcauuauuuccuguauu

SEQ ID NO: 775389 - RNA, 19 nt, Artificial Sequence
  Description of Artificial Sequence: Synthetic oligonucleotide
  Antisense strand to SEQ ID NO: 775388
aauacaggaaauaaugcga

SEQ ID NO: 775390 - RNA, 19 nt, Artificial Sequence
  Description of Artificial Sequence: Synthetic oligonucleotide
  Sense strand starting at position 1584 of SEQ ID NO: 587215
gugauccaucuauaccuua

SEQ ID NO: 775391 - RNA, 19 nt, Artificial Sequence
  Description of Artificial Sequence: Synthetic oligonucleotide
  Antisense strand to SEQ ID NO: 775390
uaagguauagauggaucac

SEQ ID NO: 775392 - RNA, 19 nt, Artificial Sequence
  Description of Artificial Sequence: Synthetic oligonucleotide
  Sense strand starting at position 2310 of SEQ ID NO: 587215
cccaguuucgaacaacaga

SEQ ID NO: 775393 - RNA, 19 nt, Artificial Sequence
  Description of Artificial Sequence: Synthetic oligonucleotide
  Antisense strand to SEQ ID NO: 775392
ucuguuguucgaaacuggg

SEQ ID NO: 775394 - RNA, 19 nt, Artificial Sequence
  Description of Artificial Sequence: Synthetic oligonucleotide
  Sense strand starting at position 2331 of SEQ ID NO: 587215
gugagaaugcaugaguuaa

SEQ ID NO: 775395 - RNA, 19 nt, Artificial Sequence
  Description of Artificial Sequence: Synthetic oligonucleotide
  Antisense strand to SEQ ID NO: 775394
uuaacucaugcauucucac

SEQ ID NO: 775396 - RNA, 19 nt, Artificial Sequence
  Description of Artificial Sequence: Synthetic oligonucleotide
  Sense strand starting at position 2333 of SEQ ID NO: 587215
gagaaugcaugaguuaaga

SEQ ID NO: 775397 - RNA, 19 nt, Artificial Sequence
  Description of Artificial Sequence: Synthetic oligonucleotide
  Antisense strand to SEQ ID NO: 775396
ucuuaacucaugcauucuc

SEQ ID NO: 775398 - RNA, 19 nt, Artificial Sequence
  Description of Artificial Sequence: Synthetic oligonucleotide
  Sense strand starting at position 2383 of SEQ ID NO: 587215
uaguaaugucagcagauag

SEQ ID NO: 775399 - RNA, 19 nt, Artificial Sequence
  Description of Artificial Sequence: Synthetic oligonucleotide
  Antisense strand to SEQ ID NO: 775398
cuaucugcugacauuacua

SEQ ID NO: 775400 - RNA, 19 nt, Artificial Sequence
  Description of Artificial Sequence: Synthetic oligonucleotide
  Sense strand starting at position 2407 of SEQ ID NO: 587215
uauggauguguggaacuua

SEQ ID NO: 775401 - RNA, 19 nt, Artificial Sequence
  Description of Artificial Sequence: Synthetic oligonucleotide
  Antisense strand to SEQ ID NO: 775400
uaaguuccacacauccaua

SEQ ID NO: 775402 - RNA, 19 nt, Artificial Sequence
  Description of Artificial Sequence: Synthetic oligonucleotide
  Sense strand starting at position 2445 of SEQ ID NO: 587215
acacacuuagugggaauua

SEQ ID NO: 775403 - RNA, 19 nt, Artificial Sequence
  Description of Artificial Sequence: Synthetic oligonucleotide
  Antisense strand to SEQ ID NO: 775402
uaauucccacuaagugugu

SEQ ID NO: 775404 - RNA, 19 nt, Artificial Sequence
  Description of Artificial Sequence: Synthetic oligonucleotide
  Sense strand starting at position 2454 of SEQ ID NO: 587215
gugggaauuaaagguaagu

SEQ ID NO: 775405 - RNA, 19 nt, Artificial Sequence
  Description of Artificial Sequence: Synthetic oligonucleotide
  Antisense strand to SEQ ID NO: 775404
acuuaccuuuaauucccac

SEQ ID NO: 775406 - RNA, 19 nt, Artificial Sequence
  Description of Artificial Sequence: Synthetic oligonucleotide
  Sense strand starting at position 2475 of SEQ ID NO: 587215
ggccuuuagccucagaaag

SEQ ID NO: 775407 - RNA, 19 nt, Artificial Sequence
  Description of Artificial Sequence: Synthetic oligonucleotide
  Antisense strand to SEQ ID NO: 775406
cuuucugaggcuaaaggcc

SEQ ID NO: 775408 - RNA, 19 nt, Artificial Sequence
  Description of Artificial Sequence: Synthetic oligonucleotide
  Sense strand starting at position 2551 of SEQ ID NO: 587215
accggaagaucaucuuaua

SEQ ID NO: 775409 - RNA, 19 nt, Artificial Sequence
  Description of Artificial Sequence: Synthetic oligonucleotide
  Antisense strand to SEQ ID NO: 775408
uauaagaugaucuuccggu

SEQ ID NO: 775410 - RNA, 19 nt, Artificial Sequence
  Description of Artificial Sequence: Synthetic oligonucleotide
  Sense strand starting at position 2759 of SEQ ID NO: 587215
cuccuuuaccagggagaac

SEQ ID NO: 775411 - RNA, 19 nt, Artificial Sequence
  Description of Artificial Sequence: Synthetic oligonucleotide
  Antisense strand to SEQ ID NO: 775410
guucucccugguaaaggag

SEQ ID NO: 775412 - RNA, 19 nt, Artificial Sequence
  Description of Artificial Sequence: Synthetic oligonucleotide
  Sense strand starting at position 2808 of SEQ ID NO: 587215
ccucauuagccuugaaaug

SEQ ID NO: 775413 - RNA, 19 nt, Artificial Sequence
  Description of Artificial Sequence: Synthetic oligonucleotide
  Antisense strand to SEQ ID NO: 775412
cauuucaaggcuaaugagg

SEQ ID NO: 775414 - RNA, 19 nt, Artificial Sequence
  Description of Artificial Sequence: Synthetic oligonucleotide
  Sense strand starting at position 2809 of SEQ ID NO: 587215
cucauuagccuugaaauga

SEQ ID NO: 775415 - RNA, 19 nt, Artificial Sequence
  Description of Artificial Sequence: Synthetic oligonucleotide
  Antisense strand to SEQ ID NO: 775414
ucauuucaaggcuaaugag

SEQ ID NO: 775416 - RNA, 19 nt, Artificial Sequence
  Description of Artificial Sequence: Synthetic oligonucleotide
  Sense strand starting at position 2951 of SEQ ID NO: 587215
cuagucuuuguugaagaug

SEQ ID NO: 775417 - RNA, 19 nt, Artificial Sequence
  Description of Artificial Sequence: Synthetic oligonucleotide
  Antisense strand to SEQ ID NO: 775416
caucuucaacaaagacuag

SEQ ID NO: 775418 - RNA, 19 nt, Artificial Sequence
  Description of Artificial Sequence: Synthetic oligonucleotide
  Sense strand starting at position 2987 of SEQ ID NO: 587215
caaagacgcuucuuugaga

SEQ ID NO: 775419 - RNA, 19 nt, Artificial Sequence
  Description of Artificial Sequence: Synthetic oligonucleotide
  Antisense strand to SEQ ID NO: 775418
ucucaaagaagcgucuuug

SEQ ID NO: 775420 - RNA, 19 nt, Artificial Sequence
  Description of Artificial Sequence: Synthetic oligonucleotide
  Sense strand starting at position 2988 of SEQ ID NO: 587215
aaagacgcuucuuugagaa

SEQ ID NO: 775421 - RNA, 19 nt, Artificial Sequence
  Description of Artificial Sequence: Synthetic oligonucleotide
  Antisense strand to SEQ ID NO: 775420
uucucaaagaagcgucuuu

SEQ ID NO: 775422 - RNA, 19 nt, Artificial Sequence
  Description of Artificial Sequence: Synthetic oligonucleotide
  Sense strand starting at position 3018 of SEQ ID NO: 587215
cuggguguuccucauauau

SEQ ID NO: 775423 - RNA, 19 nt, Artificial Sequence
  Description of Artificial Sequence: Synthetic oligonucleotide
  Antisense strand to SEQ ID NO: 775422
auauaugaggaacacccag

SEQ ID NO: 775424 - RNA, 19 nt, Artificial Sequence
  Description of Artificial Sequence: Synthetic oligonucleotide
  Sense strand starting at position 3289 of SEQ ID NO: 587215
aagaaugaaguuugagcaa

SEQ ID NO: 775425 - RNA, 19 nt, Artificial Sequence
  Description of Artificial Sequence: Synthetic oligonucleotide
  Antisense strand to SEQ ID NO: 775424
uugcucaaacuucauucuu

SEQ ID NO: 775426 - RNA, 19 nt, Artificial Sequence
  Description of Artificial Sequence: Synthetic oligonucleotide
  Sense strand starting at position 3308 of SEQ ID NO: 587215
cuaaauguagaaugccuaa

SEQ ID NO: 775427 - RNA, 19 nt, Artificial Sequence
  Description of Artificial Sequence: Synthetic oligonucleotide
  Antisense strand to SEQ ID NO: 775426
uuaggcauucuacauuuag

SEQ ID NO: 775428 - RNA, 19 nt, Artificial Sequence
  Description of Artificial Sequence: Synthetic oligonucleotide
  Sense strand starting at position 3329 of SEQ ID NO: 587215
acaagugaguuaucacuuu

SEQ ID NO: 775429 - RNA, 19 nt, Artificial Sequence
  Description of Artificial Sequence: Synthetic oligonucleotide
  Antisense strand to SEQ ID NO: 775428
aaagugauaacucacuugu

SEQ ID NO: 775430 - RNA, 19 nt, Artificial Sequence
  Description of Artificial Sequence: Synthetic oligonucleotide
  Sense strand starting at position 3451 of SEQ ID NO: 587215
aucucacuuguuuaauagu

SEQ ID NO: 775431 - RNA, 19 nt, Artificial Sequence
  Description of Artificial Sequence: Synthetic oligonucleotide
  Antisense strand to SEQ ID NO: 775430
acuauuaaacaagugagau

SEQ ID NO: 775432 - RNA, 19 nt, Artificial Sequence
  Description of Artificial Sequence: Synthetic oligonucleotide
  Sense strand starting at position 3525 of SEQ ID NO: 587215
acauaucacccuugacagu

SEQ ID NO: 775433 - RNA, 19 nt, Artificial Sequence
  Description of Artificial Sequence: Synthetic oligonucleotide
  Antisense strand to SEQ ID NO: 775432
acugucaagggugauaugu

SEQ ID NO: 775434 - RNA, 19 nt, Artificial Sequence
  Description of Artificial Sequence: Synthetic oligonucleotide
  Sense strand starting at position 3538 of SEQ ID NO: 587215
gacaguuggccugauuaac

SEQ ID NO: 775435 - RNA, 19 nt, Artificial Sequence
  Description of Artificial Sequence: Synthetic oligonucleotide
  Antisense strand to SEQ ID NO: 775434
guuaaucaggccaacuguc

SEQ ID NO: 775436 - RNA, 19 nt, Artificial Sequence
  Description of Artificial Sequence: Synthetic oligonucleotide
  Sense strand starting at position 3750 of SEQ ID NO: 587215
uguguagacaguuaacuga

SEQ ID NO: 775437 - RNA, 19 nt, Artificial Sequence
  Description of Artificial Sequence: Synthetic oligonucleotide
  Antisense strand to SEQ ID NO: 775436
ucaguuaacugucuacaca

SEQ ID NO: 775438 - RNA, 19 nt, Artificial Sequence
  Description of Artificial Sequence: Synthetic oligonucleotide
  Sense strand starting at position 929 of SEQ ID NO: 587216
auccuagguuaguccaaga

SEQ ID NO: 775439 - RNA, 19 nt, Artificial Sequence
  Description of Artificial Sequence: Synthetic oligonucleotide
  Antisense strand to SEQ ID NO: 775438
ucuuggacuaaccuaggau

SEQ ID NO: 775440 - RNA, 19 nt, Artificial Sequence
  Description of Artificial Sequence: Synthetic oligonucleotide
  Sense strand starting at position 1027 of SEQ ID NO: 587216
gcucaacuguuccuuagau

SEQ ID NO: 775441 - RNA, 19 nt, Artificial Sequence
  Description of Artificial Sequence: Synthetic oligonucleotide
  Antisense strand to SEQ ID NO: 775440
aucuaaggaacaguugagc

SEQ ID NO: 775442 - RNA, 19 nt, Artificial Sequence
  Description of Artificial Sequence: Synthetic oligonucleotide
  Sense strand starting at position 1037 of SEQ ID NO: 587216
uccuuagauuucguggguu

SEQ ID NO: 775443 - RNA, 19 nt, Artificial Sequence
  Description of Artificial Sequence: Synthetic oligonucleotide
  Antisense strand to SEQ ID NO: 775442
aacccacgaaaucuaagga

SEQ ID NO: 775444 - RNA, 19 nt, Artificial Sequence
  Description of Artificial Sequence: Synthetic oligonucleotide
  Sense strand starting at position 1039 of SEQ ID NO: 587216
cuuagauuucguggguuuc

SEQ ID NO: 775445 - RNA, 19 nt, Artificial Sequence
  Description of Artificial Sequence: Synthetic oligonucleotide
  Antisense strand to SEQ ID NO: 775444
gaaacccacgaaaucuaag

SEQ ID NO: 775446 - RNA, 19 nt, Artificial Sequence
  Description of Artificial Sequence: Synthetic oligonucleotide
  Sense strand starting at position 1041 of SEQ ID NO: 587216
uagauuucguggguuucca

SEQ ID NO: 775447 - RNA, 19 nt, Artificial Sequence
  Description of Artificial Sequence: Synthetic oligonucleotide
  Antisense strand to SEQ ID NO: 775446
uggaaacccacgaaaucua

SEQ ID NO: 775448 - RNA, 19 nt, Artificial Sequence
  Description of Artificial Sequence: Synthetic oligonucleotide
  Sense strand starting at position 1139 of SEQ ID NO: 587216
gcgugaucucgguucagug

SEQ ID NO: 775449 - RNA, 19 nt, Artificial Sequence
  Description of Artificial Sequence: Synthetic oligonucleotide
  Antisense strand to SEQ ID NO: 775448
cacugaaccgagaucacgc

SEQ ID NO: 775450 - RNA, 19 nt, Artificial Sequence
  Description of Artificial Sequence: Synthetic oligonucleotide
  Sense strand starting at position 1403 of SEQ ID NO: 587216
auacaugguucuuuaagac

SEQ ID NO: 775451 - RNA, 19 nt, Artificial Sequence
  Description of Artificial Sequence: Synthetic oligonucleotide
  Antisense strand to SEQ ID NO: 775450
gucuuaaagaaccauguau

SEQ ID NO: 775452 - RNA, 19 nt, Artificial Sequence
  Description of Artificial Sequence: Synthetic oligonucleotide
  Sense strand starting at position 1461 of SEQ ID NO: 587216
guguucuagcccgaacaaa

SEQ ID NO: 775453 - RNA, 19 nt, Artificial Sequence
  Description of Artificial Sequence: Synthetic oligonucleotide
  Antisense strand to SEQ ID NO: 775452
uuuguucgggcuagaacac

SEQ ID NO: 775454 - RNA, 19 nt, Artificial Sequence
  Description of Artificial Sequence: Synthetic oligonucleotide
  Sense strand starting at position 1504 of SEQ ID NO: 587216
uggauuugauucuacccaa

SEQ ID NO: 775455 - RNA, 19 nt, Artificial Sequence
  Description of Artificial Sequence: Synthetic oligonucleotide
  Antisense strand to SEQ ID NO: 775454
uuggguagaaucaaaucca

SEQ ID NO: 775456 - RNA, 19 nt, Artificial Sequence
  Description of Artificial Sequence: Synthetic oligonucleotide
  Sense strand starting at position 1568 of SEQ ID NO: 587216
gcguauugccaucaaugag

SEQ ID NO: 775457 - RNA, 19 nt, Artificial Sequence
  Description of Artificial Sequence: Synthetic oligonucleotide
  Antisense strand to SEQ ID NO: 775456
cucauugauggcaauacgc

SEQ ID NO: 775458 - RNA, 19 nt, Artificial Sequence
  Description of Artificial Sequence: Synthetic oligonucleotide
  Sense strand starting at position 1679 of SEQ ID NO: 587216
acuauucuggaacgcgaaa

SEQ ID NO: 775459 - RNA, 19 nt, Artificial Sequence
  Description of Artificial Sequence: Synthetic oligonucleotide
  Antisense strand to SEQ ID NO: 775458
uuucgcguuccagaauagu

SEQ ID NO: 775460 - RNA, 19 nt, Artificial Sequence
  Description of Artificial Sequence: Synthetic oligonucleotide
  Sense strand starting at position 1944 of SEQ ID NO: 587216
gcaggcucaccaugaauca

SEQ ID NO: 775461 - RNA, 19 nt, Artificial Sequence
  Description of Artificial Sequence: Synthetic oligonucleotide
  Antisense strand to SEQ ID NO: 775460
ugauucauggugagccugc

SEQ ID NO: 775462 - RNA, 19 nt, Artificial Sequence
  Description of Artificial Sequence: Synthetic oligonucleotide
  Sense strand starting at position 2305 of SEQ ID NO: 587216
cugaguacccuugggauaa

SEQ ID NO: 775463 - RNA, 19 nt, Artificial Sequence
  Description of Artificial Sequence: Synthetic oligonucleotide
  Antisense strand to SEQ ID NO: 775462
uuaucccaaggguacucag

SEQ ID NO: 775464 - RNA, 19 nt, Artificial Sequence
  Description of Artificial Sequence: Synthetic oligonucleotide
  Sense strand starting at position 2327 of SEQ ID NO: 587216
caggguuccuuguccauaa

SEQ ID NO: 775465 - RNA, 19 nt, Artificial Sequence
  Description of Artificial Sequence: Synthetic oligonucleotide
  Antisense strand to SEQ ID NO: 775464
uuauggacaaggaacccug

SEQ ID NO: 775466 - RNA, 19 nt, Artificial Sequence
  Description of Artificial Sequence: Synthetic oligonucleotide
  Sense strand starting at position 2328 of SEQ ID NO: 587216
aggguuccuuguccauaaa

SEQ ID NO: 775467 - RNA, 19 nt, Artificial Sequence
  Description of Artificial Sequence: Synthetic oligonucleotide
  Antisense strand to SEQ ID NO: 775466
uuuauggacaaggaacccu

SEQ ID NO: 775468 - RNA, 19 nt, Artificial Sequence
  Description of Artificial Sequence: Synthetic oligonucleotide
  Sense strand starting at position 2331 of SEQ ID NO: 587216
guuccuuguccauaaaccu

SEQ ID NO: 775469 - RNA, 19 nt, Artificial Sequence
  Description of Artificial Sequence: Synthetic oligonucleotide
  Antisense strand to SEQ ID NO: 775468
agguuuauggacaaggaac

SEQ ID NO: 775470 - RNA, 19 nt, Artificial Sequence
  Description of Artificial Sequence: Synthetic oligonucleotide
  Sense strand starting at position 2338 of SEQ ID NO: 587216
guccauaaaccuggaucga

SEQ ID NO: 775471 - RNA, 19 nt, Artificial Sequence
  Description of Artificial Sequence: Synthetic oligonucleotide
  Antisense strand to SEQ ID NO: 775470
ucgauccagguuuauggac

SEQ ID NO: 775472 - RNA, 19 nt, Artificial Sequence
  Description of Artificial Sequence: Synthetic oligonucleotide
  Sense strand starting at position 2428 of SEQ ID NO: 587216
gaagccagagauugaguua

SEQ ID NO: 775473 - RNA, 19 nt, Artificial Sequence
  Description of Artificial Sequence: Synthetic oligonucleotide
  Antisense strand to SEQ ID NO: 775472
uaacucaaucucuggcuuc

SEQ ID NO: 775474 - RNA, 19 nt, Artificial Sequence
  Description of Artificial Sequence: Synthetic oligonucleotide
  Sense strand starting at position 2431 of SEQ ID NO: 587216
gccagagauugaguuaaua

SEQ ID NO: 775475 - RNA, 19 nt, Artificial Sequence
  Description of Artificial Sequence: Synthetic oligonucleotide
  Antisense strand to SEQ ID NO: 775474
uauuaacucaaucucuggc

SEQ ID NO: 775476 - RNA, 19 nt, Artificial Sequence
  Description of Artificial Sequence: Synthetic oligonucleotide
  Sense strand starting at position 2441 of SEQ ID NO: 587216
gaguuaauacuucguugau

SEQ ID NO: 775477 - RNA, 19 nt, Artificial Sequence
  Description of Artificial Sequence: Synthetic oligonucleotide
  Antisense strand to SEQ ID NO: 775476
aucaacgaaguauuaacuc

SEQ ID NO: 775478 - RNA, 19 nt, Artificial Sequence
  Description of Artificial Sequence: Synthetic oligonucleotide
  Sense strand starting at position 2442 of SEQ ID NO: 587216
aguuaauacuucguugaug

SEQ ID NO: 775479 - RNA, 19 nt, Artificial Sequence
  Description of Artificial Sequence: Synthetic oligonucleotide
  Antisense strand to SEQ ID NO: 775478
caucaacgaaguauuaacu

SEQ ID NO: 775480 - RNA, 19 nt, Artificial Sequence
  Description of Artificial Sequence: Synthetic oligonucleotide
  Sense strand starting at position 2443 of SEQ ID NO: 587216
guuaauacuucguugauga

SEQ ID NO: 775481 - RNA, 19 nt, Artificial Sequence
  Description of Artificial Sequence: Synthetic oligonucleotide
  Antisense strand to SEQ ID NO: 775480
ucaucaacgaaguauuaac

SEQ ID NO: 775482 - RNA, 19 nt, Artificial Sequence
  Description of Artificial Sequence: Synthetic oligonucleotide
  Sense strand starting at position 2444 of SEQ ID NO: 587216
uuaauacuucguugaugaa

SEQ ID NO: 775483 - RNA, 19 nt, Artificial Sequence
  Description of Artificial Sequence: Synthetic oligonucleotide
  Antisense strand to SEQ ID NO: 775482
uucaucaacgaaguauuaa

SEQ ID NO: 775484 - RNA, 19 nt, Artificial Sequence
  Description of Artificial Sequence: Synthetic oligonucleotide
  Sense strand starting at position 2445 of SEQ ID NO: 587216
uaauacuucguugaugaaa

SEQ ID NO: 775485 - RNA, 19 nt, Artificial Sequence
  Description of Artificial Sequence: Synthetic oligonucleotide
  Antisense strand to SEQ ID NO: 775484
uuucaucaacgaaguauua

SEQ ID NO: 775486 - RNA, 19 nt, Artificial Sequence
  Description of Artificial Sequence: Synthetic oligonucleotide
  Sense strand starting at position 2579 of SEQ ID NO: 587216
acagcuuggguuuauacaa

SEQ ID NO: 775487 - RNA, 19 nt, Artificial Sequence
  Description of Artificial Sequence: Synthetic oligonucleotide
  Antisense strand to SEQ ID NO: 775486
uuguauaaacccaagcugu

SEQ ID NO: 775488 - RNA, 19 nt, Artificial Sequence
  Description of Artificial Sequence: Synthetic oligonucleotide
  Sense strand starting at position 2638 of SEQ ID NO: 587216
aacauugguucugugggaa

SEQ ID NO: 775489 - RNA, 19 nt, Artificial Sequence
  Description of Artificial Sequence: Synthetic oligonucleotide
  Antisense strand to SEQ ID NO: 775488
uucccacagaaccaauguu

SEQ ID NO: 775490 - RNA, 19 nt, Artificial Sequence
  Description of Artificial Sequence: Synthetic oligonucleotide
  Sense strand starting at position 2694 of SEQ ID NO: 587216
aggugaacucaaggaucuu

SEQ ID NO: 775491 - RNA, 19 nt, Artificial Sequence
  Description of Artificial Sequence: Synthetic oligonucleotide
  Antisense strand to SEQ ID NO: 775490
aagauccuugaguucaccu

SEQ ID NO: 775492 - RNA, 19 nt, Artificial Sequence
  Description of Artificial Sequence: Synthetic oligonucleotide
  Sense strand starting at position 2718 of SEQ ID NO: 587216
gggcaacuggcugaaaguu

SEQ ID NO: 775493 - RNA, 19 nt, Artificial Sequence
  Description of Artificial Sequence: Synthetic oligonucleotide
  Antisense strand to SEQ ID NO: 775492
aacuuucagccaguugccc

SEQ ID NO: 775494 - RNA, 19 nt, Artificial Sequence
  Description of Artificial Sequence: Synthetic oligonucleotide
  Sense strand starting at position 2726 of SEQ ID NO: 587216
ggcugaaaguuauugucua

SEQ ID NO: 775495 - RNA, 19 nt, Artificial Sequence
  Description of Artificial Sequence: Synthetic oligonucleotide
  Antisense strand to SEQ ID NO: 775494
uagacaauaacuuucagcc

SEQ ID NO: 775496 - RNA, 19 nt, Artificial Sequence
  Description of Artificial Sequence: Synthetic oligonucleotide
  Sense strand starting at position 2730 of SEQ ID NO: 587216
gaaaguuauugucuaaaga

SEQ ID NO: 775497 - RNA, 19 nt, Artificial Sequence
  Description of Artificial Sequence: Synthetic oligonucleotide
  Antisense strand to SEQ ID NO: 775496
ucuuuagacaauaacuuuc

SEQ ID NO: 775498 - RNA, 19 nt, Artificial Sequence
  Description of Artificial Sequence: Synthetic oligonucleotide
  Sense strand starting at position 2765 of SEQ ID NO: 587216
aggaaugucugggaugacu

SEQ ID NO: 775499 - RNA, 19 nt, Artificial Sequence
  Description of Artificial Sequence: Synthetic oligonucleotide
  Antisense strand to SEQ ID NO: 775498
agucaucccagacauuccu

SEQ ID NO: 775500 - RNA, 19 nt, Artificial Sequence
  Description of Artificial Sequence: Synthetic oligonucleotide
  Sense strand starting at position 3128 of SEQ ID NO: 587216
cuauguuaugaugaguugu

SEQ ID NO: 775501 - RNA, 19 nt, Artificial Sequence
  Description of Artificial Sequence: Synthetic oligonucleotide
  Antisense strand to SEQ ID NO: 775500
acaacucaucauaacauag

SEQ ID NO: 775502 - RNA, 19 nt, Artificial Sequence
  Description of Artificial Sequence: Synthetic oligonucleotide
  Sense strand starting at position 3130 of SEQ ID NO: 587216
auguuaugaugaguuguac

SEQ ID NO: 775503 - RNA, 19 nt, Artificial Sequence
  Description of Artificial Sequence: Synthetic oligonucleotide
  Antisense strand to SEQ ID NO: 775502
guacaacucaucauaacau

SEQ ID NO: 775504 - RNA, 19 nt, Artificial Sequence
  Description of Artificial Sequence: Synthetic oligonucleotide
  Sense strand starting at position 3595 of SEQ ID NO: 587216
cuuuaucugccaugugaug

SEQ ID NO: 775505 - RNA, 19 nt, Artificial Sequence
  Description of Artificial Sequence: Synthetic oligonucleotide
  Antisense strand to SEQ ID NO: 775504
caucacauggcagauaaag

SEQ ID NO: 775506 - RNA, 19 nt, Artificial Sequence
  Description of Artificial Sequence: Synthetic oligonucleotide
  Sense strand starting at position 3677 of SEQ ID NO: 587216
gaggcuuuaugguuugaag

SEQ ID NO: 775507 - RNA, 19 nt, Artificial Sequence
  Description of Artificial Sequence: Synthetic oligonucleotide
  Antisense strand to SEQ ID NO: 775506
cuucaaaccauaaagccuc

SEQ ID NO: 775508 - RNA, 19 nt, Artificial Sequence
  Description of Artificial Sequence: Synthetic oligonucleotide
  Sense strand starting at position 3751 of SEQ ID NO: 587216
agaguuuaguccucaacuu

SEQ ID NO: 775509 - RNA, 19 nt, Artificial Sequence
  Description of Artificial Sequence: Synthetic oligonucleotide
  Antisense strand to SEQ ID NO: 775508
aaguugaggacuaaacucu

SEQ ID NO: 775510 - RNA, 19 nt, Artificial Sequence
  Description of Artificial Sequence: Synthetic oligonucleotide
  Sense strand starting at position 3823 of SEQ ID NO: 587216
guccuaaacuuccugagca

SEQ ID NO: 775511 - RNA, 19 nt, Artificial Sequence
  Description of Artificial Sequence: Synthetic oligonucleotide
  Antisense strand to SEQ ID NO: 775510
ugcucaggaaguuuaggac

SEQ ID NO: 775512 - RNA, 19 nt, Artificial Sequence
  Description of Artificial Sequence: Synthetic oligonucleotide
  Sense strand starting at position 3825 of SEQ ID NO: 587216
ccuaaacuuccugagcaga

SEQ ID NO: 775513 - RNA, 19 nt, Artificial Sequence
  Description of Artificial Sequence: Synthetic oligonucleotide
  Antisense strand to SEQ ID NO: 775512
ucugcucaggaaguuuagg

SEQ ID NO: 775514 - RNA, 19 nt, Artificial Sequence
  Description of Artificial Sequence: Synthetic oligonucleotide
  Sense strand starting at position 3879 of SEQ ID NO: 587216
acucgaugaagaugucuuu

SEQ ID NO: 775515 - RNA, 19 nt, Artificial Sequence
  Description of Artificial Sequence: Synthetic oligonucleotide
  Antisense strand to SEQ ID NO: 775514
aaagacaucuucaucgagu

SEQ ID NO: 775516 - RNA, 19 nt, Artificial Sequence
  Description of Artificial Sequence: Synthetic oligonucleotide
  Sense strand starting at position 3935 of SEQ ID NO: 587216
gguuuccagacugaagagu

SEQ ID NO: 775517 - RNA, 19 nt, Artificial Sequence
  Description of Artificial Sequence: Synthetic oligonucleotide
  Antisense strand to SEQ ID NO: 775516
acucuucagucuggaaacc

SEQ ID NO: 775518 - RNA, 19 nt, Artificial Sequence
  Description of Artificial Sequence: Synthetic oligonucleotide
  Sense strand starting at position 44 of SEQ ID NO: 587217
cuaagaaauuacucugggu

SEQ ID NO: 775519 - RNA, 19 nt, Artificial Sequence
  Description of Artificial Sequence: Synthetic oligonucleotide
  Antisense strand to SEQ ID NO: 775518
acccagaguaauuucuuag

SEQ ID NO: 775520 - RNA, 19 nt, Artificial Sequence
  Description of Artificial Sequence: Synthetic oligonucleotide
  Sense strand starting at position 46 of SEQ ID NO: 587217
aagaaauuacucugggugu

SEQ ID NO: 775521 - RNA, 19 nt, Artificial Sequence
  Description of Artificial Sequence: Synthetic oligonucleotide
  Antisense strand to SEQ ID NO: 775520
acacccagaguaauuucuu

SEQ ID NO: 775522 - RNA, 19 nt, Artificial Sequence
  Description of Artificial Sequence: Synthetic oligonucleotide
  Sense strand starting at position 50 of SEQ ID NO: 587217
aauuacucuggguguccaa

SEQ ID NO: 775523 - RNA, 19 nt, Artificial Sequence
  Description of Artificial Sequence: Synthetic oligonucleotide
  Antisense strand to SEQ ID NO: 775522
uuggacacccagaguaauu

SEQ ID NO: 775524 - RNA, 19 nt, Artificial Sequence
  Description of Artificial Sequence: Synthetic oligonucleotide
  Sense strand starting at position 53 of SEQ ID NO: 587217
uacucuggguguccaagaa

SEQ ID NO: 775525 - RNA, 19 nt, Artificial Sequence
  Description of Artificial Sequence: Synthetic oligonucleotide
  Antisense strand to SEQ ID NO: 775524
uucuuggacacccagagua

SEQ ID NO: 775526 - RNA, 19 nt, Artificial Sequence
  Description of Artificial Sequence: Synthetic oligonucleotide
  Sense strand starting at position 202 of SEQ ID NO: 587217
uuacuuuagcgaggaacua

SEQ ID NO: 775527 - RNA, 19 nt, Artificial Sequence
  Description of Artificial Sequence: Synthetic oligonucleotide
  Antisense strand to SEQ ID NO: 775526
uaguuccucgcuaaaguaa

SEQ ID NO: 775528 - RNA, 19 nt, Artificial Sequence
  Description of Artificial Sequence: Synthetic oligonucleotide
  Sense strand starting at position 235 of SEQ ID NO: 587217
gucauucugccuguguguu

SEQ ID NO: 775529 - RNA, 19 nt, Artificial Sequence
  Description of Artificial Sequence: Synthetic oligonucleotide
  Antisense strand to SEQ ID NO: 775528
aacacacaggcagaaugac

SEQ ID NO: 775530 - RNA, 19 nt, Artificial Sequence
  Description of Artificial Sequence: Synthetic oligonucleotide
  Sense strand starting at position 247 of SEQ ID NO: 587217
guguguugacagggaauag

SEQ ID NO: 775531 - RNA, 19 nt, Artificial Sequence
  Description of Artificial Sequence: Synthetic oligonucleotide
  Antisense strand to SEQ ID NO: 775530
cuauucccugucaacacac

SEQ ID NO: 775532 - RNA, 19 nt, Artificial Sequence
  Description of Artificial Sequence: Synthetic oligonucleotide
  Sense strand starting at position 492 of SEQ ID NO: 587217
aggcuuuacucuuuagaaa

SEQ ID NO: 775533 - RNA, 19 nt, Artificial Sequence
  Description of Artificial Sequence: Synthetic oligonucleotide
  Antisense strand to SEQ ID NO: 775532
uuucuaaagaguaaagccu

SEQ ID NO: 775534 - RNA, 19 nt, Artificial Sequence
  Description of Artificial Sequence: Synthetic oligonucleotide
  Sense strand starting at position 493 of SEQ ID NO: 587217
ggcuuuacucuuuagaaag

SEQ ID NO: 775535 - RNA, 19 nt, Artificial Sequence
  Description of Artificial Sequence: Synthetic oligonucleotide
  Antisense strand to SEQ ID NO: 775534
cuuucuaaagaguaaagcc

SEQ ID NO: 775536 - RNA, 19 nt, Artificial Sequence
  Description of Artificial Sequence: Synthetic oligonucleotide
  Sense strand starting at position 717 of SEQ ID NO: 587217
acuggagaaugaguccuau

SEQ ID NO: 775537 - RNA, 19 nt, Artificial Sequence
  Description of Artificial Sequence: Synthetic oligonucleotide
  Antisense strand to SEQ ID NO: 775536
auaggacucauucuccagu

SEQ ID NO: 775538 - RNA, 19 nt, Artificial Sequence
  Description of Artificial Sequence: Synthetic oligonucleotide
  Sense strand starting at position 721 of SEQ ID NO: 587217
gagaaugaguccuauuuac

SEQ ID NO: 775539 - RNA, 19 nt, Artificial Sequence
  Description of Artificial Sequence: Synthetic oligonucleotide
  Antisense strand to SEQ ID NO: 775538
guaaauaggacucauucuc

SEQ ID NO: 775540 - RNA, 19 nt, Artificial Sequence
  Description of Artificial Sequence: Synthetic oligonucleotide
  Sense strand starting at position 808 of SEQ ID NO: 587217
ggagauccugcuugucaga

SEQ ID NO: 775541 - RNA, 19 nt, Artificial Sequence
  Description of Artificial Sequence: Synthetic oligonucleotide
  Antisense strand to SEQ ID NO: 775540
ucugacaagcaggaucucc

SEQ ID NO: 775542 - RNA, 19 nt, Artificial Sequence
  Description of Artificial Sequence: Synthetic oligonucleotide
  Sense strand starting at position 810 of SEQ ID NO: 587217
agauccugcuugucagaaa

SEQ ID NO: 775543 - RNA, 19 nt, Artificial Sequence
  Description of Artificial Sequence: Synthetic oligonucleotide
  Antisense strand to SEQ ID NO: 775542
uuucugacaagcaggaucu

SEQ ID NO: 775544 - RNA, 19 nt, Artificial Sequence
  Description of Artificial Sequence: Synthetic oligonucleotide
  Sense strand starting at position 829 of SEQ ID NO: 587217
acggaaagaucaccugacu

SEQ ID NO: 775545 - RNA, 19 nt, Artificial Sequence
  Description of Artificial Sequence: Synthetic oligonucleotide
  Antisense strand to SEQ ID NO: 775544
agucaggugaucuuuccgu

SEQ ID NO: 775546 - RNA, 19 nt, Artificial Sequence
  Description of Artificial Sequence: Synthetic oligonucleotide
  Sense strand starting at position 907 of SEQ ID NO: 587217
uugugaguuuguguauuua

SEQ ID NO: 775547 - RNA, 19 nt, Artificial Sequence
  Description of Artificial Sequence: Synthetic oligonucleotide
  Antisense strand to SEQ ID NO: 775546
uaaauacacaaacucacaa

SEQ ID NO: 775548 - RNA, 19 nt, Artificial Sequence
  Description of Artificial Sequence: Synthetic oligonucleotide
  Sense strand starting at position 911 of SEQ ID NO: 587217
gaguuuguguauuuaucua

SEQ ID NO: 775549 - RNA, 19 nt, Artificial Sequence
  Description of Artificial Sequence: Synthetic oligonucleotide
  Antisense strand to SEQ ID NO: 775548
uagauaaauacacaaacuc

SEQ ID NO: 775550 - RNA, 19 nt, Artificial Sequence
  Description of Artificial Sequence: Synthetic oligonucleotide
  Sense strand starting at position 1052 of SEQ ID NO: 587217
agugcaaauguuuacccau

SEQ ID NO: 775551 - RNA, 19 nt, Artificial Sequence
  Description of Artificial Sequence: Synthetic oligonucleotide
  Antisense strand to SEQ ID NO: 775550
auggguaaacauuugcacu

SEQ ID NO: 775552 - RNA, 19 nt, Artificial Sequence
  Description of Artificial Sequence: Synthetic oligonucleotide
  Sense strand starting at position 1070 of SEQ ID NO: 587217
ugugucucccucuaacaga

SEQ ID NO: 775553 - RNA, 19 nt, Artificial Sequence
  Description of Artificial Sequence: Synthetic oligonucleotide
  Antisense strand to SEQ ID NO: 775552
ucuguuagagggagacaca

SEQ ID NO: 775554 - RNA, 19 nt, Artificial Sequence
  Description of Artificial Sequence: Synthetic oligonucleotide
  Sense strand starting at position 1083 of SEQ ID NO: 587217
aacagauucccuggaggca

SEQ ID NO: 775555 - RNA, 19 nt, Artificial Sequence
  Description of Artificial Sequence: Synthetic oligonucleotide
  Antisense strand to SEQ ID NO: 775554
ugccuccagggaaucuguu

SEQ ID NO: 775556 - RNA, 19 nt, Artificial Sequence
  Description of Artificial Sequence: Synthetic oligonucleotide
  Sense strand starting at position 1407 of SEQ ID NO: 587217
gcggcaugaauguaaguca

SEQ ID NO: 775557 - RNA, 19 nt, Artificial Sequence
  Description of Artificial Sequence: Synthetic oligonucleotide
  Antisense strand to SEQ ID NO: 775556
ugacuuacauucaugccgc

SEQ ID NO: 775558 - RNA, 19 nt, Artificial Sequence
  Description of Artificial Sequence: Synthetic oligonucleotide
  Sense strand starting at position 1579 of SEQ ID NO: 587217
uuaaauaaguguccuaugu

SEQ ID NO: 775559 - RNA, 19 nt, Artificial Sequence
  Description of Artificial Sequence: Synthetic oligonucleotide
  Antisense strand to SEQ ID NO: 775558
acauaggacacuuauuuaa

SEQ ID NO: 775560 - RNA, 19 nt, Artificial Sequence
  Description of Artificial Sequence: Synthetic oligonucleotide
  Sense strand starting at position 1583 of SEQ ID NO: 587217
auaaguguccuaugugauu

SEQ ID NO: 775561 - RNA, 19 nt, Artificial Sequence
  Description of Artificial Sequence: Synthetic oligonucleotide
  Antisense strand to SEQ ID NO: 775560
aaucacauaggacacuuau

SEQ ID NO: 775562 - RNA, 19 nt, Artificial Sequence
  Description of Artificial Sequence: Synthetic oligonucleotide
  Sense strand starting at position 1588 of SEQ ID NO: 587217
uguccuaugugauuacuuu

SEQ ID NO: 775563 - RNA, 19 nt, Artificial Sequence
  Description of Artificial Sequence: Synthetic oligonucleotide
  Antisense strand to SEQ ID NO: 775562
aaaguaaucacauaggaca

SEQ ID NO: 775564 - RNA, 19 nt, Artificial Sequence
  Description of Artificial Sequence: Synthetic oligonucleotide
  Sense strand starting at position 1589 of SEQ ID NO: 587217
guccuaugugauuacuuuc

SEQ ID NO: 775565 - RNA, 19 nt, Artificial Sequence
  Description of Artificial Sequence: Synthetic oligonucleotide
  Antisense strand to SEQ ID NO: 775564
gaaaguaaucacauaggac

SEQ ID NO: 775566 - RNA, 19 nt, Artificial Sequence
  Description of Artificial Sequence: Synthetic oligonucleotide
  Sense strand starting at position 2312 of SEQ ID NO: 587217
gcgacuauuccggcugcga

SEQ ID NO: 775567 - RNA, 19 nt, Artificial Sequence
  Description of Artificial Sequence: Synthetic oligonucleotide
  Antisense strand to SEQ ID NO: 775566
ucgcagccggaauagucgc

SEQ ID NO: 775568 - RNA, 19 nt, Artificial Sequence
  Description of Artificial Sequence: Synthetic oligonucleotide
  Sense strand starting at position 2313 of SEQ ID NO: 587217
cgacuauuccggcugcgag

SEQ ID NO: 775569 - RNA, 19 nt, Artificial Sequence
  Description of Artificial Sequence: Synthetic oligonucleotide
  Antisense strand to SEQ ID NO: 775568
cucgcagccggaauagucg

SEQ ID NO: 775570 - RNA, 19 nt, Artificial Sequence
  Description of Artificial Sequence: Synthetic oligonucleotide
  Sense strand starting at position 2815 of SEQ ID NO: 587217
ggcccaguguuacuccaga

SEQ ID NO: 775571 - RNA, 19 nt, Artificial Sequence
  Description of Artificial Sequence: Synthetic oligonucleotide
  Antisense strand to SEQ ID NO: 775570
ucuggaguaacacugggcc

SEQ ID NO: 775572 - RNA, 19 nt, Artificial Sequence
  Description of Artificial Sequence: Synthetic oligonucleotide
  Sense strand starting at position 2820 of SEQ ID NO: 587217
aguguuacuccagaaucca

SEQ ID NO: 775573 - RNA, 19 nt, Artificial Sequence
  Description of Artificial Sequence: Synthetic oligonucleotide
  Antisense strand to SEQ ID NO: 775572
uggauucuggaguaacacu

SEQ ID NO: 775574 - RNA, 19 nt, Artificial Sequence
  Description of Artificial Sequence: Synthetic oligonucleotide
  Sense strand starting at position 2888 of SEQ ID NO: 587217
aagugucugguacaauauu

SEQ ID NO: 775575 - RNA, 19 nt, Artificial Sequence
  Description of Artificial Sequence: Synthetic oligonucleotide
  Antisense strand to SEQ ID NO: 775574
aauauuguaccagacacuu

SEQ ID NO: 775576 - RNA, 19 nt, Artificial Sequence
  Description of Artificial Sequence: Synthetic oligonucleotide
  Sense strand starting at position 3474 of SEQ ID NO: 587217
uaccgauauguuuaagcuu

SEQ ID NO: 775577 - RNA, 19 nt, Artificial Sequence
  Description of Artificial Sequence: Synthetic oligonucleotide
  Antisense strand to SEQ ID NO: 775576
aagcuuaaacauaucggua

SEQ ID NO: 775578 - RNA, 19 nt, Artificial Sequence
  Description of Artificial Sequence: Synthetic oligonucleotide
  Sense strand starting at position 3511 of SEQ ID NO: 587217
uauaguugagccugauaau

SEQ ID NO: 775579 - RNA, 19 nt, Artificial Sequence
  Description of Artificial Sequence: Synthetic oligonucleotide
  Antisense strand to SEQ ID NO: 775578
auuaucaggcucaacuaua

SEQ ID NO: 775580 - RNA, 19 nt, Artificial Sequence
  Description of Artificial Sequence: Synthetic oligonucleotide
  Sense strand starting at position 3512 of SEQ ID NO: 587217
auaguugagccugauaauu

SEQ ID NO: 775581 - RNA, 19 nt, Artificial Sequence
  Description of Artificial Sequence: Synthetic oligonucleotide
  Antisense strand to SEQ ID NO: 775580
aauuaucaggcucaacuau

SEQ ID NO: 775582 - RNA, 19 nt, Artificial Sequence
  Description of Artificial Sequence: Synthetic oligonucleotide
  Sense strand starting at position 3549 of SEQ ID NO: 587217
ucagauaucuuucugugau

SEQ ID NO: 775583 - RNA, 19 nt, Artificial Sequence
  Description of Artificial Sequence: Synthetic oligonucleotide
  Antisense strand to SEQ ID NO: 775582
aucacagaaagauaucuga

SEQ ID NO: 775584 - RNA, 19 nt, Artificial Sequence
  Description of Artificial Sequence: Synthetic oligonucleotide
  Sense strand starting at position 3551 of SEQ ID NO: 587217
agauaucuuucugugaucu

SEQ ID NO: 775585 - RNA, 19 nt, Artificial Sequence
  Description of Artificial Sequence: Synthetic oligonucleotide
  Antisense strand to SEQ ID NO: 775584
agaucacagaaagauaucu

SEQ ID NO: 775586 - RNA, 19 nt, Artificial Sequence
  Description of Artificial Sequence: Synthetic oligonucleotide
  Sense strand starting at position 3552 of SEQ ID NO: 587217
gauaucuuucugugaucug

SEQ ID NO: 775587 - RNA, 19 nt, Artificial Sequence
  Description of Artificial Sequence: Synthetic oligonucleotide
  Antisense strand to SEQ ID NO: 775586
cagaucacagaaagauauc

SEQ ID NO: 775588 - RNA, 19 nt, Artificial Sequence
  Description of Artificial Sequence: Synthetic oligonucleotide
  Sense strand starting at position 3671 of SEQ ID NO: 587217
ugccaauugacaggugaag

SEQ ID NO: 775589 - RNA, 19 nt, Artificial Sequence
  Description of Artificial Sequence: Synthetic oligonucleotide
  Antisense strand to SEQ ID NO: 775588
cuucaccugucaauuggca

SEQ ID NO: 775590 - RNA, 19 nt, Artificial Sequence
  Description of Artificial Sequence: Synthetic oligonucleotide
  Sense strand starting at position 3673 of SEQ ID NO: 587217
ccaauugacaggugaagua

SEQ ID NO: 775591 - RNA, 19 nt, Artificial Sequence
  Description of Artificial Sequence: Synthetic oligonucleotide
  Antisense strand to SEQ ID NO: 775590
uacuucaccugucaauugg

SEQ ID NO: 775592 - RNA, 19 nt, Artificial Sequence
  Description of Artificial Sequence: Synthetic oligonucleotide
  Sense strand starting at position 3735 of SEQ ID NO: 587217
gaggucagucauuauuccu

SEQ ID NO: 775593 - RNA, 19 nt, Artificial Sequence
  Description of Artificial Sequence: Synthetic oligonucleotide
  Antisense strand to SEQ ID NO: 775592
aggaauaaugacugaccuc

SEQ ID NO: 775594 - RNA, 19 nt, Artificial Sequence
  Description of Artificial Sequence: Synthetic oligonucleotide
  Sense strand starting at position 3738 of SEQ ID NO: 587217
gucagucauuauuccuacu

SEQ ID NO: 775595 - RNA, 19 nt, Artificial Sequence
  Description of Artificial Sequence: Synthetic oligonucleotide
  Antisense strand to SEQ ID NO: 775594
aguaggaauaaugacugac

SEQ ID NO: 775596 - RNA, 19 nt, Artificial Sequence
  Description of Artificial Sequence: Synthetic oligonucleotide
  Sense strand starting at position 3860 of SEQ ID NO: 587217
auauaaugucccuagagca

SEQ ID NO: 775597 - RNA, 19 nt, Artificial Sequence
  Description of Artificial Sequence: Synthetic oligonucleotide
  Antisense strand to SEQ ID NO: 775596
ugcucuagggacauuauau

SEQ ID NO: 775598 - RNA, 19 nt, Artificial Sequence
  Description of Artificial Sequence: Synthetic oligonucleotide
  Sense strand starting at position 1353 of SEQ ID NO: 587218
agaacaucugcucgggaca

SEQ ID NO: 775599 - RNA, 19 nt, Artificial Sequence
  Description of Artificial Sequence: Synthetic oligonucleotide
  Antisense strand to SEQ ID NO: 775598
ugucccgagcagauguucu

SEQ ID NO: 775600 - RNA, 19 nt, Artificial Sequence
  Description of Artificial Sequence: Synthetic oligonucleotide
  Sense strand starting at position 2206 of SEQ ID NO: 587218
acaggccucugaugucauu

SEQ ID NO: 775601 - RNA, 19 nt, Artificial Sequence
  Description of Artificial Sequence: Synthetic oligonucleotide
  Antisense strand to SEQ ID NO: 775600
aaugacaucagaggccugu

SEQ ID NO: 775602 - RNA, 19 nt, Artificial Sequence
  Description of Artificial Sequence: Synthetic oligonucleotide
  Sense strand starting at position 2257 of SEQ ID NO: 587218
gcgggugcccgagaucuga

SEQ ID NO: 775603 - RNA, 19 nt, Artificial Sequence
  Description of Artificial Sequence: Synthetic oligonucleotide
  Antisense strand to SEQ ID NO: 775602
ucagaucucgggcacccgc

SEQ ID NO: 775604 - RNA, 19 nt, Artificial Sequence
  Description of Artificial Sequence: Synthetic oligonucleotide
  Sense strand starting at position 2611 of SEQ ID NO: 587218
ucuuaaggcuucuaggaau

SEQ ID NO: 775605 - RNA, 19 nt, Artificial Sequence
  Description of Artificial Sequence: Synthetic oligonucleotide
  Antisense strand to SEQ ID NO: 775604
auuccuagaagccuuaaga

SEQ ID NO: 775606 - RNA, 19 nt, Artificial Sequence
  Description of Artificial Sequence: Synthetic oligonucleotide
  Sense strand starting at position 2891 of SEQ ID NO: 587218
gguggagcucuugggcauu

SEQ ID NO: 775607 - RNA, 19 nt, Artificial Sequence
  Description of Artificial Sequence: Synthetic oligonucleotide
  Antisense strand to SEQ ID NO: 775606
aaugcccaagagcuccacc

SEQ ID NO: 775608 - RNA, 19 nt, Artificial Sequence
  Description of Artificial Sequence: Synthetic oligonucleotide
  Sense strand starting at position 2950 of SEQ ID NO: 587218
gauuucucagccugcgacu

SEQ ID NO: 775609 - RNA, 19 nt, Artificial Sequence
  Description of Artificial Sequence: Synthetic oligonucleotide
  Antisense strand to SEQ ID NO: 775608
agucgcaggcugagaaauc

SEQ ID NO: 775610 - RNA, 19 nt, Artificial Sequence
  Description of Artificial Sequence: Synthetic oligonucleotide
  Sense strand starting at position 2989 of SEQ ID NO: 587218
gaagccagaccuggguaau

SEQ ID NO: 775611 - RNA, 19 nt, Artificial Sequence
  Description of Artificial Sequence: Synthetic oligonucleotide
  Antisense strand to SEQ ID NO: 775610
auuacccaggucuggcuuc

SEQ ID NO: 775612 - RNA, 19 nt, Artificial Sequence
  Description of Artificial Sequence: Synthetic oligonucleotide
  Sense strand starting at position 2992 of SEQ ID NO: 587218
gccagaccuggguaauucu

SEQ ID NO: 775613 - RNA, 19 nt, Artificial Sequence
  Description of Artificial Sequence: Synthetic oligonucleotide
  Antisense strand to SEQ ID NO: 775612
agaauuacccaggucuggc

SEQ ID NO: 775614 - RNA, 19 nt, Artificial Sequence
  Description of Artificial Sequence: Synthetic oligonucleotide
  Sense strand starting at position 2999 of SEQ ID NO: 587218
cuggguaauucuucuaguu

SEQ ID NO: 775615 - RNA, 19 nt, Artificial Sequence
  Description of Artificial Sequence: Synthetic oligonucleotide
  Antisense strand to SEQ ID NO: 775614
aacuagaagaauuacccag

SEQ ID NO: 775616 - RNA, 19 nt, Artificial Sequence
  Description of Artificial Sequence: Synthetic oligonucleotide
  Sense strand starting at position 3001 of SEQ ID NO: 587218
ggguaauucuucuaguucu

SEQ ID NO: 775617 - RNA, 19 nt, Artificial Sequence
  Description of Artificial Sequence: Synthetic oligonucleotide
  Antisense strand to SEQ ID NO: 775616
agaacuagaagaauuaccc

SEQ ID NO: 775618 - RNA, 19 nt, Artificial Sequence
  Description of Artificial Sequence: Synthetic oligonucleotide
  Sense strand starting at position 3034 of SEQ ID NO: 587218
uuaauugcacugggaaacu

SEQ ID NO: 775619 - RNA, 19 nt, Artificial Sequence
  Description of Artificial Sequence: Synthetic oligonucleotide
  Antisense strand to SEQ ID NO: 775618
aguuucccagugcaauuaa

SEQ ID NO: 775620 - RNA, 19 nt, Artificial Sequence
  Description of Artificial Sequence: Synthetic oligonucleotide
  Sense strand starting at position 3259 of SEQ ID NO: 587218
uagagaucauccgaggacu

SEQ ID NO: 775621 - RNA, 19 nt, Artificial Sequence
  Description of Artificial Sequence: Synthetic oligonucleotide
  Antisense strand to SEQ ID NO: 775620
aguccucggaugaucucua

SEQ ID NO: 775622 - RNA, 19 nt, Artificial Sequence
  Description of Artificial Sequence: Synthetic oligonucleotide
  Sense strand starting at position 3360 of SEQ ID NO: 587218
aacugaaacuggugucaga

SEQ ID NO: 775623 - RNA, 19 nt, Artificial Sequence
  Description of Artificial Sequence: Synthetic oligonucleotide
  Antisense strand to SEQ ID NO: 775622
ucugacaccaguuucaguu

SEQ ID NO: 775624 - RNA, 19 nt, Artificial Sequence
  Description of Artificial Sequence: Synthetic oligonucleotide
  Sense strand starting at position 3396 of SEQ ID NO: 587218
ccugauaucaggugaagca

SEQ ID NO: 775625 - RNA, 19 nt, Artificial Sequence
  Description of Artificial Sequence: Synthetic oligonucleotide
  Antisense strand to SEQ ID NO: 775624
ugcuucaccugauaucagg

SEQ ID NO: 775626 - RNA, 19 nt, Artificial Sequence
  Description of Artificial Sequence: Synthetic oligonucleotide
  Sense strand starting at position 3439 of SEQ ID NO: 587218
gaggucagagugugaagau

SEQ ID NO: 775627 - RNA, 19 nt, Artificial Sequence
  Description of Artificial Sequence: Synthetic oligonucleotide
  Antisense strand to SEQ ID NO: 775626
aucuucacacucugaccuc

SEQ ID NO: 775628 - RNA, 19 nt, Artificial Sequence
  Description of Artificial Sequence: Synthetic oligonucleotide
  Sense strand starting at position 3505 of SEQ ID NO: 587218
cuguaaacgucacgguuaa

SEQ ID NO: 775629 - RNA, 19 nt, Artificial Sequence
  Description of Artificial Sequence: Synthetic oligonucleotide
  Antisense strand to SEQ ID NO: 775628
uuaaccgugacguuuacag

SEQ ID NO: 775630 - RNA, 19 nt, Artificial Sequence
  Description of Artificial Sequence: Synthetic oligonucleotide
  Sense strand starting at position 3506 of SEQ ID NO: 587218
uguaaacgucacgguuaau

SEQ ID NO: 775631 - RNA, 19 nt, Artificial Sequence
  Description of Artificial Sequence: Synthetic oligonucleotide
  Antisense strand to SEQ ID NO: 775630
auuaaccgugacguuuaca

SEQ ID NO: 775632 - RNA, 19 nt, Artificial Sequence
  Description of Artificial Sequence: Synthetic oligonucleotide
  Sense strand starting at position 3557 of SEQ ID NO: 587218
aaugaaaugucauagcugu

SEQ ID NO: 775633 - RNA, 19 nt, Artificial Sequence
  Description of Artificial Sequence: Synthetic oligonucleotide
  Antisense strand to SEQ ID NO: 775632
acagcuaugacauuucauu

SEQ ID NO: 775634 - RNA, 19 nt, Artificial Sequence
  Description of Artificial Sequence: Synthetic oligonucleotide
  Sense strand starting at position 3570 of SEQ ID NO: 587218
agcuguaugcgcuauauga

SEQ ID NO: 775635 - RNA, 19 nt, Artificial Sequence
  Description of Artificial Sequence: Synthetic oligonucleotide
  Antisense strand to SEQ ID NO: 775634
ucauauagcgcauacagcu

SEQ ID NO: 775636 - RNA, 19 nt, Artificial Sequence
  Description of Artificial Sequence: Synthetic oligonucleotide
  Sense strand starting at position 3572 of SEQ ID NO: 587218
cuguaugcgcuauaugacu

SEQ ID NO: 775637 - RNA, 19 nt, Artificial Sequence
  Description of Artificial Sequence: Synthetic oligonucleotide
  Antisense strand to SEQ ID NO: 775636
agucauauagcgcauacag

SEQ ID NO: 775638 - RNA, 19 nt, Artificial Sequence
  Description of Artificial Sequence: Synthetic oligonucleotide
  Sense strand starting at position 3577 of SEQ ID NO: 587218
ugcgcuauaugacucagua

SEQ ID NO: 775639 - RNA, 19 nt, Artificial Sequence
  Description of Artificial Sequence: Synthetic oligonucleotide
  Antisense strand to SEQ ID NO: 775638
uacugagucauauagcgca

SEQ ID NO: 775640 - RNA, 19 nt, Artificial Sequence
  Description of Artificial Sequence: Synthetic oligonucleotide
  Sense strand starting at position 3581 of SEQ ID NO: 587218
cuauaugacucaguauuau

SEQ ID NO: 775641 - RNA, 19 nt, Artificial Sequence
  Description of Artificial Sequence: Synthetic oligonucleotide
  Antisense strand to SEQ ID NO: 775640
auaauacugagucauauag

SEQ ID NO: 775642 - RNA, 19 nt, Artificial Sequence
  Description of Artificial Sequence: Synthetic oligonucleotide
  Sense strand starting at position 3609 of SEQ ID NO: 587218
uccaguucugcccagaaug

SEQ ID NO: 775643 - RNA, 19 nt, Artificial Sequence
  Description of Artificial Sequence: Synthetic oligonucleotide
  Antisense strand to SEQ ID NO: 775642
cauucugggcagaacugga

SEQ ID NO: 775644 - RNA, 19 nt, Artificial Sequence
  Description of Artificial Sequence: Synthetic oligonucleotide
  Sense strand starting at position 3611 of SEQ ID NO: 587218
caguucugcccagaaugaa

SEQ ID NO: 775645 - RNA, 19 nt, Artificial Sequence
  Description of Artificial Sequence: Synthetic oligonucleotide
  Antisense strand to SEQ ID NO: 775644
uucauucugggcagaacug

SEQ ID NO: 775646 - RNA, 19 nt, Artificial Sequence
  Description of Artificial Sequence: Synthetic oligonucleotide
  Sense strand starting at position 3713 of SEQ ID NO: 587218
ugugcaauguccucucuuu

SEQ ID NO: 775647 - RNA, 19 nt, Artificial Sequence
  Description of Artificial Sequence: Synthetic oligonucleotide
  Antisense strand to SEQ ID NO: 775646
aaagagaggacauugcaca

SEQ ID NO: 775648 - RNA, 19 nt, Artificial Sequence
  Description of Artificial Sequence: Synthetic oligonucleotide
  Sense strand starting at position 3810 of SEQ ID NO: 587218
cuggcaucucauugucuuu

SEQ ID NO: 775649 - RNA, 19 nt, Artificial Sequence
  Description of Artificial Sequence: Synthetic oligonucleotide
  Antisense strand to SEQ ID NO: 775648
aaagacaaugagaugccag

SEQ ID NO: 775650 - RNA, 19 nt, Artificial Sequence
  Description of Artificial Sequence: Synthetic oligonucleotide
  Sense strand starting at position 3825 of SEQ ID NO: 587218
cuuugucaccaccaguauu

SEQ ID NO: 775651 - RNA, 19 nt, Artificial Sequence
  Description of Artificial Sequence: Synthetic oligonucleotide
  Antisense strand to SEQ ID NO: 775650
aauacugguggugacaaag

SEQ ID NO: 775652 - RNA, 19 nt, Artificial Sequence
  Description of Artificial Sequence: Synthetic oligonucleotide
  Sense strand starting at position 3856 of SEQ ID NO: 587218
aggcauguguggccaugua

SEQ ID NO: 775653 - RNA, 19 nt, Artificial Sequence
  Description of Artificial Sequence: Synthetic oligonucleotide
  Antisense strand to SEQ ID NO: 775652
uacauggccacacaugccu

SEQ ID NO: 775654 - RNA, 19 nt, Artificial Sequence
  Description of Artificial Sequence: Synthetic oligonucleotide
  Sense strand starting at position 3868 of SEQ ID NO: 587218
ccauguaugauggguagua

SEQ ID NO: 775655 - RNA, 19 nt, Artificial Sequence
  Description of Artificial Sequence: Synthetic oligonucleotide
  Antisense strand to SEQ ID NO: 775654
uacuacccaucauacaugg

SEQ ID NO: 775656 - RNA, 19 nt, Artificial Sequence
  Description of Artificial Sequence: Synthetic oligonucleotide
  Sense strand starting at position 3925 of SEQ ID NO: 587218
gggccugucucugaagaca

SEQ ID NO: 775657 - RNA, 19 nt, Artificial Sequence
  Description of Artificial Sequence: Synthetic oligonucleotide
  Antisense strand to SEQ ID NO: 775656
ugucuucagagacaggccc

SEQ ID NO: 775658 - RNA, 19 nt, Artificial Sequence
  Description of Artificial Sequence: Synthetic oligonucleotide
  Sense strand starting at position 3937 of SEQ ID NO: 587218
gaagacauguuagaaauuu

SEQ ID NO: 775659 - RNA, 19 nt, Artificial Sequence
  Description of Artificial Sequence: Synthetic oligonucleotide
  Antisense strand to SEQ ID NO: 775658
aaauuucuaacaugucuuc

SEQ ID NO: 775660 - RNA, 19 nt, Artificial Sequence
  Description of Artificial Sequence: Synthetic oligonucleotide
  Sense strand starting at position 3946 of SEQ ID NO: 587218
uuagaaauuugauacugga

SEQ ID NO: 775661 - RNA, 19 nt, Artificial Sequence
  Description of Artificial Sequence: Synthetic oligonucleotide
  Antisense strand to SEQ ID NO: 775660
uccaguaucaaauuucuaa

SEQ ID NO: 775662 - RNA, 19 nt, Artificial Sequence
  Description of Artificial Sequence: Synthetic oligonucleotide
  Sense strand starting at position 3960 of SEQ ID NO: 587218
cuggauuuccugugcaugu

SEQ ID NO: 775663 - RNA, 19 nt, Artificial Sequence
  Description of Artificial Sequence: Synthetic oligonucleotide
  Antisense strand to SEQ ID NO: 775662
acaugcacaggaaauccag

SEQ ID NO: 775664 - RNA, 19 nt, Artificial Sequence
  Description of Artificial Sequence: Synthetic oligonucleotide
  Sense strand starting at position 3961 of SEQ ID NO: 587218
uggauuuccugugcauguu

SEQ ID NO: 775665 - RNA, 19 nt, Artificial Sequence
  Description of Artificial Sequence: Synthetic oligonucleotide
  Antisense strand to SEQ ID NO: 775664
aacaugcacaggaaaucca

SEQ ID NO: 775666 - RNA, 19 nt, Artificial Sequence
  Description of Artificial Sequence: Synthetic oligonucleotide
  Sense strand starting at position 3981 of SEQ ID NO: 587218
gagauugugucuugggcuu

SEQ ID NO: 775667 - RNA, 19 nt, Artificial Sequence
  Description of Artificial Sequence: Synthetic oligonucleotide
  Antisense strand to SEQ ID NO: 775666
aagcccaagacacaaucuc

SEQ ID NO: 775668 - RNA, 19 nt, Artificial Sequence
  Description of Artificial Sequence: Synthetic oligonucleotide
  Sense strand starting at position 50 of SEQ ID NO: 587219
caacaaguguuagcagaac

SEQ ID NO: 775669 - RNA, 19 nt, Artificial Sequence
  Description of Artificial Sequence: Synthetic oligonucleotide
  Antisense strand to SEQ ID NO: 775668
guucugcuaacacuuguug

SEQ ID NO: 775670 - RNA, 19 nt, Artificial Sequence
  Description of Artificial Sequence: Synthetic oligonucleotide
  Sense strand starting at position 83 of SEQ ID NO: 587219
guugguauuugagcccuca

SEQ ID NO: 775671 - RNA, 19 nt, Artificial Sequence
  Description of Artificial Sequence: Synthetic oligonucleotide
  Antisense strand to SEQ ID NO: 775670
ugagggcucaaauaccaac

SEQ ID NO: 775672 - RNA, 19 nt, Artificial Sequence
  Description of Artificial Sequence: Synthetic oligonucleotide
  Sense strand starting at position 188 of SEQ ID NO: 587219
acauauugcuugucuaaag

SEQ ID NO: 775673 - RNA, 19 nt, Artificial Sequence
  Description of Artificial Sequence: Synthetic oligonucleotide
  Antisense strand to SEQ ID NO: 775672
cuuuagacaagcaauaugu

SEQ ID NO: 775674 - RNA, 19 nt, Artificial Sequence
  Description of Artificial Sequence: Synthetic oligonucleotide
  Sense strand starting at position 228 of SEQ ID NO: 587219
aaauguuaugauugaaagc

SEQ ID NO: 775675 - RNA, 19 nt, Artificial Sequence
  Description of Artificial Sequence: Synthetic oligonucleotide
  Antisense strand to SEQ ID NO: 775674
gcuuucaaucauaacauuu

SEQ ID NO: 775676 - RNA, 19 nt, Artificial Sequence
  Description of Artificial Sequence: Synthetic oligonucleotide
  Sense strand starting at position 265 of SEQ ID NO: 587219
guguaaucuccucaucuga

SEQ ID NO: 775677 - RNA, 19 nt, Artificial Sequence
  Description of Artificial Sequence: Synthetic oligonucleotide
  Antisense strand to SEQ ID NO: 775676
ucagaugaggagauuacac

SEQ ID NO: 775678 - RNA, 19 nt, Artificial Sequence
  Description of Artificial Sequence: Synthetic oligonucleotide
  Sense strand starting at position 482 of SEQ ID NO: 587219
uuucuuugacauuguugga

SEQ ID NO: 775679 - RNA, 19 nt, Artificial Sequence
  Description of Artificial Sequence: Synthetic oligonucleotide
  Antisense strand to SEQ ID NO: 775678
uccaacaaugucaaagaaa

SEQ ID NO: 775680 - RNA, 19 nt, Artificial Sequence
  Description of Artificial Sequence: Synthetic oligonucleotide
  Sense strand starting at position 896 of SEQ ID NO: 587219
uuagaaaugcgauaacauu

SEQ ID NO: 775681 - RNA, 19 nt, Artificial Sequence
  Description of Artificial Sequence: Synthetic oligonucleotide
  Antisense strand to SEQ ID NO: 775680
aauguuaucgcauuucuaa

SEQ ID NO: 775682 - RNA, 19 nt, Artificial Sequence
  Description of Artificial Sequence: Synthetic oligonucleotide
  Sense strand starting at position 904 of SEQ ID NO: 587219
gcgauaacauucuuaaaua

SEQ ID NO: 775683 - RNA, 19 nt, Artificial Sequence
  Description of Artificial Sequence: Synthetic oligonucleotide
  Antisense strand to SEQ ID NO: 775682
uauuuaagaauguuaucgc

SEQ ID NO: 775684 - RNA, 19 nt, Artificial Sequence
  Description of Artificial Sequence: Synthetic oligonucleotide
  Sense strand starting at position 952 of SEQ ID NO: 587219
uaaaguagugguuaauugu

SEQ ID NO: 775685 - RNA, 19 nt, Artificial Sequence
  Description of Artificial Sequence: Synthetic oligonucleotide
  Antisense strand to SEQ ID NO: 775684
acaauuaaccacuacuuua

SEQ ID NO: 775686 - RNA, 19 nt, Artificial Sequence
  Description of Artificial Sequence: Synthetic oligonucleotide
  Sense strand starting at position 1158 of SEQ ID NO: 587219
uuaauauucggauguaacc

SEQ ID NO: 775687 - RNA, 19 nt, Artificial Sequence
  Description of Artificial Sequence: Synthetic oligonucleotide
  Antisense strand to SEQ ID NO: 775686
gguuacauccgaauauuaa

SEQ ID NO: 775688 - RNA, 19 nt, Artificial Sequence
  Description of Artificial Sequence: Synthetic oligonucleotide
  Sense strand starting at position 1237 of SEQ ID NO: 587219
uuauuacccacgggaaaga

SEQ ID NO: 775689 - RNA, 19 nt, Artificial Sequence
  Description of Artificial Sequence: Synthetic oligonucleotide
  Antisense strand to SEQ ID NO: 775688
ucuuucccguggguaauaa

SEQ ID NO: 775690 - RNA, 19 nt, Artificial Sequence
  Description of Artificial Sequence: Synthetic oligonucleotide
  Sense strand starting at position 1247 of SEQ ID NO: 587219
cgggaaagauaagaauaaa

SEQ ID NO: 775691 - RNA, 19 nt, Artificial Sequence
  Description of Artificial Sequence: Synthetic oligonucleotide
  Antisense strand to SEQ ID NO: 775690
uuuauucuuaucuuucccg

SEQ ID NO: 775692 - RNA, 19 nt, Artificial Sequence
  Description of Artificial Sequence: Synthetic oligonucleotide
  Sense strand starting at position 1337 of SEQ ID NO: 587219
gaaauuuccuccuccgcga

SEQ ID NO: 775693 - RNA, 19 nt, Artificial Sequence
  Description of Artificial Sequence: Synthetic oligonucleotide
  Antisense strand to SEQ ID NO: 775692
ucgcggaggaggaaauuuc

SEQ ID NO: 775694 - RNA, 19 nt, Artificial Sequence
  Description of Artificial Sequence: Synthetic oligonucleotide
  Sense strand starting at position 1417 of SEQ ID NO: 587219
aggagacaucuuggguaug

SEQ ID NO: 775695 - RNA, 19 nt, Artificial Sequence
  Description of Artificial Sequence: Synthetic oligonucleotide
  Antisense strand to SEQ ID NO: 775694
cauacccaagaugucuccu

SEQ ID NO: 775696 - RNA, 19 nt, Artificial Sequence
  Description of Artificial Sequence: Synthetic oligonucleotide
  Sense strand starting at position 1419 of SEQ ID NO: 587219
gagacaucuuggguauguc

SEQ ID NO: 775697 - RNA, 19 nt, Artificial Sequence
  Description of Artificial Sequence: Synthetic oligonucleotide
  Antisense strand to SEQ ID NO: 775696
gacauacccaagaugucuc

SEQ ID NO: 775698 - RNA, 19 nt, Artificial Sequence
  Description of Artificial Sequence: Synthetic oligonucleotide
  Sense strand starting at position 1420 of SEQ ID NO: 587219
agacaucuuggguauguca

SEQ ID NO: 775699 - RNA, 19 nt, Artificial Sequence
  Description of Artificial Sequence: Synthetic oligonucleotide
  Antisense strand to SEQ ID NO: 775698
ugacauacccaagaugucu

SEQ ID NO: 775700 - RNA, 19 nt, Artificial Sequence
  Description of Artificial Sequence: Synthetic oligonucleotide
  Sense strand starting at position 2017 of SEQ ID NO: 587219
gcugaaagaugaguuucua

SEQ ID NO: 775701 - RNA, 19 nt, Artificial Sequence
  Description of Artificial Sequence: Synthetic oligonucleotide
  Antisense strand to SEQ ID NO: 775700
uagaaacucaucuuucagc

SEQ ID NO: 775702 - RNA, 19 nt, Artificial Sequence
  Description of Artificial Sequence: Synthetic oligonucleotide
  Sense strand starting at position 2021 of SEQ ID NO: 587219
aaagaugaguuucuaaguu

SEQ ID NO: 775703 - RNA, 19 nt, Artificial Sequence
  Description of Artificial Sequence: Synthetic oligonucleotide
  Antisense strand to SEQ ID NO: 775702
aacuuagaaacucaucuuu

SEQ ID NO: 775704 - RNA, 19 nt, Artificial Sequence
  Description of Artificial Sequence: Synthetic oligonucleotide
  Sense strand starting at position 2025 of SEQ ID NO: 587219
augaguuucuaaguuugau

SEQ ID NO: 775705 - RNA, 19 nt, Artificial Sequence
  Description of Artificial Sequence: Synthetic oligonucleotide
  Antisense strand to SEQ ID NO: 775704
aucaaacuuagaaacucau

SEQ ID NO: 775706 - RNA, 19 nt, Artificial Sequence
  Description of Artificial Sequence: Synthetic oligonucleotide
  Sense strand starting at position 2201 of SEQ ID NO: 587219
ggagaaguuuaagcugagu

SEQ ID NO: 775707 - RNA, 19 nt, Artificial Sequence
  Description of Artificial Sequence: Synthetic oligonucleotide
  Antisense strand to SEQ ID NO: 775706
acucagcuuaaacuucucc

SEQ ID NO: 775708 - RNA, 19 nt, Artificial Sequence
  Description of Artificial Sequence: Synthetic oligonucleotide
  Sense strand starting at position 2231 of SEQ ID NO: 587219
gcugcuugcauugaaagga

SEQ ID NO: 775709 - RNA, 19 nt, Artificial Sequence
  Description of Artificial Sequence: Synthetic oligonucleotide
  Antisense strand to SEQ ID NO: 775708
uccuuucaaugcaagcagc

SEQ ID NO: 775710 - RNA, 19 nt, Artificial Sequence
  Description of Artificial Sequence: Synthetic oligonucleotide
  Sense strand starting at position 2260 of SEQ ID NO: 587219
aggagaaggcuugguaacu

SEQ ID NO: 775711 - RNA, 19 nt, Artificial Sequence
  Description of Artificial Sequence: Synthetic oligonucleotide
  Antisense strand to SEQ ID NO: 775710
aguuaccaagccuucuccu

SEQ ID NO: 775712 - RNA, 19 nt, Artificial Sequence
  Description of Artificial Sequence: Synthetic oligonucleotide
  Sense strand starting at position 2485 of SEQ ID NO: 587219
cagguauugcccgcaguca

SEQ ID NO: 775713 - RNA, 19 nt, Artificial Sequence
  Description of Artificial Sequence: Synthetic oligonucleotide
  Antisense strand to SEQ ID NO: 775712
ugacugcgggcaauaccug

SEQ ID NO: 775714 - RNA, 19 nt, Artificial Sequence
  Description of Artificial Sequence: Synthetic oligonucleotide
  Sense strand starting at position 2532 of SEQ ID NO: 587219
guuagaauguaccuucuac

SEQ ID NO: 775715 - RNA, 19 nt, Artificial Sequence
  Description of Artificial Sequence: Synthetic oligonucleotide
  Antisense strand to SEQ ID NO: 775714
guagaagguacauucuaac

SEQ ID NO: 775716 - RNA, 19 nt, Artificial Sequence
  Description of Artificial Sequence: Synthetic oligonucleotide
  Sense strand starting at position 2711 of SEQ ID NO: 587219
cugugucaucaccaaauuc

SEQ ID NO: 775717 - RNA, 19 nt, Artificial Sequence
  Description of Artificial Sequence: Synthetic oligonucleotide
  Antisense strand to SEQ ID NO: 775716
gaauuuggugaugacacag

SEQ ID NO: 775718 - RNA, 19 nt, Artificial Sequence
  Description of Artificial Sequence: Synthetic oligonucleotide
  Sense strand starting at position 2721 of SEQ ID NO: 587219
accaaauuccaguggaauu

SEQ ID NO: 775719 - RNA, 19 nt, Artificial Sequence
  Description of Artificial Sequence: Synthetic oligonucleotide
  Antisense strand to SEQ ID NO: 775718
aauuccacuggaauuuggu

SEQ ID NO: 775720 - RNA, 19 nt, Artificial Sequence
  Description of Artificial Sequence: Synthetic oligonucleotide
  Sense strand starting at position 2790 of SEQ ID NO: 587219
gagguagaguucucaugaa

SEQ ID NO: 775721 - RNA, 19 nt, Artificial Sequence
  Description of Artificial Sequence: Synthetic oligonucleotide
  Antisense strand to SEQ ID NO: 775720
uucaugagaacucuaccuc

SEQ ID NO: 775722 - RNA, 19 nt, Artificial Sequence
  Description of Artificial Sequence: Synthetic oligonucleotide
  Sense strand starting at position 2836 of SEQ ID NO: 587219
cuuuauagugaaugaguuc

SEQ ID NO: 775723 - RNA, 19 nt, Artificial Sequence
  Description of Artificial Sequence: Synthetic oligonucleotide
  Antisense strand to SEQ ID NO: 775722
gaacucauucacuauaaag

SEQ ID NO: 775724 - RNA, 19 nt, Artificial Sequence
  Description of Artificial Sequence: Synthetic oligonucleotide
  Sense strand starting at position 2839 of SEQ ID NO: 587219
uauagugaaugaguucuua

SEQ ID NO: 775725 - RNA, 19 nt, Artificial Sequence
  Description of Artificial Sequence: Synthetic oligonucleotide
  Antisense strand to SEQ ID NO: 775724
uaagaacucauucacuaua

SEQ ID NO: 775726 - RNA, 19 nt, Artificial Sequence
  Description of Artificial Sequence: Synthetic oligonucleotide
  Sense strand starting at position 2843 of SEQ ID NO: 587219
gugaaugaguucuuaccag

SEQ ID NO: 775727 - RNA, 19 nt, Artificial Sequence
  Description of Artificial Sequence: Synthetic oligonucleotide
  Antisense strand to SEQ ID NO: 775726
cugguaagaacucauucac

SEQ ID NO: 775728 - RNA, 19 nt, Artificial Sequence
  Description of Artificial Sequence: Synthetic oligonucleotide
  Sense strand starting at position 3001 of SEQ ID NO: 587219
uucuguauagcauacagaa

SEQ ID NO: 775729 - RNA, 19 nt, Artificial Sequence
  Description of Artificial Sequence: Synthetic oligonucleotide
  Antisense strand to SEQ ID NO: 775728
uucuguaugcuauacagaa

SEQ ID NO: 775730 - RNA, 19 nt, Artificial Sequence
  Description of Artificial Sequence: Synthetic oligonucleotide
  Sense strand starting at position 3072 of SEQ ID NO: 587219
ucuuuauagcagugagagg

SEQ ID NO: 775731 - RNA, 19 nt, Artificial Sequence
  Description of Artificial Sequence: Synthetic oligonucleotide
  Antisense strand to SEQ ID NO: 775730
ccucucacugcuauaaaga

SEQ ID NO: 775732 - RNA, 19 nt, Artificial Sequence
  Description of Artificial Sequence: Synthetic oligonucleotide
  Sense strand starting at position 3112 of SEQ ID NO: 587219
agguaaucaugugccaaua

SEQ ID NO: 775733 - RNA, 19 nt, Artificial Sequence
  Description of Artificial Sequence: Synthetic oligonucleotide
  Antisense strand to SEQ ID NO: 775732
uauuggcacaugauuaccu

SEQ ID NO: 775734 - RNA, 19 nt, Artificial Sequence
  Description of Artificial Sequence: Synthetic oligonucleotide
  Sense strand starting at position 3173 of SEQ ID NO: 587219
uugaucuaauagggaauuu

SEQ ID NO: 775735 - RNA, 19 nt, Artificial Sequence
  Description of Artificial Sequence: Synthetic oligonucleotide
  Antisense strand to SEQ ID NO: 775734
aaauucccuauuagaucaa

SEQ ID NO: 775736 - RNA, 19 nt, Artificial Sequence
  Description of Artificial Sequence: Synthetic oligonucleotide
  Sense strand starting at position 3568 of SEQ ID NO: 587219
gcuccaaaccacugggaua

SEQ ID NO: 775737 - RNA, 19 nt, Artificial Sequence
  Description of Artificial Sequence: Synthetic oligonucleotide
  Antisense strand to SEQ ID NO: 775736
uaucccagugguuuggagc

SEQ ID NO: 775738 - RNA, 19 nt, Artificial Sequence
  Description of Artificial Sequence: Synthetic oligonucleotide
  Sense strand starting at position 3616 of SEQ ID NO: 587219
ggaagagaguugcucaguu

SEQ ID NO: 775739 - RNA, 19 nt, Artificial Sequence
  Description of Artificial Sequence: Synthetic oligonucleotide
  Antisense strand to SEQ ID NO: 775738
aacugagcaacucucuucc

SEQ ID NO: 775740 - RNA, 19 nt, Artificial Sequence
  Description of Artificial Sequence: Synthetic oligonucleotide
  Sense strand starting at position 3618 of SEQ ID NO: 587219
aagagaguugcucaguuua

SEQ ID NO: 775741 - RNA, 19 nt, Artificial Sequence
  Description of Artificial Sequence: Synthetic oligonucleotide
  Antisense strand to SEQ ID NO: 775740
uaaacugagcaacucucuu

SEQ ID NO: 775742 - RNA, 19 nt, Artificial Sequence
  Description of Artificial Sequence: Synthetic oligonucleotide
  Sense strand starting at position 3659 of SEQ ID NO: 587219
aagagugaauaaguguuua

SEQ ID NO: 775743 - RNA, 19 nt, Artificial Sequence
  Description of Artificial Sequence: Synthetic oligonucleotide
  Antisense strand to SEQ ID NO: 775742
uaaacacuuauucacucuu

SEQ ID NO: 775744 - RNA, 19 nt, Artificial Sequence
  Description of Artificial Sequence: Synthetic oligonucleotide
  Sense strand starting at position 3707 of SEQ ID NO: 587219
auugaaauggcuuaaggcu

SEQ ID NO: 775745 - RNA, 19 nt, Artificial Sequence
  Description of Artificial Sequence: Synthetic oligonucleotide
  Antisense strand to SEQ ID NO: 775744
agccuuaagccauuucaau

SEQ ID NO: 775746 - RNA, 19 nt, Artificial Sequence
  Description of Artificial Sequence: Synthetic oligonucleotide
  Sense strand starting at position 3875 of SEQ ID NO: 587219
guugucuugguagaaauua

SEQ ID NO: 775747 - RNA, 19 nt, Artificial Sequence
  Description of Artificial Sequence: Synthetic oligonucleotide
  Antisense strand to SEQ ID NO: 775746
uaauuucuaccaagacaac

SEQ ID NO: 775748 - RNA, 19 nt, Artificial Sequence
  Description of Artificial Sequence: Synthetic oligonucleotide
  Sense strand starting at position 60 of SEQ ID NO: 587220
uggaguuacugucuugaaa

SEQ ID NO: 775749 - RNA, 19 nt, Artificial Sequence
  Description of Artificial Sequence: Synthetic oligonucleotide
  Antisense strand to SEQ ID NO: 775748
uuucaagacaguaacucca

SEQ ID NO: 775750 - RNA, 19 nt, Artificial Sequence
  Description of Artificial Sequence: Synthetic oligonucleotide
  Sense strand starting at position 63 of SEQ ID NO: 587220
aguuacugucuugaaauaa

SEQ ID NO: 775751 - RNA, 19 nt, Artificial Sequence
  Description of Artificial Sequence: Synthetic oligonucleotide
  Antisense strand to SEQ ID NO: 775750
uuauuucaagacaguaacu

SEQ ID NO: 775752 - RNA, 19 nt, Artificial Sequence
  Description of Artificial Sequence: Synthetic oligonucleotide
  Sense strand starting at position 87 of SEQ ID NO: 587220
guguuucuugucuauauac

SEQ ID NO: 775753 - RNA, 19 nt, Artificial Sequence
  Description of Artificial Sequence: Synthetic oligonucleotide
  Antisense strand to SEQ ID NO: 775752
guauauagacaagaaacac

SEQ ID NO: 775754 - RNA, 19 nt, Artificial Sequence
  Description of Artificial Sequence: Synthetic oligonucleotide
  Sense strand starting at position 89 of SEQ ID NO: 587220
guuucuugucuauauacau

SEQ ID NO: 775755 - RNA, 19 nt, Artificial Sequence
  Description of Artificial Sequence: Synthetic oligonucleotide
  Antisense strand to SEQ ID NO: 775754
auguauauagacaagaaac

SEQ ID NO: 775756 - RNA, 19 nt, Artificial Sequence
  Description of Artificial Sequence: Synthetic oligonucleotide
  Sense strand starting at position 117 of SEQ ID NO: 587220
ugaguaaauguguauguga

SEQ ID NO: 775757 - RNA, 19 nt, Artificial Sequence
  Description of Artificial Sequence: Synthetic oligonucleotide
  Antisense strand to SEQ ID NO: 775756
ucacauacacauuuacuca

SEQ ID NO: 775758 - RNA, 19 nt, Artificial Sequence
  Description of Artificial Sequence: Synthetic oligonucleotide
  Sense strand starting at position 140 of SEQ ID NO: 587220
auguauguguauuuaccau

SEQ ID NO: 775759 - RNA, 19 nt, Artificial Sequence
  Description of Artificial Sequence: Synthetic oligonucleotide
  Antisense strand to SEQ ID NO: 775758
augguaaauacacauacau

SEQ ID NO: 775760 - RNA, 19 nt, Artificial Sequence
  Description of Artificial Sequence: Synthetic oligonucleotide
  Sense strand starting at position 176 of SEQ ID NO: 587220
ugcuguauuuguuuacaaa

SEQ ID NO: 775761 - RNA, 19 nt, Artificial Sequence
  Description of Artificial Sequence: Synthetic oligonucleotide
  Antisense strand to SEQ ID NO: 775760
uuuguaaacaaauacagca

SEQ ID NO: 775762 - RNA, 19 nt, Artificial Sequence
  Description of Artificial Sequence: Synthetic oligonucleotide
  Sense strand starting at position 266 of SEQ ID NO: 587220
guguauugagcauauguga

SEQ ID NO: 775763 - RNA, 19 nt, Artificial Sequence
  Description of Artificial Sequence: Synthetic oligonucleotide
  Antisense strand to SEQ ID NO: 775762
ucacauaugcucaauacac

SEQ ID NO: 775764 - RNA, 19 nt, Artificial Sequence
  Description of Artificial Sequence: Synthetic oligonucleotide
  Sense strand starting at position 303 of SEQ ID NO: 587220
gcccuaaucucauuuacgu

SEQ ID NO: 775765 - RNA, 19 nt, Artificial Sequence
  Description of Artificial Sequence: Synthetic oligonucleotide
  Antisense strand to SEQ ID NO: 775764
acguaaaugagauuagggc

SEQ ID NO: 775766 - RNA, 19 nt, Artificial Sequence
  Description of Artificial Sequence: Synthetic oligonucleotide
  Sense strand starting at position 799 of SEQ ID NO: 587220
ccuguuuagagucagagau

SEQ ID NO: 775767 - RNA, 19 nt, Artificial Sequence
  Description of Artificial Sequence: Synthetic oligonucleotide
  Antisense strand to SEQ ID NO: 775766
aucucugacucuaaacagg

SEQ ID NO: 775768 - RNA, 19 nt, Artificial Sequence
  Description of Artificial Sequence: Synthetic oligonucleotide
  Sense strand starting at position 801 of SEQ ID NO: 587220
uguuuagagucagagauuu

SEQ ID NO: 775769 - RNA, 19 nt, Artificial Sequence
  Description of Artificial Sequence: Synthetic oligonucleotide
  Antisense strand to SEQ ID NO: 775768
aaaucucugacucuaaaca

SEQ ID NO: 775770 - RNA, 19 nt, Artificial Sequence
  Description of Artificial Sequence: Synthetic oligonucleotide
  Sense strand starting at position 816 of SEQ ID NO: 587220
auuuguauuccaugggugu

SEQ ID NO: 775771 - RNA, 19 nt, Artificial Sequence
  Description of Artificial Sequence: Synthetic oligonucleotide
  Antisense strand to SEQ ID NO: 775770
acacccauggaauacaaau

SEQ ID NO: 775772 - RNA, 19 nt, Artificial Sequence
  Description of Artificial Sequence: Synthetic oligonucleotide
  Sense strand starting at position 833 of SEQ ID NO: 587220
guuauugaagcagacguau

SEQ ID NO: 775773 - RNA, 19 nt, Artificial Sequence
  Description of Artificial Sequence: Synthetic oligonucleotide
  Antisense strand to SEQ ID NO: 775772
auacgucugcuucaauaac

SEQ ID NO: 775774 - RNA, 19 nt, Artificial Sequence
  Description of Artificial Sequence: Synthetic oligonucleotide
  Sense strand starting at position 845 of SEQ ID NO: 587220
gacguaucuccugauaaua

SEQ ID NO: 775775 - RNA, 19 nt, Artificial Sequence
  Description of Artificial Sequence: Synthetic oligonucleotide
  Antisense strand to SEQ ID NO: 775774
uauuaucaggagauacguc

SEQ ID NO: 775776 - RNA, 19 nt, Artificial Sequence
  Description of Artificial Sequence: Synthetic oligonucleotide
  Sense strand starting at position 1013 of SEQ ID NO: 587220
cuuuguugaggcuaagacu

SEQ ID NO: 775777 - RNA, 19 nt, Artificial Sequence
  Description of Artificial Sequence: Synthetic oligonucleotide
  Antisense strand to SEQ ID NO: 775776
agucuuagccucaacaaag

SEQ ID NO: 775778 - RNA, 19 nt, Artificial Sequence
  Description of Artificial Sequence: Synthetic oligonucleotide
  Sense strand starting at position 1020 of SEQ ID NO: 587220
gaggcuaagacuugagugu

SEQ ID NO: 775779 - RNA, 19 nt, Artificial Sequence
  Description of Artificial Sequence: Synthetic oligonucleotide
  Antisense strand to SEQ ID NO: 775778
acacucaagucuuagccuc

SEQ ID NO: 775780 - RNA, 19 nt, Artificial Sequence
  Description of Artificial Sequence: Synthetic oligonucleotide
  Sense strand starting at position 1021 of SEQ ID NO: 587220
aggcuaagacuugaguguu

SEQ ID NO: 775781 - RNA, 19 nt, Artificial Sequence
  Description of Artificial Sequence: Synthetic oligonucleotide
  Antisense strand to SEQ ID NO: 775780
aacacucaagucuuagccu

SEQ ID NO: 775782 - RNA, 19 nt, Artificial Sequence
  Description of Artificial Sequence: Synthetic oligonucleotide
  Sense strand starting at position 1154 of SEQ ID NO: 587220
ccuguccagucuuugagau

SEQ ID NO: 775783 - RNA, 19 nt, Artificial Sequence
  Description of Artificial Sequence: Synthetic oligonucleotide
  Antisense strand to SEQ ID NO: 775782
aucucaaagacuggacagg

SEQ ID NO: 775784 - RNA, 19 nt, Artificial Sequence
  Description of Artificial Sequence: Synthetic oligonucleotide
  Sense strand starting at position 1155 of SEQ ID NO: 587220
cuguccagucuuugagauu

SEQ ID NO: 775785 - RNA, 19 nt, Artificial Sequence
  Description of Artificial Sequence: Synthetic oligonucleotide
  Antisense strand to SEQ ID NO: 775784
aaucucaaagacuggacag

SEQ ID NO: 775786 - RNA, 19 nt, Artificial Sequence
  Description of Artificial Sequence: Synthetic oligonucleotide
  Sense strand starting at position 1231 of SEQ ID NO: 587220
gcucaauagugauccugac

SEQ ID NO: 775787 - RNA, 19 nt, Artificial Sequence
  Description of Artificial Sequence: Synthetic oligonucleotide
  Antisense strand to SEQ ID NO: 775786
gucaggaucacuauugagc

SEQ ID NO: 775788 - RNA, 19 nt, Artificial Sequence
  Description of Artificial Sequence: Synthetic oligonucleotide
  Sense strand starting at position 1293 of SEQ ID NO: 587220
gcgcuugauccugaccaca

SEQ ID NO: 775789 - RNA, 19 nt, Artificial Sequence
  Description of Artificial Sequence: Synthetic oligonucleotide
  Antisense strand to SEQ ID NO: 775788
uguggucaggaucaagcgc

SEQ ID NO: 775790 - RNA, 19 nt, Artificial Sequence
  Description of Artificial Sequence: Synthetic oligonucleotide
  Sense strand starting at position 1496 of SEQ ID NO: 587220
ggauucugucaaugucauu

SEQ ID NO: 775791 - RNA, 19 nt, Artificial Sequence
  Description of Artificial Sequence: Synthetic oligonucleotide
  Antisense strand to SEQ ID NO: 775790
aaugacauugacagaaucc

SEQ ID NO: 775792 - RNA, 19 nt, Artificial Sequence
  Description of Artificial Sequence: Synthetic oligonucleotide
  Sense strand starting at position 1591 of SEQ ID NO: 587220
ucauaagucuugcugacca

SEQ ID NO: 775793 - RNA, 19 nt, Artificial Sequence
  Description of Artificial Sequence: Synthetic oligonucleotide
  Antisense strand to SEQ ID NO: 775792
uggucagcaagacuuauga

SEQ ID NO: 775794 - RNA, 19 nt, Artificial Sequence
  Description of Artificial Sequence: Synthetic oligonucleotide
  Sense strand starting at position 1743 of SEQ ID NO: 587220
gggugugauugguuuagga

SEQ ID NO: 775795 - RNA, 19 nt, Artificial Sequence
  Description of Artificial Sequence: Synthetic oligonucleotide
  Antisense strand to SEQ ID NO: 775794
uccuaaaccaaucacaccc

SEQ ID NO: 775796 - RNA, 19 nt, Artificial Sequence
  Description of Artificial Sequence: Synthetic oligonucleotide
  Sense strand starting at position 1967 of SEQ ID NO: 587220
ugcugauagccuggacacu

SEQ ID NO: 775797 - RNA, 19 nt, Artificial Sequence
  Description of Artificial Sequence: Synthetic oligonucleotide
  Antisense strand to SEQ ID NO: 775796
aguguccaggcuaucagca

SEQ ID NO: 775798 - RNA, 19 nt, Artificial Sequence
  Description of Artificial Sequence: Synthetic oligonucleotide
  Sense strand starting at position 2008 of SEQ ID NO: 587220
uggagugccugggauuuaa

SEQ ID NO: 775799 - RNA, 19 nt, Artificial Sequence
  Description of Artificial Sequence: Synthetic oligonucleotide
  Antisense strand to SEQ ID NO: 775798
uuaaaucccaggcacucca

SEQ ID NO: 775800 - RNA, 19 nt, Artificial Sequence
  Description of Artificial Sequence: Synthetic oligonucleotide
  Sense strand starting at position 2055 of SEQ ID NO: 587220
gagcuuagugacgauggaa

SEQ ID NO: 775801 - RNA, 19 nt, Artificial Sequence
  Description of Artificial Sequence: Synthetic oligonucleotide
  Antisense strand to SEQ ID NO: 775800
uuccaucgucacuaagcuc

SEQ ID NO: 775802 - RNA, 19 nt, Artificial Sequence
  Description of Artificial Sequence: Synthetic oligonucleotide
  Sense strand starting at position 2068 of SEQ ID NO: 587220
auggaaacuaugugaagca

SEQ ID NO: 775803 - RNA, 19 nt, Artificial Sequence
  Description of Artificial Sequence: Synthetic oligonucleotide
  Antisense strand to SEQ ID NO: 775802
ugcuucacauaguuuccau

SEQ ID NO: 775804 - RNA, 19 nt, Artificial Sequence
  Description of Artificial Sequence: Synthetic oligonucleotide
  Sense strand starting at position 2166 of SEQ ID NO: 587220
agggacaucucugcuggua

SEQ ID NO: 775805 - RNA, 19 nt, Artificial Sequence
  Description of Artificial Sequence: Synthetic oligonucleotide
  Antisense strand to SEQ ID NO: 775804
uaccagcagagaugucccu

SEQ ID NO: 775806 - RNA, 19 nt, Artificial Sequence
  Description of Artificial Sequence: Synthetic oligonucleotide
  Sense strand starting at position 2264 of SEQ ID NO: 587220
uuugucugaccuuaauaug

SEQ ID NO: 775807 - RNA, 19 nt, Artificial Sequence
  Description of Artificial Sequence: Synthetic oligonucleotide
  Antisense strand to SEQ ID NO: 775806
cauauuaaggucagacaaa

SEQ ID NO: 775808 - RNA, 19 nt, Artificial Sequence
  Description of Artificial Sequence: Synthetic oligonucleotide
  Sense strand starting at position 2292 of SEQ ID NO: 587220
uuuauaggugcauacauau

SEQ ID NO: 775809 - RNA, 19 nt, Artificial Sequence
  Description of Artificial Sequence: Synthetic oligonucleotide
  Antisense strand to SEQ ID NO: 775808
auauguaugcaccuauaaa

SEQ ID NO: 775810 - RNA, 19 nt, Artificial Sequence
  Description of Artificial Sequence: Synthetic oligonucleotide
  Sense strand starting at position 2326 of SEQ ID NO: 587220
auaggauuguucccacuua

SEQ ID NO: 775811 - RNA, 19 nt, Artificial Sequence
  Description of Artificial Sequence: Synthetic oligonucleotide
  Antisense strand to SEQ ID NO: 775810
uaagugggaacaauccuau

SEQ ID NO: 775812 - RNA, 19 nt, Artificial Sequence
  Description of Artificial Sequence: Synthetic oligonucleotide
  Sense strand starting at position 2439 of SEQ ID NO: 587220
ucaaauccaucucugugua

SEQ ID NO: 775813 - RNA, 19 nt, Artificial Sequence
  Description of Artificial Sequence: Synthetic oligonucleotide
  Antisense strand to SEQ ID NO: 775812
uacacagagauggauuuga

SEQ ID NO: 775814 - RNA, 19 nt, Artificial Sequence
  Description of Artificial Sequence: Synthetic oligonucleotide
  Sense strand starting at position 2443 of SEQ ID NO: 587220
auccaucucuguguaauuc

SEQ ID NO: 775815 - RNA, 19 nt, Artificial Sequence
  Description of Artificial Sequence: Synthetic oligonucleotide
  Antisense strand to SEQ ID NO: 775814
gaauuacacagagauggau

SEQ ID NO: 775816 - RNA, 19 nt, Artificial Sequence
  Description of Artificial Sequence: Synthetic oligonucleotide
  Sense strand starting at position 2966 of SEQ ID NO: 587220
agaagaauccugugaaccc

SEQ ID NO: 775817 - RNA, 19 nt, Artificial Sequence
  Description of Artificial Sequence: Synthetic oligonucleotide
  Antisense strand to SEQ ID NO: 775816
ggguucacaggauucuucu

SEQ ID NO: 775818 - RNA, 19 nt, Artificial Sequence
  Description of Artificial Sequence: Synthetic oligonucleotide
  Sense strand starting at position 3165 of SEQ ID NO: 587220
gaaagcuaucgguagcuca

SEQ ID NO: 775819 - RNA, 19 nt, Artificial Sequence
  Description of Artificial Sequence: Synthetic oligonucleotide
  Antisense strand to SEQ ID NO: 775818
ugagcuaccgauagcuuuc

SEQ ID NO: 775820 - RNA, 19 nt, Artificial Sequence
  Description of Artificial Sequence: Synthetic oligonucleotide
  Sense strand starting at position 3675 of SEQ ID NO: 587220
gagaaacaucuaugcagug

SEQ ID NO: 775821 - RNA, 19 nt, Artificial Sequence
  Description of Artificial Sequence: Synthetic oligonucleotide
  Antisense strand to SEQ ID NO: 775820
cacugcauagauguuucuc

SEQ ID NO: 775822 - RNA, 19 nt, Artificial Sequence
  Description of Artificial Sequence: Synthetic oligonucleotide
  Sense strand starting at position 3682 of SEQ ID NO: 587220
aucuaugcaguguauuaaa

SEQ ID NO: 775823 - RNA, 19 nt, Artificial Sequence
  Description of Artificial Sequence: Synthetic oligonucleotide
  Antisense strand to SEQ ID NO: 775822
uuuaauacacugcauagau

SEQ ID NO: 775824 - RNA, 19 nt, Artificial Sequence
  Description of Artificial Sequence: Synthetic oligonucleotide
  Sense strand starting at position 3717 of SEQ ID NO: 587220
agggcucagcaaugaauaa

SEQ ID NO: 775825 - RNA, 19 nt, Artificial Sequence
  Description of Artificial Sequence: Synthetic oligonucleotide
  Antisense strand to SEQ ID NO: 775824
uuauucauugcugagcccu

SEQ ID NO: 775826 - RNA, 19 nt, Artificial Sequence
  Description of Artificial Sequence: Synthetic oligonucleotide
  Sense strand starting at position 3739 of SEQ ID NO: 587220
cuuaaaguaagacggaauu

SEQ ID NO: 775827 - RNA, 19 nt, Artificial Sequence
  Description of Artificial Sequence: Synthetic oligonucleotide
  Antisense strand to SEQ ID NO: 775826
aauuccgucuuacuuuaag

SEQ ID NO: 775828 - RNA, 19 nt, Artificial Sequence
  Description of Artificial Sequence: Synthetic oligonucleotide
  Sense strand starting at position 92 of SEQ ID NO: 587221
ugggauuguguuggcagaa

SEQ ID NO: 775829 - RNA, 19 nt, Artificial Sequence
  Description of Artificial Sequence: Synthetic oligonucleotide
  Antisense strand to SEQ ID NO: 775828
uucugccaacacaauccca

SEQ ID NO: 775830 - RNA, 19 nt, Artificial Sequence
  Description of Artificial Sequence: Synthetic oligonucleotide
  Sense strand starting at position 93 of SEQ ID NO: 587221
gggauuguguuggcagaaa

SEQ ID NO: 775831 - RNA, 19 nt, Artificial Sequence
  Description of Artificial Sequence: Synthetic oligonucleotide
  Antisense strand to SEQ ID NO: 775830
uuucugccaacacaauccc

SEQ ID NO: 775832 - RNA, 19 nt, Artificial Sequence
  Description of Artificial Sequence: Synthetic oligonucleotide
  Sense strand starting at position 277 of SEQ ID NO: 587221
gaaggauaaugugauaaau

SEQ ID NO: 775833 - RNA, 19 nt, Artificial Sequence
  Description of Artificial Sequence: Synthetic oligonucleotide
  Antisense strand to SEQ ID NO: 775832
auuuaucacauuauccuuc

SEQ ID NO: 775834 - RNA, 19 nt, Artificial Sequence
  Description of Artificial Sequence: Synthetic oligonucleotide
  Sense strand starting at position 402 of SEQ ID NO: 587221
guagaacauagccauggua

SEQ ID NO: 775835 - RNA, 19 nt, Artificial Sequence
  Description of Artificial Sequence: Synthetic oligonucleotide
  Antisense strand to SEQ ID NO: 775834
uaccauggcuauguucuac

SEQ ID NO: 775836 - RNA, 19 nt, Artificial Sequence
  Description of Artificial Sequence: Synthetic oligonucleotide
  Sense strand starting at position 423 of SEQ ID NO: 587221
ucccaauauugugugccaa

SEQ ID NO: 775837 - RNA, 19 nt, Artificial Sequence
  Description of Artificial Sequence: Synthetic oligonucleotide
  Antisense strand to SEQ ID NO: 775836
uuggcacacaauauuggga

SEQ ID NO: 775838 - RNA, 19 nt, Artificial Sequence
  Description of Artificial Sequence: Synthetic oligonucleotide
  Sense strand starting at position 424 of SEQ ID NO: 587221
cccaauauugugugccaaa

SEQ ID NO: 775839 - RNA, 19 nt, Artificial Sequence
  Description of Artificial Sequence: Synthetic oligonucleotide
  Antisense strand to SEQ ID NO: 775838
uuuggcacacaauauuggg

SEQ ID NO: 775840 - RNA, 19 nt, Artificial Sequence
  Description of Artificial Sequence: Synthetic oligonucleotide
  Sense strand starting at position 678 of SEQ ID NO: 587221
gcaggcagguuaguaauuu

SEQ ID NO: 775841 - RNA, 19 nt, Artificial Sequence
  Description of Artificial Sequence: Synthetic oligonucleotide
  Antisense strand to SEQ ID NO: 775840
aaauuacuaaccugccugc

SEQ ID NO: 775842 - RNA, 19 nt, Artificial Sequence
  Description of Artificial Sequence: Synthetic oligonucleotide
  Sense strand starting at position 823 of SEQ ID NO: 587221
ugaugcuugugggucaaau

SEQ ID NO: 775843 - RNA, 19 nt, Artificial Sequence
  Description of Artificial Sequence: Synthetic oligonucleotide
  Antisense strand to SEQ ID NO: 775842
auuugacccacaagcauca

SEQ ID NO: 775844 - RNA, 19 nt, Artificial Sequence
  Description of Artificial Sequence: Synthetic oligonucleotide
  Sense strand starting at position 904 of SEQ ID NO: 587221
uguuaauuuguuggcugaa

SEQ ID NO: 775845 - RNA, 19 nt, Artificial Sequence
  Description of Artificial Sequence: Synthetic oligonucleotide
  Antisense strand to SEQ ID NO: 775844
uucagccaacaaauuaaca

SEQ ID NO: 775846 - RNA, 19 nt, Artificial Sequence
  Description of Artificial Sequence: Synthetic oligonucleotide
  Sense strand starting at position 905 of SEQ ID NO: 587221
guuaauuuguuggcugaac

SEQ ID NO: 775847 - RNA, 19 nt, Artificial Sequence
  Description of Artificial Sequence: Synthetic oligonucleotide
  Antisense strand to SEQ ID NO: 775846
guucagccaacaaauuaac

SEQ ID NO: 775848 - RNA, 19 nt, Artificial Sequence
  Description of Artificial Sequence: Synthetic oligonucleotide
  Sense strand starting at position 917 of SEQ ID NO: 587221
gcugaaccauggucaugaa

SEQ ID NO: 775849 - RNA, 19 nt, Artificial Sequence
  Description of Artificial Sequence: Synthetic oligonucleotide
  Antisense strand to SEQ ID NO: 775848
uucaugaccaugguucagc

SEQ ID NO: 775850 - RNA, 19 nt, Artificial Sequence
  Description of Artificial Sequence: Synthetic oligonucleotide
  Sense strand starting at position 959 of SEQ ID NO: 587221
ccaccaguuugauugcuga

SEQ ID NO: 775851 - RNA, 19 nt, Artificial Sequence
  Description of Artificial Sequence: Synthetic oligonucleotide
  Antisense strand to SEQ ID NO: 775850
ucagcaaucaaacuggugg

SEQ ID NO: 775852 - RNA, 19 nt, Artificial Sequence
  Description of Artificial Sequence: Synthetic oligonucleotide
  Sense strand starting at position 976 of SEQ ID NO: 587221
gagcauuucuuggaaauug

SEQ ID NO: 775853 - RNA, 19 nt, Artificial Sequence
  Description of Artificial Sequence: Synthetic oligonucleotide
  Antisense strand to SEQ ID NO: 775852
caauuuccaagaaaugcuc

SEQ ID NO: 775854 - RNA, 19 nt, Artificial Sequence
  Description of Artificial Sequence: Synthetic oligonucleotide
  Sense strand starting at position 996 of SEQ ID NO: 587221
gaacaaguaguauguuaag

SEQ ID NO: 775855 - RNA, 19 nt, Artificial Sequence
  Description of Artificial Sequence: Synthetic oligonucleotide
  Antisense strand to SEQ ID NO: 775854
cuuaacauacuacuuguuc

SEQ ID NO: 775856 - RNA, 19 nt, Artificial Sequence
  Description of Artificial Sequence: Synthetic oligonucleotide
  Sense strand starting at position 1107 of SEQ ID NO: 587221
auauuaugauuuggcaaug

SEQ ID NO: 775857 - RNA, 19 nt, Artificial Sequence
  Description of Artificial Sequence: Synthetic oligonucleotide
  Antisense strand to SEQ ID NO: 775856
cauugccaaaucauaauau

SEQ ID NO: 775858 - RNA, 19 nt, Artificial Sequence
  Description of Artificial Sequence: Synthetic oligonucleotide
  Sense strand starting at position 1361 of SEQ ID NO: 587221
guucuuaucccggacugca

SEQ ID NO: 775859 - RNA, 19 nt, Artificial Sequence
  Description of Artificial Sequence: Synthetic oligonucleotide
  Antisense strand to SEQ ID NO: 775858
ugcaguccgggauaagaac

SEQ ID NO: 775860 - RNA, 19 nt, Artificial Sequence
  Description of Artificial Sequence: Synthetic oligonucleotide
  Sense strand starting at position 1400 of SEQ ID NO: 587221
aguagaaguucucucaugu

SEQ ID NO: 775861 - RNA, 19 nt, Artificial Sequence
  Description of Artificial Sequence: Synthetic oligonucleotide
  Antisense strand to SEQ ID NO: 775860
acaugagagaacuucuacu

SEQ ID NO: 775862 - RNA, 19 nt, Artificial Sequence
  Description of Artificial Sequence: Synthetic oligonucleotide
  Sense strand starting at position 1555 of SEQ ID NO: 587221
gagacuugcuuccucagga

SEQ ID NO: 775863 - RNA, 19 nt, Artificial Sequence
  Description of Artificial Sequence: Synthetic oligonucleotide
  Antisense strand to SEQ ID NO: 775862
uccugaggaagcaagucuc

SEQ ID NO: 775864 - RNA, 19 nt, Artificial Sequence
  Description of Artificial Sequence: Synthetic oligonucleotide
  Sense strand starting at position 1574 of SEQ ID NO: 587221
cucugaggaguucgcugaa

SEQ ID NO: 775865 - RNA, 19 nt, Artificial Sequence
  Description of Artificial Sequence: Synthetic oligonucleotide
  Antisense strand to SEQ ID NO: 775864
uucagcgaacuccucagag

SEQ ID NO: 775866 - RNA, 19 nt, Artificial Sequence
  Description of Artificial Sequence: Synthetic oligonucleotide
  Sense strand starting at position 1593 of SEQ ID NO: 587221
ggcaguuaguacuccacca

SEQ ID NO: 775867 - RNA, 19 nt, Artificial Sequence
  Description of Artificial Sequence: Synthetic oligonucleotide
  Antisense strand to SEQ ID NO: 775866
ugguggaguacuaacugcc

SEQ ID NO: 775868 - RNA, 19 nt, Artificial Sequence
  Description of Artificial Sequence: Synthetic oligonucleotide
  Sense strand starting at position 1805 of SEQ ID NO: 587221
gucccagaaugacaagaaa

SEQ ID NO: 775869 - RNA, 19 nt, Artificial Sequence
  Description of Artificial Sequence: Synthetic oligonucleotide
  Antisense strand to SEQ ID NO: 775868
uuucuugucauucugggac

SEQ ID NO: 775870 - RNA, 19 nt, Artificial Sequence
  Description of Artificial Sequence: Synthetic oligonucleotide
  Sense strand starting at position 1816 of SEQ ID NO: 587221
acaagaaacugcucccagu

SEQ ID NO: 775871 - RNA, 19 nt, Artificial Sequence
  Description of Artificial Sequence: Synthetic oligonucleotide
  Antisense strand to SEQ ID NO: 775870
acugggagcaguuucuugu

SEQ ID NO: 775872 - RNA, 19 nt, Artificial Sequence
  Description of Artificial Sequence: Synthetic oligonucleotide
  Sense strand starting at position 2163 of SEQ ID NO: 587221
auuuguugcagagacguuu

SEQ ID NO: 775873 - RNA, 19 nt, Artificial Sequence
  Description of Artificial Sequence: Synthetic oligonucleotide
  Antisense strand to SEQ ID NO: 775872
aaacgucucugcaacaaau

SEQ ID NO: 775874 - RNA, 19 nt, Artificial Sequence
  Description of Artificial Sequence: Synthetic oligonucleotide
  Sense strand starting at position 2169 of SEQ ID NO: 587221
ugcagagacguuuaaguug

SEQ ID NO: 775875 - RNA, 19 nt, Artificial Sequence
  Description of Artificial Sequence: Synthetic oligonucleotide
  Antisense strand to SEQ ID NO: 775874
caacuuaaacgucucugca

SEQ ID NO: 775876 - RNA, 19 nt, Artificial Sequence
  Description of Artificial Sequence: Synthetic oligonucleotide
  Sense strand starting at position 2176 of SEQ ID NO: 587221
acguuuaaguuguuuaaag

SEQ ID NO: 775877 - RNA, 19 nt, Artificial Sequence
  Description of Artificial Sequence: Synthetic oligonucleotide
  Antisense strand to SEQ ID NO: 775876
cuuuaaacaacuuaaacgu

SEQ ID NO: 775878 - RNA, 19 nt, Artificial Sequence
  Description of Artificial Sequence: Synthetic oligonucleotide
  Sense strand starting at position 2187 of SEQ ID NO: 587221
guuuaaagcccucaguagu

SEQ ID NO: 775879 - RNA, 19 nt, Artificial Sequence
  Description of Artificial Sequence: Synthetic oligonucleotide
  Antisense strand to SEQ ID NO: 775878
acuacugagggcuuuaaac

SEQ ID NO: 775880 - RNA, 19 nt, Artificial Sequence
  Description of Artificial Sequence: Synthetic oligonucleotide
  Sense strand starting at position 2252 of SEQ ID NO: 587221
uuuagugagguugguaauu

SEQ ID NO: 775881 - RNA, 19 nt, Artificial Sequence
  Description of Artificial Sequence: Synthetic oligonucleotide
  Antisense strand to SEQ ID NO: 775880
aauuaccaaccucacuaaa

SEQ ID NO: 775882 - RNA, 19 nt, Artificial Sequence
  Description of Artificial Sequence: Synthetic oligonucleotide
  Sense strand starting at position 2386 of SEQ ID NO: 587221
ugcuacugcugacuuaaau

SEQ ID NO: 775883 - RNA, 19 nt, Artificial Sequence
  Description of Artificial Sequence: Synthetic oligonucleotide
  Antisense strand to SEQ ID NO: 775882
auuuaagucagcaguagca

SEQ ID NO: 775884 - RNA, 19 nt, Artificial Sequence
  Description of Artificial Sequence: Synthetic oligonucleotide
  Sense strand starting at position 2557 of SEQ ID NO: 587221
aguauacagccuuaacgaa

SEQ ID NO: 775885 - RNA, 19 nt, Artificial Sequence
  Description of Artificial Sequence: Synthetic oligonucleotide
  Antisense strand to SEQ ID NO: 775884
uucguuaaggcuguauacu

SEQ ID NO: 775886 - RNA, 19 nt, Artificial Sequence
  Description of Artificial Sequence: Synthetic oligonucleotide
  Sense strand starting at position 2564 of SEQ ID NO: 587221
agccuuaacgaaggaaauu

SEQ ID NO: 775887 - RNA, 19 nt, Artificial Sequence
  Description of Artificial Sequence: Synthetic oligonucleotide
  Antisense strand to SEQ ID NO: 775886
aauuuccuucguuaaggcu

SEQ ID NO: 775888 - RNA, 19 nt, Artificial Sequence
  Description of Artificial Sequence: Synthetic oligonucleotide
  Sense strand starting at position 2605 of SEQ ID NO: 587221
accagagaacguuaugcua

SEQ ID NO: 775889 - RNA, 19 nt, Artificial Sequence
  Description of Artificial Sequence: Synthetic oligonucleotide
  Antisense strand to SEQ ID NO: 775888
uagcauaacguucucuggu

SEQ ID NO: 775890 - RNA, 19 nt, Artificial Sequence
  Description of Artificial Sequence: Synthetic oligonucleotide
  Sense strand starting at position 2655 of SEQ ID NO: 587221
acuguaugaucucauuuga

SEQ ID NO: 775891 - RNA, 19 nt, Artificial Sequence
  Description of Artificial Sequence: Synthetic oligonucleotide
  Antisense strand to SEQ ID NO: 775890
ucaaaugagaucauacagu

SEQ ID NO: 775892 - RNA, 19 nt, Artificial Sequence
  Description of Artificial Sequence: Synthetic oligonucleotide
  Sense strand starting at position 2821 of SEQ ID NO: 587221
acuacauggugaucacagu

SEQ ID NO: 775893 - RNA, 19 nt, Artificial Sequence
  Description of Artificial Sequence: Synthetic oligonucleotide
  Antisense strand to SEQ ID NO: 775892
acugugaucaccauguagu

SEQ ID NO: 775894 - RNA, 19 nt, Artificial Sequence
  Description of Artificial Sequence: Synthetic oligonucleotide
  Sense strand starting at position 2943 of SEQ ID NO: 587221
ugaagcauucuauaaugua

SEQ ID NO: 775895 - RNA, 19 nt, Artificial Sequence
  Description of Artificial Sequence: Synthetic oligonucleotide
  Antisense strand to SEQ ID NO: 775894
uacauuauagaaugcuuca

SEQ ID NO: 775896 - RNA, 19 nt, Artificial Sequence
  Description of Artificial Sequence: Synthetic oligonucleotide
  Sense strand starting at position 2981 of SEQ ID NO: 587221
cgcuguacccuauaaauac

SEQ ID NO: 775897 - RNA, 19 nt, Artificial Sequence
  Description of Artificial Sequence: Synthetic oligonucleotide
  Antisense strand to SEQ ID NO: 775896
guauuuauaggguacagcg

SEQ ID NO: 775898 - RNA, 19 nt, Artificial Sequence
  Description of Artificial Sequence: Synthetic oligonucleotide
  Sense strand starting at position 3233 of SEQ ID NO: 587221
guaccuugcuuacuacaca

SEQ ID NO: 775899 - RNA, 19 nt, Artificial Sequence
  Description of Artificial Sequence: Synthetic oligonucleotide
  Antisense strand to SEQ ID NO: 775898
uguguaguaagcaagguac

SEQ ID NO: 775900 - RNA, 19 nt, Artificial Sequence
  Description of Artificial Sequence: Synthetic oligonucleotide
  Sense strand starting at position 3257 of SEQ ID NO: 587221
auaauauaguguucuaagg

SEQ ID NO: 775901 - RNA, 19 nt, Artificial Sequence
  Description of Artificial Sequence: Synthetic oligonucleotide
  Antisense strand to SEQ ID NO: 775900
ccuuagaacacuauauuau

SEQ ID NO: 775902 - RNA, 19 nt, Artificial Sequence
  Description of Artificial Sequence: Synthetic oligonucleotide
  Sense strand starting at position 3398 of SEQ ID NO: 587221
uguagaagacuaugcaacu

SEQ ID NO: 775903 - RNA, 19 nt, Artificial Sequence
  Description of Artificial Sequence: Synthetic oligonucleotide
  Antisense strand to SEQ ID NO: 775902
aguugcauagucuucuaca

SEQ ID NO: 775904 - RNA, 19 nt, Artificial Sequence
  Description of Artificial Sequence: Synthetic oligonucleotide
  Sense strand starting at position 3913 of SEQ ID NO: 587221
aaacuuggaucugcuaagu

SEQ ID NO: 775905 - RNA, 19 nt, Artificial Sequence
  Description of Artificial Sequence: Synthetic oligonucleotide
  Antisense strand to SEQ ID NO: 775904
acuuagcagauccaaguuu

SEQ ID NO: 775906 - RNA, 19 nt, Artificial Sequence
  Description of Artificial Sequence: Synthetic oligonucleotide
  Sense strand starting at position 3932 of SEQ ID NO: 587221
gcugguacgccugaacaga

SEQ ID NO: 775907 - RNA, 19 nt, Artificial Sequence
  Description of Artificial Sequence: Synthetic oligonucleotide
  Antisense strand to SEQ ID NO: 775906
ucuguucaggcguaccagc

SEQ ID NO: 775908 - RNA, 19 nt, Artificial Sequence
  Description of Artificial Sequence: Synthetic oligonucleotide
  Sense strand starting at position 165 of SEQ ID NO: 587222
cuauaaugucuguauuagg

SEQ ID NO: 775909 - RNA, 19 nt, Artificial Sequence
  Description of Artificial Sequence: Synthetic oligonucleotide
  Antisense strand to SEQ ID NO: 775908
ccuaauacagacauuauag

SEQ ID NO: 775910 - RNA, 19 nt, Artificial Sequence
  Description of Artificial Sequence: Synthetic oligonucleotide
  Sense strand starting at position 173 of SEQ ID NO: 587222
ucuguauuaggaugacaaa

SEQ ID NO: 775911 - RNA, 19 nt, Artificial Sequence
  Description of Artificial Sequence: Synthetic oligonucleotide
  Antisense strand to SEQ ID NO: 775910
uuugucauccuaauacaga

SEQ ID NO: 775912 - RNA, 19 nt, Artificial Sequence
  Description of Artificial Sequence: Synthetic oligonucleotide
  Sense strand starting at position 205 of SEQ ID NO: 587222
aggaaauguuugcauuuaa

SEQ ID NO: 775913 - RNA, 19 nt, Artificial Sequence
  Description of Artificial Sequence: Synthetic oligonucleotide
  Antisense strand to SEQ ID NO: 775912
uuaaaugcaaacauuuccu

SEQ ID NO: 775914 - RNA, 19 nt, Artificial Sequence
  Description of Artificial Sequence: Synthetic oligonucleotide
  Sense strand starting at position 292 of SEQ ID NO: 587222
agaaauggauucuagaacu

SEQ ID NO: 775915 - RNA, 19 nt, Artificial Sequence
  Description of Artificial Sequence: Synthetic oligonucleotide
  Antisense strand to SEQ ID NO: 775914
aguucuagaauccauuucu

SEQ ID NO: 775916 - RNA, 19 nt, Artificial Sequence
  Description of Artificial Sequence: Synthetic oligonucleotide
  Sense strand starting at position 420 of SEQ ID NO: 587222
auucgcaaucagggcuaaa

SEQ ID NO: 775917 - RNA, 19 nt, Artificial Sequence
  Description of Artificial Sequence: Synthetic oligonucleotide
  Antisense strand to SEQ ID NO: 775916
uuuagcccugauugcgaau

SEQ ID NO: 775918 - RNA, 19 nt, Artificial Sequence
  Description of Artificial Sequence: Synthetic oligonucleotide
  Sense strand starting at position 637 of SEQ ID NO: 587222
gggcuuugauaaccagcau

SEQ ID NO: 775919 - RNA, 19 nt, Artificial Sequence
  Description of Artificial Sequence: Synthetic oligonucleotide
  Antisense strand to SEQ ID NO: 775918
augcugguuaucaaagccc

SEQ ID NO: 775920 - RNA, 19 nt, Artificial Sequence
  Description of Artificial Sequence: Synthetic oligonucleotide
  Sense strand starting at position 749 of SEQ ID NO: 587222
ucaacaggugugcaugaau

SEQ ID NO: 775921 - RNA, 19 nt, Artificial Sequence
  Description of Artificial Sequence: Synthetic oligonucleotide
  Antisense strand to SEQ ID NO: 775920
auucaugcacaccuguuga

SEQ ID NO: 775922 - RNA, 19 nt, Artificial Sequence
  Description of Artificial Sequence: Synthetic oligonucleotide
  Sense strand starting at position 752 of SEQ ID NO: 587222
acaggugugcaugaaugaa

SEQ ID NO: 775923 - RNA, 19 nt, Artificial Sequence
  Description of Artificial Sequence: Synthetic oligonucleotide
  Antisense strand to SEQ ID NO: 775922
uucauucaugcacaccugu

SEQ ID NO: 775924 - RNA, 19 nt, Artificial Sequence
  Description of Artificial Sequence: Synthetic oligonucleotide
  Sense strand starting at position 773 of SEQ ID NO: 587222
auggcagauuaacuucuua

SEQ ID NO: 775925 - RNA, 19 nt, Artificial Sequence
  Description of Artificial Sequence: Synthetic oligonucleotide
  Antisense strand to SEQ ID NO: 775924
uaagaaguuaaucugccau

SEQ ID NO: 775926 - RNA, 19 nt, Artificial Sequence
  Description of Artificial Sequence: Synthetic oligonucleotide
  Sense strand starting at position 1455 of SEQ ID NO: 587222
ucugguaaccuugggucaa

SEQ ID NO: 775927 - RNA, 19 nt, Artificial Sequence
  Description of Artificial Sequence: Synthetic oligonucleotide
  Antisense strand to SEQ ID NO: 775926
uugacccaagguuaccaga

SEQ ID NO: 775928 - RNA, 19 nt, Artificial Sequence
  Description of Artificial Sequence: Synthetic oligonucleotide
  Sense strand starting at position 1457 of SEQ ID NO: 587222
ugguaaccuugggucaaua

SEQ ID NO: 775929 - RNA, 19 nt, Artificial Sequence
  Description of Artificial Sequence: Synthetic oligonucleotide
  Antisense strand to SEQ ID NO: 775928
uauugacccaagguuacca

SEQ ID NO: 775930 - RNA, 19 nt, Artificial Sequence
  Description of Artificial Sequence: Synthetic oligonucleotide
  Sense strand starting at position 1529 of SEQ ID NO: 587222
uacagaaguugggucucaa

SEQ ID NO: 775931 - RNA, 19 nt, Artificial Sequence
  Description of Artificial Sequence: Synthetic oligonucleotide
  Antisense strand to SEQ ID NO: 775930
uugagacccaacuucugua

SEQ ID NO: 775932 - RNA, 19 nt, Artificial Sequence
  Description of Artificial Sequence: Synthetic oligonucleotide
  Sense strand starting at position 1626 of SEQ ID NO: 587222
aucuuaucuuuccuagguu

SEQ ID NO: 775933 - RNA, 19 nt, Artificial Sequence
  Description of Artificial Sequence: Synthetic oligonucleotide
  Antisense strand to SEQ ID NO: 775932
aaccuaggaaagauaagau

SEQ ID NO: 775934 - RNA, 19 nt, Artificial Sequence
  Description of Artificial Sequence: Synthetic oligonucleotide
  Sense strand starting at position 1656 of SEQ ID NO: 587222
ugggaaagcccuuauucua

SEQ ID NO: 775935 - RNA, 19 nt, Artificial Sequence
  Description of Artificial Sequence: Synthetic oligonucleotide
  Antisense strand to SEQ ID NO: 775934
uagaauaagggcuuuccca

SEQ ID NO: 775936 - RNA, 19 nt, Artificial Sequence
  Description of Artificial Sequence: Synthetic oligonucleotide
  Sense strand starting at position 1759 of SEQ ID NO: 587222
cagggaugucaauguaacu

SEQ ID NO: 775937 - RNA, 19 nt, Artificial Sequence
  Description of Artificial Sequence: Synthetic oligonucleotide
  Antisense strand to SEQ ID NO: 775936
aguuacauugacaucccug

SEQ ID NO: 775938 - RNA, 19 nt, Artificial Sequence
  Description of Artificial Sequence: Synthetic oligonucleotide
  Sense strand starting at position 1910 of SEQ ID NO: 587222
gggucccagccggaauaau

SEQ ID NO: 775939 - RNA, 19 nt, Artificial Sequence
  Description of Artificial Sequence: Synthetic oligonucleotide
  Antisense strand to SEQ ID NO: 775938
auuauuccggcugggaccc

SEQ ID NO: 775940 - RNA, 19 nt, Artificial Sequence
  Description of Artificial Sequence: Synthetic oligonucleotide
  Sense strand starting at position 2096 of SEQ ID NO: 587222
ggacgugaugccuaauuaa

SEQ ID NO: 775941 - RNA, 19 nt, Artificial Sequence
  Description of Artificial Sequence: Synthetic oligonucleotide
  Antisense strand to SEQ ID NO: 775940
uuaauuaggcaucacgucc

SEQ ID NO: 775942 - RNA, 19 nt, Artificial Sequence
  Description of Artificial Sequence: Synthetic oligonucleotide
  Sense strand starting at position 2541 of SEQ ID NO: 587222
uaacuaguaccacgaugaa

SEQ ID NO: 775943 - RNA, 19 nt, Artificial Sequence
  Description of Artificial Sequence: Synthetic oligonucleotide
  Antisense strand to SEQ ID NO: 775942
uucaucgugguacuaguua

SEQ ID NO: 775944 - RNA, 19 nt, Artificial Sequence
  Description of Artificial Sequence: Synthetic oligonucleotide
  Sense strand starting at position 2544 of SEQ ID NO: 587222
cuaguaccacgaugaagaa

SEQ ID NO: 775945 - RNA, 19 nt, Artificial Sequence
  Description of Artificial Sequence: Synthetic oligonucleotide
  Antisense strand to SEQ ID NO: 775944
uucuucaucgugguacuag

SEQ ID NO: 775946 - RNA, 19 nt, Artificial Sequence
  Description of Artificial Sequence: Synthetic oligonucleotide
  Sense strand starting at position 2745 of SEQ ID NO: 587222
uuauccucauugguguaua

SEQ ID NO: 775947 - RNA, 19 nt, Artificial Sequence
  Description of Artificial Sequence: Synthetic oligonucleotide
  Antisense strand to SEQ ID NO: 775946
uauacaccaaugaggauaa

SEQ ID NO: 775948 - RNA, 19 nt, Artificial Sequence
  Description of Artificial Sequence: Synthetic oligonucleotide
  Sense strand starting at position 2748 of SEQ ID NO: 587222
uccucauugguguauauua

SEQ ID NO: 775949 - RNA, 19 nt, Artificial Sequence
  Description of Artificial Sequence: Synthetic oligonucleotide
  Antisense strand to SEQ ID NO: 775948
uaauauacaccaaugagga

SEQ ID NO: 775950 - RNA, 19 nt, Artificial Sequence
  Description of Artificial Sequence: Synthetic oligonucleotide
  Sense strand starting at position 2750 of SEQ ID NO: 587222
cucauugguguauauuaca

SEQ ID NO: 775951 - RNA, 19 nt, Artificial Sequence
  Description of Artificial Sequence: Synthetic oligonucleotide
  Antisense strand to SEQ ID NO: 775950
uguaauauacaccaaugag

SEQ ID NO: 775952 - RNA, 19 nt, Artificial Sequence
  Description of Artificial Sequence: Synthetic oligonucleotide
  Sense strand starting at position 2888 of SEQ ID NO: 587222
ugguguaauaaguaaggau

SEQ ID NO: 775953 - RNA, 19 nt, Artificial Sequence
  Description of Artificial Sequence: Synthetic oligonucleotide
  Antisense strand to SEQ ID NO: 775952
auccuuacuuauuacacca

SEQ ID NO: 775954 - RNA, 19 nt, Artificial Sequence
  Description of Artificial Sequence: Synthetic oligonucleotide
  Sense strand starting at position 2912 of SEQ ID NO: 587222
cuguguauauuucuagagu

SEQ ID NO: 775955 - RNA, 19 nt, Artificial Sequence
  Description of Artificial Sequence: Synthetic oligonucleotide
  Antisense strand to SEQ ID NO: 775954
acucuagaaauauacacag

SEQ ID NO: 775956 - RNA, 19 nt, Artificial Sequence
  Description of Artificial Sequence: Synthetic oligonucleotide
  Sense strand starting at position 2962 of SEQ ID NO: 587222
agauacuuccgacaaguuu

SEQ ID NO: 775957 - RNA, 19 nt, Artificial Sequence
  Description of Artificial Sequence: Synthetic oligonucleotide
  Antisense strand to SEQ ID NO: 775956
aaacuugucggaaguaucu

SEQ ID NO: 775958 - RNA, 19 nt, Artificial Sequence
  Description of Artificial Sequence: Synthetic oligonucleotide
  Sense strand starting at position 3056 of SEQ ID NO: 587222
uguuguuguguugucugua

SEQ ID NO: 775959 - RNA, 19 nt, Artificial Sequence
  Description of Artificial Sequence: Synthetic oligonucleotide
  Antisense strand to SEQ ID NO: 775958
uacagacaacacaacaaca

SEQ ID NO: 775960 - RNA, 19 nt, Artificial Sequence
  Description of Artificial Sequence: Synthetic oligonucleotide
  Sense strand starting at position 3168 of SEQ ID NO: 587222
uuugaaauaguguaaugcu

SEQ ID NO: 775961 - RNA, 19 nt, Artificial Sequence
  Description of Artificial Sequence: Synthetic oligonucleotide
  Antisense strand to SEQ ID NO: 775960
agcauuacacuauuucaaa

SEQ ID NO: 775962 - RNA, 19 nt, Artificial Sequence
  Description of Artificial Sequence: Synthetic oligonucleotide
  Sense strand starting at position 3231 of SEQ ID NO: 587222
gugauuaugaccuggaguu

SEQ ID NO: 775963 - RNA, 19 nt, Artificial Sequence
  Description of Artificial Sequence: Synthetic oligonucleotide
  Antisense strand to SEQ ID NO: 775962
aacuccaggucauaaucac

SEQ ID NO: 775964 - RNA, 19 nt, Artificial Sequence
  Description of Artificial Sequence: Synthetic oligonucleotide
  Sense strand starting at position 3232 of SEQ ID NO: 587222
ugauuaugaccuggaguuu

SEQ ID NO: 775965 - RNA, 19 nt, Artificial Sequence
  Description of Artificial Sequence: Synthetic oligonucleotide
  Antisense strand to SEQ ID NO: 775964
aaacuccaggucauaauca

SEQ ID NO: 775966 - RNA, 19 nt, Artificial Sequence
  Description of Artificial Sequence: Synthetic oligonucleotide
  Sense strand starting at position 3324 of SEQ ID NO: 587222
guuugagaaaguuauguuu

SEQ ID NO: 775967 - RNA, 19 nt, Artificial Sequence
  Description of Artificial Sequence: Synthetic oligonucleotide
  Antisense strand to SEQ ID NO: 775966
aaacauaacuuucucaaac

SEQ ID NO: 775968 - RNA, 19 nt, Artificial Sequence
  Description of Artificial Sequence: Synthetic oligonucleotide
  Sense strand starting at position 3486 of SEQ ID NO: 587222
ugauguuucucuuuauacu

SEQ ID NO: 775969 - RNA, 19 nt, Artificial Sequence
  Description of Artificial Sequence: Synthetic oligonucleotide
  Antisense strand to SEQ ID NO: 775968
aguauaaagagaaacauca

SEQ ID NO: 775970 - RNA, 19 nt, Artificial Sequence
  Description of Artificial Sequence: Synthetic oligonucleotide
  Sense strand starting at position 3495 of SEQ ID NO: 587222
ucuuuauacuggguaaaua

SEQ ID NO: 775971 - RNA, 19 nt, Artificial Sequence
  Description of Artificial Sequence: Synthetic oligonucleotide
  Antisense strand to SEQ ID NO: 775970
uauuuacccaguauaaaga

SEQ ID NO: 775972 - RNA, 19 nt, Artificial Sequence
  Description of Artificial Sequence: Synthetic oligonucleotide
  Sense strand starting at position 3508 of SEQ ID NO: 587222
uaaauaggucuuggaaugu

SEQ ID NO: 775973 - RNA, 19 nt, Artificial Sequence
  Description of Artificial Sequence: Synthetic oligonucleotide
  Antisense strand to SEQ ID NO: 775972
acauuccaagaccuauuua

SEQ ID NO: 775974 - RNA, 19 nt, Artificial Sequence
  Description of Artificial Sequence: Synthetic oligonucleotide
  Sense strand starting at position 3512 of SEQ ID NO: 587222
uaggucuuggaauguauaa

SEQ ID NO: 775975 - RNA, 19 nt, Artificial Sequence
  Description of Artificial Sequence: Synthetic oligonucleotide
  Antisense strand to SEQ ID NO: 775974
uuauacauuccaagaccua

SEQ ID NO: 775976 - RNA, 19 nt, Artificial Sequence
  Description of Artificial Sequence: Synthetic oligonucleotide
  Sense strand starting at position 3514 of SEQ ID NO: 587222
ggucuuggaauguauaauu

SEQ ID NO: 775977 - RNA, 19 nt, Artificial Sequence
  Description of Artificial Sequence: Synthetic oligonucleotide
  Antisense strand to SEQ ID NO: 775976
aauuauacauuccaagacc

SEQ ID NO: 775978 - RNA, 19 nt, Artificial Sequence
  Description of Artificial Sequence: Synthetic oligonucleotide
  Sense strand starting at position 3631 of SEQ ID NO: 587222
uuucuacuuugggcauaau

SEQ ID NO: 775979 - RNA, 19 nt, Artificial Sequence
  Description of Artificial Sequence: Synthetic oligonucleotide
  Antisense strand to SEQ ID NO: 775978
auuaugcccaaaguagaaa

SEQ ID NO: 775980 - RNA, 19 nt, Artificial Sequence
  Description of Artificial Sequence: Synthetic oligonucleotide
  Sense strand starting at position 3634 of SEQ ID NO: 587222
cuacuuugggcauaauguu

SEQ ID NO: 775981 - RNA, 19 nt, Artificial Sequence
  Description of Artificial Sequence: Synthetic oligonucleotide
  Antisense strand to SEQ ID NO: 775980
aacauuaugcccaaaguag

SEQ ID NO: 775982 - RNA, 19 nt, Artificial Sequence
  Description of Artificial Sequence: Synthetic oligonucleotide
  Sense strand starting at position 3661 of SEQ ID NO: 587222
agcuucuaagauuggaagu

SEQ ID NO: 775983 - RNA, 19 nt, Artificial Sequence
  Description of Artificial Sequence: Synthetic oligonucleotide
  Antisense strand to SEQ ID NO: 775982
acuuccaaucuuagaagcu

SEQ ID NO: 775984 - RNA, 19 nt, Artificial Sequence
  Description of Artificial Sequence: Synthetic oligonucleotide
  Sense strand starting at position 3662 of SEQ ID NO: 587222
gcuucuaagauuggaaguu

SEQ ID NO: 775985 - RNA, 19 nt, Artificial Sequence
  Description of Artificial Sequence: Synthetic oligonucleotide
  Antisense strand to SEQ ID NO: 775984
aacuuccaaucuuagaagc

SEQ ID NO: 775986 - RNA, 19 nt, Artificial Sequence
  Description of Artificial Sequence: Synthetic oligonucleotide
  Sense strand starting at position 3953 of SEQ ID NO: 587222
uuccauugugaucauagau

SEQ ID NO: 775987 - RNA, 19 nt, Artificial Sequence
  Description of Artificial Sequence: Synthetic oligonucleotide
  Antisense strand to SEQ ID NO: 775986
aucuaugaucacaauggaa

SEQ ID NO: 775988 - RNA, 19 nt, Artificial Sequence
  Description of Artificial Sequence: Synthetic oligonucleotide
  Sense strand starting at position 115 of SEQ ID NO: 587223
ggcagaagucauggucaga

SEQ ID NO: 775989 - RNA, 19 nt, Artificial Sequence
  Description of Artificial Sequence: Synthetic oligonucleotide
  Antisense strand to SEQ ID NO: 775988
ucugaccaugacuucugcc

SEQ ID NO: 775990 - RNA, 19 nt, Artificial Sequence
  Description of Artificial Sequence: Synthetic oligonucleotide
  Sense strand starting at position 139 of SEQ ID NO: 587223
acauauguauugcuuugau

SEQ ID NO: 775991 - RNA, 19 nt, Artificial Sequence
  Description of Artificial Sequence: Synthetic oligonucleotide
  Antisense strand to SEQ ID NO: 775990
aucaaagcaauacauaugu

SEQ ID NO: 775992 - RNA, 19 nt, Artificial Sequence
  Description of Artificial Sequence: Synthetic oligonucleotide
  Sense strand starting at position 241 of SEQ ID NO: 587223
ugggaaucauaacagggau

SEQ ID NO: 775993 - RNA, 19 nt, Artificial Sequence
  Description of Artificial Sequence: Synthetic oligonucleotide
  Antisense strand to SEQ ID NO: 775992
aucccuguuaugauuccca

SEQ ID NO: 775994 - RNA, 19 nt, Artificial Sequence
  Description of Artificial Sequence: Synthetic oligonucleotide
  Sense strand starting at position 254 of SEQ ID NO: 587223
agggauaguucaguggcaa

SEQ ID NO: 775995 - RNA, 19 nt, Artificial Sequence
  Description of Artificial Sequence: Synthetic oligonucleotide
  Antisense strand to SEQ ID NO: 775994
uugccacugaacuaucccu

SEQ ID NO: 775996 - RNA, 19 nt, Artificial Sequence
  Description of Artificial Sequence: Synthetic oligonucleotide
  Sense strand starting at position 255 of SEQ ID NO: 587223
gggauaguucaguggcaaa

SEQ ID NO: 775997 - RNA, 19 nt, Artificial Sequence
  Description of Artificial Sequence: Synthetic oligonucleotide
  Antisense strand to SEQ ID NO: 775996
uuugccacugaacuauccc

SEQ ID NO: 775998 - RNA, 19 nt, Artificial Sequence
  Description of Artificial Sequence: Synthetic oligonucleotide
  Sense strand starting at position 333 of SEQ ID NO: 587223
guugacaucagaggaaguu

SEQ ID NO: 775999 - RNA, 19 nt, Artificial Sequence
  Description of Artificial Sequence: Synthetic oligonucleotide
  Antisense strand to SEQ ID NO: 775998
aacuuccucugaugucaac

SEQ ID NO: 776000 - RNA, 19 nt, Artificial Sequence
  Description of Artificial Sequence: Synthetic oligonucleotide
  Sense strand starting at position 456 of SEQ ID NO: 587223
ccaugugacucuguuaaug

SEQ ID NO: 776001 - RNA, 19 nt, Artificial Sequence
  Description of Artificial Sequence: Synthetic oligonucleotide
  Antisense strand to SEQ ID NO: 776000
cauuaacagagucacaugg

SEQ ID NO: 776002 - RNA, 19 nt, Artificial Sequence
  Description of Artificial Sequence: Synthetic oligonucleotide
  Sense strand starting at position 1001 of SEQ ID NO: 587223
agcccauaccucuaguuga

SEQ ID NO: 776003 - RNA, 19 nt, Artificial Sequence
  Description of Artificial Sequence: Synthetic oligonucleotide
  Antisense strand to SEQ ID NO: 776002
ucaacuagagguaugggcu

SEQ ID NO: 776004 - RNA, 19 nt, Artificial Sequence
  Description of Artificial Sequence: Synthetic oligonucleotide
  Sense strand starting at position 1014 of SEQ ID NO: 587223
aguugauaaucuguuccca

SEQ ID NO: 776005 - RNA, 19 nt, Artificial Sequence
  Description of Artificial Sequence: Synthetic oligonucleotide
  Antisense strand to SEQ ID NO: 776004
ugggaacagauuaucaacu

SEQ ID NO: 776006 - RNA, 19 nt, Artificial Sequence
  Description of Artificial Sequence: Synthetic oligonucleotide
  Sense strand starting at position 1071 of SEQ ID NO: 587223
gguuuacugggaggaauuc

SEQ ID NO: 776007 - RNA, 19 nt, Artificial Sequence
  Description of Artificial Sequence: Synthetic oligonucleotide
  Antisense strand to SEQ ID NO: 776006
gaauuccucccaguaaacc

SEQ ID NO: 776008 - RNA, 19 nt, Artificial Sequence
  Description of Artificial Sequence: Synthetic oligonucleotide
  Sense strand starting at position 1098 of SEQ ID NO: 587223
gcaguucaugugcugaguu

SEQ ID NO: 776009 - RNA, 19 nt, Artificial Sequence
  Description of Artificial Sequence: Synthetic oligonucleotide
  Antisense strand to SEQ ID NO: 776008
aacucagcacaugaacugc

SEQ ID NO: 776010 - RNA, 19 nt, Artificial Sequence
  Description of Artificial Sequence: Synthetic oligonucleotide
  Sense strand starting at position 1115 of SEQ ID NO: 587223
uuaaauaagcucuggaaau

SEQ ID NO: 776011 - RNA, 19 nt, Artificial Sequence
  Description of Artificial Sequence: Synthetic oligonucleotide
  Antisense strand to SEQ ID NO: 776010
auuuccagagcuuauuuaa

SEQ ID NO: 776012 - RNA, 19 nt, Artificial Sequence
  Description of Artificial Sequence: Synthetic oligonucleotide
  Sense strand starting at position 1192 of SEQ ID NO: 587223
accagaaauugagagacuu

SEQ ID NO: 776013 - RNA, 19 nt, Artificial Sequence
  Description of Artificial Sequence: Synthetic oligonucleotide
  Antisense strand to SEQ ID NO: 776012
aagucucucaauuucuggu

SEQ ID NO: 776014 - RNA, 19 nt, Artificial Sequence
  Description of Artificial Sequence: Synthetic oligonucleotide
  Sense strand starting at position 1200 of SEQ ID NO: 587223
uugagagacuugcuagaca

SEQ ID NO: 776015 - RNA, 19 nt, Artificial Sequence
  Description of Artificial Sequence: Synthetic oligonucleotide
  Antisense strand to SEQ ID NO: 776014
ugucuagcaagucucucaa

SEQ ID NO: 776016 - RNA, 19 nt, Artificial Sequence
  Description of Artificial Sequence: Synthetic oligonucleotide
  Sense strand starting at position 1218 of SEQ ID NO: 587223
auaauuuccuguuaggaag

SEQ ID NO: 776017 - RNA, 19 nt, Artificial Sequence
  Description of Artificial Sequence: Synthetic oligonucleotide
  Antisense strand to SEQ ID NO: 776016
cuuccuaacaggaaauuau

SEQ ID NO: 776018 - RNA, 19 nt, Artificial Sequence
  Description of Artificial Sequence: Synthetic oligonucleotide
  Sense strand starting at position 1225 of SEQ ID NO: 587223
ccuguuaggaaguaguauu

SEQ ID NO: 776019 - RNA, 19 nt, Artificial Sequence
  Description of Artificial Sequence: Synthetic oligonucleotide
  Antisense strand to SEQ ID NO: 776018
aauacuacuuccuaacagg

SEQ ID NO: 776020 - RNA, 19 nt, Artificial Sequence
  Description of Artificial Sequence: Synthetic oligonucleotide
  Sense strand starting at position 1303 of SEQ ID NO: 587223
auuuaagcuuaacagagau

SEQ ID NO: 776021 - RNA, 19 nt, Artificial Sequence
  Description of Artificial Sequence: Synthetic oligonucleotide
  Antisense strand to SEQ ID NO: 776020
aucucuguuaagcuuaaau

SEQ ID NO: 776022 - RNA, 19 nt, Artificial Sequence
  Description of Artificial Sequence: Synthetic oligonucleotide
  Sense strand starting at position 1332 of SEQ ID NO: 587223
guaauaucacaguaccuua

SEQ ID NO: 776023 - RNA, 19 nt, Artificial Sequence
  Description of Artificial Sequence: Synthetic oligonucleotide
  Antisense strand to SEQ ID NO: 776022
uaagguacugugauauuac

SEQ ID NO: 776024 - RNA, 19 nt, Artificial Sequence
  Description of Artificial Sequence: Synthetic oligonucleotide
  Sense strand starting at position 1588 of SEQ ID NO: 587223
gauuuaaauugugcuguau

SEQ ID NO: 776025 - RNA, 19 nt, Artificial Sequence
  Description of Artificial Sequence: Synthetic oligonucleotide
  Antisense strand to SEQ ID NO: 776024
auacagcacaauuuaaauc

SEQ ID NO: 776026 - RNA, 19 nt, Artificial Sequence
  Description of Artificial Sequence: Synthetic oligonucleotide
  Sense strand starting at position 1592 of SEQ ID NO: 587223
uaaauugugcuguaugaaa

SEQ ID NO: 776027 - RNA, 19 nt, Artificial Sequence
  Description of Artificial Sequence: Synthetic oligonucleotide
  Antisense strand to SEQ ID NO: 776026
uuucauacagcacaauuua

SEQ ID NO: 776028 - RNA, 19 nt, Artificial Sequence
  Description of Artificial Sequence: Synthetic oligonucleotide
  Sense strand starting at position 1594 of SEQ ID NO: 587223
aauugugcuguaugaaauu

SEQ ID NO: 776029 - RNA, 19 nt, Artificial Sequence
  Description of Artificial Sequence: Synthetic oligonucleotide
  Antisense strand to SEQ ID NO: 776028
aauuucauacagcacaauu

SEQ ID NO: 776030 - RNA, 19 nt, Artificial Sequence
  Description of Artificial Sequence: Synthetic oligonucleotide
  Sense strand starting at position 1624 of SEQ ID NO: 587223
uucuguauauucucagaug

SEQ ID NO: 776031 - RNA, 19 nt, Artificial Sequence
  Description of Artificial Sequence: Synthetic oligonucleotide
  Antisense strand to SEQ ID NO: 776030
caucugagaauauacagaa

SEQ ID NO: 776032 - RNA, 19 nt, Artificial Sequence
  Description of Artificial Sequence: Synthetic oligonucleotide
  Sense strand starting at position 1733 of SEQ ID NO: 587223
cagcccaacugguuaguaa

SEQ ID NO: 776033 - RNA, 19 nt, Artificial Sequence
  Description of Artificial Sequence: Synthetic oligonucleotide
  Antisense strand to SEQ ID NO: 776032
uuacuaaccaguugggcug

SEQ ID NO: 776034 - RNA, 19 nt, Artificial Sequence
  Description of Artificial Sequence: Synthetic oligonucleotide
  Sense strand starting at position 1736 of SEQ ID NO: 587223
cccaacugguuaguaagau

SEQ ID NO: 776035 - RNA, 19 nt, Artificial Sequence
  Description of Artificial Sequence: Synthetic oligonucleotide
  Antisense strand to SEQ ID NO: 776034
aucuuacuaaccaguuggg

SEQ ID NO: 776036 - RNA, 19 nt, Artificial Sequence
  Description of Artificial Sequence: Synthetic oligonucleotide
  Sense strand starting at position 1987 of SEQ ID NO: 587223
ccuccucuccagugagaca

SEQ ID NO: 776037 - RNA, 19 nt, Artificial Sequence
  Description of Artificial Sequence: Synthetic oligonucleotide
  Antisense strand to SEQ ID NO: 776036
ugucucacuggagaggagg

SEQ ID NO: 776038 - RNA, 19 nt, Artificial Sequence
  Description of Artificial Sequence: Synthetic oligonucleotide
  Sense strand starting at position 2122 of SEQ ID NO: 587223
gccuccuggcucuaagauu

SEQ ID NO: 776039 - RNA, 19 nt, Artificial Sequence
  Description of Artificial Sequence: Synthetic oligonucleotide
  Antisense strand to SEQ ID NO: 776038
aaucuuagagccaggaggc

SEQ ID NO: 776040 - RNA, 19 nt, Artificial Sequence
  Description of Artificial Sequence: Synthetic oligonucleotide
  Sense strand starting at position 2130 of SEQ ID NO: 587223
gcucuaagauuacuugauc

SEQ ID NO: 776041 - RNA, 19 nt, Artificial Sequence
  Description of Artificial Sequence: Synthetic oligonucleotide
  Antisense strand to SEQ ID NO: 776040
gaucaaguaaucuuagagc

SEQ ID NO: 776042 - RNA, 19 nt, Artificial Sequence
  Description of Artificial Sequence: Synthetic oligonucleotide
  Sense strand starting at position 2248 of SEQ ID NO: 587223
cugcauuaaugagucuuga

SEQ ID NO: 776043 - RNA, 19 nt, Artificial Sequence
  Description of Artificial Sequence: Synthetic oligonucleotide
  Antisense strand to SEQ ID NO: 776042
ucaagacucauuaaugcag

SEQ ID NO: 776044 - RNA, 19 nt, Artificial Sequence
  Description of Artificial Sequence: Synthetic oligonucleotide
  Sense strand starting at position 2388 of SEQ ID NO: 587223
acauaaugugguuauguaa

SEQ ID NO: 776045 - RNA, 19 nt, Artificial Sequence
  Description of Artificial Sequence: Synthetic oligonucleotide
  Antisense strand to SEQ ID NO: 776044
uuacauaaccacauuaugu

SEQ ID NO: 776046 - RNA, 19 nt, Artificial Sequence
  Description of Artificial Sequence: Synthetic oligonucleotide
  Sense strand starting at position 2481 of SEQ ID NO: 587223
guguacucucaggaaguuu

SEQ ID NO: 776047 - RNA, 19 nt, Artificial Sequence
  Description of Artificial Sequence: Synthetic oligonucleotide
  Antisense strand to SEQ ID NO: 776046
aaacuuccugagaguacac

SEQ ID NO: 776048 - RNA, 19 nt, Artificial Sequence
  Description of Artificial Sequence: Synthetic oligonucleotide
  Sense strand starting at position 2578 of SEQ ID NO: 587223
ggcaaugaggaguguggaa

SEQ ID NO: 776049 - RNA, 19 nt, Artificial Sequence
  Description of Artificial Sequence: Synthetic oligonucleotide
  Antisense strand to SEQ ID NO: 776048
uuccacacuccucauugcc

SEQ ID NO: 776050 - RNA, 19 nt, Artificial Sequence
  Description of Artificial Sequence: Synthetic oligonucleotide
  Sense strand starting at position 2654 of SEQ ID NO: 587223
cuaaacugggcaugucuaa

SEQ ID NO: 776051 - RNA, 19 nt, Artificial Sequence
  Description of Artificial Sequence: Synthetic oligonucleotide
  Antisense strand to SEQ ID NO: 776050
uuagacaugcccaguuuag

SEQ ID NO: 776052 - RNA, 19 nt, Artificial Sequence
  Description of Artificial Sequence: Synthetic oligonucleotide
  Sense strand starting at position 3134 of SEQ ID NO: 587223
ucuuuaugauacucaugua

SEQ ID NO: 776053 - RNA, 19 nt, Artificial Sequence
  Description of Artificial Sequence: Synthetic oligonucleotide
  Antisense strand to SEQ ID NO: 776052
uacaugaguaucauaaaga

SEQ ID NO: 776054 - RNA, 19 nt, Artificial Sequence
  Description of Artificial Sequence: Synthetic oligonucleotide
  Sense strand starting at position 3316 of SEQ ID NO: 587223
cugggcucuuagucauaua

SEQ ID NO: 776055 - RNA, 19 nt, Artificial Sequence
  Description of Artificial Sequence: Synthetic oligonucleotide
  Antisense strand to SEQ ID NO: 776054
uauaugacuaagagcccag

SEQ ID NO: 776056 - RNA, 19 nt, Artificial Sequence
  Description of Artificial Sequence: Synthetic oligonucleotide
  Sense strand starting at position 3364 of SEQ ID NO: 587223
uuguacucccaguaucauu

SEQ ID NO: 776057 - RNA, 19 nt, Artificial Sequence
  Description of Artificial Sequence: Synthetic oligonucleotide
  Antisense strand to SEQ ID NO: 776056
aaugauacugggaguacaa

SEQ ID NO: 776058 - RNA, 19 nt, Artificial Sequence
  Description of Artificial Sequence: Synthetic oligonucleotide
  Sense strand starting at position 3435 of SEQ ID NO: 587223
uagaaauuacgcugaggac

SEQ ID NO: 776059 - RNA, 19 nt, Artificial Sequence
  Description of Artificial Sequence: Synthetic oligonucleotide
  Antisense strand to SEQ ID NO: 776058
guccucagcguaauuucua

SEQ ID NO: 776060 - RNA, 19 nt, Artificial Sequence
  Description of Artificial Sequence: Synthetic oligonucleotide
  Sense strand starting at position 3472 of SEQ ID NO: 587223
cuaguccuaguccacuaaa

SEQ ID NO: 776061 - RNA, 19 nt, Artificial Sequence
  Description of Artificial Sequence: Synthetic oligonucleotide
  Antisense strand to SEQ ID NO: 776060
uuuaguggacuaggacuag

SEQ ID NO: 776062 - RNA, 19 nt, Artificial Sequence
  Description of Artificial Sequence: Synthetic oligonucleotide
  Sense strand starting at position 3537 of SEQ ID NO: 587223
ggauuacagugauuauuga

SEQ ID NO: 776063 - RNA, 19 nt, Artificial Sequence
  Description of Artificial Sequence: Synthetic oligonucleotide
  Antisense strand to SEQ ID NO: 776062
ucaauaaucacuguaaucc

SEQ ID NO: 776064 - RNA, 19 nt, Artificial Sequence
  Description of Artificial Sequence: Synthetic oligonucleotide
  Sense strand starting at position 3628 of SEQ ID NO: 587223
aaccaucaggauugcgauu

SEQ ID NO: 776065 - RNA, 19 nt, Artificial Sequence
  Description of Artificial Sequence: Synthetic oligonucleotide
  Antisense strand to SEQ ID NO: 776064
aaucgcaauccugaugguu

SEQ ID NO: 776066 - RNA, 19 nt, Artificial Sequence
  Description of Artificial Sequence: Synthetic oligonucleotide
  Sense strand starting at position 3779 of SEQ ID NO: 587223
ugugucagacacugagauu

SEQ ID NO: 776067 - RNA, 19 nt, Artificial Sequence
  Description of Artificial Sequence: Synthetic oligonucleotide
  Antisense strand to SEQ ID NO: 776066
aaucucagugucugacaca

SEQ ID NO: 776068 - RNA, 19 nt, Artificial Sequence
  Description of Artificial Sequence: Synthetic oligonucleotide
  Sense strand starting at position 454 of SEQ ID NO: 587224
guguuaugaacugaaugua

SEQ ID NO: 776069 - RNA, 19 nt, Artificial Sequence
  Description of Artificial Sequence: Synthetic oligonucleotide
  Antisense strand to SEQ ID NO: 776068
uacauucaguucauaacac

SEQ ID NO: 776070 - RNA, 19 nt, Artificial Sequence
  Description of Artificial Sequence: Synthetic oligonucleotide
  Sense strand starting at position 509 of SEQ ID NO: 587224
ugugacaguauuugguuau

SEQ ID NO: 776071 - RNA, 19 nt, Artificial Sequence
  Description of Artificial Sequence: Synthetic oligonucleotide
  Antisense strand to SEQ ID NO: 776070
auaaccaaauacugucaca

SEQ ID NO: 776072 - RNA, 19 nt, Artificial Sequence
  Description of Artificial Sequence: Synthetic oligonucleotide
  Sense strand starting at position 591 of SEQ ID NO: 587224
cuuauaagaugagacauca

SEQ ID NO: 776073 - RNA, 19 nt, Artificial Sequence
  Description of Artificial Sequence: Synthetic oligonucleotide
  Antisense strand to SEQ ID NO: 776072
ugaugucucaucuuauaag

SEQ ID NO: 776074 - RNA, 19 nt, Artificial Sequence
  Description of Artificial Sequence: Synthetic oligonucleotide
  Sense strand starting at position 623 of SEQ ID NO: 587224
uccugucuuucccuguaca

SEQ ID NO: 776075 - RNA, 19 nt, Artificial Sequence
  Description of Artificial Sequence: Synthetic oligonucleotide
  Antisense strand to SEQ ID NO: 776074
uguacagggaaagacagga

SEQ ID NO: 776076 - RNA, 19 nt, Artificial Sequence
  Description of Artificial Sequence: Synthetic oligonucleotide
  Sense strand starting at position 626 of SEQ ID NO: 587224
ugucuuucccuguacacaa

SEQ ID NO: 776077 - RNA, 19 nt, Artificial Sequence
  Description of Artificial Sequence: Synthetic oligonucleotide
  Antisense strand to SEQ ID NO: 776076
uuguguacagggaaagaca

SEQ ID NO: 776078 - RNA, 19 nt, Artificial Sequence
  Description of Artificial Sequence: Synthetic oligonucleotide
  Sense strand starting at position 668 of SEQ ID NO: 587224
gggagaagguagcuguuua

SEQ ID NO: 776079 - RNA, 19 nt, Artificial Sequence
  Description of Artificial Sequence: Synthetic oligonucleotide
  Antisense strand to SEQ ID NO: 776078
uaaacagcuaccuucuccc

SEQ ID NO: 776080 - RNA, 19 nt, Artificial Sequence
  Description of Artificial Sequence: Synthetic oligonucleotide
  Sense strand starting at position 669 of SEQ ID NO: 587224
ggagaagguagcuguuuac

SEQ ID NO: 776081 - RNA, 19 nt, Artificial Sequence
  Description of Artificial Sequence: Synthetic oligonucleotide
  Antisense strand to SEQ ID NO: 776080
guaaacagcuaccuucucc

SEQ ID NO: 776082 - RNA, 19 nt, Artificial Sequence
  Description of Artificial Sequence: Synthetic oligonucleotide
  Sense strand starting at position 672 of SEQ ID NO: 587224
gaagguagcuguuuacaag

SEQ ID NO: 776083 - RNA, 19 nt, Artificial Sequence
  Description of Artificial Sequence: Synthetic oligonucleotide
  Antisense strand to SEQ ID NO: 776082
cuuguaaacagcuaccuuc

SEQ ID NO: 776084 - RNA, 19 nt, Artificial Sequence
  Description of Artificial Sequence: Synthetic oligonucleotide
  Sense strand starting at position 752 of SEQ ID NO: 587224
ugcuaugcugcagagguaa

SEQ ID NO: 776085 - RNA, 19 nt, Artificial Sequence
  Description of Artificial Sequence: Synthetic oligonucleotide
  Antisense strand to SEQ ID NO: 776084
uuaccucugcagcauagca

SEQ ID NO: 776086 - RNA, 19 nt, Artificial Sequence
  Description of Artificial Sequence: Synthetic oligonucleotide
  Sense strand starting at position 754 of SEQ ID NO: 587224
cuaugcugcagagguaauu

SEQ ID NO: 776087 - RNA, 19 nt, Artificial Sequence
  Description of Artificial Sequence: Synthetic oligonucleotide
  Antisense strand to SEQ ID NO: 776086
aauuaccucugcagcauag

SEQ ID NO: 776088 - RNA, 19 nt, Artificial Sequence
  Description of Artificial Sequence: Synthetic oligonucleotide
  Sense strand starting at position 853 of SEQ ID NO: 587224
uuuggauaugcccguauuu

SEQ ID NO: 776089 - RNA, 19 nt, Artificial Sequence
  Description of Artificial Sequence: Synthetic oligonucleotide
  Antisense strand to SEQ ID NO: 776088
aaauacgggcauauccaaa

SEQ ID NO: 776090 - RNA, 19 nt, Artificial Sequence
  Description of Artificial Sequence: Synthetic oligonucleotide
  Sense strand starting at position 919 of SEQ ID NO: 587224
caguacauggcaugucuua

SEQ ID NO: 776091 - RNA, 19 nt, Artificial Sequence
  Description of Artificial Sequence: Synthetic oligonucleotide
  Antisense strand to SEQ ID NO: 776090
uaagacaugccauguacug

SEQ ID NO: 776092 - RNA, 19 nt, Artificial Sequence
  Description of Artificial Sequence: Synthetic oligonucleotide
  Sense strand starting at position 993 of SEQ ID NO: 587224
uuuagcaguucucuuacua

SEQ ID NO: 776093 - RNA, 19 nt, Artificial Sequence
  Description of Artificial Sequence: Synthetic oligonucleotide
  Antisense strand to SEQ ID NO: 776092
uaguaagagaacugcuaaa

SEQ ID NO: 776094 - RNA, 19 nt, Artificial Sequence
  Description of Artificial Sequence: Synthetic oligonucleotide
  Sense strand starting at position 997 of SEQ ID NO: 587224
gcaguucucuuacuaauga

SEQ ID NO: 776095 - RNA, 19 nt, Artificial Sequence
  Description of Artificial Sequence: Synthetic oligonucleotide
  Antisense strand to SEQ ID NO: 776094
ucauuaguaagagaacugc

SEQ ID NO: 776096 - RNA, 19 nt, Artificial Sequence
  Description of Artificial Sequence: Synthetic oligonucleotide
  Sense strand starting at position 1049 of SEQ ID NO: 587224
guacuauauuagucagcuc

SEQ ID NO: 776097 - RNA, 19 nt, Artificial Sequence
  Description of Artificial Sequence: Synthetic oligonucleotide
  Antisense strand to SEQ ID NO: 776096
gagcugacuaauauaguac

SEQ ID NO: 776098 - RNA, 19 nt, Artificial Sequence
  Description of Artificial Sequence: Synthetic oligonucleotide
  Sense strand starting at position 1052 of SEQ ID NO: 587224
cuauauuagucagcuccca

SEQ ID NO: 776099 - RNA, 19 nt, Artificial Sequence
  Description of Artificial Sequence: Synthetic oligonucleotide
  Antisense strand to SEQ ID NO: 776098
ugggagcugacuaauauag

SEQ ID NO: 776100 - RNA, 19 nt, Artificial Sequence
  Description of Artificial Sequence: Synthetic oligonucleotide
  Sense strand starting at position 1449 of SEQ ID NO: 587224
cuccaacuccgaggucaaa

SEQ ID NO: 776101 - RNA, 19 nt, Artificial Sequence
  Description of Artificial Sequence: Synthetic oligonucleotide
  Antisense strand to SEQ ID NO: 776100
uuugaccucggaguuggag

SEQ ID NO: 776102 - RNA, 19 nt, Artificial Sequence
  Description of Artificial Sequence: Synthetic oligonucleotide
  Sense strand starting at position 2021 of SEQ ID NO: 587224
ugucgagaucgcgcucgua

SEQ ID NO: 776103 - RNA, 19 nt, Artificial Sequence
  Description of Artificial Sequence: Synthetic oligonucleotide
  Antisense strand to SEQ ID NO: 776102
uacgagcgcgaucucgaca

SEQ ID NO: 776104 - RNA, 19 nt, Artificial Sequence
  Description of Artificial Sequence: Synthetic oligonucleotide
  Sense strand starting at position 2023 of SEQ ID NO: 587224
ucgagaucgcgcucguagu

SEQ ID NO: 776105 - RNA, 19 nt, Artificial Sequence
  Description of Artificial Sequence: Synthetic oligonucleotide
  Antisense strand to SEQ ID NO: 776104
acuacgagcgcgaucucga

SEQ ID NO: 776106 - RNA, 19 nt, Artificial Sequence
  Description of Artificial Sequence: Synthetic oligonucleotide
  Sense strand starting at position 2037 of SEQ ID NO: 587224
guaguccuccacuaacuuu

SEQ ID NO: 776107 - RNA, 19 nt, Artificial Sequence
  Description of Artificial Sequence: Synthetic oligonucleotide
  Antisense strand to SEQ ID NO: 776106
aaaguuaguggaggacuac

SEQ ID NO: 776108 - RNA, 19 nt, Artificial Sequence
  Description of Artificial Sequence: Synthetic oligonucleotide
  Sense strand starting at position 2297 of SEQ ID NO: 587224
guguaauacuuucugaauu

SEQ ID NO: 776109 - RNA, 19 nt, Artificial Sequence
  Description of Artificial Sequence: Synthetic oligonucleotide
  Antisense strand to SEQ ID NO: 776108
aauucagaaaguauuacac

SEQ ID NO: 776110 - RNA, 19 nt, Artificial Sequence
  Description of Artificial Sequence: Synthetic oligonucleotide
  Sense strand starting at position 2388 of SEQ ID NO: 587224
uagccagaugugugaacau

SEQ ID NO: 776111 - RNA, 19 nt, Artificial Sequence
  Description of Artificial Sequence: Synthetic oligonucleotide
  Antisense strand to SEQ ID NO: 776110
auguucacacaucuggcua

SEQ ID NO: 776112 - RNA, 19 nt, Artificial Sequence
  Description of Artificial Sequence: Synthetic oligonucleotide
  Sense strand starting at position 2594 of SEQ ID NO: 587224
agaaacuucucagugcaau

SEQ ID NO: 776113 - RNA, 19 nt, Artificial Sequence
  Description of Artificial Sequence: Synthetic oligonucleotide
  Antisense strand to SEQ ID NO: 776112
auugcacugagaaguuucu

SEQ ID NO: 776114 - RNA, 19 nt, Artificial Sequence
  Description of Artificial Sequence: Synthetic oligonucleotide
  Sense strand starting at position 2631 of SEQ ID NO: 587224
gugaaagauuuagagauuc

SEQ ID NO: 776115 - RNA, 19 nt, Artificial Sequence
  Description of Artificial Sequence: Synthetic oligonucleotide
  Antisense strand to SEQ ID NO: 776114
gaaucucuaaaucuuucac

SEQ ID NO: 776116 - RNA, 19 nt, Artificial Sequence
  Description of Artificial Sequence: Synthetic oligonucleotide
  Sense strand starting at position 2642 of SEQ ID NO: 587224
agagauucuugcccacaau

SEQ ID NO: 776117 - RNA, 19 nt, Artificial Sequence
  Description of Artificial Sequence: Synthetic oligonucleotide
  Antisense strand to SEQ ID NO: 776116
auugugggcaagaaucucu

SEQ ID NO: 776118 - RNA, 19 nt, Artificial Sequence
  Description of Artificial Sequence: Synthetic oligonucleotide
  Sense strand starting at position 2689 of SEQ ID NO: 587224
cuagccucagcauaguaau

SEQ ID NO: 776119 - RNA, 19 nt, Artificial Sequence
  Description of Artificial Sequence: Synthetic oligonucleotide
  Antisense strand to SEQ ID NO: 776118
auuacuaugcugaggcuag

SEQ ID NO: 776120 - RNA, 19 nt, Artificial Sequence
  Description of Artificial Sequence: Synthetic oligonucleotide
  Sense strand starting at position 2793 of SEQ ID NO: 587224
ugcuuuacucccuggaacu

SEQ ID NO: 776121 - RNA, 19 nt, Artificial Sequence
  Description of Artificial Sequence: Synthetic oligonucleotide
  Antisense strand to SEQ ID NO: 776120
aguuccagggaguaaagca

SEQ ID NO: 776122 - RNA, 19 nt, Artificial Sequence
  Description of Artificial Sequence: Synthetic oligonucleotide
  Sense strand starting at position 2843 of SEQ ID NO: 587224
ggucuccaucuguaugcau

SEQ ID NO: 776123 - RNA, 19 nt, Artificial Sequence
  Description of Artificial Sequence: Synthetic oligonucleotide
  Antisense strand to SEQ ID NO: 776122
augcauacagauggagacc

SEQ ID NO: 776124 - RNA, 19 nt, Artificial Sequence
  Description of Artificial Sequence: Synthetic oligonucleotide
  Sense strand starting at position 2845 of SEQ ID NO: 587224
ucuccaucuguaugcauua

SEQ ID NO: 776125 - RNA, 19 nt, Artificial Sequence
  Description of Artificial Sequence: Synthetic oligonucleotide
  Antisense strand to SEQ ID NO: 776124
uaaugcauacagauggaga

SEQ ID NO: 776126 - RNA, 19 nt, Artificial Sequence
  Description of Artificial Sequence: Synthetic oligonucleotide
  Sense strand starting at position 3044 of SEQ ID NO: 587224
ugaaauuaauagcaugaac

SEQ ID NO: 776127 - RNA, 19 nt, Artificial Sequence
  Description of Artificial Sequence: Synthetic oligonucleotide
  Antisense strand to SEQ ID NO: 776126
guucaugcuauuaauuuca

SEQ ID NO: 776128 - RNA, 19 nt, Artificial Sequence
  Description of Artificial Sequence: Synthetic oligonucleotide
  Sense strand starting at position 3407 of SEQ ID NO: 587224
cugagcuuguaucucaaua

SEQ ID NO: 776129 - RNA, 19 nt, Artificial Sequence
  Description of Artificial Sequence: Synthetic oligonucleotide
  Antisense strand to SEQ ID NO: 776128
uauugagauacaagcucag

SEQ ID NO: 776130 - RNA, 19 nt, Artificial Sequence
  Description of Artificial Sequence: Synthetic oligonucleotide
  Sense strand starting at position 3532 of SEQ ID NO: 587224
acucaucaauuagugguaa

SEQ ID NO: 776131 - RNA, 19 nt, Artificial Sequence
  Description of Artificial Sequence: Synthetic oligonucleotide
  Antisense strand to SEQ ID NO: 776130
uuaccacuaauugaugagu

SEQ ID NO: 776132 - RNA, 19 nt, Artificial Sequence
  Description of Artificial Sequence: Synthetic oligonucleotide
  Sense strand starting at position 3543 of SEQ ID NO: 587224
agugguaaguauucugaau

SEQ ID NO: 776133 - RNA, 19 nt, Artificial Sequence
  Description of Artificial Sequence: Synthetic oligonucleotide
  Antisense strand to SEQ ID NO: 776132
auucagaauacuuaccacu

SEQ ID NO: 776134 - RNA, 19 nt, Artificial Sequence
  Description of Artificial Sequence: Synthetic oligonucleotide
  Sense strand starting at position 3610 of SEQ ID NO: 587224
ucugguuuguaucuuuaau

SEQ ID NO: 776135 - RNA, 19 nt, Artificial Sequence
  Description of Artificial Sequence: Synthetic oligonucleotide
  Antisense strand to SEQ ID NO: 776134
auuaaagauacaaaccaga

SEQ ID NO: 776136 - RNA, 19 nt, Artificial Sequence
  Description of Artificial Sequence: Synthetic oligonucleotide
  Sense strand starting at position 3612 of SEQ ID NO: 587224
ugguuuguaucuuuaauag

SEQ ID NO: 776137 - RNA, 19 nt, Artificial Sequence
  Description of Artificial Sequence: Synthetic oligonucleotide
  Antisense strand to SEQ ID NO: 776136
cuauuaaagauacaaacca

SEQ ID NO: 776138 - RNA, 19 nt, Artificial Sequence
  Description of Artificial Sequence: Synthetic oligonucleotide
  Sense strand starting at position 3618 of SEQ ID NO: 587224
guaucuuuaauaggguuga

SEQ ID NO: 776139 - RNA, 19 nt, Artificial Sequence
  Description of Artificial Sequence: Synthetic oligonucleotide
  Antisense strand to SEQ ID NO: 776138
ucaacccuauuaaagauac

SEQ ID NO: 776140 - RNA, 19 nt, Artificial Sequence
  Description of Artificial Sequence: Synthetic oligonucleotide
  Sense strand starting at position 3821 of SEQ ID NO: 587224
ugugcuuaacucuaugguu

SEQ ID NO: 776141 - RNA, 19 nt, Artificial Sequence
  Description of Artificial Sequence: Synthetic oligonucleotide
  Antisense strand to SEQ ID NO: 776140
aaccauagaguuaagcaca

SEQ ID NO: 776142 - RNA, 19 nt, Artificial Sequence
  Description of Artificial Sequence: Synthetic oligonucleotide
  Sense strand starting at position 3823 of SEQ ID NO: 587224
ugcuuaacucuaugguuac

SEQ ID NO: 776143 - RNA, 19 nt, Artificial Sequence
  Description of Artificial Sequence: Synthetic oligonucleotide
  Antisense strand to SEQ ID NO: 776142
guaaccauagaguuaagca

SEQ ID NO: 776144 - RNA, 19 nt, Artificial Sequence
  Description of Artificial Sequence: Synthetic oligonucleotide
  Sense strand starting at position 3826 of SEQ ID NO: 587224
uuaacucuaugguuacaga

SEQ ID NO: 776145 - RNA, 19 nt, Artificial Sequence
  Description of Artificial Sequence: Synthetic oligonucleotide
  Antisense strand to SEQ ID NO: 776144
ucuguaaccauagaguuaa

SEQ ID NO: 776146 - RNA, 19 nt, Artificial Sequence
  Description of Artificial Sequence: Synthetic oligonucleotide
  Sense strand starting at position 3862 of SEQ ID NO: 587224
augcaauacucugaacaag

SEQ ID NO: 776147 - RNA, 19 nt, Artificial Sequence
  Description of Artificial Sequence: Synthetic oligonucleotide
  Antisense strand to SEQ ID NO: 776146
cuuguucagaguauugcau

SEQ ID NO: 776148 - RNA, 19 nt, Artificial Sequence
  Description of Artificial Sequence: Synthetic oligonucleotide
  Sense strand starting at position 37 of SEQ ID NO: 587225
cugaaaguugcacaucuuu

SEQ ID NO: 776149 - RNA, 19 nt, Artificial Sequence
  Description of Artificial Sequence: Synthetic oligonucleotide
  Antisense strand to SEQ ID NO: 776148
aaagaugugcaacuuucag

SEQ ID NO: 776150 - RNA, 19 nt, Artificial Sequence
  Description of Artificial Sequence: Synthetic oligonucleotide
  Sense strand starting at position 87 of SEQ ID NO: 587225
accagaccucugggaaagu

SEQ ID NO: 776151 - RNA, 19 nt, Artificial Sequence
  Description of Artificial Sequence: Synthetic oligonucleotide
  Antisense strand to SEQ ID NO: 776150
acuuucccagaggucuggu

SEQ ID NO: 776152 - RNA, 19 nt, Artificial Sequence
  Description of Artificial Sequence: Synthetic oligonucleotide
  Sense strand starting at position 98 of SEQ ID NO: 587225
gggaaaguaacaugcucaa

SEQ ID NO: 776153 - RNA, 19 nt, Artificial Sequence
  Description of Artificial Sequence: Synthetic oligonucleotide
  Antisense strand to SEQ ID NO: 776152
uugagcauguuacuuuccc

SEQ ID NO: 776154 - RNA, 19 nt, Artificial Sequence
  Description of Artificial Sequence: Synthetic oligonucleotide
  Sense strand starting at position 144 of SEQ ID NO: 587225
aacaaaugagguuguuaua

SEQ ID NO: 776155 - RNA, 19 nt, Artificial Sequence
  Description of Artificial Sequence: Synthetic oligonucleotide
  Antisense strand to SEQ ID NO: 776154
uauaacaaccucauuuguu

SEQ ID NO: 776156 - RNA, 19 nt, Artificial Sequence
  Description of Artificial Sequence: Synthetic oligonucleotide
  Sense strand starting at position 160 of SEQ ID NO: 587225
auaagucagccugaaagcu

SEQ ID NO: 776157 - RNA, 19 nt, Artificial Sequence
  Description of Artificial Sequence: Synthetic oligonucleotide
  Antisense strand to SEQ ID NO: 776156
agcuuucaggcugacuuau

SEQ ID NO: 776158 - RNA, 19 nt, Artificial Sequence
  Description of Artificial Sequence: Synthetic oligonucleotide
  Sense strand starting at position 207 of SEQ ID NO: 587225
uuagaaugguauucccuaa

SEQ ID NO: 776159 - RNA, 19 nt, Artificial Sequence
  Description of Artificial Sequence: Synthetic oligonucleotide
  Antisense strand to SEQ ID NO: 776158
uuagggaauaccauucuaa

SEQ ID NO: 776160 - RNA, 19 nt, Artificial Sequence
  Description of Artificial Sequence: Synthetic oligonucleotide
  Sense strand starting at position 551 of SEQ ID NO: 587225
uccgucugacauuaacauu

SEQ ID NO: 776161 - RNA, 19 nt, Artificial Sequence
  Description of Artificial Sequence: Synthetic oligonucleotide
  Antisense strand to SEQ ID NO: 776160
aauguuaaugucagacgga

SEQ ID NO: 776162 - RNA, 19 nt, Artificial Sequence
  Description of Artificial Sequence: Synthetic oligonucleotide
  Sense strand starting at position 665 of SEQ ID NO: 587225
cuuuacuggcaaggaaauu

SEQ ID NO: 776163 - RNA, 19 nt, Artificial Sequence
  Description of Artificial Sequence: Synthetic oligonucleotide
  Antisense strand to SEQ ID NO: 776162
aauuuccuugccaguaaag

SEQ ID NO: 776164 - RNA, 19 nt, Artificial Sequence
  Description of Artificial Sequence: Synthetic oligonucleotide
  Sense strand starting at position 693 of SEQ ID NO: 587225
auuuacaaaucaggagaau

SEQ ID NO: 776165 - RNA, 19 nt, Artificial Sequence
  Description of Artificial Sequence: Synthetic oligonucleotide
  Antisense strand to SEQ ID NO: 776164
auucuccugauuuguaaau

SEQ ID NO: 776166 - RNA, 19 nt, Artificial Sequence
  Description of Artificial Sequence: Synthetic oligonucleotide
  Sense strand starting at position 1202 of SEQ ID NO: 587225
uggucuuccagggauguuu

SEQ ID NO: 776167 - RNA, 19 nt, Artificial Sequence
  Description of Artificial Sequence: Synthetic oligonucleotide
  Antisense strand to SEQ ID NO: 776166
aaacaucccuggaagacca

SEQ ID NO: 776168 - RNA, 19 nt, Artificial Sequence
  Description of Artificial Sequence: Synthetic oligonucleotide
  Sense strand starting at position 1239 of SEQ ID NO: 587225
uucguaguuaaguauaaga

SEQ ID NO: 776169 - RNA, 19 nt, Artificial Sequence
  Description of Artificial Sequence: Synthetic oligonucleotide
  Antisense strand to SEQ ID NO: 776168
ucuuauacuuaacuacgaa

SEQ ID NO: 776170 - RNA, 19 nt, Artificial Sequence
  Description of Artificial Sequence: Synthetic oligonucleotide
  Sense strand starting at position 1250 of SEQ ID NO: 587225
guauaagaccuuuaccugu

SEQ ID NO: 776171 - RNA, 19 nt, Artificial Sequence
  Description of Artificial Sequence: Synthetic oligonucleotide
  Antisense strand to SEQ ID NO: 776170
acagguaaaggucuuauac

SEQ ID NO: 776172 - RNA, 19 nt, Artificial Sequence
  Description of Artificial Sequence: Synthetic oligonucleotide
  Sense strand starting at position 1332 of SEQ ID NO: 587225
uugauagucaucugugaga

SEQ ID NO: 776173 - RNA, 19 nt, Artificial Sequence
  Description of Artificial Sequence: Synthetic oligonucleotide
  Antisense strand to SEQ ID NO: 776172
ucucacagaugacuaucaa

SEQ ID NO: 776174 - RNA, 19 nt, Artificial Sequence
  Description of Artificial Sequence: Synthetic oligonucleotide
  Sense strand starting at position 1334 of SEQ ID NO: 587225
gauagucaucugugagaug

SEQ ID NO: 776175 - RNA, 19 nt, Artificial Sequence
  Description of Artificial Sequence: Synthetic oligonucleotide
  Antisense strand to SEQ ID NO: 776174
caucucacagaugacuauc

SEQ ID NO: 776176 - RNA, 19 nt, Artificial Sequence
  Description of Artificial Sequence: Synthetic oligonucleotide
  Sense strand starting at position 1350 of SEQ ID NO: 587225
augagcccugcuuaauuaa

SEQ ID NO: 776177 - RNA, 19 nt, Artificial Sequence
  Description of Artificial Sequence: Synthetic oligonucleotide
  Antisense strand to SEQ ID NO: 776176
uuaauuaagcagggcucau

SEQ ID NO: 776178 - RNA, 19 nt, Artificial Sequence
  Description of Artificial Sequence: Synthetic oligonucleotide
  Sense strand starting at position 1361 of SEQ ID NO: 587225
uuaauuaaggugugauacu

SEQ ID NO: 776179 - RNA, 19 nt, Artificial Sequence
  Description of Artificial Sequence: Synthetic oligonucleotide
  Antisense strand to SEQ ID NO: 776178
aguaucacaccuuaauuaa

SEQ ID NO: 776180 - RNA, 19 nt, Artificial Sequence
  Description of Artificial Sequence: Synthetic oligonucleotide
  Sense strand starting at position 1483 of SEQ ID NO: 587225
uucucugaucuguaaauag

SEQ ID NO: 776181 - RNA, 19 nt, Artificial Sequence
  Description of Artificial Sequence: Synthetic oligonucleotide
  Antisense strand to SEQ ID NO: 776180
cuauuuacagaucagagaa

SEQ ID NO: 776182 - RNA, 19 nt, Artificial Sequence
  Description of Artificial Sequence: Synthetic oligonucleotide
  Sense strand starting at position 1643 of SEQ ID NO: 587225
gggucagaauguucaagag

SEQ ID NO: 776183 - RNA, 19 nt, Artificial Sequence
  Description of Artificial Sequence: Synthetic oligonucleotide
  Antisense strand to SEQ ID NO: 776182
cucuugaacauucugaccc

SEQ ID NO: 776184 - RNA, 19 nt, Artificial Sequence
  Description of Artificial Sequence: Synthetic oligonucleotide
  Sense strand starting at position 1655 of SEQ ID NO: 587225
ucaagagugauauggcauu

SEQ ID NO: 776185 - RNA, 19 nt, Artificial Sequence
  Description of Artificial Sequence: Synthetic oligonucleotide
  Antisense strand to SEQ ID NO: 776184
aaugccauaucacucuuga

SEQ ID NO: 776186 - RNA, 19 nt, Artificial Sequence
  Description of Artificial Sequence: Synthetic oligonucleotide
  Sense strand starting at position 1661 of SEQ ID NO: 587225
gugauauggcauuacacag

SEQ ID NO: 776187 - RNA, 19 nt, Artificial Sequence
  Description of Artificial Sequence: Synthetic oligonucleotide
  Antisense strand to SEQ ID NO: 776186
cuguguaaugccauaucac

SEQ ID NO: 776188 - RNA, 19 nt, Artificial Sequence
  Description of Artificial Sequence: Synthetic oligonucleotide
  Sense strand starting at position 1753 of SEQ ID NO: 587225
ucacuuacaguuuaaaguu

SEQ ID NO: 776189 - RNA, 19 nt, Artificial Sequence
  Description of Artificial Sequence: Synthetic oligonucleotide
  Antisense strand to SEQ ID NO: 776188
aacuuuaaacuguaaguga

SEQ ID NO: 776190 - RNA, 19 nt, Artificial Sequence
  Description of Artificial Sequence: Synthetic oligonucleotide
  Sense strand starting at position 1765 of SEQ ID NO: 587225
uaaaguuugugacuaaaga

SEQ ID NO: 776191 - RNA, 19 nt, Artificial Sequence
  Description of Artificial Sequence: Synthetic oligonucleotide
  Antisense strand to SEQ ID NO: 776190
ucuuuagucacaaacuuua

SEQ ID NO: 776192 - RNA, 19 nt, Artificial Sequence
  Description of Artificial Sequence: Synthetic oligonucleotide
  Sense strand starting at position 2014 of SEQ ID NO: 587225
ggaaguguuccuugaggga

SEQ ID NO: 776193 - RNA, 19 nt, Artificial Sequence
  Description of Artificial Sequence: Synthetic oligonucleotide
  Antisense strand to SEQ ID NO: 776192
ucccucaaggaacacuucc

SEQ ID NO: 776194 - RNA, 19 nt, Artificial Sequence
  Description of Artificial Sequence: Synthetic oligonucleotide
  Sense strand starting at position 2247 of SEQ ID NO: 587225
uaugcuuugguugaagaug

SEQ ID NO: 776195 - RNA, 19 nt, Artificial Sequence
  Description of Artificial Sequence: Synthetic oligonucleotide
  Antisense strand to SEQ ID NO: 776194
caucuucaaccaaagcaua

SEQ ID NO: 776196 - RNA, 19 nt, Artificial Sequence
  Description of Artificial Sequence: Synthetic oligonucleotide
  Sense strand starting at position 2253 of SEQ ID NO: 587225
uugguugaagaugguuaaa

SEQ ID NO: 776197 - RNA, 19 nt, Artificial Sequence
  Description of Artificial Sequence: Synthetic oligonucleotide
  Antisense strand to SEQ ID NO: 776196
uuuaaccaucuucaaccaa

SEQ ID NO: 776198 - RNA, 19 nt, Artificial Sequence
  Description of Artificial Sequence: Synthetic oligonucleotide
  Sense strand starting at position 2255 of SEQ ID NO: 587225
gguugaagaugguuaaauu

SEQ ID NO: 776199 - RNA, 19 nt, Artificial Sequence
  Description of Artificial Sequence: Synthetic oligonucleotide
  Antisense strand to SEQ ID NO: 776198
aauuuaaccaucuucaacc

SEQ ID NO: 776200 - RNA, 19 nt, Artificial Sequence
  Description of Artificial Sequence: Synthetic oligonucleotide
  Sense strand starting at position 2308 of SEQ ID NO: 587225
aggaacauuuguuaaauga

SEQ ID NO: 776201 - RNA, 19 nt, Artificial Sequence
  Description of Artificial Sequence: Synthetic oligonucleotide
  Antisense strand to SEQ ID NO: 776200
ucauuuaacaaauguuccu

SEQ ID NO: 776202 - RNA, 19 nt, Artificial Sequence
  Description of Artificial Sequence: Synthetic oligonucleotide
  Sense strand starting at position 2416 of SEQ ID NO: 587225
gggaguaaguguccauaua

SEQ ID NO: 776203 - RNA, 19 nt, Artificial Sequence
  Description of Artificial Sequence: Synthetic oligonucleotide
  Antisense strand to SEQ ID NO: 776202
uauauggacacuuacuccc

SEQ ID NO: 776204 - RNA, 19 nt, Artificial Sequence
  Description of Artificial Sequence: Synthetic oligonucleotide
  Sense strand starting at position 2417 of SEQ ID NO: 587225
ggaguaaguguccauauaa

SEQ ID NO: 776205 - RNA, 19 nt, Artificial Sequence
  Description of Artificial Sequence: Synthetic oligonucleotide
  Antisense strand to SEQ ID NO: 776204
uuauauggacacuuacucc

SEQ ID NO: 776206 - RNA, 19 nt, Artificial Sequence
  Description of Artificial Sequence: Synthetic oligonucleotide
  Sense strand starting at position 2515 of SEQ ID NO: 587225
gucuguguucucuuguuau

SEQ ID NO: 776207 - RNA, 19 nt, Artificial Sequence
  Description of Artificial Sequence: Synthetic oligonucleotide
  Antisense strand to SEQ ID NO: 776206
auaacaagagaacacagac

SEQ ID NO: 776208 - RNA, 19 nt, Artificial Sequence
  Description of Artificial Sequence: Synthetic oligonucleotide
  Sense strand starting at position 2517 of SEQ ID NO: 587225
cuguguucucuuguuaugu

SEQ ID NO: 776209 - RNA, 19 nt, Artificial Sequence
  Description of Artificial Sequence: Synthetic oligonucleotide
  Antisense strand to SEQ ID NO: 776208
acauaacaagagaacacag

SEQ ID NO: 776210 - RNA, 19 nt, Artificial Sequence
  Description of Artificial Sequence: Synthetic oligonucleotide
  Sense strand starting at position 3059 of SEQ ID NO: 587225
acaguauuaccuggacuuc

SEQ ID NO: 776211 - RNA, 19 nt, Artificial Sequence
  Description of Artificial Sequence: Synthetic oligonucleotide
  Antisense strand to SEQ ID NO: 776210
gaaguccagguaauacugu

SEQ ID NO: 776212 - RNA, 19 nt, Artificial Sequence
  Description of Artificial Sequence: Synthetic oligonucleotide
  Sense strand starting at position 3152 of SEQ ID NO: 587225
ggccaauaucuccagugau

SEQ ID NO: 776213 - RNA, 19 nt, Artificial Sequence
  Description of Artificial Sequence: Synthetic oligonucleotide
  Antisense strand to SEQ ID NO: 776212
aucacuggagauauuggcc

SEQ ID NO: 776214 - RNA, 19 nt, Artificial Sequence
  Description of Artificial Sequence: Synthetic oligonucleotide
  Sense strand starting at position 3375 of SEQ ID NO: 587225
ugagguauuuauuaaacac

SEQ ID NO: 776215 - RNA, 19 nt, Artificial Sequence
  Description of Artificial Sequence: Synthetic oligonucleotide
  Antisense strand to SEQ ID NO: 776214
guguuuaauaaauaccuca

SEQ ID NO: 776216 - RNA, 19 nt, Artificial Sequence
  Description of Artificial Sequence: Synthetic oligonucleotide
  Sense strand starting at position 3497 of SEQ ID NO: 587225
gcaacagaucuuuacagca

SEQ ID NO: 776217 - RNA, 19 nt, Artificial Sequence
  Description of Artificial Sequence: Synthetic oligonucleotide
  Antisense strand to SEQ ID NO: 776216
ugcuguaaagaucuguugc

SEQ ID NO: 776218 - RNA, 19 nt, Artificial Sequence
  Description of Artificial Sequence: Synthetic oligonucleotide
  Sense strand starting at position 3502 of SEQ ID NO: 587225
agaucuuuacagcaaaguu

SEQ ID NO: 776219 - RNA, 19 nt, Artificial Sequence
  Description of Artificial Sequence: Synthetic oligonucleotide
  Antisense strand to SEQ ID NO: 776218
aacuuugcuguaaagaucu

SEQ ID NO: 776220 - RNA, 19 nt, Artificial Sequence
  Description of Artificial Sequence: Synthetic oligonucleotide
  Sense strand starting at position 3545 of SEQ ID NO: 587225
ggaucaaaguccuuguaaa

SEQ ID NO: 776221 - RNA, 19 nt, Artificial Sequence
  Description of Artificial Sequence: Synthetic oligonucleotide
  Antisense strand to SEQ ID NO: 776220
uuuacaaggacuuugaucc

SEQ ID NO: 776222 - RNA, 19 nt, Artificial Sequence
  Description of Artificial Sequence: Synthetic oligonucleotide
  Sense strand starting at position 3651 of SEQ ID NO: 587225
ucugaaagucaguaucauc

SEQ ID NO: 776223 - RNA, 19 nt, Artificial Sequence
  Description of Artificial Sequence: Synthetic oligonucleotide
  Antisense strand to SEQ ID NO: 776222
gaugauacugacuuucaga

SEQ ID NO: 776224 - RNA, 19 nt, Artificial Sequence
  Description of Artificial Sequence: Synthetic oligonucleotide
  Sense strand starting at position 3729 of SEQ ID NO: 587225
ccaagacauucuuugguua

SEQ ID NO: 776225 - RNA, 19 nt, Artificial Sequence
  Description of Artificial Sequence: Synthetic oligonucleotide
  Antisense strand to SEQ ID NO: 776224
uaaccaaagaaugucuugg

SEQ ID NO: 776226 - RNA, 19 nt, Artificial Sequence
  Description of Artificial Sequence: Synthetic oligonucleotide
  Sense strand starting at position 3732 of SEQ ID NO: 587225
agacauucuuugguuacau

SEQ ID NO: 776227 - RNA, 19 nt, Artificial Sequence
  Description of Artificial Sequence: Synthetic oligonucleotide
  Antisense strand to SEQ ID NO: 776226
auguaaccaaagaaugucu

SEQ ID NO: 776228 - RNA, 19 nt, Artificial Sequence
  Description of Artificial Sequence: Synthetic oligonucleotide
  Sense strand starting at position 119 of SEQ ID NO: 587226
accuuaguuugaucuucca

SEQ ID NO: 776229 - RNA, 19 nt, Artificial Sequence
  Description of Artificial Sequence: Synthetic oligonucleotide
  Antisense strand to SEQ ID NO: 776228
uggaagaucaaacuaaggu

SEQ ID NO: 776230 - RNA, 19 nt, Artificial Sequence
  Description of Artificial Sequence: Synthetic oligonucleotide
  Sense strand starting at position 149 of SEQ ID NO: 587226
uauagucugcaugaagaca

SEQ ID NO: 776231 - RNA, 19 nt, Artificial Sequence
  Description of Artificial Sequence: Synthetic oligonucleotide
  Antisense strand to SEQ ID NO: 776230
ugucuucaugcagacuaua

SEQ ID NO: 776232 - RNA, 19 nt, Artificial Sequence
  Description of Artificial Sequence: Synthetic oligonucleotide
  Sense strand starting at position 517 of SEQ ID NO: 587226
gucgguaaugacugacaau

SEQ ID NO: 776233 - RNA, 19 nt, Artificial Sequence
  Description of Artificial Sequence: Synthetic oligonucleotide
  Antisense strand to SEQ ID NO: 776232
auugucagucauuaccgac

SEQ ID NO: 776234 - RNA, 19 nt, Artificial Sequence
  Description of Artificial Sequence: Synthetic oligonucleotide
  Sense strand starting at position 518 of SEQ ID NO: 587226
ucgguaaugacugacaauu

SEQ ID NO: 776235 - RNA, 19 nt, Artificial Sequence
  Description of Artificial Sequence: Synthetic oligonucleotide
  Antisense strand to SEQ ID NO: 776234
aauugucagucauuaccga

SEQ ID NO: 776236 - RNA, 19 nt, Artificial Sequence
  Description of Artificial Sequence: Synthetic oligonucleotide
  Sense strand starting at position 520 of SEQ ID NO: 587226
gguaaugacugacaauuua

SEQ ID NO: 776237 - RNA, 19 nt, Artificial Sequence
  Description of Artificial Sequence: Synthetic oligonucleotide
  Antisense strand to SEQ ID NO: 776236
uaaauugucagucauuacc

SEQ ID NO: 776238 - RNA, 19 nt, Artificial Sequence
  Description of Artificial Sequence: Synthetic oligonucleotide
  Sense strand starting at position 642 of SEQ ID NO: 587226
gugaguguuaaccaucuag

SEQ ID NO: 776239 - RNA, 19 nt, Artificial Sequence
  Description of Artificial Sequence: Synthetic oligonucleotide
  Antisense strand to SEQ ID NO: 776238
cuagaugguuaacacucac

SEQ ID NO: 776240 - RNA, 19 nt, Artificial Sequence
  Description of Artificial Sequence: Synthetic oligonucleotide
  Sense strand starting at position 797 of SEQ ID NO: 587226
aguaauuaguuuccugaag

SEQ ID NO: 776241 - RNA, 19 nt, Artificial Sequence
  Description of Artificial Sequence: Synthetic oligonucleotide
  Antisense strand to SEQ ID NO: 776240
cuucaggaaacuaauuacu

SEQ ID NO: 776242 - RNA, 19 nt, Artificial Sequence
  Description of Artificial Sequence: Synthetic oligonucleotide
  Sense strand starting at position 1022 of SEQ ID NO: 587226
gggcaucuccaauacaagu

SEQ ID NO: 776243 - RNA, 19 nt, Artificial Sequence
  Description of Artificial Sequence: Synthetic oligonucleotide
  Antisense strand to SEQ ID NO: 776242
acuuguauuggagaugccc

SEQ ID NO: 776244 - RNA, 19 nt, Artificial Sequence
  Description of Artificial Sequence: Synthetic oligonucleotide
  Sense strand starting at position 1105 of SEQ ID NO: 587226
acaauaauccugugaguuc

SEQ ID NO: 776245 - RNA, 19 nt, Artificial Sequence
  Description of Artificial Sequence: Synthetic oligonucleotide
  Antisense strand to SEQ ID NO: 776244
gaacucacaggauuauugu

SEQ ID NO: 776246 - RNA, 19 nt, Artificial Sequence
  Description of Artificial Sequence: Synthetic oligonucleotide
  Sense strand starting at position 1131 of SEQ ID NO: 587226
cagggauuaucuguccgga

SEQ ID NO: 776247 - RNA, 19 nt, Artificial Sequence
  Description of Artificial Sequence: Synthetic oligonucleotide
  Antisense strand to SEQ ID NO: 776246
uccggacagauaaucccug

SEQ ID NO: 776248 - RNA, 19 nt, Artificial Sequence
  Description of Artificial Sequence: Synthetic oligonucleotide
  Sense strand starting at position 1187 of SEQ ID NO: 587226
uuaagaaugguuuggcuau

SEQ ID NO: 776249 - RNA, 19 nt, Artificial Sequence
  Description of Artificial Sequence: Synthetic oligonucleotide
  Antisense strand to SEQ ID NO: 776248
auagccaaaccauucuuaa

SEQ ID NO: 776250 - RNA, 19 nt, Artificial Sequence
  Description of Artificial Sequence: Synthetic oligonucleotide
  Sense strand starting at position 1296 of SEQ ID NO: 587226
uaaauuuagcuguguugac

SEQ ID NO: 776251 - RNA, 19 nt, Artificial Sequence
  Description of Artificial Sequence: Synthetic oligonucleotide
  Antisense strand to SEQ ID NO: 776250
gucaacacagcuaaauuua

SEQ ID NO: 776252 - RNA, 19 nt, Artificial Sequence
  Description of Artificial Sequence: Synthetic oligonucleotide
  Sense strand starting at position 1430 of SEQ ID NO: 587226
aggcguuuggaggacugaa

SEQ ID NO: 776253 - RNA, 19 nt, Artificial Sequence
  Description of Artificial Sequence: Synthetic oligonucleotide
  Antisense strand to SEQ ID NO: 776252
uucaguccuccaaacgccu

SEQ ID NO: 776254 - RNA, 19 nt, Artificial Sequence
  Description of Artificial Sequence: Synthetic oligonucleotide
  Sense strand starting at position 2260 of SEQ ID NO: 587226
gacggauccgauuggagaa

SEQ ID NO: 776255 - RNA, 19 nt, Artificial Sequence
  Description of Artificial Sequence: Synthetic oligonucleotide
  Antisense strand to SEQ ID NO: 776254
uucuccaaucggauccguc

SEQ ID NO: 776256 - RNA, 19 nt, Artificial Sequence
  Description of Artificial Sequence: Synthetic oligonucleotide
  Sense strand starting at position 2557 of SEQ ID NO: 587226
ggugguugcccgguuaguu

SEQ ID NO: 776257 - RNA, 19 nt, Artificial Sequence
  Description of Artificial Sequence: Synthetic oligonucleotide
  Antisense strand to SEQ ID NO: 776256
aacuaaccgggcaaccacc

SEQ ID NO: 776258 - RNA, 19 nt, Artificial Sequence
  Description of Artificial Sequence: Synthetic oligonucleotide
  Sense strand starting at position 2558 of SEQ ID NO: 587226
gugguugcccgguuaguua

SEQ ID NO: 776259 - RNA, 19 nt, Artificial Sequence
  Description of Artificial Sequence: Synthetic oligonucleotide
  Antisense strand to SEQ ID NO: 776258
uaacuaaccgggcaaccac

SEQ ID NO: 776260 - RNA, 19 nt, Artificial Sequence
  Description of Artificial Sequence: Synthetic oligonucleotide
  Sense strand starting at position 2808 of SEQ ID NO: 587226
gagggugugccaggaauau

SEQ ID NO: 776261 - RNA, 19 nt, Artificial Sequence
  Description of Artificial Sequence: Synthetic oligonucleotide
  Antisense strand to SEQ ID NO: 776260
auauuccuggcacacccuc

SEQ ID NO: 776262 - RNA, 19 nt, Artificial Sequence
  Description of Artificial Sequence: Synthetic oligonucleotide
  Sense strand starting at position 2818 of SEQ ID NO: 587226
caggaauauauggguguua

SEQ ID NO: 776263 - RNA, 19 nt, Artificial Sequence
  Description of Artificial Sequence: Synthetic oligonucleotide
  Antisense strand to SEQ ID NO: 776262
uaacacccauauauuccug

SEQ ID NO: 776264 - RNA, 19 nt, Artificial Sequence
  Description of Artificial Sequence: Synthetic oligonucleotide
  Sense strand starting at position 2819 of SEQ ID NO: 587226
aggaauauauggguguuaa

SEQ ID NO: 776265 - RNA, 19 nt, Artificial Sequence
  Description of Artificial Sequence: Synthetic oligonucleotide
  Antisense strand to SEQ ID NO: 776264
uuaacacccauauauuccu

SEQ ID NO: 776266 - RNA, 19 nt, Artificial Sequence
  Description of Artificial Sequence: Synthetic oligonucleotide
  Sense strand starting at position 2820 of SEQ ID NO: 587226
ggaauauauggguguuaag

SEQ ID NO: 776267 - RNA, 19 nt, Artificial Sequence
  Description of Artificial Sequence: Synthetic oligonucleotide
  Antisense strand to SEQ ID NO: 776266
cuuaacacccauauauucc

SEQ ID NO: 776268 - RNA, 19 nt, Artificial Sequence
  Description of Artificial Sequence: Synthetic oligonucleotide
  Sense strand starting at position 3010 of SEQ ID NO: 587226
ucauauagccucuggaaga

SEQ ID NO: 776269 - RNA, 19 nt, Artificial Sequence
  Description of Artificial Sequence: Synthetic oligonucleotide
  Antisense strand to SEQ ID NO: 776268
ucuuccagaggcuauauga

SEQ ID NO: 776270 - RNA, 19 nt, Artificial Sequence
  Description of Artificial Sequence: Synthetic oligonucleotide
  Sense strand starting at position 3023 of SEQ ID NO: 587226
ggaagaagggcguaagguu

SEQ ID NO: 776271 - RNA, 19 nt, Artificial Sequence
  Description of Artificial Sequence: Synthetic oligonucleotide
  Antisense strand to SEQ ID NO: 776270
aaccuuacgcccuucuucc

SEQ ID NO: 776272 - RNA, 19 nt, Artificial Sequence
  Description of Artificial Sequence: Synthetic oligonucleotide
  Sense strand starting at position 3068 of SEQ ID NO: 587226
gcccaaggagaguauuagu

SEQ ID NO: 776273 - RNA, 19 nt, Artificial Sequence
  Description of Artificial Sequence: Synthetic oligonucleotide
  Antisense strand to SEQ ID NO: 776272
acuaauacucuccuugggc

SEQ ID NO: 776274 - RNA, 19 nt, Artificial Sequence
  Description of Artificial Sequence: Synthetic oligonucleotide
  Sense strand starting at position 3088 of SEQ ID NO: 587226
ggucgauucggugccagua

SEQ ID NO: 776275 - RNA, 19 nt, Artificial Sequence
  Description of Artificial Sequence: Synthetic oligonucleotide
  Antisense strand to SEQ ID NO: 776274
uacuggcaccgaaucgacc

SEQ ID NO: 776276 - RNA, 19 nt, Artificial Sequence
  Description of Artificial Sequence: Synthetic oligonucleotide
  Sense strand starting at position 3261 of SEQ ID NO: 587226
cugagaauacuuuggcuua

SEQ ID NO: 776277 - RNA, 19 nt, Artificial Sequence
  Description of Artificial Sequence: Synthetic oligonucleotide
  Antisense strand to SEQ ID NO: 776276
uaagccaaaguauucucag

SEQ ID NO: 776278 - RNA, 19 nt, Artificial Sequence
  Description of Artificial Sequence: Synthetic oligonucleotide
  Sense strand starting at position 3264 of SEQ ID NO: 587226
agaauacuuuggcuuaaau

SEQ ID NO: 776279 - RNA, 19 nt, Artificial Sequence
  Description of Artificial Sequence: Synthetic oligonucleotide
  Antisense strand to SEQ ID NO: 776278
auuuaagccaaaguauucu

SEQ ID NO: 776280 - RNA, 19 nt, Artificial Sequence
  Description of Artificial Sequence: Synthetic oligonucleotide
  Sense strand starting at position 3427 of SEQ ID NO: 587226
caguuuaauuggcuuggaa

SEQ ID NO: 776281 - RNA, 19 nt, Artificial Sequence
  Description of Artificial Sequence: Synthetic oligonucleotide
  Antisense strand to SEQ ID NO: 776280
uuccaagccaauuaaacug

SEQ ID NO: 776282 - RNA, 19 nt, Artificial Sequence
  Description of Artificial Sequence: Synthetic oligonucleotide
  Sense strand starting at position 3429 of SEQ ID NO: 587226
guuuaauuggcuuggaaag

SEQ ID NO: 776283 - RNA, 19 nt, Artificial Sequence
  Description of Artificial Sequence: Synthetic oligonucleotide
  Antisense strand to SEQ ID NO: 776282
cuuuccaagccaauuaaac

SEQ ID NO: 776284 - RNA, 19 nt, Artificial Sequence
  Description of Artificial Sequence: Synthetic oligonucleotide
  Sense strand starting at position 3529 of SEQ ID NO: 587226
gcgauuugcaaagaccgua

SEQ ID NO: 776285 - RNA, 19 nt, Artificial Sequence
  Description of Artificial Sequence: Synthetic oligonucleotide
  Antisense strand to SEQ ID NO: 776284
uacggucuuugcaaaucgc

SEQ ID NO: 776286 - RNA, 19 nt, Artificial Sequence
  Description of Artificial Sequence: Synthetic oligonucleotide
  Sense strand starting at position 3534 of SEQ ID NO: 587226
uugcaaagaccguaugaug

SEQ ID NO: 776287 - RNA, 19 nt, Artificial Sequence
  Description of Artificial Sequence: Synthetic oligonucleotide
  Antisense strand to SEQ ID NO: 776286
caucauacggucuuugcaa

SEQ ID NO: 776288 - RNA, 19 nt, Artificial Sequence
  Description of Artificial Sequence: Synthetic oligonucleotide
  Sense strand starting at position 3545 of SEQ ID NO: 587226
guaugaugaugaucaugau

SEQ ID NO: 776289 - RNA, 19 nt, Artificial Sequence
  Description of Artificial Sequence: Synthetic oligonucleotide
  Antisense strand to SEQ ID NO: 776288
aucaugaucaucaucauac

SEQ ID NO: 776290 - RNA, 19 nt, Artificial Sequence
  Description of Artificial Sequence: Synthetic oligonucleotide
  Sense strand starting at position 3551 of SEQ ID NO: 587226
ugaugaucaugaucuuacu

SEQ ID NO: 776291 - RNA, 19 nt, Artificial Sequence
  Description of Artificial Sequence: Synthetic oligonucleotide
  Antisense strand to SEQ ID NO: 776290
aguaagaucaugaucauca

SEQ ID NO: 776292 - RNA, 19 nt, Artificial Sequence
  Description of Artificial Sequence: Synthetic oligonucleotide
  Sense strand starting at position 3613 of SEQ ID NO: 587226
guggaucauguuggaaaug

SEQ ID NO: 776293 - RNA, 19 nt, Artificial Sequence
  Description of Artificial Sequence: Synthetic oligonucleotide
  Antisense strand to SEQ ID NO: 776292
cauuuccaacaugauccac

SEQ ID NO: 776294 - RNA, 19 nt, Artificial Sequence
  Description of Artificial Sequence: Synthetic oligonucleotide
  Sense strand starting at position 3642 of SEQ ID NO: 587226
ccaggaacuugguuauggu

SEQ ID NO: 776295 - RNA, 19 nt, Artificial Sequence
  Description of Artificial Sequence: Synthetic oligonucleotide
  Antisense strand to SEQ ID NO: 776294
accauaaccaaguuccugg

SEQ ID NO: 776296 - RNA, 19 nt, Artificial Sequence
  Description of Artificial Sequence: Synthetic oligonucleotide
  Sense strand starting at position 3709 of SEQ ID NO: 587226
acgaaauaggaaugucuga

SEQ ID NO: 776297 - RNA, 19 nt, Artificial Sequence
  Description of Artificial Sequence: Synthetic oligonucleotide
  Antisense strand to SEQ ID NO: 776296
ucagacauuccuauuucgu

SEQ ID NO: 776298 - RNA, 19 nt, Artificial Sequence
  Description of Artificial Sequence: Synthetic oligonucleotide
  Sense strand starting at position 3769 of SEQ ID NO: 587226
agaauuuccucagaaagac

SEQ ID NO: 776299 - RNA, 19 nt, Artificial Sequence
  Description of Artificial Sequence: Synthetic oligonucleotide
  Antisense strand to SEQ ID NO: 776298
gucuuucugaggaaauucu

SEQ ID NO: 776300 - RNA, 19 nt, Artificial Sequence
  Description of Artificial Sequence: Synthetic oligonucleotide
  Sense strand starting at position 3781 of SEQ ID NO: 587226
gaaagaccguuacuggaaa

SEQ ID NO: 776301 - RNA, 19 nt, Artificial Sequence
  Description of Artificial Sequence: Synthetic oligonucleotide
  Antisense strand to SEQ ID NO: 776300
uuuccaguaacggucuuuc

SEQ ID NO: 776302 - RNA, 19 nt, Artificial Sequence
  Description of Artificial Sequence: Synthetic oligonucleotide
  Sense strand starting at position 3792 of SEQ ID NO: 587226
acuggaaauuuccaguaug

SEQ ID NO: 776303 - RNA, 19 nt, Artificial Sequence
  Description of Artificial Sequence: Synthetic oligonucleotide
  Antisense strand to SEQ ID NO: 776302
cauacuggaaauuuccagu

SEQ ID NO: 776304 - RNA, 19 nt, Artificial Sequence
  Description of Artificial Sequence: Synthetic oligonucleotide
  Sense strand starting at position 3814 of SEQ ID NO: 587226
agggucagugacugaacaa

SEQ ID NO: 776305 - RNA, 19 nt, Artificial Sequence
  Description of Artificial Sequence: Synthetic oligonucleotide
  Antisense strand to SEQ ID NO: 776304
uuguucagucacugacccu

SEQ ID NO: 776306 - RNA, 19 nt, Artificial Sequence
  Description of Artificial Sequence: Synthetic oligonucleotide
  Sense strand starting at position 3965 of SEQ ID NO: 587226
gcaugaaccuuuccugaaa

SEQ ID NO: 776307 - RNA, 19 nt, Artificial Sequence
  Description of Artificial Sequence: Synthetic oligonucleotide
  Antisense strand to SEQ ID NO: 776306
uuucaggaaagguucaugc

SEQ ID NO: 776308 - RNA, 19 nt, Artificial Sequence
  Description of Artificial Sequence: Synthetic oligonucleotide
  Sense strand starting at position 6 of SEQ ID NO: 587227
uaagauuguguauggguaa

SEQ ID NO: 776309 - RNA, 19 nt, Artificial Sequence
  Description of Artificial Sequence: Synthetic oligonucleotide
  Antisense strand to SEQ ID NO: 776308
uuacccauacacaaucuua

SEQ ID NO: 776310 - RNA, 19 nt, Artificial Sequence
  Description of Artificial Sequence: Synthetic oligonucleotide
  Sense strand starting at position 9 of SEQ ID NO: 587227
gauuguguauggguaaaca

SEQ ID NO: 776311 - RNA, 19 nt, Artificial Sequence
  Description of Artificial Sequence: Synthetic oligonucleotide
  Antisense strand to SEQ ID NO: 776310
uguuuacccauacacaauc

SEQ ID NO: 776312 - RNA, 19 nt, Artificial Sequence
  Description of Artificial Sequence: Synthetic oligonucleotide
  Sense strand starting at position 104 of SEQ ID NO: 587227
guuaacuauuggguuaucu

SEQ ID NO: 776313 - RNA, 19 nt, Artificial Sequence
  Description of Artificial Sequence: Synthetic oligonucleotide
  Antisense strand to SEQ ID NO: 776312
agauaacccaauaguuaac

SEQ ID NO: 776314 - RNA, 19 nt, Artificial Sequence
  Description of Artificial Sequence: Synthetic oligonucleotide
  Sense strand starting at position 108 of SEQ ID NO: 587227
acuauuggguuaucuaaag

SEQ ID NO: 776315 - RNA, 19 nt, Artificial Sequence
  Description of Artificial Sequence: Synthetic oligonucleotide
  Antisense strand to SEQ ID NO: 776314
cuuuagauaacccaauagu

SEQ ID NO: 776316 - RNA, 19 nt, Artificial Sequence
  Description of Artificial Sequence: Synthetic oligonucleotide
  Sense strand starting at position 163 of SEQ ID NO: 587227
gggcacuaugggcaucaua

SEQ ID NO: 776317 - RNA, 19 nt, Artificial Sequence
  Description of Artificial Sequence: Synthetic oligonucleotide
  Antisense strand to SEQ ID NO: 776316
uaugaugcccauagugccc

SEQ ID NO: 776318 - RNA, 19 nt, Artificial Sequence
  Description of Artificial Sequence: Synthetic oligonucleotide
  Sense strand starting at position 268 of SEQ ID NO: 587227
cuagaaauguaucuaugag

SEQ ID NO: 776319 - RNA, 19 nt, Artificial Sequence
  Description of Artificial Sequence: Synthetic oligonucleotide
  Antisense strand to SEQ ID NO: 776318
cucauagauacauuucuag

SEQ ID NO: 776320 - RNA, 19 nt, Artificial Sequence
  Description of Artificial Sequence: Synthetic oligonucleotide
  Sense strand starting at position 374 of SEQ ID NO: 587227
uuugacuucucuuuaggua

SEQ ID NO: 776321 - RNA, 19 nt, Artificial Sequence
  Description of Artificial Sequence: Synthetic oligonucleotide
  Antisense strand to SEQ ID NO: 776320
uaccuaaagagaagucaaa

SEQ ID NO: 776322 - RNA, 19 nt, Artificial Sequence
  Description of Artificial Sequence: Synthetic oligonucleotide
  Sense strand starting at position 566 of SEQ ID NO: 587227
agagcuaugauucggaagu

SEQ ID NO: 776323 - RNA, 19 nt, Artificial Sequence
  Description of Artificial Sequence: Synthetic oligonucleotide
  Antisense strand to SEQ ID NO: 776322
acuuccgaaucauagcucu

SEQ ID NO: 776324 - RNA, 19 nt, Artificial Sequence
  Description of Artificial Sequence: Synthetic oligonucleotide
  Sense strand starting at position 621 of SEQ ID NO: 587227
guuaguucuguguugucau

SEQ ID NO: 776325 - RNA, 19 nt, Artificial Sequence
  Description of Artificial Sequence: Synthetic oligonucleotide
  Antisense strand to SEQ ID NO: 776324
augacaacacagaacuaac

SEQ ID NO: 776326 - RNA, 19 nt, Artificial Sequence
  Description of Artificial Sequence: Synthetic oligonucleotide
  Sense strand starting at position 735 of SEQ ID NO: 587227
uuacaaaguguugacuaua

SEQ ID NO: 776327 - RNA, 19 nt, Artificial Sequence
  Description of Artificial Sequence: Synthetic oligonucleotide
  Antisense strand to SEQ ID NO: 776326
uauagucaacacuuuguaa

SEQ ID NO: 776328 - RNA, 19 nt, Artificial Sequence
  Description of Artificial Sequence: Synthetic oligonucleotide
  Sense strand starting at position 870 of SEQ ID NO: 587227
ggguauaguauuggugaug

SEQ ID NO: 776329 - RNA, 19 nt, Artificial Sequence
  Description of Artificial Sequence: Synthetic oligonucleotide
  Antisense strand to SEQ ID NO: 776328
caucaccaauacuauaccc

SEQ ID NO: 776330 - RNA, 19 nt, Artificial Sequence
  Description of Artificial Sequence: Synthetic oligonucleotide
  Sense strand starting at position 882 of SEQ ID NO: 587227
ggugaugcacaaugaggaa

SEQ ID NO: 776331 - RNA, 19 nt, Artificial Sequence
  Description of Artificial Sequence: Synthetic oligonucleotide
  Antisense strand to SEQ ID NO: 776330
uuccucauugugcaucacc

SEQ ID NO: 776332 - RNA, 19 nt, Artificial Sequence
  Description of Artificial Sequence: Synthetic oligonucleotide
  Sense strand starting at position 989 of SEQ ID NO: 587227
uuggauaacuccucagcua

SEQ ID NO: 776333 - RNA, 19 nt, Artificial Sequence
  Description of Artificial Sequence: Synthetic oligonucleotide
  Antisense strand to SEQ ID NO: 776332
uagcugaggaguuauccaa

SEQ ID NO: 776334 - RNA, 19 nt, Artificial Sequence
  Description of Artificial Sequence: Synthetic oligonucleotide
  Sense strand starting at position 990 of SEQ ID NO: 587227
uggauaacuccucagcuau

SEQ ID NO: 776335 - RNA, 19 nt, Artificial Sequence
  Description of Artificial Sequence: Synthetic oligonucleotide
  Antisense strand to SEQ ID NO: 776334
auagcugaggaguuaucca

SEQ ID NO: 776336 - RNA, 19 nt, Artificial Sequence
  Description of Artificial Sequence: Synthetic oligonucleotide
  Sense strand starting at position 1029 of SEQ ID NO: 587227
uaggguuuagcacaaaugu

SEQ ID NO: 776337 - RNA, 19 nt, Artificial Sequence
  Description of Artificial Sequence: Synthetic oligonucleotide
  Antisense strand to SEQ ID NO: 776336
acauuugugcuaaacccua

SEQ ID NO: 776338 - RNA, 19 nt, Artificial Sequence
  Description of Artificial Sequence: Synthetic oligonucleotide
  Sense strand starting at position 1038 of SEQ ID NO: 587227
gcacaaauguguuuauaca

SEQ ID NO: 776339 - RNA, 19 nt, Artificial Sequence
  Description of Artificial Sequence: Synthetic oligonucleotide
  Antisense strand to SEQ ID NO: 776338
uguauaaacacauuugugc

SEQ ID NO: 776340 - RNA, 19 nt, Artificial Sequence
  Description of Artificial Sequence: Synthetic oligonucleotide
  Sense strand starting at position 1046 of SEQ ID NO: 587227
guguuuauacauggaaaua

SEQ ID NO: 776341 - RNA, 19 nt, Artificial Sequence
  Description of Artificial Sequence: Synthetic oligonucleotide
  Antisense strand to SEQ ID NO: 776340
uauuuccauguauaaacac

SEQ ID NO: 776342 - RNA, 19 nt, Artificial Sequence
  Description of Artificial Sequence: Synthetic oligonucleotide
  Sense strand starting at position 1055 of SEQ ID NO: 587227
cauggaaauacguagguuu

SEQ ID NO: 776343 - RNA, 19 nt, Artificial Sequence
  Description of Artificial Sequence: Synthetic oligonucleotide
  Antisense strand to SEQ ID NO: 776342
aaaccuacguauuuccaug

SEQ ID NO: 776344 - RNA, 19 nt, Artificial Sequence
  Description of Artificial Sequence: Synthetic oligonucleotide
  Sense strand starting at position 1057 of SEQ ID NO: 587227
uggaaauacguagguuuac

SEQ ID NO: 776345 - RNA, 19 nt, Artificial Sequence
  Description of Artificial Sequence: Synthetic oligonucleotide
  Antisense strand to SEQ ID NO: 776344
guaaaccuacguauuucca

SEQ ID NO: 776346 - RNA, 19 nt, Artificial Sequence
  Description of Artificial Sequence: Synthetic oligonucleotide
  Sense strand starting at position 1058 of SEQ ID NO: 587227
ggaaauacguagguuuaca

SEQ ID NO: 776347 - RNA, 19 nt, Artificial Sequence
  Description of Artificial Sequence: Synthetic oligonucleotide
  Antisense strand to SEQ ID NO: 776346
uguaaaccuacguauuucc

SEQ ID NO: 776348 - RNA, 19 nt, Artificial Sequence
  Description of Artificial Sequence: Synthetic oligonucleotide
  Sense strand starting at position 1094 of SEQ ID NO: 587227
cuuauuaugugaucacuag

SEQ ID NO: 776349 - RNA, 19 nt, Artificial Sequence
  Description of Artificial Sequence: Synthetic oligonucleotide
  Antisense strand to SEQ ID NO: 776348
cuagugaucacauaauaag

SEQ ID NO: 776350 - RNA, 19 nt, Artificial Sequence
  Description of Artificial Sequence: Synthetic oligonucleotide
  Sense strand starting at position 1095 of SEQ ID NO: 587227
uuauuaugugaucacuagu

SEQ ID NO: 776351 - RNA, 19 nt, Artificial Sequence
  Description of Artificial Sequence: Synthetic oligonucleotide
  Antisense strand to SEQ ID NO: 776350
acuagugaucacauaauaa

SEQ ID NO: 776352 - RNA, 19 nt, Artificial Sequence
  Description of Artificial Sequence: Synthetic oligonucleotide
  Sense strand starting at position 1098 of SEQ ID NO: 587227
uuaugugaucacuaguaaa

SEQ ID NO: 776353 - RNA, 19 nt, Artificial Sequence
  Description of Artificial Sequence: Synthetic oligonucleotide
  Antisense strand to SEQ ID NO: 776352
uuuacuagugaucacauaa

SEQ ID NO: 776354 - RNA, 19 nt, Artificial Sequence
  Description of Artificial Sequence: Synthetic oligonucleotide
  Sense strand starting at position 1136 of SEQ ID NO: 587227
uuauuuguaggguguguau

SEQ ID NO: 776355 - RNA, 19 nt, Artificial Sequence
  Description of Artificial Sequence: Synthetic oligonucleotide
  Antisense strand to SEQ ID NO: 776354
auacacacccuacaaauaa

SEQ ID NO: 776356 - RNA, 19 nt, Artificial Sequence
  Description of Artificial Sequence: Synthetic oligonucleotide
  Sense strand starting at position 1438 of SEQ ID NO: 587227
auauaacaauuggaggaaa

SEQ ID NO: 776357 - RNA, 19 nt, Artificial Sequence
  Description of Artificial Sequence: Synthetic oligonucleotide
  Antisense strand to SEQ ID NO: 776356
uuuccuccaauuguuauau

SEQ ID NO: 776358 - RNA, 19 nt, Artificial Sequence
  Description of Artificial Sequence: Synthetic oligonucleotide
  Sense strand starting at position 1674 of SEQ ID NO: 587227
gcuggugugaugguacgua

SEQ ID NO: 776359 - RNA, 19 nt, Artificial Sequence
  Description of Artificial Sequence: Synthetic oligonucleotide
  Antisense strand to SEQ ID NO: 776358
uacguaccaucacaccagc

SEQ ID NO: 776360 - RNA, 19 nt, Artificial Sequence
  Description of Artificial Sequence: Synthetic oligonucleotide
  Sense strand starting at position 1690 of SEQ ID NO: 587227
guaccuugaguuugaacaa

SEQ ID NO: 776361 - RNA, 19 nt, Artificial Sequence
  Description of Artificial Sequence: Synthetic oligonucleotide
  Antisense strand to SEQ ID NO: 776360
uuguucaaacucaagguac

SEQ ID NO: 776362 - RNA, 19 nt, Artificial Sequence
  Description of Artificial Sequence: Synthetic oligonucleotide
  Sense strand starting at position 2024 of SEQ ID NO: 587227
uccuauaagcagugggaau

SEQ ID NO: 776363 - RNA, 19 nt, Artificial Sequence
  Description of Artificial Sequence: Synthetic oligonucleotide
  Antisense strand to SEQ ID NO: 776362
auucccacugcuuauagga

SEQ ID NO: 776364 - RNA, 19 nt, Artificial Sequence
  Description of Artificial Sequence: Synthetic oligonucleotide
  Sense strand starting at position 2057 of SEQ ID NO: 587227
ugagguggucgcgugcaua

SEQ ID NO: 776365 - RNA, 19 nt, Artificial Sequence
  Description of Artificial Sequence: Synthetic oligonucleotide
  Antisense strand to SEQ ID NO: 776364
uaugcacgcgaccaccuca

SEQ ID NO: 776366 - RNA, 19 nt, Artificial Sequence
  Description of Artificial Sequence: Synthetic oligonucleotide
  Sense strand starting at position 2148 of SEQ ID NO: 587227
ggacauauaucaguauucu

SEQ ID NO: 776367 - RNA, 19 nt, Artificial Sequence
  Description of Artificial Sequence: Synthetic oligonucleotide
  Antisense strand to SEQ ID NO: 776366
agaauacugauauaugucc

SEQ ID NO: 776368 - RNA, 19 nt, Artificial Sequence
  Description of Artificial Sequence: Synthetic oligonucleotide
  Sense strand starting at position 2156 of SEQ ID NO: 587227
aucaguauucuguacauau

SEQ ID NO: 776369 - RNA, 19 nt, Artificial Sequence
  Description of Artificial Sequence: Synthetic oligonucleotide
  Antisense strand to SEQ ID NO: 776368
auauguacagaauacugau

SEQ ID NO: 776370 - RNA, 19 nt, Artificial Sequence
  Description of Artificial Sequence: Synthetic oligonucleotide
  Sense strand starting at position 2264 of SEQ ID NO: 587227
gucuccuaaugagucaaca

SEQ ID NO: 776371 - RNA, 19 nt, Artificial Sequence
  Description of Artificial Sequence: Synthetic oligonucleotide
  Antisense strand to SEQ ID NO: 776370
uguugacucauuaggagac

SEQ ID NO: 776372 - RNA, 19 nt, Artificial Sequence
  Description of Artificial Sequence: Synthetic oligonucleotide
  Sense strand starting at position 2373 of SEQ ID NO: 587227
aagaaaugugcauguauaa

SEQ ID NO: 776373 - RNA, 19 nt, Artificial Sequence
  Description of Artificial Sequence: Synthetic oligonucleotide
  Antisense strand to SEQ ID NO: 776372
uuauacaugcacauuucuu

SEQ ID NO: 776374 - RNA, 19 nt, Artificial Sequence
  Description of Artificial Sequence: Synthetic oligonucleotide
  Sense strand starting at position 2788 of SEQ ID NO: 587227
guguguugaguguccaugu

SEQ ID NO: 776375 - RNA, 19 nt, Artificial Sequence
  Description of Artificial Sequence: Synthetic oligonucleotide
  Antisense strand to SEQ ID NO: 776374
acauggacacucaacacac

SEQ ID NO: 776376 - RNA, 19 nt, Artificial Sequence
  Description of Artificial Sequence: Synthetic oligonucleotide
  Sense strand starting at position 3025 of SEQ ID NO: 587227
cugauacaucugggaguuu

SEQ ID NO: 776377 - RNA, 19 nt, Artificial Sequence
  Description of Artificial Sequence: Synthetic oligonucleotide
  Antisense strand to SEQ ID NO: 776376
aaacucccagauguaucag

SEQ ID NO: 776378 - RNA, 19 nt, Artificial Sequence
  Description of Artificial Sequence: Synthetic oligonucleotide
  Sense strand starting at position 3382 of SEQ ID NO: 587227
uucuacagauguuugaaau

SEQ ID NO: 776379 - RNA, 19 nt, Artificial Sequence
  Description of Artificial Sequence: Synthetic oligonucleotide
  Antisense strand to SEQ ID NO: 776378
auuucaaacaucuguagaa

SEQ ID NO: 776380 - RNA, 19 nt, Artificial Sequence
  Description of Artificial Sequence: Synthetic oligonucleotide
  Sense strand starting at position 3383 of SEQ ID NO: 587227
ucuacagauguuugaaauu

SEQ ID NO: 776381 - RNA, 19 nt, Artificial Sequence
  Description of Artificial Sequence: Synthetic oligonucleotide
  Antisense strand to SEQ ID NO: 776380
aauuucaaacaucuguaga

SEQ ID NO: 776382 - RNA, 19 nt, Artificial Sequence
  Description of Artificial Sequence: Synthetic oligonucleotide
  Sense strand starting at position 3831 of SEQ ID NO: 587227
guaguauuccaucaaauac

SEQ ID NO: 776383 - RNA, 19 nt, Artificial Sequence
  Description of Artificial Sequence: Synthetic oligonucleotide
  Antisense strand to SEQ ID NO: 776382
guauuugauggaauacuac

SEQ ID NO: 776384 - RNA, 19 nt, Artificial Sequence
  Description of Artificial Sequence: Synthetic oligonucleotide
  Sense strand starting at position 3889 of SEQ ID NO: 587227
guauguaugguauacauca

SEQ ID NO: 776385 - RNA, 19 nt, Artificial Sequence
  Description of Artificial Sequence: Synthetic oligonucleotide
  Antisense strand to SEQ ID NO: 776384
ugauguauaccauacauac

SEQ ID NO: 776386 - RNA, 19 nt, Artificial Sequence
  Description of Artificial Sequence: Synthetic oligonucleotide
  Sense strand starting at position 3915 of SEQ ID NO: 587227
gugugugguauauacauau

SEQ ID NO: 776387 - RNA, 19 nt, Artificial Sequence
  Description of Artificial Sequence: Synthetic oligonucleotide
  Antisense strand to SEQ ID NO: 776386
auauguauauaccacacac

SEQ ID NO: 776388 - RNA, 19 nt, Artificial Sequence
  Description of Artificial Sequence: Synthetic oligonucleotide
  Sense strand starting at position 87 of SEQ ID NO: 587228
ccucuaaacugccagaaga

SEQ ID NO: 776389 - RNA, 19 nt, Artificial Sequence
  Description of Artificial Sequence: Synthetic oligonucleotide
  Antisense strand to SEQ ID NO: 776388
ucuucuggcaguuuagagg

SEQ ID NO: 776390 - RNA, 19 nt, Artificial Sequence
  Description of Artificial Sequence: Synthetic oligonucleotide
  Sense strand starting at position 203 of SEQ ID NO: 587228
agccuuccaguuuggacaa

SEQ ID NO: 776391 - RNA, 19 nt, Artificial Sequence
  Description of Artificial Sequence: Synthetic oligonucleotide
  Antisense strand to SEQ ID NO: 776390
uuguccaaacuggaaggcu

SEQ ID NO: 776392 - RNA, 19 nt, Artificial Sequence
  Description of Artificial Sequence: Synthetic oligonucleotide
  Sense strand starting at position 276 of SEQ ID NO: 587228
ugcagucugucugcacaaa

SEQ ID NO: 776393 - RNA, 19 nt, Artificial Sequence
  Description of Artificial Sequence: Synthetic oligonucleotide
  Antisense strand to SEQ ID NO: 776392
uuugugcagacagacugca

SEQ ID NO: 776394 - RNA, 19 nt, Artificial Sequence
  Description of Artificial Sequence: Synthetic oligonucleotide
  Sense strand starting at position 330 of SEQ ID NO: 587228
acagcugacuaccuugaaa

SEQ ID NO: 776395 - RNA, 19 nt, Artificial Sequence
  Description of Artificial Sequence: Synthetic oligonucleotide
  Antisense strand to SEQ ID NO: 776394
uuucaagguagucagcugu

SEQ ID NO: 776396 - RNA, 19 nt, Artificial Sequence
  Description of Artificial Sequence: Synthetic oligonucleotide
  Sense strand starting at position 341 of SEQ ID NO: 587228
ccuugaaagcggcaaguau

SEQ ID NO: 776397 - RNA, 19 nt, Artificial Sequence
  Description of Artificial Sequence: Synthetic oligonucleotide
  Antisense strand to SEQ ID NO: 776396
auacuugccgcuuucaagg

SEQ ID NO: 776398 - RNA, 19 nt, Artificial Sequence
  Description of Artificial Sequence: Synthetic oligonucleotide
  Sense strand starting at position 353 of SEQ ID NO: 587228
caaguauucugagugguaa

SEQ ID NO: 776399 - RNA, 19 nt, Artificial Sequence
  Description of Artificial Sequence: Synthetic oligonucleotide
  Antisense strand to SEQ ID NO: 776398
uuaccacucagaauacuug

SEQ ID NO: 776400 - RNA, 19 nt, Artificial Sequence
  Description of Artificial Sequence: Synthetic oligonucleotide
  Sense strand starting at position 354 of SEQ ID NO: 587228
aaguauucugagugguaac

SEQ ID NO: 776401 - RNA, 19 nt, Artificial Sequence
  Description of Artificial Sequence: Synthetic oligonucleotide
  Antisense strand to SEQ ID NO: 776400
guuaccacucagaauacuu

SEQ ID NO: 776402 - RNA, 19 nt, Artificial Sequence
  Description of Artificial Sequence: Synthetic oligonucleotide
  Sense strand starting at position 355 of SEQ ID NO: 587228
aguauucugagugguaaca

SEQ ID NO: 776403 - RNA, 19 nt, Artificial Sequence
  Description of Artificial Sequence: Synthetic oligonucleotide
  Antisense strand to SEQ ID NO: 776402
uguuaccacucagaauacu

SEQ ID NO: 776404 - RNA, 19 nt, Artificial Sequence
  Description of Artificial Sequence: Synthetic oligonucleotide
  Sense strand starting at position 533 of SEQ ID NO: 587228
ucagaaugaugccagaaac

SEQ ID NO: 776405 - RNA, 19 nt, Artificial Sequence
  Description of Artificial Sequence: Synthetic oligonucleotide
  Antisense strand to SEQ ID NO: 776404
guuucuggcaucauucuga

SEQ ID NO: 776406 - RNA, 19 nt, Artificial Sequence
  Description of Artificial Sequence: Synthetic oligonucleotide
  Sense strand starting at position 867 of SEQ ID NO: 587228
aagacuuugucaccuggaa

SEQ ID NO: 776407 - RNA, 19 nt, Artificial Sequence
  Description of Artificial Sequence: Synthetic oligonucleotide
  Antisense strand to SEQ ID NO: 776406
uuccaggugacaaagucuu

SEQ ID NO: 776408 - RNA, 19 nt, Artificial Sequence
  Description of Artificial Sequence: Synthetic oligonucleotide
  Sense strand starting at position 962 of SEQ ID NO: 587228
ccguccaucugugcuauuu

SEQ ID NO: 776409 - RNA, 19 nt, Artificial Sequence
  Description of Artificial Sequence: Synthetic oligonucleotide
  Antisense strand to SEQ ID NO: 776408
aaauagcacagauggacgg

SEQ ID NO: 776410 - RNA, 19 nt, Artificial Sequence
  Description of Artificial Sequence: Synthetic oligonucleotide
  Sense strand starting at position 998 of SEQ ID NO: 587228
gcuagcuuaucgccaaaca

SEQ ID NO: 776411 - RNA, 19 nt, Artificial Sequence
  Description of Artificial Sequence: Synthetic oligonucleotide
  Antisense strand to SEQ ID NO: 776410
uguuuggcgauaagcuagc

SEQ ID NO: 776412 - RNA, 19 nt, Artificial Sequence
  Description of Artificial Sequence: Synthetic oligonucleotide
  Sense strand starting at position 1087 of SEQ ID NO: 587228
uggguaagaugcgugucaa

SEQ ID NO: 776413 - RNA, 19 nt, Artificial Sequence
  Description of Artificial Sequence: Synthetic oligonucleotide
  Antisense strand to SEQ ID NO: 776412
uugacacgcaucuuaccca

SEQ ID NO: 776414 - RNA, 19 nt, Artificial Sequence
  Description of Artificial Sequence: Synthetic oligonucleotide
  Sense strand starting at position 1088 of SEQ ID NO: 587228
ggguaagaugcgugucaag

SEQ ID NO: 776415 - RNA, 19 nt, Artificial Sequence
  Description of Artificial Sequence: Synthetic oligonucleotide
  Antisense strand to SEQ ID NO: 776414
cuugacacgcaucuuaccc

SEQ ID NO: 776416 - RNA, 19 nt, Artificial Sequence
  Description of Artificial Sequence: Synthetic oligonucleotide
  Sense strand starting at position 1355 of SEQ ID NO: 587228
cagggaggcguccgugauu

SEQ ID NO: 776417 - RNA, 19 nt, Artificial Sequence
  Description of Artificial Sequence: Synthetic oligonucleotide
  Antisense strand to SEQ ID NO: 776416
aaucacggacgccucccug

SEQ ID NO: 776418 - RNA, 19 nt, Artificial Sequence
  Description of Artificial Sequence: Synthetic oligonucleotide
  Sense strand starting at position 1530 of SEQ ID NO: 587228
cgcggcucccgccugaaau

SEQ ID NO: 776419 - RNA, 19 nt, Artificial Sequence
  Description of Artificial Sequence: Synthetic oligonucleotide
  Antisense strand to SEQ ID NO: 776418
auuucaggcgggagccgcg

SEQ ID NO: 776420 - RNA, 19 nt, Artificial Sequence
  Description of Artificial Sequence: Synthetic oligonucleotide
  Sense strand starting at position 2224 of SEQ ID NO: 587228
gugagaagcacguggauaa

SEQ ID NO: 776421 - RNA, 19 nt, Artificial Sequence
  Description of Artificial Sequence: Synthetic oligonucleotide
  Antisense strand to SEQ ID NO: 776420
uuauccacgugcuucucac

SEQ ID NO: 776422 - RNA, 19 nt, Artificial Sequence
  Description of Artificial Sequence: Synthetic oligonucleotide
  Sense strand starting at position 2225 of SEQ ID NO: 587228
ugagaagcacguggauaau

SEQ ID NO: 776423 - RNA, 19 nt, Artificial Sequence
  Description of Artificial Sequence: Synthetic oligonucleotide
  Antisense strand to SEQ ID NO: 776422
auuauccacgugcuucuca

SEQ ID NO: 776424 - RNA, 19 nt, Artificial Sequence
  Description of Artificial Sequence: Synthetic oligonucleotide
  Sense strand starting at position 2295 of SEQ ID NO: 587228
ucuuuaacacuccgugcua

SEQ ID NO: 776425 - RNA, 19 nt, Artificial Sequence
  Description of Artificial Sequence: Synthetic oligonucleotide
  Antisense strand to SEQ ID NO: 776424
uagcacggaguguuaaaga

SEQ ID NO: 776426 - RNA, 19 nt, Artificial Sequence
  Description of Artificial Sequence: Synthetic oligonucleotide
  Sense strand starting at position 2296 of SEQ ID NO: 587228
cuuuaacacuccgugcuau

SEQ ID NO: 776427 - RNA, 19 nt, Artificial Sequence
  Description of Artificial Sequence: Synthetic oligonucleotide
  Antisense strand to SEQ ID NO: 776426
auagcacggaguguuaaag

SEQ ID NO: 776428 - RNA, 19 nt, Artificial Sequence
  Description of Artificial Sequence: Synthetic oligonucleotide
  Sense strand starting at position 2297 of SEQ ID NO: 587228
uuuaacacuccgugcuaua

SEQ ID NO: 776429 - RNA, 19 nt, Artificial Sequence
  Description of Artificial Sequence: Synthetic oligonucleotide
  Antisense strand to SEQ ID NO: 776428
uauagcacggaguguuaaa

SEQ ID NO: 776430 - RNA, 19 nt, Artificial Sequence
  Description of Artificial Sequence: Synthetic oligonucleotide
  Sense strand starting at position 2307 of SEQ ID NO: 587228
cgugcuauagugugauuag

SEQ ID NO: 776431 - RNA, 19 nt, Artificial Sequence
  Description of Artificial Sequence: Synthetic oligonucleotide
  Antisense strand to SEQ ID NO: 776430
cuaaucacacuauagcacg

SEQ ID NO: 776432 - RNA, 19 nt, Artificial Sequence
  Description of Artificial Sequence: Synthetic oligonucleotide
  Sense strand starting at position 2316 of SEQ ID NO: 587228
gugugauuagcgugaaucu

SEQ ID NO: 776433 - RNA, 19 nt, Artificial Sequence
  Description of Artificial Sequence: Synthetic oligonucleotide
  Antisense strand to SEQ ID NO: 776432
agauucacgcuaaucacac

SEQ ID NO: 776434 - RNA, 19 nt, Artificial Sequence
  Description of Artificial Sequence: Synthetic oligonucleotide
  Sense strand starting at position 2317 of SEQ ID NO: 587228
ugugauuagcgugaaucuc

SEQ ID NO: 776435 - RNA, 19 nt, Artificial Sequence
  Description of Artificial Sequence: Synthetic oligonucleotide
  Antisense strand to SEQ ID NO: 776434
gagauucacgcuaaucaca

SEQ ID NO: 776436 - RNA, 19 nt, Artificial Sequence
  Description of Artificial Sequence: Synthetic oligonucleotide
  Sense strand starting at position 2323 of SEQ ID NO: 587228
uagcgugaaucucuuuaac

SEQ ID NO: 776437 - RNA, 19 nt, Artificial Sequence
  Description of Artificial Sequence: Synthetic oligonucleotide
  Antisense strand to SEQ ID NO: 776436
guuaaagagauucacgcua

SEQ ID NO: 776438 - RNA, 19 nt, Artificial Sequence
  Description of Artificial Sequence: Synthetic oligonucleotide
  Sense strand starting at position 2325 of SEQ ID NO: 587228
gcgugaaucucuuuaaccu

SEQ ID NO: 776439 - RNA, 19 nt, Artificial Sequence
  Description of Artificial Sequence: Synthetic oligonucleotide
  Antisense strand to SEQ ID NO: 776438
agguuaaagagauucacgc

SEQ ID NO: 776440 - RNA, 19 nt, Artificial Sequence
  Description of Artificial Sequence: Synthetic oligonucleotide
  Sense strand starting at position 2326 of SEQ ID NO: 587228
cgugaaucucuuuaaccuc

SEQ ID NO: 776441 - RNA, 19 nt, Artificial Sequence
  Description of Artificial Sequence: Synthetic oligonucleotide
  Antisense strand to SEQ ID NO: 776440
gagguuaaagagauucacg

SEQ ID NO: 776442 - RNA, 19 nt, Artificial Sequence
  Description of Artificial Sequence: Synthetic oligonucleotide
  Sense strand starting at position 2535 of SEQ ID NO: 587228
uucuuaugggaacgucagu

SEQ ID NO: 776443 - RNA, 19 nt, Artificial Sequence
  Description of Artificial Sequence: Synthetic oligonucleotide
  Antisense strand to SEQ ID NO: 776442
acugacguucccauaagaa

SEQ ID NO: 776444 - RNA, 19 nt, Artificial Sequence
  Description of Artificial Sequence: Synthetic oligonucleotide
  Sense strand starting at position 2587 of SEQ ID NO: 587228
ugcuacucacucugugaca

SEQ ID NO: 776445 - RNA, 19 nt, Artificial Sequence
  Description of Artificial Sequence: Synthetic oligonucleotide
  Antisense strand to SEQ ID NO: 776444
ugucacagagugaguagca

SEQ ID NO: 776446 - RNA, 19 nt, Artificial Sequence
  Description of Artificial Sequence: Synthetic oligonucleotide
  Sense strand starting at position 2888 of SEQ ID NO: 587228
cugagucagcuuggccuaa

SEQ ID NO: 776447 - RNA, 19 nt, Artificial Sequence
  Description of Artificial Sequence: Synthetic oligonucleotide
  Antisense strand to SEQ ID NO: 776446
uuaggccaagcugacucag

SEQ ID NO: 776448 - RNA, 19 nt, Artificial Sequence
  Description of Artificial Sequence: Synthetic oligonucleotide
  Sense strand starting at position 3199 of SEQ ID NO: 587228
guccucaucuucuuacagu

SEQ ID NO: 776449 - RNA, 19 nt, Artificial Sequence
  Description of Artificial Sequence: Synthetic oligonucleotide
  Antisense strand to SEQ ID NO: 776448
acuguaagaagaugaggac

SEQ ID NO: 776450 - RNA, 19 nt, Artificial Sequence
  Description of Artificial Sequence: Synthetic oligonucleotide
  Sense strand starting at position 3335 of SEQ ID NO: 587228
cugugaagucucugucauc

SEQ ID NO: 776451 - RNA, 19 nt, Artificial Sequence
  Description of Artificial Sequence: Synthetic oligonucleotide
  Antisense strand to SEQ ID NO: 776450
gaugacagagacuucacag

SEQ ID NO: 776452 - RNA, 19 nt, Artificial Sequence
  Description of Artificial Sequence: Synthetic oligonucleotide
  Sense strand starting at position 3361 of SEQ ID NO: 587228
ucaaguuugcugggcucaa

SEQ ID NO: 776453 - RNA, 19 nt, Artificial Sequence
  Description of Artificial Sequence: Synthetic oligonucleotide
  Antisense strand to SEQ ID NO: 776452
uugagcccagcaaacuuga

SEQ ID NO: 776454 - RNA, 19 nt, Artificial Sequence
  Description of Artificial Sequence: Synthetic oligonucleotide
  Sense strand starting at position 3362 of SEQ ID NO: 587228
caaguuugcugggcucaau

SEQ ID NO: 776455 - RNA, 19 nt, Artificial Sequence
  Description of Artificial Sequence: Synthetic oligonucleotide
  Antisense strand to SEQ ID NO: 776454
auugagcccagcaaacuug

SEQ ID NO: 776456 - RNA, 19 nt, Artificial Sequence
  Description of Artificial Sequence: Synthetic oligonucleotide
  Sense strand starting at position 3365 of SEQ ID NO: 587228
guuugcugggcucaaugau

SEQ ID NO: 776457 - RNA, 19 nt, Artificial Sequence
  Description of Artificial Sequence: Synthetic oligonucleotide
  Antisense strand to SEQ ID NO: 776456
aucauugagcccagcaaac

SEQ ID NO: 776458 - RNA, 19 nt, Artificial Sequence
  Description of Artificial Sequence: Synthetic oligonucleotide
  Sense strand starting at position 3377 of SEQ ID NO: 587228
caaugauucugugugcccu

SEQ ID NO: 776459 - RNA, 19 nt, Artificial Sequence
  Description of Artificial Sequence: Synthetic oligonucleotide
  Antisense strand to SEQ ID NO: 776458
agggcacacagaaucauug

SEQ ID NO: 776460 - RNA, 19 nt, Artificial Sequence
  Description of Artificial Sequence: Synthetic oligonucleotide
  Sense strand starting at position 3418 of SEQ ID NO: 587228
gggauuggccuccagucuu

SEQ ID NO: 776461 - RNA, 19 nt, Artificial Sequence
  Description of Artificial Sequence: Synthetic oligonucleotide
  Antisense strand to SEQ ID NO: 776460
aagacuggaggccaauccc

SEQ ID NO: 776462 - RNA, 19 nt, Artificial Sequence
  Description of Artificial Sequence: Synthetic oligonucleotide
  Sense strand starting at position 3514 of SEQ ID NO: 587228
guguucucauuugcuaaca

SEQ ID NO: 776463 - RNA, 19 nt, Artificial Sequence
  Description of Artificial Sequence: Synthetic oligonucleotide
  Antisense strand to SEQ ID NO: 776462
uguuagcaaaugagaacac

SEQ ID NO: 776464 - RNA, 19 nt, Artificial Sequence
  Description of Artificial Sequence: Synthetic oligonucleotide
  Sense strand starting at position 3545 of SEQ ID NO: 587228
ggcaaccuuuccucuguaa

SEQ ID NO: 776465 - RNA, 19 nt, Artificial Sequence
  Description of Artificial Sequence: Synthetic oligonucleotide
  Antisense strand to SEQ ID NO: 776464
uuacagaggaaagguugcc

SEQ ID NO: 776466 - RNA, 19 nt, Artificial Sequence
  Description of Artificial Sequence: Synthetic oligonucleotide
  Sense strand starting at position 3549 of SEQ ID NO: 587228
accuuuccucuguaaugga

SEQ ID NO: 776467 - RNA, 19 nt, Artificial Sequence
  Description of Artificial Sequence: Synthetic oligonucleotide
  Antisense strand to SEQ ID NO: 776466
uccauuacagaggaaaggu

SEQ ID NO: 776468 - RNA, 19 nt, Artificial Sequence
  Description of Artificial Sequence: Synthetic oligonucleotide
  Sense strand starting at position 159 of SEQ ID NO: 587229
cgugucaugagagaagaua

SEQ ID NO: 776469 - RNA, 19 nt, Artificial Sequence
  Description of Artificial Sequence: Synthetic oligonucleotide
  Antisense strand to SEQ ID NO: 776468
uaucuucucucaugacacg

SEQ ID NO: 776470 - RNA, 19 nt, Artificial Sequence
  Description of Artificial Sequence: Synthetic oligonucleotide
  Sense strand starting at position 172 of SEQ ID NO: 587229
aagauaucauguuugguca

SEQ ID NO: 776471 - RNA, 19 nt, Artificial Sequence
  Description of Artificial Sequence: Synthetic oligonucleotide
  Antisense strand to SEQ ID NO: 776470
ugaccaaacaugauaucuu

SEQ ID NO: 776472 - RNA, 19 nt, Artificial Sequence
  Description of Artificial Sequence: Synthetic oligonucleotide
  Sense strand starting at position 183 of SEQ ID NO: 587229
uuuggucaccaaggcaaua

SEQ ID NO: 776473 - RNA, 19 nt, Artificial Sequence
  Description of Artificial Sequence: Synthetic oligonucleotide
  Antisense strand to SEQ ID NO: 776472
uauugccuuggugaccaaa

SEQ ID NO: 776474 - RNA, 19 nt, Artificial Sequence
  Description of Artificial Sequence: Synthetic oligonucleotide
  Sense strand starting at position 223 of SEQ ID NO: 587229
gugucauaggauuguuuga

SEQ ID NO: 776475 - RNA, 19 nt, Artificial Sequence
  Description of Artificial Sequence: Synthetic oligonucleotide
  Antisense strand to SEQ ID NO: 776474
ucaaacaauccuaugacac

SEQ ID NO: 776476 - RNA, 19 nt, Artificial Sequence
  Description of Artificial Sequence: Synthetic oligonucleotide
  Sense strand starting at position 225 of SEQ ID NO: 587229
gucauaggauuguuugaag

SEQ ID NO: 776477 - RNA, 19 nt, Artificial Sequence
  Description of Artificial Sequence: Synthetic oligonucleotide
  Antisense strand to SEQ ID NO: 776476
cuucaaacaauccuaugac

SEQ ID NO: 776478 - RNA, 19 nt, Artificial Sequence
  Description of Artificial Sequence: Synthetic oligonucleotide
  Sense strand starting at position 242 of SEQ ID NO: 587229
aggauuggaugacauaaca

SEQ ID NO: 776479 - RNA, 19 nt, Artificial Sequence
  Description of Artificial Sequence: Synthetic oligonucleotide
  Antisense strand to SEQ ID NO: 776478
uguuaugucauccaauccu

SEQ ID NO: 776480 - RNA, 19 nt, Artificial Sequence
  Description of Artificial Sequence: Synthetic oligonucleotide
  Sense strand starting at position 266 of SEQ ID NO: 587229
aguacucagcacugacaau

SEQ ID NO: 776481 - RNA, 19 nt, Artificial Sequence
  Description of Artificial Sequence: Synthetic oligonucleotide
  Antisense strand to SEQ ID NO: 776480
auugucagugcugaguacu

SEQ ID NO: 776482 - RNA, 19 nt, Artificial Sequence
  Description of Artificial Sequence: Synthetic oligonucleotide
  Sense strand starting at position 283 of SEQ ID NO: 587229
aucaguauguguuuaacaa

SEQ ID NO: 776483 - RNA, 19 nt, Artificial Sequence
  Description of Artificial Sequence: Synthetic oligonucleotide
  Antisense strand to SEQ ID NO: 776482
uuguuaaacacauacugau

SEQ ID NO: 776484 - RNA, 19 nt, Artificial Sequence
  Description of Artificial Sequence: Synthetic oligonucleotide
  Sense strand starting at position 284 of SEQ ID NO: 587229
ucaguauguguuuaacaaa

SEQ ID NO: 776485 - RNA, 19 nt, Artificial Sequence
  Description of Artificial Sequence: Synthetic oligonucleotide
  Antisense strand to SEQ ID NO: 776484
uuuguuaaacacauacuga

SEQ ID NO: 776486 - RNA, 19 nt, Artificial Sequence
  Description of Artificial Sequence: Synthetic oligonucleotide
  Sense strand starting at position 301 of SEQ ID NO: 587229
aauguauguuccuuugaga

SEQ ID NO: 776487 - RNA, 19 nt, Artificial Sequence
  Description of Artificial Sequence: Synthetic oligonucleotide
  Antisense strand to SEQ ID NO: 776486
ucucaaaggaacauacauu

SEQ ID NO: 776488 - RNA, 19 nt, Artificial Sequence
  Description of Artificial Sequence: Synthetic oligonucleotide
  Sense strand starting at position 314 of SEQ ID NO: 587229
uugagaacugaggguuugu

SEQ ID NO: 776489 - RNA, 19 nt, Artificial Sequence
  Description of Artificial Sequence: Synthetic oligonucleotide
  Antisense strand to SEQ ID NO: 776488
acaaacccucaguucucaa

SEQ ID NO: 776490 - RNA, 19 nt, Artificial Sequence
  Description of Artificial Sequence: Synthetic oligonucleotide
  Sense strand starting at position 323 of SEQ ID NO: 587229
gaggguuuguggcuuagag

SEQ ID NO: 776491 - RNA, 19 nt, Artificial Sequence
  Description of Artificial Sequence: Synthetic oligonucleotide
  Antisense strand to SEQ ID NO: 776490
cucuaagccacaaacccuc

SEQ ID NO: 776492 - RNA, 19 nt, Artificial Sequence
  Description of Artificial Sequence: Synthetic oligonucleotide
  Sense strand starting at position 325 of SEQ ID NO: 587229
ggguuuguggcuuagagau

SEQ ID NO: 776493 - RNA, 19 nt, Artificial Sequence
  Description of Artificial Sequence: Synthetic oligonucleotide
  Antisense strand to SEQ ID NO: 776492
aucucuaagccacaaaccc

SEQ ID NO: 776494 - RNA, 19 nt, Artificial Sequence
  Description of Artificial Sequence: Synthetic oligonucleotide
  Sense strand starting at position 331 of SEQ ID NO: 587229
guggcuuagagauacggaa

SEQ ID NO: 776495 - RNA, 19 nt, Artificial Sequence
  Description of Artificial Sequence: Synthetic oligonucleotide
  Antisense strand to SEQ ID NO: 776494
uuccguaucucuaagccac

SEQ ID NO: 776496 - RNA, 19 nt, Artificial Sequence
  Description of Artificial Sequence: Synthetic oligonucleotide
  Sense strand starting at position 391 of SEQ ID NO: 587229
ugcgacucuccugaggaga

SEQ ID NO: 776497 - RNA, 19 nt, Artificial Sequence
  Description of Artificial Sequence: Synthetic oligonucleotide
  Antisense strand to SEQ ID NO: 776496
ucuccucaggagagucgca

SEQ ID NO: 776498 - RNA, 19 nt, Artificial Sequence
  Description of Artificial Sequence: Synthetic oligonucleotide
  Sense strand starting at position 410 of SEQ ID NO: 587229
gauguuaaggaauggguca

SEQ ID NO: 776499 - RNA, 19 nt, Artificial Sequence
  Description of Artificial Sequence: Synthetic oligonucleotide
  Antisense strand to SEQ ID NO: 776498
ugacccauuccuuaacauc

SEQ ID NO: 776500 - RNA, 19 nt, Artificial Sequence
  Description of Artificial Sequence: Synthetic oligonucleotide
  Sense strand starting at position 417 of SEQ ID NO: 587229
aggaaugggucaccuucua

SEQ ID NO: 776501 - RNA, 19 nt, Artificial Sequence
  Description of Artificial Sequence: Synthetic oligonucleotide
  Antisense strand to SEQ ID NO: 776500
uagaaggugacccauuccu

SEQ ID NO: 776502 - RNA, 19 nt, Artificial Sequence
  Description of Artificial Sequence: Synthetic oligonucleotide
  Sense strand starting at position 430 of SEQ ID NO: 587229
cuucuaaaucuggaugcuu

SEQ ID NO: 776503 - RNA, 19 nt, Artificial Sequence
  Description of Artificial Sequence: Synthetic oligonucleotide
  Antisense strand to SEQ ID NO: 776502
aagcauccagauuuagaag

SEQ ID NO: 776504 - RNA, 19 nt, Artificial Sequence
  Description of Artificial Sequence: Synthetic oligonucleotide
  Sense strand starting at position 516 of SEQ ID NO: 587229
cagacuuucuuagcugaug

SEQ ID NO: 776505 - RNA, 19 nt, Artificial Sequence
  Description of Artificial Sequence: Synthetic oligonucleotide
  Antisense strand to SEQ ID NO: 776504
caucagcuaagaaagucug

SEQ ID NO: 776506 - RNA, 19 nt, Artificial Sequence
  Description of Artificial Sequence: Synthetic oligonucleotide
  Sense strand starting at position 567 of SEQ ID NO: 587229
aaggguagaguugguagaa

SEQ ID NO: 776507 - RNA, 19 nt, Artificial Sequence
  Description of Artificial Sequence: Synthetic oligonucleotide
  Antisense strand to SEQ ID NO: 776506
uucuaccaacucuacccuu

SEQ ID NO: 776508 - RNA, 19 nt, Artificial Sequence
  Description of Artificial Sequence: Synthetic oligonucleotide
  Sense strand starting at position 568 of SEQ ID NO: 587229
aggguagaguugguagaaa

SEQ ID NO: 776509 - RNA, 19 nt, Artificial Sequence
  Description of Artificial Sequence: Synthetic oligonucleotide
  Antisense strand to SEQ ID NO: 776508
uuucuaccaacucuacccu

SEQ ID NO: 776510 - RNA, 19 nt, Artificial Sequence
  Description of Artificial Sequence: Synthetic oligonucleotide
  Sense strand starting at position 660 of SEQ ID NO: 587229
ggcacugugccagacugaa

SEQ ID NO: 776511 - RNA, 19 nt, Artificial Sequence
  Description of Artificial Sequence: Synthetic oligonucleotide
  Antisense strand to SEQ ID NO: 776510
uucagucuggcacagugcc

SEQ ID NO: 776512 - RNA, 19 nt, Artificial Sequence
  Description of Artificial Sequence: Synthetic oligonucleotide
  Sense strand starting at position 778 of SEQ ID NO: 587229
gaguuaccugguugaugga

SEQ ID NO: 776513 - RNA, 19 nt, Artificial Sequence
  Description of Artificial Sequence: Synthetic oligonucleotide
  Antisense strand to SEQ ID NO: 776512
uccaucaaccagguaacuc

SEQ ID NO: 776514 - RNA, 19 nt, Artificial Sequence
  Description of Artificial Sequence: Synthetic oligonucleotide
  Sense strand starting at position 814 of SEQ ID NO: 587229
guaugaccacuuggaggau

SEQ ID NO: 776515 - RNA, 19 nt, Artificial Sequence
  Description of Artificial Sequence: Synthetic oligonucleotide
  Antisense strand to SEQ ID NO: 776514
auccuccaaguggucauac

SEQ ID NO: 776516 - RNA, 19 nt, Artificial Sequence
  Description of Artificial Sequence: Synthetic oligonucleotide
  Sense strand starting at position 970 of SEQ ID NO: 587229
ccaggaucuggguggucau

SEQ ID NO: 776517 - RNA, 19 nt, Artificial Sequence
  Description of Artificial Sequence: Synthetic oligonucleotide
  Antisense strand to SEQ ID NO: 776516
augaccacccagauccugg

SEQ ID NO: 776518 - RNA, 19 nt, Artificial Sequence
  Description of Artificial Sequence: Synthetic oligonucleotide
  Sense strand starting at position 1075 of SEQ ID NO: 587229
ccucaaugccggugaagaa

SEQ ID NO: 776519 - RNA, 19 nt, Artificial Sequence
  Description of Artificial Sequence: Synthetic oligonucleotide
  Antisense strand to SEQ ID NO: 776518
uucuucaccggcauugagg

SEQ ID NO: 776520 - RNA, 19 nt, Artificial Sequence
  Description of Artificial Sequence: Synthetic oligonucleotide
  Sense strand starting at position 1150 of SEQ ID NO: 587229
ggaccaagagagugaguuu

SEQ ID NO: 776521 - RNA, 19 nt, Artificial Sequence
  Description of Artificial Sequence: Synthetic oligonucleotide
  Antisense strand to SEQ ID NO: 776520
aaacucacucucuuggucc

SEQ ID NO: 776522 - RNA, 19 nt, Artificial Sequence
  Description of Artificial Sequence: Synthetic oligonucleotide
  Sense strand starting at position 1161 of SEQ ID NO: 587229
gugaguuuggucagcacgu

SEQ ID NO: 776523 - RNA, 19 nt, Artificial Sequence
  Description of Artificial Sequence: Synthetic oligonucleotide
  Antisense strand to SEQ ID NO: 776522
acgugcugaccaaacucac

SEQ ID NO: 776524 - RNA, 19 nt, Artificial Sequence
  Description of Artificial Sequence: Synthetic oligonucleotide
  Sense strand starting at position 1221 of SEQ ID NO: 587229
aagaaauagcgcugguaga

SEQ ID NO: 776525 - RNA, 19 nt, Artificial Sequence
  Description of Artificial Sequence: Synthetic oligonucleotide
  Antisense strand to SEQ ID NO: 776524
ucuaccagcgcuauuucuu

SEQ ID NO: 776526 - RNA, 19 nt, Artificial Sequence
  Description of Artificial Sequence: Synthetic oligonucleotide
  Sense strand starting at position 1408 of SEQ ID NO: 587229
ugcguuccgggaagacuuu

SEQ ID NO: 776527 - RNA, 19 nt, Artificial Sequence
  Description of Artificial Sequence: Synthetic oligonucleotide
  Antisense strand to SEQ ID NO: 776526
aaagucuucccggaacgca

SEQ ID NO: 776528 - RNA, 19 nt, Artificial Sequence
  Description of Artificial Sequence: Synthetic oligonucleotide
  Sense strand starting at position 1686 of SEQ ID NO: 587229
ggguggaugguguagaguu

SEQ ID NO: 776529 - RNA, 19 nt, Artificial Sequence
  Description of Artificial Sequence: Synthetic oligonucleotide
  Antisense strand to SEQ ID NO: 776528
aacucuacaccauccaccc

SEQ ID NO: 776530 - RNA, 19 nt, Artificial Sequence
  Description of Artificial Sequence: Synthetic oligonucleotide
  Sense strand starting at position 2269 of SEQ ID NO: 587229
agcagauguggcuggaauc

SEQ ID NO: 776531 - RNA, 19 nt, Artificial Sequence
  Description of Artificial Sequence: Synthetic oligonucleotide
  Antisense strand to SEQ ID NO: 776530
gauuccagccacaucugcu

SEQ ID NO: 776532 - RNA, 19 nt, Artificial Sequence
  Description of Artificial Sequence: Synthetic oligonucleotide
  Sense strand starting at position 2270 of SEQ ID NO: 587229
gcagauguggcuggaauca

SEQ ID NO: 776533 - RNA, 19 nt, Artificial Sequence
  Description of Artificial Sequence: Synthetic oligonucleotide
  Antisense strand to SEQ ID NO: 776532
ugauuccagccacaucugc

SEQ ID NO: 776534 - RNA, 19 nt, Artificial Sequence
  Description of Artificial Sequence: Synthetic oligonucleotide
  Sense strand starting at position 2681 of SEQ ID NO: 587229
uccauuuggcucggagcua

SEQ ID NO: 776535 - RNA, 19 nt, Artificial Sequence
  Description of Artificial Sequence: Synthetic oligonucleotide
  Antisense strand to SEQ ID NO: 776534
uagcuccgagccaaaugga

SEQ ID NO: 776536 - RNA, 19 nt, Artificial Sequence
  Description of Artificial Sequence: Synthetic oligonucleotide
  Sense strand starting at position 2786 of SEQ ID NO: 587229
gauaucugaggcugagaac

SEQ ID NO: 776537 - RNA, 19 nt, Artificial Sequence
  Description of Artificial Sequence: Synthetic oligonucleotide
  Antisense strand to SEQ ID NO: 776536
guucucagccucagauauc

SEQ ID NO: 776538 - RNA, 19 nt, Artificial Sequence
  Description of Artificial Sequence: Synthetic oligonucleotide
  Sense strand starting at position 2965 of SEQ ID NO: 587229
accugucagaguggucaga

SEQ ID NO: 776539 - RNA, 19 nt, Artificial Sequence
  Description of Artificial Sequence: Synthetic oligonucleotide
  Antisense strand to SEQ ID NO: 776538
ucugaccacucugacaggu

SEQ ID NO: 776540 - RNA, 19 nt, Artificial Sequence
  Description of Artificial Sequence: Synthetic oligonucleotide
  Sense strand starting at position 2967 of SEQ ID NO: 587229
cugucagaguggucagaca

SEQ ID NO: 776541 - RNA, 19 nt, Artificial Sequence
  Description of Artificial Sequence: Synthetic oligonucleotide
  Antisense strand to SEQ ID NO: 776540
ugucugaccacucugacag

SEQ ID NO: 776542 - RNA, 19 nt, Artificial Sequence
  Description of Artificial Sequence: Synthetic oligonucleotide
  Sense strand starting at position 3521 of SEQ ID NO: 587229
aguuucuccgcuuacaaua

SEQ ID NO: 776543 - RNA, 19 nt, Artificial Sequence
  Description of Artificial Sequence: Synthetic oligonucleotide
  Antisense strand to SEQ ID NO: 776542
uauuguaagcggagaaacu

SEQ ID NO: 776544 - RNA, 19 nt, Artificial Sequence
  Description of Artificial Sequence: Synthetic oligonucleotide
  Sense strand starting at position 3687 of SEQ ID NO: 587229
agcuuagugccggugcuaa

SEQ ID NO: 776545 - RNA, 19 nt, Artificial Sequence
  Description of Artificial Sequence: Synthetic oligonucleotide
  Antisense strand to SEQ ID NO: 776544
uuagcaccggcacuaagcu

SEQ ID NO: 776546 - RNA, 19 nt, Artificial Sequence
  Description of Artificial Sequence: Synthetic oligonucleotide
  Sense strand starting at position 3695 of SEQ ID NO: 587229
gccggugcuaaugacagau

SEQ ID NO: 776547 - RNA, 19 nt, Artificial Sequence
  Description of Artificial Sequence: Synthetic oligonucleotide
  Antisense strand to SEQ ID NO: 776546
aucugucauuagcaccggc

SEQ ID NO: 776548 - RNA, 19 nt, Artificial Sequence
  Description of Artificial Sequence: Synthetic oligonucleotide
  Sense strand starting at position 47 of SEQ ID NO: 587230
uguuuccuucuagguuaga

SEQ ID NO: 776549 - RNA, 19 nt, Artificial Sequence
  Description of Artificial Sequence: Synthetic oligonucleotide
  Antisense strand to SEQ ID NO: 776548
ucuaaccuagaaggaaaca

SEQ ID NO: 776550 - RNA, 19 nt, Artificial Sequence
  Description of Artificial Sequence: Synthetic oligonucleotide
  Sense strand starting at position 50 of SEQ ID NO: 587230
uuccuucuagguuagaguu

SEQ ID NO: 776551 - RNA, 19 nt, Artificial Sequence
  Description of Artificial Sequence: Synthetic oligonucleotide
  Antisense strand to SEQ ID NO: 776550
aacucuaaccuagaaggaa

SEQ ID NO: 776552 - RNA, 19 nt, Artificial Sequence
  Description of Artificial Sequence: Synthetic oligonucleotide
  Sense strand starting at position 171 of SEQ ID NO: 587230
cugaauguaccagaagcau

SEQ ID NO: 776553 - RNA, 19 nt, Artificial Sequence
  Description of Artificial Sequence: Synthetic oligonucleotide
  Antisense strand to SEQ ID NO: 776552
augcuucugguacauucag

SEQ ID NO: 776554 - RNA, 19 nt, Artificial Sequence
  Description of Artificial Sequence: Synthetic oligonucleotide
  Sense strand starting at position 177 of SEQ ID NO: 587230
guaccagaagcaugcucaa

SEQ ID NO: 776555 - RNA, 19 nt, Artificial Sequence
  Description of Artificial Sequence: Synthetic oligonucleotide
  Antisense strand to SEQ ID NO: 776554
uugagcaugcuucugguac

SEQ ID NO: 776556 - RNA, 19 nt, Artificial Sequence
  Description of Artificial Sequence: Synthetic oligonucleotide
  Sense strand starting at position 263 of SEQ ID NO: 587230
gguaaaugagcccacuguu

SEQ ID NO: 776557 - RNA, 19 nt, Artificial Sequence
  Description of Artificial Sequence: Synthetic oligonucleotide
  Antisense strand to SEQ ID NO: 776556
aacagugggcucauuuacc

SEQ ID NO: 776558 - RNA, 19 nt, Artificial Sequence
  Description of Artificial Sequence: Synthetic oligonucleotide
  Sense strand starting at position 336 of SEQ ID NO: 587230
uguggauucuaaccaaccu

SEQ ID NO: 776559 - RNA, 19 nt, Artificial Sequence
  Description of Artificial Sequence: Synthetic oligonucleotide
  Antisense strand to SEQ ID NO: 776558
agguugguuagaauccaca

SEQ ID NO: 776560 - RNA, 19 nt, Artificial Sequence
  Description of Artificial Sequence: Synthetic oligonucleotide
  Sense strand starting at position 393 of SEQ ID NO: 587230
gcaugaagccauuaucuuc

SEQ ID NO: 776561 - RNA, 19 nt, Artificial Sequence
  Description of Artificial Sequence: Synthetic oligonucleotide
  Antisense strand to SEQ ID NO: 776560
gaagauaauggcuucaugc

SEQ ID NO: 776562 - RNA, 19 nt, Artificial Sequence
  Description of Artificial Sequence: Synthetic oligonucleotide
  Sense strand starting at position 536 of SEQ ID NO: 587230
gugugugacacugauucca

SEQ ID NO: 776563 - RNA, 19 nt, Artificial Sequence
  Description of Artificial Sequence: Synthetic oligonucleotide
  Antisense strand to SEQ ID NO: 776562
uggaaucagugucacacac

SEQ ID NO: 776564 - RNA, 19 nt, Artificial Sequence
  Description of Artificial Sequence: Synthetic oligonucleotide
  Sense strand starting at position 538 of SEQ ID NO: 587230
gugugacacugauuccaug

SEQ ID NO: 776565 - RNA, 19 nt, Artificial Sequence
  Description of Artificial Sequence: Synthetic oligonucleotide
  Antisense strand to SEQ ID NO: 776564
cauggaaucagugucacac

SEQ ID NO: 776566 - RNA, 19 nt, Artificial Sequence
  Description of Artificial Sequence: Synthetic oligonucleotide
  Sense strand starting at position 544 of SEQ ID NO: 587230
cacugauuccaugggauau

SEQ ID NO: 776567 - RNA, 19 nt, Artificial Sequence
  Description of Artificial Sequence: Synthetic oligonucleotide
  Antisense strand to SEQ ID NO: 776566
auaucccauggaaucagug

SEQ ID NO: 776568 - RNA, 19 nt, Artificial Sequence
  Description of Artificial Sequence: Synthetic oligonucleotide
  Sense strand starting at position 554 of SEQ ID NO: 587230
augggauauaaaugguguu

SEQ ID NO: 776569 - RNA, 19 nt, Artificial Sequence
  Description of Artificial Sequence: Synthetic oligonucleotide
  Antisense strand to SEQ ID NO: 776568
aacaccauuuauaucccau

SEQ ID NO: 776570 - RNA, 19 nt, Artificial Sequence
  Description of Artificial Sequence: Synthetic oligonucleotide
  Sense strand starting at position 564 of SEQ ID NO: 587230
aaugguguugugugacaaa

SEQ ID NO: 776571 - RNA, 19 nt, Artificial Sequence
  Description of Artificial Sequence: Synthetic oligonucleotide
  Antisense strand to SEQ ID NO: 776570
uuugucacacaacaccauu

SEQ ID NO: 776572 - RNA, 19 nt, Artificial Sequence
  Description of Artificial Sequence: Synthetic oligonucleotide
  Sense strand starting at position 579 of SEQ ID NO: 587230
caaagaguucuaugaugac

SEQ ID NO: 776573 - RNA, 19 nt, Artificial Sequence
  Description of Artificial Sequence: Synthetic oligonucleotide
  Antisense strand to SEQ ID NO: 776572
gucaucauagaacucuuug

SEQ ID NO: 776574 - RNA, 19 nt, Artificial Sequence
  Description of Artificial Sequence: Synthetic oligonucleotide
  Sense strand starting at position 619 of SEQ ID NO: 587230
ugaacacagcuuuaguauu

SEQ ID NO: 776575 - RNA, 19 nt, Artificial Sequence
  Description of Artificial Sequence: Synthetic oligonucleotide
  Antisense strand to SEQ ID NO: 776574
aauacuaaagcuguguuca

SEQ ID NO: 776576 - RNA, 19 nt, Artificial Sequence
  Description of Artificial Sequence: Synthetic oligonucleotide
  Sense strand starting at position 722 of SEQ ID NO: 587230
cuuauuuggccauguaauu

SEQ ID NO: 776577 - RNA, 19 nt, Artificial Sequence
  Description of Artificial Sequence: Synthetic oligonucleotide
  Antisense strand to SEQ ID NO: 776576
aauuacauggccaaauaag

SEQ ID NO: 776578 - RNA, 19 nt, Artificial Sequence
  Description of Artificial Sequence: Synthetic oligonucleotide
  Sense strand starting at position 763 of SEQ ID NO: 587230
gguaucaguguuuaauggu

SEQ ID NO: 776579 - RNA, 19 nt, Artificial Sequence
  Description of Artificial Sequence: Synthetic oligonucleotide
  Antisense strand to SEQ ID NO: 776578
accauuaaacacugauacc

SEQ ID NO: 776580 - RNA, 19 nt, Artificial Sequence
  Description of Artificial Sequence: Synthetic oligonucleotide
  Sense strand starting at position 770 of SEQ ID NO: 587230
guguuuaauggugacaaau

SEQ ID NO: 776581 - RNA, 19 nt, Artificial Sequence
  Description of Artificial Sequence: Synthetic oligonucleotide
  Antisense strand to SEQ ID NO: 776580
auuugucaccauuaaacac

SEQ ID NO: 776582 - RNA, 19 nt, Artificial Sequence
  Description of Artificial Sequence: Synthetic oligonucleotide
  Sense strand starting at position 882 of SEQ ID NO: 587230
ucaaauuaugacugugcca

SEQ ID NO: 776583 - RNA, 19 nt, Artificial Sequence
  Description of Artificial Sequence: Synthetic oligonucleotide
  Antisense strand to SEQ ID NO: 776582
uggcacagucauaauuuga

SEQ ID NO: 776584 - RNA, 19 nt, Artificial Sequence
  Description of Artificial Sequence: Synthetic oligonucleotide
  Sense strand starting at position 910 of SEQ ID NO: 587230
cugugugacacuggacaaa

SEQ ID NO: 776585 - RNA, 19 nt, Artificial Sequence
  Description of Artificial Sequence: Synthetic oligonucleotide
  Antisense strand to SEQ ID NO: 776584
uuuguccagugucacacag

SEQ ID NO: 776586 - RNA, 19 nt, Artificial Sequence
  Description of Artificial Sequence: Synthetic oligonucleotide
  Sense strand starting at position 940 of SEQ ID NO: 587230
gccuuuauuuccguaucua

SEQ ID NO: 776587 - RNA, 19 nt, Artificial Sequence
  Description of Artificial Sequence: Synthetic oligonucleotide
  Antisense strand to SEQ ID NO: 776586
uagauacggaaauaaaggc

SEQ ID NO: 776588 - RNA, 19 nt, Artificial Sequence
  Description of Artificial Sequence: Synthetic oligonucleotide
  Sense strand starting at position 964 of SEQ ID NO: 587230
augacaauaccguguguca

SEQ ID NO: 776589 - RNA, 19 nt, Artificial Sequence
  Description of Artificial Sequence: Synthetic oligonucleotide
  Antisense strand to SEQ ID NO: 776588
ugacacacgguauugucau

SEQ ID NO: 776590 - RNA, 19 nt, Artificial Sequence
  Description of Artificial Sequence: Synthetic oligonucleotide
  Sense strand starting at position 977 of SEQ ID NO: 587230
gugucauagggucagugaa

SEQ ID NO: 776591 - RNA, 19 nt, Artificial Sequence
  Description of Artificial Sequence: Synthetic oligonucleotide
  Antisense strand to SEQ ID NO: 776590
uucacugacccuaugacac

SEQ ID NO: 776592 - RNA, 19 nt, Artificial Sequence
  Description of Artificial Sequence: Synthetic oligonucleotide
  Sense strand starting at position 979 of SEQ ID NO: 587230
gucauagggucagugaaag

SEQ ID NO: 776593 - RNA, 19 nt, Artificial Sequence
  Description of Artificial Sequence: Synthetic oligonucleotide
  Antisense strand to SEQ ID NO: 776592
cuuucacugacccuaugac

SEQ ID NO: 776594 - RNA, 19 nt, Artificial Sequence
  Description of Artificial Sequence: Synthetic oligonucleotide
  Sense strand starting at position 997 of SEQ ID NO: 587230
ggauuagaguuacuauuau

SEQ ID NO: 776595 - RNA, 19 nt, Artificial Sequence
  Description of Artificial Sequence: Synthetic oligonucleotide
  Antisense strand to SEQ ID NO: 776594
auaauaguaacucuaaucc

SEQ ID NO: 776596 - RNA, 19 nt, Artificial Sequence
  Description of Artificial Sequence: Synthetic oligonucleotide
  Sense strand starting at position 1058 of SEQ ID NO: 587230
ucguauuagcuauauucuu

SEQ ID NO: 776597 - RNA, 19 nt, Artificial Sequence
  Description of Artificial Sequence: Synthetic oligonucleotide
  Antisense strand to SEQ ID NO: 776596
aagaauauagcuaauacga

SEQ ID NO: 776598 - RNA, 19 nt, Artificial Sequence
  Description of Artificial Sequence: Synthetic oligonucleotide
  Sense strand starting at position 1320 of SEQ ID NO: 587230
ggauguaccucacauuucu

SEQ ID NO: 776599 - RNA, 19 nt, Artificial Sequence
  Description of Artificial Sequence: Synthetic oligonucleotide
  Antisense strand to SEQ ID NO: 776598
agaaaugugagguacaucc

SEQ ID NO: 776600 - RNA, 19 nt, Artificial Sequence
  Description of Artificial Sequence: Synthetic oligonucleotide
  Sense strand starting at position 1578 of SEQ ID NO: 587230
gugucaauugcauacauga

SEQ ID NO: 776601 - RNA, 19 nt, Artificial Sequence
  Description of Artificial Sequence: Synthetic oligonucleotide
  Antisense strand to SEQ ID NO: 776600
ucauguaugcaauugacac

SEQ ID NO: 776602 - RNA, 19 nt, Artificial Sequence
  Description of Artificial Sequence: Synthetic oligonucleotide
  Sense strand starting at position 1670 of SEQ ID NO: 587230
uuucuuuaacgguagacaa

SEQ ID NO: 776603 - RNA, 19 nt, Artificial Sequence
  Description of Artificial Sequence: Synthetic oligonucleotide
  Antisense strand to SEQ ID NO: 776602
uugucuaccguuaaagaaa

SEQ ID NO: 776604 - RNA, 19 nt, Artificial Sequence
  Description of Artificial Sequence: Synthetic oligonucleotide
  Sense strand starting at position 1784 of SEQ ID NO: 587230
guauccaaauucuccgaau

SEQ ID NO: 776605 - RNA, 19 nt, Artificial Sequence
  Description of Artificial Sequence: Synthetic oligonucleotide
  Antisense strand to SEQ ID NO: 776604
auucggagaauuuggauac

SEQ ID NO: 776606 - RNA, 19 nt, Artificial Sequence
  Description of Artificial Sequence: Synthetic oligonucleotide
  Sense strand starting at position 1795 of SEQ ID NO: 587230
cuccgaauucuugaaagua

SEQ ID NO: 776607 - RNA, 19 nt, Artificial Sequence
  Description of Artificial Sequence: Synthetic oligonucleotide
  Antisense strand to SEQ ID NO: 776606
uacuuucaagaauucggag

SEQ ID NO: 776608 - RNA, 19 nt, Artificial Sequence
  Description of Artificial Sequence: Synthetic oligonucleotide
  Sense strand starting at position 2185 of SEQ ID NO: 587230
gaaauugccguagaaggua

SEQ ID NO: 776609 - RNA, 19 nt, Artificial Sequence
  Description of Artificial Sequence: Synthetic oligonucleotide
  Antisense strand to SEQ ID NO: 776608
uaccuucuacggcaauuuc

SEQ ID NO: 776610 - RNA, 19 nt, Artificial Sequence
  Description of Artificial Sequence: Synthetic oligonucleotide
  Sense strand starting at position 2220 of SEQ ID NO: 587230
cggguucugccuuaaaucu

SEQ ID NO: 776611 - RNA, 19 nt, Artificial Sequence
  Description of Artificial Sequence: Synthetic oligonucleotide
  Antisense strand to SEQ ID NO: 776610
agauuuaaggcagaacccg

SEQ ID NO: 776612 - RNA, 19 nt, Artificial Sequence
  Description of Artificial Sequence: Synthetic oligonucleotide
  Sense strand starting at position 2427 of SEQ ID NO: 587230
uguuaaauacugugugaau

SEQ ID NO: 776613 - RNA, 19 nt, Artificial Sequence
  Description of Artificial Sequence: Synthetic oligonucleotide
  Antisense strand to SEQ ID NO: 776612
auucacacaguauuuaaca

SEQ ID NO: 776614 - RNA, 19 nt, Artificial Sequence
  Description of Artificial Sequence: Synthetic oligonucleotide
  Sense strand starting at position 2428 of SEQ ID NO: 587230
guuaaauacugugugaaug

SEQ ID NO: 776615 - RNA, 19 nt, Artificial Sequence
  Description of Artificial Sequence: Synthetic oligonucleotide
  Antisense strand to SEQ ID NO: 776614
cauucacacaguauuuaac

SEQ ID NO: 776616 - RNA, 19 nt, Artificial Sequence
  Description of Artificial Sequence: Synthetic oligonucleotide
  Sense strand starting at position 2573 of SEQ ID NO: 587230
gcugauuaacgauaaagcu

SEQ ID NO: 776617 - RNA, 19 nt, Artificial Sequence
  Description of Artificial Sequence: Synthetic oligonucleotide
  Antisense strand to SEQ ID NO: 776616
agcuuuaucguuaaucagc

SEQ ID NO: 776618 - RNA, 19 nt, Artificial Sequence
  Description of Artificial Sequence: Synthetic oligonucleotide
  Sense strand starting at position 2703 of SEQ ID NO: 587230
ugaauuuacugcgaucaaa

SEQ ID NO: 776619 - RNA, 19 nt, Artificial Sequence
  Description of Artificial Sequence: Synthetic oligonucleotide
  Antisense strand to SEQ ID NO: 776618
uuugaucgcaguaaauuca

SEQ ID NO: 776620 - RNA, 19 nt, Artificial Sequence
  Description of Artificial Sequence: Synthetic oligonucleotide
  Sense strand starting at position 2826 of SEQ ID NO: 587230
guucuaugagaacacaugu

SEQ ID NO: 776621 - RNA, 19 nt, Artificial Sequence
  Description of Artificial Sequence: Synthetic oligonucleotide
  Antisense strand to SEQ ID NO: 776620
acauguguucucauagaac

SEQ ID NO: 776622 - RNA, 19 nt, Artificial Sequence
  Description of Artificial Sequence: Synthetic oligonucleotide
  Sense strand starting at position 3200 of SEQ ID NO: 587230
auugaucauuuacaggaaa

SEQ ID NO: 776623 - RNA, 19 nt, Artificial Sequence
  Description of Artificial Sequence: Synthetic oligonucleotide
  Antisense strand to SEQ ID NO: 776622
uuuccuguaaaugaucaau

SEQ ID NO: 776624 - RNA, 19 nt, Artificial Sequence
  Description of Artificial Sequence: Synthetic oligonucleotide
  Sense strand starting at position 3694 of SEQ ID NO: 587230
guaccagguauccagguaa

SEQ ID NO: 776625 - RNA, 19 nt, Artificial Sequence
  Description of Artificial Sequence: Synthetic oligonucleotide
  Antisense strand to SEQ ID NO: 776624
uuaccuggauaccugguac

SEQ ID NO: 776626 - RNA, 19 nt, Artificial Sequence
  Description of Artificial Sequence: Synthetic oligonucleotide
  Sense strand starting at position 3731 of SEQ ID NO: 587230
ucuacccaguagucagaaa

SEQ ID NO: 776627 - RNA, 19 nt, Artificial Sequence
  Description of Artificial Sequence: Synthetic oligonucleotide
  Antisense strand to SEQ ID NO: 776626
uuucugacuacuggguaga

SEQ ID NO: 776628 - RNA, 19 nt, Artificial Sequence
  Description of Artificial Sequence: Synthetic oligonucleotide
  Sense strand starting at position 78 of SEQ ID NO: 587231
ggcuuaaauugguuuggac

SEQ ID NO: 776629 - RNA, 19 nt, Artificial Sequence
  Description of Artificial Sequence: Synthetic oligonucleotide
  Antisense strand to SEQ ID NO: 776628
guccaaaccaauuuaagcc

SEQ ID NO: 776630 - RNA, 19 nt, Artificial Sequence
  Description of Artificial Sequence: Synthetic oligonucleotide
  Sense strand starting at position 80 of SEQ ID NO: 587231
cuuaaauugguuuggacau

SEQ ID NO: 776631 - RNA, 19 nt, Artificial Sequence
  Description of Artificial Sequence: Synthetic oligonucleotide
  Antisense strand to SEQ ID NO: 776630
auguccaaaccaauuuaag

SEQ ID NO: 776632 - RNA, 19 nt, Artificial Sequence
  Description of Artificial Sequence: Synthetic oligonucleotide
  Sense strand starting at position 115 of SEQ ID NO: 587231
cuuaguggcugaccauaau

SEQ ID NO: 776633 - RNA, 19 nt, Artificial Sequence
  Description of Artificial Sequence: Synthetic oligonucleotide
  Antisense strand to SEQ ID NO: 776632
auuauggucagccacuaag

SEQ ID NO: 776634 - RNA, 19 nt, Artificial Sequence
  Description of Artificial Sequence: Synthetic oligonucleotide
  Sense strand starting at position 246 of SEQ ID NO: 587231
ccagaauaagcaugguacu

SEQ ID NO: 776635 - RNA, 19 nt, Artificial Sequence
  Description of Artificial Sequence: Synthetic oligonucleotide
  Antisense strand to SEQ ID NO: 776634
aguaccaugcuuauucugg

SEQ ID NO: 776636 - RNA, 19 nt, Artificial Sequence
  Description of Artificial Sequence: Synthetic oligonucleotide
  Sense strand starting at position 247 of SEQ ID NO: 587231
cagaauaagcaugguacuu

SEQ ID NO: 776637 - RNA, 19 nt, Artificial Sequence
  Description of Artificial Sequence: Synthetic oligonucleotide
  Antisense strand to SEQ ID NO: 776636
aaguaccaugcuuauucug

SEQ ID NO: 776638 - RNA, 19 nt, Artificial Sequence
  Description of Artificial Sequence: Synthetic oligonucleotide
  Sense strand starting at position 288 of SEQ ID NO: 587231
cauucuguagcagagugaa

SEQ ID NO: 776639 - RNA, 19 nt, Artificial Sequence
  Description of Artificial Sequence: Synthetic oligonucleotide
  Antisense strand to SEQ ID NO: 776638
uucacucugcuacagaaug

SEQ ID NO: 776640 - RNA, 19 nt, Artificial Sequence
  Description of Artificial Sequence: Synthetic oligonucleotide
  Sense strand starting at position 339 of SEQ ID NO: 587231
uggagacucugagacuaga

SEQ ID NO: 776641 - RNA, 19 nt, Artificial Sequence
  Description of Artificial Sequence: Synthetic oligonucleotide
  Antisense strand to SEQ ID NO: 776640
ucuagucucagagucucca

SEQ ID NO: 776642 - RNA, 19 nt, Artificial Sequence
  Description of Artificial Sequence: Synthetic oligonucleotide
  Sense strand starting at position 387 of SEQ ID NO: 587231
gcuuauaggcauuaagaaa

SEQ ID NO: 776643 - RNA, 19 nt, Artificial Sequence
  Description of Artificial Sequence: Synthetic oligonucleotide
  Antisense strand to SEQ ID NO: 776642
uuucuuaaugccuauaagc

SEQ ID NO: 776644 - RNA, 19 nt, Artificial Sequence
  Description of Artificial Sequence: Synthetic oligonucleotide
  Sense strand starting at position 409 of SEQ ID NO: 587231
ugacauucuuauuaaagag

SEQ ID NO: 776645 - RNA, 19 nt, Artificial Sequence
  Description of Artificial Sequence: Synthetic oligonucleotide
  Antisense strand to SEQ ID NO: 776644
cucuuuaauaagaauguca

SEQ ID NO: 776646 - RNA, 19 nt, Artificial Sequence
  Description of Artificial Sequence: Synthetic oligonucleotide
  Sense strand starting at position 547 of SEQ ID NO: 587231
uucuaauugcccuagagcu

SEQ ID NO: 776647 - RNA, 19 nt, Artificial Sequence
  Description of Artificial Sequence: Synthetic oligonucleotide
  Antisense strand to SEQ ID NO: 776646
agcucuagggcaauuagaa

SEQ ID NO: 776648 - RNA, 19 nt, Artificial Sequence
  Description of Artificial Sequence: Synthetic oligonucleotide
  Sense strand starting at position 757 of SEQ ID NO: 587231
cuuucuucucccgggagaa

SEQ ID NO: 776649 - RNA, 19 nt, Artificial Sequence
  Description of Artificial Sequence: Synthetic oligonucleotide
  Antisense strand to SEQ ID NO: 776648
uucucccgggagaagaaag

SEQ ID NO: 776650 - RNA, 19 nt, Artificial Sequence
  Description of Artificial Sequence: Synthetic oligonucleotide
  Sense strand starting at position 758 of SEQ ID NO: 587231
uuucuucucccgggagaac

SEQ ID NO: 776651 - RNA, 19 nt, Artificial Sequence
  Description of Artificial Sequence: Synthetic oligonucleotide
  Antisense strand to SEQ ID NO: 776650
guucucccgggagaagaaa

SEQ ID NO: 776652 - RNA, 19 nt, Artificial Sequence
  Description of Artificial Sequence: Synthetic oligonucleotide
  Sense strand starting at position 759 of SEQ ID NO: 587231
uucuucucccgggagaacu

SEQ ID NO: 776653 - RNA, 19 nt, Artificial Sequence
  Description of Artificial Sequence: Synthetic oligonucleotide
  Antisense strand to SEQ ID NO: 776652
aguucucccgggagaagaa

SEQ ID NO: 776654 - RNA, 19 nt, Artificial Sequence
  Description of Artificial Sequence: Synthetic oligonucleotide
  Sense strand starting at position 778 of SEQ ID NO: 587231
ugaggagccucacugagaa

SEQ ID NO: 776655 - RNA, 19 nt, Artificial Sequence
  Description of Artificial Sequence: Synthetic oligonucleotide
  Antisense strand to SEQ ID NO: 776654
uucucagugaggcuccuca

SEQ ID NO: 776656 - RNA, 19 nt, Artificial Sequence
  Description of Artificial Sequence: Synthetic oligonucleotide
  Sense strand starting at position 1027 of SEQ ID NO: 587231
cguugaucuggcagauggu

SEQ ID NO: 776657 - RNA, 19 nt, Artificial Sequence
  Description of Artificial Sequence: Synthetic oligonucleotide
  Antisense strand to SEQ ID NO: 776656
accaucugccagaucaacg

SEQ ID NO: 776658 - RNA, 19 nt, Artificial Sequence
  Description of Artificial Sequence: Synthetic oligonucleotide
  Sense strand starting at position 1294 of SEQ ID NO: 587231
agccuaggaccucgaagau

SEQ ID NO: 776659 - RNA, 19 nt, Artificial Sequence
  Description of Artificial Sequence: Synthetic oligonucleotide
  Antisense strand to SEQ ID NO: 776658
aucuucgagguccuaggcu

SEQ ID NO: 776660 - RNA, 19 nt, Artificial Sequence
  Description of Artificial Sequence: Synthetic oligonucleotide
  Sense strand starting at position 1360 of SEQ ID NO: 587231
ccagguugacgauguagua

SEQ ID NO: 776661 - RNA, 19 nt, Artificial Sequence
  Description of Artificial Sequence: Synthetic oligonucleotide
  Antisense strand to SEQ ID NO: 776660
uacuacaucgucaaccugg

SEQ ID NO: 776662 - RNA, 19 nt, Artificial Sequence
  Description of Artificial Sequence: Synthetic oligonucleotide
  Sense strand starting at position 1480 of SEQ ID NO: 587231
gcagaauggccuuggaaau

SEQ ID NO: 776663 - RNA, 19 nt, Artificial Sequence
  Description of Artificial Sequence: Synthetic oligonucleotide
  Antisense strand to SEQ ID NO: 776662
auuuccaaggccauucugc

SEQ ID NO: 776664 - RNA, 19 nt, Artificial Sequence
  Description of Artificial Sequence: Synthetic oligonucleotide
  Sense strand starting at position 1481 of SEQ ID NO: 587231
cagaauggccuuggaaaug

SEQ ID NO: 776665 - RNA, 19 nt, Artificial Sequence
  Description of Artificial Sequence: Synthetic oligonucleotide
  Antisense strand to SEQ ID NO: 776664
cauuuccaaggccauucug

SEQ ID NO: 776666 - RNA, 19 nt, Artificial Sequence
  Description of Artificial Sequence: Synthetic oligonucleotide
  Sense strand starting at position 1538 of SEQ ID NO: 587231
ggaagcauuucccgagaga

SEQ ID NO: 776667 - RNA, 19 nt, Artificial Sequence
  Description of Artificial Sequence: Synthetic oligonucleotide
  Antisense strand to SEQ ID NO: 776666
ucucucgggaaaugcuucc

SEQ ID NO: 776668 - RNA, 19 nt, Artificial Sequence
  Description of Artificial Sequence: Synthetic oligonucleotide
  Sense strand starting at position 1887 of SEQ ID NO: 587231
ccaggagacuccuugcaac

SEQ ID NO: 776669 - RNA, 19 nt, Artificial Sequence
  Description of Artificial Sequence: Synthetic oligonucleotide
  Antisense strand to SEQ ID NO: 776668
guugcaaggagucuccugg

SEQ ID NO: 776670 - RNA, 19 nt, Artificial Sequence
  Description of Artificial Sequence: Synthetic oligonucleotide
  Sense strand starting at position 1981 of SEQ ID NO: 587231
cugcacaugauucggaauu

SEQ ID NO: 776671 - RNA, 19 nt, Artificial Sequence
  Description of Artificial Sequence: Synthetic oligonucleotide
  Antisense strand to SEQ ID NO: 776670
aauuccgaaucaugugcag

SEQ ID NO: 776672 - RNA, 19 nt, Artificial Sequence
  Description of Artificial Sequence: Synthetic oligonucleotide
  Sense strand starting at position 2185 of SEQ ID NO: 587231
gggacguagguguggaaua

SEQ ID NO: 776673 - RNA, 19 nt, Artificial Sequence
  Description of Artificial Sequence: Synthetic oligonucleotide
  Antisense strand to SEQ ID NO: 776672
uauuccacaccuacguccc

SEQ ID NO: 776674 - RNA, 19 nt, Artificial Sequence
  Description of Artificial Sequence: Synthetic oligonucleotide
  Sense strand starting at position 2195 of SEQ ID NO: 587231
uguggaauaugugcugaga

SEQ ID NO: 776675 - RNA, 19 nt, Artificial Sequence
  Description of Artificial Sequence: Synthetic oligonucleotide
  Antisense strand to SEQ ID NO: 776674
ucucagcacauauuccaca

SEQ ID NO: 776676 - RNA, 19 nt, Artificial Sequence
  Description of Artificial Sequence: Synthetic oligonucleotide
  Sense strand starting at position 2350 of SEQ ID NO: 587231
guugguucugcgguccaga

SEQ ID NO: 776677 - RNA, 19 nt, Artificial Sequence
  Description of Artificial Sequence: Synthetic oligonucleotide
  Antisense strand to SEQ ID NO: 776676
ucuggaccgcagaaccaac

SEQ ID NO: 776678 - RNA, 19 nt, Artificial Sequence
  Description of Artificial Sequence: Synthetic oligonucleotide
  Sense strand starting at position 2643 of SEQ ID NO: 587231
ggaggauguacucgguuuc

SEQ ID NO: 776679 - RNA, 19 nt, Artificial Sequence
  Description of Artificial Sequence: Synthetic oligonucleotide
  Antisense strand to SEQ ID NO: 776678
gaaaccgaguacauccucc

SEQ ID NO: 776680 - RNA, 19 nt, Artificial Sequence
  Description of Artificial Sequence: Synthetic oligonucleotide
  Sense strand starting at position 2646 of SEQ ID NO: 587231
ggauguacucgguuuccgu

SEQ ID NO: 776681 - RNA, 19 nt, Artificial Sequence
  Description of Artificial Sequence: Synthetic oligonucleotide
  Antisense strand to SEQ ID NO: 776680
acggaaaccgaguacaucc

SEQ ID NO: 776682 - RNA, 19 nt, Artificial Sequence
  Description of Artificial Sequence: Synthetic oligonucleotide
  Sense strand starting at position 2653 of SEQ ID NO: 587231
cucgguuuccguuagaaca

SEQ ID NO: 776683 - RNA, 19 nt, Artificial Sequence
  Description of Artificial Sequence: Synthetic oligonucleotide
  Antisense strand to SEQ ID NO: 776682
uguucuaacggaaaccgag

SEQ ID NO: 776684 - RNA, 19 nt, Artificial Sequence
  Description of Artificial Sequence: Synthetic oligonucleotide
  Sense strand starting at position 3098 of SEQ ID NO: 587231
ccaccaucugcguaagaaa

SEQ ID NO: 776685 - RNA, 19 nt, Artificial Sequence
  Description of Artificial Sequence: Synthetic oligonucleotide
  Antisense strand to SEQ ID NO: 776684
uuucuuacgcagauggugg

SEQ ID NO: 776686 - RNA, 19 nt, Artificial Sequence
  Description of Artificial Sequence: Synthetic oligonucleotide
  Sense strand starting at position 3107 of SEQ ID NO: 587231
gcguaagaaaccuggguuu

SEQ ID NO: 776687 - RNA, 19 nt, Artificial Sequence
  Description of Artificial Sequence: Synthetic oligonucleotide
  Antisense strand to SEQ ID NO: 776686
aaacccagguuucuuacgc

SEQ ID NO: 776688 - RNA, 19 nt, Artificial Sequence
  Description of Artificial Sequence: Synthetic oligonucleotide
  Sense strand starting at position 3255 of SEQ ID NO: 587231
agaccucacaggugguauu

SEQ ID NO: 776689 - RNA, 19 nt, Artificial Sequence
  Description of Artificial Sequence: Synthetic oligonucleotide
  Antisense strand to SEQ ID NO: 776688
aauaccaccugugaggucu

SEQ ID NO: 776690 - RNA, 19 nt, Artificial Sequence
  Description of Artificial Sequence: Synthetic oligonucleotide
  Sense strand starting at position 3256 of SEQ ID NO: 587231
gaccucacaggugguauua

SEQ ID NO: 776691 - RNA, 19 nt, Artificial Sequence
  Description of Artificial Sequence: Synthetic oligonucleotide
  Antisense strand to SEQ ID NO: 776690
uaauaccaccugugagguc

SEQ ID NO: 776692 - RNA, 19 nt, Artificial Sequence
  Description of Artificial Sequence: Synthetic oligonucleotide
  Sense strand starting at position 3304 of SEQ ID NO: 587231
uccuaccucgagggugaua

SEQ ID NO: 776693 - RNA, 19 nt, Artificial Sequence
  Description of Artificial Sequence: Synthetic oligonucleotide
  Antisense strand to SEQ ID NO: 776692
uaucacccucgagguagga

SEQ ID NO: 776694 - RNA, 19 nt, Artificial Sequence
  Description of Artificial Sequence: Synthetic oligonucleotide
  Sense strand starting at position 3306 of SEQ ID NO: 587231
cuaccucgagggugauaaa

SEQ ID NO: 776695 - RNA, 19 nt, Artificial Sequence
  Description of Artificial Sequence: Synthetic oligonucleotide
  Antisense strand to SEQ ID NO: 776694
uuuaucacccucgagguag

SEQ ID NO: 776696 - RNA, 19 nt, Artificial Sequence
  Description of Artificial Sequence: Synthetic oligonucleotide
  Sense strand starting at position 3317 of SEQ ID NO: 587231
gugauaaacacaggguuaa

SEQ ID NO: 776697 - RNA, 19 nt, Artificial Sequence
  Description of Artificial Sequence: Synthetic oligonucleotide
  Antisense strand to SEQ ID NO: 776696
uuaacccuguguuuaucac

SEQ ID NO: 776698 - RNA, 19 nt, Artificial Sequence
  Description of Artificial Sequence: Synthetic oligonucleotide
  Sense strand starting at position 3894 of SEQ ID NO: 587231
ccguaaucuccugcugcua

SEQ ID NO: 776699 - RNA, 19 nt, Artificial Sequence
  Description of Artificial Sequence: Synthetic oligonucleotide
  Antisense strand to SEQ ID NO: 776698
uagcagcaggagauuacgg

SEQ ID NO: 776700 - RNA, 19 nt, Artificial Sequence
  Description of Artificial Sequence: Synthetic oligonucleotide
  Sense strand starting at position 3912 of SEQ ID NO: 587231
accguauuacucuacggca

SEQ ID NO: 776701 - RNA, 19 nt, Artificial Sequence
  Description of Artificial Sequence: Synthetic oligonucleotide
  Antisense strand to SEQ ID NO: 776700
ugccguagaguaauacggu

SEQ ID NO: 776702 - RNA, 19 nt, Artificial Sequence
  Description of Artificial Sequence: Synthetic oligonucleotide
  Sense strand starting at position 3941 of SEQ ID NO: 587231
gugcguauacagcuguaau

SEQ ID NO: 776703 - RNA, 19 nt, Artificial Sequence
  Description of Artificial Sequence: Synthetic oligonucleotide
  Antisense strand to SEQ ID NO: 776702
auuacagcuguauacgcac

SEQ ID NO: 776704 - RNA, 19 nt, Artificial Sequence
  Description of Artificial Sequence: Synthetic oligonucleotide
  Sense strand starting at position 3943 of SEQ ID NO: 587231
gcguauacagcuguaaugu

SEQ ID NO: 776705 - RNA, 19 nt, Artificial Sequence
  Description of Artificial Sequence: Synthetic oligonucleotide
  Antisense strand to SEQ ID NO: 776704
acauuacagcuguauacgc

SEQ ID NO: 776706 - RNA, 19 nt, Artificial Sequence
  Description of Artificial Sequence: Synthetic oligonucleotide
  Sense strand starting at position 3944 of SEQ ID NO: 587231
cguauacagcuguaauguu

SEQ ID NO: 776707 - RNA, 19 nt, Artificial Sequence
  Description of Artificial Sequence: Synthetic oligonucleotide
  Antisense strand to SEQ ID NO: 776706
aacauuacagcuguauacg

SEQ ID NO: 776708 - RNA, 19 nt, Artificial Sequence
  Description of Artificial Sequence: Synthetic oligonucleotide
  Sense strand starting at position 314 of SEQ ID NO: 587232
ggcgagaguccucgggaca

SEQ ID NO: 776709 - RNA, 19 nt, Artificial Sequence
  Description of Artificial Sequence: Synthetic oligonucleotide
  Antisense strand to SEQ ID NO: 776708
ugucccgaggacucucgcc

SEQ ID NO: 776710 - RNA, 19 nt, Artificial Sequence
  Description of Artificial Sequence: Synthetic oligonucleotide
  Sense strand starting at position 315 of SEQ ID NO: 587232
gcgagaguccucgggacac

SEQ ID NO: 776711 - RNA, 19 nt, Artificial Sequence
  Description of Artificial Sequence: Synthetic oligonucleotide
  Antisense strand to SEQ ID NO: 776710
gugucccgaggacucucgc

SEQ ID NO: 776712 - RNA, 19 nt, Artificial Sequence
  Description of Artificial Sequence: Synthetic oligonucleotide
  Sense strand starting at position 413 of SEQ ID NO: 587232
gugacuggauccggaaaga

SEQ ID NO: 776713 - RNA, 19 nt, Artificial Sequence
  Description of Artificial Sequence: Synthetic oligonucleotide
  Antisense strand to SEQ ID NO: 776712
ucuuuccggauccagucac

SEQ ID NO: 776714 - RNA, 19 nt, Artificial Sequence
  Description of Artificial Sequence: Synthetic oligonucleotide
  Sense strand starting at position 765 of SEQ ID NO: 587232
aguagaugagcggguugaa

SEQ ID NO: 776715 - RNA, 19 nt, Artificial Sequence
  Description of Artificial Sequence: Synthetic oligonucleotide
  Antisense strand to SEQ ID NO: 776714
uucaacccgcucaucuacu

SEQ ID NO: 776716 - RNA, 19 nt, Artificial Sequence
  Description of Artificial Sequence: Synthetic oligonucleotide
  Sense strand starting at position 774 of SEQ ID NO: 587232
gcggguugaaggcagaauu

SEQ ID NO: 776717 - RNA, 19 nt, Artificial Sequence
  Description of Artificial Sequence: Synthetic oligonucleotide
  Antisense strand to SEQ ID NO: 776716
aauucugccuucaacccgc

SEQ ID NO: 776718 - RNA, 19 nt, Artificial Sequence
  Description of Artificial Sequence: Synthetic oligonucleotide
  Sense strand starting at position 785 of SEQ ID NO: 587232
gcagaauuggcauaaccua

SEQ ID NO: 776719 - RNA, 19 nt, Artificial Sequence
  Description of Artificial Sequence: Synthetic oligonucleotide
  Antisense strand to SEQ ID NO: 776718
uagguuaugccaauucugc

SEQ ID NO: 776720 - RNA, 19 nt, Artificial Sequence
  Description of Artificial Sequence: Synthetic oligonucleotide
  Sense strand starting at position 864 of SEQ ID NO: 587232
gcacguuggccagaaagaa

SEQ ID NO: 776721 - RNA, 19 nt, Artificial Sequence
  Description of Artificial Sequence: Synthetic oligonucleotide
  Antisense strand to SEQ ID NO: 776720
uucuuucuggccaacgugc

SEQ ID NO: 776722 - RNA, 19 nt, Artificial Sequence
  Description of Artificial Sequence: Synthetic oligonucleotide
  Sense strand starting at position 897 of SEQ ID NO: 587232
gagugaaggugcccaugau

SEQ ID NO: 776723 - RNA, 19 nt, Artificial Sequence
  Description of Artificial Sequence: Synthetic oligonucleotide
  Antisense strand to SEQ ID NO: 776722
aucaugggcaccuucacuc

SEQ ID NO: 776724 - RNA, 19 nt, Artificial Sequence
  Description of Artificial Sequence: Synthetic oligonucleotide
  Sense strand starting at position 938 of SEQ ID NO: 587232
cgguguucccggagaggca

SEQ ID NO: 776725 - RNA, 19 nt, Artificial Sequence
  Description of Artificial Sequence: Synthetic oligonucleotide
  Antisense strand to SEQ ID NO: 776724
ugccucuccgggaacaccg

SEQ ID NO: 776726 - RNA, 19 nt, Artificial Sequence
  Description of Artificial Sequence: Synthetic oligonucleotide
  Sense strand starting at position 1776 of SEQ ID NO: 587232
agcuguucucgugaggcca

SEQ ID NO: 776727 - RNA, 19 nt, Artificial Sequence
  Description of Artificial Sequence: Synthetic oligonucleotide
  Antisense strand to SEQ ID NO: 776726
uggccucacgagaacagcu

SEQ ID NO: 776728 - RNA, 19 nt, Artificial Sequence
  Description of Artificial Sequence: Synthetic oligonucleotide
  Sense strand starting at position 2085 of SEQ ID NO: 587232
ccacguuuccuuuagcuaa

SEQ ID NO: 776729 - RNA, 19 nt, Artificial Sequence
  Description of Artificial Sequence: Synthetic oligonucleotide
  Antisense strand to SEQ ID NO: 776728
uuagcuaaaggaaacgugg

SEQ ID NO: 776730 - RNA, 19 nt, Artificial Sequence
  Description of Artificial Sequence: Synthetic oligonucleotide
  Sense strand starting at position 2087 of SEQ ID NO: 587232
acguuuccuuuagcuaaau

SEQ ID NO: 776731 - RNA, 19 nt, Artificial Sequence
  Description of Artificial Sequence: Synthetic oligonucleotide
  Antisense strand to SEQ ID NO: 776730
auuuagcuaaaggaaacgu

SEQ ID NO: 776732 - RNA, 19 nt, Artificial Sequence
  Description of Artificial Sequence: Synthetic oligonucleotide
  Sense strand starting at position 2096 of SEQ ID NO: 587232
uuagcuaaaucuggaggaa

SEQ ID NO: 776733 - RNA, 19 nt, Artificial Sequence
  Description of Artificial Sequence: Synthetic oligonucleotide
  Antisense strand to SEQ ID NO: 776732
uuccuccagauuuagcuaa

SEQ ID NO: 776734 - RNA, 19 nt, Artificial Sequence
  Description of Artificial Sequence: Synthetic oligonucleotide
  Sense strand starting at position 2285 of SEQ ID NO: 587232
cuuuauguaucagaggcaa

SEQ ID NO: 776735 - RNA, 19 nt, Artificial Sequence
  Description of Artificial Sequence: Synthetic oligonucleotide
  Antisense strand to SEQ ID NO: 776734
uugccucugauacauaaag

SEQ ID NO: 776736 - RNA, 19 nt, Artificial Sequence
  Description of Artificial Sequence: Synthetic oligonucleotide
  Sense strand starting at position 2287 of SEQ ID NO: 587232
uuauguaucagaggcaaag

SEQ ID NO: 776737 - RNA, 19 nt, Artificial Sequence
  Description of Artificial Sequence: Synthetic oligonucleotide
  Antisense strand to SEQ ID NO: 776736
cuuugccucugauacauaa

SEQ ID NO: 776738 - RNA, 19 nt, Artificial Sequence
  Description of Artificial Sequence: Synthetic oligonucleotide
  Sense strand starting at position 2400 of SEQ ID NO: 587232
gccaguaucuccucuccca

SEQ ID NO: 776739 - RNA, 19 nt, Artificial Sequence
  Description of Artificial Sequence: Synthetic oligonucleotide
  Antisense strand to SEQ ID NO: 776738
ugggagaggagauacuggc

SEQ ID NO: 776740 - RNA, 19 nt, Artificial Sequence
  Description of Artificial Sequence: Synthetic oligonucleotide
  Sense strand starting at position 2419 of SEQ ID NO: 587232
agaccucagcuuggugaga

SEQ ID NO: 776741 - RNA, 19 nt, Artificial Sequence
  Description of Artificial Sequence: Synthetic oligonucleotide
  Antisense strand to SEQ ID NO: 776740
ucucaccaagcugaggucu

SEQ ID NO: 776742 - RNA, 19 nt, Artificial Sequence
  Description of Artificial Sequence: Synthetic oligonucleotide
  Sense strand starting at position 2420 of SEQ ID NO: 587232
gaccucagcuuggugagau

SEQ ID NO: 776743 - RNA, 19 nt, Artificial Sequence
  Description of Artificial Sequence: Synthetic oligonucleotide
  Antisense strand to SEQ ID NO: 776742
aucucaccaagcugagguc

SEQ ID NO: 776744 - RNA, 19 nt, Artificial Sequence
  Description of Artificial Sequence: Synthetic oligonucleotide
  Sense strand starting at position 2421 of SEQ ID NO: 587232
accucagcuuggugagauc

SEQ ID NO: 776745 - RNA, 19 nt, Artificial Sequence
  Description of Artificial Sequence: Synthetic oligonucleotide
  Antisense strand to SEQ ID NO: 776744
gaucucaccaagcugaggu

SEQ ID NO: 776746 - RNA, 19 nt, Artificial Sequence
  Description of Artificial Sequence: Synthetic oligonucleotide
  Sense strand starting at position 2734 of SEQ ID NO: 587232
gugcaaugaugugaugucu

SEQ ID NO: 776747 - RNA, 19 nt, Artificial Sequence
  Description of Artificial Sequence: Synthetic oligonucleotide
  Antisense strand to SEQ ID NO: 776746
agacaucacaucauugcac

SEQ ID NO: 776748 - RNA, 19 nt, Artificial Sequence
  Description of Artificial Sequence: Synthetic oligonucleotide
  Sense strand starting at position 2993 of SEQ ID NO: 587232
cauugcuagcucuggauuu

SEQ ID NO: 776749 - RNA, 19 nt, Artificial Sequence
  Description of Artificial Sequence: Synthetic oligonucleotide
  Antisense strand to SEQ ID NO: 776748
aaauccagagcuagcaaug

SEQ ID NO: 776750 - RNA, 19 nt, Artificial Sequence
  Description of Artificial Sequence: Synthetic oligonucleotide
  Sense strand starting at position 3024 of SEQ ID NO: 587232
ggcacuauguagucuggga

SEQ ID NO: 776751 - RNA, 19 nt, Artificial Sequence
  Description of Artificial Sequence: Synthetic oligonucleotide
  Antisense strand to SEQ ID NO: 776750
ucccagacuacauagugcc

SEQ ID NO: 776752 - RNA, 19 nt, Artificial Sequence
  Description of Artificial Sequence: Synthetic oligonucleotide
  Sense strand starting at position 3028 of SEQ ID NO: 587232
cuauguagucugggaugcu

SEQ ID NO: 776753 - RNA, 19 nt, Artificial Sequence
  Description of Artificial Sequence: Synthetic oligonucleotide
  Antisense strand to SEQ ID NO: 776752
agcaucccagacuacauag

SEQ ID NO: 776754 - RNA, 19 nt, Artificial Sequence
  Description of Artificial Sequence: Synthetic oligonucleotide
  Sense strand starting at position 3031 of SEQ ID NO: 587232
uguagucugggaugcugaa

SEQ ID NO: 776755 - RNA, 19 nt, Artificial Sequence
  Description of Artificial Sequence: Synthetic oligonucleotide
  Antisense strand to SEQ ID NO: 776754
uucagcaucccagacuaca

SEQ ID NO: 776756 - RNA, 19 nt, Artificial Sequence
  Description of Artificial Sequence: Synthetic oligonucleotide
  Sense strand starting at position 3727 of SEQ ID NO: 587232
guaaguguucgcuccacuu

SEQ ID NO: 776757 - RNA, 19 nt, Artificial Sequence
  Description of Artificial Sequence: Synthetic oligonucleotide
  Antisense strand to SEQ ID NO: 776756
aaguggagcgaacacuuac

SEQ ID NO: 776758 - RNA, 19 nt, Artificial Sequence
  Description of Artificial Sequence: Synthetic oligonucleotide
  Sense strand starting at position 144 of SEQ ID NO: 587233
gguuauagggcuugaaagg

SEQ ID NO: 776759 - RNA, 19 nt, Artificial Sequence
  Description of Artificial Sequence: Synthetic oligonucleotide
  Antisense strand to SEQ ID NO: 776758
ccuuucaagcccuauaacc

SEQ ID NO: 776760 - RNA, 19 nt, Artificial Sequence
  Description of Artificial Sequence: Synthetic oligonucleotide
  Sense strand starting at position 159 of SEQ ID NO: 587233
aagggacugcccugaggaa

SEQ ID NO: 776761 - RNA, 19 nt, Artificial Sequence
  Description of Artificial Sequence: Synthetic oligonucleotide
  Antisense strand to SEQ ID NO: 776760
uuccucagggcagucccuu

SEQ ID NO: 776762 - RNA, 19 nt, Artificial Sequence
  Description of Artificial Sequence: Synthetic oligonucleotide
  Sense strand starting at position 204 of SEQ ID NO: 587233
cggaccgauuguccugaua

SEQ ID NO: 776763 - RNA, 19 nt, Artificial Sequence
  Description of Artificial Sequence: Synthetic oligonucleotide
  Antisense strand to SEQ ID NO: 776762
uaucaggacaaucgguccg

SEQ ID NO: 776764 - RNA, 19 nt, Artificial Sequence
  Description of Artificial Sequence: Synthetic oligonucleotide
  Sense strand starting at position 207 of SEQ ID NO: 587233
accgauuguccugauacuc

SEQ ID NO: 776765 - RNA, 19 nt, Artificial Sequence
  Description of Artificial Sequence: Synthetic oligonucleotide
  Antisense strand to SEQ ID NO: 776764
gaguaucaggacaaucggu

SEQ ID NO: 776766 - RNA, 19 nt, Artificial Sequence
  Description of Artificial Sequence: Synthetic oligonucleotide
  Sense strand starting at position 305 of SEQ ID NO: 587233
cagcaaguggagugaauua

SEQ ID NO: 776767 - RNA, 19 nt, Artificial Sequence
  Description of Artificial Sequence: Synthetic oligonucleotide
  Antisense strand to SEQ ID NO: 776766
uaauucacuccacuugcug

SEQ ID NO: 776768 - RNA, 19 nt, Artificial Sequence
  Description of Artificial Sequence: Synthetic oligonucleotide
  Sense strand starting at position 636 of SEQ ID NO: 587233
cagacuccgccuuguugaa

SEQ ID NO: 776769 - RNA, 19 nt, Artificial Sequence
  Description of Artificial Sequence: Synthetic oligonucleotide
  Antisense strand to SEQ ID NO: 776768
uucaacaaggcggagucug

SEQ ID NO: 776770 - RNA, 19 nt, Artificial Sequence
  Description of Artificial Sequence: Synthetic oligonucleotide
  Sense strand starting at position 648 of SEQ ID NO: 587233
uguugaagcuuucuaaaug

SEQ ID NO: 776771 - RNA, 19 nt, Artificial Sequence
  Description of Artificial Sequence: Synthetic oligonucleotide
  Antisense strand to SEQ ID NO: 776770
cauuuagaaagcuucaaca

SEQ ID NO: 776772 - RNA, 19 nt, Artificial Sequence
  Description of Artificial Sequence: Synthetic oligonucleotide
  Sense strand starting at position 1062 of SEQ ID NO: 587233
acgcguuaccgcuuuaagu

SEQ ID NO: 776773 - RNA, 19 nt, Artificial Sequence
  Description of Artificial Sequence: Synthetic oligonucleotide
  Antisense strand to SEQ ID NO: 776772
acuuaaagcgguaacgcgu

SEQ ID NO: 776774 - RNA, 19 nt, Artificial Sequence
  Description of Artificial Sequence: Synthetic oligonucleotide
  Sense strand starting at position 1063 of SEQ ID NO: 587233
cgcguuaccgcuuuaaguu

SEQ ID NO: 776775 - RNA, 19 nt, Artificial Sequence
  Description of Artificial Sequence: Synthetic oligonucleotide
  Antisense strand to SEQ ID NO: 776774
aacuuaaagcgguaacgcg

SEQ ID NO: 776776 - RNA, 19 nt, Artificial Sequence
  Description of Artificial Sequence: Synthetic oligonucleotide
  Sense strand starting at position 1171 of SEQ ID NO: 587233
ggaauuagcacuugaaugg

SEQ ID NO: 776777 - RNA, 19 nt, Artificial Sequence
  Description of Artificial Sequence: Synthetic oligonucleotide
  Antisense strand to SEQ ID NO: 776776
ccauucaagugcuaauucc

SEQ ID NO: 776778 - RNA, 19 nt, Artificial Sequence
  Description of Artificial Sequence: Synthetic oligonucleotide
  Sense strand starting at position 1196 of SEQ ID NO: 587233
cggcgugucuggaaugaga

SEQ ID NO: 776779 - RNA, 19 nt, Artificial Sequence
  Description of Artificial Sequence: Synthetic oligonucleotide
  Antisense strand to SEQ ID NO: 776778
ucucauuccagacacgccg

SEQ ID NO: 776780 - RNA, 19 nt, Artificial Sequence
  Description of Artificial Sequence: Synthetic oligonucleotide
  Sense strand starting at position 1198 of SEQ ID NO: 587233
gcgugucuggaaugagaac

SEQ ID NO: 776781 - RNA, 19 nt, Artificial Sequence
  Description of Artificial Sequence: Synthetic oligonucleotide
  Antisense strand to SEQ ID NO: 776780
guucucauuccagacacgc

SEQ ID NO: 776782 - RNA, 19 nt, Artificial Sequence
  Description of Artificial Sequence: Synthetic oligonucleotide
  Sense strand starting at position 2566 of SEQ ID NO: 587233
cagccuggcucuuuaaguu

SEQ ID NO: 776783 - RNA, 19 nt, Artificial Sequence
  Description of Artificial Sequence: Synthetic oligonucleotide
  Antisense strand to SEQ ID NO: 776782
aacuuaaagagccaggcug

SEQ ID NO: 776784 - RNA, 19 nt, Artificial Sequence
  Description of Artificial Sequence: Synthetic oligonucleotide
  Sense strand starting at position 2696 of SEQ ID NO: 587233
cccagauaauccguuuaaa

SEQ ID NO: 776785 - RNA, 19 nt, Artificial Sequence
  Description of Artificial Sequence: Synthetic oligonucleotide
  Antisense strand to SEQ ID NO: 776784
uuuaaacggauuaucuggg

SEQ ID NO: 776786 - RNA, 19 nt, Artificial Sequence
  Description of Artificial Sequence: Synthetic oligonucleotide
  Sense strand starting at position 2699 of SEQ ID NO: 587233
agauaauccguuuaaagca

SEQ ID NO: 776787 - RNA, 19 nt, Artificial Sequence
  Description of Artificial Sequence: Synthetic oligonucleotide
  Antisense strand to SEQ ID NO: 776786
ugcuuuaaacggauuaucu

SEQ ID NO: 776788 - RNA, 19 nt, Artificial Sequence
  Description of Artificial Sequence: Synthetic oligonucleotide
  Sense strand starting at position 2707 of SEQ ID NO: 587233
cguuuaaagcacugagaaa

SEQ ID NO: 776789 - RNA, 19 nt, Artificial Sequence
  Description of Artificial Sequence: Synthetic oligonucleotide
  Antisense strand to SEQ ID NO: 776788
uuucucagugcuuuaaacg

SEQ ID NO: 776790 - RNA, 19 nt, Artificial Sequence
  Description of Artificial Sequence: Synthetic oligonucleotide
  Sense strand starting at position 2752 of SEQ ID NO: 587233
gcugguaucagggaucaga

SEQ ID NO: 776791 - RNA, 19 nt, Artificial Sequence
  Description of Artificial Sequence: Synthetic oligonucleotide
  Antisense strand to SEQ ID NO: 776790
ucugaucccugauaccagc

SEQ ID NO: 776792 - RNA, 19 nt, Artificial Sequence
  Description of Artificial Sequence: Synthetic oligonucleotide
  Sense strand starting at position 2865 of SEQ ID NO: 587233
uucggaggcuuuccuggaa

SEQ ID NO: 776793 - RNA, 19 nt, Artificial Sequence
  Description of Artificial Sequence: Synthetic oligonucleotide
  Antisense strand to SEQ ID NO: 776792
uuccaggaaagccuccgaa

SEQ ID NO: 776794 - RNA, 19 nt, Artificial Sequence
  Description of Artificial Sequence: Synthetic oligonucleotide
  Sense strand starting at position 3103 of SEQ ID NO: 587233
gucacuaguucucugcagu

SEQ ID NO: 776795 - RNA, 19 nt, Artificial Sequence
  Description of Artificial Sequence: Synthetic oligonucleotide
  Antisense strand to SEQ ID NO: 776794
acugcagagaacuagugac

SEQ ID NO: 776796 - RNA, 19 nt, Artificial Sequence
  Description of Artificial Sequence: Synthetic oligonucleotide
  Sense strand starting at position 3212 of SEQ ID NO: 587233
aaacgugcuccugaaaugu

SEQ ID NO: 776797 - RNA, 19 nt, Artificial Sequence
  Description of Artificial Sequence: Synthetic oligonucleotide
  Antisense strand to SEQ ID NO: 776796
acauuucaggagcacguuu

SEQ ID NO: 776798 - RNA, 19 nt, Artificial Sequence
  Description of Artificial Sequence: Synthetic oligonucleotide
  Sense strand starting at position 3218 of SEQ ID NO: 587233
gcuccugaaauguguagua

SEQ ID NO: 776799 - RNA, 19 nt, Artificial Sequence
  Description of Artificial Sequence: Synthetic oligonucleotide
  Antisense strand to SEQ ID NO: 776798
uacuacacauuucaggagc

SEQ ID NO: 776800 - RNA, 19 nt, Artificial Sequence
  Description of Artificial Sequence: Synthetic oligonucleotide
  Sense strand starting at position 3220 of SEQ ID NO: 587233
uccugaaauguguaguaau

SEQ ID NO: 776801 - RNA, 19 nt, Artificial Sequence
  Description of Artificial Sequence: Synthetic oligonucleotide
  Antisense strand to SEQ ID NO: 776800
auuacuacacauuucagga

SEQ ID NO: 776802 - RNA, 19 nt, Artificial Sequence
  Description of Artificial Sequence: Synthetic oligonucleotide
  Sense strand starting at position 3223 of SEQ ID NO: 587233
ugaaauguguaguaaugaa

SEQ ID NO: 776803 - RNA, 19 nt, Artificial Sequence
  Description of Artificial Sequence: Synthetic oligonucleotide
  Antisense strand to SEQ ID NO: 776802
uucauuacuacacauuuca

SEQ ID NO: 776804 - RNA, 19 nt, Artificial Sequence
  Description of Artificial Sequence: Synthetic oligonucleotide
  Sense strand starting at position 3328 of SEQ ID NO: 587233
ggagaaacagugugcucau

SEQ ID NO: 776805 - RNA, 19 nt, Artificial Sequence
  Description of Artificial Sequence: Synthetic oligonucleotide
  Antisense strand to SEQ ID NO: 776804
augagcacacuguuucucc

SEQ ID NO: 776806 - RNA, 19 nt, Artificial Sequence
  Description of Artificial Sequence: Synthetic oligonucleotide
  Sense strand starting at position 3329 of SEQ ID NO: 587233
gagaaacagugugcucaua

SEQ ID NO: 776807 - RNA, 19 nt, Artificial Sequence
  Description of Artificial Sequence: Synthetic oligonucleotide
  Antisense strand to SEQ ID NO: 776806
uaugagcacacuguuucuc

SEQ ID NO: 776808 - RNA, 19 nt, Artificial Sequence
  Description of Artificial Sequence: Synthetic oligonucleotide
  Sense strand starting at position 3331 of SEQ ID NO: 587233
gaaacagugugcucauauu

SEQ ID NO: 776809 - RNA, 19 nt, Artificial Sequence
  Description of Artificial Sequence: Synthetic oligonucleotide
  Antisense strand to SEQ ID NO: 776808
aauaugagcacacuguuuc

SEQ ID NO: 776810 - RNA, 19 nt, Artificial Sequence
  Description of Artificial Sequence: Synthetic oligonucleotide
  Sense strand starting at position 3404 of SEQ ID NO: 587233
gcauucuuuagggaagcau

SEQ ID NO: 776811 - RNA, 19 nt, Artificial Sequence
  Description of Artificial Sequence: Synthetic oligonucleotide
  Antisense strand to SEQ ID NO: 776810
augcuucccuaaagaaugc

SEQ ID NO: 776812 - RNA, 19 nt, Artificial Sequence
  Description of Artificial Sequence: Synthetic oligonucleotide
  Sense strand starting at position 3413 of SEQ ID NO: 587233
agggaagcaucauuaagua

SEQ ID NO: 776813 - RNA, 19 nt, Artificial Sequence
  Description of Artificial Sequence: Synthetic oligonucleotide
  Antisense strand to SEQ ID NO: 776812
uacuuaaugaugcuucccu

SEQ ID NO: 776814 - RNA, 19 nt, Artificial Sequence
  Description of Artificial Sequence: Synthetic oligonucleotide
  Sense strand starting at position 3451 of SEQ ID NO: 587233
gcaagaaggugcuuacucu

SEQ ID NO: 776815 - RNA, 19 nt, Artificial Sequence
  Description of Artificial Sequence: Synthetic oligonucleotide
  Antisense strand to SEQ ID NO: 776814
agaguaagcaccuucuugc

SEQ ID NO: 776816 - RNA, 19 nt, Artificial Sequence
  Description of Artificial Sequence: Synthetic oligonucleotide
  Sense strand starting at position 3452 of SEQ ID NO: 587233
caagaaggugcuuacucua

SEQ ID NO: 776817 - RNA, 19 nt, Artificial Sequence
  Description of Artificial Sequence: Synthetic oligonucleotide
  Antisense strand to SEQ ID NO: 776816
uagaguaagcaccuucuug

SEQ ID NO: 776818 - RNA, 19 nt, Artificial Sequence
  Description of Artificial Sequence: Synthetic oligonucleotide
  Sense strand starting at position 3455 of SEQ ID NO: 587233
gaaggugcuuacucuaagu

SEQ ID NO: 776819 - RNA, 19 nt, Artificial Sequence
  Description of Artificial Sequence: Synthetic oligonucleotide
  Antisense strand to SEQ ID NO: 776818
acuuagaguaagcaccuuc

SEQ ID NO: 776820 - RNA, 19 nt, Artificial Sequence
  Description of Artificial Sequence: Synthetic oligonucleotide
  Sense strand starting at position 3457 of SEQ ID NO: 587233
aggugcuuacucuaagugu

SEQ ID NO: 776821 - RNA, 19 nt, Artificial Sequence
  Description of Artificial Sequence: Synthetic oligonucleotide
  Antisense strand to SEQ ID NO: 776820
acacuuagaguaagcaccu

SEQ ID NO: 776822 - RNA, 19 nt, Artificial Sequence
  Description of Artificial Sequence: Synthetic oligonucleotide
  Sense strand starting at position 3464 of SEQ ID NO: 587233
uacucuaagugucagaaug

SEQ ID NO: 776823 - RNA, 19 nt, Artificial Sequence
  Description of Artificial Sequence: Synthetic oligonucleotide
  Antisense strand to SEQ ID NO: 776822
cauucugacacuuagagua

SEQ ID NO: 776824 - RNA, 19 nt, Artificial Sequence
  Description of Artificial Sequence: Synthetic oligonucleotide
  Sense strand starting at position 3470 of SEQ ID NO: 587233
aagugucagaaugguggau

SEQ ID NO: 776825 - RNA, 19 nt, Artificial Sequence
  Description of Artificial Sequence: Synthetic oligonucleotide
  Antisense strand to SEQ ID NO: 776824
auccaccauucugacacuu

SEQ ID NO: 776826 - RNA, 19 nt, Artificial Sequence
  Description of Artificial Sequence: Synthetic oligonucleotide
  Sense strand starting at position 3550 of SEQ ID NO: 587233
gccuguuccuuccugcaau

SEQ ID NO: 776827 - RNA, 19 nt, Artificial Sequence
  Description of Artificial Sequence: Synthetic oligonucleotide
  Antisense strand to SEQ ID NO: 776826
auugcaggaaggaacaggc

SEQ ID NO: 776828 - RNA, 19 nt, Artificial Sequence
  Description of Artificial Sequence: Synthetic oligonucleotide
  Sense strand starting at position 3623 of SEQ ID NO: 587233
guaccuuuacuguaguauu

SEQ ID NO: 776829 - RNA, 19 nt, Artificial Sequence
  Description of Artificial Sequence: Synthetic oligonucleotide
  Antisense strand to SEQ ID NO: 776828
aauacuacaguaaagguac

SEQ ID NO: 776830 - RNA, 19 nt, Artificial Sequence
  Description of Artificial Sequence: Synthetic oligonucleotide
  Sense strand starting at position 3842 of SEQ ID NO: 587233
cccagaaggcucugucauc

SEQ ID NO: 776831 - RNA, 19 nt, Artificial Sequence
  Description of Artificial Sequence: Synthetic oligonucleotide
  Antisense strand to SEQ ID NO: 776830
gaugacagagccuucuggg

SEQ ID NO: 776832 - RNA, 19 nt, Artificial Sequence
  Description of Artificial Sequence: Synthetic oligonucleotide
  Sense strand starting at position 3843 of SEQ ID NO: 587233
ccagaaggcucugucauca

SEQ ID NO: 776833 - RNA, 19 nt, Artificial Sequence
  Description of Artificial Sequence: Synthetic oligonucleotide
  Antisense strand to SEQ ID NO: 776832
ugaugacagagccuucugg

SEQ ID NO: 776834 - RNA, 19 nt, Artificial Sequence
  Description of Artificial Sequence: Synthetic oligonucleotide
  Sense strand starting at position 3908 of SEQ ID NO: 587233
ggaacuuuguugcaaggau

SEQ ID NO: 776835 - RNA, 19 nt, Artificial Sequence
  Description of Artificial Sequence: Synthetic oligonucleotide
  Antisense strand to SEQ ID NO: 776834
auccuugcaacaaaguucc

SEQ ID NO: 776836 - RNA, 19 nt, Artificial Sequence
  Description of Artificial Sequence: Synthetic oligonucleotide
  Sense strand starting at position 3940 of SEQ ID NO: 587233
gcaagauaaugucucugag

SEQ ID NO: 776837 - RNA, 19 nt, Artificial Sequence
  Description of Artificial Sequence: Synthetic oligonucleotide
  Antisense strand to SEQ ID NO: 776836
cucagagacauuaucuugc

SEQ ID NO: 776838 - RNA, 19 nt, Artificial Sequence
  Description of Artificial Sequence: Synthetic oligonucleotide
  Sense strand starting at position 67 of SEQ ID NO: 587234
ucagguaagguaugcaauu

SEQ ID NO: 776839 - RNA, 19 nt, Artificial Sequence
  Description of Artificial Sequence: Synthetic oligonucleotide
  Antisense strand to SEQ ID NO: 776838
aauugcauaccuuaccuga

SEQ ID NO: 776840 - RNA, 19 nt, Artificial Sequence
  Description of Artificial Sequence: Synthetic oligonucleotide
  Sense strand starting at position 155 of SEQ ID NO: 587234
ugguguauucugcaucaua

SEQ ID NO: 776841 - RNA, 19 nt, Artificial Sequence
  Description of Artificial Sequence: Synthetic oligonucleotide
  Antisense strand to SEQ ID NO: 776840
uaugaugcagaauacacca

SEQ ID NO: 776842 - RNA, 19 nt, Artificial Sequence
  Description of Artificial Sequence: Synthetic oligonucleotide
  Sense strand starting at position 228 of SEQ ID NO: 587234
uuaagaggugaaugacuuu

SEQ ID NO: 776843 - RNA, 19 nt, Artificial Sequence
  Description of Artificial Sequence: Synthetic oligonucleotide
  Antisense strand to SEQ ID NO: 776842
aaagucauucaccucuuaa

SEQ ID NO: 776844 - RNA, 19 nt, Artificial Sequence
  Description of Artificial Sequence: Synthetic oligonucleotide
  Sense strand starting at position 237 of SEQ ID NO: 587234
gaaugacuuuguguucuga

SEQ ID NO: 776845 - RNA, 19 nt, Artificial Sequence
  Description of Artificial Sequence: Synthetic oligonucleotide
  Antisense strand to SEQ ID NO: 776844
ucagaacacaaagucauuc

SEQ ID NO: 776846 - RNA, 19 nt, Artificial Sequence
  Description of Artificial Sequence: Synthetic oligonucleotide
  Sense strand starting at position 332 of SEQ ID NO: 587234
gacaaacuugguggaguua

SEQ ID NO: 776847 - RNA, 19 nt, Artificial Sequence
  Description of Artificial Sequence: Synthetic oligonucleotide
  Antisense strand to SEQ ID NO: 776846
uaacuccaccaaguuuguc

SEQ ID NO: 776848 - RNA, 19 nt, Artificial Sequence
  Description of Artificial Sequence: Synthetic oligonucleotide
  Sense strand starting at position 847 of SEQ ID NO: 587234
guuucucaaguuuaaucua

SEQ ID NO: 776849 - RNA, 19 nt, Artificial Sequence
  Description of Artificial Sequence: Synthetic oligonucleotide
  Antisense strand to SEQ ID NO: 776848
uagauuaaacuugagaaac

SEQ ID NO: 776850 - RNA, 19 nt, Artificial Sequence
  Description of Artificial Sequence: Synthetic oligonucleotide
  Sense strand starting at position 850 of SEQ ID NO: 587234
ucucaaguuuaaucuacga

SEQ ID NO: 776851 - RNA, 19 nt, Artificial Sequence
  Description of Artificial Sequence: Synthetic oligonucleotide
  Antisense strand to SEQ ID NO: 776850
ucguagauuaaacuugaga

SEQ ID NO: 776852 - RNA, 19 nt, Artificial Sequence
  Description of Artificial Sequence: Synthetic oligonucleotide
  Sense strand starting at position 866 of SEQ ID NO: 587234
cgaauccaaucucuacaga

SEQ ID NO: 776853 - RNA, 19 nt, Artificial Sequence
  Description of Artificial Sequence: Synthetic oligonucleotide
  Antisense strand to SEQ ID NO: 776852
ucuguagagauuggauucg

SEQ ID NO: 776854 - RNA, 19 nt, Artificial Sequence
  Description of Artificial Sequence: Synthetic oligonucleotide
  Sense strand starting at position 939 of SEQ ID NO: 587234
ccaguuaaaguuggcaaga

SEQ ID NO: 776855 - RNA, 19 nt, Artificial Sequence
  Description of Artificial Sequence: Synthetic oligonucleotide
  Antisense strand to SEQ ID NO: 776854
ucuugccaacuuuaacugg

SEQ ID NO: 776856 - RNA, 19 nt, Artificial Sequence
  Description of Artificial Sequence: Synthetic oligonucleotide
  Sense strand starting at position 944 of SEQ ID NO: 587234
uaaaguuggcaagaaaugu

SEQ ID NO: 776857 - RNA, 19 nt, Artificial Sequence
  Description of Artificial Sequence: Synthetic oligonucleotide
  Antisense strand to SEQ ID NO: 776856
acauuucuugccaacuuua

SEQ ID NO: 776858 - RNA, 19 nt, Artificial Sequence
  Description of Artificial Sequence: Synthetic oligonucleotide
  Sense strand starting at position 948 of SEQ ID NO: 587234
guuggcaagaaauguaucu

SEQ ID NO: 776859 - RNA, 19 nt, Artificial Sequence
  Description of Artificial Sequence: Synthetic oligonucleotide
  Antisense strand to SEQ ID NO: 776858
agauacauuucuugccaac

SEQ ID NO: 776860 - RNA, 19 nt, Artificial Sequence
  Description of Artificial Sequence: Synthetic oligonucleotide
  Sense strand starting at position 957 of SEQ ID NO: 587234
aaauguaucuaguuaggcu

SEQ ID NO: 776861 - RNA, 19 nt, Artificial Sequence
  Description of Artificial Sequence: Synthetic oligonucleotide
  Antisense strand to SEQ ID NO: 776860
agccuaacuagauacauuu

SEQ ID NO: 776862 - RNA, 19 nt, Artificial Sequence
  Description of Artificial Sequence: Synthetic oligonucleotide
  Sense strand starting at position 972 of SEQ ID NO: 587234
ggcuucuacgguuaacaaa

SEQ ID NO: 776863 - RNA, 19 nt, Artificial Sequence
  Description of Artificial Sequence: Synthetic oligonucleotide
  Antisense strand to SEQ ID NO: 776862
uuuguuaaccguagaagcc

SEQ ID NO: 776864 - RNA, 19 nt, Artificial Sequence
  Description of Artificial Sequence: Synthetic oligonucleotide
  Sense strand starting at position 1080 of SEQ ID NO: 587234
gcgcacuucggaguguaga

SEQ ID NO: 776865 - RNA, 19 nt, Artificial Sequence
  Description of Artificial Sequence: Synthetic oligonucleotide
  Antisense strand to SEQ ID NO: 776864
ucuacacuccgaagugcgc

SEQ ID NO: 776866 - RNA, 19 nt, Artificial Sequence
  Description of Artificial Sequence: Synthetic oligonucleotide
  Sense strand starting at position 2372 of SEQ ID NO: 587234
gugagaaaguggguguuaa

SEQ ID NO: 776867 - RNA, 19 nt, Artificial Sequence
  Description of Artificial Sequence: Synthetic oligonucleotide
  Antisense strand to SEQ ID NO: 776866
uuaacacccacuuucucac

SEQ ID NO: 776868 - RNA, 19 nt, Artificial Sequence
  Description of Artificial Sequence: Synthetic oligonucleotide
  Sense strand starting at position 2373 of SEQ ID NO: 587234
ugagaaaguggguguuaac

SEQ ID NO: 776869 - RNA, 19 nt, Artificial Sequence
  Description of Artificial Sequence: Synthetic oligonucleotide
  Antisense strand to SEQ ID NO: 776868
guuaacacccacuuucuca

SEQ ID NO: 776870 - RNA, 19 nt, Artificial Sequence
  Description of Artificial Sequence: Synthetic oligonucleotide
  Sense strand starting at position 2627 of SEQ ID NO: 587234
cauguuuaugcauagcuga

SEQ ID NO: 776871 - RNA, 19 nt, Artificial Sequence
  Description of Artificial Sequence: Synthetic oligonucleotide
  Antisense strand to SEQ ID NO: 776870
ucagcuaugcauaaacaug

SEQ ID NO: 776872 - RNA, 19 nt, Artificial Sequence
  Description of Artificial Sequence: Synthetic oligonucleotide
  Sense strand starting at position 2635 of SEQ ID NO: 587234
ugcauagcugaagaacaau

SEQ ID NO: 776873 - RNA, 19 nt, Artificial Sequence
  Description of Artificial Sequence: Synthetic oligonucleotide
  Antisense strand to SEQ ID NO: 776872
auuguucuucagcuaugca

SEQ ID NO: 776874 - RNA, 19 nt, Artificial Sequence
  Description of Artificial Sequence: Synthetic oligonucleotide
  Sense strand starting at position 2791 of SEQ ID NO: 587234
uugcgugcacauguguaau

SEQ ID NO: 776875 - RNA, 19 nt, Artificial Sequence
  Description of Artificial Sequence: Synthetic oligonucleotide
  Antisense strand to SEQ ID NO: 776874
auuacacaugugcacgcaa

SEQ ID NO: 776876 - RNA, 19 nt, Artificial Sequence
  Description of Artificial Sequence: Synthetic oligonucleotide
  Sense strand starting at position 2797 of SEQ ID NO: 587234
gcacauguguaauccauaa

SEQ ID NO: 776877 - RNA, 19 nt, Artificial Sequence
  Description of Artificial Sequence: Synthetic oligonucleotide
  Antisense strand to SEQ ID NO: 776876
uuauggauuacacaugugc

SEQ ID NO: 776878 - RNA, 19 nt, Artificial Sequence
  Description of Artificial Sequence: Synthetic oligonucleotide
  Sense strand starting at position 2982 of SEQ ID NO: 587234
ugccgaaugcuuuaccaua

SEQ ID NO: 776879 - RNA, 19 nt, Artificial Sequence
  Description of Artificial Sequence: Synthetic oligonucleotide
  Antisense strand to SEQ ID NO: 776878
uaugguaaagcauucggca

SEQ ID NO: 776880 - RNA, 19 nt, Artificial Sequence
  Description of Artificial Sequence: Synthetic oligonucleotide
  Sense strand starting at position 2984 of SEQ ID NO: 587234
ccgaaugcuuuaccauaua

SEQ ID NO: 776881 - RNA, 19 nt, Artificial Sequence
  Description of Artificial Sequence: Synthetic oligonucleotide
  Antisense strand to SEQ ID NO: 776880
uauaugguaaagcauucgg

SEQ ID NO: 776882 - RNA, 19 nt, Artificial Sequence
  Description of Artificial Sequence: Synthetic oligonucleotide
  Sense strand starting at position 3094 of SEQ ID NO: 587234
cgguauuucagugggaagu

SEQ ID NO: 776883 - RNA, 19 nt, Artificial Sequence
  Description of Artificial Sequence: Synthetic oligonucleotide
  Antisense strand to SEQ ID NO: 776882
acuucccacugaaauaccg

SEQ ID NO: 776884 - RNA, 19 nt, Artificial Sequence
  Description of Artificial Sequence: Synthetic oligonucleotide
  Sense strand starting at position 3197 of SEQ ID NO: 587234
gggacaaagccaggugaau

SEQ ID NO: 776885 - RNA, 19 nt, Artificial Sequence
  Description of Artificial Sequence: Synthetic oligonucleotide
  Antisense strand to SEQ ID NO: 776884
auucaccuggcuuuguccc

SEQ ID NO: 776886 - RNA, 19 nt, Artificial Sequence
  Description of Artificial Sequence: Synthetic oligonucleotide
  Sense strand starting at position 3301 of SEQ ID NO: 587234
uguccuguacuguaagaag

SEQ ID NO: 776887 - RNA, 19 nt, Artificial Sequence
  Description of Artificial Sequence: Synthetic oligonucleotide
  Antisense strand to SEQ ID NO: 776886
cuucuuacaguacaggaca

SEQ ID NO: 776888 - RNA, 19 nt, Artificial Sequence
  Description of Artificial Sequence: Synthetic oligonucleotide
  Sense strand starting at position 3324 of SEQ ID NO: 587234
agguuuaguacugguggaa

SEQ ID NO: 776889 - RNA, 19 nt, Artificial Sequence
  Description of Artificial Sequence: Synthetic oligonucleotide
  Antisense strand to SEQ ID NO: 776888
uuccaccaguacuaaaccu

SEQ ID NO: 776890 - RNA, 19 nt, Artificial Sequence
  Description of Artificial Sequence: Synthetic oligonucleotide
  Sense strand starting at position 3418 of SEQ ID NO: 587234
acuagaacagugugcgaaa

SEQ ID NO: 776891 - RNA, 19 nt, Artificial Sequence
  Description of Artificial Sequence: Synthetic oligonucleotide
  Antisense strand to SEQ ID NO: 776890
uuucgcacacuguucuagu

SEQ ID NO: 776892 - RNA, 19 nt, Artificial Sequence
  Description of Artificial Sequence: Synthetic oligonucleotide
  Sense strand starting at position 3463 of SEQ ID NO: 587234
uaggauugcuguguauaaa

SEQ ID NO: 776893 - RNA, 19 nt, Artificial Sequence
  Description of Artificial Sequence: Synthetic oligonucleotide
  Antisense strand to SEQ ID NO: 776892
uuuauacacagcaauccua

SEQ ID NO: 776894 - RNA, 19 nt, Artificial Sequence
  Description of Artificial Sequence: Synthetic oligonucleotide
  Sense strand starting at position 3464 of SEQ ID NO: 587234
aggauugcuguguauaaag

SEQ ID NO: 776895 - RNA, 19 nt, Artificial Sequence
  Description of Artificial Sequence: Synthetic oligonucleotide
  Antisense strand to SEQ ID NO: 776894
cuuuauacacagcaauccu

SEQ ID NO: 776896 - RNA, 19 nt, Artificial Sequence
  Description of Artificial Sequence: Synthetic oligonucleotide
  Sense strand starting at position 3472 of SEQ ID NO: 587234
uguguauaaagucaguaaa

SEQ ID NO: 776897 - RNA, 19 nt, Artificial Sequence
  Description of Artificial Sequence: Synthetic oligonucleotide
  Antisense strand to SEQ ID NO: 776896
uuuacugacuuuauacaca

SEQ ID NO: 776898 - RNA, 19 nt, Artificial Sequence
  Description of Artificial Sequence: Synthetic oligonucleotide
  Sense strand starting at position 3484 of SEQ ID NO: 587234
caguaaauauguguuuaug

SEQ ID NO: 776899 - RNA, 19 nt, Artificial Sequence
  Description of Artificial Sequence: Synthetic oligonucleotide
  Antisense strand to SEQ ID NO: 776898
cauaaacacauauuuacug

SEQ ID NO: 776900 - RNA, 19 nt, Artificial Sequence
  Description of Artificial Sequence: Synthetic oligonucleotide
  Sense strand starting at position 3500 of SEQ ID NO: 587234
auguguaaauuuguuguga

SEQ ID NO: 776901 - RNA, 19 nt, Artificial Sequence
  Description of Artificial Sequence: Synthetic oligonucleotide
  Antisense strand to SEQ ID NO: 776900
ucacaacaaauuuacacau

SEQ ID NO: 776902 - RNA, 19 nt, Artificial Sequence
  Description of Artificial Sequence: Synthetic oligonucleotide
  Sense strand starting at position 3501 of SEQ ID NO: 587234
uguguaaauuuguugugaa

SEQ ID NO: 776903 - RNA, 19 nt, Artificial Sequence
  Description of Artificial Sequence: Synthetic oligonucleotide
  Antisense strand to SEQ ID NO: 776902
uucacaacaaauuuacaca

SEQ ID NO: 776904 - RNA, 19 nt, Artificial Sequence
  Description of Artificial Sequence: Synthetic oligonucleotide
  Sense strand starting at position 3527 of SEQ ID NO: 587234
agauuacuguuagucacga

SEQ ID NO: 776905 - RNA, 19 nt, Artificial Sequence
  Description of Artificial Sequence: Synthetic oligonucleotide
  Antisense strand to SEQ ID NO: 776904
ucgugacuaacaguaaucu

SEQ ID NO: 776906 - RNA, 19 nt, Artificial Sequence
  Description of Artificial Sequence: Synthetic oligonucleotide
  Sense strand starting at position 3528 of SEQ ID NO: 587234
gauuacuguuagucacgaa

SEQ ID NO: 776907 - RNA, 19 nt, Artificial Sequence
  Description of Artificial Sequence: Synthetic oligonucleotide
  Antisense strand to SEQ ID NO: 776906
uucgugacuaacaguaauc

SEQ ID NO: 776908 - RNA, 19 nt, Artificial Sequence
  Description of Artificial Sequence: Synthetic oligonucleotide
  Sense strand starting at position 3628 of SEQ ID NO: 587234
uccugacuaucaguuauug

SEQ ID NO: 776909 - RNA, 19 nt, Artificial Sequence
  Description of Artificial Sequence: Synthetic oligonucleotide
  Antisense strand to SEQ ID NO: 776908
caauaacugauagucagga

SEQ ID NO: 776910 - RNA, 19 nt, Artificial Sequence
  Description of Artificial Sequence: Synthetic oligonucleotide
  Sense strand starting at position 3756 of SEQ ID NO: 587234
gcaaaccucuuaguugaua

SEQ ID NO: 776911 - RNA, 19 nt, Artificial Sequence
  Description of Artificial Sequence: Synthetic oligonucleotide
  Antisense strand to SEQ ID NO: 776910
uaucaacuaagagguuugc

SEQ ID NO: 776912 - RNA, 19 nt, Artificial Sequence
  Description of Artificial Sequence: Synthetic oligonucleotide
  Sense strand starting at position 3767 of SEQ ID NO: 587234
aguugauaaucagcccaca

SEQ ID NO: 776913 - RNA, 19 nt, Artificial Sequence
  Description of Artificial Sequence: Synthetic oligonucleotide
  Antisense strand to SEQ ID NO: 776912
ugugggcugauuaucaacu

SEQ ID NO: 776914 - RNA, 19 nt, Artificial Sequence
  Description of Artificial Sequence: Synthetic oligonucleotide
  Sense strand starting at position 3968 of SEQ ID NO: 587234
caaggaguuaccuguggga

SEQ ID NO: 776915 - RNA, 19 nt, Artificial Sequence
  Description of Artificial Sequence: Synthetic oligonucleotide
  Antisense strand to SEQ ID NO: 776914
ucccacagguaacuccuug

SEQ ID NO: 776916 - RNA, 19 nt, Artificial Sequence
  Description of Artificial Sequence: Synthetic oligonucleotide
  Sense strand starting at position 3972 of SEQ ID NO: 587234
gaguuaccugugggaugaa

SEQ ID NO: 776917 - RNA, 19 nt, Artificial Sequence
  Description of Artificial Sequence: Synthetic oligonucleotide
  Antisense strand to SEQ ID NO: 776916
uucaucccacagguaacuc

SEQ ID NO: 776918 - RNA, 19 nt, Artificial Sequence
  Description of Artificial Sequence: Synthetic oligonucleotide
  Sense strand starting at position 74 of SEQ ID NO: 587235
gcucauguucgccuaucca

SEQ ID NO: 776919 - RNA, 19 nt, Artificial Sequence
  Description of Artificial Sequence: Synthetic oligonucleotide
  Antisense strand to SEQ ID NO: 776918
uggauaggcgaacaugagc

SEQ ID NO: 776920 - RNA, 19 nt, Artificial Sequence
  Description of Artificial Sequence: Synthetic oligonucleotide
  Sense strand starting at position 156 of SEQ ID NO: 587235
gcaaguaguaugggucagu

SEQ ID NO: 776921 - RNA, 19 nt, Artificial Sequence
  Description of Artificial Sequence: Synthetic oligonucleotide
  Antisense strand to SEQ ID NO: 776920
acugacccauacuacuugc

SEQ ID NO: 776922 - RNA, 19 nt, Artificial Sequence
  Description of Artificial Sequence: Synthetic oligonucleotide
  Sense strand starting at position 159 of SEQ ID NO: 587235
aguaguaugggucagugga

SEQ ID NO: 776923 - RNA, 19 nt, Artificial Sequence
  Description of Artificial Sequence: Synthetic oligonucleotide
  Antisense strand to SEQ ID NO: 776922
uccacugacccauacuacu

SEQ ID NO: 776924 - RNA, 19 nt, Artificial Sequence
  Description of Artificial Sequence: Synthetic oligonucleotide
  Sense strand starting at position 305 of SEQ ID NO: 587235
uguucucauccagaucuga

SEQ ID NO: 776925 - RNA, 19 nt, Artificial Sequence
  Description of Artificial Sequence: Synthetic oligonucleotide
  Antisense strand to SEQ ID NO: 776924
ucagaucuggaugagaaca

SEQ ID NO: 776926 - RNA, 19 nt, Artificial Sequence
  Description of Artificial Sequence: Synthetic oligonucleotide
  Sense strand starting at position 701 of SEQ ID NO: 587235
cuguguuucuuagcugaag

SEQ ID NO: 776927 - RNA, 19 nt, Artificial Sequence
  Description of Artificial Sequence: Synthetic oligonucleotide
  Antisense strand to SEQ ID NO: 776926
cuucagcuaagaaacacag

SEQ ID NO: 776928 - RNA, 19 nt, Artificial Sequence
  Description of Artificial Sequence: Synthetic oligonucleotide
  Sense strand starting at position 702 of SEQ ID NO: 587235
uguguuucuuagcugaaga

SEQ ID NO: 776929 - RNA, 19 nt, Artificial Sequence
  Description of Artificial Sequence: Synthetic oligonucleotide
  Antisense strand to SEQ ID NO: 776928
ucuucagcuaagaaacaca

SEQ ID NO: 776930 - RNA, 19 nt, Artificial Sequence
  Description of Artificial Sequence: Synthetic oligonucleotide
  Sense strand starting at position 703 of SEQ ID NO: 587235
guguuucuuagcugaagac

SEQ ID NO: 776931 - RNA, 19 nt, Artificial Sequence
  Description of Artificial Sequence: Synthetic oligonucleotide
  Antisense strand to SEQ ID NO: 776930
gucuucagcuaagaaacac

SEQ ID NO: 776932 - RNA, 19 nt, Artificial Sequence
  Description of Artificial Sequence: Synthetic oligonucleotide
  Sense strand starting at position 712 of SEQ ID NO: 587235
agcugaagaccucaugagu

SEQ ID NO: 776933 - RNA, 19 nt, Artificial Sequence
  Description of Artificial Sequence: Synthetic oligonucleotide
  Antisense strand to SEQ ID NO: 776932
acucaugaggucuucagcu

SEQ ID NO: 776934 - RNA, 19 nt, Artificial Sequence
  Description of Artificial Sequence: Synthetic oligonucleotide
  Sense strand starting at position 725 of SEQ ID NO: 587235
augaguaggcuguguucca

SEQ ID NO: 776935 - RNA, 19 nt, Artificial Sequence
  Description of Artificial Sequence: Synthetic oligonucleotide
  Antisense strand to SEQ ID NO: 776934
uggaacacagccuacucau

SEQ ID NO: 776936 - RNA, 19 nt, Artificial Sequence
  Description of Artificial Sequence: Synthetic oligonucleotide
  Sense strand starting at position 803 of SEQ ID NO: 587235
uugacagacucaucuugca

SEQ ID NO: 776937 - RNA, 19 nt, Artificial Sequence
  Description of Artificial Sequence: Synthetic oligonucleotide
  Antisense strand to SEQ ID NO: 776936
ugcaagaugagucugucaa

SEQ ID NO: 776938 - RNA, 19 nt, Artificial Sequence
  Description of Artificial Sequence: Synthetic oligonucleotide
  Sense strand starting at position 822 of SEQ ID NO: 587235
ucaaguucucccugagaca

SEQ ID NO: 776939 - RNA, 19 nt, Artificial Sequence
  Description of Artificial Sequence: Synthetic oligonucleotide
  Antisense strand to SEQ ID NO: 776938
ugucucagggagaacuuga

SEQ ID NO: 776940 - RNA, 19 nt, Artificial Sequence
  Description of Artificial Sequence: Synthetic oligonucleotide
  Sense strand starting at position 863 of SEQ ID NO: 587235
guguguauggcacaggaau

SEQ ID NO: 776941 - RNA, 19 nt, Artificial Sequence
  Description of Artificial Sequence: Synthetic oligonucleotide
  Antisense strand to SEQ ID NO: 776940
auuccugugccauacacac

SEQ ID NO: 776942 - RNA, 19 nt, Artificial Sequence
  Description of Artificial Sequence: Synthetic oligonucleotide
  Sense strand starting at position 939 of SEQ ID NO: 587235
ucuauuucccugugucuga

SEQ ID NO: 776943 - RNA, 19 nt, Artificial Sequence
  Description of Artificial Sequence: Synthetic oligonucleotide
  Antisense strand to SEQ ID NO: 776942
ucagacacagggaaauaga

SEQ ID NO: 776944 - RNA, 19 nt, Artificial Sequence
  Description of Artificial Sequence: Synthetic oligonucleotide
  Sense strand starting at position 940 of SEQ ID NO: 587235
cuauuucccugugucugaa

SEQ ID NO: 776945 - RNA, 19 nt, Artificial Sequence
  Description of Artificial Sequence: Synthetic oligonucleotide
  Antisense strand to SEQ ID NO: 776944
uucagacacagggaaauag

SEQ ID NO: 776946 - RNA, 19 nt, Artificial Sequence
  Description of Artificial Sequence: Synthetic oligonucleotide
  Sense strand starting at position 943 of SEQ ID NO: 587235
uuucccugugucugaaauu

SEQ ID NO: 776947 - RNA, 19 nt, Artificial Sequence
  Description of Artificial Sequence: Synthetic oligonucleotide
  Antisense strand to SEQ ID NO: 776946
aauuucagacacagggaaa

SEQ ID NO: 776948 - RNA, 19 nt, Artificial Sequence
  Description of Artificial Sequence: Synthetic oligonucleotide
  Sense strand starting at position 1023 of SEQ ID NO: 587235
uuugauuggcauuauuaca

SEQ ID NO: 776949 - RNA, 19 nt, Artificial Sequence
  Description of Artificial Sequence: Synthetic oligonucleotide
  Antisense strand to SEQ ID NO: 776948
uguaauaaugccaaucaaa

SEQ ID NO: 776950 - RNA, 19 nt, Artificial Sequence
  Description of Artificial Sequence: Synthetic oligonucleotide
  Sense strand starting at position 1054 of SEQ ID NO: 587235
gagacuuugguaugguaua

SEQ ID NO: 776951 - RNA, 19 nt, Artificial Sequence
  Description of Artificial Sequence: Synthetic oligonucleotide
  Antisense strand to SEQ ID NO: 776950
uauaccauaccaaagucuc

SEQ ID NO: 776952 - RNA, 19 nt, Artificial Sequence
  Description of Artificial Sequence: Synthetic oligonucleotide
  Sense strand starting at position 1089 of SEQ ID NO: 587235
uuucccuuggauugagaua

SEQ ID NO: 776953 - RNA, 19 nt, Artificial Sequence
  Description of Artificial Sequence: Synthetic oligonucleotide
  Antisense strand to SEQ ID NO: 776952
uaucucaauccaagggaaa

SEQ ID NO: 776954 - RNA, 19 nt, Artificial Sequence
  Description of Artificial Sequence: Synthetic oligonucleotide
  Sense strand starting at position 1130 of SEQ ID NO: 587235
aggagagcuccucaaaguu

SEQ ID NO: 776955 - RNA, 19 nt, Artificial Sequence
  Description of Artificial Sequence: Synthetic oligonucleotide
  Antisense strand to SEQ ID NO: 776954
aacuuugaggagcucuccu

SEQ ID NO: 776956 - RNA, 19 nt, Artificial Sequence
  Description of Artificial Sequence: Synthetic oligonucleotide
  Sense strand starting at position 1202 of SEQ ID NO: 587235
gguuauccaugagaagauc

SEQ ID NO: 776957 - RNA, 19 nt, Artificial Sequence
  Description of Artificial Sequence: Synthetic oligonucleotide
  Antisense strand to SEQ ID NO: 776956
gaucuucucauggauaacc

SEQ ID NO: 776958 - RNA, 19 nt, Artificial Sequence
  Description of Artificial Sequence: Synthetic oligonucleotide
  Sense strand starting at position 1214 of SEQ ID NO: 587235
gaagauccaugguaauacu

SEQ ID NO: 776959 - RNA, 19 nt, Artificial Sequence
  Description of Artificial Sequence: Synthetic oligonucleotide
  Antisense strand to SEQ ID NO: 776958
aguauuaccauggaucuuc

SEQ ID NO: 776960 - RNA, 19 nt, Artificial Sequence
  Description of Artificial Sequence: Synthetic oligonucleotide
  Sense strand starting at position 1247 of SEQ ID NO: 587235
acuuauuuccaucgugcua

SEQ ID NO: 776961 - RNA, 19 nt, Artificial Sequence
  Description of Artificial Sequence: Synthetic oligonucleotide
  Antisense strand to SEQ ID NO: 776960
uagcacgauggaaauaagu

SEQ ID NO: 776962 - RNA, 19 nt, Artificial Sequence
  Description of Artificial Sequence: Synthetic oligonucleotide
  Sense strand starting at position 1270 of SEQ ID NO: 587235
guaugucuccuauaagcua

SEQ ID NO: 776963 - RNA, 19 nt, Artificial Sequence
  Description of Artificial Sequence: Synthetic oligonucleotide
  Antisense strand to SEQ ID NO: 776962
uagcuuauaggagacauac

SEQ ID NO: 776964 - RNA, 19 nt, Artificial Sequence
  Description of Artificial Sequence: Synthetic oligonucleotide
  Sense strand starting at position 1295 of SEQ ID NO: 587235
gcaacuucugaacagcuaa

SEQ ID NO: 776965 - RNA, 19 nt, Artificial Sequence
  Description of Artificial Sequence: Synthetic oligonucleotide
  Antisense strand to SEQ ID NO: 776964
uuagcuguucagaaguugc

SEQ ID NO: 776966 - RNA, 19 nt, Artificial Sequence
  Description of Artificial Sequence: Synthetic oligonucleotide
  Sense strand starting at position 1321 of SEQ ID NO: 587235
cccucugugacauggaaag

SEQ ID NO: 776967 - RNA, 19 nt, Artificial Sequence
  Description of Artificial Sequence: Synthetic oligonucleotide
  Antisense strand to SEQ ID NO: 776966
cuuuccaugucacagaggg

SEQ ID NO: 776968 - RNA, 19 nt, Artificial Sequence
  Description of Artificial Sequence: Synthetic oligonucleotide
  Sense strand starting at position 1469 of SEQ ID NO: 587235
aggguaaagacaugcaucu

SEQ ID NO: 776969 - RNA, 19 nt, Artificial Sequence
  Description of Artificial Sequence: Synthetic oligonucleotide
  Antisense strand to SEQ ID NO: 776968
agaugcaugucuuuacccu

SEQ ID NO: 776970 - RNA, 19 nt, Artificial Sequence
  Description of Artificial Sequence: Synthetic oligonucleotide
  Sense strand starting at position 1868 of SEQ ID NO: 587235
ggucggagacuuugaggua

SEQ ID NO: 776971 - RNA, 19 nt, Artificial Sequence
  Description of Artificial Sequence: Synthetic oligonucleotide
  Antisense strand to SEQ ID NO: 776970
uaccucaaagucuccgacc

SEQ ID NO: 776972 - RNA, 19 nt, Artificial Sequence
  Description of Artificial Sequence: Synthetic oligonucleotide
  Sense strand starting at position 2298 of SEQ ID NO: 587235
ggagguucgcuuguguguu

SEQ ID NO: 776973 - RNA, 19 nt, Artificial Sequence
  Description of Artificial Sequence: Synthetic oligonucleotide
  Antisense strand to SEQ ID NO: 776972
aacacacaagcgaaccucc

SEQ ID NO: 776974 - RNA, 19 nt, Artificial Sequence
  Description of Artificial Sequence: Synthetic oligonucleotide
  Sense strand starting at position 2305 of SEQ ID NO: 587235
cgcuuguguguuccggaga

SEQ ID NO: 776975 - RNA, 19 nt, Artificial Sequence
  Description of Artificial Sequence: Synthetic oligonucleotide
  Antisense strand to SEQ ID NO: 776974
ucuccggaacacacaagcg

SEQ ID NO: 776976 - RNA, 19 nt, Artificial Sequence
  Description of Artificial Sequence: Synthetic oligonucleotide
  Sense strand starting at position 2353 of SEQ ID NO: 587235
aggcuagagucacuaaauc

SEQ ID NO: 776977 - RNA, 19 nt, Artificial Sequence
  Description of Artificial Sequence: Synthetic oligonucleotide
  Antisense strand to SEQ ID NO: 776976
gauuuagugacucuagccu

SEQ ID NO: 776978 - RNA, 19 nt, Artificial Sequence
  Description of Artificial Sequence: Synthetic oligonucleotide
  Sense strand starting at position 2409 of SEQ ID NO: 587235
cauucugcccguuagagga

SEQ ID NO: 776979 - RNA, 19 nt, Artificial Sequence
  Description of Artificial Sequence: Synthetic oligonucleotide
  Antisense strand to SEQ ID NO: 776978
uccucuaacgggcagaaug

SEQ ID NO: 776980 - RNA, 19 nt, Artificial Sequence
  Description of Artificial Sequence: Synthetic oligonucleotide
  Sense strand starting at position 2664 of SEQ ID NO: 587235
guguguuucuuacuauauc

SEQ ID NO: 776981 - RNA, 19 nt, Artificial Sequence
  Description of Artificial Sequence: Synthetic oligonucleotide
  Antisense strand to SEQ ID NO: 776980
gauauaguaagaaacacac

SEQ ID NO: 776982 - RNA, 19 nt, Artificial Sequence
  Description of Artificial Sequence: Synthetic oligonucleotide
  Sense strand starting at position 2775 of SEQ ID NO: 587235
aagacaguuugccuuuagu

SEQ ID NO: 776983 - RNA, 19 nt, Artificial Sequence
  Description of Artificial Sequence: Synthetic oligonucleotide
  Antisense strand to SEQ ID NO: 776982
acuaaaggcaaacugucuu

SEQ ID NO: 776984 - RNA, 19 nt, Artificial Sequence
  Description of Artificial Sequence: Synthetic oligonucleotide
  Sense strand starting at position 2831 of SEQ ID NO: 587235
gucagauugucauuccgug

SEQ ID NO: 776985 - RNA, 19 nt, Artificial Sequence
  Description of Artificial Sequence: Synthetic oligonucleotide
  Antisense strand to SEQ ID NO: 776984
cacggaaugacaaucugac

SEQ ID NO: 776986 - RNA, 19 nt, Artificial Sequence
  Description of Artificial Sequence: Synthetic oligonucleotide
  Sense strand starting at position 2847 of SEQ ID NO: 587235
gugcuaaaugcauaaucug

SEQ ID NO: 776987 - RNA, 19 nt, Artificial Sequence
  Description of Artificial Sequence: Synthetic oligonucleotide
  Antisense strand to SEQ ID NO: 776986
cagauuaugcauuuagcac

SEQ ID NO: 776988 - RNA, 19 nt, Artificial Sequence
  Description of Artificial Sequence: Synthetic oligonucleotide
  Sense strand starting at position 3447 of SEQ ID NO: 587235
uuuggaacugaucacguau

SEQ ID NO: 776989 - RNA, 19 nt, Artificial Sequence
  Description of Artificial Sequence: Synthetic oligonucleotide
  Antisense strand to SEQ ID NO: 776988
auacgugaucaguuccaaa

SEQ ID NO: 776990 - RNA, 19 nt, Artificial Sequence
  Description of Artificial Sequence: Synthetic oligonucleotide
  Sense strand starting at position 3449 of SEQ ID NO: 587235
uggaacugaucacguauuu

SEQ ID NO: 776991 - RNA, 19 nt, Artificial Sequence
  Description of Artificial Sequence: Synthetic oligonucleotide
  Antisense strand to SEQ ID NO: 776990
aaauacgugaucaguucca

SEQ ID NO: 776992 - RNA, 19 nt, Artificial Sequence
  Description of Artificial Sequence: Synthetic oligonucleotide
  Sense strand starting at position 3547 of SEQ ID NO: 587235
aaugcauggccacgucuaa

SEQ ID NO: 776993 - RNA, 19 nt, Artificial Sequence
  Description of Artificial Sequence: Synthetic oligonucleotide
  Antisense strand to SEQ ID NO: 776992
uuagacguggccaugcauu

SEQ ID NO: 776994 - RNA, 19 nt, Artificial Sequence
  Description of Artificial Sequence: Synthetic oligonucleotide
  Sense strand starting at position 3561 of SEQ ID NO: 587235
ucuaaucgucaacgacauu

SEQ ID NO: 776995 - RNA, 19 nt, Artificial Sequence
  Description of Artificial Sequence: Synthetic oligonucleotide
  Antisense strand to SEQ ID NO: 776994
aaugucguugacgauuaga

SEQ ID NO: 776996 - RNA, 19 nt, Artificial Sequence
  Description of Artificial Sequence: Synthetic oligonucleotide
  Sense strand starting at position 3710 of SEQ ID NO: 587235
gucucuccgucucuacuaa

SEQ ID NO: 776997 - RNA, 19 nt, Artificial Sequence
  Description of Artificial Sequence: Synthetic oligonucleotide
  Antisense strand to SEQ ID NO: 776996
uuaguagagacggagagac

SEQ ID NO: 776998 - RNA, 19 nt, Artificial Sequence
  Description of Artificial Sequence: Synthetic oligonucleotide
  Sense strand starting at position 101 of SEQ ID NO: 587236
cgguuaacagacuaacuua

SEQ ID NO: 776999 - RNA, 19 nt, Artificial Sequence
  Description of Artificial Sequence: Synthetic oligonucleotide
  Antisense strand to SEQ ID NO: 776998
uaaguuagucuguuaaccg

SEQ ID NO: 777000 - RNA, 19 nt, Artificial Sequence
  Description of Artificial Sequence: Synthetic oligonucleotide
  Sense strand starting at position 278 of SEQ ID NO: 587236
gaaugaauugcagaagugu

SEQ ID NO: 777001 - RNA, 19 nt, Artificial Sequence
  Description of Artificial Sequence: Synthetic oligonucleotide
  Antisense strand to SEQ ID NO: 777000
acacuucugcaauucauuc

SEQ ID NO: 777002 - RNA, 19 nt, Artificial Sequence
  Description of Artificial Sequence: Synthetic oligonucleotide
  Sense strand starting at position 330 of SEQ ID NO: 587236
acuuaaaugguuuguagau

SEQ ID NO: 777003 - RNA, 19 nt, Artificial Sequence
  Description of Artificial Sequence: Synthetic oligonucleotide
  Antisense strand to SEQ ID NO: 777002
aucuacaaaccauuuaagu

SEQ ID NO: 777004 - RNA, 19 nt, Artificial Sequence
  Description of Artificial Sequence: Synthetic oligonucleotide
  Sense strand starting at position 331 of SEQ ID NO: 587236
cuuaaaugguuuguagaua

SEQ ID NO: 777005 - RNA, 19 nt, Artificial Sequence
  Description of Artificial Sequence: Synthetic oligonucleotide
  Antisense strand to SEQ ID NO: 777004
uaucuacaaaccauuuaag

SEQ ID NO: 777006 - RNA, 19 nt, Artificial Sequence
  Description of Artificial Sequence: Synthetic oligonucleotide
  Sense strand starting at position 463 of SEQ ID NO: 587236
acuacaaugcccugagaag

SEQ ID NO: 777007 - RNA, 19 nt, Artificial Sequence
  Description of Artificial Sequence: Synthetic oligonucleotide
  Antisense strand to SEQ ID NO: 777006
cuucucagggcauuguagu

SEQ ID NO: 777008 - RNA, 19 nt, Artificial Sequence
  Description of Artificial Sequence: Synthetic oligonucleotide
  Sense strand starting at position 903 of SEQ ID NO: 587236
gcuuaagagguacauacuu

SEQ ID NO: 777009 - RNA, 19 nt, Artificial Sequence
  Description of Artificial Sequence: Synthetic oligonucleotide
  Antisense strand to SEQ ID NO: 777008
aaguauguaccucuuaagc

SEQ ID NO: 777010 - RNA, 19 nt, Artificial Sequence
  Description of Artificial Sequence: Synthetic oligonucleotide
  Sense strand starting at position 1098 of SEQ ID NO: 587236
gccgucuugcaauugcaaa

SEQ ID NO: 777011 - RNA, 19 nt, Artificial Sequence
  Description of Artificial Sequence: Synthetic oligonucleotide
  Antisense strand to SEQ ID NO: 777010
uuugcaauugcaagacggc

SEQ ID NO: 777012 - RNA, 19 nt, Artificial Sequence
  Description of Artificial Sequence: Synthetic oligonucleotide
  Sense strand starting at position 1271 of SEQ ID NO: 587236
guuccagauguugaaguuu

SEQ ID NO: 777013 - RNA, 19 nt, Artificial Sequence
  Description of Artificial Sequence: Synthetic oligonucleotide
  Antisense strand to SEQ ID NO: 777012
aaacuucaacaucuggaac

SEQ ID NO: 777014 - RNA, 19 nt, Artificial Sequence
  Description of Artificial Sequence: Synthetic oligonucleotide
  Sense strand starting at position 1379 of SEQ ID NO: 587236
caucguguucuggaagaau

SEQ ID NO: 777015 - RNA, 19 nt, Artificial Sequence
  Description of Artificial Sequence: Synthetic oligonucleotide
  Antisense strand to SEQ ID NO: 777014
auucuuccagaacacgaug

SEQ ID NO: 777016 - RNA, 19 nt, Artificial Sequence
  Description of Artificial Sequence: Synthetic oligonucleotide
  Sense strand starting at position 1382 of SEQ ID NO: 587236
cguguucuggaagaaugaa

SEQ ID NO: 777017 - RNA, 19 nt, Artificial Sequence
  Description of Artificial Sequence: Synthetic oligonucleotide
  Antisense strand to SEQ ID NO: 777016
uucauucuuccagaacacg

SEQ ID NO: 777018 - RNA, 19 nt, Artificial Sequence
  Description of Artificial Sequence: Synthetic oligonucleotide
  Sense strand starting at position 1477 of SEQ ID NO: 587236
cacccuaugugagucagaa

SEQ ID NO: 777019 - RNA, 19 nt, Artificial Sequence
  Description of Artificial Sequence: Synthetic oligonucleotide
  Antisense strand to SEQ ID NO: 777018
uucugacucacauagggug

SEQ ID NO: 777020 - RNA, 19 nt, Artificial Sequence
  Description of Artificial Sequence: Synthetic oligonucleotide
  Sense strand starting at position 1479 of SEQ ID NO: 587236
cccuaugugagucagaaug

SEQ ID NO: 777021 - RNA, 19 nt, Artificial Sequence
  Description of Artificial Sequence: Synthetic oligonucleotide
  Antisense strand to SEQ ID NO: 777020
cauucugacucacauaggg

SEQ ID NO: 777022 - RNA, 19 nt, Artificial Sequence
  Description of Artificial Sequence: Synthetic oligonucleotide
  Sense strand starting at position 1650 of SEQ ID NO: 587236
aaagaaagcguuugaagaa

SEQ ID NO: 777023 - RNA, 19 nt, Artificial Sequence
  Description of Artificial Sequence: Synthetic oligonucleotide
  Antisense strand to SEQ ID NO: 777022
uucuucaaacgcuuucuuu

SEQ ID NO: 777024 - RNA, 19 nt, Artificial Sequence
  Description of Artificial Sequence: Synthetic oligonucleotide
  Sense strand starting at position 1688 of SEQ ID NO: 587236
auuuguuagcuuuguucua

SEQ ID NO: 777025 - RNA, 19 nt, Artificial Sequence
  Description of Artificial Sequence: Synthetic oligonucleotide
  Antisense strand to SEQ ID NO: 777024
uagaacaaagcuaacaaau

SEQ ID NO: 777026 - RNA, 19 nt, Artificial Sequence
  Description of Artificial Sequence: Synthetic oligonucleotide
  Sense strand starting at position 1802 of SEQ ID NO: 587236
cugugugaccguucagcau

SEQ ID NO: 777027 - RNA, 19 nt, Artificial Sequence
  Description of Artificial Sequence: Synthetic oligonucleotide
  Antisense strand to SEQ ID NO: 777026
augcugaacggucacacag

SEQ ID NO: 777028 - RNA, 19 nt, Artificial Sequence
  Description of Artificial Sequence: Synthetic oligonucleotide
  Sense strand starting at position 1845 of SEQ ID NO: 587236
guacauauucuagacccuu

SEQ ID NO: 777029 - RNA, 19 nt, Artificial Sequence
  Description of Artificial Sequence: Synthetic oligonucleotide
  Antisense strand to SEQ ID NO: 777028
aagggucuagaauauguac

SEQ ID NO: 777030 - RNA, 19 nt, Artificial Sequence
  Description of Artificial Sequence: Synthetic oligonucleotide
  Sense strand starting at position 2062 of SEQ ID NO: 587236
caugaccucgaucauguau

SEQ ID NO: 777031 - RNA, 19 nt, Artificial Sequence
  Description of Artificial Sequence: Synthetic oligonucleotide
  Antisense strand to SEQ ID NO: 777030
auacaugaucgaggucaug

SEQ ID NO: 777032 - RNA, 19 nt, Artificial Sequence
  Description of Artificial Sequence: Synthetic oligonucleotide
  Sense strand starting at position 2262 of SEQ ID NO: 587236
uggcauaauguccaaugga

SEQ ID NO: 777033 - RNA, 19 nt, Artificial Sequence
  Description of Artificial Sequence: Synthetic oligonucleotide
  Antisense strand to SEQ ID NO: 777032
uccauuggacauuaugcca

SEQ ID NO: 777034 - RNA, 19 nt, Artificial Sequence
  Description of Artificial Sequence: Synthetic oligonucleotide
  Sense strand starting at position 2496 of SEQ ID NO: 587236
ugcacaaagcaauauagua

SEQ ID NO: 777035 - RNA, 19 nt, Artificial Sequence
  Description of Artificial Sequence: Synthetic oligonucleotide
  Antisense strand to SEQ ID NO: 777034
uacuauauugcuuugugca

SEQ ID NO: 777036 - RNA, 19 nt, Artificial Sequence
  Description of Artificial Sequence: Synthetic oligonucleotide
  Sense strand starting at position 2516 of SEQ ID NO: 587236
gugcauauuaaagaggguu

SEQ ID NO: 777037 - RNA, 19 nt, Artificial Sequence
  Description of Artificial Sequence: Synthetic oligonucleotide
  Antisense strand to SEQ ID NO: 777036
aacccucuuuaauaugcac

SEQ ID NO: 777038 - RNA, 19 nt, Artificial Sequence
  Description of Artificial Sequence: Synthetic oligonucleotide
  Sense strand starting at position 2518 of SEQ ID NO: 587236
gcauauuaaagaggguuau

SEQ ID NO: 777039 - RNA, 19 nt, Artificial Sequence
  Description of Artificial Sequence: Synthetic oligonucleotide
  Antisense strand to SEQ ID NO: 777038
auaacccucuuuaauaugc

SEQ ID NO: 777040 - RNA, 19 nt, Artificial Sequence
  Description of Artificial Sequence: Synthetic oligonucleotide
  Sense strand starting at position 2524 of SEQ ID NO: 587236
uaaagaggguuaucuaagu

SEQ ID NO: 777041 - RNA, 19 nt, Artificial Sequence
  Description of Artificial Sequence: Synthetic oligonucleotide
  Antisense strand to SEQ ID NO: 777040
acuuagauaacccucuuua

SEQ ID NO: 777042 - RNA, 19 nt, Artificial Sequence
  Description of Artificial Sequence: Synthetic oligonucleotide
  Sense strand starting at position 2529 of SEQ ID NO: 587236
aggguuaucuaaguaccuu

SEQ ID NO: 777043 - RNA, 19 nt, Artificial Sequence
  Description of Artificial Sequence: Synthetic oligonucleotide
  Antisense strand to SEQ ID NO: 777042
aagguacuuagauaacccu

SEQ ID NO: 777044 - RNA, 19 nt, Artificial Sequence
  Description of Artificial Sequence: Synthetic oligonucleotide
  Sense strand starting at position 2550 of SEQ ID NO: 587236
gguauaggguucuuaaaug

SEQ ID NO: 777045 - RNA, 19 nt, Artificial Sequence
  Description of Artificial Sequence: Synthetic oligonucleotide
  Antisense strand to SEQ ID NO: 777044
cauuuaagaacccuauacc

SEQ ID NO: 777046 - RNA, 19 nt, Artificial Sequence
  Description of Artificial Sequence: Synthetic oligonucleotide
  Sense strand starting at position 2573 of SEQ ID NO: 587236
ugguguccugaucagaaug

SEQ ID NO: 777047 - RNA, 19 nt, Artificial Sequence
  Description of Artificial Sequence: Synthetic oligonucleotide
  Antisense strand to SEQ ID NO: 777046
cauucugaucaggacacca

SEQ ID NO: 777048 - RNA, 19 nt, Artificial Sequence
  Description of Artificial Sequence: Synthetic oligonucleotide
  Sense strand starting at position 2667 of SEQ ID NO: 587236
gcuugagaauuauuaauuc

SEQ ID NO: 777049 - RNA, 19 nt, Artificial Sequence
  Description of Artificial Sequence: Synthetic oligonucleotide
  Antisense strand to SEQ ID NO: 777048
gaauuaauaauucucaagc

SEQ ID NO: 777050 - RNA, 19 nt, Artificial Sequence
  Description of Artificial Sequence: Synthetic oligonucleotide
  Sense strand starting at position 2866 of SEQ ID NO: 587236
ugcuucugugaaggaagaa

SEQ ID NO: 777051 - RNA, 19 nt, Artificial Sequence
  Description of Artificial Sequence: Synthetic oligonucleotide
  Antisense strand to SEQ ID NO: 777050
uucuuccuucacagaagca

SEQ ID NO: 777052 - RNA, 19 nt, Artificial Sequence
  Description of Artificial Sequence: Synthetic oligonucleotide
  Sense strand starting at position 2979 of SEQ ID NO: 587236
agggaacggcuuugagauc

SEQ ID NO: 777053 - RNA, 19 nt, Artificial Sequence
  Description of Artificial Sequence: Synthetic oligonucleotide
  Antisense strand to SEQ ID NO: 777052
gaucucaaagccguucccu

SEQ ID NO: 777054 - RNA, 19 nt, Artificial Sequence
  Description of Artificial Sequence: Synthetic oligonucleotide
  Sense strand starting at position 2990 of SEQ ID NO: 587236
uugagaucuuuacuagaug

SEQ ID NO: 777055 - RNA, 19 nt, Artificial Sequence
  Description of Artificial Sequence: Synthetic oligonucleotide
  Antisense strand to SEQ ID NO: 777054
caucuaguaaagaucucaa

SEQ ID NO: 777056 - RNA, 19 nt, Artificial Sequence
  Description of Artificial Sequence: Synthetic oligonucleotide
  Sense strand starting at position 3016 of SEQ ID NO: 587236
ccugaauuaugaguuggga

SEQ ID NO: 777057 - RNA, 19 nt, Artificial Sequence
  Description of Artificial Sequence: Synthetic oligonucleotide
  Antisense strand to SEQ ID NO: 777056
ucccaacucauaauucagg

SEQ ID NO: 777058 - RNA, 19 nt, Artificial Sequence
  Description of Artificial Sequence: Synthetic oligonucleotide
  Sense strand starting at position 3018 of SEQ ID NO: 587236
ugaauuaugaguugggauu

SEQ ID NO: 777059 - RNA, 19 nt, Artificial Sequence
  Description of Artificial Sequence: Synthetic oligonucleotide
  Antisense strand to SEQ ID NO: 777058
aaucccaacucauaauuca

SEQ ID NO: 777060 - RNA, 19 nt, Artificial Sequence
  Description of Artificial Sequence: Synthetic oligonucleotide
  Sense strand starting at position 3107 of SEQ ID NO: 587236
cucccaugucuuggaagga

SEQ ID NO: 777061 - RNA, 19 nt, Artificial Sequence
  Description of Artificial Sequence: Synthetic oligonucleotide
  Antisense strand to SEQ ID NO: 777060
uccuuccaagacaugggag

SEQ ID NO: 777062 - RNA, 19 nt, Artificial Sequence
  Description of Artificial Sequence: Synthetic oligonucleotide
  Sense strand starting at position 3407 of SEQ ID NO: 587236
auaauaauggcaugcauua

SEQ ID NO: 777063 - RNA, 19 nt, Artificial Sequence
  Description of Artificial Sequence: Synthetic oligonucleotide
  Antisense strand to SEQ ID NO: 777062
uaaugcaugccauuauuau

SEQ ID NO: 777064 - RNA, 19 nt, Artificial Sequence
  Description of Artificial Sequence: Synthetic oligonucleotide
  Sense strand starting at position 3420 of SEQ ID NO: 587236
gcauuaagaccuuacuguu

SEQ ID NO: 777065 - RNA, 19 nt, Artificial Sequence
  Description of Artificial Sequence: Synthetic oligonucleotide
  Antisense strand to SEQ ID NO: 777064
aacaguaaggucuuaaugc

SEQ ID NO: 777066 - RNA, 19 nt, Artificial Sequence
  Description of Artificial Sequence: Synthetic oligonucleotide
  Sense strand starting at position 3489 of SEQ ID NO: 587236
accuaagaucacggauauc

SEQ ID NO: 777067 - RNA, 19 nt, Artificial Sequence
  Description of Artificial Sequence: Synthetic oligonucleotide
  Antisense strand to SEQ ID NO: 777066
gauauccgugaucuuaggu

SEQ ID NO: 777068 - RNA, 19 nt, Artificial Sequence
  Description of Artificial Sequence: Synthetic oligonucleotide
  Sense strand starting at position 3553 of SEQ ID NO: 587236
aggcuaacaggauguaauu

SEQ ID NO: 777069 - RNA, 19 nt, Artificial Sequence
  Description of Artificial Sequence: Synthetic oligonucleotide
  Antisense strand to SEQ ID NO: 777068
aauuacauccuguuagccu

SEQ ID NO: 777070 - RNA, 19 nt, Artificial Sequence
  Description of Artificial Sequence: Synthetic oligonucleotide
  Sense strand starting at position 3582 of SEQ ID NO: 587236
gcaagugauggcgccagua

SEQ ID NO: 777071 - RNA, 19 nt, Artificial Sequence
  Description of Artificial Sequence: Synthetic oligonucleotide
  Antisense strand to SEQ ID NO: 777070
uacuggcgccaucacuugc

SEQ ID NO: 777072 - RNA, 19 nt, Artificial Sequence
  Description of Artificial Sequence: Synthetic oligonucleotide
  Sense strand starting at position 3658 of SEQ ID NO: 587236
uuggaaaucucugcaagga

SEQ ID NO: 777073 - RNA, 19 nt, Artificial Sequence
  Description of Artificial Sequence: Synthetic oligonucleotide
  Antisense strand to SEQ ID NO: 777072
uccuugcagagauuuccaa

SEQ ID NO: 777074 - RNA, 19 nt, Artificial Sequence
  Description of Artificial Sequence: Synthetic oligonucleotide
  Sense strand starting at position 3771 of SEQ ID NO: 587236
agaguaucucuccaaagug

SEQ ID NO: 777075 - RNA, 19 nt, Artificial Sequence
  Description of Artificial Sequence: Synthetic oligonucleotide
  Antisense strand to SEQ ID NO: 777074
cacuuuggagagauacucu

SEQ ID NO: 777076 - RNA, 19 nt, Artificial Sequence
  Description of Artificial Sequence: Synthetic oligonucleotide
  Sense strand starting at position 3902 of SEQ ID NO: 587236
aaugcagguugucuaagaa

SEQ ID NO: 777077 - RNA, 19 nt, Artificial Sequence
  Description of Artificial Sequence: Synthetic oligonucleotide
  Antisense strand to SEQ ID NO: 777076
uucuuagacaaccugcauu

SEQ ID NO: 777078 - RNA, 19 nt, Artificial Sequence
  Description of Artificial Sequence: Synthetic oligonucleotide
  Sense strand starting at position 22 of SEQ ID NO: 587237
aucuacauuugauagguca

SEQ ID NO: 777079 - RNA, 19 nt, Artificial Sequence
  Description of Artificial Sequence: Synthetic oligonucleotide
  Antisense strand to SEQ ID NO: 777078
ugaccuaucaaauguagau

SEQ ID NO: 777080 - RNA, 19 nt, Artificial Sequence
  Description of Artificial Sequence: Synthetic oligonucleotide
  Sense strand starting at position 193 of SEQ ID NO: 587237
ccgauuaggcuccaagauc

SEQ ID NO: 777081 - RNA, 19 nt, Artificial Sequence
  Description of Artificial Sequence: Synthetic oligonucleotide
  Antisense strand to SEQ ID NO: 777080
gaucuuggagccuaaucgg

SEQ ID NO: 777082 - RNA, 19 nt, Artificial Sequence
  Description of Artificial Sequence: Synthetic oligonucleotide
  Sense strand starting at position 224 of SEQ ID NO: 587237
cagauaagguguccuaaca

SEQ ID NO: 777083 - RNA, 19 nt, Artificial Sequence
  Description of Artificial Sequence: Synthetic oligonucleotide
  Antisense strand to SEQ ID NO: 777082
uguuaggacaccuuaucug

SEQ ID NO: 777084 - RNA, 19 nt, Artificial Sequence
  Description of Artificial Sequence: Synthetic oligonucleotide
  Sense strand starting at position 292 of SEQ ID NO: 587237
agggucaugcgucaaauga

SEQ ID NO: 777085 - RNA, 19 nt, Artificial Sequence
  Description of Artificial Sequence: Synthetic oligonucleotide
  Antisense strand to SEQ ID NO: 777084
ucauuugacgcaugacccu

SEQ ID NO: 777086 - RNA, 19 nt, Artificial Sequence
  Description of Artificial Sequence: Synthetic oligonucleotide
  Sense strand starting at position 599 of SEQ ID NO: 587237
gugggaucaucugugaaac

SEQ ID NO: 777087 - RNA, 19 nt, Artificial Sequence
  Description of Artificial Sequence: Synthetic oligonucleotide
  Antisense strand to SEQ ID NO: 777086
guuucacagaugaucccac

SEQ ID NO: 777088 - RNA, 19 nt, Artificial Sequence
  Description of Artificial Sequence: Synthetic oligonucleotide
  Sense strand starting at position 609 of SEQ ID NO: 587237
cugugaaacaguggaauca

SEQ ID NO: 777089 - RNA, 19 nt, Artificial Sequence
  Description of Artificial Sequence: Synthetic oligonucleotide
  Antisense strand to SEQ ID NO: 777088
ugauuccacuguuucacag

SEQ ID NO: 777090 - RNA, 19 nt, Artificial Sequence
  Description of Artificial Sequence: Synthetic oligonucleotide
  Sense strand starting at position 663 of SEQ ID NO: 587237
guggcaugacuugaacaua

SEQ ID NO: 777091 - RNA, 19 nt, Artificial Sequence
  Description of Artificial Sequence: Synthetic oligonucleotide
  Antisense strand to SEQ ID NO: 777090
uauguucaagucaugccac

SEQ ID NO: 777092 - RNA, 19 nt, Artificial Sequence
  Description of Artificial Sequence: Synthetic oligonucleotide
  Sense strand starting at position 830 of SEQ ID NO: 587237
aggucugcuuuauuuaauu

SEQ ID NO: 777093 - RNA, 19 nt, Artificial Sequence
  Description of Artificial Sequence: Synthetic oligonucleotide
  Antisense strand to SEQ ID NO: 777092
aauuaaauaaagcagaccu

SEQ ID NO: 777094 - RNA, 19 nt, Artificial Sequence
  Description of Artificial Sequence: Synthetic oligonucleotide
  Sense strand starting at position 921 of SEQ ID NO: 587237
auccguuaugccucgguca

SEQ ID NO: 777095 - RNA, 19 nt, Artificial Sequence
  Description of Artificial Sequence: Synthetic oligonucleotide
  Antisense strand to SEQ ID NO: 777094
ugaccgaggcauaacggau

SEQ ID NO: 777096 - RNA, 19 nt, Artificial Sequence
  Description of Artificial Sequence: Synthetic oligonucleotide
  Sense strand starting at position 1034 of SEQ ID NO: 587237
auggguguuacugagcuua

SEQ ID NO: 777097 - RNA, 19 nt, Artificial Sequence
  Description of Artificial Sequence: Synthetic oligonucleotide
  Antisense strand to SEQ ID NO: 777096
uaagcucaguaacacccau

SEQ ID NO: 777098 - RNA, 19 nt, Artificial Sequence
  Description of Artificial Sequence: Synthetic oligonucleotide
  Sense strand starting at position 1036 of SEQ ID NO: 587237
ggguguuacugagcuuaaa

SEQ ID NO: 777099 - RNA, 19 nt, Artificial Sequence
  Description of Artificial Sequence: Synthetic oligonucleotide
  Antisense strand to SEQ ID NO: 777098
uuuaagcucaguaacaccc

SEQ ID NO: 777100 - RNA, 19 nt, Artificial Sequence
  Description of Artificial Sequence: Synthetic oligonucleotide
  Sense strand starting at position 1039 of SEQ ID NO: 587237
uguuacugagcuuaaacga

SEQ ID NO: 777101 - RNA, 19 nt, Artificial Sequence
  Description of Artificial Sequence: Synthetic oligonucleotide
  Antisense strand to SEQ ID NO: 777100
ucguuuaagcucaguaaca

SEQ ID NO: 777102 - RNA, 19 nt, Artificial Sequence
  Description of Artificial Sequence: Synthetic oligonucleotide
  Sense strand starting at position 1044 of SEQ ID NO: 587237
cugagcuuaaacgauguaa

SEQ ID NO: 777103 - RNA, 19 nt, Artificial Sequence
  Description of Artificial Sequence: Synthetic oligonucleotide
  Antisense strand to SEQ ID NO: 777102
uuacaucguuuaagcucag

SEQ ID NO: 777104 - RNA, 19 nt, Artificial Sequence
  Description of Artificial Sequence: Synthetic oligonucleotide
  Sense strand starting at position 1046 of SEQ ID NO: 587237
gagcuuaaacgauguaaac

SEQ ID NO: 777105 - RNA, 19 nt, Artificial Sequence
  Description of Artificial Sequence: Synthetic oligonucleotide
  Antisense strand to SEQ ID NO: 777104
guuuacaucguuuaagcuc

SEQ ID NO: 777106 - RNA, 19 nt, Artificial Sequence
  Description of Artificial Sequence: Synthetic oligonucleotide
  Sense strand starting at position 1682 of SEQ ID NO: 587237
guaauaaaccagcagcuua

SEQ ID NO: 777107 - RNA, 19 nt, Artificial Sequence
  Description of Artificial Sequence: Synthetic oligonucleotide
  Antisense strand to SEQ ID NO: 777106
uaagcugcugguuuauuac

SEQ ID NO: 777108 - RNA, 19 nt, Artificial Sequence
  Description of Artificial Sequence: Synthetic oligonucleotide
  Sense strand starting at position 1734 of SEQ ID NO: 587237
cgagcugcugccgucuaaa

SEQ ID NO: 777109 - RNA, 19 nt, Artificial Sequence
  Description of Artificial Sequence: Synthetic oligonucleotide
  Antisense strand to SEQ ID NO: 777108
uuuagacggcagcagcucg

SEQ ID NO: 777110 - RNA, 19 nt, Artificial Sequence
  Description of Artificial Sequence: Synthetic oligonucleotide
  Sense strand starting at position 1870 of SEQ ID NO: 587237
gucagauugcagugggaag

SEQ ID NO: 777111 - RNA, 19 nt, Artificial Sequence
  Description of Artificial Sequence: Synthetic oligonucleotide
  Antisense strand to SEQ ID NO: 777110
cuucccacugcaaucugac

SEQ ID NO: 777112 - RNA, 19 nt, Artificial Sequence
  Description of Artificial Sequence: Synthetic oligonucleotide
  Sense strand starting at position 1871 of SEQ ID NO: 587237
ucagauugcagugggaaga

SEQ ID NO: 777113 - RNA, 19 nt, Artificial Sequence
  Description of Artificial Sequence: Synthetic oligonucleotide
  Antisense strand to SEQ ID NO: 777112
ucuucccacugcaaucuga

SEQ ID NO: 777114 - RNA, 19 nt, Artificial Sequence
  Description of Artificial Sequence: Synthetic oligonucleotide
  Sense strand starting at position 2064 of SEQ ID NO: 587237
cuggcuuagccguuaucuu

SEQ ID NO: 777115 - RNA, 19 nt, Artificial Sequence
  Description of Artificial Sequence: Synthetic oligonucleotide
  Antisense strand to SEQ ID NO: 777114
aagauaacggcuaagccag

SEQ ID NO: 777116 - RNA, 19 nt, Artificial Sequence
  Description of Artificial Sequence: Synthetic oligonucleotide
  Sense strand starting at position 2157 of SEQ ID NO: 587237
gcagaaacccucugggaaa

SEQ ID NO: 777117 - RNA, 19 nt, Artificial Sequence
  Description of Artificial Sequence: Synthetic oligonucleotide
  Antisense strand to SEQ ID NO: 777116
uuucccagaggguuucugc

SEQ ID NO: 777118 - RNA, 19 nt, Artificial Sequence
  Description of Artificial Sequence: Synthetic oligonucleotide
  Sense strand starting at position 2224 of SEQ ID NO: 587237
uuaaguauuuccuagagag

SEQ ID NO: 777119 - RNA, 19 nt, Artificial Sequence
  Description of Artificial Sequence: Synthetic oligonucleotide
  Antisense strand to SEQ ID NO: 777118
cucucuaggaaauacuuaa

SEQ ID NO: 777120 - RNA, 19 nt, Artificial Sequence
  Description of Artificial Sequence: Synthetic oligonucleotide
  Sense strand starting at position 2240 of SEQ ID NO: 587237
gagagcaguugaucucuuu

SEQ ID NO: 777121 - RNA, 19 nt, Artificial Sequence
  Description of Artificial Sequence: Synthetic oligonucleotide
  Antisense strand to SEQ ID NO: 777120
aaagagaucaacugcucuc

SEQ ID NO: 777122 - RNA, 19 nt, Artificial Sequence
  Description of Artificial Sequence: Synthetic oligonucleotide
  Sense strand starting at position 2319 of SEQ ID NO: 587237
guugaaguacaaugaaagu

SEQ ID NO: 777123 - RNA, 19 nt, Artificial Sequence
  Description of Artificial Sequence: Synthetic oligonucleotide
  Antisense strand to SEQ ID NO: 777122
acuuucauuguacuucaac

SEQ ID NO: 777124 - RNA, 19 nt, Artificial Sequence
  Description of Artificial Sequence: Synthetic oligonucleotide
  Sense strand starting at position 2522 of SEQ ID NO: 587237
uuccgaacaguuggauaga

SEQ ID NO: 777125 - RNA, 19 nt, Artificial Sequence
  Description of Artificial Sequence: Synthetic oligonucleotide
  Antisense strand to SEQ ID NO: 777124
ucuauccaacuguucggaa

SEQ ID NO: 777126 - RNA, 19 nt, Artificial Sequence
  Description of Artificial Sequence: Synthetic oligonucleotide
  Sense strand starting at position 2678 of SEQ ID NO: 587237
gaauuuaagugccugugua

SEQ ID NO: 777127 - RNA, 19 nt, Artificial Sequence
  Description of Artificial Sequence: Synthetic oligonucleotide
  Antisense strand to SEQ ID NO: 777126
uacacaggcacuuaaauuc

SEQ ID NO: 777128 - RNA, 19 nt, Artificial Sequence
  Description of Artificial Sequence: Synthetic oligonucleotide
  Sense strand starting at position 3020 of SEQ ID NO: 587237
cuucuuuauugugucagaa

SEQ ID NO: 777129 - RNA, 19 nt, Artificial Sequence
  Description of Artificial Sequence: Synthetic oligonucleotide
  Antisense strand to SEQ ID NO: 777128
uucugacacaauaaagaag

SEQ ID NO: 777130 - RNA, 19 nt, Artificial Sequence
  Description of Artificial Sequence: Synthetic oligonucleotide
  Sense strand starting at position 3035 of SEQ ID NO: 587237
agaauuuguugacaucuca

SEQ ID NO: 777131 - RNA, 19 nt, Artificial Sequence
  Description of Artificial Sequence: Synthetic oligonucleotide
  Antisense strand to SEQ ID NO: 777130
ugagaugucaacaaauucu

SEQ ID NO: 777132 - RNA, 19 nt, Artificial Sequence
  Description of Artificial Sequence: Synthetic oligonucleotide
  Sense strand starting at position 3092 of SEQ ID NO: 587237
ugguauuagacucgggcaa

SEQ ID NO: 777133 - RNA, 19 nt, Artificial Sequence
  Description of Artificial Sequence: Synthetic oligonucleotide
  Antisense strand to SEQ ID NO: 777132
uugcccgagucuaauacca

SEQ ID NO: 777134 - RNA, 19 nt, Artificial Sequence
  Description of Artificial Sequence: Synthetic oligonucleotide
  Sense strand starting at position 3333 of SEQ ID NO: 587237
agguacaagguuuauuauu

SEQ ID NO: 777135 - RNA, 19 nt, Artificial Sequence
  Description of Artificial Sequence: Synthetic oligonucleotide
  Antisense strand to SEQ ID NO: 777134
aauaauaaaccuuguaccu

SEQ ID NO: 777136 - RNA, 19 nt, Artificial Sequence
  Description of Artificial Sequence: Synthetic oligonucleotide
  Sense strand starting at position 3341 of SEQ ID NO: 587237
gguuuauuauucccaguga

SEQ ID NO: 777137 - RNA, 19 nt, Artificial Sequence
  Description of Artificial Sequence: Synthetic oligonucleotide
  Antisense strand to SEQ ID NO: 777136
ucacugggaauaauaaacc

SEQ ID NO: 777138 - RNA, 19 nt, Artificial Sequence
  Description of Artificial Sequence: Synthetic oligonucleotide
  Sense strand starting at position 3421 of SEQ ID NO: 587237
uuuacuaagcucuaaccga

SEQ ID NO: 777139 - RNA, 19 nt, Artificial Sequence
  Description of Artificial Sequence: Synthetic oligonucleotide
  Antisense strand to SEQ ID NO: 777138
ucgguuagagcuuaguaaa

SEQ ID NO: 777140 - RNA, 19 nt, Artificial Sequence
  Description of Artificial Sequence: Synthetic oligonucleotide
  Sense strand starting at position 3471 of SEQ ID NO: 587237
aacgaacaacagugugaau

SEQ ID NO: 777141 - RNA, 19 nt, Artificial Sequence
  Description of Artificial Sequence: Synthetic oligonucleotide
  Antisense strand to SEQ ID NO: 777140
auucacacuguuguucguu

SEQ ID NO: 777142 - RNA, 19 nt, Artificial Sequence
  Description of Artificial Sequence: Synthetic oligonucleotide
  Sense strand starting at position 3473 of SEQ ID NO: 587237
cgaacaacagugugaauau

SEQ ID NO: 777143 - RNA, 19 nt, Artificial Sequence
  Description of Artificial Sequence: Synthetic oligonucleotide
  Antisense strand to SEQ ID NO: 777142
auauucacacuguuguucg

SEQ ID NO: 777144 - RNA, 19 nt, Artificial Sequence
  Description of Artificial Sequence: Synthetic oligonucleotide
  Sense strand starting at position 3583 of SEQ ID NO: 587237
gcuacugaacauuggaaua

SEQ ID NO: 777145 - RNA, 19 nt, Artificial Sequence
  Description of Artificial Sequence: Synthetic oligonucleotide
  Antisense strand to SEQ ID NO: 777144
uauuccaauguucaguagc

SEQ ID NO: 777146 - RNA, 19 nt, Artificial Sequence
  Description of Artificial Sequence: Synthetic oligonucleotide
  Sense strand starting at position 3706 of SEQ ID NO: 587237
auuaguagaagagguagua

SEQ ID NO: 777147 - RNA, 19 nt, Artificial Sequence
  Description of Artificial Sequence: Synthetic oligonucleotide
  Antisense strand to SEQ ID NO: 777146
uacuaccucuucuacuaau

SEQ ID NO: 777148 - RNA, 19 nt, Artificial Sequence
  Description of Artificial Sequence: Synthetic oligonucleotide
  Sense strand starting at position 3722 of SEQ ID NO: 587237
guaugauuccaccaagguu

SEQ ID NO: 777149 - RNA, 19 nt, Artificial Sequence
  Description of Artificial Sequence: Synthetic oligonucleotide
  Antisense strand to SEQ ID NO: 777148
aaccuugguggaaucauac

SEQ ID NO: 777150 - RNA, 19 nt, Artificial Sequence
  Description of Artificial Sequence: Synthetic oligonucleotide
  Sense strand starting at position 3742 of SEQ ID NO: 587237
uggacaugguuuccacuaa

SEQ ID NO: 777151 - RNA, 19 nt, Artificial Sequence
  Description of Artificial Sequence: Synthetic oligonucleotide
  Antisense strand to SEQ ID NO: 777150
uuaguggaaaccaugucca

SEQ ID NO: 777152 - RNA, 19 nt, Artificial Sequence
  Description of Artificial Sequence: Synthetic oligonucleotide
  Sense strand starting at position 3794 of SEQ ID NO: 587237
cagugcaccgucgaagaaa

SEQ ID NO: 777153 - RNA, 19 nt, Artificial Sequence
  Description of Artificial Sequence: Synthetic oligonucleotide
  Antisense strand to SEQ ID NO: 777152
uuucuucgacggugcacug

SEQ ID NO: 777154 - RNA, 19 nt, Artificial Sequence
  Description of Artificial Sequence: Synthetic oligonucleotide
  Sense strand starting at position 3809 of SEQ ID NO: 587237
gaaagcauauaggucuuaa

SEQ ID NO: 777155 - RNA, 19 nt, Artificial Sequence
  Description of Artificial Sequence: Synthetic oligonucleotide
  Antisense strand to SEQ ID NO: 777154
uuaagaccuauaugcuuuc

SEQ ID NO: 777156 - RNA, 19 nt, Artificial Sequence
  Description of Artificial Sequence: Synthetic oligonucleotide
  Sense strand starting at position 3828 of SEQ ID NO: 587237
agaugagaccuguguuaga

SEQ ID NO: 777157 - RNA, 19 nt, Artificial Sequence
  Description of Artificial Sequence: Synthetic oligonucleotide
  Antisense strand to SEQ ID NO: 777156
ucuaacacaggucucaucu

SEQ ID NO: 777158 - RNA, 19 nt, Artificial Sequence
  Description of Artificial Sequence: Synthetic oligonucleotide
  Sense strand starting at position 161 of SEQ ID NO: 587238
auugguuaugcguacaaac

SEQ ID NO: 777159 - RNA, 19 nt, Artificial Sequence
  Description of Artificial Sequence: Synthetic oligonucleotide
  Antisense strand to SEQ ID NO: 777158
guuuguacgcauaaccaau

SEQ ID NO: 777160 - RNA, 19 nt, Artificial Sequence
  Description of Artificial Sequence: Synthetic oligonucleotide
  Sense strand starting at position 163 of SEQ ID NO: 587238
ugguuaugcguacaaacau

SEQ ID NO: 777161 - RNA, 19 nt, Artificial Sequence
  Description of Artificial Sequence: Synthetic oligonucleotide
  Antisense strand to SEQ ID NO: 777160
auguuuguacgcauaacca

SEQ ID NO: 777162 - RNA, 19 nt, Artificial Sequence
  Description of Artificial Sequence: Synthetic oligonucleotide
  Sense strand starting at position 219 of SEQ ID NO: 587238
gcagcuuagggugacuaua

SEQ ID NO: 777163 - RNA, 19 nt, Artificial Sequence
  Description of Artificial Sequence: Synthetic oligonucleotide
  Antisense strand to SEQ ID NO: 777162
uauagucacccuaagcugc

SEQ ID NO: 777164 - RNA, 19 nt, Artificial Sequence
  Description of Artificial Sequence: Synthetic oligonucleotide
  Sense strand starting at position 348 of SEQ ID NO: 587238
cccugucuuggucaguaca

SEQ ID NO: 777165 - RNA, 19 nt, Artificial Sequence
  Description of Artificial Sequence: Synthetic oligonucleotide
  Antisense strand to SEQ ID NO: 777164
uguacugaccaagacaggg

SEQ ID NO: 777166 - RNA, 19 nt, Artificial Sequence
  Description of Artificial Sequence: Synthetic oligonucleotide
  Sense strand starting at position 351 of SEQ ID NO: 587238
ugucuuggucaguacacau

SEQ ID NO: 777167 - RNA, 19 nt, Artificial Sequence
  Description of Artificial Sequence: Synthetic oligonucleotide
  Antisense strand to SEQ ID NO: 777166
auguguacugaccaagaca

SEQ ID NO: 777168 - RNA, 19 nt, Artificial Sequence
  Description of Artificial Sequence: Synthetic oligonucleotide
  Sense strand starting at position 362 of SEQ ID NO: 587238
guacacauucuaugcauga

SEQ ID NO: 777169 - RNA, 19 nt, Artificial Sequence
  Description of Artificial Sequence: Synthetic oligonucleotide
  Antisense strand to SEQ ID NO: 777168
ucaugcauagaauguguac

SEQ ID NO: 777170 - RNA, 19 nt, Artificial Sequence
  Description of Artificial Sequence: Synthetic oligonucleotide
  Sense strand starting at position 460 of SEQ ID NO: 587238
cauaaagucaagggugagu

SEQ ID NO: 777171 - RNA, 19 nt, Artificial Sequence
  Description of Artificial Sequence: Synthetic oligonucleotide
  Antisense strand to SEQ ID NO: 777170
acucacccuugacuuuaug

SEQ ID NO: 777172 - RNA, 19 nt, Artificial Sequence
  Description of Artificial Sequence: Synthetic oligonucleotide
  Sense strand starting at position 473 of SEQ ID NO: 587238
gugaguugagucuauggau

SEQ ID NO: 777173 - RNA, 19 nt, Artificial Sequence
  Description of Artificial Sequence: Synthetic oligonucleotide
  Antisense strand to SEQ ID NO: 777172
auccauagacucaacucac

SEQ ID NO: 777174 - RNA, 19 nt, Artificial Sequence
  Description of Artificial Sequence: Synthetic oligonucleotide
  Sense strand starting at position 485 of SEQ ID NO: 587238
uauggauccugguuacaau

SEQ ID NO: 777175 - RNA, 19 nt, Artificial Sequence
  Description of Artificial Sequence: Synthetic oligonucleotide
  Antisense strand to SEQ ID NO: 777174
auuguaaccaggauccaua

SEQ ID NO: 777176 - RNA, 19 nt, Artificial Sequence
  Description of Artificial Sequence: Synthetic oligonucleotide
  Sense strand starting at position 625 of SEQ ID NO: 587238
gcuguaacuugauuuguga

SEQ ID NO: 777177 - RNA, 19 nt, Artificial Sequence
  Description of Artificial Sequence: Synthetic oligonucleotide
  Antisense strand to SEQ ID NO: 777176
ucacaaaucaaguuacagc

SEQ ID NO: 777178 - RNA, 19 nt, Artificial Sequence
  Description of Artificial Sequence: Synthetic oligonucleotide
  Sense strand starting at position 629 of SEQ ID NO: 587238
uaacuugauuugugaaaga

SEQ ID NO: 777179 - RNA, 19 nt, Artificial Sequence
  Description of Artificial Sequence: Synthetic oligonucleotide
  Antisense strand to SEQ ID NO: 777178
ucuuucacaaaucaaguua

SEQ ID NO: 777180 - RNA, 19 nt, Artificial Sequence
  Description of Artificial Sequence: Synthetic oligonucleotide
  Sense strand starting at position 762 of SEQ ID NO: 587238
uuccaaaguuggcuaugau

SEQ ID NO: 777181 - RNA, 19 nt, Artificial Sequence
  Description of Artificial Sequence: Synthetic oligonucleotide
  Antisense strand to SEQ ID NO: 777180
aucauagccaacuuuggaa

SEQ ID NO: 777182 - RNA, 19 nt, Artificial Sequence
  Description of Artificial Sequence: Synthetic oligonucleotide
  Sense strand starting at position 763 of SEQ ID NO: 587238
uccaaaguuggcuaugauc

SEQ ID NO: 777183 - RNA, 19 nt, Artificial Sequence
  Description of Artificial Sequence: Synthetic oligonucleotide
  Antisense strand to SEQ ID NO: 777182
gaucauagccaacuuugga

SEQ ID NO: 777184 - RNA, 19 nt, Artificial Sequence
  Description of Artificial Sequence: Synthetic oligonucleotide
  Sense strand starting at position 981 of SEQ ID NO: 587238
gaaauucccgcuuaguauu

SEQ ID NO: 777185 - RNA, 19 nt, Artificial Sequence
  Description of Artificial Sequence: Synthetic oligonucleotide
  Antisense strand to SEQ ID NO: 777184
aauacuaagcgggaauuuc

SEQ ID NO: 777186 - RNA, 19 nt, Artificial Sequence
  Description of Artificial Sequence: Synthetic oligonucleotide
  Sense strand starting at position 1204 of SEQ ID NO: 587238
agagauaggacggguucua

SEQ ID NO: 777187 - RNA, 19 nt, Artificial Sequence
  Description of Artificial Sequence: Synthetic oligonucleotide
  Antisense strand to SEQ ID NO: 777186
uagaacccguccuaucucu

SEQ ID NO: 777188 - RNA, 19 nt, Artificial Sequence
  Description of Artificial Sequence: Synthetic oligonucleotide
  Sense strand starting at position 1330 of SEQ ID NO: 587238
ccuuccuucguagacauau

SEQ ID NO: 777189 - RNA, 19 nt, Artificial Sequence
  Description of Artificial Sequence: Synthetic oligonucleotide
  Antisense strand to SEQ ID NO: 777188
auaugucuacgaaggaagg

SEQ ID NO: 777190 - RNA, 19 nt, Artificial Sequence
  Description of Artificial Sequence: Synthetic oligonucleotide
  Sense strand starting at position 1556 of SEQ ID NO: 587238
cucaauagauuuggacuau

SEQ ID NO: 777191 - RNA, 19 nt, Artificial Sequence
  Description of Artificial Sequence: Synthetic oligonucleotide
  Antisense strand to SEQ ID NO: 777190
auaguccaaaucuauugag

SEQ ID NO: 777192 - RNA, 19 nt, Artificial Sequence
  Description of Artificial Sequence: Synthetic oligonucleotide
  Sense strand starting at position 1557 of SEQ ID NO: 587238
ucaauagauuuggacuaua

SEQ ID NO: 777193 - RNA, 19 nt, Artificial Sequence
  Description of Artificial Sequence: Synthetic oligonucleotide
  Antisense strand to SEQ ID NO: 777192
uauaguccaaaucuauuga

SEQ ID NO: 777194 - RNA, 19 nt, Artificial Sequence
  Description of Artificial Sequence: Synthetic oligonucleotide
  Sense strand starting at position 1653 of SEQ ID NO: 587238
acagcaaaucucuggaugu

SEQ ID NO: 777195 - RNA, 19 nt, Artificial Sequence
  Description of Artificial Sequence: Synthetic oligonucleotide
  Antisense strand to SEQ ID NO: 777194
acauccagagauuugcugu

SEQ ID NO: 777196 - RNA, 19 nt, Artificial Sequence
  Description of Artificial Sequence: Synthetic oligonucleotide
  Sense strand starting at position 1655 of SEQ ID NO: 587238
agcaaaucucuggauguaa

SEQ ID NO: 777197 - RNA, 19 nt, Artificial Sequence
  Description of Artificial Sequence: Synthetic oligonucleotide
  Antisense strand to SEQ ID NO: 777196
uuacauccagagauuugcu

SEQ ID NO: 777198 - RNA, 19 nt, Artificial Sequence
  Description of Artificial Sequence: Synthetic oligonucleotide
  Sense strand starting at position 2356 of SEQ ID NO: 587238
agcaauacuaagcgggaau

SEQ ID NO: 777199 - RNA, 19 nt, Artificial Sequence
  Description of Artificial Sequence: Synthetic oligonucleotide
  Antisense strand to SEQ ID NO: 777198
auucccgcuuaguauugcu

SEQ ID NO: 777200 - RNA, 19 nt, Artificial Sequence
  Description of Artificial Sequence: Synthetic oligonucleotide
  Sense strand starting at position 2357 of SEQ ID NO: 587238
gcaauacuaagcgggaauu

SEQ ID NO: 777201 - RNA, 19 nt, Artificial Sequence
  Description of Artificial Sequence: Synthetic oligonucleotide
  Antisense strand to SEQ ID NO: 777200
aauucccgcuuaguauugc

SEQ ID NO: 777202 - RNA, 19 nt, Artificial Sequence
  Description of Artificial Sequence: Synthetic oligonucleotide
  Sense strand starting at position 2683 of SEQ ID NO: 587238
ggccgauuugcagggaauc

SEQ ID NO: 777203 - RNA, 19 nt, Artificial Sequence
  Description of Artificial Sequence: Synthetic oligonucleotide
  Antisense strand to SEQ ID NO: 777202
gauucccugcaaaucggcc

SEQ ID NO: 777204 - RNA, 19 nt, Artificial Sequence
  Description of Artificial Sequence: Synthetic oligonucleotide
  Sense strand starting at position 2684 of SEQ ID NO: 587238
gccgauuugcagggaaucu

SEQ ID NO: 777205 - RNA, 19 nt, Artificial Sequence
  Description of Artificial Sequence: Synthetic oligonucleotide
  Antisense strand to SEQ ID NO: 777204
agauucccugcaaaucggc

SEQ ID NO: 777206 - RNA, 19 nt, Artificial Sequence
  Description of Artificial Sequence: Synthetic oligonucleotide
  Sense strand starting at position 2693 of SEQ ID NO: 587238
cagggaaucugggcacaau

SEQ ID NO: 777207 - RNA, 19 nt, Artificial Sequence
  Description of Artificial Sequence: Synthetic oligonucleotide
  Antisense strand to SEQ ID NO: 777206
auugugcccagauucccug

SEQ ID NO: 777208 - RNA, 19 nt, Artificial Sequence
  Description of Artificial Sequence: Synthetic oligonucleotide
  Sense strand starting at position 2947 of SEQ ID NO: 587238
gaugucaucugcccagaau

SEQ ID NO: 777209 - RNA, 19 nt, Artificial Sequence
  Description of Artificial Sequence: Synthetic oligonucleotide
  Antisense strand to SEQ ID NO: 777208
auucugggcagaugacauc

SEQ ID NO: 777210 - RNA, 19 nt, Artificial Sequence
  Description of Artificial Sequence: Synthetic oligonucleotide
  Sense strand starting at position 2948 of SEQ ID NO: 587238
augucaucugcccagaaug

SEQ ID NO: 777211 - RNA, 19 nt, Artificial Sequence
  Description of Artificial Sequence: Synthetic oligonucleotide
  Antisense strand to SEQ ID NO: 777210
cauucugggcagaugacau

SEQ ID NO: 777212 - RNA, 19 nt, Artificial Sequence
  Description of Artificial Sequence: Synthetic oligonucleotide
  Sense strand starting at position 2959 of SEQ ID NO: 587238
ccagaauggcuuuaucagu

SEQ ID NO: 777213 - RNA, 19 nt, Artificial Sequence
  Description of Artificial Sequence: Synthetic oligonucleotide
  Antisense strand to SEQ ID NO: 777212
acugauaaagccauucugg

SEQ ID NO: 777214 - RNA, 19 nt, Artificial Sequence
  Description of Artificial Sequence: Synthetic oligonucleotide
  Sense strand starting at position 2964 of SEQ ID NO: 587238
auggcuuuaucagugagaa

SEQ ID NO: 777215 - RNA, 19 nt, Artificial Sequence
  Description of Artificial Sequence: Synthetic oligonucleotide
  Antisense strand to SEQ ID NO: 777214
uucucacugauaaagccau

SEQ ID NO: 777216 - RNA, 19 nt, Artificial Sequence
  Description of Artificial Sequence: Synthetic oligonucleotide
  Sense strand starting at position 2965 of SEQ ID NO: 587238
uggcuuuaucagugagaac

SEQ ID NO: 777217 - RNA, 19 nt, Artificial Sequence
  Description of Artificial Sequence: Synthetic oligonucleotide
  Antisense strand to SEQ ID NO: 777216
guucucacugauaaagcca

SEQ ID NO: 777218 - RNA, 19 nt, Artificial Sequence
  Description of Artificial Sequence: Synthetic oligonucleotide
  Sense strand starting at position 2966 of SEQ ID NO: 587238
ggcuuuaucagugagaaca

SEQ ID NO: 777219 - RNA, 19 nt, Artificial Sequence
  Description of Artificial Sequence: Synthetic oligonucleotide
  Antisense strand to SEQ ID NO: 777218
uguucucacugauaaagcc

SEQ ID NO: 777220 - RNA, 19 nt, Artificial Sequence
  Description of Artificial Sequence: Synthetic oligonucleotide
  Sense strand starting at position 3265 of SEQ ID NO: 587238
gcuuuagagcuuucccgca

SEQ ID NO: 777221 - RNA, 19 nt, Artificial Sequence
  Description of Artificial Sequence: Synthetic oligonucleotide
  Antisense strand to SEQ ID NO: 777220
ugcgggaaagcucuaaagc

SEQ ID NO: 777222 - RNA, 19 nt, Artificial Sequence
  Description of Artificial Sequence: Synthetic oligonucleotide
  Sense strand starting at position 3311 of SEQ ID NO: 587238
acagcugcugcggaaagau

SEQ ID NO: 777223 - RNA, 19 nt, Artificial Sequence
  Description of Artificial Sequence: Synthetic oligonucleotide
  Antisense strand to SEQ ID NO: 777222
aucuuuccgcagcagcugu

SEQ ID NO: 777224 - RNA, 19 nt, Artificial Sequence
  Description of Artificial Sequence: Synthetic oligonucleotide
  Sense strand starting at position 3323 of SEQ ID NO: 587238
gaaagaugccaccgagauc

SEQ ID NO: 777225 - RNA, 19 nt, Artificial Sequence
  Description of Artificial Sequence: Synthetic oligonucleotide
  Antisense strand to SEQ ID NO: 777224
gaucucgguggcaucuuuc

SEQ ID NO: 777226 - RNA, 19 nt, Artificial Sequence
  Description of Artificial Sequence: Synthetic oligonucleotide
  Sense strand starting at position 3412 of SEQ ID NO: 587238
gggacuagugccugacaga

SEQ ID NO: 777227 - RNA, 19 nt, Artificial Sequence
  Description of Artificial Sequence: Synthetic oligonucleotide
  Antisense strand to SEQ ID NO: 777226
ucugucaggcacuaguccc

SEQ ID NO: 777228 - RNA, 19 nt, Artificial Sequence
  Description of Artificial Sequence: Synthetic oligonucleotide
  Sense strand starting at position 3413 of SEQ ID NO: 587238
ggacuagugccugacagag

SEQ ID NO: 777229 - RNA, 19 nt, Artificial Sequence
  Description of Artificial Sequence: Synthetic oligonucleotide
  Antisense strand to SEQ ID NO: 777228
cucugucaggcacuagucc

SEQ ID NO: 777230 - RNA, 19 nt, Artificial Sequence
  Description of Artificial Sequence: Synthetic oligonucleotide
  Sense strand starting at position 3434 of SEQ ID NO: 587238
gacagaguucuaggccaca

SEQ ID NO: 777231 - RNA, 19 nt, Artificial Sequence
  Description of Artificial Sequence: Synthetic oligonucleotide
  Antisense strand to SEQ ID NO: 777230
uguggccuagaacucuguc

SEQ ID NO: 777232 - RNA, 19 nt, Artificial Sequence
  Description of Artificial Sequence: Synthetic oligonucleotide
  Sense strand starting at position 3764 of SEQ ID NO: 587238
auagcaagugcucaguaau

SEQ ID NO: 777233 - RNA, 19 nt, Artificial Sequence
  Description of Artificial Sequence: Synthetic oligonucleotide
  Antisense strand to SEQ ID NO: 777232
auuacugagcacuugcuau

SEQ ID NO: 777234 - RNA, 19 nt, Artificial Sequence
  Description of Artificial Sequence: Synthetic oligonucleotide
  Sense strand starting at position 3951 of SEQ ID NO: 587238
ccuguagguagagaguaua

SEQ ID NO: 777235 - RNA, 19 nt, Artificial Sequence
  Description of Artificial Sequence: Synthetic oligonucleotide
  Antisense strand to SEQ ID NO: 777234
uauacucucuaccuacagg

SEQ ID NO: 777236 - RNA, 19 nt, Artificial Sequence
  Description of Artificial Sequence: Synthetic oligonucleotide
  Sense strand starting at position 3954 of SEQ ID NO: 587238
guagguagagaguauaauu

SEQ ID NO: 777237 - RNA, 19 nt, Artificial Sequence
  Description of Artificial Sequence: Synthetic oligonucleotide
  Antisense strand to SEQ ID NO: 777236
aauuauacucucuaccuac

SEQ ID NO: 777238 - RNA, 19 nt, Artificial Sequence
  Description of Artificial Sequence: Synthetic oligonucleotide
  Sense strand starting at position 87 of SEQ ID NO: 587239
ggacuaggucugggauguu

SEQ ID NO: 777239 - RNA, 19 nt, Artificial Sequence
  Description of Artificial Sequence: Synthetic oligonucleotide
  Antisense strand to SEQ ID NO: 777238
aacaucccagaccuagucc

SEQ ID NO: 777240 - RNA, 19 nt, Artificial Sequence
  Description of Artificial Sequence: Synthetic oligonucleotide
  Sense strand starting at position 402 of SEQ ID NO: 587239
ccgugaauugcuccucugu

SEQ ID NO: 777241 - RNA, 19 nt, Artificial Sequence
  Description of Artificial Sequence: Synthetic oligonucleotide
  Antisense strand to SEQ ID NO: 777240
acagaggagcaauucacgg

SEQ ID NO: 777242 - RNA, 19 nt, Artificial Sequence
  Description of Artificial Sequence: Synthetic oligonucleotide
  Sense strand starting at position 403 of SEQ ID NO: 587239
cgugaauugcuccucuguc

SEQ ID NO: 777243 - RNA, 19 nt, Artificial Sequence
  Description of Artificial Sequence: Synthetic oligonucleotide
  Antisense strand to SEQ ID NO: 777242
gacagaggagcaauucacg

SEQ ID NO: 777244 - RNA, 19 nt, Artificial Sequence
  Description of Artificial Sequence: Synthetic oligonucleotide
  Sense strand starting at position 667 of SEQ ID NO: 587239
aacggucgagcucacaauu

SEQ ID NO: 777245 - RNA, 19 nt, Artificial Sequence
  Description of Artificial Sequence: Synthetic oligonucleotide
  Antisense strand to SEQ ID NO: 777244
aauugugagcucgaccguu

SEQ ID NO: 777246 - RNA, 19 nt, Artificial Sequence
  Description of Artificial Sequence: Synthetic oligonucleotide
  Sense strand starting at position 799 of SEQ ID NO: 587239
agcacuuugcaguauagaa

SEQ ID NO: 777247 - RNA, 19 nt, Artificial Sequence
  Description of Artificial Sequence: Synthetic oligonucleotide
  Antisense strand to SEQ ID NO: 777246
uucuauacugcaaagugcu

SEQ ID NO: 777248 - RNA, 19 nt, Artificial Sequence
  Description of Artificial Sequence: Synthetic oligonucleotide
  Sense strand starting at position 841 of SEQ ID NO: 587239
cccagaaugugacuugcuu

SEQ ID NO: 777249 - RNA, 19 nt, Artificial Sequence
  Description of Artificial Sequence: Synthetic oligonucleotide
  Antisense strand to SEQ ID NO: 777248
aagcaagucacauucuggg

SEQ ID NO: 777250 - RNA, 19 nt, Artificial Sequence
  Description of Artificial Sequence: Synthetic oligonucleotide
  Sense strand starting at position 845 of SEQ ID NO: 587239
gaaugugacuugcuugaaa

SEQ ID NO: 777251 - RNA, 19 nt, Artificial Sequence
  Description of Artificial Sequence: Synthetic oligonucleotide
  Antisense strand to SEQ ID NO: 777250
uuucaagcaagucacauuc

SEQ ID NO: 777252 - RNA, 19 nt, Artificial Sequence
  Description of Artificial Sequence: Synthetic oligonucleotide
  Sense strand starting at position 1120 of SEQ ID NO: 587239
acaguaagcccagguuaca

SEQ ID NO: 777253 - RNA, 19 nt, Artificial Sequence
  Description of Artificial Sequence: Synthetic oligonucleotide
  Antisense strand to SEQ ID NO: 777252
uguaaccugggcuuacugu

SEQ ID NO: 777254 - RNA, 19 nt, Artificial Sequence
  Description of Artificial Sequence: Synthetic oligonucleotide
  Sense strand starting at position 1281 of SEQ ID NO: 587239
acccaaagcugaguguuua

SEQ ID NO: 777255 - RNA, 19 nt, Artificial Sequence
  Description of Artificial Sequence: Synthetic oligonucleotide
  Antisense strand to SEQ ID NO: 777254
uaaacacucagcuuugggu

SEQ ID NO: 777256 - RNA, 19 nt, Artificial Sequence
  Description of Artificial Sequence: Synthetic oligonucleotide
  Sense strand starting at position 1282 of SEQ ID NO: 587239
cccaaagcugaguguuuaa

SEQ ID NO: 777257 - RNA, 19 nt, Artificial Sequence
  Description of Artificial Sequence: Synthetic oligonucleotide
  Antisense strand to SEQ ID NO: 777256
uuaaacacucagcuuuggg

SEQ ID NO: 777258 - RNA, 19 nt, Artificial Sequence
  Description of Artificial Sequence: Synthetic oligonucleotide
  Sense strand starting at position 1294 of SEQ ID NO: 587239
uguuuaaugucacugucac

SEQ ID NO: 777259 - RNA, 19 nt, Artificial Sequence
  Description of Artificial Sequence: Synthetic oligonucleotide
  Antisense strand to SEQ ID NO: 777258
gugacagugacauuaaaca

SEQ ID NO: 777260 - RNA, 19 nt, Artificial Sequence
  Description of Artificial Sequence: Synthetic oligonucleotide
  Sense strand starting at position 1295 of SEQ ID NO: 587239
guuuaaugucacugucaca

SEQ ID NO: 777261 - RNA, 19 nt, Artificial Sequence
  Description of Artificial Sequence: Synthetic oligonucleotide
  Antisense strand to SEQ ID NO: 777260
ugugacagugacauuaaac

SEQ ID NO: 777262 - RNA, 19 nt, Artificial Sequence
  Description of Artificial Sequence: Synthetic oligonucleotide
  Sense strand starting at position 1615 of SEQ ID NO: 587239
guggaugugcuuuagcaca

SEQ ID NO: 777263 - RNA, 19 nt, Artificial Sequence
  Description of Artificial Sequence: Synthetic oligonucleotide
  Antisense strand to SEQ ID NO: 777262
ugugcuaaagcacauccac

SEQ ID NO: 777264 - RNA, 19 nt, Artificial Sequence
  Description of Artificial Sequence: Synthetic oligonucleotide
  Sense strand starting at position 1617 of SEQ ID NO: 587239
ggaugugcuuuagcacaaa

SEQ ID NO: 777265 - RNA, 19 nt, Artificial Sequence
  Description of Artificial Sequence: Synthetic oligonucleotide
  Antisense strand to SEQ ID NO: 777264
uuugugcuaaagcacaucc

SEQ ID NO: 777266 - RNA, 19 nt, Artificial Sequence
  Description of Artificial Sequence: Synthetic oligonucleotide
  Sense strand starting at position 2104 of SEQ ID NO: 587239
agugaaagucacuguguga

SEQ ID NO: 777267 - RNA, 19 nt, Artificial Sequence
  Description of Artificial Sequence: Synthetic oligonucleotide
  Antisense strand to SEQ ID NO: 777266
ucacacagugacuuucacu

SEQ ID NO: 777268 - RNA, 19 nt, Artificial Sequence
  Description of Artificial Sequence: Synthetic oligonucleotide
  Sense strand starting at position 2220 of SEQ ID NO: 587239
gaguucugcccagggaaag

SEQ ID NO: 777269 - RNA, 19 nt, Artificial Sequence
  Description of Artificial Sequence: Synthetic oligonucleotide
  Antisense strand to SEQ ID NO: 777268
cuuucccugggcagaacuc

SEQ ID NO: 777270 - RNA, 19 nt, Artificial Sequence
  Description of Artificial Sequence: Synthetic oligonucleotide
  Sense strand starting at position 2221 of SEQ ID NO: 587239
aguucugcccagggaaagu

SEQ ID NO: 777271 - RNA, 19 nt, Artificial Sequence
  Description of Artificial Sequence: Synthetic oligonucleotide
  Antisense strand to SEQ ID NO: 777270
acuuucccugggcagaacu

SEQ ID NO: 777272 - RNA, 19 nt, Artificial Sequence
  Description of Artificial Sequence: Synthetic oligonucleotide
  Sense strand starting at position 2230 of SEQ ID NO: 587239
cagggaaaguuucuuacuu

SEQ ID NO: 777273 - RNA, 19 nt, Artificial Sequence
  Description of Artificial Sequence: Synthetic oligonucleotide
  Antisense strand to SEQ ID NO: 777272
aaguaagaaacuuucccug

SEQ ID NO: 777274 - RNA, 19 nt, Artificial Sequence
  Description of Artificial Sequence: Synthetic oligonucleotide
  Sense strand starting at position 2231 of SEQ ID NO: 587239
agggaaaguuucuuacuuu

SEQ ID NO: 777275 - RNA, 19 nt, Artificial Sequence
  Description of Artificial Sequence: Synthetic oligonucleotide
  Antisense strand to SEQ ID NO: 777274
aaaguaagaaacuuucccu

SEQ ID NO: 777276 - RNA, 19 nt, Artificial Sequence
  Description of Artificial Sequence: Synthetic oligonucleotide
  Sense strand starting at position 2352 of SEQ ID NO: 587239
gcuaauacccuggguacuu

SEQ ID NO: 777277 - RNA, 19 nt, Artificial Sequence
  Description of Artificial Sequence: Synthetic oligonucleotide
  Antisense strand to SEQ ID NO: 777276
aaguacccaggguauuagc

SEQ ID NO: 777278 - RNA, 19 nt, Artificial Sequence
  Description of Artificial Sequence: Synthetic oligonucleotide
  Sense strand starting at position 2353 of SEQ ID NO: 587239
cuaauacccuggguacuua

SEQ ID NO: 777279 - RNA, 19 nt, Artificial Sequence
  Description of Artificial Sequence: Synthetic oligonucleotide
  Antisense strand to SEQ ID NO: 777278
uaaguacccaggguauuag

SEQ ID NO: 777280 - RNA, 19 nt, Artificial Sequence
  Description of Artificial Sequence: Synthetic oligonucleotide
  Sense strand starting at position 2364 of SEQ ID NO: 587239
gguacuuagcggucuguuu

SEQ ID NO: 777281 - RNA, 19 nt, Artificial Sequence
  Description of Artificial Sequence: Synthetic oligonucleotide
  Antisense strand to SEQ ID NO: 777280
aaacagaccgcuaaguacc

SEQ ID NO: 777282 - RNA, 19 nt, Artificial Sequence
  Description of Artificial Sequence: Synthetic oligonucleotide
  Sense strand starting at position 2565 of SEQ ID NO: 587239
cuauuuaaggccuguucuu

SEQ ID NO: 777283 - RNA, 19 nt, Artificial Sequence
  Description of Artificial Sequence: Synthetic oligonucleotide
  Antisense strand to SEQ ID NO: 777282
aagaacaggccuuaaauag

SEQ ID NO: 777284 - RNA, 19 nt, Artificial Sequence
  Description of Artificial Sequence: Synthetic oligonucleotide
  Sense strand starting at position 2624 of SEQ ID NO: 587239
aggaacaacgcguauuaaa

SEQ ID NO: 777285 - RNA, 19 nt, Artificial Sequence
  Description of Artificial Sequence: Synthetic oligonucleotide
  Antisense strand to SEQ ID NO: 777284
uuuaauacgcguuguuccu

SEQ ID NO: 777286 - RNA, 19 nt, Artificial Sequence
  Description of Artificial Sequence: Synthetic oligonucleotide
  Sense strand starting at position 2714 of SEQ ID NO: 587239
ucagguuguuccucucuga

SEQ ID NO: 777287 - RNA, 19 nt, Artificial Sequence
  Description of Artificial Sequence: Synthetic oligonucleotide
  Antisense strand to SEQ ID NO: 777286
ucagagaggaacaaccuga

SEQ ID NO: 777288 - RNA, 19 nt, Artificial Sequence
  Description of Artificial Sequence: Synthetic oligonucleotide
  Sense strand starting at position 2721 of SEQ ID NO: 587239
guuccucucugaguggcaa

SEQ ID NO: 777289 - RNA, 19 nt, Artificial Sequence
  Description of Artificial Sequence: Synthetic oligonucleotide
  Antisense strand to SEQ ID NO: 777288
uugccacucagagaggaac

SEQ ID NO: 777290 - RNA, 19 nt, Artificial Sequence
  Description of Artificial Sequence: Synthetic oligonucleotide
  Sense strand starting at position 2851 of SEQ ID NO: 587239
aucugugaagcacggauua

SEQ ID NO: 777291 - RNA, 19 nt, Artificial Sequence
  Description of Artificial Sequence: Synthetic oligonucleotide
  Antisense strand to SEQ ID NO: 777290
uaauccgugcuucacagau

SEQ ID NO: 777292 - RNA, 19 nt, Artificial Sequence
  Description of Artificial Sequence: Synthetic oligonucleotide
  Sense strand starting at position 2853 of SEQ ID NO: 587239
cugugaagcacggauuaaa

SEQ ID NO: 777293 - RNA, 19 nt, Artificial Sequence
  Description of Artificial Sequence: Synthetic oligonucleotide
  Antisense strand to SEQ ID NO: 777292
uuuaauccgugcuucacag

SEQ ID NO: 777294 - RNA, 19 nt, Artificial Sequence
  Description of Artificial Sequence: Synthetic oligonucleotide
  Sense strand starting at position 2924 of SEQ ID NO: 587239
augcuaacacuaugaauga

SEQ ID NO: 777295 - RNA, 19 nt, Artificial Sequence
  Description of Artificial Sequence: Synthetic oligonucleotide
  Antisense strand to SEQ ID NO: 777294
ucauucauaguguuagcau

SEQ ID NO: 777296 - RNA, 19 nt, Artificial Sequence
  Description of Artificial Sequence: Synthetic oligonucleotide
  Sense strand starting at position 2945 of SEQ ID NO: 587239
auggcaaacgcuugugaua

SEQ ID NO: 777297 - RNA, 19 nt, Artificial Sequence
  Description of Artificial Sequence: Synthetic oligonucleotide
  Antisense strand to SEQ ID NO: 777296
uaucacaagcguuugccau

SEQ ID NO: 777298 - RNA, 19 nt, Artificial Sequence
  Description of Artificial Sequence: Synthetic oligonucleotide
  Sense strand starting at position 3069 of SEQ ID NO: 587239
aaaguauucugccuaggug

SEQ ID NO: 777299 - RNA, 19 nt, Artificial Sequence
  Description of Artificial Sequence: Synthetic oligonucleotide
  Antisense strand to SEQ ID NO: 777298
caccuaggcagaauacuuu

SEQ ID NO: 777300 - RNA, 19 nt, Artificial Sequence
  Description of Artificial Sequence: Synthetic oligonucleotide
  Sense strand starting at position 3242 of SEQ ID NO: 587239
ccuccuaaguccucagaga

SEQ ID NO: 777301 - RNA, 19 nt, Artificial Sequence
  Description of Artificial Sequence: Synthetic oligonucleotide
  Antisense strand to SEQ ID NO: 777300
ucucugaggacuuaggagg

SEQ ID NO: 777302 - RNA, 19 nt, Artificial Sequence
  Description of Artificial Sequence: Synthetic oligonucleotide
  Sense strand starting at position 3256 of SEQ ID NO: 587239
agagaaaucagcuggguca

SEQ ID NO: 777303 - RNA, 19 nt, Artificial Sequence
  Description of Artificial Sequence: Synthetic oligonucleotide
  Antisense strand to SEQ ID NO: 777302
ugacccagcugauuucucu

SEQ ID NO: 777304 - RNA, 19 nt, Artificial Sequence
  Description of Artificial Sequence: Synthetic oligonucleotide
  Sense strand starting at position 3557 of SEQ ID NO: 587239
ccuccuggucccugacauu

SEQ ID NO: 777305 - RNA, 19 nt, Artificial Sequence
  Description of Artificial Sequence: Synthetic oligonucleotide
  Antisense strand to SEQ ID NO: 777304
aaugucagggaccaggagg

SEQ ID NO: 777306 - RNA, 19 nt, Artificial Sequence
  Description of Artificial Sequence: Synthetic oligonucleotide
  Sense strand starting at position 3632 of SEQ ID NO: 587239
auuuauaauugagggaguu

SEQ ID NO: 777307 - RNA, 19 nt, Artificial Sequence
  Description of Artificial Sequence: Synthetic oligonucleotide
  Antisense strand to SEQ ID NO: 777306
aacucccucaauuauaaau

SEQ ID NO: 777308 - RNA, 19 nt, Artificial Sequence
  Description of Artificial Sequence: Synthetic oligonucleotide
  Sense strand starting at position 3633 of SEQ ID NO: 587239
uuuauaauugagggaguug

SEQ ID NO: 777309 - RNA, 19 nt, Artificial Sequence
  Description of Artificial Sequence: Synthetic oligonucleotide
  Antisense strand to SEQ ID NO: 777308
caacucccucaauuauaaa

SEQ ID NO: 777310 - RNA, 19 nt, Artificial Sequence
  Description of Artificial Sequence: Synthetic oligonucleotide
  Sense strand starting at position 3642 of SEQ ID NO: 587239
gagggaguuggauguguga

SEQ ID NO: 777311 - RNA, 19 nt, Artificial Sequence
  Description of Artificial Sequence: Synthetic oligonucleotide
  Antisense strand to SEQ ID NO: 777310
ucacacauccaacucccuc

SEQ ID NO: 777312 - RNA, 19 nt, Artificial Sequence
  Description of Artificial Sequence: Synthetic oligonucleotide
  Sense strand starting at position 3644 of SEQ ID NO: 587239
gggaguuggaugugugauc

SEQ ID NO: 777313 - RNA, 19 nt, Artificial Sequence
  Description of Artificial Sequence: Synthetic oligonucleotide
  Antisense strand to SEQ ID NO: 777312
gaucacacauccaacuccc

SEQ ID NO: 777314 - RNA, 19 nt, Artificial Sequence
  Description of Artificial Sequence: Synthetic oligonucleotide
  Sense strand starting at position 3649 of SEQ ID NO: 587239
uuggaugugugaucuagaa

SEQ ID NO: 777315 - RNA, 19 nt, Artificial Sequence
  Description of Artificial Sequence: Synthetic oligonucleotide
  Antisense strand to SEQ ID NO: 777314
uucuagaucacacauccaa

SEQ ID NO: 777316 - RNA, 19 nt, Artificial Sequence
  Description of Artificial Sequence: Synthetic oligonucleotide
  Sense strand starting at position 3980 of SEQ ID NO: 587239
acccuaguccuggagucua

SEQ ID NO: 777317 - RNA, 19 nt, Artificial Sequence
  Description of Artificial Sequence: Synthetic oligonucleotide
  Antisense strand to SEQ ID NO: 777316
uagacuccaggacuagggu

SEQ ID NO: 777318 - RNA, 19 nt, Artificial Sequence
  Description of Artificial Sequence: Synthetic oligonucleotide
  Sense strand starting at position 230 of SEQ ID NO: 587240
ucaguuucugaaggguaca

SEQ ID NO: 777319 - RNA, 19 nt, Artificial Sequence
  Description of Artificial Sequence: Synthetic oligonucleotide
  Antisense strand to SEQ ID NO: 777318
uguacccuucagaaacuga

SEQ ID NO: 777320 - RNA, 19 nt, Artificial Sequence
  Description of Artificial Sequence: Synthetic oligonucleotide
  Sense strand starting at position 257 of SEQ ID NO: 587240
uagagaguguugguuacuu

SEQ ID NO: 777321 - RNA, 19 nt, Artificial Sequence
  Description of Artificial Sequence: Synthetic oligonucleotide
  Antisense strand to SEQ ID NO: 777320
aaguaaccaacacucucua

SEQ ID NO: 777322 - RNA, 19 nt, Artificial Sequence
  Description of Artificial Sequence: Synthetic oligonucleotide
  Sense strand starting at position 261 of SEQ ID NO: 587240
gaguguugguuacuuccuu

SEQ ID NO: 777323 - RNA, 19 nt, Artificial Sequence
  Description of Artificial Sequence: Synthetic oligonucleotide
  Antisense strand to SEQ ID NO: 777322
aaggaaguaaccaacacuc

SEQ ID NO: 777324 - RNA, 19 nt, Artificial Sequence
  Description of Artificial Sequence: Synthetic oligonucleotide
  Sense strand starting at position 265 of SEQ ID NO: 587240
guugguuacuuccuuugaa

SEQ ID NO: 777325 - RNA, 19 nt, Artificial Sequence
  Description of Artificial Sequence: Synthetic oligonucleotide
  Antisense strand to SEQ ID NO: 777324
uucaaaggaaguaaccaac

SEQ ID NO: 777326 - RNA, 19 nt, Artificial Sequence
  Description of Artificial Sequence: Synthetic oligonucleotide
  Sense strand starting at position 266 of SEQ ID NO: 587240
uugguuacuuccuuugaaa

SEQ ID NO: 777327 - RNA, 19 nt, Artificial Sequence
  Description of Artificial Sequence: Synthetic oligonucleotide
  Antisense strand to SEQ ID NO: 777326
uuucaaaggaaguaaccaa

SEQ ID NO: 777328 - RNA, 19 nt, Artificial Sequence
  Description of Artificial Sequence: Synthetic oligonucleotide
  Sense strand starting at position 268 of SEQ ID NO: 587240
gguuacuuccuuugaaauc

SEQ ID NO: 777329 - RNA, 19 nt, Artificial Sequence
  Description of Artificial Sequence: Synthetic oligonucleotide
  Antisense strand to SEQ ID NO: 777328
gauuucaaaggaaguaacc

SEQ ID NO: 777330 - RNA, 19 nt, Artificial Sequence
  Description of Artificial Sequence: Synthetic oligonucleotide
  Sense strand starting at position 286 of SEQ ID NO: 587240
cagagagcaucucuaggaa

SEQ ID NO: 777331 - RNA, 19 nt, Artificial Sequence
  Description of Artificial Sequence: Synthetic oligonucleotide
  Antisense strand to SEQ ID NO: 777330
uuccuagagaugcucucug

SEQ ID NO: 777332 - RNA, 19 nt, Artificial Sequence
  Description of Artificial Sequence: Synthetic oligonucleotide
  Sense strand starting at position 396 of SEQ ID NO: 587240
ccaaacuucuuucucggaa

SEQ ID NO: 777333 - RNA, 19 nt, Artificial Sequence
  Description of Artificial Sequence: Synthetic oligonucleotide
  Antisense strand to SEQ ID NO: 777332
uuccgagaaagaaguuugg

SEQ ID NO: 777334 - RNA, 19 nt, Artificial Sequence
  Description of Artificial Sequence: Synthetic oligonucleotide
  Sense strand starting at position 400 of SEQ ID NO: 587240
acuucuuucucggaaugag

SEQ ID NO: 777335 - RNA, 19 nt, Artificial Sequence
  Description of Artificial Sequence: Synthetic oligonucleotide
  Antisense strand to SEQ ID NO: 777334
cucauuccgagaaagaagu

SEQ ID NO: 777336 - RNA, 19 nt, Artificial Sequence
  Description of Artificial Sequence: Synthetic oligonucleotide
  Sense strand starting at position 403 of SEQ ID NO: 587240
ucuuucucggaaugagaca

SEQ ID NO: 777337 - RNA, 19 nt, Artificial Sequence
  Description of Artificial Sequence: Synthetic oligonucleotide
  Antisense strand to SEQ ID NO: 777336
ugucucauuccgagaaaga

SEQ ID NO: 777338 - RNA, 19 nt, Artificial Sequence
  Description of Artificial Sequence: Synthetic oligonucleotide
  Sense strand starting at position 414 of SEQ ID NO: 587240
augagacaguuucagggaa

SEQ ID NO: 777339 - RNA, 19 nt, Artificial Sequence
  Description of Artificial Sequence: Synthetic oligonucleotide
  Antisense strand to SEQ ID NO: 777338
uucccugaaacugucucau

SEQ ID NO: 777340 - RNA, 19 nt, Artificial Sequence
  Description of Artificial Sequence: Synthetic oligonucleotide
  Sense strand starting at position 439 of SEQ ID NO: 587240
cguguuuccuucucaacca

SEQ ID NO: 777341 - RNA, 19 nt, Artificial Sequence
  Description of Artificial Sequence: Synthetic oligonucleotide
  Antisense strand to SEQ ID NO: 777340
ugguugagaaggaaacacg

SEQ ID NO: 777342 - RNA, 19 nt, Artificial Sequence
  Description of Artificial Sequence: Synthetic oligonucleotide
  Sense strand starting at position 529 of SEQ ID NO: 587240
caucgacuucuucggguga

SEQ ID NO: 777343 - RNA, 19 nt, Artificial Sequence
  Description of Artificial Sequence: Synthetic oligonucleotide
  Antisense strand to SEQ ID NO: 777342
ucacccgaagaagucgaug

SEQ ID NO: 777344 - RNA, 19 nt, Artificial Sequence
  Description of Artificial Sequence: Synthetic oligonucleotide
  Sense strand starting at position 577 of SEQ ID NO: 587240
aucuccgauucccagaauu

SEQ ID NO: 777345 - RNA, 19 nt, Artificial Sequence
  Description of Artificial Sequence: Synthetic oligonucleotide
  Antisense strand to SEQ ID NO: 777344
aauucugggaaucggagau

SEQ ID NO: 777346 - RNA, 19 nt, Artificial Sequence
  Description of Artificial Sequence: Synthetic oligonucleotide
  Sense strand starting at position 579 of SEQ ID NO: 587240
cuccgauucccagaauuac

SEQ ID NO: 777347 - RNA, 19 nt, Artificial Sequence
  Description of Artificial Sequence: Synthetic oligonucleotide
  Antisense strand to SEQ ID NO: 777346
guaauucugggaaucggag

SEQ ID NO: 777348 - RNA, 19 nt, Artificial Sequence
  Description of Artificial Sequence: Synthetic oligonucleotide
  Sense strand starting at position 667 of SEQ ID NO: 587240
aaagguguuucugaccuaa

SEQ ID NO: 777349 - RNA, 19 nt, Artificial Sequence
  Description of Artificial Sequence: Synthetic oligonucleotide
  Antisense strand to SEQ ID NO: 777348
uuaggucagaaacaccuuu

SEQ ID NO: 777350 - RNA, 19 nt, Artificial Sequence
  Description of Artificial Sequence: Synthetic oligonucleotide
  Sense strand starting at position 679 of SEQ ID NO: 587240
gaccuaaggugcuucucaa

SEQ ID NO: 777351 - RNA, 19 nt, Artificial Sequence
  Description of Artificial Sequence: Synthetic oligonucleotide
  Antisense strand to SEQ ID NO: 777350
uugagaagcaccuuagguc

SEQ ID NO: 777352 - RNA, 19 nt, Artificial Sequence
  Description of Artificial Sequence: Synthetic oligonucleotide
  Sense strand starting at position 773 of SEQ ID NO: 587240
gggucuuugcgggccuauu

SEQ ID NO: 777353 - RNA, 19 nt, Artificial Sequence
  Description of Artificial Sequence: Synthetic oligonucleotide
  Antisense strand to SEQ ID NO: 777352
aauaggcccgcaaagaccc

SEQ ID NO: 777354 - RNA, 19 nt, Artificial Sequence
  Description of Artificial Sequence: Synthetic oligonucleotide
  Sense strand starting at position 810 of SEQ ID NO: 587240
acagaaauacccgggaugu

SEQ ID NO: 777355 - RNA, 19 nt, Artificial Sequence
  Description of Artificial Sequence: Synthetic oligonucleotide
  Antisense strand to SEQ ID NO: 777354
acaucccggguauuucugu

SEQ ID NO: 777356 - RNA, 19 nt, Artificial Sequence
  Description of Artificial Sequence: Synthetic oligonucleotide
  Sense strand starting at position 811 of SEQ ID NO: 587240
cagaaauacccgggauguc

SEQ ID NO: 777357 - RNA, 19 nt, Artificial Sequence
  Description of Artificial Sequence: Synthetic oligonucleotide
  Antisense strand to SEQ ID NO: 777356
gacaucccggguauuucug

SEQ ID NO: 777358 - RNA, 19 nt, Artificial Sequence
  Description of Artificial Sequence: Synthetic oligonucleotide
  Sense strand starting at position 926 of SEQ ID NO: 587240
ggcucaucuugagugaccu

SEQ ID NO: 777359 - RNA, 19 nt, Artificial Sequence
  Description of Artificial Sequence: Synthetic oligonucleotide
  Antisense strand to SEQ ID NO: 777358
aggucacucaagaugagcc

SEQ ID NO: 777360 - RNA, 19 nt, Artificial Sequence
  Description of Artificial Sequence: Synthetic oligonucleotide
  Sense strand starting at position 932 of SEQ ID NO: 587240
ucuugagugaccugagcau

SEQ ID NO: 777361 - RNA, 19 nt, Artificial Sequence
  Description of Artificial Sequence: Synthetic oligonucleotide
  Antisense strand to SEQ ID NO: 777360
augcucaggucacucaaga

SEQ ID NO: 777362 - RNA, 19 nt, Artificial Sequence
  Description of Artificial Sequence: Synthetic oligonucleotide
  Sense strand starting at position 1021 of SEQ ID NO: 587240
aaaggugcucccugagaag

SEQ ID NO: 777363 - RNA, 19 nt, Artificial Sequence
  Description of Artificial Sequence: Synthetic oligonucleotide
  Antisense strand to SEQ ID NO: 777362
cuucucagggagcaccuuu

SEQ ID NO: 777364 - RNA, 19 nt, Artificial Sequence
  Description of Artificial Sequence: Synthetic oligonucleotide
  Sense strand starting at position 1088 of SEQ ID NO: 587240
agacgcucucuucgucaga

SEQ ID NO: 777365 - RNA, 19 nt, Artificial Sequence
  Description of Artificial Sequence: Synthetic oligonucleotide
  Antisense strand to SEQ ID NO: 777364
ucugacgaagagagcgucu

SEQ ID NO: 777366 - RNA, 19 nt, Artificial Sequence
  Description of Artificial Sequence: Synthetic oligonucleotide
  Sense strand starting at position 1107 of SEQ ID NO: 587240
gugggucaccuagggagaa

SEQ ID NO: 777367 - RNA, 19 nt, Artificial Sequence
  Description of Artificial Sequence: Synthetic oligonucleotide
  Antisense strand to SEQ ID NO: 777366
uucucccuaggugacccac

SEQ ID NO: 777368 - RNA, 19 nt, Artificial Sequence
  Description of Artificial Sequence: Synthetic oligonucleotide
  Sense strand starting at position 1263 of SEQ ID NO: 587240
cgggaaaguugguccuaga

SEQ ID NO: 777369 - RNA, 19 nt, Artificial Sequence
  Description of Artificial Sequence: Synthetic oligonucleotide
  Antisense strand to SEQ ID NO: 777368
ucuaggaccaacuuucccg

SEQ ID NO: 777370 - RNA, 19 nt, Artificial Sequence
  Description of Artificial Sequence: Synthetic oligonucleotide
  Sense strand starting at position 1671 of SEQ ID NO: 587240
cgccucgaugucuuugauu

SEQ ID NO: 777371 - RNA, 19 nt, Artificial Sequence
  Description of Artificial Sequence: Synthetic oligonucleotide
  Antisense strand to SEQ ID NO: 777370
aaucaaagacaucgaggcg

SEQ ID NO: 777372 - RNA, 19 nt, Artificial Sequence
  Description of Artificial Sequence: Synthetic oligonucleotide
  Sense strand starting at position 2210 of SEQ ID NO: 587240
gagcuuccgccuuugcaga

SEQ ID NO: 777373 - RNA, 19 nt, Artificial Sequence
  Description of Artificial Sequence: Synthetic oligonucleotide
  Antisense strand to SEQ ID NO: 777372
ucugcaaaggcggaagcuc

SEQ ID NO: 777374 - RNA, 19 nt, Artificial Sequence
  Description of Artificial Sequence: Synthetic oligonucleotide
  Sense strand starting at position 2636 of SEQ ID NO: 587240
uuugcauauuuccgaauua

SEQ ID NO: 777375 - RNA, 19 nt, Artificial Sequence
  Description of Artificial Sequence: Synthetic oligonucleotide
  Antisense strand to SEQ ID NO: 777374
uaauucggaaauaugcaaa

SEQ ID NO: 777376 - RNA, 19 nt, Artificial Sequence
  Description of Artificial Sequence: Synthetic oligonucleotide
  Sense strand starting at position 2637 of SEQ ID NO: 587240
uugcauauuuccgaauuau

SEQ ID NO: 777377 - RNA, 19 nt, Artificial Sequence
  Description of Artificial Sequence: Synthetic oligonucleotide
  Antisense strand to SEQ ID NO: 777376
auaauucggaaauaugcaa

SEQ ID NO: 777378 - RNA, 19 nt, Artificial Sequence
  Description of Artificial Sequence: Synthetic oligonucleotide
  Sense strand starting at position 2643 of SEQ ID NO: 587240
auuuccgaauuauagauga

SEQ ID NO: 777379 - RNA, 19 nt, Artificial Sequence
  Description of Artificial Sequence: Synthetic oligonucleotide
  Antisense strand to SEQ ID NO: 777378
ucaucuauaauucggaaau

SEQ ID NO: 777380 - RNA, 19 nt, Artificial Sequence
  Description of Artificial Sequence: Synthetic oligonucleotide
  Sense strand starting at position 2697 of SEQ ID NO: 587240
gaguccucuugggacagaa

SEQ ID NO: 777381 - RNA, 19 nt, Artificial Sequence
  Description of Artificial Sequence: Synthetic oligonucleotide
  Antisense strand to SEQ ID NO: 777380
uucugucccaagaggacuc

SEQ ID NO: 777382 - RNA, 19 nt, Artificial Sequence
  Description of Artificial Sequence: Synthetic oligonucleotide
  Sense strand starting at position 2968 of SEQ ID NO: 587240
acgagcacuucuuccacaa

SEQ ID NO: 777383 - RNA, 19 nt, Artificial Sequence
  Description of Artificial Sequence: Synthetic oligonucleotide
  Antisense strand to SEQ ID NO: 777382
uuguggaagaagugcucgu

SEQ ID NO: 777384 - RNA, 19 nt, Artificial Sequence
  Description of Artificial Sequence: Synthetic oligonucleotide
  Sense strand starting at position 3078 of SEQ ID NO: 587240
gagggcuugcuguagacau

SEQ ID NO: 777385 - RNA, 19 nt, Artificial Sequence
  Description of Artificial Sequence: Synthetic oligonucleotide
  Antisense strand to SEQ ID NO: 777384
augucuacagcaagcccuc

SEQ ID NO: 777386 - RNA, 19 nt, Artificial Sequence
  Description of Artificial Sequence: Synthetic oligonucleotide
  Sense strand starting at position 3306 of SEQ ID NO: 587240
ccugcacuccucuggcaaa

SEQ ID NO: 777387 - RNA, 19 nt, Artificial Sequence
  Description of Artificial Sequence: Synthetic oligonucleotide
  Antisense strand to SEQ ID NO: 777386
uuugccagaggagugcagg

SEQ ID NO: 777388 - RNA, 19 nt, Artificial Sequence
  Description of Artificial Sequence: Synthetic oligonucleotide
  Sense strand starting at position 3433 of SEQ ID NO: 587240
guagccauaucuuuagaaa

SEQ ID NO: 777389 - RNA, 19 nt, Artificial Sequence
  Description of Artificial Sequence: Synthetic oligonucleotide
  Antisense strand to SEQ ID NO: 777388
uuucuaaagauauggcuac

SEQ ID NO: 777390 - RNA, 19 nt, Artificial Sequence
  Description of Artificial Sequence: Synthetic oligonucleotide
  Sense strand starting at position 3628 of SEQ ID NO: 587240
gcuuaauaguuacauuuga

SEQ ID NO: 777391 - RNA, 19 nt, Artificial Sequence
  Description of Artificial Sequence: Synthetic oligonucleotide
  Antisense strand to SEQ ID NO: 777390
ucaaauguaacuauuaagc

SEQ ID NO: 777392 - RNA, 19 nt, Artificial Sequence
  Description of Artificial Sequence: Synthetic oligonucleotide
  Sense strand starting at position 3639 of SEQ ID NO: 587240
acauuugacuagugguaac

SEQ ID NO: 777393 - RNA, 19 nt, Artificial Sequence
  Description of Artificial Sequence: Synthetic oligonucleotide
  Antisense strand to SEQ ID NO: 777392
guuaccacuagucaaaugu

SEQ ID NO: 777394 - RNA, 19 nt, Artificial Sequence
  Description of Artificial Sequence: Synthetic oligonucleotide
  Sense strand starting at position 3761 of SEQ ID NO: 587240
agcacuauuccuugagcac

SEQ ID NO: 777395 - RNA, 19 nt, Artificial Sequence
  Description of Artificial Sequence: Synthetic oligonucleotide
  Antisense strand to SEQ ID NO: 777394
gugcucaaggaauagugcu

SEQ ID NO: 777396 - RNA, 19 nt, Artificial Sequence
  Description of Artificial Sequence: Synthetic oligonucleotide
  Sense strand starting at position 3762 of SEQ ID NO: 587240
gcacuauuccuugagcaca

SEQ ID NO: 777397 - RNA, 19 nt, Artificial Sequence
  Description of Artificial Sequence: Synthetic oligonucleotide
  Antisense strand to SEQ ID NO: 777396
ugugcucaaggaauagugc

SEQ ID NO: 777398 - RNA, 19 nt, Artificial Sequence
  Description of Artificial Sequence: Synthetic oligonucleotide
  Sense strand starting at position 203 of SEQ ID NO: 587241
auguuagcuccuggaagac

SEQ ID NO: 777399 - RNA, 19 nt, Artificial Sequence
  Description of Artificial Sequence: Synthetic oligonucleotide
  Antisense strand to SEQ ID NO: 777398
gucuuccaggagcuaacau

SEQ ID NO: 777400 - RNA, 19 nt, Artificial Sequence
  Description of Artificial Sequence: Synthetic oligonucleotide
  Sense strand starting at position 289 of SEQ ID NO: 587241
ucaauauacgcuugcuaua

SEQ ID NO: 777401 - RNA, 19 nt, Artificial Sequence
  Description of Artificial Sequence: Synthetic oligonucleotide
  Antisense strand to SEQ ID NO: 777400
uauagcaagcguauauuga

SEQ ID NO: 777402 - RNA, 19 nt, Artificial Sequence
  Description of Artificial Sequence: Synthetic oligonucleotide
  Sense strand starting at position 294 of SEQ ID NO: 587241
auacgcuugcuauaugaau

SEQ ID NO: 777403 - RNA, 19 nt, Artificial Sequence
  Description of Artificial Sequence: Synthetic oligonucleotide
  Antisense strand to SEQ ID NO: 777402
auucauauagcaagcguau

SEQ ID NO: 777404 - RNA, 19 nt, Artificial Sequence
  Description of Artificial Sequence: Synthetic oligonucleotide
  Sense strand starting at position 300 of SEQ ID NO: 587241
uugcuauaugaaugccgaa

SEQ ID NO: 777405 - RNA, 19 nt, Artificial Sequence
  Description of Artificial Sequence: Synthetic oligonucleotide
  Antisense strand to SEQ ID NO: 777404
uucggcauucauauagcaa

SEQ ID NO: 777406 - RNA, 19 nt, Artificial Sequence
  Description of Artificial Sequence: Synthetic oligonucleotide
  Sense strand starting at position 349 of SEQ ID NO: 587241
ggcuaagaaguuugggacu

SEQ ID NO: 777407 - RNA, 19 nt, Artificial Sequence
  Description of Artificial Sequence: Synthetic oligonucleotide
  Antisense strand to SEQ ID NO: 777406
agucccaaacuucuuagcc

SEQ ID NO: 777408 - RNA, 19 nt, Artificial Sequence
  Description of Artificial Sequence: Synthetic oligonucleotide
  Sense strand starting at position 423 of SEQ ID NO: 587241
cugugagaauccuuuguuu

SEQ ID NO: 777409 - RNA, 19 nt, Artificial Sequence
  Description of Artificial Sequence: Synthetic oligonucleotide
  Antisense strand to SEQ ID NO: 777408
aaacaaaggauucucacag

SEQ ID NO: 777410 - RNA, 19 nt, Artificial Sequence
  Description of Artificial Sequence: Synthetic oligonucleotide
  Sense strand starting at position 508 of SEQ ID NO: 587241
ccuuuccuguauucuguaa

SEQ ID NO: 777411 - RNA, 19 nt, Artificial Sequence
  Description of Artificial Sequence: Synthetic oligonucleotide
  Antisense strand to SEQ ID NO: 777410
uuacagaauacaggaaagg

SEQ ID NO: 777412 - RNA, 19 nt, Artificial Sequence
  Description of Artificial Sequence: Synthetic oligonucleotide
  Sense strand starting at position 638 of SEQ ID NO: 587241
gaagaaauguaauaaagug

SEQ ID NO: 777413 - RNA, 19 nt, Artificial Sequence
  Description of Artificial Sequence: Synthetic oligonucleotide
  Antisense strand to SEQ ID NO: 777412
cacuuuauuacauuucuuc

SEQ ID NO: 777414 - RNA, 19 nt, Artificial Sequence
  Description of Artificial Sequence: Synthetic oligonucleotide
  Sense strand starting at position 645 of SEQ ID NO: 587241
uguaauaaaguguguuaac

SEQ ID NO: 777415 - RNA, 19 nt, Artificial Sequence
  Description of Artificial Sequence: Synthetic oligonucleotide
  Antisense strand to SEQ ID NO: 777414
guuaacacacuuuauuaca

SEQ ID NO: 777416 - RNA, 19 nt, Artificial Sequence
  Description of Artificial Sequence: Synthetic oligonucleotide
  Sense strand starting at position 646 of SEQ ID NO: 587241
guaauaaaguguguuaaca

SEQ ID NO: 777417 - RNA, 19 nt, Artificial Sequence
  Description of Artificial Sequence: Synthetic oligonucleotide
  Antisense strand to SEQ ID NO: 777416
uguuaacacacuuuauuac

SEQ ID NO: 777418 - RNA, 19 nt, Artificial Sequence
  Description of Artificial Sequence: Synthetic oligonucleotide
  Sense strand starting at position 722 of SEQ ID NO: 587241
guccaaguuuaacuuuauu

SEQ ID NO: 777419 - RNA, 19 nt, Artificial Sequence
  Description of Artificial Sequence: Synthetic oligonucleotide
  Antisense strand to SEQ ID NO: 777418
aauaaaguuaaacuuggac

SEQ ID NO: 777420 - RNA, 19 nt, Artificial Sequence
  Description of Artificial Sequence: Synthetic oligonucleotide
  Sense strand starting at position 749 of SEQ ID NO: 587241
aguccuuaaugagcuaaca

SEQ ID NO: 777421 - RNA, 19 nt, Artificial Sequence
  Description of Artificial Sequence: Synthetic oligonucleotide
  Antisense strand to SEQ ID NO: 777420
uguuagcucauuaaggacu

SEQ ID NO: 777422 - RNA, 19 nt, Artificial Sequence
  Description of Artificial Sequence: Synthetic oligonucleotide
  Sense strand starting at position 896 of SEQ ID NO: 587241
gcuacauguuuggcuagau

SEQ ID NO: 777423 - RNA, 19 nt, Artificial Sequence
  Description of Artificial Sequence: Synthetic oligonucleotide
  Antisense strand to SEQ ID NO: 777422
aucuagccaaacauguagc

SEQ ID NO: 777424 - RNA, 19 nt, Artificial Sequence
  Description of Artificial Sequence: Synthetic oligonucleotide
  Sense strand starting at position 897 of SEQ ID NO: 587241
cuacauguuuggcuagaua

SEQ ID NO: 777425 - RNA, 19 nt, Artificial Sequence
  Description of Artificial Sequence: Synthetic oligonucleotide
  Antisense strand to SEQ ID NO: 777424
uaucuagccaaacauguag

SEQ ID NO: 777426 - RNA, 19 nt, Artificial Sequence
  Description of Artificial Sequence: Synthetic oligonucleotide
  Sense strand starting at position 900 of SEQ ID NO: 587241
cauguuuggcuagauaaca

SEQ ID NO: 777427 - RNA, 19 nt, Artificial Sequence
  Description of Artificial Sequence: Synthetic oligonucleotide
  Antisense strand to SEQ ID NO: 777426
uguuaucuagccaaacaug

SEQ ID NO: 777428 - RNA, 19 nt, Artificial Sequence
  Description of Artificial Sequence: Synthetic oligonucleotide
  Sense strand starting at position 976 of SEQ ID NO: 587241
cuuucugaccuuggagaag

SEQ ID NO: 777429 - RNA, 19 nt, Artificial Sequence
  Description of Artificial Sequence: Synthetic oligonucleotide
  Antisense strand to SEQ ID NO: 777428
cuucuccaaggucagaaag

SEQ ID NO: 777430 - RNA, 19 nt, Artificial Sequence
  Description of Artificial Sequence: Synthetic oligonucleotide
  Sense strand starting at position 1091 of SEQ ID NO: 587241
uggcaccgugucugacaua

SEQ ID NO: 777431 - RNA, 19 nt, Artificial Sequence
  Description of Artificial Sequence: Synthetic oligonucleotide
  Antisense strand to SEQ ID NO: 777430
uaugucagacacggugcca

SEQ ID NO: 777432 - RNA, 19 nt, Artificial Sequence
  Description of Artificial Sequence: Synthetic oligonucleotide
  Sense strand starting at position 1253 of SEQ ID NO: 587241
uuauuauguucuguagcca

SEQ ID NO: 777433 - RNA, 19 nt, Artificial Sequence
  Description of Artificial Sequence: Synthetic oligonucleotide
  Antisense strand to SEQ ID NO: 777432
uggcuacagaacauaauaa

SEQ ID NO: 777434 - RNA, 19 nt, Artificial Sequence
  Description of Artificial Sequence: Synthetic oligonucleotide
  Sense strand starting at position 1385 of SEQ ID NO: 587241
gaaguuugcgauuacccga

SEQ ID NO: 777435 - RNA, 19 nt, Artificial Sequence
  Description of Artificial Sequence: Synthetic oligonucleotide
  Antisense strand to SEQ ID NO: 777434
ucggguaaucgcaaacuuc

SEQ ID NO: 777436 - RNA, 19 nt, Artificial Sequence
  Description of Artificial Sequence: Synthetic oligonucleotide
  Sense strand starting at position 1870 of SEQ ID NO: 587241
ggagauaucaaguggcucu

SEQ ID NO: 777437 - RNA, 19 nt, Artificial Sequence
  Description of Artificial Sequence: Synthetic oligonucleotide
  Antisense strand to SEQ ID NO: 777436
agagccacuugauaucucc

SEQ ID NO: 777438 - RNA, 19 nt, Artificial Sequence
  Description of Artificial Sequence: Synthetic oligonucleotide
  Sense strand starting at position 2089 of SEQ ID NO: 587241
cgggcugcucugagucaga

SEQ ID NO: 777439 - RNA, 19 nt, Artificial Sequence
  Description of Artificial Sequence: Synthetic oligonucleotide
  Antisense strand to SEQ ID NO: 777438
ucugacucagagcagcccg

SEQ ID NO: 777440 - RNA, 19 nt, Artificial Sequence
  Description of Artificial Sequence: Synthetic oligonucleotide
  Sense strand starting at position 2114 of SEQ ID NO: 587241
gggaaagccugcucugaau

SEQ ID NO: 777441 - RNA, 19 nt, Artificial Sequence
  Description of Artificial Sequence: Synthetic oligonucleotide
  Antisense strand to SEQ ID NO: 777440
auucagagcaggcuuuccc

SEQ ID NO: 777442 - RNA, 19 nt, Artificial Sequence
  Description of Artificial Sequence: Synthetic oligonucleotide
  Sense strand starting at position 2178 of SEQ ID NO: 587241
agaagagguuuauccgauc

SEQ ID NO: 777443 - RNA, 19 nt, Artificial Sequence
  Description of Artificial Sequence: Synthetic oligonucleotide
  Antisense strand to SEQ ID NO: 777442
gaucggauaaaccucuucu

SEQ ID NO: 777444 - RNA, 19 nt, Artificial Sequence
  Description of Artificial Sequence: Synthetic oligonucleotide
  Sense strand starting at position 2194 of SEQ ID NO: 587241
aucugaguccgggagcauu

SEQ ID NO: 777445 - RNA, 19 nt, Artificial Sequence
  Description of Artificial Sequence: Synthetic oligonucleotide
  Antisense strand to SEQ ID NO: 777444
aaugcucccggacucagau

SEQ ID NO: 777446 - RNA, 19 nt, Artificial Sequence
  Description of Artificial Sequence: Synthetic oligonucleotide
  Sense strand starting at position 2330 of SEQ ID NO: 587241
cuagguaggucuucuauag

SEQ ID NO: 777447 - RNA, 19 nt, Artificial Sequence
  Description of Artificial Sequence: Synthetic oligonucleotide
  Antisense strand to SEQ ID NO: 777446
cuauagaagaccuaccuag

SEQ ID NO: 777448 - RNA, 19 nt, Artificial Sequence
  Description of Artificial Sequence: Synthetic oligonucleotide
  Sense strand starting at position 2349 of SEQ ID NO: 587241
acccgaaauugacauauua

SEQ ID NO: 777449 - RNA, 19 nt, Artificial Sequence
  Description of Artificial Sequence: Synthetic oligonucleotide
  Antisense strand to SEQ ID NO: 777448
uaauaugucaauuucgggu

SEQ ID NO: 777450 - RNA, 19 nt, Artificial Sequence
  Description of Artificial Sequence: Synthetic oligonucleotide
  Sense strand starting at position 2550 of SEQ ID NO: 587241
gguucaagcgauucgcagu

SEQ ID NO: 777451 - RNA, 19 nt, Artificial Sequence
  Description of Artificial Sequence: Synthetic oligonucleotide
  Antisense strand to SEQ ID NO: 777450
acugcgaaucgcuugaacc

SEQ ID NO: 777452 - RNA, 19 nt, Artificial Sequence
  Description of Artificial Sequence: Synthetic oligonucleotide
  Sense strand starting at position 2557 of SEQ ID NO: 587241
gcgauucgcaguuugaauc

SEQ ID NO: 777453 - RNA, 19 nt, Artificial Sequence
  Description of Artificial Sequence: Synthetic oligonucleotide
  Antisense strand to SEQ ID NO: 777452
gauucaaacugcgaaucgc

SEQ ID NO: 777454 - RNA, 19 nt, Artificial Sequence
  Description of Artificial Sequence: Synthetic oligonucleotide
  Sense strand starting at position 2748 of SEQ ID NO: 587241
cagugaccguccucugaau

SEQ ID NO: 777455 - RNA, 19 nt, Artificial Sequence
  Description of Artificial Sequence: Synthetic oligonucleotide
  Antisense strand to SEQ ID NO: 777454
auucagaggacggucacug

SEQ ID NO: 777456 - RNA, 19 nt, Artificial Sequence
  Description of Artificial Sequence: Synthetic oligonucleotide
  Sense strand starting at position 2939 of SEQ ID NO: 587241
ucaacaauugcugguguua

SEQ ID NO: 777457 - RNA, 19 nt, Artificial Sequence
  Description of Artificial Sequence: Synthetic oligonucleotide
  Antisense strand to SEQ ID NO: 777456
uaacaccagcaauuguuga

SEQ ID NO: 777458 - RNA, 19 nt, Artificial Sequence
  Description of Artificial Sequence: Synthetic oligonucleotide
  Sense strand starting at position 3089 of SEQ ID NO: 587241
uguucuugaaagugucaug

SEQ ID NO: 777459 - RNA, 19 nt, Artificial Sequence
  Description of Artificial Sequence: Synthetic oligonucleotide
  Antisense strand to SEQ ID NO: 777458
caugacacuuucaagaaca

SEQ ID NO: 777460 - RNA, 19 nt, Artificial Sequence
  Description of Artificial Sequence: Synthetic oligonucleotide
  Sense strand starting at position 3100 of SEQ ID NO: 587241
gugucauguaaagguuuag

SEQ ID NO: 777461 - RNA, 19 nt, Artificial Sequence
  Description of Artificial Sequence: Synthetic oligonucleotide
  Antisense strand to SEQ ID NO: 777460
cuaaaccuuuacaugacac

SEQ ID NO: 777462 - RNA, 19 nt, Artificial Sequence
  Description of Artificial Sequence: Synthetic oligonucleotide
  Sense strand starting at position 3115 of SEQ ID NO: 587241
uuaggacuauugucauauu

SEQ ID NO: 777463 - RNA, 19 nt, Artificial Sequence
  Description of Artificial Sequence: Synthetic oligonucleotide
  Antisense strand to SEQ ID NO: 777462
aauaugacaauaguccuaa

SEQ ID NO: 777464 - RNA, 19 nt, Artificial Sequence
  Description of Artificial Sequence: Synthetic oligonucleotide
  Sense strand starting at position 3123 of SEQ ID NO: 587241
auugucauauuagaggaaa

SEQ ID NO: 777465 - RNA, 19 nt, Artificial Sequence
  Description of Artificial Sequence: Synthetic oligonucleotide
  Antisense strand to SEQ ID NO: 777464
uuuccucuaauaugacaau

SEQ ID NO: 777466 - RNA, 19 nt, Artificial Sequence
  Description of Artificial Sequence: Synthetic oligonucleotide
  Sense strand starting at position 3399 of SEQ ID NO: 587241
ucacaaugagccgagaucu

SEQ ID NO: 777467 - RNA, 19 nt, Artificial Sequence
  Description of Artificial Sequence: Synthetic oligonucleotide
  Antisense strand to SEQ ID NO: 777466
agaucucggcucauuguga

SEQ ID NO: 777468 - RNA, 19 nt, Artificial Sequence
  Description of Artificial Sequence: Synthetic oligonucleotide
  Sense strand starting at position 3477 of SEQ ID NO: 587241
auaagaucuuagggcauuu

SEQ ID NO: 777469 - RNA, 19 nt, Artificial Sequence
  Description of Artificial Sequence: Synthetic oligonucleotide
  Antisense strand to SEQ ID NO: 777468
aaaugcccuaagaucuuau

SEQ ID NO: 777470 - RNA, 19 nt, Artificial Sequence
  Description of Artificial Sequence: Synthetic oligonucleotide
  Sense strand starting at position 3508 of SEQ ID NO: 587241
ugcuaugacuaaucagcaa

SEQ ID NO: 777471 - RNA, 19 nt, Artificial Sequence
  Description of Artificial Sequence: Synthetic oligonucleotide
  Antisense strand to SEQ ID NO: 777470
uugcugauuagucauagca

SEQ ID NO: 777472 - RNA, 19 nt, Artificial Sequence
  Description of Artificial Sequence: Synthetic oligonucleotide
  Sense strand starting at position 3557 of SEQ ID NO: 587241
aucaguuuguuauugaugu

SEQ ID NO: 777473 - RNA, 19 nt, Artificial Sequence
  Description of Artificial Sequence: Synthetic oligonucleotide
  Antisense strand to SEQ ID NO: 777472
acaucaauaacaaacugau

SEQ ID NO: 777474 - RNA, 19 nt, Artificial Sequence
  Description of Artificial Sequence: Synthetic oligonucleotide
  Sense strand starting at position 3630 of SEQ ID NO: 587241
augacaaauuagcaaggaa

SEQ ID NO: 777475 - RNA, 19 nt, Artificial Sequence
  Description of Artificial Sequence: Synthetic oligonucleotide
  Antisense strand to SEQ ID NO: 777474
uuccuugcuaauuugucau

SEQ ID NO: 777476 - RNA, 19 nt, Artificial Sequence
  Description of Artificial Sequence: Synthetic oligonucleotide
  Sense strand starting at position 3901 of SEQ ID NO: 587241
gcuguuaggagcugauaug

SEQ ID NO: 777477 - RNA, 19 nt, Artificial Sequence
  Description of Artificial Sequence: Synthetic oligonucleotide
  Antisense strand to SEQ ID NO: 777476
cauaucagcuccuaacagc

SEQ ID NO: 777478 - RNA, 19 nt, Artificial Sequence
  Description of Artificial Sequence: Synthetic oligonucleotide
  Sense strand starting at position 42 of SEQ ID NO: 587242
uugguaugcucuuucccua

SEQ ID NO: 777479 - RNA, 19 nt, Artificial Sequence
  Description of Artificial Sequence: Synthetic oligonucleotide
  Antisense strand to SEQ ID NO: 777478
uagggaaagagcauaccaa

SEQ ID NO: 777480 - RNA, 19 nt, Artificial Sequence
  Description of Artificial Sequence: Synthetic oligonucleotide
  Sense strand starting at position 278 of SEQ ID NO: 587242
auguuagcuccuggaagac

SEQ ID NO: 777481 - RNA, 19 nt, Artificial Sequence
  Description of Artificial Sequence: Synthetic oligonucleotide
  Antisense strand to SEQ ID NO: 777480
gucuuccaggagcuaacau

SEQ ID NO: 777482 - RNA, 19 nt, Artificial Sequence
  Description of Artificial Sequence: Synthetic oligonucleotide
  Sense strand starting at position 364 of SEQ ID NO: 587242
ucaauauacgcuugcuaua

SEQ ID NO: 777483 - RNA, 19 nt, Artificial Sequence
  Description of Artificial Sequence: Synthetic oligonucleotide
  Antisense strand to SEQ ID NO: 777482
uauagcaagcguauauuga

SEQ ID NO: 777484 - RNA, 19 nt, Artificial Sequence
  Description of Artificial Sequence: Synthetic oligonucleotide
  Sense strand starting at position 369 of SEQ ID NO: 587242
auacgcuugcuauaugaau

SEQ ID NO: 777485 - RNA, 19 nt, Artificial Sequence
  Description of Artificial Sequence: Synthetic oligonucleotide
  Antisense strand to SEQ ID NO: 777484
auucauauagcaagcguau

SEQ ID NO: 777486 - RNA, 19 nt, Artificial Sequence
  Description of Artificial Sequence: Synthetic oligonucleotide
  Sense strand starting at position 375 of SEQ ID NO: 587242
uugcuauaugaaugccgaa

SEQ ID NO: 777487 - RNA, 19 nt, Artificial Sequence
  Description of Artificial Sequence: Synthetic oligonucleotide
  Antisense strand to SEQ ID NO: 777486
uucggcauucauauagcaa

SEQ ID NO: 777488 - RNA, 19 nt, Artificial Sequence
  Description of Artificial Sequence: Synthetic oligonucleotide
  Sense strand starting at position 424 of SEQ ID NO: 587242
ggcuaagaaguuugggacu

SEQ ID NO: 777489 - RNA, 19 nt, Artificial Sequence
  Description of Artificial Sequence: Synthetic oligonucleotide
  Antisense strand to SEQ ID NO: 777488
agucccaaacuucuuagcc

SEQ ID NO: 777490 - RNA, 19 nt, Artificial Sequence
  Description of Artificial Sequence: Synthetic oligonucleotide
  Sense strand starting at position 498 of SEQ ID NO: 587242
cugugagaauccuuuguuu

SEQ ID NO: 777491 - RNA, 19 nt, Artificial Sequence
  Description of Artificial Sequence: Synthetic oligonucleotide
  Antisense strand to SEQ ID NO: 777490
aaacaaaggauucucacag

SEQ ID NO: 777492 - RNA, 19 nt, Artificial Sequence
  Description of Artificial Sequence: Synthetic oligonucleotide
  Sense strand starting at position 583 of SEQ ID NO: 587242
ccuuuccuguauucuguaa

SEQ ID NO: 777493 - RNA, 19 nt, Artificial Sequence
  Description of Artificial Sequence: Synthetic oligonucleotide
  Antisense strand to SEQ ID NO: 777492
uuacagaauacaggaaagg

SEQ ID NO: 777494 - RNA, 19 nt, Artificial Sequence
  Description of Artificial Sequence: Synthetic oligonucleotide
  Sense strand starting at position 713 of SEQ ID NO: 587242
gaagaaauguaauaaagug

SEQ ID NO: 777495 - RNA, 19 nt, Artificial Sequence
  Description of Artificial Sequence: Synthetic oligonucleotide
  Antisense strand to SEQ ID NO: 777494
cacuuuauuacauuucuuc

SEQ ID NO: 777496 - RNA, 19 nt, Artificial Sequence
  Description of Artificial Sequence: Synthetic oligonucleotide
  Sense strand starting at position 720 of SEQ ID NO: 587242
uguaauaaaguguguuaac

SEQ ID NO: 777497 - RNA, 19 nt, Artificial Sequence
  Description of Artificial Sequence: Synthetic oligonucleotide
  Antisense strand to SEQ ID NO: 777496
guuaacacacuuuauuaca

SEQ ID NO: 777498 - RNA, 19 nt, Artificial Sequence
  Description of Artificial Sequence: Synthetic oligonucleotide
  Sense strand starting at position 721 of SEQ ID NO: 587242
guaauaaaguguguuaaca

SEQ ID NO: 777499 - RNA, 19 nt, Artificial Sequence
  Description of Artificial Sequence: Synthetic oligonucleotide
  Antisense strand to SEQ ID NO: 777498
uguuaacacacuuuauuac

SEQ ID NO: 777500 - RNA, 19 nt, Artificial Sequence
  Description of Artificial Sequence: Synthetic oligonucleotide
  Sense strand starting at position 797 of SEQ ID NO: 587242
guccaaguuuaacuuuauu

SEQ ID NO: 777501 - RNA, 19 nt, Artificial Sequence
  Description of Artificial Sequence: Synthetic oligonucleotide
  Antisense strand to SEQ ID NO: 777500
aauaaaguuaaacuuggac

SEQ ID NO: 777502 - RNA, 19 nt, Artificial Sequence
  Description of Artificial Sequence: Synthetic oligonucleotide
  Sense strand starting at position 824 of SEQ ID NO: 587242
aguccuuaaugagcuaaca

SEQ ID NO: 777503 - RNA, 19 nt, Artificial Sequence
  Description of Artificial Sequence: Synthetic oligonucleotide
  Antisense strand to SEQ ID NO: 777502
uguuagcucauuaaggacu

SEQ ID NO: 777504 - RNA, 19 nt, Artificial Sequence
  Description of Artificial Sequence: Synthetic oligonucleotide
  Sense strand starting at position 971 of SEQ ID NO: 587242
gcuacauguuuggcuagau

SEQ ID NO: 777505 - RNA, 19 nt, Artificial Sequence
  Description of Artificial Sequence: Synthetic oligonucleotide
  Antisense strand to SEQ ID NO: 777504
aucuagccaaacauguagc

SEQ ID NO: 777506 - RNA, 19 nt, Artificial Sequence
  Description of Artificial Sequence: Synthetic oligonucleotide
  Sense strand starting at position 972 of SEQ ID NO: 587242
cuacauguuuggcuagaua

SEQ ID NO: 777507 - RNA, 19 nt, Artificial Sequence
  Description of Artificial Sequence: Synthetic oligonucleotide
  Antisense strand to SEQ ID NO: 777506
uaucuagccaaacauguag

SEQ ID NO: 777508 - RNA, 19 nt, Artificial Sequence
  Description of Artificial Sequence: Synthetic oligonucleotide
  Sense strand starting at position 975 of SEQ ID NO: 587242
cauguuuggcuagauaaca

SEQ ID NO: 777509 - RNA, 19 nt, Artificial Sequence
  Description of Artificial Sequence: Synthetic oligonucleotide
  Antisense strand to SEQ ID NO: 777508
uguuaucuagccaaacaug

SEQ ID NO: 777510 - RNA, 19 nt, Artificial Sequence
  Description of Artificial Sequence: Synthetic oligonucleotide
  Sense strand starting at position 1051 of SEQ ID NO: 587242
cuuucugaccuuggagaag

SEQ ID NO: 777511 - RNA, 19 nt, Artificial Sequence
  Description of Artificial Sequence: Synthetic oligonucleotide
  Antisense strand to SEQ ID NO: 777510
cuucuccaaggucagaaag

SEQ ID NO: 777512 - RNA, 19 nt, Artificial Sequence
  Description of Artificial Sequence: Synthetic oligonucleotide
  Sense strand starting at position 1166 of SEQ ID NO: 587242
uggcaccgugucugacaua

SEQ ID NO: 777513 - RNA, 19 nt, Artificial Sequence
  Description of Artificial Sequence: Synthetic oligonucleotide
  Antisense strand to SEQ ID NO: 777512
uaugucagacacggugcca

SEQ ID NO: 777514 - RNA, 19 nt, Artificial Sequence
  Description of Artificial Sequence: Synthetic oligonucleotide
  Sense strand starting at position 1328 of SEQ ID NO: 587242
uuauuauguucuguagcca

SEQ ID NO: 777515 - RNA, 19 nt, Artificial Sequence
  Description of Artificial Sequence: Synthetic oligonucleotide
  Antisense strand to SEQ ID NO: 777514
uggcuacagaacauaauaa

SEQ ID NO: 777516 - RNA, 19 nt, Artificial Sequence
  Description of Artificial Sequence: Synthetic oligonucleotide
  Sense strand starting at position 1460 of SEQ ID NO: 587242
gaaguuugcgauuacccga

SEQ ID NO: 777517 - RNA, 19 nt, Artificial Sequence
  Description of Artificial Sequence: Synthetic oligonucleotide
  Antisense strand to SEQ ID NO: 777516
ucggguaaucgcaaacuuc

SEQ ID NO: 777518 - RNA, 19 nt, Artificial Sequence
  Description of Artificial Sequence: Synthetic oligonucleotide
  Sense strand starting at position 1945 of SEQ ID NO: 587242
ggagauaucaaguggcucu

SEQ ID NO: 777519 - RNA, 19 nt, Artificial Sequence
  Description of Artificial Sequence: Synthetic oligonucleotide
  Antisense strand to SEQ ID NO: 777518
agagccacuugauaucucc

SEQ ID NO: 777520 - RNA, 19 nt, Artificial Sequence
  Description of Artificial Sequence: Synthetic oligonucleotide
  Sense strand starting at position 2164 of SEQ ID NO: 587242
cgggcugcucugagucaga

SEQ ID NO: 777521 - RNA, 19 nt, Artificial Sequence
  Description of Artificial Sequence: Synthetic oligonucleotide
  Antisense strand to SEQ ID NO: 777520
ucugacucagagcagcccg

SEQ ID NO: 777522 - RNA, 19 nt, Artificial Sequence
  Description of Artificial Sequence: Synthetic oligonucleotide
  Sense strand starting at position 2189 of SEQ ID NO: 587242
gggaaagccugcucugaau

SEQ ID NO: 777523 - RNA, 19 nt, Artificial Sequence
  Description of Artificial Sequence: Synthetic oligonucleotide
  Antisense strand to SEQ ID NO: 777522
auucagagcaggcuuuccc

SEQ ID NO: 777524 - RNA, 19 nt, Artificial Sequence
  Description of Artificial Sequence: Synthetic oligonucleotide
  Sense strand starting at position 2253 of SEQ ID NO: 587242
agaagagguuuauccgauc

SEQ ID NO: 777525 - RNA, 19 nt, Artificial Sequence
  Description of Artificial Sequence: Synthetic oligonucleotide
  Antisense strand to SEQ ID NO: 777524
gaucggauaaaccucuucu

SEQ ID NO: 777526 - RNA, 19 nt, Artificial Sequence
  Description of Artificial Sequence: Synthetic oligonucleotide
  Sense strand starting at position 2269 of SEQ ID NO: 587242
aucugaguccgggagcauu

SEQ ID NO: 777527 - RNA, 19 nt, Artificial Sequence
  Description of Artificial Sequence: Synthetic oligonucleotide
  Antisense strand to SEQ ID NO: 777526
aaugcucccggacucagau

SEQ ID NO: 777528 - RNA, 19 nt, Artificial Sequence
  Description of Artificial Sequence: Synthetic oligonucleotide
  Sense strand starting at position 2405 of SEQ ID NO: 587242
cuagguaggucuucuauag

SEQ ID NO: 777529 - RNA, 19 nt, Artificial Sequence
  Description of Artificial Sequence: Synthetic oligonucleotide
  Antisense strand to SEQ ID NO: 777528
cuauagaagaccuaccuag

SEQ ID NO: 777530 - RNA, 19 nt, Artificial Sequence
  Description of Artificial Sequence: Synthetic oligonucleotide
  Sense strand starting at position 2625 of SEQ ID NO: 587242
gguucaagcgauucgcagu

SEQ ID NO: 777531 - RNA, 19 nt, Artificial Sequence
  Description of Artificial Sequence: Synthetic oligonucleotide
  Antisense strand to SEQ ID NO: 777530
acugcgaaucgcuugaacc

SEQ ID NO: 777532 - RNA, 19 nt, Artificial Sequence
  Description of Artificial Sequence: Synthetic oligonucleotide
  Sense strand starting at position 2632 of SEQ ID NO: 587242
gcgauucgcaguuugaauc

SEQ ID NO: 777533 - RNA, 19 nt, Artificial Sequence
  Description of Artificial Sequence: Synthetic oligonucleotide
  Antisense strand to SEQ ID NO: 777532
gauucaaacugcgaaucgc

SEQ ID NO: 777534 - RNA, 19 nt, Artificial Sequence
  Description of Artificial Sequence: Synthetic oligonucleotide
  Sense strand starting at position 2823 of SEQ ID NO: 587242
cagugaccguccucugaau

SEQ ID NO: 777535 - RNA, 19 nt, Artificial Sequence
  Description of Artificial Sequence: Synthetic oligonucleotide
  Antisense strand to SEQ ID NO: 777534
auucagaggacggucacug

SEQ ID NO: 777536 - RNA, 19 nt, Artificial Sequence
  Description of Artificial Sequence: Synthetic oligonucleotide
  Sense strand starting at position 3014 of SEQ ID NO: 587242
ucaacaauugcugguguua

SEQ ID NO: 777537 - RNA, 19 nt, Artificial Sequence
  Description of Artificial Sequence: Synthetic oligonucleotide
  Antisense strand to SEQ ID NO: 777536
uaacaccagcaauuguuga

SEQ ID NO: 777538 - RNA, 19 nt, Artificial Sequence
  Description of Artificial Sequence: Synthetic oligonucleotide
  Sense strand starting at position 3164 of SEQ ID NO: 587242
uguucuugaaagugucaug

SEQ ID NO: 777539 - RNA, 19 nt, Artificial Sequence
  Description of Artificial Sequence: Synthetic oligonucleotide
  Antisense strand to SEQ ID NO: 777538
caugacacuuucaagaaca

SEQ ID NO: 777540 - RNA, 19 nt, Artificial Sequence
  Description of Artificial Sequence: Synthetic oligonucleotide
  Sense strand starting at position 3175 of SEQ ID NO: 587242
gugucauguaaagguuuag

SEQ ID NO: 777541 - RNA, 19 nt, Artificial Sequence
  Description of Artificial Sequence: Synthetic oligonucleotide
  Antisense strand to SEQ ID NO: 777540
cuaaaccuuuacaugacac

SEQ ID NO: 777542 - RNA, 19 nt, Artificial Sequence
  Description of Artificial Sequence: Synthetic oligonucleotide
  Sense strand starting at position 3190 of SEQ ID NO: 587242
uuaggacuauugucauauu

SEQ ID NO: 777543 - RNA, 19 nt, Artificial Sequence
  Description of Artificial Sequence: Synthetic oligonucleotide
  Antisense strand to SEQ ID NO: 777542
aauaugacaauaguccuaa

SEQ ID NO: 777544 - RNA, 19 nt, Artificial Sequence
  Description of Artificial Sequence: Synthetic oligonucleotide
  Sense strand starting at position 3198 of SEQ ID NO: 587242
auugucauauuagaggaaa

SEQ ID NO: 777545 - RNA, 19 nt, Artificial Sequence
  Description of Artificial Sequence: Synthetic oligonucleotide
  Antisense strand to SEQ ID NO: 777544
uuuccucuaauaugacaau

SEQ ID NO: 777546 - RNA, 19 nt, Artificial Sequence
  Description of Artificial Sequence: Synthetic oligonucleotide
  Sense strand starting at position 3474 of SEQ ID NO: 587242
ucacaaugagccgagaucu

SEQ ID NO: 777547 - RNA, 19 nt, Artificial Sequence
  Description of Artificial Sequence: Synthetic oligonucleotide
  Antisense strand to SEQ ID NO: 777546
agaucucggcucauuguga

SEQ ID NO: 777548 - RNA, 19 nt, Artificial Sequence
  Description of Artificial Sequence: Synthetic oligonucleotide
  Sense strand starting at position 3552 of SEQ ID NO: 587242
auaagaucuuagggcauuu

SEQ ID NO: 777549 - RNA, 19 nt, Artificial Sequence
  Description of Artificial Sequence: Synthetic oligonucleotide
  Antisense strand to SEQ ID NO: 777548
aaaugcccuaagaucuuau

SEQ ID NO: 777550 - RNA, 19 nt, Artificial Sequence
  Description of Artificial Sequence: Synthetic oligonucleotide
  Sense strand starting at position 3583 of SEQ ID NO: 587242
ugcuaugacuaaucagcaa

SEQ ID NO: 777551 - RNA, 19 nt, Artificial Sequence
  Description of Artificial Sequence: Synthetic oligonucleotide
  Antisense strand to SEQ ID NO: 777550
uugcugauuagucauagca

SEQ ID NO: 777552 - RNA, 19 nt, Artificial Sequence
  Description of Artificial Sequence: Synthetic oligonucleotide
  Sense strand starting at position 3632 of SEQ ID NO: 587242
aucaguuuguuauugaugu

SEQ ID NO: 777553 - RNA, 19 nt, Artificial Sequence
  Description of Artificial Sequence: Synthetic oligonucleotide
  Antisense strand to SEQ ID NO: 777552
acaucaauaacaaacugau

SEQ ID NO: 777554 - RNA, 19 nt, Artificial Sequence
  Description of Artificial Sequence: Synthetic oligonucleotide
  Sense strand starting at position 3705 of SEQ ID NO: 587242
augacaaauuagcaaggaa

SEQ ID NO: 777555 - RNA, 19 nt, Artificial Sequence
  Description of Artificial Sequence: Synthetic oligonucleotide
  Antisense strand to SEQ ID NO: 777554
uuccuugcuaauuugucau

SEQ ID NO: 777556 - RNA, 19 nt, Artificial Sequence
  Description of Artificial Sequence: Synthetic oligonucleotide
  Sense strand starting at position 3976 of SEQ ID NO: 587242
gcuguuaggagcugauaug

SEQ ID NO: 777557 - RNA, 19 nt, Artificial Sequence
  Description of Artificial Sequence: Synthetic oligonucleotide
  Antisense strand to SEQ ID NO: 777556
cauaucagcuccuaacagc

SEQ ID NO: 777558 - RNA, 19 nt, Artificial Sequence
  Description of Artificial Sequence: Synthetic oligonucleotide
  Sense strand starting at position 83 of SEQ ID NO: 587243
agccucaugugcuugauuu

SEQ ID NO: 777559 - RNA, 19 nt, Artificial Sequence
  Description of Artificial Sequence: Synthetic oligonucleotide
  Antisense strand to SEQ ID NO: 777558
aaaucaagcacaugaggcu

SEQ ID NO: 777560 - RNA, 19 nt, Artificial Sequence
  Description of Artificial Sequence: Synthetic oligonucleotide
  Sense strand starting at position 84 of SEQ ID NO: 587243
gccucaugugcuugauuuc

SEQ ID NO: 777561 - RNA, 19 nt, Artificial Sequence
  Description of Artificial Sequence: Synthetic oligonucleotide
  Antisense strand to SEQ ID NO: 777560
gaaaucaagcacaugaggc

SEQ ID NO: 777562 - RNA, 19 nt, Artificial Sequence
  Description of Artificial Sequence: Synthetic oligonucleotide
  Sense strand starting at position 219 of SEQ ID NO: 587243
ggaagucacaccugaugau

SEQ ID NO: 777563 - RNA, 19 nt, Artificial Sequence
  Description of Artificial Sequence: Synthetic oligonucleotide
  Antisense strand to SEQ ID NO: 777562
aucaucaggugugacuucc

SEQ ID NO: 777564 - RNA, 19 nt, Artificial Sequence
  Description of Artificial Sequence: Synthetic oligonucleotide
  Sense strand starting at position 675 of SEQ ID NO: 587243
auaaucucugcugguauga

SEQ ID NO: 777565 - RNA, 19 nt, Artificial Sequence
  Description of Artificial Sequence: Synthetic oligonucleotide
  Antisense strand to SEQ ID NO: 777564
ucauaccagcagagauuau

SEQ ID NO: 777566 - RNA, 19 nt, Artificial Sequence
  Description of Artificial Sequence: Synthetic oligonucleotide
  Sense strand starting at position 850 of SEQ ID NO: 587243
cauagugugcaugaaauau

SEQ ID NO: 777567 - RNA, 19 nt, Artificial Sequence
  Description of Artificial Sequence: Synthetic oligonucleotide
  Antisense strand to SEQ ID NO: 777566
auauuucaugcacacuaug

SEQ ID NO: 777568 - RNA, 19 nt, Artificial Sequence
  Description of Artificial Sequence: Synthetic oligonucleotide
  Sense strand starting at position 919 of SEQ ID NO: 587243
uuuguauuggaauagcuuu

SEQ ID NO: 777569 - RNA, 19 nt, Artificial Sequence
  Description of Artificial Sequence: Synthetic oligonucleotide
  Antisense strand to SEQ ID NO: 777568
aaagcuauuccaauacaaa

SEQ ID NO: 777570 - RNA, 19 nt, Artificial Sequence
  Description of Artificial Sequence: Synthetic oligonucleotide
  Sense strand starting at position 1097 of SEQ ID NO: 587243
aguccauuccauggauauu

SEQ ID NO: 777571 - RNA, 19 nt, Artificial Sequence
  Description of Artificial Sequence: Synthetic oligonucleotide
  Antisense strand to SEQ ID NO: 777570
aauauccauggaauggacu

SEQ ID NO: 777572 - RNA, 19 nt, Artificial Sequence
  Description of Artificial Sequence: Synthetic oligonucleotide
  Sense strand starting at position 1116 of SEQ ID NO: 587243
ugcaaauauguggauguuu

SEQ ID NO: 777573 - RNA, 19 nt, Artificial Sequence
  Description of Artificial Sequence: Synthetic oligonucleotide
  Antisense strand to SEQ ID NO: 777572
aaacauccacauauuugca

SEQ ID NO: 777574 - RNA, 19 nt, Artificial Sequence
  Description of Artificial Sequence: Synthetic oligonucleotide
  Sense strand starting at position 1118 of SEQ ID NO: 587243
caaauauguggauguuuag

SEQ ID NO: 777575 - RNA, 19 nt, Artificial Sequence
  Description of Artificial Sequence: Synthetic oligonucleotide
  Antisense strand to SEQ ID NO: 777574
cuaaacauccacauauuug

SEQ ID NO: 777576 - RNA, 19 nt, Artificial Sequence
  Description of Artificial Sequence: Synthetic oligonucleotide
  Sense strand starting at position 1121 of SEQ ID NO: 587243
auauguggauguuuagaaa

SEQ ID NO: 777577 - RNA, 19 nt, Artificial Sequence
  Description of Artificial Sequence: Synthetic oligonucleotide
  Antisense strand to SEQ ID NO: 777576
uuucuaaacauccacauau

SEQ ID NO: 777578 - RNA, 19 nt, Artificial Sequence
  Description of Artificial Sequence: Synthetic oligonucleotide
  Sense strand starting at position 1176 of SEQ ID NO: 587243
uguggacuuacaugaguau

SEQ ID NO: 777579 - RNA, 19 nt, Artificial Sequence
  Description of Artificial Sequence: Synthetic oligonucleotide
  Antisense strand to SEQ ID NO: 777578
auacucauguaaguccaca

SEQ ID NO: 777580 - RNA, 19 nt, Artificial Sequence
  Description of Artificial Sequence: Synthetic oligonucleotide
  Sense strand starting at position 1177 of SEQ ID NO: 587243
guggacuuacaugaguauu

SEQ ID NO: 777581 - RNA, 19 nt, Artificial Sequence
  Description of Artificial Sequence: Synthetic oligonucleotide
  Antisense strand to SEQ ID NO: 777580
aauacucauguaaguccac

SEQ ID NO: 777582 - RNA, 19 nt, Artificial Sequence
  Description of Artificial Sequence: Synthetic oligonucleotide
  Sense strand starting at position 1191 of SEQ ID NO: 587243
guauuuaccuuggucuauu

SEQ ID NO: 777583 - RNA, 19 nt, Artificial Sequence
  Description of Artificial Sequence: Synthetic oligonucleotide
  Antisense strand to SEQ ID NO: 777582
aauagaccaagguaaauac

SEQ ID NO: 777584 - RNA, 19 nt, Artificial Sequence
  Description of Artificial Sequence: Synthetic oligonucleotide
  Sense strand starting at position 1246 of SEQ ID NO: 587243
ucugaaugggcuuaguuua

SEQ ID NO: 777585 - RNA, 19 nt, Artificial Sequence
  Description of Artificial Sequence: Synthetic oligonucleotide
  Antisense strand to SEQ ID NO: 777584
uaaacuaagcccauucaga

SEQ ID NO: 777586 - RNA, 19 nt, Artificial Sequence
  Description of Artificial Sequence: Synthetic oligonucleotide
  Sense strand starting at position 1824 of SEQ ID NO: 587243
auacaaguaucagucauga

SEQ ID NO: 777587 - RNA, 19 nt, Artificial Sequence
  Description of Artificial Sequence: Synthetic oligonucleotide
  Antisense strand to SEQ ID NO: 777586
ucaugacugauacuuguau

SEQ ID NO: 777588 - RNA, 19 nt, Artificial Sequence
  Description of Artificial Sequence: Synthetic oligonucleotide
  Sense strand starting at position 1897 of SEQ ID NO: 587243
ggcaaugaguacuuacaug

SEQ ID NO: 777589 - RNA, 19 nt, Artificial Sequence
  Description of Artificial Sequence: Synthetic oligonucleotide
  Antisense strand to SEQ ID NO: 777588
cauguaaguacucauugcc

SEQ ID NO: 777590 - RNA, 19 nt, Artificial Sequence
  Description of Artificial Sequence: Synthetic oligonucleotide
  Sense strand starting at position 1902 of SEQ ID NO: 587243
ugaguacuuacaugacgau

SEQ ID NO: 777591 - RNA, 19 nt, Artificial Sequence
  Description of Artificial Sequence: Synthetic oligonucleotide
  Antisense strand to SEQ ID NO: 777590
aucgucauguaaguacuca

SEQ ID NO: 777592 - RNA, 19 nt, Artificial Sequence
  Description of Artificial Sequence: Synthetic oligonucleotide
  Sense strand starting at position 1903 of SEQ ID NO: 587243
gaguacuuacaugacgauu

SEQ ID NO: 777593 - RNA, 19 nt, Artificial Sequence
  Description of Artificial Sequence: Synthetic oligonucleotide
  Antisense strand to SEQ ID NO: 777592
aaucgucauguaaguacuc

SEQ ID NO: 777594 - RNA, 19 nt, Artificial Sequence
  Description of Artificial Sequence: Synthetic oligonucleotide
  Sense strand starting at position 1965 of SEQ ID NO: 587243
agagaucaguccuccuaca

SEQ ID NO: 777595 - RNA, 19 nt, Artificial Sequence
  Description of Artificial Sequence: Synthetic oligonucleotide
  Antisense strand to SEQ ID NO: 777594
uguaggaggacugaucucu

SEQ ID NO: 777596 - RNA, 19 nt, Artificial Sequence
  Description of Artificial Sequence: Synthetic oligonucleotide
  Sense strand starting at position 2020 of SEQ ID NO: 587243
aucucuuguguuuaauaag

SEQ ID NO: 777597 - RNA, 19 nt, Artificial Sequence
  Description of Artificial Sequence: Synthetic oligonucleotide
  Antisense strand to SEQ ID NO: 777596
cuuauuaaacacaagagau

SEQ ID NO: 777598 - RNA, 19 nt, Artificial Sequence
  Description of Artificial Sequence: Synthetic oligonucleotide
  Sense strand starting at position 2047 of SEQ ID NO: 587243
ggcacugaauuugaauaca

SEQ ID NO: 777599 - RNA, 19 nt, Artificial Sequence
  Description of Artificial Sequence: Synthetic oligonucleotide
  Antisense strand to SEQ ID NO: 777598
uguauucaaauucagugcc

SEQ ID NO: 777600 - RNA, 19 nt, Artificial Sequence
  Description of Artificial Sequence: Synthetic oligonucleotide
  Sense strand starting at position 2085 of SEQ ID NO: 587243
aguggcucuagcuacagau

SEQ ID NO: 777601 - RNA, 19 nt, Artificial Sequence
  Description of Artificial Sequence: Synthetic oligonucleotide
  Antisense strand to SEQ ID NO: 777600
aucuguagcuagagccacu

SEQ ID NO: 777602 - RNA, 19 nt, Artificial Sequence
  Description of Artificial Sequence: Synthetic oligonucleotide
  Sense strand starting at position 2087 of SEQ ID NO: 587243
uggcucuagcuacagauaa

SEQ ID NO: 777603 - RNA, 19 nt, Artificial Sequence
  Description of Artificial Sequence: Synthetic oligonucleotide
  Antisense strand to SEQ ID NO: 777602
uuaucuguagcuagagcca

SEQ ID NO: 777604 - RNA, 19 nt, Artificial Sequence
  Description of Artificial Sequence: Synthetic oligonucleotide
  Sense strand starting at position 2227 of SEQ ID NO: 587243
acuucugaauuguugaguu

SEQ ID NO: 777605 - RNA, 19 nt, Artificial Sequence
  Description of Artificial Sequence: Synthetic oligonucleotide
  Antisense strand to SEQ ID NO: 777604
aacucaacaauucagaagu

SEQ ID NO: 777606 - RNA, 19 nt, Artificial Sequence
  Description of Artificial Sequence: Synthetic oligonucleotide
  Sense strand starting at position 2231 of SEQ ID NO: 587243
cugaauuguugaguuauuc

SEQ ID NO: 777607 - RNA, 19 nt, Artificial Sequence
  Description of Artificial Sequence: Synthetic oligonucleotide
  Antisense strand to SEQ ID NO: 777606
gaauaacucaacaauucag

SEQ ID NO: 777608 - RNA, 19 nt, Artificial Sequence
  Description of Artificial Sequence: Synthetic oligonucleotide
  Sense strand starting at position 2433 of SEQ ID NO: 587243
auaugugcagaugguaaau

SEQ ID NO: 777609 - RNA, 19 nt, Artificial Sequence
  Description of Artificial Sequence: Synthetic oligonucleotide
  Antisense strand to SEQ ID NO: 777608
auuuaccaucugcacauau

SEQ ID NO: 777610 - RNA, 19 nt, Artificial Sequence
  Description of Artificial Sequence: Synthetic oligonucleotide
  Sense strand starting at position 2539 of SEQ ID NO: 587243
ccugaagugguccaugcau

SEQ ID NO: 777611 - RNA, 19 nt, Artificial Sequence
  Description of Artificial Sequence: Synthetic oligonucleotide
  Antisense strand to SEQ ID NO: 777610
augcauggaccacuucagg

SEQ ID NO: 777612 - RNA, 19 nt, Artificial Sequence
  Description of Artificial Sequence: Synthetic oligonucleotide
  Sense strand starting at position 2637 of SEQ ID NO: 587243
accaaauggguuuguacaa

SEQ ID NO: 777613 - RNA, 19 nt, Artificial Sequence
  Description of Artificial Sequence: Synthetic oligonucleotide
  Antisense strand to SEQ ID NO: 777612
uuguacaaacccauuuggu

SEQ ID NO: 777614 - RNA, 19 nt, Artificial Sequence
  Description of Artificial Sequence: Synthetic oligonucleotide
  Sense strand starting at position 2638 of SEQ ID NO: 587243
ccaaauggguuuguacaau

SEQ ID NO: 777615 - RNA, 19 nt, Artificial Sequence
  Description of Artificial Sequence: Synthetic oligonucleotide
  Antisense strand to SEQ ID NO: 777614
auuguacaaacccauuugg

SEQ ID NO: 777616 - RNA, 19 nt, Artificial Sequence
  Description of Artificial Sequence: Synthetic oligonucleotide
  Sense strand starting at position 2775 of SEQ ID NO: 587243
ugcauauaaugaguaguga

SEQ ID NO: 777617 - RNA, 19 nt, Artificial Sequence
  Description of Artificial Sequence: Synthetic oligonucleotide
  Antisense strand to SEQ ID NO: 777616
ucacuacucauuauaugca

SEQ ID NO: 777618 - RNA, 19 nt, Artificial Sequence
  Description of Artificial Sequence: Synthetic oligonucleotide
  Sense strand starting at position 2776 of SEQ ID NO: 587243
gcauauaaugaguagugau

SEQ ID NO: 777619 - RNA, 19 nt, Artificial Sequence
  Description of Artificial Sequence: Synthetic oligonucleotide
  Antisense strand to SEQ ID NO: 777618
aucacuacucauuauaugc

SEQ ID NO: 777620 - RNA, 19 nt, Artificial Sequence
  Description of Artificial Sequence: Synthetic oligonucleotide
  Sense strand starting at position 3263 of SEQ ID NO: 587243
cuuuguugugcuuucuuau

SEQ ID NO: 777621 - RNA, 19 nt, Artificial Sequence
  Description of Artificial Sequence: Synthetic oligonucleotide
  Antisense strand to SEQ ID NO: 777620
auaagaaagcacaacaaag

SEQ ID NO: 777622 - RNA, 19 nt, Artificial Sequence
  Description of Artificial Sequence: Synthetic oligonucleotide
  Sense strand starting at position 3301 of SEQ ID NO: 587243
aauagaguugcuggcuaaa

SEQ ID NO: 777623 - RNA, 19 nt, Artificial Sequence
  Description of Artificial Sequence: Synthetic oligonucleotide
  Antisense strand to SEQ ID NO: 777622
uuuagccagcaacucuauu

SEQ ID NO: 777624 - RNA, 19 nt, Artificial Sequence
  Description of Artificial Sequence: Synthetic oligonucleotide
  Sense strand starting at position 3359 of SEQ ID NO: 587243
uguccuccacacugacaua

SEQ ID NO: 777625 - RNA, 19 nt, Artificial Sequence
  Description of Artificial Sequence: Synthetic oligonucleotide
  Antisense strand to SEQ ID NO: 777624
uaugucaguguggaggaca

SEQ ID NO: 777626 - RNA, 19 nt, Artificial Sequence
  Description of Artificial Sequence: Synthetic oligonucleotide
  Sense strand starting at position 3408 of SEQ ID NO: 587243
auccaugaggcuuacuuua

SEQ ID NO: 777627 - RNA, 19 nt, Artificial Sequence
  Description of Artificial Sequence: Synthetic oligonucleotide
  Antisense strand to SEQ ID NO: 777626
uaaaguaagccucauggau

SEQ ID NO: 777628 - RNA, 19 nt, Artificial Sequence
  Description of Artificial Sequence: Synthetic oligonucleotide
  Sense strand starting at position 3410 of SEQ ID NO: 587243
ccaugaggcuuacuuuaaa

SEQ ID NO: 777629 - RNA, 19 nt, Artificial Sequence
  Description of Artificial Sequence: Synthetic oligonucleotide
  Antisense strand to SEQ ID NO: 777628
uuuaaaguaagccucaugg

SEQ ID NO: 777630 - RNA, 19 nt, Artificial Sequence
  Description of Artificial Sequence: Synthetic oligonucleotide
  Sense strand starting at position 3455 of SEQ ID NO: 587243
ugaauauaccagugugauu

SEQ ID NO: 777631 - RNA, 19 nt, Artificial Sequence
  Description of Artificial Sequence: Synthetic oligonucleotide
  Antisense strand to SEQ ID NO: 777630
aaucacacugguauauuca

SEQ ID NO: 777632 - RNA, 19 nt, Artificial Sequence
  Description of Artificial Sequence: Synthetic oligonucleotide
  Sense strand starting at position 3804 of SEQ ID NO: 587243
aagaaaguauuagcucuga

SEQ ID NO: 777633 - RNA, 19 nt, Artificial Sequence
  Description of Artificial Sequence: Synthetic oligonucleotide
  Antisense strand to SEQ ID NO: 777632
ucagagcuaauacuuucuu

SEQ ID NO: 777634 - RNA, 19 nt, Artificial Sequence
  Description of Artificial Sequence: Synthetic oligonucleotide
  Sense strand starting at position 3877 of SEQ ID NO: 587243
gcauuaagaugcuuaaauc

SEQ ID NO: 777635 - RNA, 19 nt, Artificial Sequence
  Description of Artificial Sequence: Synthetic oligonucleotide
  Antisense strand to SEQ ID NO: 777634
gauuuaagcaucuuaaugc

SEQ ID NO: 777636 - RNA, 19 nt, Artificial Sequence
  Description of Artificial Sequence: Synthetic oligonucleotide
  Sense strand starting at position 3944 of SEQ ID NO: 587243
aggcuuauaucuuugauuc

SEQ ID NO: 777637 - RNA, 19 nt, Artificial Sequence
  Description of Artificial Sequence: Synthetic oligonucleotide
  Antisense strand to SEQ ID NO: 777636
gaaucaaagauauaagccu

SEQ ID NO: 777638 - RNA, 19 nt, Artificial Sequence
  Description of Artificial Sequence: Synthetic oligonucleotide
  Sense strand starting at position 480 of SEQ ID NO: 587244
aaacgauaaugaucaguca

SEQ ID NO: 777639 - RNA, 19 nt, Artificial Sequence
  Description of Artificial Sequence: Synthetic oligonucleotide
  Antisense strand to SEQ ID NO: 777638
ugacugaucauuaucguuu

SEQ ID NO: 777640 - RNA, 19 nt, Artificial Sequence
  Description of Artificial Sequence: Synthetic oligonucleotide
  Sense strand starting at position 483 of SEQ ID NO: 587244
cgauaaugaucagucaucu

SEQ ID NO: 777641 - RNA, 19 nt, Artificial Sequence
  Description of Artificial Sequence: Synthetic oligonucleotide
  Antisense strand to SEQ ID NO: 777640
agaugacugaucauuaucg

SEQ ID NO: 777642 - RNA, 19 nt, Artificial Sequence
  Description of Artificial Sequence: Synthetic oligonucleotide
  Sense strand starting at position 492 of SEQ ID NO: 587244
ucagucaucugacugucaa

SEQ ID NO: 777643 - RNA, 19 nt, Artificial Sequence
  Description of Artificial Sequence: Synthetic oligonucleotide
  Antisense strand to SEQ ID NO: 777642
uugacagucagaugacuga

SEQ ID NO: 777644 - RNA, 19 nt, Artificial Sequence
  Description of Artificial Sequence: Synthetic oligonucleotide
  Sense strand starting at position 566 of SEQ ID NO: 587244
acuuaucugugggugucua

SEQ ID NO: 777645 - RNA, 19 nt, Artificial Sequence
  Description of Artificial Sequence: Synthetic oligonucleotide
  Antisense strand to SEQ ID NO: 777644
uagacacccacagauaagu

SEQ ID NO: 777646 - RNA, 19 nt, Artificial Sequence
  Description of Artificial Sequence: Synthetic oligonucleotide
  Sense strand starting at position 598 of SEQ ID NO: 587244
accgcaaacuccuugaaga

SEQ ID NO: 777647 - RNA, 19 nt, Artificial Sequence
  Description of Artificial Sequence: Synthetic oligonucleotide
  Antisense strand to SEQ ID NO: 777646
ucuucaaggaguuugcggu

SEQ ID NO: 777648 - RNA, 19 nt, Artificial Sequence
  Description of Artificial Sequence: Synthetic oligonucleotide
  Sense strand starting at position 599 of SEQ ID NO: 587244
ccgcaaacuccuugaagaa

SEQ ID NO: 777649 - RNA, 19 nt, Artificial Sequence
  Description of Artificial Sequence: Synthetic oligonucleotide
  Antisense strand to SEQ ID NO: 777648
uucuucaaggaguuugcgg

SEQ ID NO: 777650 - RNA, 19 nt, Artificial Sequence
  Description of Artificial Sequence: Synthetic oligonucleotide
  Sense strand starting at position 600 of SEQ ID NO: 587244
cgcaaacuccuugaagaaa

SEQ ID NO: 777651 - RNA, 19 nt, Artificial Sequence
  Description of Artificial Sequence: Synthetic oligonucleotide
  Antisense strand to SEQ ID NO: 777650
uuucuucaaggaguuugcg

SEQ ID NO: 777652 - RNA, 19 nt, Artificial Sequence
  Description of Artificial Sequence: Synthetic oligonucleotide
  Sense strand starting at position 658 of SEQ ID NO: 587244
caaucaguguucuuugaag

SEQ ID NO: 777653 - RNA, 19 nt, Artificial Sequence
  Description of Artificial Sequence: Synthetic oligonucleotide
  Antisense strand to SEQ ID NO: 777652
cuucaaagaacacugauug

SEQ ID NO: 777654 - RNA, 19 nt, Artificial Sequence
  Description of Artificial Sequence: Synthetic oligonucleotide
  Sense strand starting at position 660 of SEQ ID NO: 587244
aucaguguucuuugaagag

SEQ ID NO: 777655 - RNA, 19 nt, Artificial Sequence
  Description of Artificial Sequence: Synthetic oligonucleotide
  Antisense strand to SEQ ID NO: 777654
cucuucaaagaacacugau

SEQ ID NO: 777656 - RNA, 19 nt, Artificial Sequence
  Description of Artificial Sequence: Synthetic oligonucleotide
  Sense strand starting at position 691 of SEQ ID NO: 587244
cacugaauuugaugucaug

SEQ ID NO: 777657 - RNA, 19 nt, Artificial Sequence
  Description of Artificial Sequence: Synthetic oligonucleotide
  Antisense strand to SEQ ID NO: 777656
caugacaucaaauucagug

SEQ ID NO: 777658 - RNA, 19 nt, Artificial Sequence
  Description of Artificial Sequence: Synthetic oligonucleotide
  Sense strand starting at position 733 of SEQ ID NO: 587244
acaagaaaugcgcagcuua

SEQ ID NO: 777659 - RNA, 19 nt, Artificial Sequence
  Description of Artificial Sequence: Synthetic oligonucleotide
  Antisense strand to SEQ ID NO: 777658
uaagcugcgcauuucuugu

SEQ ID NO: 777660 - RNA, 19 nt, Artificial Sequence
  Description of Artificial Sequence: Synthetic oligonucleotide
  Sense strand starting at position 807 of SEQ ID NO: 587244
aggugugcuguuaagugua

SEQ ID NO: 777661 - RNA, 19 nt, Artificial Sequence
  Description of Artificial Sequence: Synthetic oligonucleotide
  Antisense strand to SEQ ID NO: 777660
uacacuuaacagcacaccu

SEQ ID NO: 777662 - RNA, 19 nt, Artificial Sequence
  Description of Artificial Sequence: Synthetic oligonucleotide
  Sense strand starting at position 812 of SEQ ID NO: 587244
ugcuguuaaguguaagaca

SEQ ID NO: 777663 - RNA, 19 nt, Artificial Sequence
  Description of Artificial Sequence: Synthetic oligonucleotide
  Antisense strand to SEQ ID NO: 777662
ugucuuacacuuaacagca

SEQ ID NO: 777664 - RNA, 19 nt, Artificial Sequence
  Description of Artificial Sequence: Synthetic oligonucleotide
  Sense strand starting at position 840 of SEQ ID NO: 587244
ucugaaaggcuuugcauga

SEQ ID NO: 777665 - RNA, 19 nt, Artificial Sequence
  Description of Artificial Sequence: Synthetic oligonucleotide
  Antisense strand to SEQ ID NO: 777664
ucaugcaaagccuuucaga

SEQ ID NO: 777666 - RNA, 19 nt, Artificial Sequence
  Description of Artificial Sequence: Synthetic oligonucleotide
  Sense strand starting at position 841 of SEQ ID NO: 587244
cugaaaggcuuugcaugaa

SEQ ID NO: 777667 - RNA, 19 nt, Artificial Sequence
  Description of Artificial Sequence: Synthetic oligonucleotide
  Antisense strand to SEQ ID NO: 777666
uucaugcaaagccuuucag

SEQ ID NO: 777668 - RNA, 19 nt, Artificial Sequence
  Description of Artificial Sequence: Synthetic oligonucleotide
  Sense strand starting at position 919 of SEQ ID NO: 587244
uuuggauauccuggguuaa

SEQ ID NO: 777669 - RNA, 19 nt, Artificial Sequence
  Description of Artificial Sequence: Synthetic oligonucleotide
  Antisense strand to SEQ ID NO: 777668
uuaacccaggauauccaaa

SEQ ID NO: 777670 - RNA, 19 nt, Artificial Sequence
  Description of Artificial Sequence: Synthetic oligonucleotide
  Sense strand starting at position 920 of SEQ ID NO: 587244
uuggauauccuggguuaaa

SEQ ID NO: 777671 - RNA, 19 nt, Artificial Sequence
  Description of Artificial Sequence: Synthetic oligonucleotide
  Antisense strand to SEQ ID NO: 777670
uuuaacccaggauauccaa

SEQ ID NO: 777672 - RNA, 19 nt, Artificial Sequence
  Description of Artificial Sequence: Synthetic oligonucleotide
  Sense strand starting at position 921 of SEQ ID NO: 587244
uggauauccuggguuaaau

SEQ ID NO: 777673 - RNA, 19 nt, Artificial Sequence
  Description of Artificial Sequence: Synthetic oligonucleotide
  Antisense strand to SEQ ID NO: 777672
auuuaacccaggauaucca

SEQ ID NO: 777674 - RNA, 19 nt, Artificial Sequence
  Description of Artificial Sequence: Synthetic oligonucleotide
  Sense strand starting at position 1092 of SEQ ID NO: 587244
cagagcuauucucugagca

SEQ ID NO: 777675 - RNA, 19 nt, Artificial Sequence
  Description of Artificial Sequence: Synthetic oligonucleotide
  Antisense strand to SEQ ID NO: 777674
ugcucagagaauagcucug

SEQ ID NO: 777676 - RNA, 19 nt, Artificial Sequence
  Description of Artificial Sequence: Synthetic oligonucleotide
  Sense strand starting at position 1093 of SEQ ID NO: 587244
agagcuauucucugagcac

SEQ ID NO: 777677 - RNA, 19 nt, Artificial Sequence
  Description of Artificial Sequence: Synthetic oligonucleotide
  Antisense strand to SEQ ID NO: 777676
gugcucagagaauagcucu

SEQ ID NO: 777678 - RNA, 19 nt, Artificial Sequence
  Description of Artificial Sequence: Synthetic oligonucleotide
  Sense strand starting at position 1123 of SEQ ID NO: 587244
uuguuaaugcaguaagaca

SEQ ID NO: 777679 - RNA, 19 nt, Artificial Sequence
  Description of Artificial Sequence: Synthetic oligonucleotide
  Antisense strand to SEQ ID NO: 777678
ugucuuacugcauuaacaa

SEQ ID NO: 777680 - RNA, 19 nt, Artificial Sequence
  Description of Artificial Sequence: Synthetic oligonucleotide
  Sense strand starting at position 1169 of SEQ ID NO: 587244
cugugaucccaguacuuag

SEQ ID NO: 777681 - RNA, 19 nt, Artificial Sequence
  Description of Artificial Sequence: Synthetic oligonucleotide
  Antisense strand to SEQ ID NO: 777680
cuaaguacugggaucacag

SEQ ID NO: 777682 - RNA, 19 nt, Artificial Sequence
  Description of Artificial Sequence: Synthetic oligonucleotide
  Sense strand starting at position 2094 of SEQ ID NO: 587244
gucaucuccgauugguaca

SEQ ID NO: 777683 - RNA, 19 nt, Artificial Sequence
  Description of Artificial Sequence: Synthetic oligonucleotide
  Antisense strand to SEQ ID NO: 777682
uguaccaaucggagaugac

SEQ ID NO: 777684 - RNA, 19 nt, Artificial Sequence
  Description of Artificial Sequence: Synthetic oligonucleotide
  Sense strand starting at position 2293 of SEQ ID NO: 587244
agcgccucgcgguugauaa

SEQ ID NO: 777685 - RNA, 19 nt, Artificial Sequence
  Description of Artificial Sequence: Synthetic oligonucleotide
  Antisense strand to SEQ ID NO: 777684
uuaucaaccgcgaggcgcu

SEQ ID NO: 777686 - RNA, 19 nt, Artificial Sequence
  Description of Artificial Sequence: Synthetic oligonucleotide
  Sense strand starting at position 2757 of SEQ ID NO: 587244
guugucacuuuggugaaau

SEQ ID NO: 777687 - RNA, 19 nt, Artificial Sequence
  Description of Artificial Sequence: Synthetic oligonucleotide
  Antisense strand to SEQ ID NO: 777686
auuucaccaaagugacaac

SEQ ID NO: 777688 - RNA, 19 nt, Artificial Sequence
  Description of Artificial Sequence: Synthetic oligonucleotide
  Sense strand starting at position 2858 of SEQ ID NO: 587244
guaguuggcugacuuugaa

SEQ ID NO: 777689 - RNA, 19 nt, Artificial Sequence
  Description of Artificial Sequence: Synthetic oligonucleotide
  Antisense strand to SEQ ID NO: 777688
uucaaagucagccaacuac

SEQ ID NO: 777690 - RNA, 19 nt, Artificial Sequence
  Description of Artificial Sequence: Synthetic oligonucleotide
  Sense strand starting at position 2861 of SEQ ID NO: 587244
guuggcugacuuugaacua

SEQ ID NO: 777691 - RNA, 19 nt, Artificial Sequence
  Description of Artificial Sequence: Synthetic oligonucleotide
  Antisense strand to SEQ ID NO: 777690
uaguucaaagucagccaac

SEQ ID NO: 777692 - RNA, 19 nt, Artificial Sequence
  Description of Artificial Sequence: Synthetic oligonucleotide
  Sense strand starting at position 2903 of SEQ ID NO: 587244
ggcagaaugguaugacucu

SEQ ID NO: 777693 - RNA, 19 nt, Artificial Sequence
  Description of Artificial Sequence: Synthetic oligonucleotide
  Antisense strand to SEQ ID NO: 777692
agagucauaccauucugcc

SEQ ID NO: 777694 - RNA, 19 nt, Artificial Sequence
  Description of Artificial Sequence: Synthetic oligonucleotide
  Sense strand starting at position 2984 of SEQ ID NO: 587244
cugagugaccgugagaaag

SEQ ID NO: 777695 - RNA, 19 nt, Artificial Sequence
  Description of Artificial Sequence: Synthetic oligonucleotide
  Antisense strand to SEQ ID NO: 777694
cuuucucacggucacucag

SEQ ID NO: 777696 - RNA, 19 nt, Artificial Sequence
  Description of Artificial Sequence: Synthetic oligonucleotide
  Sense strand starting at position 2994 of SEQ ID NO: 587244
gugagaaagaacuguaacu

SEQ ID NO: 777697 - RNA, 19 nt, Artificial Sequence
  Description of Artificial Sequence: Synthetic oligonucleotide
  Antisense strand to SEQ ID NO: 777696
aguuacaguucuuucucac

SEQ ID NO: 777698 - RNA, 19 nt, Artificial Sequence
  Description of Artificial Sequence: Synthetic oligonucleotide
  Sense strand starting at position 3038 of SEQ ID NO: 587244
cucaaauaagaacgugaau

SEQ ID NO: 777699 - RNA, 19 nt, Artificial Sequence
  Description of Artificial Sequence: Synthetic oligonucleotide
  Antisense strand to SEQ ID NO: 777698
auucacguucuuauuugag

SEQ ID NO: 777700 - RNA, 19 nt, Artificial Sequence
  Description of Artificial Sequence: Synthetic oligonucleotide
  Sense strand starting at position 3101 of SEQ ID NO: 587244
agcaauuguuaugcccuaa

SEQ ID NO: 777701 - RNA, 19 nt, Artificial Sequence
  Description of Artificial Sequence: Synthetic oligonucleotide
  Antisense strand to SEQ ID NO: 777700
uuagggcauaacaauugcu

SEQ ID NO: 777702 - RNA, 19 nt, Artificial Sequence
  Description of Artificial Sequence: Synthetic oligonucleotide
  Sense strand starting at position 3105 of SEQ ID NO: 587244
auuguuaugcccuaaggaa

SEQ ID NO: 777703 - RNA, 19 nt, Artificial Sequence
  Description of Artificial Sequence: Synthetic oligonucleotide
  Antisense strand to SEQ ID NO: 777702
uuccuuagggcauaacaau

SEQ ID NO: 777704 - RNA, 19 nt, Artificial Sequence
  Description of Artificial Sequence: Synthetic oligonucleotide
  Sense strand starting at position 3382 of SEQ ID NO: 587244
ggaggagugcuguagagau

SEQ ID NO: 777705 - RNA, 19 nt, Artificial Sequence
  Description of Artificial Sequence: Synthetic oligonucleotide
  Antisense strand to SEQ ID NO: 777704
aucucuacagcacuccucc

SEQ ID NO: 777706 - RNA, 19 nt, Artificial Sequence
  Description of Artificial Sequence: Synthetic oligonucleotide
  Sense strand starting at position 3392 of SEQ ID NO: 587244
uguagagauggcugaccua

SEQ ID NO: 777707 - RNA, 19 nt, Artificial Sequence
  Description of Artificial Sequence: Synthetic oligonucleotide
  Antisense strand to SEQ ID NO: 777706
uaggucagccaucucuaca

SEQ ID NO: 777708 - RNA, 19 nt, Artificial Sequence
  Description of Artificial Sequence: Synthetic oligonucleotide
  Sense strand starting at position 3459 of SEQ ID NO: 587244
ccucaaaugcagggauaga

SEQ ID NO: 777709 - RNA, 19 nt, Artificial Sequence
  Description of Artificial Sequence: Synthetic oligonucleotide
  Antisense strand to SEQ ID NO: 777708
ucuaucccugcauuugagg

SEQ ID NO: 777710 - RNA, 19 nt, Artificial Sequence
  Description of Artificial Sequence: Synthetic oligonucleotide
  Sense strand starting at position 3513 of SEQ ID NO: 587244
agaugagcaaguuaaguau

SEQ ID NO: 777711 - RNA, 19 nt, Artificial Sequence
  Description of Artificial Sequence: Synthetic oligonucleotide
  Antisense strand to SEQ ID NO: 777710
auacuuaacuugcucaucu

SEQ ID NO: 777712 - RNA, 19 nt, Artificial Sequence
  Description of Artificial Sequence: Synthetic oligonucleotide
  Sense strand starting at position 3519 of SEQ ID NO: 587244
gcaaguuaaguauagcuga

SEQ ID NO: 777713 - RNA, 19 nt, Artificial Sequence
  Description of Artificial Sequence: Synthetic oligonucleotide
  Antisense strand to SEQ ID NO: 777712
ucagcuauacuuaacuugc

SEQ ID NO: 777714 - RNA, 19 nt, Artificial Sequence
  Description of Artificial Sequence: Synthetic oligonucleotide
  Sense strand starting at position 3588 of SEQ ID NO: 587244
ggagccuagugguugugaa

SEQ ID NO: 777715 - RNA, 19 nt, Artificial Sequence
  Description of Artificial Sequence: Synthetic oligonucleotide
  Antisense strand to SEQ ID NO: 777714
uucacaaccacuaggcucc

SEQ ID NO: 777716 - RNA, 19 nt, Artificial Sequence
  Description of Artificial Sequence: Synthetic oligonucleotide
  Sense strand starting at position 3598 of SEQ ID NO: 587244
gguugugaaccuuggaaau

SEQ ID NO: 777717 - RNA, 19 nt, Artificial Sequence
  Description of Artificial Sequence: Synthetic oligonucleotide
  Antisense strand to SEQ ID NO: 777716
auuuccaagguucacaacc

SEQ ID NO: 777718 - RNA, 19 nt, Artificial Sequence
  Description of Artificial Sequence: Synthetic oligonucleotide
  Sense strand starting at position 223 of SEQ ID NO: 587245
cugggugucccaugagcuu

SEQ ID NO: 777719 - RNA, 19 nt, Artificial Sequence
  Description of Artificial Sequence: Synthetic oligonucleotide
  Antisense strand to SEQ ID NO: 777718
aagcucaugggacacccag

SEQ ID NO: 777720 - RNA, 19 nt, Artificial Sequence
  Description of Artificial Sequence: Synthetic oligonucleotide
  Sense strand starting at position 300 of SEQ ID NO: 587245
gguguuguagcagaaugag

SEQ ID NO: 777721 - RNA, 19 nt, Artificial Sequence
  Description of Artificial Sequence: Synthetic oligonucleotide
  Antisense strand to SEQ ID NO: 777720
cucauucugcuacaacacc

SEQ ID NO: 777722 - RNA, 19 nt, Artificial Sequence
  Description of Artificial Sequence: Synthetic oligonucleotide
  Sense strand starting at position 441 of SEQ ID NO: 587245
ggugcucacaucuggauga

SEQ ID NO: 777723 - RNA, 19 nt, Artificial Sequence
  Description of Artificial Sequence: Synthetic oligonucleotide
  Antisense strand to SEQ ID NO: 777722
ucauccagaugugagcacc

SEQ ID NO: 777724 - RNA, 19 nt, Artificial Sequence
  Description of Artificial Sequence: Synthetic oligonucleotide
  Sense strand starting at position 443 of SEQ ID NO: 587245
ugcucacaucuggaugaca

SEQ ID NO: 777725 - RNA, 19 nt, Artificial Sequence
  Description of Artificial Sequence: Synthetic oligonucleotide
  Antisense strand to SEQ ID NO: 777724
ugucauccagaugugagca

SEQ ID NO: 777726 - RNA, 19 nt, Artificial Sequence
  Description of Artificial Sequence: Synthetic oligonucleotide
  Sense strand starting at position 788 of SEQ ID NO: 587245
gcaggaaacgcuugagcuu

SEQ ID NO: 777727 - RNA, 19 nt, Artificial Sequence
  Description of Artificial Sequence: Synthetic oligonucleotide
  Antisense strand to SEQ ID NO: 777726
aagcucaagcguuuccugc

SEQ ID NO: 777728 - RNA, 19 nt, Artificial Sequence
  Description of Artificial Sequence: Synthetic oligonucleotide
  Sense strand starting at position 985 of SEQ ID NO: 587245
aggaacuccuucuugaacu

SEQ ID NO: 777729 - RNA, 19 nt, Artificial Sequence
  Description of Artificial Sequence: Synthetic oligonucleotide
  Antisense strand to SEQ ID NO: 777728
aguucaagaaggaguuccu

SEQ ID NO: 777730 - RNA, 19 nt, Artificial Sequence
  Description of Artificial Sequence: Synthetic oligonucleotide
  Sense strand starting at position 1057 of SEQ ID NO: 587245
ccguucaugugauucugga

SEQ ID NO: 777731 - RNA, 19 nt, Artificial Sequence
  Description of Artificial Sequence: Synthetic oligonucleotide
  Antisense strand to SEQ ID NO: 777730
uccagaaucacaugaacgg

SEQ ID NO: 777732 - RNA, 19 nt, Artificial Sequence
  Description of Artificial Sequence: Synthetic oligonucleotide
  Sense strand starting at position 1144 of SEQ ID NO: 587245
ucucgaggguccucgaaga

SEQ ID NO: 777733 - RNA, 19 nt, Artificial Sequence
  Description of Artificial Sequence: Synthetic oligonucleotide
  Antisense strand to SEQ ID NO: 777732
ucuucgaggacccucgaga

SEQ ID NO: 777734 - RNA, 19 nt, Artificial Sequence
  Description of Artificial Sequence: Synthetic oligonucleotide
  Sense strand starting at position 1157 of SEQ ID NO: 587245
cgaagaucugcguguccac

SEQ ID NO: 777735 - RNA, 19 nt, Artificial Sequence
  Description of Artificial Sequence: Synthetic oligonucleotide
  Antisense strand to SEQ ID NO: 777734
guggacacgcagaucuucg

SEQ ID NO: 777736 - RNA, 19 nt, Artificial Sequence
  Description of Artificial Sequence: Synthetic oligonucleotide
  Sense strand starting at position 2535 of SEQ ID NO: 587245
ucagcaagucuccauguga

SEQ ID NO: 777737 - RNA, 19 nt, Artificial Sequence
  Description of Artificial Sequence: Synthetic oligonucleotide
  Antisense strand to SEQ ID NO: 777736
ucacauggagacuugcuga

SEQ ID NO: 777738 - RNA, 19 nt, Artificial Sequence
  Description of Artificial Sequence: Synthetic oligonucleotide
  Sense strand starting at position 2608 of SEQ ID NO: 587245
ggucuugggcucuguguga

SEQ ID NO: 777739 - RNA, 19 nt, Artificial Sequence
  Description of Artificial Sequence: Synthetic oligonucleotide
  Antisense strand to SEQ ID NO: 777738
ucacacagagcccaagacc

SEQ ID NO: 777740 - RNA, 19 nt, Artificial Sequence
  Description of Artificial Sequence: Synthetic oligonucleotide
  Sense strand starting at position 2768 of SEQ ID NO: 587245
uguguuuccagggaaaucu

SEQ ID NO: 777741 - RNA, 19 nt, Artificial Sequence
  Description of Artificial Sequence: Synthetic oligonucleotide
  Antisense strand to SEQ ID NO: 777740
agauuucccuggaaacaca

SEQ ID NO: 777742 - RNA, 19 nt, Artificial Sequence
  Description of Artificial Sequence: Synthetic oligonucleotide
  Sense strand starting at position 2852 of SEQ ID NO: 587245
ggaauugggcccugaagac

SEQ ID NO: 777743 - RNA, 19 nt, Artificial Sequence
  Description of Artificial Sequence: Synthetic oligonucleotide
  Antisense strand to SEQ ID NO: 777742
gucuucagggcccaauucc

SEQ ID NO: 777744 - RNA, 19 nt, Artificial Sequence
  Description of Artificial Sequence: Synthetic oligonucleotide
  Sense strand starting at position 2862 of SEQ ID NO: 587245
ccugaagacccuggcuaua

SEQ ID NO: 777745 - RNA, 19 nt, Artificial Sequence
  Description of Artificial Sequence: Synthetic oligonucleotide
  Antisense strand to SEQ ID NO: 777744
uauagccagggucuucagg

SEQ ID NO: 777746 - RNA, 19 nt, Artificial Sequence
  Description of Artificial Sequence: Synthetic oligonucleotide
  Sense strand starting at position 3149 of SEQ ID NO: 587245
ggacgcccuuccugaguua

SEQ ID NO: 777747 - RNA, 19 nt, Artificial Sequence
  Description of Artificial Sequence: Synthetic oligonucleotide
  Antisense strand to SEQ ID NO: 777746
uaacucaggaagggcgucc

SEQ ID NO: 777748 - RNA, 19 nt, Artificial Sequence
  Description of Artificial Sequence: Synthetic oligonucleotide
  Sense strand starting at position 3262 of SEQ ID NO: 587245
aggacaucaucgcugacaa

SEQ ID NO: 777749 - RNA, 19 nt, Artificial Sequence
  Description of Artificial Sequence: Synthetic oligonucleotide
  Antisense strand to SEQ ID NO: 777748
uugucagcgaugauguccu

SEQ ID NO: 777750 - RNA, 19 nt, Artificial Sequence
  Description of Artificial Sequence: Synthetic oligonucleotide
  Sense strand starting at position 3263 of SEQ ID NO: 587245
ggacaucaucgcugacaau

SEQ ID NO: 777751 - RNA, 19 nt, Artificial Sequence
  Description of Artificial Sequence: Synthetic oligonucleotide
  Antisense strand to SEQ ID NO: 777750
auugucagcgaugaugucc

SEQ ID NO: 777752 - RNA, 19 nt, Artificial Sequence
  Description of Artificial Sequence: Synthetic oligonucleotide
  Sense strand starting at position 3695 of SEQ ID NO: 587245
gggaaugucuuucuggcaa

SEQ ID NO: 777753 - RNA, 19 nt, Artificial Sequence
  Description of Artificial Sequence: Synthetic oligonucleotide
  Antisense strand to SEQ ID NO: 777752
uugccagaaagacauuccc

SEQ ID NO: 777754 - RNA, 19 nt, Artificial Sequence
  Description of Artificial Sequence: Synthetic oligonucleotide
  Sense strand starting at position 3820 of SEQ ID NO: 587245
cagagaagucuccagcaca

SEQ ID NO: 777755 - RNA, 19 nt, Artificial Sequence
  Description of Artificial Sequence: Synthetic oligonucleotide
  Antisense strand to SEQ ID NO: 777754
ugugcuggagacuucucug

SEQ ID NO: 777756 - RNA, 19 nt, Artificial Sequence
  Description of Artificial Sequence: Synthetic oligonucleotide
  Sense strand starting at position 163 of SEQ ID NO: 587246
gcaaacuucuggucgauaa

SEQ ID NO: 777757 - RNA, 19 nt, Artificial Sequence
  Description of Artificial Sequence: Synthetic oligonucleotide
  Antisense strand to SEQ ID NO: 777756
uuaucgaccagaaguuugc

SEQ ID NO: 777758 - RNA, 19 nt, Artificial Sequence
  Description of Artificial Sequence: Synthetic oligonucleotide
  Sense strand starting at position 164 of SEQ ID NO: 587246
caaacuucuggucgauaag

SEQ ID NO: 777759 - RNA, 19 nt, Artificial Sequence
  Description of Artificial Sequence: Synthetic oligonucleotide
  Antisense strand to SEQ ID NO: 777758
cuuaucgaccagaaguuug

SEQ ID NO: 777760 - RNA, 19 nt, Artificial Sequence
  Description of Artificial Sequence: Synthetic oligonucleotide
  Sense strand starting at position 165 of SEQ ID NO: 587246
aaacuucuggucgauaagu

SEQ ID NO: 777761 - RNA, 19 nt, Artificial Sequence
  Description of Artificial Sequence: Synthetic oligonucleotide
  Antisense strand to SEQ ID NO: 777760
acuuaucgaccagaaguuu

SEQ ID NO: 777762 - RNA, 19 nt, Artificial Sequence
  Description of Artificial Sequence: Synthetic oligonucleotide
  Sense strand starting at position 167 of SEQ ID NO: 587246
acuucuggucgauaaguaa

SEQ ID NO: 777763 - RNA, 19 nt, Artificial Sequence
  Description of Artificial Sequence: Synthetic oligonucleotide
  Antisense strand to SEQ ID NO: 777762
uuacuuaucgaccagaagu

SEQ ID NO: 777764 - RNA, 19 nt, Artificial Sequence
  Description of Artificial Sequence: Synthetic oligonucleotide
  Sense strand starting at position 237 of SEQ ID NO: 587246
augaaauuucuucgacguu

SEQ ID NO: 777765 - RNA, 19 nt, Artificial Sequence
  Description of Artificial Sequence: Synthetic oligonucleotide
  Antisense strand to SEQ ID NO: 777764
aacgucgaagaaauuucau

SEQ ID NO: 777766 - RNA, 19 nt, Artificial Sequence
  Description of Artificial Sequence: Synthetic oligonucleotide
  Sense strand starting at position 383 of SEQ ID NO: 587246
uacuuuaaguuauugugga

SEQ ID NO: 777767 - RNA, 19 nt, Artificial Sequence
  Description of Artificial Sequence: Synthetic oligonucleotide
  Antisense strand to SEQ ID NO: 777766
uccacaauaacuuaaagua

SEQ ID NO: 777768 - RNA, 19 nt, Artificial Sequence
  Description of Artificial Sequence: Synthetic oligonucleotide
  Sense strand starting at position 468 of SEQ ID NO: 587246
gaccuaguguauuuccagu

SEQ ID NO: 777769 - RNA, 19 nt, Artificial Sequence
  Description of Artificial Sequence: Synthetic oligonucleotide
  Antisense strand to SEQ ID NO: 777768
acuggaaauacacuagguc

SEQ ID NO: 777770 - RNA, 19 nt, Artificial Sequence
  Description of Artificial Sequence: Synthetic oligonucleotide
  Sense strand starting at position 474 of SEQ ID NO: 587246
guguauuuccagugcuaua

SEQ ID NO: 777771 - RNA, 19 nt, Artificial Sequence
  Description of Artificial Sequence: Synthetic oligonucleotide
  Antisense strand to SEQ ID NO: 777770
uauagcacuggaaauacac

SEQ ID NO: 777772 - RNA, 19 nt, Artificial Sequence
  Description of Artificial Sequence: Synthetic oligonucleotide
  Sense strand starting at position 486 of SEQ ID NO: 587246
ugcuauaaaguguaaacau

SEQ ID NO: 777773 - RNA, 19 nt, Artificial Sequence
  Description of Artificial Sequence: Synthetic oligonucleotide
  Antisense strand to SEQ ID NO: 777772
auguuuacacuuuauagca

SEQ ID NO: 777774 - RNA, 19 nt, Artificial Sequence
  Description of Artificial Sequence: Synthetic oligonucleotide
  Sense strand starting at position 506 of SEQ ID NO: 587246
aggaauguaucuuuguguu

SEQ ID NO: 777775 - RNA, 19 nt, Artificial Sequence
  Description of Artificial Sequence: Synthetic oligonucleotide
  Antisense strand to SEQ ID NO: 777774
aacacaaagauacauuccu

SEQ ID NO: 777776 - RNA, 19 nt, Artificial Sequence
  Description of Artificial Sequence: Synthetic oligonucleotide
  Sense strand starting at position 508 of SEQ ID NO: 587246
gaauguaucuuuguguuaa

SEQ ID NO: 777777 - RNA, 19 nt, Artificial Sequence
  Description of Artificial Sequence: Synthetic oligonucleotide
  Antisense strand to SEQ ID NO: 777776
uuaacacaaagauacauuc

SEQ ID NO: 777778 - RNA, 19 nt, Artificial Sequence
  Description of Artificial Sequence: Synthetic oligonucleotide
  Sense strand starting at position 1364 of SEQ ID NO: 587246
agggcuucccgaggucaga

SEQ ID NO: 777779 - RNA, 19 nt, Artificial Sequence
  Description of Artificial Sequence: Synthetic oligonucleotide
  Antisense strand to SEQ ID NO: 777778
ucugaccucgggaagcccu

SEQ ID NO: 777780 - RNA, 19 nt, Artificial Sequence
  Description of Artificial Sequence: Synthetic oligonucleotide
  Sense strand starting at position 1549 of SEQ ID NO: 587246
gccaauaucuucuccagag

SEQ ID NO: 777781 - RNA, 19 nt, Artificial Sequence
  Description of Artificial Sequence: Synthetic oligonucleotide
  Antisense strand to SEQ ID NO: 777780
cucuggagaagauauuggc

SEQ ID NO: 777782 - RNA, 19 nt, Artificial Sequence
  Description of Artificial Sequence: Synthetic oligonucleotide
  Sense strand starting at position 1571 of SEQ ID NO: 587246
gggucaggaacauguucuu

SEQ ID NO: 777783 - RNA, 19 nt, Artificial Sequence
  Description of Artificial Sequence: Synthetic oligonucleotide
  Antisense strand to SEQ ID NO: 777782
aagaacauguuccugaccc

SEQ ID NO: 777784 - RNA, 19 nt, Artificial Sequence
  Description of Artificial Sequence: Synthetic oligonucleotide
  Sense strand starting at position 2681 of SEQ ID NO: 587246
gucggauaaaucggucaac

SEQ ID NO: 777785 - RNA, 19 nt, Artificial Sequence
  Description of Artificial Sequence: Synthetic oligonucleotide
  Antisense strand to SEQ ID NO: 777784
guugaccgauuuauccgac

SEQ ID NO: 777786 - RNA, 19 nt, Artificial Sequence
  Description of Artificial Sequence: Synthetic oligonucleotide
  Sense strand starting at position 2682 of SEQ ID NO: 587246
ucggauaaaucggucaacu

SEQ ID NO: 777787 - RNA, 19 nt, Artificial Sequence
  Description of Artificial Sequence: Synthetic oligonucleotide
  Antisense strand to SEQ ID NO: 777786
aguugaccgauuuauccga

SEQ ID NO: 777788 - RNA, 19 nt, Artificial Sequence
  Description of Artificial Sequence: Synthetic oligonucleotide
  Sense strand starting at position 2684 of SEQ ID NO: 587246
ggauaaaucggucaacucu

SEQ ID NO: 777789 - RNA, 19 nt, Artificial Sequence
  Description of Artificial Sequence: Synthetic oligonucleotide
  Antisense strand to SEQ ID NO: 777788
agaguugaccgauuuaucc

SEQ ID NO: 777790 - RNA, 19 nt, Artificial Sequence
  Description of Artificial Sequence: Synthetic oligonucleotide
  Sense strand starting at position 2720 of SEQ ID NO: 587246
ugaauugacucaguuaagg

SEQ ID NO: 777791 - RNA, 19 nt, Artificial Sequence
  Description of Artificial Sequence: Synthetic oligonucleotide
  Antisense strand to SEQ ID NO: 777790
ccuuaacugagucaauuca

SEQ ID NO: 777792 - RNA, 19 nt, Artificial Sequence
  Description of Artificial Sequence: Synthetic oligonucleotide
  Sense strand starting at position 2734 of SEQ ID NO: 587246
uaaggugaaugguugugaa

SEQ ID NO: 777793 - RNA, 19 nt, Artificial Sequence
  Description of Artificial Sequence: Synthetic oligonucleotide
  Antisense strand to SEQ ID NO: 777792
uucacaaccauucaccuua

SEQ ID NO: 777794 - RNA, 19 nt, Artificial Sequence
  Description of Artificial Sequence: Synthetic oligonucleotide
  Sense strand starting at position 2771 of SEQ ID NO: 587246
uguguuucugugccuuuaa

SEQ ID NO: 777795 - RNA, 19 nt, Artificial Sequence
  Description of Artificial Sequence: Synthetic oligonucleotide
  Antisense strand to SEQ ID NO: 777794
uuaaaggcacagaaacaca

SEQ ID NO: 777796 - RNA, 19 nt, Artificial Sequence
  Description of Artificial Sequence: Synthetic oligonucleotide
  Sense strand starting at position 2798 of SEQ ID NO: 587246
uuuaguccaggacauguaa

SEQ ID NO: 777797 - RNA, 19 nt, Artificial Sequence
  Description of Artificial Sequence: Synthetic oligonucleotide
  Antisense strand to SEQ ID NO: 777796
uuacauguccuggacuaaa

SEQ ID NO: 777798 - RNA, 19 nt, Artificial Sequence
  Description of Artificial Sequence: Synthetic oligonucleotide
  Sense strand starting at position 2880 of SEQ ID NO: 587246
uuagucugaguguagaacu

SEQ ID NO: 777799 - RNA, 19 nt, Artificial Sequence
  Description of Artificial Sequence: Synthetic oligonucleotide
  Antisense strand to SEQ ID NO: 777798
aguucuacacucagacuaa

SEQ ID NO: 777800 - RNA, 19 nt, Artificial Sequence
  Description of Artificial Sequence: Synthetic oligonucleotide
  Sense strand starting at position 3037 of SEQ ID NO: 587246
guucccuaauguuuacuau

SEQ ID NO: 777801 - RNA, 19 nt, Artificial Sequence
  Description of Artificial Sequence: Synthetic oligonucleotide
  Antisense strand to SEQ ID NO: 777800
auaguaaacauuagggaac

SEQ ID NO: 777802 - RNA, 19 nt, Artificial Sequence
  Description of Artificial Sequence: Synthetic oligonucleotide
  Sense strand starting at position 3092 of SEQ ID NO: 587246
acuauaggcuuguccuaac

SEQ ID NO: 777803 - RNA, 19 nt, Artificial Sequence
  Description of Artificial Sequence: Synthetic oligonucleotide
  Antisense strand to SEQ ID NO: 777802
guuaggacaagccuauagu

SEQ ID NO: 777804 - RNA, 19 nt, Artificial Sequence
  Description of Artificial Sequence: Synthetic oligonucleotide
  Sense strand starting at position 3141 of SEQ ID NO: 587246
uuaagugacucugugaacu

SEQ ID NO: 777805 - RNA, 19 nt, Artificial Sequence
  Description of Artificial Sequence: Synthetic oligonucleotide
  Antisense strand to SEQ ID NO: 777804
aguucacagagucacuuaa

SEQ ID NO: 777806 - RNA, 19 nt, Artificial Sequence
  Description of Artificial Sequence: Synthetic oligonucleotide
  Sense strand starting at position 3262 of SEQ ID NO: 587246
cuuuauuguccugagaaac

SEQ ID NO: 777807 - RNA, 19 nt, Artificial Sequence
  Description of Artificial Sequence: Synthetic oligonucleotide
  Antisense strand to SEQ ID NO: 777806
guuucucaggacaauaaag

SEQ ID NO: 777808 - RNA, 19 nt, Artificial Sequence
  Description of Artificial Sequence: Synthetic oligonucleotide
  Sense strand starting at position 3371 of SEQ ID NO: 587246
cugauuucuguguauacgu

SEQ ID NO: 777809 - RNA, 19 nt, Artificial Sequence
  Description of Artificial Sequence: Synthetic oligonucleotide
  Antisense strand to SEQ ID NO: 777808
acguauacacagaaaucag

SEQ ID NO: 777810 - RNA, 19 nt, Artificial Sequence
  Description of Artificial Sequence: Synthetic oligonucleotide
  Sense strand starting at position 3378 of SEQ ID NO: 587246
cuguguauacguuaauaaa

SEQ ID NO: 777811 - RNA, 19 nt, Artificial Sequence
  Description of Artificial Sequence: Synthetic oligonucleotide
  Antisense strand to SEQ ID NO: 777810
uuuauuaacguauacacag

SEQ ID NO: 777812 - RNA, 19 nt, Artificial Sequence
  Description of Artificial Sequence: Synthetic oligonucleotide
  Sense strand starting at position 3504 of SEQ ID NO: 587246
gguacuguugaggguacua

SEQ ID NO: 777813 - RNA, 19 nt, Artificial Sequence
  Description of Artificial Sequence: Synthetic oligonucleotide
  Antisense strand to SEQ ID NO: 777812
uaguacccucaacaguacc

SEQ ID NO: 777814 - RNA, 19 nt, Artificial Sequence
  Description of Artificial Sequence: Synthetic oligonucleotide
  Sense strand starting at position 3516 of SEQ ID NO: 587246
gguacuagcugaucaccaa

SEQ ID NO: 777815 - RNA, 19 nt, Artificial Sequence
  Description of Artificial Sequence: Synthetic oligonucleotide
  Antisense strand to SEQ ID NO: 777814
uuggugaucagcuaguacc

SEQ ID NO: 777816 - RNA, 19 nt, Artificial Sequence
  Description of Artificial Sequence: Synthetic oligonucleotide
  Sense strand starting at position 3517 of SEQ ID NO: 587246
guacuagcugaucaccaaa

SEQ ID NO: 777817 - RNA, 19 nt, Artificial Sequence
  Description of Artificial Sequence: Synthetic oligonucleotide
  Antisense strand to SEQ ID NO: 777816
uuuggugaucagcuaguac

SEQ ID NO: 777818 - RNA, 19 nt, Artificial Sequence
  Description of Artificial Sequence: Synthetic oligonucleotide
  Sense strand starting at position 3545 of SEQ ID NO: 587246
ucuucuuucuuaguauaga

SEQ ID NO: 777819 - RNA, 19 nt, Artificial Sequence
  Description of Artificial Sequence: Synthetic oligonucleotide
  Antisense strand to SEQ ID NO: 777818
ucuauacuaagaaagaaga

SEQ ID NO: 777820 - RNA, 19 nt, Artificial Sequence
  Description of Artificial Sequence: Synthetic oligonucleotide
  Sense strand starting at position 3559 of SEQ ID NO: 587246
auagaauugcauuguccag

SEQ ID NO: 777821 - RNA, 19 nt, Artificial Sequence
  Description of Artificial Sequence: Synthetic oligonucleotide
  Antisense strand to SEQ ID NO: 777820
cuggacaaugcaauucuau

SEQ ID NO: 777822 - RNA, 19 nt, Artificial Sequence
  Description of Artificial Sequence: Synthetic oligonucleotide
  Sense strand starting at position 3699 of SEQ ID NO: 587246
ggcaucucaccauguugaa

SEQ ID NO: 777823 - RNA, 19 nt, Artificial Sequence
  Description of Artificial Sequence: Synthetic oligonucleotide
  Antisense strand to SEQ ID NO: 777822
uucaacauggugagaugcc

SEQ ID NO: 777824 - RNA, 19 nt, Artificial Sequence
  Description of Artificial Sequence: Synthetic oligonucleotide
  Sense strand starting at position 3844 of SEQ ID NO: 587246
gagucuuaguuucugaauu

SEQ ID NO: 777825 - RNA, 19 nt, Artificial Sequence
  Description of Artificial Sequence: Synthetic oligonucleotide
  Antisense strand to SEQ ID NO: 777824
aauucagaaacuaagacuc

SEQ ID NO: 777826 - RNA, 19 nt, Artificial Sequence
  Description of Artificial Sequence: Synthetic oligonucleotide
  Sense strand starting at position 3861 of SEQ ID NO: 587246
uuggaacucuuggagaaga

SEQ ID NO: 777827 - RNA, 19 nt, Artificial Sequence
  Description of Artificial Sequence: Synthetic oligonucleotide
  Antisense strand to SEQ ID NO: 777826
ucuucuccaagaguuccaa

SEQ ID NO: 777828 - RNA, 19 nt, Artificial Sequence
  Description of Artificial Sequence: Synthetic oligonucleotide
  Sense strand starting at position 3900 of SEQ ID NO: 587246
uguacuuuacaugaacgaa

SEQ ID NO: 777829 - RNA, 19 nt, Artificial Sequence
  Description of Artificial Sequence: Synthetic oligonucleotide
  Antisense strand to SEQ ID NO: 777828
uucguucauguaaaguaca

SEQ ID NO: 777830 - RNA, 19 nt, Artificial Sequence
  Description of Artificial Sequence: Synthetic oligonucleotide
  Sense strand starting at position 3916 of SEQ ID NO: 587246
gaagcagacucuucgguua

SEQ ID NO: 777831 - RNA, 19 nt, Artificial Sequence
  Description of Artificial Sequence: Synthetic oligonucleotide
  Antisense strand to SEQ ID NO: 777830
uaaccgaagagucugcuuc

SEQ ID NO: 777832 - RNA, 19 nt, Artificial Sequence
  Description of Artificial Sequence: Synthetic oligonucleotide
  Sense strand starting at position 3921 of SEQ ID NO: 587246
agacucuucgguuauguuu

SEQ ID NO: 777833 - RNA, 19 nt, Artificial Sequence
  Description of Artificial Sequence: Synthetic oligonucleotide
  Antisense strand to SEQ ID NO: 777832
aaacauaaccgaagagucu

SEQ ID NO: 777834 - RNA, 19 nt, Artificial Sequence
  Description of Artificial Sequence: Synthetic oligonucleotide
  Sense strand starting at position 3933 of SEQ ID NO: 587246
uauguuuagcugucagcuu

SEQ ID NO: 777835 - RNA, 19 nt, Artificial Sequence
  Description of Artificial Sequence: Synthetic oligonucleotide
  Antisense strand to SEQ ID NO: 777834
aagcugacagcuaaacaua

SEQ ID NO: 777836 - RNA, 19 nt, Artificial Sequence
  Description of Artificial Sequence: Synthetic oligonucleotide
  Sense strand starting at position 42 of SEQ ID NO: 587247
uacagugucuucuugauga

SEQ ID NO: 777837 - RNA, 19 nt, Artificial Sequence
  Description of Artificial Sequence: Synthetic oligonucleotide
  Antisense strand to SEQ ID NO: 777836
ucaucaagaagacacugua

SEQ ID NO: 777838 - RNA, 19 nt, Artificial Sequence
  Description of Artificial Sequence: Synthetic oligonucleotide
  Sense strand starting at position 44 of SEQ ID NO: 587247
cagugucuucuugaugaau

SEQ ID NO: 777839 - RNA, 19 nt, Artificial Sequence
  Description of Artificial Sequence: Synthetic oligonucleotide
  Antisense strand to SEQ ID NO: 777838
auucaucaagaagacacug

SEQ ID NO: 777840 - RNA, 19 nt, Artificial Sequence
  Description of Artificial Sequence: Synthetic oligonucleotide
  Sense strand starting at position 78 of SEQ ID NO: 587247
gaaguaucuuuauccuggu

SEQ ID NO: 777841 - RNA, 19 nt, Artificial Sequence
  Description of Artificial Sequence: Synthetic oligonucleotide
  Antisense strand to SEQ ID NO: 777840
accaggauaaagauacuuc

SEQ ID NO: 777842 - RNA, 19 nt, Artificial Sequence
  Description of Artificial Sequence: Synthetic oligonucleotide
  Sense strand starting at position 133 of SEQ ID NO: 587247
acaguaacuccggauugcu

SEQ ID NO: 777843 - RNA, 19 nt, Artificial Sequence
  Description of Artificial Sequence: Synthetic oligonucleotide
  Antisense strand to SEQ ID NO: 777842
agcaauccggaguuacugu

SEQ ID NO: 777844 - RNA, 19 nt, Artificial Sequence
  Description of Artificial Sequence: Synthetic oligonucleotide
  Sense strand starting at position 141 of SEQ ID NO: 587247
uccggauugcuuuacauca

SEQ ID NO: 777845 - RNA, 19 nt, Artificial Sequence
  Description of Artificial Sequence: Synthetic oligonucleotide
  Antisense strand to SEQ ID NO: 777844
ugauguaaagcaauccgga

SEQ ID NO: 777846 - RNA, 19 nt, Artificial Sequence
  Description of Artificial Sequence: Synthetic oligonucleotide
  Sense strand starting at position 146 of SEQ ID NO: 587247
auugcuuuacaucagaguu

SEQ ID NO: 777847 - RNA, 19 nt, Artificial Sequence
  Description of Artificial Sequence: Synthetic oligonucleotide
  Antisense strand to SEQ ID NO: 777846
aacucugauguaaagcaau

SEQ ID NO: 777848 - RNA, 19 nt, Artificial Sequence
  Description of Artificial Sequence: Synthetic oligonucleotide
  Sense strand starting at position 162 of SEQ ID NO: 587247
guuagaauuguguaacauu

SEQ ID NO: 777849 - RNA, 19 nt, Artificial Sequence
  Description of Artificial Sequence: Synthetic oligonucleotide
  Antisense strand to SEQ ID NO: 777848
aauguuacacaauucuaac

SEQ ID NO: 777850 - RNA, 19 nt, Artificial Sequence
  Description of Artificial Sequence: Synthetic oligonucleotide
  Sense strand starting at position 1370 of SEQ ID NO: 587247
gcccacauauaugugagua

SEQ ID NO: 777851 - RNA, 19 nt, Artificial Sequence
  Description of Artificial Sequence: Synthetic oligonucleotide
  Antisense strand to SEQ ID NO: 777850
uacucacauauaugugggc

SEQ ID NO: 777852 - RNA, 19 nt, Artificial Sequence
  Description of Artificial Sequence: Synthetic oligonucleotide
  Sense strand starting at position 1374 of SEQ ID NO: 587247
acauauaugugaguauuga

SEQ ID NO: 777853 - RNA, 19 nt, Artificial Sequence
  Description of Artificial Sequence: Synthetic oligonucleotide
  Antisense strand to SEQ ID NO: 777852
ucaauacucacauauaugu

SEQ ID NO: 777854 - RNA, 19 nt, Artificial Sequence
  Description of Artificial Sequence: Synthetic oligonucleotide
  Sense strand starting at position 1375 of SEQ ID NO: 587247
cauauaugugaguauugau

SEQ ID NO: 777855 - RNA, 19 nt, Artificial Sequence
  Description of Artificial Sequence: Synthetic oligonucleotide
  Antisense strand to SEQ ID NO: 777854
aucaauacucacauauaug

SEQ ID NO: 777856 - RNA, 19 nt, Artificial Sequence
  Description of Artificial Sequence: Synthetic oligonucleotide
  Sense strand starting at position 1461 of SEQ ID NO: 587247
ccuucuuuggauuaaguau

SEQ ID NO: 777857 - RNA, 19 nt, Artificial Sequence
  Description of Artificial Sequence: Synthetic oligonucleotide
  Antisense strand to SEQ ID NO: 777856
auacuuaauccaaagaagg

SEQ ID NO: 777858 - RNA, 19 nt, Artificial Sequence
  Description of Artificial Sequence: Synthetic oligonucleotide
  Sense strand starting at position 1518 of SEQ ID NO: 587247
agcuguaauuuguugcuuu

SEQ ID NO: 777859 - RNA, 19 nt, Artificial Sequence
  Description of Artificial Sequence: Synthetic oligonucleotide
  Antisense strand to SEQ ID NO: 777858
aaagcaacaaauuacagcu

SEQ ID NO: 777860 - RNA, 19 nt, Artificial Sequence
  Description of Artificial Sequence: Synthetic oligonucleotide
  Sense strand starting at position 1522 of SEQ ID NO: 587247
guaauuuguugcuuugcua

SEQ ID NO: 777861 - RNA, 19 nt, Artificial Sequence
  Description of Artificial Sequence: Synthetic oligonucleotide
  Antisense strand to SEQ ID NO: 777860
uagcaaagcaacaaauuac

SEQ ID NO: 777862 - RNA, 19 nt, Artificial Sequence
  Description of Artificial Sequence: Synthetic oligonucleotide
  Sense strand starting at position 1769 of SEQ ID NO: 587247
uguauuuacccauguaguu

SEQ ID NO: 777863 - RNA, 19 nt, Artificial Sequence
  Description of Artificial Sequence: Synthetic oligonucleotide
  Antisense strand to SEQ ID NO: 777862
aacuacauggguaaauaca

SEQ ID NO: 777864 - RNA, 19 nt, Artificial Sequence
  Description of Artificial Sequence: Synthetic oligonucleotide
  Sense strand starting at position 1822 of SEQ ID NO: 587247
uccagacuuccacaugguu

SEQ ID NO: 777865 - RNA, 19 nt, Artificial Sequence
  Description of Artificial Sequence: Synthetic oligonucleotide
  Antisense strand to SEQ ID NO: 777864
aaccauguggaagucugga

SEQ ID NO: 777866 - RNA, 19 nt, Artificial Sequence
  Description of Artificial Sequence: Synthetic oligonucleotide
  Sense strand starting at position 1924 of SEQ ID NO: 587247
uuggaaacaucuuuauguc

SEQ ID NO: 777867 - RNA, 19 nt, Artificial Sequence
  Description of Artificial Sequence: Synthetic oligonucleotide
  Antisense strand to SEQ ID NO: 777866
gacauaaagauguuuccaa

SEQ ID NO: 777868 - RNA, 19 nt, Artificial Sequence
  Description of Artificial Sequence: Synthetic oligonucleotide
  Sense strand starting at position 1970 of SEQ ID NO: 587247
agaauucuugguggacagu

SEQ ID NO: 777869 - RNA, 19 nt, Artificial Sequence
  Description of Artificial Sequence: Synthetic oligonucleotide
  Antisense strand to SEQ ID NO: 777868
acuguccaccaagaauucu

SEQ ID NO: 777870 - RNA, 19 nt, Artificial Sequence
  Description of Artificial Sequence: Synthetic oligonucleotide
  Sense strand starting at position 1971 of SEQ ID NO: 587247
gaauucuugguggacaguu

SEQ ID NO: 777871 - RNA, 19 nt, Artificial Sequence
  Description of Artificial Sequence: Synthetic oligonucleotide
  Antisense strand to SEQ ID NO: 777870
aacuguccaccaagaauuc

SEQ ID NO: 777872 - RNA, 19 nt, Artificial Sequence
  Description of Artificial Sequence: Synthetic oligonucleotide
  Sense strand starting at position 2069 of SEQ ID NO: 587247
cugucaucugugucuuugu

SEQ ID NO: 777873 - RNA, 19 nt, Artificial Sequence
  Description of Artificial Sequence: Synthetic oligonucleotide
  Antisense strand to SEQ ID NO: 777872
acaaagacacagaugacag

SEQ ID NO: 777874 - RNA, 19 nt, Artificial Sequence
  Description of Artificial Sequence: Synthetic oligonucleotide
  Sense strand starting at position 2161 of SEQ ID NO: 587247
ugaguaacucgaugaugau

SEQ ID NO: 777875 - RNA, 19 nt, Artificial Sequence
  Description of Artificial Sequence: Synthetic oligonucleotide
  Antisense strand to SEQ ID NO: 777874
aucaucaucgaguuacuca

SEQ ID NO: 777876 - RNA, 19 nt, Artificial Sequence
  Description of Artificial Sequence: Synthetic oligonucleotide
  Sense strand starting at position 2217 of SEQ ID NO: 587247
gguccuuaagauggucaga

SEQ ID NO: 777877 - RNA, 19 nt, Artificial Sequence
  Description of Artificial Sequence: Synthetic oligonucleotide
  Antisense strand to SEQ ID NO: 777876
ucugaccaucuuaaggacc

SEQ ID NO: 777878 - RNA, 19 nt, Artificial Sequence
  Description of Artificial Sequence: Synthetic oligonucleotide
  Sense strand starting at position 2219 of SEQ ID NO: 587247
uccuuaagauggucagauc

SEQ ID NO: 777879 - RNA, 19 nt, Artificial Sequence
  Description of Artificial Sequence: Synthetic oligonucleotide
  Antisense strand to SEQ ID NO: 777878
gaucugaccaucuuaagga

SEQ ID NO: 777880 - RNA, 19 nt, Artificial Sequence
  Description of Artificial Sequence: Synthetic oligonucleotide
  Sense strand starting at position 2240 of SEQ ID NO: 587247
gugacaugaauccauuggu

SEQ ID NO: 777881 - RNA, 19 nt, Artificial Sequence
  Description of Artificial Sequence: Synthetic oligonucleotide
  Antisense strand to SEQ ID NO: 777880
accaauggauucaugucac

SEQ ID NO: 777882 - RNA, 19 nt, Artificial Sequence
  Description of Artificial Sequence: Synthetic oligonucleotide
  Sense strand starting at position 2243 of SEQ ID NO: 587247
acaugaauccauuggucaa

SEQ ID NO: 777883 - RNA, 19 nt, Artificial Sequence
  Description of Artificial Sequence: Synthetic oligonucleotide
  Antisense strand to SEQ ID NO: 777882
uugaccaauggauucaugu

SEQ ID NO: 777884 - RNA, 19 nt, Artificial Sequence
  Description of Artificial Sequence: Synthetic oligonucleotide
  Sense strand starting at position 2246 of SEQ ID NO: 587247
ugaauccauuggucaacaa

SEQ ID NO: 777885 - RNA, 19 nt, Artificial Sequence
  Description of Artificial Sequence: Synthetic oligonucleotide
  Antisense strand to SEQ ID NO: 777884
uuguugaccaauggauuca

SEQ ID NO: 777886 - RNA, 19 nt, Artificial Sequence
  Description of Artificial Sequence: Synthetic oligonucleotide
  Sense strand starting at position 2279 of SEQ ID NO: 587247
uggucagaucuaggcuuau

SEQ ID NO: 777887 - RNA, 19 nt, Artificial Sequence
  Description of Artificial Sequence: Synthetic oligonucleotide
  Antisense strand to SEQ ID NO: 777886
auaagccuagaucugacca

SEQ ID NO: 777888 - RNA, 19 nt, Artificial Sequence
  Description of Artificial Sequence: Synthetic oligonucleotide
  Sense strand starting at position 2283 of SEQ ID NO: 587247
cagaucuaggcuuauaguu

SEQ ID NO: 777889 - RNA, 19 nt, Artificial Sequence
  Description of Artificial Sequence: Synthetic oligonucleotide
  Antisense strand to SEQ ID NO: 777888
aacuauaagccuagaucug

SEQ ID NO: 777890 - RNA, 19 nt, Artificial Sequence
  Description of Artificial Sequence: Synthetic oligonucleotide
  Sense strand starting at position 2291 of SEQ ID NO: 587247
ggcuuauaguuuccaucaa

SEQ ID NO: 777891 - RNA, 19 nt, Artificial Sequence
  Description of Artificial Sequence: Synthetic oligonucleotide
  Antisense strand to SEQ ID NO: 777890
uugauggaaacuauaagcc

SEQ ID NO: 777892 - RNA, 19 nt, Artificial Sequence
  Description of Artificial Sequence: Synthetic oligonucleotide
  Sense strand starting at position 2399 of SEQ ID NO: 587247
cucugaaaguuguccuaca

SEQ ID NO: 777893 - RNA, 19 nt, Artificial Sequence
  Description of Artificial Sequence: Synthetic oligonucleotide
  Antisense strand to SEQ ID NO: 777892
uguaggacaacuuucagag

SEQ ID NO: 777894 - RNA, 19 nt, Artificial Sequence
  Description of Artificial Sequence: Synthetic oligonucleotide
  Sense strand starting at position 2409 of SEQ ID NO: 587247
uguccuacagcucaaugau

SEQ ID NO: 777895 - RNA, 19 nt, Artificial Sequence
  Description of Artificial Sequence: Synthetic oligonucleotide
  Antisense strand to SEQ ID NO: 777894
aucauugagcuguaggaca

SEQ ID NO: 777896 - RNA, 19 nt, Artificial Sequence
  Description of Artificial Sequence: Synthetic oligonucleotide
  Sense strand starting at position 2699 of SEQ ID NO: 587247
cccuaacaucuaugucagu

SEQ ID NO: 777897 - RNA, 19 nt, Artificial Sequence
  Description of Artificial Sequence: Synthetic oligonucleotide
  Antisense strand to SEQ ID NO: 777896
acugacauagauguuaggg

SEQ ID NO: 777898 - RNA, 19 nt, Artificial Sequence
  Description of Artificial Sequence: Synthetic oligonucleotide
  Sense strand starting at position 2700 of SEQ ID NO: 587247
ccuaacaucuaugucaguu

SEQ ID NO: 777899 - RNA, 19 nt, Artificial Sequence
  Description of Artificial Sequence: Synthetic oligonucleotide
  Antisense strand to SEQ ID NO: 777898
aacugacauagauguuagg

SEQ ID NO: 777900 - RNA, 19 nt, Artificial Sequence
  Description of Artificial Sequence: Synthetic oligonucleotide
  Sense strand starting at position 2757 of SEQ ID NO: 587247
uguuucuuuccacaccuga

SEQ ID NO: 777901 - RNA, 19 nt, Artificial Sequence
  Description of Artificial Sequence: Synthetic oligonucleotide
  Antisense strand to SEQ ID NO: 777900
ucagguguggaaagaaaca

SEQ ID NO: 777902 - RNA, 19 nt, Artificial Sequence
  Description of Artificial Sequence: Synthetic oligonucleotide
  Sense strand starting at position 2770 of SEQ ID NO: 587247
accugauaaucuuugguug

SEQ ID NO: 777903 - RNA, 19 nt, Artificial Sequence
  Description of Artificial Sequence: Synthetic oligonucleotide
  Antisense strand to SEQ ID NO: 777902
caaccaaagauuaucaggu

SEQ ID NO: 777904 - RNA, 19 nt, Artificial Sequence
  Description of Artificial Sequence: Synthetic oligonucleotide
  Sense strand starting at position 2773 of SEQ ID NO: 587247
ugauaaucuuugguuggau

SEQ ID NO: 777905 - RNA, 19 nt, Artificial Sequence
  Description of Artificial Sequence: Synthetic oligonucleotide
  Antisense strand to SEQ ID NO: 777904
auccaaccaaagauuauca

SEQ ID NO: 777906 - RNA, 19 nt, Artificial Sequence
  Description of Artificial Sequence: Synthetic oligonucleotide
  Sense strand starting at position 3151 of SEQ ID NO: 587247
guuacuauucuugagcuuu

SEQ ID NO: 777907 - RNA, 19 nt, Artificial Sequence
  Description of Artificial Sequence: Synthetic oligonucleotide
  Antisense strand to SEQ ID NO: 777906
aaagcucaagaauaguaac

SEQ ID NO: 777908 - RNA, 19 nt, Artificial Sequence
  Description of Artificial Sequence: Synthetic oligonucleotide
  Sense strand starting at position 3232 of SEQ ID NO: 587247
gcagcagagcagcauuuau

SEQ ID NO: 777909 - RNA, 19 nt, Artificial Sequence
  Description of Artificial Sequence: Synthetic oligonucleotide
  Antisense strand to SEQ ID NO: 777908
auaaaugcugcucugcugc

SEQ ID NO: 777910 - RNA, 19 nt, Artificial Sequence
  Description of Artificial Sequence: Synthetic oligonucleotide
  Sense strand starting at position 3300 of SEQ ID NO: 587247
uuaugagguuucucaguca

SEQ ID NO: 777911 - RNA, 19 nt, Artificial Sequence
  Description of Artificial Sequence: Synthetic oligonucleotide
  Antisense strand to SEQ ID NO: 777910
ugacugagaaaccucauaa

SEQ ID NO: 777912 - RNA, 19 nt, Artificial Sequence
  Description of Artificial Sequence: Synthetic oligonucleotide
  Sense strand starting at position 3430 of SEQ ID NO: 587247
cugguaguuuccuuauaug

SEQ ID NO: 777913 - RNA, 19 nt, Artificial Sequence
  Description of Artificial Sequence: Synthetic oligonucleotide
  Antisense strand to SEQ ID NO: 777912
cauauaaggaaacuaccag

SEQ ID NO: 777914 - RNA, 19 nt, Artificial Sequence
  Description of Artificial Sequence: Synthetic oligonucleotide
  Sense strand starting at position 3453 of SEQ ID NO: 587247
caaugaucaguaugauguu

SEQ ID NO: 777915 - RNA, 19 nt, Artificial Sequence
  Description of Artificial Sequence: Synthetic oligonucleotide
  Antisense strand to SEQ ID NO: 777914
aacaucauacugaucauug

SEQ ID NO: 777916 - RNA, 19 nt, Artificial Sequence
  Description of Artificial Sequence: Synthetic oligonucleotide
  Sense strand starting at position 72 of SEQ ID NO: 587248
gugaaauuguuccuccuug

SEQ ID NO: 777917 - RNA, 19 nt, Artificial Sequence
  Description of Artificial Sequence: Synthetic oligonucleotide
  Antisense strand to SEQ ID NO: 777916
caaggaggaacaauuucac

SEQ ID NO: 777918 - RNA, 19 nt, Artificial Sequence
  Description of Artificial Sequence: Synthetic oligonucleotide
  Sense strand starting at position 161 of SEQ ID NO: 587248
gguuaugguuaaccagaga

SEQ ID NO: 777919 - RNA, 19 nt, Artificial Sequence
  Description of Artificial Sequence: Synthetic oligonucleotide
  Antisense strand to SEQ ID NO: 777918
ucucugguuaaccauaacc

SEQ ID NO: 777920 - RNA, 19 nt, Artificial Sequence
  Description of Artificial Sequence: Synthetic oligonucleotide
  Sense strand starting at position 193 of SEQ ID NO: 587248
ccguuacaucuugagucaa

SEQ ID NO: 777921 - RNA, 19 nt, Artificial Sequence
  Description of Artificial Sequence: Synthetic oligonucleotide
  Antisense strand to SEQ ID NO: 777920
uugacucaagauguaacgg

SEQ ID NO: 777922 - RNA, 19 nt, Artificial Sequence
  Description of Artificial Sequence: Synthetic oligonucleotide
  Sense strand starting at position 195 of SEQ ID NO: 587248
guuacaucuugagucaaug

SEQ ID NO: 777923 - RNA, 19 nt, Artificial Sequence
  Description of Artificial Sequence: Synthetic oligonucleotide
  Antisense strand to SEQ ID NO: 777922
cauugacucaagauguaac

SEQ ID NO: 777924 - RNA, 19 nt, Artificial Sequence
  Description of Artificial Sequence: Synthetic oligonucleotide
  Sense strand starting at position 232 of SEQ ID NO: 587248
caaaguuagugacuggaau

SEQ ID NO: 777925 - RNA, 19 nt, Artificial Sequence
  Description of Artificial Sequence: Synthetic oligonucleotide
  Antisense strand to SEQ ID NO: 777924
auuccagucacuaacuuug

SEQ ID NO: 777926 - RNA, 19 nt, Artificial Sequence
  Description of Artificial Sequence: Synthetic oligonucleotide
  Sense strand starting at position 233 of SEQ ID NO: 587248
aaaguuagugacuggaauc

SEQ ID NO: 777927 - RNA, 19 nt, Artificial Sequence
  Description of Artificial Sequence: Synthetic oligonucleotide
  Antisense strand to SEQ ID NO: 777926
gauuccagucacuaacuuu

SEQ ID NO: 777928 - RNA, 19 nt, Artificial Sequence
  Description of Artificial Sequence: Synthetic oligonucleotide
  Sense strand starting at position 245 of SEQ ID NO: 587248
uggaaucaauaucagacaa

SEQ ID NO: 777929 - RNA, 19 nt, Artificial Sequence
  Description of Artificial Sequence: Synthetic oligonucleotide
  Antisense strand to SEQ ID NO: 777928
uugucugauauugauucca

SEQ ID NO: 777930 - RNA, 19 nt, Artificial Sequence
  Description of Artificial Sequence: Synthetic oligonucleotide
  Sense strand starting at position 403 of SEQ ID NO: 587248
uagggcaguuuccucagaa

SEQ ID NO: 777931 - RNA, 19 nt, Artificial Sequence
  Description of Artificial Sequence: Synthetic oligonucleotide
  Antisense strand to SEQ ID NO: 777930
uucugaggaaacugcccua

SEQ ID NO: 777932 - RNA, 19 nt, Artificial Sequence
  Description of Artificial Sequence: Synthetic oligonucleotide
  Sense strand starting at position 404 of SEQ ID NO: 587248
agggcaguuuccucagaau

SEQ ID NO: 777933 - RNA, 19 nt, Artificial Sequence
  Description of Artificial Sequence: Synthetic oligonucleotide
  Antisense strand to SEQ ID NO: 777932
auucugaggaaacugcccu

SEQ ID NO: 777934 - RNA, 19 nt, Artificial Sequence
  Description of Artificial Sequence: Synthetic oligonucleotide
  Sense strand starting at position 2708 of SEQ ID NO: 587248
uuggaaaugcgaugacuuc

SEQ ID NO: 777935 - RNA, 19 nt, Artificial Sequence
  Description of Artificial Sequence: Synthetic oligonucleotide
  Antisense strand to SEQ ID NO: 777934
gaagucaucgcauuuccaa

SEQ ID NO: 777936 - RNA, 19 nt, Artificial Sequence
  Description of Artificial Sequence: Synthetic oligonucleotide
  Sense strand starting at position 2810 of SEQ ID NO: 587248
ccuucugaguuauuggaau

SEQ ID NO: 777937 - RNA, 19 nt, Artificial Sequence
  Description of Artificial Sequence: Synthetic oligonucleotide
  Antisense strand to SEQ ID NO: 777936
auuccaauaacucagaagg

SEQ ID NO: 777938 - RNA, 19 nt, Artificial Sequence
  Description of Artificial Sequence: Synthetic oligonucleotide
  Sense strand starting at position 2869 of SEQ ID NO: 587248
ggaaacagauuaucguuau

SEQ ID NO: 777939 - RNA, 19 nt, Artificial Sequence
  Description of Artificial Sequence: Synthetic oligonucleotide
  Antisense strand to SEQ ID NO: 777938
auaacgauaaucuguuucc

SEQ ID NO: 777940 - RNA, 19 nt, Artificial Sequence
  Description of Artificial Sequence: Synthetic oligonucleotide
  Sense strand starting at position 2979 of SEQ ID NO: 587248
uaacaaguguguucgcaga

SEQ ID NO: 777941 - RNA, 19 nt, Artificial Sequence
  Description of Artificial Sequence: Synthetic oligonucleotide
  Antisense strand to SEQ ID NO: 777940
ucugcgaacacacuuguua

SEQ ID NO: 777942 - RNA, 19 nt, Artificial Sequence
  Description of Artificial Sequence: Synthetic oligonucleotide
  Sense strand starting at position 2981 of SEQ ID NO: 587248
acaaguguguucgcagaug

SEQ ID NO: 777943 - RNA, 19 nt, Artificial Sequence
  Description of Artificial Sequence: Synthetic oligonucleotide
  Antisense strand to SEQ ID NO: 777942
caucugcgaacacacuugu

SEQ ID NO: 777944 - RNA, 19 nt, Artificial Sequence
  Description of Artificial Sequence: Synthetic oligonucleotide
  Sense strand starting at position 3074 of SEQ ID NO: 587248
cugucagacuucuuagaga

SEQ ID NO: 777945 - RNA, 19 nt, Artificial Sequence
  Description of Artificial Sequence: Synthetic oligonucleotide
  Antisense strand to SEQ ID NO: 777944
ucucuaagaagucugacag

SEQ ID NO: 777946 - RNA, 19 nt, Artificial Sequence
  Description of Artificial Sequence: Synthetic oligonucleotide
  Sense strand starting at position 3077 of SEQ ID NO: 587248
ucagacuucuuagagauuu

SEQ ID NO: 777947 - RNA, 19 nt, Artificial Sequence
  Description of Artificial Sequence: Synthetic oligonucleotide
  Antisense strand to SEQ ID NO: 777946
aaaucucuaagaagucuga

SEQ ID NO: 777948 - RNA, 19 nt, Artificial Sequence
  Description of Artificial Sequence: Synthetic oligonucleotide
  Sense strand starting at position 3132 of SEQ ID NO: 587248
acagcuauuugggaugcua

SEQ ID NO: 777949 - RNA, 19 nt, Artificial Sequence
  Description of Artificial Sequence: Synthetic oligonucleotide
  Antisense strand to SEQ ID NO: 777948
uagcaucccaaauagcugu

SEQ ID NO: 777950 - RNA, 19 nt, Artificial Sequence
  Description of Artificial Sequence: Synthetic oligonucleotide
  Sense strand starting at position 3192 of SEQ ID NO: 587248
uugugugcucuggaauaag

SEQ ID NO: 777951 - RNA, 19 nt, Artificial Sequence
  Description of Artificial Sequence: Synthetic oligonucleotide
  Antisense strand to SEQ ID NO: 777950
cuuauuccagagcacacaa

SEQ ID NO: 777952 - RNA, 19 nt, Artificial Sequence
  Description of Artificial Sequence: Synthetic oligonucleotide
  Sense strand starting at position 3195 of SEQ ID NO: 587248
ugugcucuggaauaaguua

SEQ ID NO: 777953 - RNA, 19 nt, Artificial Sequence
  Description of Artificial Sequence: Synthetic oligonucleotide
  Antisense strand to SEQ ID NO: 777952
uaacuuauuccagagcaca

SEQ ID NO: 777954 - RNA, 19 nt, Artificial Sequence
  Description of Artificial Sequence: Synthetic oligonucleotide
  Sense strand starting at position 3280 of SEQ ID NO: 587248
aaauaaucguagguaaggu

SEQ ID NO: 777955 - RNA, 19 nt, Artificial Sequence
  Description of Artificial Sequence: Synthetic oligonucleotide
  Antisense strand to SEQ ID NO: 777954
accuuaccuacgauuauuu

SEQ ID NO: 777956 - RNA, 19 nt, Artificial Sequence
  Description of Artificial Sequence: Synthetic oligonucleotide
  Sense strand starting at position 3342 of SEQ ID NO: 587248
aaaucagacugaguuguuu

SEQ ID NO: 777957 - RNA, 19 nt, Artificial Sequence
  Description of Artificial Sequence: Synthetic oligonucleotide
  Antisense strand to SEQ ID NO: 777956
aaacaacucagucugauuu

SEQ ID NO: 777958 - RNA, 19 nt, Artificial Sequence
  Description of Artificial Sequence: Synthetic oligonucleotide
  Sense strand starting at position 3425 of SEQ ID NO: 587248
uuucuauuccuaggguucu

SEQ ID NO: 777959 - RNA, 19 nt, Artificial Sequence
  Description of Artificial Sequence: Synthetic oligonucleotide
  Antisense strand to SEQ ID NO: 777958
agaacccuaggaauagaaa

SEQ ID NO: 777960 - RNA, 19 nt, Artificial Sequence
  Description of Artificial Sequence: Synthetic oligonucleotide
  Sense strand starting at position 3437 of SEQ ID NO: 587248
ggguucucuggguaccuua

SEQ ID NO: 777961 - RNA, 19 nt, Artificial Sequence
  Description of Artificial Sequence: Synthetic oligonucleotide
  Antisense strand to SEQ ID NO: 777960
uaagguacccagagaaccc

SEQ ID NO: 777962 - RNA, 19 nt, Artificial Sequence
  Description of Artificial Sequence: Synthetic oligonucleotide
  Sense strand starting at position 3458 of SEQ ID NO: 587248
cagagaucuucugcacaga

SEQ ID NO: 777963 - RNA, 19 nt, Artificial Sequence
  Description of Artificial Sequence: Synthetic oligonucleotide
  Antisense strand to SEQ ID NO: 777962
ucugugcagaagaucucug

SEQ ID NO: 777964 - RNA, 19 nt, Artificial Sequence
  Description of Artificial Sequence: Synthetic oligonucleotide
  Sense strand starting at position 3461 of SEQ ID NO: 587248
agaucuucugcacagauca

SEQ ID NO: 777965 - RNA, 19 nt, Artificial Sequence
  Description of Artificial Sequence: Synthetic oligonucleotide
  Antisense strand to SEQ ID NO: 777964
ugaucugugcagaagaucu

SEQ ID NO: 777966 - RNA, 19 nt, Artificial Sequence
  Description of Artificial Sequence: Synthetic oligonucleotide
  Sense strand starting at position 3472 of SEQ ID NO: 587248
acagaucaauggucagauc

SEQ ID NO: 777967 - RNA, 19 nt, Artificial Sequence
  Description of Artificial Sequence: Synthetic oligonucleotide
  Antisense strand to SEQ ID NO: 777966
gaucugaccauugaucugu

SEQ ID NO: 777968 - RNA, 19 nt, Artificial Sequence
  Description of Artificial Sequence: Synthetic oligonucleotide
  Sense strand starting at position 3475 of SEQ ID NO: 587248
gaucaauggucagaucaau

SEQ ID NO: 777969 - RNA, 19 nt, Artificial Sequence
  Description of Artificial Sequence: Synthetic oligonucleotide
  Antisense strand to SEQ ID NO: 777968
auugaucugaccauugauc

SEQ ID NO: 777970 - RNA, 19 nt, Artificial Sequence
  Description of Artificial Sequence: Synthetic oligonucleotide
  Sense strand starting at position 3481 of SEQ ID NO: 587248
uggucagaucaauggucuu

SEQ ID NO: 777971 - RNA, 19 nt, Artificial Sequence
  Description of Artificial Sequence: Synthetic oligonucleotide
  Antisense strand to SEQ ID NO: 777970
aagaccauugaucugacca

SEQ ID NO: 777972 - RNA, 19 nt, Artificial Sequence
  Description of Artificial Sequence: Synthetic oligonucleotide
  Sense strand starting at position 3484 of SEQ ID NO: 587248
ucagaucaauggucuugau

SEQ ID NO: 777973 - RNA, 19 nt, Artificial Sequence
  Description of Artificial Sequence: Synthetic oligonucleotide
  Antisense strand to SEQ ID NO: 777972
aucaagaccauugaucuga

SEQ ID NO: 777974 - RNA, 19 nt, Artificial Sequence
  Description of Artificial Sequence: Synthetic oligonucleotide
  Sense strand starting at position 3528 of SEQ ID NO: 587248
auuaguucuuguuuaccua

SEQ ID NO: 777975 - RNA, 19 nt, Artificial Sequence
  Description of Artificial Sequence: Synthetic oligonucleotide
  Antisense strand to SEQ ID NO: 777974
uagguaaacaagaacuaau

SEQ ID NO: 777976 - RNA, 19 nt, Artificial Sequence
  Description of Artificial Sequence: Synthetic oligonucleotide
  Sense strand starting at position 3529 of SEQ ID NO: 587248
uuaguucuuguuuaccuaa

SEQ ID NO: 777977 - RNA, 19 nt, Artificial Sequence
  Description of Artificial Sequence: Synthetic oligonucleotide
  Antisense strand to SEQ ID NO: 777976
uuagguaaacaagaacuaa

SEQ ID NO: 777978 - RNA, 19 nt, Artificial Sequence
  Description of Artificial Sequence: Synthetic oligonucleotide
  Sense strand starting at position 3531 of SEQ ID NO: 587248
aguucuuguuuaccuaaau

SEQ ID NO: 777979 - RNA, 19 nt, Artificial Sequence
  Description of Artificial Sequence: Synthetic oligonucleotide
  Antisense strand to SEQ ID NO: 777978
auuuagguaaacaagaacu

SEQ ID NO: 777980 - RNA, 19 nt, Artificial Sequence
  Description of Artificial Sequence: Synthetic oligonucleotide
  Sense strand starting at position 3532 of SEQ ID NO: 587248
guucuuguuuaccuaaaua

SEQ ID NO: 777981 - RNA, 19 nt, Artificial Sequence
  Description of Artificial Sequence: Synthetic oligonucleotide
  Antisense strand to SEQ ID NO: 777980
uauuuagguaaacaagaac

SEQ ID NO: 777982 - RNA, 19 nt, Artificial Sequence
  Description of Artificial Sequence: Synthetic oligonucleotide
  Sense strand starting at position 3540 of SEQ ID NO: 587248
uuaccuaaauacgaugaga

SEQ ID NO: 777983 - RNA, 19 nt, Artificial Sequence
  Description of Artificial Sequence: Synthetic oligonucleotide
  Antisense strand to SEQ ID NO: 777982
ucucaucguauuuagguaa

SEQ ID NO: 777984 - RNA, 19 nt, Artificial Sequence
  Description of Artificial Sequence: Synthetic oligonucleotide
  Sense strand starting at position 3604 of SEQ ID NO: 587248
gaaauaguccuguguaugg

SEQ ID NO: 777985 - RNA, 19 nt, Artificial Sequence
  Description of Artificial Sequence: Synthetic oligonucleotide
  Antisense strand to SEQ ID NO: 777984
ccauacacaggacuauuuc

SEQ ID NO: 777986 - RNA, 19 nt, Artificial Sequence
  Description of Artificial Sequence: Synthetic oligonucleotide
  Sense strand starting at position 3606 of SEQ ID NO: 587248
aauaguccuguguauggaa

SEQ ID NO: 777987 - RNA, 19 nt, Artificial Sequence
  Description of Artificial Sequence: Synthetic oligonucleotide
  Antisense strand to SEQ ID NO: 777986
uuccauacacaggacuauu

SEQ ID NO: 777988 - RNA, 19 nt, Artificial Sequence
  Description of Artificial Sequence: Synthetic oligonucleotide
  Sense strand starting at position 3608 of SEQ ID NO: 587248
uaguccuguguauggaaua

SEQ ID NO: 777989 - RNA, 19 nt, Artificial Sequence
  Description of Artificial Sequence: Synthetic oligonucleotide
  Antisense strand to SEQ ID NO: 777988
uauuccauacacaggacua

SEQ ID NO: 777990 - RNA, 19 nt, Artificial Sequence
  Description of Artificial Sequence: Synthetic oligonucleotide
  Sense strand starting at position 3637 of SEQ ID NO: 587248
uuucucaauggaugaaauu

SEQ ID NO: 777991 - RNA, 19 nt, Artificial Sequence
  Description of Artificial Sequence: Synthetic oligonucleotide
  Antisense strand to SEQ ID NO: 777990
aauuucauccauugagaaa

SEQ ID NO: 777992 - RNA, 19 nt, Artificial Sequence
  Description of Artificial Sequence: Synthetic oligonucleotide
  Sense strand starting at position 3781 of SEQ ID NO: 587248
ucaggcguuccucacagau

SEQ ID NO: 777993 - RNA, 19 nt, Artificial Sequence
  Description of Artificial Sequence: Synthetic oligonucleotide
  Antisense strand to SEQ ID NO: 777992
aucugugaggaacgccuga

SEQ ID NO: 777994 - RNA, 19 nt, Artificial Sequence
  Description of Artificial Sequence: Synthetic oligonucleotide
  Sense strand starting at position 3858 of SEQ ID NO: 587248
cucuuugacccaugggaua

SEQ ID NO: 777995 - RNA, 19 nt, Artificial Sequence
  Description of Artificial Sequence: Synthetic oligonucleotide
  Antisense strand to SEQ ID NO: 777994
uaucccaugggucaaagag

SEQ ID NO: 777996 - RNA, 19 nt, Artificial Sequence
  Description of Artificial Sequence: Synthetic oligonucleotide
  Sense strand starting at position 556 of SEQ ID NO: 587249
ccgggaucgcaucacugaa

SEQ ID NO: 777997 - RNA, 19 nt, Artificial Sequence
  Description of Artificial Sequence: Synthetic oligonucleotide
  Antisense strand to SEQ ID NO: 777996
uucagugaugcgaucccgg

SEQ ID NO: 777998 - RNA, 19 nt, Artificial Sequence
  Description of Artificial Sequence: Synthetic oligonucleotide
  Sense strand starting at position 740 of SEQ ID NO: 587249
cuucucaucguuuaaugag

SEQ ID NO: 777999 - RNA, 19 nt, Artificial Sequence
  Description of Artificial Sequence: Synthetic oligonucleotide
  Antisense strand to SEQ ID NO: 777998
cucauuaaacgaugagaag

SEQ ID NO: 778000 - RNA, 19 nt, Artificial Sequence
  Description of Artificial Sequence: Synthetic oligonucleotide
  Sense strand starting at position 756 of SEQ ID NO: 587249
gagcacucuggucaguuaa

SEQ ID NO: 778001 - RNA, 19 nt, Artificial Sequence
  Description of Artificial Sequence: Synthetic oligonucleotide
  Antisense strand to SEQ ID NO: 778000
uuaacugaccagagugcuc

SEQ ID NO: 778002 - RNA, 19 nt, Artificial Sequence
  Description of Artificial Sequence: Synthetic oligonucleotide
  Sense strand starting at position 758 of SEQ ID NO: 587249
gcacucuggucaguuaaag

SEQ ID NO: 778003 - RNA, 19 nt, Artificial Sequence
  Description of Artificial Sequence: Synthetic oligonucleotide
  Antisense strand to SEQ ID NO: 778002
cuuuaacugaccagagugc

SEQ ID NO: 778004 - RNA, 19 nt, Artificial Sequence
  Description of Artificial Sequence: Synthetic oligonucleotide
  Sense strand starting at position 769 of SEQ ID NO: 587249
aguuaaagguuccuguuaa

SEQ ID NO: 778005 - RNA, 19 nt, Artificial Sequence
  Description of Artificial Sequence: Synthetic oligonucleotide
  Antisense strand to SEQ ID NO: 778004
uuaacaggaaccuuuaacu

SEQ ID NO: 778006 - RNA, 19 nt, Artificial Sequence
  Description of Artificial Sequence: Synthetic oligonucleotide
  Sense strand starting at position 809 of SEQ ID NO: 587249
ggugggagagucugagauu

SEQ ID NO: 778007 - RNA, 19 nt, Artificial Sequence
  Description of Artificial Sequence: Synthetic oligonucleotide
  Antisense strand to SEQ ID NO: 778006
aaucucagacucucccacc

SEQ ID NO: 778008 - RNA, 19 nt, Artificial Sequence
  Description of Artificial Sequence: Synthetic oligonucleotide
  Sense strand starting at position 828 of SEQ ID NO: 587249
ccgcauuuccaacaagcuu

SEQ ID NO: 778009 - RNA, 19 nt, Artificial Sequence
  Description of Artificial Sequence: Synthetic oligonucleotide
  Antisense strand to SEQ ID NO: 778008
aagcuuguuggaaaugcgg

SEQ ID NO: 778010 - RNA, 19 nt, Artificial Sequence
  Description of Artificial Sequence: Synthetic oligonucleotide
  Sense strand starting at position 847 of SEQ ID NO: 587249
ccaggugaggccuaugcua

SEQ ID NO: 778011 - RNA, 19 nt, Artificial Sequence
  Description of Artificial Sequence: Synthetic oligonucleotide
  Antisense strand to SEQ ID NO: 778010
uagcauaggccucaccugg

SEQ ID NO: 778012 - RNA, 19 nt, Artificial Sequence
  Description of Artificial Sequence: Synthetic oligonucleotide
  Sense strand starting at position 888 of SEQ ID NO: 587249
gcaguuagaagauacaugu

SEQ ID NO: 778013 - RNA, 19 nt, Artificial Sequence
  Description of Artificial Sequence: Synthetic oligonucleotide
  Antisense strand to SEQ ID NO: 778012
acauguaucuucuaacugc

SEQ ID NO: 778014 - RNA, 19 nt, Artificial Sequence
  Description of Artificial Sequence: Synthetic oligonucleotide
  Sense strand starting at position 923 of SEQ ID NO: 587249
ggcagaugccugcaagauu

SEQ ID NO: 778015 - RNA, 19 nt, Artificial Sequence
  Description of Artificial Sequence: Synthetic oligonucleotide
  Antisense strand to SEQ ID NO: 778014
aaucuugcaggcaucugcc

SEQ ID NO: 778016 - RNA, 19 nt, Artificial Sequence
  Description of Artificial Sequence: Synthetic oligonucleotide
  Sense strand starting at position 1044 of SEQ ID NO: 587249
uuaggugggcuuugauaaa

SEQ ID NO: 778017 - RNA, 19 nt, Artificial Sequence
  Description of Artificial Sequence: Synthetic oligonucleotide
  Antisense strand to SEQ ID NO: 778016
uuuaucaaagcccaccuaa

SEQ ID NO: 778018 - RNA, 19 nt, Artificial Sequence
  Description of Artificial Sequence: Synthetic oligonucleotide
  Sense strand starting at position 1097 of SEQ ID NO: 587249
cccuuacucgaagaguuaa

SEQ ID NO: 778019 - RNA, 19 nt, Artificial Sequence
  Description of Artificial Sequence: Synthetic oligonucleotide
  Antisense strand to SEQ ID NO: 778018
uuaacucuucgaguaaggg

SEQ ID NO: 778020 - RNA, 19 nt, Artificial Sequence
  Description of Artificial Sequence: Synthetic oligonucleotide
  Sense strand starting at position 1105 of SEQ ID NO: 587249
cgaagaguuaacuguaacu

SEQ ID NO: 778021 - RNA, 19 nt, Artificial Sequence
  Description of Artificial Sequence: Synthetic oligonucleotide
  Antisense strand to SEQ ID NO: 778020
aguuacaguuaacucuucg

SEQ ID NO: 778022 - RNA, 19 nt, Artificial Sequence
  Description of Artificial Sequence: Synthetic oligonucleotide
  Sense strand starting at position 1124 of SEQ ID NO: 587249
uugagaaguuaaguucuua

SEQ ID NO: 778023 - RNA, 19 nt, Artificial Sequence
  Description of Artificial Sequence: Synthetic oligonucleotide
  Antisense strand to SEQ ID NO: 778022
uaagaacuuaacuucucaa

SEQ ID NO: 778024 - RNA, 19 nt, Artificial Sequence
  Description of Artificial Sequence: Synthetic oligonucleotide
  Sense strand starting at position 1128 of SEQ ID NO: 587249
gaaguuaaguucuuagagc

SEQ ID NO: 778025 - RNA, 19 nt, Artificial Sequence
  Description of Artificial Sequence: Synthetic oligonucleotide
  Antisense strand to SEQ ID NO: 778024
gcucuaagaacuuaacuuc

SEQ ID NO: 778026 - RNA, 19 nt, Artificial Sequence
  Description of Artificial Sequence: Synthetic oligonucleotide
  Sense strand starting at position 1137 of SEQ ID NO: 587249
uucuuagagccucaguuau

SEQ ID NO: 778027 - RNA, 19 nt, Artificial Sequence
  Description of Artificial Sequence: Synthetic oligonucleotide
  Antisense strand to SEQ ID NO: 778026
auaacugaggcucuaagaa

SEQ ID NO: 778028 - RNA, 19 nt, Artificial Sequence
  Description of Artificial Sequence: Synthetic oligonucleotide
  Sense strand starting at position 1144 of SEQ ID NO: 587249
agccucaguuaucucacau

SEQ ID NO: 778029 - RNA, 19 nt, Artificial Sequence
  Description of Artificial Sequence: Synthetic oligonucleotide
  Antisense strand to SEQ ID NO: 778028
augugagauaacugaggcu

SEQ ID NO: 778030 - RNA, 19 nt, Artificial Sequence
  Description of Artificial Sequence: Synthetic oligonucleotide
  Sense strand starting at position 1167 of SEQ ID NO: 587249
auccucagcgguuaucaga

SEQ ID NO: 778031 - RNA, 19 nt, Artificial Sequence
  Description of Artificial Sequence: Synthetic oligonucleotide
  Antisense strand to SEQ ID NO: 778030
ucugauaaccgcugaggau

SEQ ID NO: 778032 - RNA, 19 nt, Artificial Sequence
  Description of Artificial Sequence: Synthetic oligonucleotide
  Sense strand starting at position 1175 of SEQ ID NO: 587249
cgguuaucagauuaaagua

SEQ ID NO: 778033 - RNA, 19 nt, Artificial Sequence
  Description of Artificial Sequence: Synthetic oligonucleotide
  Antisense strand to SEQ ID NO: 778032
uacuuuaaucugauaaccg

SEQ ID NO: 778034 - RNA, 19 nt, Artificial Sequence
  Description of Artificial Sequence: Synthetic oligonucleotide
  Sense strand starting at position 1405 of SEQ ID NO: 587249
cuggucucucuugaauuaa

SEQ ID NO: 778035 - RNA, 19 nt, Artificial Sequence
  Description of Artificial Sequence: Synthetic oligonucleotide
  Antisense strand to SEQ ID NO: 778034
uuaauucaagagagaccag

SEQ ID NO: 778036 - RNA, 19 nt, Artificial Sequence
  Description of Artificial Sequence: Synthetic oligonucleotide
  Sense strand starting at position 1993 of SEQ ID NO: 587249
ucgcuuaugcccuccuauu

SEQ ID NO: 778037 - RNA, 19 nt, Artificial Sequence
  Description of Artificial Sequence: Synthetic oligonucleotide
  Antisense strand to SEQ ID NO: 778036
aauaggagggcauaagcga

SEQ ID NO: 778038 - RNA, 19 nt, Artificial Sequence
  Description of Artificial Sequence: Synthetic oligonucleotide
  Sense strand starting at position 2002 of SEQ ID NO: 587249
cccuccuauuggcugauaa

SEQ ID NO: 778039 - RNA, 19 nt, Artificial Sequence
  Description of Artificial Sequence: Synthetic oligonucleotide
  Antisense strand to SEQ ID NO: 778038
uuaucagccaauaggaggg

SEQ ID NO: 778040 - RNA, 19 nt, Artificial Sequence
  Description of Artificial Sequence: Synthetic oligonucleotide
  Sense strand starting at position 2003 of SEQ ID NO: 587249
ccuccuauuggcugauaau

SEQ ID NO: 778041 - RNA, 19 nt, Artificial Sequence
  Description of Artificial Sequence: Synthetic oligonucleotide
  Antisense strand to SEQ ID NO: 778040
auuaucagccaauaggagg

SEQ ID NO: 778042 - RNA, 19 nt, Artificial Sequence
  Description of Artificial Sequence: Synthetic oligonucleotide
  Sense strand starting at position 2004 of SEQ ID NO: 587249
cuccuauuggcugauaaug

SEQ ID NO: 778043 - RNA, 19 nt, Artificial Sequence
  Description of Artificial Sequence: Synthetic oligonucleotide
  Antisense strand to SEQ ID NO: 778042
cauuaucagccaauaggag

SEQ ID NO: 778044 - RNA, 19 nt, Artificial Sequence
  Description of Artificial Sequence: Synthetic oligonucleotide
  Sense strand starting at position 2020 of SEQ ID NO: 587249
augaguccaacgugaggau

SEQ ID NO: 778045 - RNA, 19 nt, Artificial Sequence
  Description of Artificial Sequence: Synthetic oligonucleotide
  Antisense strand to SEQ ID NO: 778044
auccucacguuggacucau

SEQ ID NO: 778046 - RNA, 19 nt, Artificial Sequence
  Description of Artificial Sequence: Synthetic oligonucleotide
  Sense strand starting at position 2042 of SEQ ID NO: 587249
guauccaaucagugaaggu

SEQ ID NO: 778047 - RNA, 19 nt, Artificial Sequence
  Description of Artificial Sequence: Synthetic oligonucleotide
  Antisense strand to SEQ ID NO: 778046
accuucacugauuggauac

SEQ ID NO: 778048 - RNA, 19 nt, Artificial Sequence
  Description of Artificial Sequence: Synthetic oligonucleotide
  Sense strand starting at position 2192 of SEQ ID NO: 587249
uuugauuccggcugggaaa

SEQ ID NO: 778049 - RNA, 19 nt, Artificial Sequence
  Description of Artificial Sequence: Synthetic oligonucleotide
  Antisense strand to SEQ ID NO: 778048
uuucccagccggaaucaaa

SEQ ID NO: 778050 - RNA, 19 nt, Artificial Sequence
  Description of Artificial Sequence: Synthetic oligonucleotide
  Sense strand starting at position 2400 of SEQ ID NO: 587249
ggacguuagcacuacauua

SEQ ID NO: 778051 - RNA, 19 nt, Artificial Sequence
  Description of Artificial Sequence: Synthetic oligonucleotide
  Antisense strand to SEQ ID NO: 778050
uaauguagugcuaacgucc

SEQ ID NO: 778052 - RNA, 19 nt, Artificial Sequence
  Description of Artificial Sequence: Synthetic oligonucleotide
  Sense strand starting at position 2416 of SEQ ID NO: 587249
uuaggcguuccuuggauuu

SEQ ID NO: 778053 - RNA, 19 nt, Artificial Sequence
  Description of Artificial Sequence: Synthetic oligonucleotide
  Antisense strand to SEQ ID NO: 778052
aaauccaaggaacgccuaa

SEQ ID NO: 778054 - RNA, 19 nt, Artificial Sequence
  Description of Artificial Sequence: Synthetic oligonucleotide
  Sense strand starting at position 2435 of SEQ ID NO: 587249
ucguuuauuucuucuuggu

SEQ ID NO: 778055 - RNA, 19 nt, Artificial Sequence
  Description of Artificial Sequence: Synthetic oligonucleotide
  Antisense strand to SEQ ID NO: 778054
accaagaagaaauaaacga

SEQ ID NO: 778056 - RNA, 19 nt, Artificial Sequence
  Description of Artificial Sequence: Synthetic oligonucleotide
  Sense strand starting at position 2437 of SEQ ID NO: 587249
guuuauuucuucuuggugu

SEQ ID NO: 778057 - RNA, 19 nt, Artificial Sequence
  Description of Artificial Sequence: Synthetic oligonucleotide
  Antisense strand to SEQ ID NO: 778056
acaccaagaagaaauaaac

SEQ ID NO: 778058 - RNA, 19 nt, Artificial Sequence
  Description of Artificial Sequence: Synthetic oligonucleotide
  Sense strand starting at position 2464 of SEQ ID NO: 587249
ucccuagcagcuugaaaga

SEQ ID NO: 778059 - RNA, 19 nt, Artificial Sequence
  Description of Artificial Sequence: Synthetic oligonucleotide
  Antisense strand to SEQ ID NO: 778058
ucuuucaagcugcuaggga

SEQ ID NO: 778060 - RNA, 19 nt, Artificial Sequence
  Description of Artificial Sequence: Synthetic oligonucleotide
  Sense strand starting at position 2473 of SEQ ID NO: 587249
gcuugaaagacgcaaagua

SEQ ID NO: 778061 - RNA, 19 nt, Artificial Sequence
  Description of Artificial Sequence: Synthetic oligonucleotide
  Antisense strand to SEQ ID NO: 778060
uacuuugcgucuuucaagc

SEQ ID NO: 778062 - RNA, 19 nt, Artificial Sequence
  Description of Artificial Sequence: Synthetic oligonucleotide
  Sense strand starting at position 2598 of SEQ ID NO: 587249
cuauguaguuuaucaaagu

SEQ ID NO: 778063 - RNA, 19 nt, Artificial Sequence
  Description of Artificial Sequence: Synthetic oligonucleotide
  Antisense strand to SEQ ID NO: 778062
acuuugauaaacuacauag

SEQ ID NO: 778064 - RNA, 19 nt, Artificial Sequence
  Description of Artificial Sequence: Synthetic oligonucleotide
  Sense strand starting at position 2643 of SEQ ID NO: 587249
uggcaaucacuugaaguuu

SEQ ID NO: 778065 - RNA, 19 nt, Artificial Sequence
  Description of Artificial Sequence: Synthetic oligonucleotide
  Antisense strand to SEQ ID NO: 778064
aaacuucaagugauugcca

SEQ ID NO: 778066 - RNA, 19 nt, Artificial Sequence
  Description of Artificial Sequence: Synthetic oligonucleotide
  Sense strand starting at position 2724 of SEQ ID NO: 587249
gcaggcagaucuuugagaa

SEQ ID NO: 778067 - RNA, 19 nt, Artificial Sequence
  Description of Artificial Sequence: Synthetic oligonucleotide
  Antisense strand to SEQ ID NO: 778066
uucucaaagaucugccugc

SEQ ID NO: 778068 - RNA, 19 nt, Artificial Sequence
  Description of Artificial Sequence: Synthetic oligonucleotide
  Sense strand starting at position 2725 of SEQ ID NO: 587249
caggcagaucuuugagaau

SEQ ID NO: 778069 - RNA, 19 nt, Artificial Sequence
  Description of Artificial Sequence: Synthetic oligonucleotide
  Antisense strand to SEQ ID NO: 778068
auucucaaagaucugccug

SEQ ID NO: 778070 - RNA, 19 nt, Artificial Sequence
  Description of Artificial Sequence: Synthetic oligonucleotide
  Sense strand starting at position 2785 of SEQ ID NO: 587249
ggauucucuccauaacagu

SEQ ID NO: 778071 - RNA, 19 nt, Artificial Sequence
  Description of Artificial Sequence: Synthetic oligonucleotide
  Antisense strand to SEQ ID NO: 778070
acuguuauggagagaaucc

SEQ ID NO: 778072 - RNA, 19 nt, Artificial Sequence
  Description of Artificial Sequence: Synthetic oligonucleotide
  Sense strand starting at position 2944 of SEQ ID NO: 587249
agcagcuacuucuugaauu

SEQ ID NO: 778073 - RNA, 19 nt, Artificial Sequence
  Description of Artificial Sequence: Synthetic oligonucleotide
  Antisense strand to SEQ ID NO: 778072
aauucaagaaguagcugcu

SEQ ID NO: 778074 - RNA, 19 nt, Artificial Sequence
  Description of Artificial Sequence: Synthetic oligonucleotide
  Sense strand starting at position 2954 of SEQ ID NO: 587249
ucuugaauuucuuuccguu

SEQ ID NO: 778075 - RNA, 19 nt, Artificial Sequence
  Description of Artificial Sequence: Synthetic oligonucleotide
  Antisense strand to SEQ ID NO: 778074
aacggaaagaaauucaaga

SEQ ID NO: 778076 - RNA, 19 nt, Artificial Sequence
  Description of Artificial Sequence: Synthetic oligonucleotide
  Sense strand starting at position 208 of SEQ ID NO: 587250
cgcagucugauugcuuuau

SEQ ID NO: 778077 - RNA, 19 nt, Artificial Sequence
  Description of Artificial Sequence: Synthetic oligonucleotide
  Antisense strand to SEQ ID NO: 778076
auaaagcaaucagacugcg

SEQ ID NO: 778078 - RNA, 19 nt, Artificial Sequence
  Description of Artificial Sequence: Synthetic oligonucleotide
  Sense strand starting at position 212 of SEQ ID NO: 587250
gucugauugcuuuauaaag

SEQ ID NO: 778079 - RNA, 19 nt, Artificial Sequence
  Description of Artificial Sequence: Synthetic oligonucleotide
  Antisense strand to SEQ ID NO: 778078
cuuuauaaagcaaucagac

SEQ ID NO: 778080 - RNA, 19 nt, Artificial Sequence
  Description of Artificial Sequence: Synthetic oligonucleotide
  Sense strand starting at position 299 of SEQ ID NO: 587250
guaaccucuggcuaaauau

SEQ ID NO: 778081 - RNA, 19 nt, Artificial Sequence
  Description of Artificial Sequence: Synthetic oligonucleotide
  Antisense strand to SEQ ID NO: 778080
auauuuagccagagguuac

SEQ ID NO: 778082 - RNA, 19 nt, Artificial Sequence
  Description of Artificial Sequence: Synthetic oligonucleotide
  Sense strand starting at position 560 of SEQ ID NO: 587250
ggcugaacuccugaacuuc

SEQ ID NO: 778083 - RNA, 19 nt, Artificial Sequence
  Description of Artificial Sequence: Synthetic oligonucleotide
  Antisense strand to SEQ ID NO: 778082
gaaguucaggaguucagcc

SEQ ID NO: 778084 - RNA, 19 nt, Artificial Sequence
  Description of Artificial Sequence: Synthetic oligonucleotide
  Sense strand starting at position 569 of SEQ ID NO: 587250
ccugaacuucuucgggaga

SEQ ID NO: 778085 - RNA, 19 nt, Artificial Sequence
  Description of Artificial Sequence: Synthetic oligonucleotide
  Antisense strand to SEQ ID NO: 778084
ucucccgaagaaguucagg

SEQ ID NO: 778086 - RNA, 19 nt, Artificial Sequence
  Description of Artificial Sequence: Synthetic oligonucleotide
  Sense strand starting at position 574 of SEQ ID NO: 587250
acuucuucgggagaaagca

SEQ ID NO: 778087 - RNA, 19 nt, Artificial Sequence
  Description of Artificial Sequence: Synthetic oligonucleotide
  Antisense strand to SEQ ID NO: 778086
ugcuuucucccgaagaagu

SEQ ID NO: 778088 - RNA, 19 nt, Artificial Sequence
  Description of Artificial Sequence: Synthetic oligonucleotide
  Sense strand starting at position 583 of SEQ ID NO: 587250
ggagaaagcaccugaccau

SEQ ID NO: 778089 - RNA, 19 nt, Artificial Sequence
  Description of Artificial Sequence: Synthetic oligonucleotide
  Antisense strand to SEQ ID NO: 778088
auggucaggugcuuucucc

SEQ ID NO: 778090 - RNA, 19 nt, Artificial Sequence
  Description of Artificial Sequence: Synthetic oligonucleotide
  Sense strand starting at position 724 of SEQ ID NO: 587250
gcgaaucacacccagguau

SEQ ID NO: 778091 - RNA, 19 nt, Artificial Sequence
  Description of Artificial Sequence: Synthetic oligonucleotide
  Antisense strand to SEQ ID NO: 778090
auaccugggugugauucgc

SEQ ID NO: 778092 - RNA, 19 nt, Artificial Sequence
  Description of Artificial Sequence: Synthetic oligonucleotide
  Sense strand starting at position 735 of SEQ ID NO: 587250
ccagguauccugcagagac

SEQ ID NO: 778093 - RNA, 19 nt, Artificial Sequence
  Description of Artificial Sequence: Synthetic oligonucleotide
  Antisense strand to SEQ ID NO: 778092
gucucugcaggauaccugg

SEQ ID NO: 778094 - RNA, 19 nt, Artificial Sequence
  Description of Artificial Sequence: Synthetic oligonucleotide
  Sense strand starting at position 737 of SEQ ID NO: 587250
agguauccugcagagacua

SEQ ID NO: 778095 - RNA, 19 nt, Artificial Sequence
  Description of Artificial Sequence: Synthetic oligonucleotide
  Antisense strand to SEQ ID NO: 778094
uagucucugcaggauaccu

SEQ ID NO: 778096 - RNA, 19 nt, Artificial Sequence
  Description of Artificial Sequence: Synthetic oligonucleotide
  Sense strand starting at position 1560 of SEQ ID NO: 587250
ccgaaaugaguugaguuau

SEQ ID NO: 778097 - RNA, 19 nt, Artificial Sequence
  Description of Artificial Sequence: Synthetic oligonucleotide
  Antisense strand to SEQ ID NO: 778096
auaacucaacucauuucgg

SEQ ID NO: 778098 - RNA, 19 nt, Artificial Sequence
  Description of Artificial Sequence: Synthetic oligonucleotide
  Sense strand starting at position 2478 of SEQ ID NO: 587250
uauguucucggugagaaau

SEQ ID NO: 778099 - RNA, 19 nt, Artificial Sequence
  Description of Artificial Sequence: Synthetic oligonucleotide
  Antisense strand to SEQ ID NO: 778098
auuucucaccgagaacaua

SEQ ID NO: 778100 - RNA, 19 nt, Artificial Sequence
  Description of Artificial Sequence: Synthetic oligonucleotide
  Sense strand starting at position 2486 of SEQ ID NO: 587250
cggugagaaaugggcaaua

SEQ ID NO: 778101 - RNA, 19 nt, Artificial Sequence
  Description of Artificial Sequence: Synthetic oligonucleotide
  Antisense strand to SEQ ID NO: 778100
uauugcccauuucucaccg

SEQ ID NO: 778102 - RNA, 19 nt, Artificial Sequence
  Description of Artificial Sequence: Synthetic oligonucleotide
  Sense strand starting at position 2529 of SEQ ID NO: 587250
cgggauguuagugacaaau

SEQ ID NO: 778103 - RNA, 19 nt, Artificial Sequence
  Description of Artificial Sequence: Synthetic oligonucleotide
  Antisense strand to SEQ ID NO: 778102
auuugucacuaacaucccg

SEQ ID NO: 778104 - RNA, 19 nt, Artificial Sequence
  Description of Artificial Sequence: Synthetic oligonucleotide
  Sense strand starting at position 2572 of SEQ ID NO: 587250
gggcaucaaguguggagau

SEQ ID NO: 778105 - RNA, 19 nt, Artificial Sequence
  Description of Artificial Sequence: Synthetic oligonucleotide
  Antisense strand to SEQ ID NO: 778104
aucuccacacuugaugccc

SEQ ID NO: 778106 - RNA, 19 nt, Artificial Sequence
  Description of Artificial Sequence: Synthetic oligonucleotide
  Sense strand starting at position 2574 of SEQ ID NO: 587250
gcaucaaguguggagauca

SEQ ID NO: 778107 - RNA, 19 nt, Artificial Sequence
  Description of Artificial Sequence: Synthetic oligonucleotide
  Antisense strand to SEQ ID NO: 778106
ugaucuccacacuugaugc

SEQ ID NO: 778108 - RNA, 19 nt, Artificial Sequence
  Description of Artificial Sequence: Synthetic oligonucleotide
  Sense strand starting at position 2637 of SEQ ID NO: 587250
ugauuaaggaggugaaguu

SEQ ID NO: 778109 - RNA, 19 nt, Artificial Sequence
  Description of Artificial Sequence: Synthetic oligonucleotide
  Antisense strand to SEQ ID NO: 778108
aacuucaccuccuuaauca

SEQ ID NO: 778110 - RNA, 19 nt, Artificial Sequence
  Description of Artificial Sequence: Synthetic oligonucleotide
  Sense strand starting at position 2647 of SEQ ID NO: 587250
ggugaaguuugagcagaca

SEQ ID NO: 778111 - RNA, 19 nt, Artificial Sequence
  Description of Artificial Sequence: Synthetic oligonucleotide
  Antisense strand to SEQ ID NO: 778110
ugucugcucaaacuucacc

SEQ ID NO: 778112 - RNA, 19 nt, Artificial Sequence
  Description of Artificial Sequence: Synthetic oligonucleotide
  Sense strand starting at position 2650 of SEQ ID NO: 587250
gaaguuugagcagacaguu

SEQ ID NO: 778113 - RNA, 19 nt, Artificial Sequence
  Description of Artificial Sequence: Synthetic oligonucleotide
  Antisense strand to SEQ ID NO: 778112
aacugucugcucaaacuuc

SEQ ID NO: 778114 - RNA, 19 nt, Artificial Sequence
  Description of Artificial Sequence: Synthetic oligonucleotide
  Sense strand starting at position 2722 of SEQ ID NO: 587250
agagacagcagcuguuaaa

SEQ ID NO: 778115 - RNA, 19 nt, Artificial Sequence
  Description of Artificial Sequence: Synthetic oligonucleotide
  Antisense strand to SEQ ID NO: 778114
uuuaacagcugcugucucu

SEQ ID NO: 778116 - RNA, 19 nt, Artificial Sequence
  Description of Artificial Sequence: Synthetic oligonucleotide
  Sense strand starting at position 2868 of SEQ ID NO: 587250
gggcaaauucuguaaggca

SEQ ID NO: 778117 - RNA, 19 nt, Artificial Sequence
  Description of Artificial Sequence: Synthetic oligonucleotide
  Antisense strand to SEQ ID NO: 778116
ugccuuacagaauuugccc

SEQ ID NO: 778118 - RNA, 19 nt, Artificial Sequence
  Description of Artificial Sequence: Synthetic oligonucleotide
  Sense strand starting at position 2935 of SEQ ID NO: 587250
guguuaaauguugaaucua

SEQ ID NO: 778119 - RNA, 19 nt, Artificial Sequence
  Description of Artificial Sequence: Synthetic oligonucleotide
  Antisense strand to SEQ ID NO: 778118
uagauucaacauuuaacac

SEQ ID NO: 778120 - RNA, 19 nt, Artificial Sequence
  Description of Artificial Sequence: Synthetic oligonucleotide
  Sense strand starting at position 2953 of SEQ ID NO: 587250
auggaauuaccuuggagcu

SEQ ID NO: 778121 - RNA, 19 nt, Artificial Sequence
  Description of Artificial Sequence: Synthetic oligonucleotide
  Antisense strand to SEQ ID NO: 778120
agcuccaagguaauuccau

SEQ ID NO: 778122 - RNA, 19 nt, Artificial Sequence
  Description of Artificial Sequence: Synthetic oligonucleotide
  Sense strand starting at position 2954 of SEQ ID NO: 587250
uggaauuaccuuggagcuu

SEQ ID NO: 778123 - RNA, 19 nt, Artificial Sequence
  Description of Artificial Sequence: Synthetic oligonucleotide
  Antisense strand to SEQ ID NO: 778122
aagcuccaagguaauucca

SEQ ID NO: 778124 - RNA, 19 nt, Artificial Sequence
  Description of Artificial Sequence: Synthetic oligonucleotide
  Sense strand starting at position 3030 of SEQ ID NO: 587250
uagcuacuugauuggaaga

SEQ ID NO: 778125 - RNA, 19 nt, Artificial Sequence
  Description of Artificial Sequence: Synthetic oligonucleotide
  Antisense strand to SEQ ID NO: 778124
ucuuccaaucaaguagcua

SEQ ID NO: 778126 - RNA, 19 nt, Artificial Sequence
  Description of Artificial Sequence: Synthetic oligonucleotide
  Sense strand starting at position 3031 of SEQ ID NO: 587250
agcuacuugauuggaagau

SEQ ID NO: 778127 - RNA, 19 nt, Artificial Sequence
  Description of Artificial Sequence: Synthetic oligonucleotide
  Antisense strand to SEQ ID NO: 778126
aucuuccaaucaaguagcu

SEQ ID NO: 778128 - RNA, 19 nt, Artificial Sequence
  Description of Artificial Sequence: Synthetic oligonucleotide
  Sense strand starting at position 3108 of SEQ ID NO: 587250
ccuacuggaggauguuaau

SEQ ID NO: 778129 - RNA, 19 nt, Artificial Sequence
  Description of Artificial Sequence: Synthetic oligonucleotide
  Antisense strand to SEQ ID NO: 778128
auuaacauccuccaguagg

SEQ ID NO: 778130 - RNA, 19 nt, Artificial Sequence
  Description of Artificial Sequence: Synthetic oligonucleotide
  Sense strand starting at position 3114 of SEQ ID NO: 587250
ggaggauguuaauugguga

SEQ ID NO: 778131 - RNA, 19 nt, Artificial Sequence
  Description of Artificial Sequence: Synthetic oligonucleotide
  Antisense strand to SEQ ID NO: 778130
ucaccaauuaacauccucc

SEQ ID NO: 778132 - RNA, 19 nt, Artificial Sequence
  Description of Artificial Sequence: Synthetic oligonucleotide
  Sense strand starting at position 3115 of SEQ ID NO: 587250
gaggauguuaauuggugau

SEQ ID NO: 778133 - RNA, 19 nt, Artificial Sequence
  Description of Artificial Sequence: Synthetic oligonucleotide
  Antisense strand to SEQ ID NO: 778132
aucaccaauuaacauccuc

SEQ ID NO: 778134 - RNA, 19 nt, Artificial Sequence
  Description of Artificial Sequence: Synthetic oligonucleotide
  Sense strand starting at position 3117 of SEQ ID NO: 587250
ggauguuaauuggugauua

SEQ ID NO: 778135 - RNA, 19 nt, Artificial Sequence
  Description of Artificial Sequence: Synthetic oligonucleotide
  Antisense strand to SEQ ID NO: 778134
uaaucaccaauuaacaucc

SEQ ID NO: 778136 - RNA, 19 nt, Artificial Sequence
  Description of Artificial Sequence: Synthetic oligonucleotide
  Sense strand starting at position 3200 of SEQ ID NO: 587250
accacuuucgcagaacuau

SEQ ID NO: 778137 - RNA, 19 nt, Artificial Sequence
  Description of Artificial Sequence: Synthetic oligonucleotide
  Antisense strand to SEQ ID NO: 778136
auaguucugcgaaaguggu

SEQ ID NO: 778138 - RNA, 19 nt, Artificial Sequence
  Description of Artificial Sequence: Synthetic oligonucleotide
  Sense strand starting at position 3460 of SEQ ID NO: 587250
gugcaaaugcaugauuaug

SEQ ID NO: 778139 - RNA, 19 nt, Artificial Sequence
  Description of Artificial Sequence: Synthetic oligonucleotide
  Antisense strand to SEQ ID NO: 778138
cauaaucaugcauuugcac

SEQ ID NO: 778140 - RNA, 19 nt, Artificial Sequence
  Description of Artificial Sequence: Synthetic oligonucleotide
  Sense strand starting at position 3469 of SEQ ID NO: 587250
caugauuauguccacggaa

SEQ ID NO: 778141 - RNA, 19 nt, Artificial Sequence
  Description of Artificial Sequence: Synthetic oligonucleotide
  Antisense strand to SEQ ID NO: 778140
uuccguggacauaaucaug

SEQ ID NO: 778142 - RNA, 19 nt, Artificial Sequence
  Description of Artificial Sequence: Synthetic oligonucleotide
  Sense strand starting at position 3471 of SEQ ID NO: 587250
ugauuauguccacggaaag

SEQ ID NO: 778143 - RNA, 19 nt, Artificial Sequence
  Description of Artificial Sequence: Synthetic oligonucleotide
  Antisense strand to SEQ ID NO: 778142
cuuuccguggacauaauca

SEQ ID NO: 778144 - RNA, 19 nt, Artificial Sequence
  Description of Artificial Sequence: Synthetic oligonucleotide
  Sense strand starting at position 3472 of SEQ ID NO: 587250
gauuauguccacggaaagg

SEQ ID NO: 778145 - RNA, 19 nt, Artificial Sequence
  Description of Artificial Sequence: Synthetic oligonucleotide
  Antisense strand to SEQ ID NO: 778144
ccuuuccguggacauaauc

SEQ ID NO: 778146 - RNA, 19 nt, Artificial Sequence
  Description of Artificial Sequence: Synthetic oligonucleotide
  Sense strand starting at position 3517 of SEQ ID NO: 587250
aguuuaagacuuggauaac

SEQ ID NO: 778147 - RNA, 19 nt, Artificial Sequence
  Description of Artificial Sequence: Synthetic oligonucleotide
  Antisense strand to SEQ ID NO: 778146
guuauccaagucuuaaacu

SEQ ID NO: 778148 - RNA, 19 nt, Artificial Sequence
  Description of Artificial Sequence: Synthetic oligonucleotide
  Sense strand starting at position 3555 of SEQ ID NO: 587250
cgggauauguaaucagauu

SEQ ID NO: 778149 - RNA, 19 nt, Artificial Sequence
  Description of Artificial Sequence: Synthetic oligonucleotide
  Antisense strand to SEQ ID NO: 778148
aaucugauuacauaucccg

SEQ ID NO: 778150 - RNA, 19 nt, Artificial Sequence
  Description of Artificial Sequence: Synthetic oligonucleotide
  Sense strand starting at position 3564 of SEQ ID NO: 587250
uaaucagauuguuuaugga

SEQ ID NO: 778151 - RNA, 19 nt, Artificial Sequence
  Description of Artificial Sequence: Synthetic oligonucleotide
  Antisense strand to SEQ ID NO: 778150
uccauaaacaaucugauua

SEQ ID NO: 778152 - RNA, 19 nt, Artificial Sequence
  Description of Artificial Sequence: Synthetic oligonucleotide
  Sense strand starting at position 3924 of SEQ ID NO: 587250
gagcucaaacaauggguaa

SEQ ID NO: 778153 - RNA, 19 nt, Artificial Sequence
  Description of Artificial Sequence: Synthetic oligonucleotide
  Antisense strand to SEQ ID NO: 778152
uuacccauuguuugagcuc

SEQ ID NO: 778154 - RNA, 19 nt, Artificial Sequence
  Description of Artificial Sequence: Synthetic oligonucleotide
  Sense strand starting at position 3960 of SEQ ID NO: 587250
acuguauugagcuagcuga

SEQ ID NO: 778155 - RNA, 19 nt, Artificial Sequence
  Description of Artificial Sequence: Synthetic oligonucleotide
  Antisense strand to SEQ ID NO: 778154
ucagcuagcucaauacagu

SEQ ID NO: 778156 - RNA, 19 nt, Artificial Sequence
  Description of Artificial Sequence: Synthetic oligonucleotide
  Sense strand starting at position 61 of SEQ ID NO: 587251
accuacgucggauaagauu

SEQ ID NO: 778157 - RNA, 19 nt, Artificial Sequence
  Description of Artificial Sequence: Synthetic oligonucleotide
  Antisense strand to SEQ ID NO: 778156
aaucuuauccgacguaggu

SEQ ID NO: 778158 - RNA, 19 nt, Artificial Sequence
  Description of Artificial Sequence: Synthetic oligonucleotide
  Sense strand starting at position 441 of SEQ ID NO: 587251
gggcccugacaguaucaaa

SEQ ID NO: 778159 - RNA, 19 nt, Artificial Sequence
  Description of Artificial Sequence: Synthetic oligonucleotide
  Antisense strand to SEQ ID NO: 778158
uuugauacugucagggccc

SEQ ID NO: 778160 - RNA, 19 nt, Artificial Sequence
  Description of Artificial Sequence: Synthetic oligonucleotide
  Sense strand starting at position 460 of SEQ ID NO: 587251
guaucaaagucucucccaa

SEQ ID NO: 778161 - RNA, 19 nt, Artificial Sequence
  Description of Artificial Sequence: Synthetic oligonucleotide
  Antisense strand to SEQ ID NO: 778160
uugggagagacuuugauac

SEQ ID NO: 778162 - RNA, 19 nt, Artificial Sequence
  Description of Artificial Sequence: Synthetic oligonucleotide
  Sense strand starting at position 565 of SEQ ID NO: 587251
auacauguucuguguauuu

SEQ ID NO: 778163 - RNA, 19 nt, Artificial Sequence
  Description of Artificial Sequence: Synthetic oligonucleotide
  Antisense strand to SEQ ID NO: 778162
aaauacacagaacauguau

SEQ ID NO: 778164 - RNA, 19 nt, Artificial Sequence
  Description of Artificial Sequence: Synthetic oligonucleotide
  Sense strand starting at position 602 of SEQ ID NO: 587251
uguauauacuauucuggau

SEQ ID NO: 778165 - RNA, 19 nt, Artificial Sequence
  Description of Artificial Sequence: Synthetic oligonucleotide
  Antisense strand to SEQ ID NO: 778164
auccagaauaguauauaca

SEQ ID NO: 778166 - RNA, 19 nt, Artificial Sequence
  Description of Artificial Sequence: Synthetic oligonucleotide
  Sense strand starting at position 836 of SEQ ID NO: 587251
cgcagucugauugcuuuau

SEQ ID NO: 778167 - RNA, 19 nt, Artificial Sequence
  Description of Artificial Sequence: Synthetic oligonucleotide
  Antisense strand to SEQ ID NO: 778166
auaaagcaaucagacugcg

SEQ ID NO: 778168 - RNA, 19 nt, Artificial Sequence
  Description of Artificial Sequence: Synthetic oligonucleotide
  Sense strand starting at position 840 of SEQ ID NO: 587251
gucugauugcuuuauaaag

SEQ ID NO: 778169 - RNA, 19 nt, Artificial Sequence
  Description of Artificial Sequence: Synthetic oligonucleotide
  Antisense strand to SEQ ID NO: 778168
cuuuauaaagcaaucagac

SEQ ID NO: 778170 - RNA, 19 nt, Artificial Sequence
  Description of Artificial Sequence: Synthetic oligonucleotide
  Sense strand starting at position 926 of SEQ ID NO: 587251
uguaaccucuggcuaaaua

SEQ ID NO: 778171 - RNA, 19 nt, Artificial Sequence
  Description of Artificial Sequence: Synthetic oligonucleotide
  Antisense strand to SEQ ID NO: 778170
uauuuagccagagguuaca

SEQ ID NO: 778172 - RNA, 19 nt, Artificial Sequence
  Description of Artificial Sequence: Synthetic oligonucleotide
  Sense strand starting at position 927 of SEQ ID NO: 587251
guaaccucuggcuaaauau

SEQ ID NO: 778173 - RNA, 19 nt, Artificial Sequence
  Description of Artificial Sequence: Synthetic oligonucleotide
  Antisense strand to SEQ ID NO: 778172
auauuuagccagagguuac

SEQ ID NO: 778174 - RNA, 19 nt, Artificial Sequence
  Description of Artificial Sequence: Synthetic oligonucleotide
  Sense strand starting at position 1188 of SEQ ID NO: 587251
ggcugaacuccugaacuuc

SEQ ID NO: 778175 - RNA, 19 nt, Artificial Sequence
  Description of Artificial Sequence: Synthetic oligonucleotide
  Antisense strand to SEQ ID NO: 778174
gaaguucaggaguucagcc

SEQ ID NO: 778176 - RNA, 19 nt, Artificial Sequence
  Description of Artificial Sequence: Synthetic oligonucleotide
  Sense strand starting at position 1197 of SEQ ID NO: 587251
ccugaacuucuucgggaga

SEQ ID NO: 778177 - RNA, 19 nt, Artificial Sequence
  Description of Artificial Sequence: Synthetic oligonucleotide
  Antisense strand to SEQ ID NO: 778176
ucucccgaagaaguucagg

SEQ ID NO: 778178 - RNA, 19 nt, Artificial Sequence
  Description of Artificial Sequence: Synthetic oligonucleotide
  Sense strand starting at position 1202 of SEQ ID NO: 587251
acuucuucgggagaaagca

SEQ ID NO: 778179 - RNA, 19 nt, Artificial Sequence
  Description of Artificial Sequence: Synthetic oligonucleotide
  Antisense strand to SEQ ID NO: 778178
ugcuuucucccgaagaagu

SEQ ID NO: 778180 - RNA, 19 nt, Artificial Sequence
  Description of Artificial Sequence: Synthetic oligonucleotide
  Sense strand starting at position 1211 of SEQ ID NO: 587251
ggagaaagcaccugaccau

SEQ ID NO: 778181 - RNA, 19 nt, Artificial Sequence
  Description of Artificial Sequence: Synthetic oligonucleotide
  Antisense strand to SEQ ID NO: 778180
auggucaggugcuuucucc

SEQ ID NO: 778182 - RNA, 19 nt, Artificial Sequence
  Description of Artificial Sequence: Synthetic oligonucleotide
  Sense strand starting at position 1352 of SEQ ID NO: 587251
gcgaaucacacccagguau

SEQ ID NO: 778183 - RNA, 19 nt, Artificial Sequence
  Description of Artificial Sequence: Synthetic oligonucleotide
  Antisense strand to SEQ ID NO: 778182
auaccugggugugauucgc

SEQ ID NO: 778184 - RNA, 19 nt, Artificial Sequence
  Description of Artificial Sequence: Synthetic oligonucleotide
  Sense strand starting at position 1363 of SEQ ID NO: 587251
ccagguauccugcagagac

SEQ ID NO: 778185 - RNA, 19 nt, Artificial Sequence
  Description of Artificial Sequence: Synthetic oligonucleotide
  Antisense strand to SEQ ID NO: 778184
gucucugcaggauaccugg

SEQ ID NO: 778186 - RNA, 19 nt, Artificial Sequence
  Description of Artificial Sequence: Synthetic oligonucleotide
  Sense strand starting at position 1365 of SEQ ID NO: 587251
agguauccugcagagacua

SEQ ID NO: 778187 - RNA, 19 nt, Artificial Sequence
  Description of Artificial Sequence: Synthetic oligonucleotide
  Antisense strand to SEQ ID NO: 778186
uagucucugcaggauaccu

SEQ ID NO: 778188 - RNA, 19 nt, Artificial Sequence
  Description of Artificial Sequence: Synthetic oligonucleotide
  Sense strand starting at position 2187 of SEQ ID NO: 587251
cccgaaaugaguugaguua

SEQ ID NO: 778189 - RNA, 19 nt, Artificial Sequence
  Description of Artificial Sequence: Synthetic oligonucleotide
  Antisense strand to SEQ ID NO: 778188
uaacucaacucauuucggg

SEQ ID NO: 778190 - RNA, 19 nt, Artificial Sequence
  Description of Artificial Sequence: Synthetic oligonucleotide
  Sense strand starting at position 2188 of SEQ ID NO: 587251
ccgaaaugaguugaguuau

SEQ ID NO: 778191 - RNA, 19 nt, Artificial Sequence
  Description of Artificial Sequence: Synthetic oligonucleotide
  Antisense strand to SEQ ID NO: 778190
auaacucaacucauuucgg

SEQ ID NO: 778192 - RNA, 19 nt, Artificial Sequence
  Description of Artificial Sequence: Synthetic oligonucleotide
  Sense strand starting at position 3106 of SEQ ID NO: 587251
uauguucucggugagaaau

SEQ ID NO: 778193 - RNA, 19 nt, Artificial Sequence
  Description of Artificial Sequence: Synthetic oligonucleotide
  Antisense strand to SEQ ID NO: 778192
auuucucaccgagaacaua

SEQ ID NO: 778194 - RNA, 19 nt, Artificial Sequence
  Description of Artificial Sequence: Synthetic oligonucleotide
  Sense strand starting at position 3114 of SEQ ID NO: 587251
cggugagaaaugggcaaua

SEQ ID NO: 778195 - RNA, 19 nt, Artificial Sequence
  Description of Artificial Sequence: Synthetic oligonucleotide
  Antisense strand to SEQ ID NO: 778194
uauugcccauuucucaccg

SEQ ID NO: 778196 - RNA, 19 nt, Artificial Sequence
  Description of Artificial Sequence: Synthetic oligonucleotide
  Sense strand starting at position 3150 of SEQ ID NO: 587251
aauuauacgggauguuagu

SEQ ID NO: 778197 - RNA, 19 nt, Artificial Sequence
  Description of Artificial Sequence: Synthetic oligonucleotide
  Antisense strand to SEQ ID NO: 778196
acuaacaucccguauaauu

SEQ ID NO: 778198 - RNA, 19 nt, Artificial Sequence
  Description of Artificial Sequence: Synthetic oligonucleotide
  Sense strand starting at position 3157 of SEQ ID NO: 587251
cgggauguuagugacaaau

SEQ ID NO: 778199 - RNA, 19 nt, Artificial Sequence
  Description of Artificial Sequence: Synthetic oligonucleotide
  Antisense strand to SEQ ID NO: 778198
auuugucacuaacaucccg

SEQ ID NO: 778200 - RNA, 19 nt, Artificial Sequence
  Description of Artificial Sequence: Synthetic oligonucleotide
  Sense strand starting at position 3200 of SEQ ID NO: 587251
gggcaucaaguguggagau

SEQ ID NO: 778201 - RNA, 19 nt, Artificial Sequence
  Description of Artificial Sequence: Synthetic oligonucleotide
  Antisense strand to SEQ ID NO: 778200
aucuccacacuugaugccc

SEQ ID NO: 778202 - RNA, 19 nt, Artificial Sequence
  Description of Artificial Sequence: Synthetic oligonucleotide
  Sense strand starting at position 3202 of SEQ ID NO: 587251
gcaucaaguguggagauca

SEQ ID NO: 778203 - RNA, 19 nt, Artificial Sequence
  Description of Artificial Sequence: Synthetic oligonucleotide
  Antisense strand to SEQ ID NO: 778202
ugaucuccacacuugaugc

SEQ ID NO: 778204 - RNA, 19 nt, Artificial Sequence
  Description of Artificial Sequence: Synthetic oligonucleotide
  Sense strand starting at position 3265 of SEQ ID NO: 587251
ugauuaaggaggugaaguu

SEQ ID NO: 778205 - RNA, 19 nt, Artificial Sequence
  Description of Artificial Sequence: Synthetic oligonucleotide
  Antisense strand to SEQ ID NO: 778204
aacuucaccuccuuaauca

SEQ ID NO: 778206 - RNA, 19 nt, Artificial Sequence
  Description of Artificial Sequence: Synthetic oligonucleotide
  Sense strand starting at position 3275 of SEQ ID NO: 587251
ggugaaguuugagcagaca

SEQ ID NO: 778207 - RNA, 19 nt, Artificial Sequence
  Description of Artificial Sequence: Synthetic oligonucleotide
  Antisense strand to SEQ ID NO: 778206
ugucugcucaaacuucacc

SEQ ID NO: 778208 - RNA, 19 nt, Artificial Sequence
  Description of Artificial Sequence: Synthetic oligonucleotide
  Sense strand starting at position 3278 of SEQ ID NO: 587251
gaaguuugagcagacaguu

SEQ ID NO: 778209 - RNA, 19 nt, Artificial Sequence
  Description of Artificial Sequence: Synthetic oligonucleotide
  Antisense strand to SEQ ID NO: 778208
aacugucugcucaaacuuc

SEQ ID NO: 778210 - RNA, 19 nt, Artificial Sequence
  Description of Artificial Sequence: Synthetic oligonucleotide
  Sense strand starting at position 3350 of SEQ ID NO: 587251
agagacagcagcuguuaaa

SEQ ID NO: 778211 - RNA, 19 nt, Artificial Sequence
  Description of Artificial Sequence: Synthetic oligonucleotide
  Antisense strand to SEQ ID NO: 778210
uuuaacagcugcugucucu

SEQ ID NO: 778212 - RNA, 19 nt, Artificial Sequence
  Description of Artificial Sequence: Synthetic oligonucleotide
  Sense strand starting at position 3496 of SEQ ID NO: 587251
gggcaaauucuguaaggca

SEQ ID NO: 778213 - RNA, 19 nt, Artificial Sequence
  Description of Artificial Sequence: Synthetic oligonucleotide
  Antisense strand to SEQ ID NO: 778212
ugccuuacagaauuugccc

SEQ ID NO: 778214 - RNA, 19 nt, Artificial Sequence
  Description of Artificial Sequence: Synthetic oligonucleotide
  Sense strand starting at position 3563 of SEQ ID NO: 587251
guguuaaauguugaaucua

SEQ ID NO: 778215 - RNA, 19 nt, Artificial Sequence
  Description of Artificial Sequence: Synthetic oligonucleotide
  Antisense strand to SEQ ID NO: 778214
uagauucaacauuuaacac

SEQ ID NO: 778216 - RNA, 19 nt, Artificial Sequence
  Description of Artificial Sequence: Synthetic oligonucleotide
  Sense strand starting at position 3581 of SEQ ID NO: 587251
auggaauuaccuuggagcu

SEQ ID NO: 778217 - RNA, 19 nt, Artificial Sequence
  Description of Artificial Sequence: Synthetic oligonucleotide
  Antisense strand to SEQ ID NO: 778216
agcuccaagguaauuccau

SEQ ID NO: 778218 - RNA, 19 nt, Artificial Sequence
  Description of Artificial Sequence: Synthetic oligonucleotide
  Sense strand starting at position 3582 of SEQ ID NO: 587251
uggaauuaccuuggagcuu

SEQ ID NO: 778219 - RNA, 19 nt, Artificial Sequence
  Description of Artificial Sequence: Synthetic oligonucleotide
  Antisense strand to SEQ ID NO: 778218
aagcuccaagguaauucca

SEQ ID NO: 778220 - RNA, 19 nt, Artificial Sequence
  Description of Artificial Sequence: Synthetic oligonucleotide
  Sense strand starting at position 3658 of SEQ ID NO: 587251
uagcuacuugauuggaaga

SEQ ID NO: 778221 - RNA, 19 nt, Artificial Sequence
  Description of Artificial Sequence: Synthetic oligonucleotide
  Antisense strand to SEQ ID NO: 778220
ucuuccaaucaaguagcua

SEQ ID NO: 778222 - RNA, 19 nt, Artificial Sequence
  Description of Artificial Sequence: Synthetic oligonucleotide
  Sense strand starting at position 3659 of SEQ ID NO: 587251
agcuacuugauuggaagau

SEQ ID NO: 778223 - RNA, 19 nt, Artificial Sequence
  Description of Artificial Sequence: Synthetic oligonucleotide
  Antisense strand to SEQ ID NO: 778222
aucuuccaaucaaguagcu

SEQ ID NO: 778224 - RNA, 19 nt, Artificial Sequence
  Description of Artificial Sequence: Synthetic oligonucleotide
  Sense strand starting at position 3736 of SEQ ID NO: 587251
ccuacuggaggauguuaau

SEQ ID NO: 778225 - RNA, 19 nt, Artificial Sequence
  Description of Artificial Sequence: Synthetic oligonucleotide
  Antisense strand to SEQ ID NO: 778224
auuaacauccuccaguagg

SEQ ID NO: 778226 - RNA, 19 nt, Artificial Sequence
  Description of Artificial Sequence: Synthetic oligonucleotide
  Sense strand starting at position 3742 of SEQ ID NO: 587251
ggaggauguuaauugguga

SEQ ID NO: 778227 - RNA, 19 nt, Artificial Sequence
  Description of Artificial Sequence: Synthetic oligonucleotide
  Antisense strand to SEQ ID NO: 778226
ucaccaauuaacauccucc

SEQ ID NO: 778228 - RNA, 19 nt, Artificial Sequence
  Description of Artificial Sequence: Synthetic oligonucleotide
  Sense strand starting at position 3743 of SEQ ID NO: 587251
gaggauguuaauuggugau

SEQ ID NO: 778229 - RNA, 19 nt, Artificial Sequence
  Description of Artificial Sequence: Synthetic oligonucleotide
  Antisense strand to SEQ ID NO: 778228
aucaccaauuaacauccuc

SEQ ID NO: 778230 - RNA, 19 nt, Artificial Sequence
  Description of Artificial Sequence: Synthetic oligonucleotide
  Sense strand starting at position 3745 of SEQ ID NO: 587251
ggauguuaauuggugauua

SEQ ID NO: 778231 - RNA, 19 nt, Artificial Sequence
  Description of Artificial Sequence: Synthetic oligonucleotide
  Antisense strand to SEQ ID NO: 778230
uaaucaccaauuaacaucc

SEQ ID NO: 778232 - RNA, 19 nt, Artificial Sequence
  Description of Artificial Sequence: Synthetic oligonucleotide
  Sense strand starting at position 3749 of SEQ ID NO: 587251
guuaauuggugauuaggua

SEQ ID NO: 778233 - RNA, 19 nt, Artificial Sequence
  Description of Artificial Sequence: Synthetic oligonucleotide
  Antisense strand to SEQ ID NO: 778232
uaccuaaucaccaauuaac

SEQ ID NO: 778234 - RNA, 19 nt, Artificial Sequence
  Description of Artificial Sequence: Synthetic oligonucleotide
  Sense strand starting at position 3828 of SEQ ID NO: 587251
accacuuucgcagaacuau

SEQ ID NO: 778235 - RNA, 19 nt, Artificial Sequence
  Description of Artificial Sequence: Synthetic oligonucleotide
  Antisense strand to SEQ ID NO: 778234
auaguucugcgaaaguggu

SEQ ID NO: 778236 - RNA, 19 nt, Artificial Sequence
  Description of Artificial Sequence: Synthetic oligonucleotide
  Sense strand starting at position 198 of SEQ ID NO: 587252
ggcugcuuagcucacaaga

SEQ ID NO: 778237 - RNA, 19 nt, Artificial Sequence
  Description of Artificial Sequence: Synthetic oligonucleotide
  Antisense strand to SEQ ID NO: 778236
ucuugugagcuaagcagcc

SEQ ID NO: 778238 - RNA, 19 nt, Artificial Sequence
  Description of Artificial Sequence: Synthetic oligonucleotide
  Sense strand starting at position 256 of SEQ ID NO: 587252
gguacauuaugugcuaaga

SEQ ID NO: 778239 - RNA, 19 nt, Artificial Sequence
  Description of Artificial Sequence: Synthetic oligonucleotide
  Antisense strand to SEQ ID NO: 778238
ucuuagcacauaauguacc

SEQ ID NO: 778240 - RNA, 19 nt, Artificial Sequence
  Description of Artificial Sequence: Synthetic oligonucleotide
  Sense strand starting at position 383 of SEQ ID NO: 587252
guagcugaaucuccaaauc

SEQ ID NO: 778241 - RNA, 19 nt, Artificial Sequence
  Description of Artificial Sequence: Synthetic oligonucleotide
  Antisense strand to SEQ ID NO: 778240
gauuuggagauucagcuac

SEQ ID NO: 778242 - RNA, 19 nt, Artificial Sequence
  Description of Artificial Sequence: Synthetic oligonucleotide
  Sense strand starting at position 488 of SEQ ID NO: 587252
gcagcauuaacaggacaga

SEQ ID NO: 778243 - RNA, 19 nt, Artificial Sequence
  Description of Artificial Sequence: Synthetic oligonucleotide
  Antisense strand to SEQ ID NO: 778242
ucuguccuguuaaugcugc

SEQ ID NO: 778244 - RNA, 19 nt, Artificial Sequence
  Description of Artificial Sequence: Synthetic oligonucleotide
  Sense strand starting at position 528 of SEQ ID NO: 587252
aaggcugugacgcaaagaa

SEQ ID NO: 778245 - RNA, 19 nt, Artificial Sequence
  Description of Artificial Sequence: Synthetic oligonucleotide
  Antisense strand to SEQ ID NO: 778244
uucuuugcgucacagccuu

SEQ ID NO: 778246 - RNA, 19 nt, Artificial Sequence
  Description of Artificial Sequence: Synthetic oligonucleotide
  Sense strand starting at position 603 of SEQ ID NO: 587252
ugggacugagccugaagaa

SEQ ID NO: 778247 - RNA, 19 nt, Artificial Sequence
  Description of Artificial Sequence: Synthetic oligonucleotide
  Antisense strand to SEQ ID NO: 778246
uucuucaggcucaguccca

SEQ ID NO: 778248 - RNA, 19 nt, Artificial Sequence
  Description of Artificial Sequence: Synthetic oligonucleotide
  Sense strand starting at position 612 of SEQ ID NO: 587252
gccugaagaaguggaaacu

SEQ ID NO: 778249 - RNA, 19 nt, Artificial Sequence
  Description of Artificial Sequence: Synthetic oligonucleotide
  Antisense strand to SEQ ID NO: 778248
aguuuccacuucuucaggc

SEQ ID NO: 778250 - RNA, 19 nt, Artificial Sequence
  Description of Artificial Sequence: Synthetic oligonucleotide
  Sense strand starting at position 809 of SEQ ID NO: 587252
ugggaugaagguugcaaua

SEQ ID NO: 778251 - RNA, 19 nt, Artificial Sequence
  Description of Artificial Sequence: Synthetic oligonucleotide
  Antisense strand to SEQ ID NO: 778250
uauugcaaccuucauccca

SEQ ID NO: 778252 - RNA, 19 nt, Artificial Sequence
  Description of Artificial Sequence: Synthetic oligonucleotide
  Sense strand starting at position 827 of SEQ ID NO: 587252
acagauaacccuggccuaa

SEQ ID NO: 778253 - RNA, 19 nt, Artificial Sequence
  Description of Artificial Sequence: Synthetic oligonucleotide
  Antisense strand to SEQ ID NO: 778252
uuaggccaggguuaucugu

SEQ ID NO: 778254 - RNA, 19 nt, Artificial Sequence
  Description of Artificial Sequence: Synthetic oligonucleotide
  Sense strand starting at position 972 of SEQ ID NO: 587252
ugcuuuccugacgaguaca

SEQ ID NO: 778255 - RNA, 19 nt, Artificial Sequence
  Description of Artificial Sequence: Synthetic oligonucleotide
  Antisense strand to SEQ ID NO: 778254
uguacucgucaggaaagca

SEQ ID NO: 778256 - RNA, 19 nt, Artificial Sequence
  Description of Artificial Sequence: Synthetic oligonucleotide
  Sense strand starting at position 993 of SEQ ID NO: 587252
uaaaguugaggucaaguua

SEQ ID NO: 778257 - RNA, 19 nt, Artificial Sequence
  Description of Artificial Sequence: Synthetic oligonucleotide
  Antisense strand to SEQ ID NO: 778256
uaacuugaccucaacuuua

SEQ ID NO: 778258 - RNA, 19 nt, Artificial Sequence
  Description of Artificial Sequence: Synthetic oligonucleotide
  Sense strand starting at position 1002 of SEQ ID NO: 587252
ggucaaguuaacgaugaug

SEQ ID NO: 778259 - RNA, 19 nt, Artificial Sequence
  Description of Artificial Sequence: Synthetic oligonucleotide
  Antisense strand to SEQ ID NO: 778258
caucaucguuaacuugacc

SEQ ID NO: 778260 - RNA, 19 nt, Artificial Sequence
  Description of Artificial Sequence: Synthetic oligonucleotide
  Sense strand starting at position 1004 of SEQ ID NO: 587252
ucaaguuaacgaugauggu

SEQ ID NO: 778261 - RNA, 19 nt, Artificial Sequence
  Description of Artificial Sequence: Synthetic oligonucleotide
  Antisense strand to SEQ ID NO: 778260
accaucaucguuaacuuga

SEQ ID NO: 778262 - RNA, 19 nt, Artificial Sequence
  Description of Artificial Sequence: Synthetic oligonucleotide
  Sense strand starting at position 1083 of SEQ ID NO: 587252
uuuagaagugcccaagaug

SEQ ID NO: 778263 - RNA, 19 nt, Artificial Sequence
  Description of Artificial Sequence: Synthetic oligonucleotide
  Antisense strand to SEQ ID NO: 778262
caucuugggcacuucuaaa

SEQ ID NO: 778264 - RNA, 19 nt, Artificial Sequence
  Description of Artificial Sequence: Synthetic oligonucleotide
  Sense strand starting at position 1102 of SEQ ID NO: 587252
aaccucuugggauguauca

SEQ ID NO: 778265 - RNA, 19 nt, Artificial Sequence
  Description of Artificial Sequence: Synthetic oligonucleotide
  Antisense strand to SEQ ID NO: 778264
ugauacaucccaagagguu

SEQ ID NO: 778266 - RNA, 19 nt, Artificial Sequence
  Description of Artificial Sequence: Synthetic oligonucleotide
  Sense strand starting at position 2115 of SEQ ID NO: 587252
ucggaauccugacuaagca

SEQ ID NO: 778267 - RNA, 19 nt, Artificial Sequence
  Description of Artificial Sequence: Synthetic oligonucleotide
  Antisense strand to SEQ ID NO: 778266
ugcuuagucaggauuccga

SEQ ID NO: 778268 - RNA, 19 nt, Artificial Sequence
  Description of Artificial Sequence: Synthetic oligonucleotide
  Sense strand starting at position 2116 of SEQ ID NO: 587252
cggaauccugacuaagcau

SEQ ID NO: 778269 - RNA, 19 nt, Artificial Sequence
  Description of Artificial Sequence: Synthetic oligonucleotide
  Antisense strand to SEQ ID NO: 778268
augcuuagucaggauuccg

SEQ ID NO: 778270 - RNA, 19 nt, Artificial Sequence
  Description of Artificial Sequence: Synthetic oligonucleotide
  Sense strand starting at position 2623 of SEQ ID NO: 587252
ucauguuaccuugaguaac

SEQ ID NO: 778271 - RNA, 19 nt, Artificial Sequence
  Description of Artificial Sequence: Synthetic oligonucleotide
  Antisense strand to SEQ ID NO: 778270
guuacucaagguaacauga

SEQ ID NO: 778272 - RNA, 19 nt, Artificial Sequence
  Description of Artificial Sequence: Synthetic oligonucleotide
  Sense strand starting at position 2635 of SEQ ID NO: 587252
gaguaacucgcucaacuuu

SEQ ID NO: 778273 - RNA, 19 nt, Artificial Sequence
  Description of Artificial Sequence: Synthetic oligonucleotide
  Antisense strand to SEQ ID NO: 778272
aaaguugagcgaguuacuc

SEQ ID NO: 778274 - RNA, 19 nt, Artificial Sequence
  Description of Artificial Sequence: Synthetic oligonucleotide
  Sense strand starting at position 2715 of SEQ ID NO: 587252
gaagcugaauguuuagaca

SEQ ID NO: 778275 - RNA, 19 nt, Artificial Sequence
  Description of Artificial Sequence: Synthetic oligonucleotide
  Antisense strand to SEQ ID NO: 778274
ugucuaaacauucagcuuc

SEQ ID NO: 778276 - RNA, 19 nt, Artificial Sequence
  Description of Artificial Sequence: Synthetic oligonucleotide
  Sense strand starting at position 2836 of SEQ ID NO: 587252
guauauugugcauaucuau

SEQ ID NO: 778277 - RNA, 19 nt, Artificial Sequence
  Description of Artificial Sequence: Synthetic oligonucleotide
  Antisense strand to SEQ ID NO: 778276
auagauaugcacaauauac

SEQ ID NO: 778278 - RNA, 19 nt, Artificial Sequence
  Description of Artificial Sequence: Synthetic oligonucleotide
  Sense strand starting at position 2875 of SEQ ID NO: 587252
acaguagucuuucuuuaga

SEQ ID NO: 778279 - RNA, 19 nt, Artificial Sequence
  Description of Artificial Sequence: Synthetic oligonucleotide
  Antisense strand to SEQ ID NO: 778278
ucuaaagaaagacuacugu

SEQ ID NO: 778280 - RNA, 19 nt, Artificial Sequence
  Description of Artificial Sequence: Synthetic oligonucleotide
  Sense strand starting at position 2904 of SEQ ID NO: 587252
ccuccuaaucauuggguga

SEQ ID NO: 778281 - RNA, 19 nt, Artificial Sequence
  Description of Artificial Sequence: Synthetic oligonucleotide
  Antisense strand to SEQ ID NO: 778280
ucacccaaugauuaggagg

SEQ ID NO: 778282 - RNA, 19 nt, Artificial Sequence
  Description of Artificial Sequence: Synthetic oligonucleotide
  Sense strand starting at position 2908 of SEQ ID NO: 587252
cuaaucauugggugauugu

SEQ ID NO: 778283 - RNA, 19 nt, Artificial Sequence
  Description of Artificial Sequence: Synthetic oligonucleotide
  Antisense strand to SEQ ID NO: 778282
acaaucacccaaugauuag

SEQ ID NO: 778284 - RNA, 19 nt, Artificial Sequence
  Description of Artificial Sequence: Synthetic oligonucleotide
  Sense strand starting at position 2909 of SEQ ID NO: 587252
uaaucauugggugauuguu

SEQ ID NO: 778285 - RNA, 19 nt, Artificial Sequence
  Description of Artificial Sequence: Synthetic oligonucleotide
  Antisense strand to SEQ ID NO: 778284
aacaaucacccaaugauua

SEQ ID NO: 778286 - RNA, 19 nt, Artificial Sequence
  Description of Artificial Sequence: Synthetic oligonucleotide
  Sense strand starting at position 2950 of SEQ ID NO: 587252
cggcucucugcagaggaaa

SEQ ID NO: 778287 - RNA, 19 nt, Artificial Sequence
  Description of Artificial Sequence: Synthetic oligonucleotide
  Antisense strand to SEQ ID NO: 778286
uuuccucugcagagagccg

SEQ ID NO: 778288 - RNA, 19 nt, Artificial Sequence
  Description of Artificial Sequence: Synthetic oligonucleotide
  Sense strand starting at position 2995 of SEQ ID NO: 587252
ucuggugaaauccgaaaca

SEQ ID NO: 778289 - RNA, 19 nt, Artificial Sequence
  Description of Artificial Sequence: Synthetic oligonucleotide
  Antisense strand to SEQ ID NO: 778288
uguuucggauuucaccaga

SEQ ID NO: 778290 - RNA, 19 nt, Artificial Sequence
  Description of Artificial Sequence: Synthetic oligonucleotide
  Sense strand starting at position 3162 of SEQ ID NO: 587252
augagugauucauuguggu

SEQ ID NO: 778291 - RNA, 19 nt, Artificial Sequence
  Description of Artificial Sequence: Synthetic oligonucleotide
  Antisense strand to SEQ ID NO: 778290
accacaaugaaucacucau

SEQ ID NO: 778292 - RNA, 19 nt, Artificial Sequence
  Description of Artificial Sequence: Synthetic oligonucleotide
  Sense strand starting at position 3206 of SEQ ID NO: 587252
gggugucuaccuggaggau

SEQ ID NO: 778293 - RNA, 19 nt, Artificial Sequence
  Description of Artificial Sequence: Synthetic oligonucleotide
  Antisense strand to SEQ ID NO: 778292
auccuccagguagacaccc

SEQ ID NO: 778294 - RNA, 19 nt, Artificial Sequence
  Description of Artificial Sequence: Synthetic oligonucleotide
  Sense strand starting at position 3656 of SEQ ID NO: 587252
uagcgcauccuguuugauu

SEQ ID NO: 778295 - RNA, 19 nt, Artificial Sequence
  Description of Artificial Sequence: Synthetic oligonucleotide
  Antisense strand to SEQ ID NO: 778294
aaucaaacaggaugcgcua

SEQ ID NO: 778296 - RNA, 19 nt, Artificial Sequence
  Description of Artificial Sequence: Synthetic oligonucleotide
  Sense strand starting at position 3686 of SEQ ID NO: 587252
cuugucacuguuuaaugua

SEQ ID NO: 778297 - RNA, 19 nt, Artificial Sequence
  Description of Artificial Sequence: Synthetic oligonucleotide
  Antisense strand to SEQ ID NO: 778296
uacauuaaacagugacaag

SEQ ID NO: 778298 - RNA, 19 nt, Artificial Sequence
  Description of Artificial Sequence: Synthetic oligonucleotide
  Sense strand starting at position 3696 of SEQ ID NO: 587252
uuuaauguagccuacauga

SEQ ID NO: 778299 - RNA, 19 nt, Artificial Sequence
  Description of Artificial Sequence: Synthetic oligonucleotide
  Antisense strand to SEQ ID NO: 778298
ucauguaggcuacauuaaa

SEQ ID NO: 778300 - RNA, 19 nt, Artificial Sequence
  Description of Artificial Sequence: Synthetic oligonucleotide
  Sense strand starting at position 3710 of SEQ ID NO: 587252
caugauugguugcuuauuu

SEQ ID NO: 778301 - RNA, 19 nt, Artificial Sequence
  Description of Artificial Sequence: Synthetic oligonucleotide
  Antisense strand to SEQ ID NO: 778300
aaauaagcaaccaaucaug

SEQ ID NO: 778302 - RNA, 19 nt, Artificial Sequence
  Description of Artificial Sequence: Synthetic oligonucleotide
  Sense strand starting at position 3757 of SEQ ID NO: 587252
auggguaaacugcauuaca

SEQ ID NO: 778303 - RNA, 19 nt, Artificial Sequence
  Description of Artificial Sequence: Synthetic oligonucleotide
  Antisense strand to SEQ ID NO: 778302
uguaaugcaguuuacccau

SEQ ID NO: 778304 - RNA, 19 nt, Artificial Sequence
  Description of Artificial Sequence: Synthetic oligonucleotide
  Sense strand starting at position 3804 of SEQ ID NO: 587252
agugcuggcccauaugaga

SEQ ID NO: 778305 - RNA, 19 nt, Artificial Sequence
  Description of Artificial Sequence: Synthetic oligonucleotide
  Antisense strand to SEQ ID NO: 778304
ucucauaugggccagcacu

SEQ ID NO: 778306 - RNA, 19 nt, Artificial Sequence
  Description of Artificial Sequence: Synthetic oligonucleotide
  Sense strand starting at position 3830 of SEQ ID NO: 587252
uaaacacguguugaauaaa

SEQ ID NO: 778307 - RNA, 19 nt, Artificial Sequence
  Description of Artificial Sequence: Synthetic oligonucleotide
  Antisense strand to SEQ ID NO: 778306
uuuauucaacacguguuua

SEQ ID NO: 778308 - RNA, 19 nt, Artificial Sequence
  Description of Artificial Sequence: Synthetic oligonucleotide
  Sense strand starting at position 3833 of SEQ ID NO: 587252
acacguguugaauaaauga

SEQ ID NO: 778309 - RNA, 19 nt, Artificial Sequence
  Description of Artificial Sequence: Synthetic oligonucleotide
  Antisense strand to SEQ ID NO: 778308
ucauuuauucaacacgugu

SEQ ID NO: 778310 - RNA, 19 nt, Artificial Sequence
  Description of Artificial Sequence: Synthetic oligonucleotide
  Sense strand starting at position 3880 of SEQ ID NO: 587252
gggaccucugccugaggua

SEQ ID NO: 778311 - RNA, 19 nt, Artificial Sequence
  Description of Artificial Sequence: Synthetic oligonucleotide
  Antisense strand to SEQ ID NO: 778310
uaccucaggcagagguccc

SEQ ID NO: 778312 - RNA, 19 nt, Artificial Sequence
  Description of Artificial Sequence: Synthetic oligonucleotide
  Sense strand starting at position 3933 of SEQ ID NO: 587252
uuccucuuugguggagaga

SEQ ID NO: 778313 - RNA, 19 nt, Artificial Sequence
  Description of Artificial Sequence: Synthetic oligonucleotide
  Antisense strand to SEQ ID NO: 778312
ucucuccaccaaagaggaa

SEQ ID NO: 778314 - RNA, 19 nt, Artificial Sequence
  Description of Artificial Sequence: Synthetic oligonucleotide
  Sense strand starting at position 3934 of SEQ ID NO: 587252
uccucuuugguggagagau

SEQ ID NO: 778315 - RNA, 19 nt, Artificial Sequence
  Description of Artificial Sequence: Synthetic oligonucleotide
  Antisense strand to SEQ ID NO: 778314
aucucuccaccaaagagga

SEQ ID NO: 778316 - RNA, 19 nt, Artificial Sequence
  Description of Artificial Sequence: Synthetic oligonucleotide
  Sense strand starting at position 44 of SEQ ID NO: 587253
gagagcgagcaguacaauu

SEQ ID NO: 778317 - RNA, 19 nt, Artificial Sequence
  Description of Artificial Sequence: Synthetic oligonucleotide
  Antisense strand to SEQ ID NO: 778316
aauuguacugcucgcucuc

SEQ ID NO: 778318 - RNA, 19 nt, Artificial Sequence
  Description of Artificial Sequence: Synthetic oligonucleotide
  Sense strand starting at position 46 of SEQ ID NO: 587253
gagcgagcaguacaauuau

SEQ ID NO: 778319 - RNA, 19 nt, Artificial Sequence
  Description of Artificial Sequence: Synthetic oligonucleotide
  Antisense strand to SEQ ID NO: 778318
auaauuguacugcucgcuc

SEQ ID NO: 778320 - RNA, 19 nt, Artificial Sequence
  Description of Artificial Sequence: Synthetic oligonucleotide
  Sense strand starting at position 138 of SEQ ID NO: 587253
gguacaugauuggaaauag

SEQ ID NO: 778321 - RNA, 19 nt, Artificial Sequence
  Description of Artificial Sequence: Synthetic oligonucleotide
  Antisense strand to SEQ ID NO: 778320
cuauuuccaaucauguacc

SEQ ID NO: 778322 - RNA, 19 nt, Artificial Sequence
  Description of Artificial Sequence: Synthetic oligonucleotide
  Sense strand starting at position 150 of SEQ ID NO: 587253
gaaauagguuugcugagga

SEQ ID NO: 778323 - RNA, 19 nt, Artificial Sequence
  Description of Artificial Sequence: Synthetic oligonucleotide
  Antisense strand to SEQ ID NO: 778322
uccucagcaaaccuauuuc

SEQ ID NO: 778324 - RNA, 19 nt, Artificial Sequence
  Description of Artificial Sequence: Synthetic oligonucleotide
  Sense strand starting at position 155 of SEQ ID NO: 587253
agguuugcugaggagagua

SEQ ID NO: 778325 - RNA, 19 nt, Artificial Sequence
  Description of Artificial Sequence: Synthetic oligonucleotide
  Antisense strand to SEQ ID NO: 778324
uacucuccucagcaaaccu

SEQ ID NO: 778326 - RNA, 19 nt, Artificial Sequence
  Description of Artificial Sequence: Synthetic oligonucleotide
  Sense strand starting at position 241 of SEQ ID NO: 587253
gagcaugggucaucucaaa

SEQ ID NO: 778327 - RNA, 19 nt, Artificial Sequence
  Description of Artificial Sequence: Synthetic oligonucleotide
  Antisense strand to SEQ ID NO: 778326
uuugagaugacccaugcuc

SEQ ID NO: 778328 - RNA, 19 nt, Artificial Sequence
  Description of Artificial Sequence: Synthetic oligonucleotide
  Sense strand starting at position 409 of SEQ ID NO: 587253
ggcaauacccaccauugua

SEQ ID NO: 778329 - RNA, 19 nt, Artificial Sequence
  Description of Artificial Sequence: Synthetic oligonucleotide
  Antisense strand to SEQ ID NO: 778328
uacaaugguggguauugcc

SEQ ID NO: 778330 - RNA, 19 nt, Artificial Sequence
  Description of Artificial Sequence: Synthetic oligonucleotide
  Sense strand starting at position 620 of SEQ ID NO: 587253
guacucacgagguaucuau

SEQ ID NO: 778331 - RNA, 19 nt, Artificial Sequence
  Description of Artificial Sequence: Synthetic oligonucleotide
  Antisense strand to SEQ ID NO: 778330
auagauaccucgugaguac

SEQ ID NO: 778332 - RNA, 19 nt, Artificial Sequence
  Description of Artificial Sequence: Synthetic oligonucleotide
  Sense strand starting at position 624 of SEQ ID NO: 587253
ucacgagguaucuaugcca

SEQ ID NO: 778333 - RNA, 19 nt, Artificial Sequence
  Description of Artificial Sequence: Synthetic oligonucleotide
  Antisense strand to SEQ ID NO: 778332
uggcauagauaccucguga

SEQ ID NO: 778334 - RNA, 19 nt, Artificial Sequence
  Description of Artificial Sequence: Synthetic oligonucleotide
  Sense strand starting at position 778 of SEQ ID NO: 587253
gucagagcaguucgagacu

SEQ ID NO: 778335 - RNA, 19 nt, Artificial Sequence
  Description of Artificial Sequence: Synthetic oligonucleotide
  Antisense strand to SEQ ID NO: 778334
agucucgaacugcucugac

SEQ ID NO: 778336 - RNA, 19 nt, Artificial Sequence
  Description of Artificial Sequence: Synthetic oligonucleotide
  Sense strand starting at position 781 of SEQ ID NO: 587253
agagcaguucgagacucaa

SEQ ID NO: 778337 - RNA, 19 nt, Artificial Sequence
  Description of Artificial Sequence: Synthetic oligonucleotide
  Antisense strand to SEQ ID NO: 778336
uugagucucgaacugcucu

SEQ ID NO: 778338 - RNA, 19 nt, Artificial Sequence
  Description of Artificial Sequence: Synthetic oligonucleotide
  Sense strand starting at position 800 of SEQ ID NO: 587253
aucaguugacuugaaugua

SEQ ID NO: 778339 - RNA, 19 nt, Artificial Sequence
  Description of Artificial Sequence: Synthetic oligonucleotide
  Antisense strand to SEQ ID NO: 778338
uacauucaagucaacugau

SEQ ID NO: 778340 - RNA, 19 nt, Artificial Sequence
  Description of Artificial Sequence: Synthetic oligonucleotide
  Sense strand starting at position 878 of SEQ ID NO: 587253
ucaagugauccugaggucu

SEQ ID NO: 778341 - RNA, 19 nt, Artificial Sequence
  Description of Artificial Sequence: Synthetic oligonucleotide
  Antisense strand to SEQ ID NO: 778340
agaccucaggaucacuuga

SEQ ID NO: 778342 - RNA, 19 nt, Artificial Sequence
  Description of Artificial Sequence: Synthetic oligonucleotide
  Sense strand starting at position 1426 of SEQ ID NO: 587253
aaugaaagcgcucaaguaa

SEQ ID NO: 778343 - RNA, 19 nt, Artificial Sequence
  Description of Artificial Sequence: Synthetic oligonucleotide
  Antisense strand to SEQ ID NO: 778342
uuacuugagcgcuuucauu

SEQ ID NO: 778344 - RNA, 19 nt, Artificial Sequence
  Description of Artificial Sequence: Synthetic oligonucleotide
  Sense strand starting at position 1528 of SEQ ID NO: 587253
ucagcuaagccugaucuca

SEQ ID NO: 778345 - RNA, 19 nt, Artificial Sequence
  Description of Artificial Sequence: Synthetic oligonucleotide
  Antisense strand to SEQ ID NO: 778344
ugagaucaggcuuagcuga

SEQ ID NO: 778346 - RNA, 19 nt, Artificial Sequence
  Description of Artificial Sequence: Synthetic oligonucleotide
  Sense strand starting at position 1530 of SEQ ID NO: 587253
agcuaagccugaucucaga

SEQ ID NO: 778347 - RNA, 19 nt, Artificial Sequence
  Description of Artificial Sequence: Synthetic oligonucleotide
  Antisense strand to SEQ ID NO: 778346
ucugagaucaggcuuagcu

SEQ ID NO: 778348 - RNA, 19 nt, Artificial Sequence
  Description of Artificial Sequence: Synthetic oligonucleotide
  Sense strand starting at position 1643 of SEQ ID NO: 587253
agucaaaucuaccuggguu

SEQ ID NO: 778349 - RNA, 19 nt, Artificial Sequence
  Description of Artificial Sequence: Synthetic oligonucleotide
  Antisense strand to SEQ ID NO: 778348
aacccagguagauuugacu

SEQ ID NO: 778350 - RNA, 19 nt, Artificial Sequence
  Description of Artificial Sequence: Synthetic oligonucleotide
  Sense strand starting at position 1646 of SEQ ID NO: 587253
caaaucuaccuggguuaga

SEQ ID NO: 778351 - RNA, 19 nt, Artificial Sequence
  Description of Artificial Sequence: Synthetic oligonucleotide
  Antisense strand to SEQ ID NO: 778350
ucuaacccagguagauuug

SEQ ID NO: 778352 - RNA, 19 nt, Artificial Sequence
  Description of Artificial Sequence: Synthetic oligonucleotide
  Sense strand starting at position 2530 of SEQ ID NO: 587253
guggcuacgacuggauauu

SEQ ID NO: 778353 - RNA, 19 nt, Artificial Sequence
  Description of Artificial Sequence: Synthetic oligonucleotide
  Antisense strand to SEQ ID NO: 778352
aauauccagucguagccac

SEQ ID NO: 778354 - RNA, 19 nt, Artificial Sequence
  Description of Artificial Sequence: Synthetic oligonucleotide
  Sense strand starting at position 2539 of SEQ ID NO: 587253
acuggauauucugcgcaga

SEQ ID NO: 778355 - RNA, 19 nt, Artificial Sequence
  Description of Artificial Sequence: Synthetic oligonucleotide
  Antisense strand to SEQ ID NO: 778354
ucugcgcagaauauccagu

SEQ ID NO: 778356 - RNA, 19 nt, Artificial Sequence
  Description of Artificial Sequence: Synthetic oligonucleotide
  Sense strand starting at position 2540 of SEQ ID NO: 587253
cuggauauucugcgcagaa

SEQ ID NO: 778357 - RNA, 19 nt, Artificial Sequence
  Description of Artificial Sequence: Synthetic oligonucleotide
  Antisense strand to SEQ ID NO: 778356
uucugcgcagaauauccag

SEQ ID NO: 778358 - RNA, 19 nt, Artificial Sequence
  Description of Artificial Sequence: Synthetic oligonucleotide
  Sense strand starting at position 2541 of SEQ ID NO: 587253
uggauauucugcgcagaag

SEQ ID NO: 778359 - RNA, 19 nt, Artificial Sequence
  Description of Artificial Sequence: Synthetic oligonucleotide
  Antisense strand to SEQ ID NO: 778358
cuucugcgcagaauaucca

SEQ ID NO: 778360 - RNA, 19 nt, Artificial Sequence
  Description of Artificial Sequence: Synthetic oligonucleotide
  Sense strand starting at position 2542 of SEQ ID NO: 587253
ggauauucugcgcagaaga

SEQ ID NO: 778361 - RNA, 19 nt, Artificial Sequence
  Description of Artificial Sequence: Synthetic oligonucleotide
  Antisense strand to SEQ ID NO: 778360
ucuucugcgcagaauaucc

SEQ ID NO: 778362 - RNA, 19 nt, Artificial Sequence
  Description of Artificial Sequence: Synthetic oligonucleotide
  Sense strand starting at position 2869 of SEQ ID NO: 587253
ucggaauguagacaaguuu

SEQ ID NO: 778363 - RNA, 19 nt, Artificial Sequence
  Description of Artificial Sequence: Synthetic oligonucleotide
  Antisense strand to SEQ ID NO: 778362
aaacuugucuacauuccga

SEQ ID NO: 778364 - RNA, 19 nt, Artificial Sequence
  Description of Artificial Sequence: Synthetic oligonucleotide
  Sense strand starting at position 2882 of SEQ ID NO: 587253
aaguuuggugcccagcgaa

SEQ ID NO: 778365 - RNA, 19 nt, Artificial Sequence
  Description of Artificial Sequence: Synthetic oligonucleotide
  Antisense strand to SEQ ID NO: 778364
uucgcugggcaccaaacuu

SEQ ID NO: 778366 - RNA, 19 nt, Artificial Sequence
  Description of Artificial Sequence: Synthetic oligonucleotide
  Sense strand starting at position 2973 of SEQ ID NO: 587253
ugaguugagucuuucagag

SEQ ID NO: 778367 - RNA, 19 nt, Artificial Sequence
  Description of Artificial Sequence: Synthetic oligonucleotide
  Antisense strand to SEQ ID NO: 778366
cucugaaagacucaacuca

SEQ ID NO: 778368 - RNA, 19 nt, Artificial Sequence
  Description of Artificial Sequence: Synthetic oligonucleotide
  Sense strand starting at position 2989 of SEQ ID NO: 587253
gagccauggucuccaaacu

SEQ ID NO: 778369 - RNA, 19 nt, Artificial Sequence
  Description of Artificial Sequence: Synthetic oligonucleotide
  Antisense strand to SEQ ID NO: 778368
aguuuggagaccauggcuc

SEQ ID NO: 778370 - RNA, 19 nt, Artificial Sequence
  Description of Artificial Sequence: Synthetic oligonucleotide
  Sense strand starting at position 2996 of SEQ ID NO: 587253
ggucuccaaacucgagaau

SEQ ID NO: 778371 - RNA, 19 nt, Artificial Sequence
  Description of Artificial Sequence: Synthetic oligonucleotide
  Antisense strand to SEQ ID NO: 778370
auucucgaguuuggagacc

SEQ ID NO: 778372 - RNA, 19 nt, Artificial Sequence
  Description of Artificial Sequence: Synthetic oligonucleotide
  Sense strand starting at position 3012 of SEQ ID NO: 587253
aaugcaaaccucugagagu

SEQ ID NO: 778373 - RNA, 19 nt, Artificial Sequence
  Description of Artificial Sequence: Synthetic oligonucleotide
  Antisense strand to SEQ ID NO: 778372
acucucagagguuugcauu

SEQ ID NO: 778374 - RNA, 19 nt, Artificial Sequence
  Description of Artificial Sequence: Synthetic oligonucleotide
  Sense strand starting at position 3057 of SEQ ID NO: 587253
accaguguuuauccuauau

SEQ ID NO: 778375 - RNA, 19 nt, Artificial Sequence
  Description of Artificial Sequence: Synthetic oligonucleotide
  Antisense strand to SEQ ID NO: 778374
auauaggauaaacacuggu

SEQ ID NO: 778376 - RNA, 19 nt, Artificial Sequence
  Description of Artificial Sequence: Synthetic oligonucleotide
  Sense strand starting at position 3061 of SEQ ID NO: 587253
guguuuauccuauauccua

SEQ ID NO: 778377 - RNA, 19 nt, Artificial Sequence
  Description of Artificial Sequence: Synthetic oligonucleotide
  Antisense strand to SEQ ID NO: 778376
uaggauauaggauaaacac

SEQ ID NO: 778378 - RNA, 19 nt, Artificial Sequence
  Description of Artificial Sequence: Synthetic oligonucleotide
  Sense strand starting at position 3084 of SEQ ID NO: 587253
guugccuaacgauaauaca

SEQ ID NO: 778379 - RNA, 19 nt, Artificial Sequence
  Description of Artificial Sequence: Synthetic oligonucleotide
  Antisense strand to SEQ ID NO: 778378
uguauuaucguuaggcaac

SEQ ID NO: 778380 - RNA, 19 nt, Artificial Sequence
  Description of Artificial Sequence: Synthetic oligonucleotide
  Sense strand starting at position 3150 of SEQ ID NO: 587253
agucuaaucuuacugugau

SEQ ID NO: 778381 - RNA, 19 nt, Artificial Sequence
  Description of Artificial Sequence: Synthetic oligonucleotide
  Antisense strand to SEQ ID NO: 778380
aucacaguaagauuagacu

SEQ ID NO: 778382 - RNA, 19 nt, Artificial Sequence
  Description of Artificial Sequence: Synthetic oligonucleotide
  Sense strand starting at position 3162 of SEQ ID NO: 587253
cugugauguguccaccgau

SEQ ID NO: 778383 - RNA, 19 nt, Artificial Sequence
  Description of Artificial Sequence: Synthetic oligonucleotide
  Antisense strand to SEQ ID NO: 778382
aucgguggacacaucacag

SEQ ID NO: 778384 - RNA, 19 nt, Artificial Sequence
  Description of Artificial Sequence: Synthetic oligonucleotide
  Sense strand starting at position 3185 of SEQ ID NO: 587253
uaggaaucucugggccacu

SEQ ID NO: 778385 - RNA, 19 nt, Artificial Sequence
  Description of Artificial Sequence: Synthetic oligonucleotide
  Antisense strand to SEQ ID NO: 778384
aguggcccagagauuccua

SEQ ID NO: 778386 - RNA, 19 nt, Artificial Sequence
  Description of Artificial Sequence: Synthetic oligonucleotide
  Sense strand starting at position 3359 of SEQ ID NO: 587253
caggaugcuugaucuaagu

SEQ ID NO: 778387 - RNA, 19 nt, Artificial Sequence
  Description of Artificial Sequence: Synthetic oligonucleotide
  Antisense strand to SEQ ID NO: 778386
acuuagaucaagcauccug

SEQ ID NO: 778388 - RNA, 19 nt, Artificial Sequence
  Description of Artificial Sequence: Synthetic oligonucleotide
  Sense strand starting at position 3361 of SEQ ID NO: 587253
ggaugcuugaucuaaguau

SEQ ID NO: 778389 - RNA, 19 nt, Artificial Sequence
  Description of Artificial Sequence: Synthetic oligonucleotide
  Antisense strand to SEQ ID NO: 778388
auacuuagaucaagcaucc

SEQ ID NO: 778390 - RNA, 19 nt, Artificial Sequence
  Description of Artificial Sequence: Synthetic oligonucleotide
  Sense strand starting at position 3393 of SEQ ID NO: 587253
cguaguauuguagcaguuu

SEQ ID NO: 778391 - RNA, 19 nt, Artificial Sequence
  Description of Artificial Sequence: Synthetic oligonucleotide
  Antisense strand to SEQ ID NO: 778390
aaacugcuacaauacuacg

SEQ ID NO: 778392 - RNA, 19 nt, Artificial Sequence
  Description of Artificial Sequence: Synthetic oligonucleotide
  Sense strand starting at position 3411 of SEQ ID NO: 587253
uuaacauauggucgcagaa

SEQ ID NO: 778393 - RNA, 19 nt, Artificial Sequence
  Description of Artificial Sequence: Synthetic oligonucleotide
  Antisense strand to SEQ ID NO: 778392
uucugcgaccauauguuaa

SEQ ID NO: 778394 - RNA, 19 nt, Artificial Sequence
  Description of Artificial Sequence: Synthetic oligonucleotide
  Sense strand starting at position 3570 of SEQ ID NO: 587253
ugagauuacagguaucugu

SEQ ID NO: 778395 - RNA, 19 nt, Artificial Sequence
  Description of Artificial Sequence: Synthetic oligonucleotide
  Antisense strand to SEQ ID NO: 778394
acagauaccuguaaucuca

SEQ ID NO: 778396 - RNA, 19 nt, Artificial Sequence
  Description of Artificial Sequence: Synthetic oligonucleotide
  Sense strand starting at position 109 of SEQ ID NO: 587254
ggcaauacccaccauugua

SEQ ID NO: 778397 - RNA, 19 nt, Artificial Sequence
  Description of Artificial Sequence: Synthetic oligonucleotide
  Antisense strand to SEQ ID NO: 778396
uacaaugguggguauugcc

SEQ ID NO: 778398 - RNA, 19 nt, Artificial Sequence
  Description of Artificial Sequence: Synthetic oligonucleotide
  Sense strand starting at position 320 of SEQ ID NO: 587254
guacucacgagguaucuau

SEQ ID NO: 778399 - RNA, 19 nt, Artificial Sequence
  Description of Artificial Sequence: Synthetic oligonucleotide
  Antisense strand to SEQ ID NO: 778398
auagauaccucgugaguac

SEQ ID NO: 778400 - RNA, 19 nt, Artificial Sequence
  Description of Artificial Sequence: Synthetic oligonucleotide
  Sense strand starting at position 324 of SEQ ID NO: 587254
ucacgagguaucuaugcca

SEQ ID NO: 778401 - RNA, 19 nt, Artificial Sequence
  Description of Artificial Sequence: Synthetic oligonucleotide
  Antisense strand to SEQ ID NO: 778400
uggcauagauaccucguga

SEQ ID NO: 778402 - RNA, 19 nt, Artificial Sequence
  Description of Artificial Sequence: Synthetic oligonucleotide
  Sense strand starting at position 465 of SEQ ID NO: 587254
agcaccuuccugugucaga

SEQ ID NO: 778403 - RNA, 19 nt, Artificial Sequence
  Description of Artificial Sequence: Synthetic oligonucleotide
  Antisense strand to SEQ ID NO: 778402
ucugacacaggaaggugcu

SEQ ID NO: 778404 - RNA, 19 nt, Artificial Sequence
  Description of Artificial Sequence: Synthetic oligonucleotide
  Sense strand starting at position 478 of SEQ ID NO: 587254
gucagagcaguucgagacu

SEQ ID NO: 778405 - RNA, 19 nt, Artificial Sequence
  Description of Artificial Sequence: Synthetic oligonucleotide
  Antisense strand to SEQ ID NO: 778404
agucucgaacugcucugac

SEQ ID NO: 778406 - RNA, 19 nt, Artificial Sequence
  Description of Artificial Sequence: Synthetic oligonucleotide
  Sense strand starting at position 481 of SEQ ID NO: 587254
agagcaguucgagacucaa

SEQ ID NO: 778407 - RNA, 19 nt, Artificial Sequence
  Description of Artificial Sequence: Synthetic oligonucleotide
  Antisense strand to SEQ ID NO: 778406
uugagucucgaacugcucu

SEQ ID NO: 778408 - RNA, 19 nt, Artificial Sequence
  Description of Artificial Sequence: Synthetic oligonucleotide
  Sense strand starting at position 500 of SEQ ID NO: 587254
aucaguugacuugaaugua

SEQ ID NO: 778409 - RNA, 19 nt, Artificial Sequence
  Description of Artificial Sequence: Synthetic oligonucleotide
  Antisense strand to SEQ ID NO: 778408
uacauucaagucaacugau

SEQ ID NO: 778410 - RNA, 19 nt, Artificial Sequence
  Description of Artificial Sequence: Synthetic oligonucleotide
  Sense strand starting at position 578 of SEQ ID NO: 587254
ucaagugauccugaggucu

SEQ ID NO: 778411 - RNA, 19 nt, Artificial Sequence
  Description of Artificial Sequence: Synthetic oligonucleotide
  Antisense strand to SEQ ID NO: 778410
agaccucaggaucacuuga

SEQ ID NO: 778412 - RNA, 19 nt, Artificial Sequence
  Description of Artificial Sequence: Synthetic oligonucleotide
  Sense strand starting at position 1126 of SEQ ID NO: 587254
aaugaaagcgcucaaguaa

SEQ ID NO: 778413 - RNA, 19 nt, Artificial Sequence
  Description of Artificial Sequence: Synthetic oligonucleotide
  Antisense strand to SEQ ID NO: 778412
uuacuugagcgcuuucauu

SEQ ID NO: 778414 - RNA, 19 nt, Artificial Sequence
  Description of Artificial Sequence: Synthetic oligonucleotide
  Sense strand starting at position 1228 of SEQ ID NO: 587254
ucagcuaagccugaucuca

SEQ ID NO: 778415 - RNA, 19 nt, Artificial Sequence
  Description of Artificial Sequence: Synthetic oligonucleotide
  Antisense strand to SEQ ID NO: 778414
ugagaucaggcuuagcuga

SEQ ID NO: 778416 - RNA, 19 nt, Artificial Sequence
  Description of Artificial Sequence: Synthetic oligonucleotide
  Sense strand starting at position 1230 of SEQ ID NO: 587254
agcuaagccugaucucaga

SEQ ID NO: 778417 - RNA, 19 nt, Artificial Sequence
  Description of Artificial Sequence: Synthetic oligonucleotide
  Antisense strand to SEQ ID NO: 778416
ucugagaucaggcuuagcu

SEQ ID NO: 778418 - RNA, 19 nt, Artificial Sequence
  Description of Artificial Sequence: Synthetic oligonucleotide
  Sense strand starting at position 1343 of SEQ ID NO: 587254
agucaaaucuaccuggguu

SEQ ID NO: 778419 - RNA, 19 nt, Artificial Sequence
  Description of Artificial Sequence: Synthetic oligonucleotide
  Antisense strand to SEQ ID NO: 778418
aacccagguagauuugacu

SEQ ID NO: 778420 - RNA, 19 nt, Artificial Sequence
  Description of Artificial Sequence: Synthetic oligonucleotide
  Sense strand starting at position 1346 of SEQ ID NO: 587254
caaaucuaccuggguuaga

SEQ ID NO: 778421 - RNA, 19 nt, Artificial Sequence
  Description of Artificial Sequence: Synthetic oligonucleotide
  Antisense strand to SEQ ID NO: 778420
ucuaacccagguagauuug

SEQ ID NO: 778422 - RNA, 19 nt, Artificial Sequence
  Description of Artificial Sequence: Synthetic oligonucleotide
  Sense strand starting at position 2061 of SEQ ID NO: 587254
gcauaauuccacgaccgcu

SEQ ID NO: 778423 - RNA, 19 nt, Artificial Sequence
  Description of Artificial Sequence: Synthetic oligonucleotide
  Antisense strand to SEQ ID NO: 778422
agcggucguggaauuaugc

SEQ ID NO: 778424 - RNA, 19 nt, Artificial Sequence
  Description of Artificial Sequence: Synthetic oligonucleotide
  Sense strand starting at position 2230 of SEQ ID NO: 587254
guggcuacgacuggauauu

SEQ ID NO: 778425 - RNA, 19 nt, Artificial Sequence
  Description of Artificial Sequence: Synthetic oligonucleotide
  Antisense strand to SEQ ID NO: 778424
aauauccagucguagccac

SEQ ID NO: 778426 - RNA, 19 nt, Artificial Sequence
  Description of Artificial Sequence: Synthetic oligonucleotide
  Sense strand starting at position 2239 of SEQ ID NO: 587254
acuggauauucugcgcaga

SEQ ID NO: 778427 - RNA, 19 nt, Artificial Sequence
  Description of Artificial Sequence: Synthetic oligonucleotide
  Antisense strand to SEQ ID NO: 778426
ucugcgcagaauauccagu

SEQ ID NO: 778428 - RNA, 19 nt, Artificial Sequence
  Description of Artificial Sequence: Synthetic oligonucleotide
  Sense strand starting at position 2240 of SEQ ID NO: 587254
cuggauauucugcgcagaa

SEQ ID NO: 778429 - RNA, 19 nt, Artificial Sequence
  Description of Artificial Sequence: Synthetic oligonucleotide
  Antisense strand to SEQ ID NO: 778428
uucugcgcagaauauccag

SEQ ID NO: 778430 - RNA, 19 nt, Artificial Sequence
  Description of Artificial Sequence: Synthetic oligonucleotide
  Sense strand starting at position 2241 of SEQ ID NO: 587254
uggauauucugcgcagaag

SEQ ID NO: 778431 - RNA, 19 nt, Artificial Sequence
  Description of Artificial Sequence: Synthetic oligonucleotide
  Antisense strand to SEQ ID NO: 778430
cuucugcgcagaauaucca

SEQ ID NO: 778432 - RNA, 19 nt, Artificial Sequence
  Description of Artificial Sequence: Synthetic oligonucleotide
  Sense strand starting at position 2242 of SEQ ID NO: 587254
ggauauucugcgcagaaga

SEQ ID NO: 778433 - RNA, 19 nt, Artificial Sequence
  Description of Artificial Sequence: Synthetic oligonucleotide
  Antisense strand to SEQ ID NO: 778432
ucuucugcgcagaauaucc

SEQ ID NO: 778434 - RNA, 19 nt, Artificial Sequence
  Description of Artificial Sequence: Synthetic oligonucleotide
  Sense strand starting at position 2569 of SEQ ID NO: 587254
ucggaauguagacaaguuu

SEQ ID NO: 778435 - RNA, 19 nt, Artificial Sequence
  Description of Artificial Sequence: Synthetic oligonucleotide
  Antisense strand to SEQ ID NO: 778434
aaacuugucuacauuccga

SEQ ID NO: 778436 - RNA, 19 nt, Artificial Sequence
  Description of Artificial Sequence: Synthetic oligonucleotide
  Sense strand starting at position 2582 of SEQ ID NO: 587254
aaguuuggugcccagcgaa

SEQ ID NO: 778437 - RNA, 19 nt, Artificial Sequence
  Description of Artificial Sequence: Synthetic oligonucleotide
  Antisense strand to SEQ ID NO: 778436
uucgcugggcaccaaacuu

SEQ ID NO: 778438 - RNA, 19 nt, Artificial Sequence
  Description of Artificial Sequence: Synthetic oligonucleotide
  Sense strand starting at position 2673 of SEQ ID NO: 587254
ugaguugagucuuucagag

SEQ ID NO: 778439 - RNA, 19 nt, Artificial Sequence
  Description of Artificial Sequence: Synthetic oligonucleotide
  Antisense strand to SEQ ID NO: 778438
cucugaaagacucaacuca

SEQ ID NO: 778440 - RNA, 19 nt, Artificial Sequence
  Description of Artificial Sequence: Synthetic oligonucleotide
  Sense strand starting at position 2689 of SEQ ID NO: 587254
gagccauggucuccaaacu

SEQ ID NO: 778441 - RNA, 19 nt, Artificial Sequence
  Description of Artificial Sequence: Synthetic oligonucleotide
  Antisense strand to SEQ ID NO: 778440
aguuuggagaccauggcuc

SEQ ID NO: 778442 - RNA, 19 nt, Artificial Sequence
  Description of Artificial Sequence: Synthetic oligonucleotide
  Sense strand starting at position 2696 of SEQ ID NO: 587254
ggucuccaaacucgagaau

SEQ ID NO: 778443 - RNA, 19 nt, Artificial Sequence
  Description of Artificial Sequence: Synthetic oligonucleotide
  Antisense strand to SEQ ID NO: 778442
auucucgaguuuggagacc

SEQ ID NO: 778444 - RNA, 19 nt, Artificial Sequence
  Description of Artificial Sequence: Synthetic oligonucleotide
  Sense strand starting at position 2712 of SEQ ID NO: 587254
aaugcaaaccucugagagu

SEQ ID NO: 778445 - RNA, 19 nt, Artificial Sequence
  Description of Artificial Sequence: Synthetic oligonucleotide
  Antisense strand to SEQ ID NO: 778444
acucucagagguuugcauu

SEQ ID NO: 778446 - RNA, 19 nt, Artificial Sequence
  Description of Artificial Sequence: Synthetic oligonucleotide
  Sense strand starting at position 2757 of SEQ ID NO: 587254
accaguguuuauccuauau

SEQ ID NO: 778447 - RNA, 19 nt, Artificial Sequence
  Description of Artificial Sequence: Synthetic oligonucleotide
  Antisense strand to SEQ ID NO: 778446
auauaggauaaacacuggu

SEQ ID NO: 778448 - RNA, 19 nt, Artificial Sequence
  Description of Artificial Sequence: Synthetic oligonucleotide
  Sense strand starting at position 2761 of SEQ ID NO: 587254
guguuuauccuauauccua

SEQ ID NO: 778449 - RNA, 19 nt, Artificial Sequence
  Description of Artificial Sequence: Synthetic oligonucleotide
  Antisense strand to SEQ ID NO: 778448
uaggauauaggauaaacac

SEQ ID NO: 778450 - RNA, 19 nt, Artificial Sequence
  Description of Artificial Sequence: Synthetic oligonucleotide
  Sense strand starting at position 2784 of SEQ ID NO: 587254
guugccuaacgauaauaca

SEQ ID NO: 778451 - RNA, 19 nt, Artificial Sequence
  Description of Artificial Sequence: Synthetic oligonucleotide
  Antisense strand to SEQ ID NO: 778450
uguauuaucguuaggcaac

SEQ ID NO: 778452 - RNA, 19 nt, Artificial Sequence
  Description of Artificial Sequence: Synthetic oligonucleotide
  Sense strand starting at position 2839 of SEQ ID NO: 587254
cgccaauccucagucuaau

SEQ ID NO: 778453 - RNA, 19 nt, Artificial Sequence
  Description of Artificial Sequence: Synthetic oligonucleotide
  Antisense strand to SEQ ID NO: 778452
auuagacugaggauuggcg

SEQ ID NO: 778454 - RNA, 19 nt, Artificial Sequence
  Description of Artificial Sequence: Synthetic oligonucleotide
  Sense strand starting at position 2850 of SEQ ID NO: 587254
agucuaaucuuacugugau

SEQ ID NO: 778455 - RNA, 19 nt, Artificial Sequence
  Description of Artificial Sequence: Synthetic oligonucleotide
  Antisense strand to SEQ ID NO: 778454
aucacaguaagauuagacu

SEQ ID NO: 778456 - RNA, 19 nt, Artificial Sequence
  Description of Artificial Sequence: Synthetic oligonucleotide
  Sense strand starting at position 2862 of SEQ ID NO: 587254
cugugauguguccaccgau

SEQ ID NO: 778457 - RNA, 19 nt, Artificial Sequence
  Description of Artificial Sequence: Synthetic oligonucleotide
  Antisense strand to SEQ ID NO: 778456
aucgguggacacaucacag

SEQ ID NO: 778458 - RNA, 19 nt, Artificial Sequence
  Description of Artificial Sequence: Synthetic oligonucleotide
  Sense strand starting at position 2865 of SEQ ID NO: 587254
ugauguguccaccgauagu

SEQ ID NO: 778459 - RNA, 19 nt, Artificial Sequence
  Description of Artificial Sequence: Synthetic oligonucleotide
  Antisense strand to SEQ ID NO: 778458
acuaucgguggacacauca

SEQ ID NO: 778460 - RNA, 19 nt, Artificial Sequence
  Description of Artificial Sequence: Synthetic oligonucleotide
  Sense strand starting at position 2868 of SEQ ID NO: 587254
uguguccaccgauagugua

SEQ ID NO: 778461 - RNA, 19 nt, Artificial Sequence
  Description of Artificial Sequence: Synthetic oligonucleotide
  Antisense strand to SEQ ID NO: 778460
uacacuaucgguggacaca

SEQ ID NO: 778462 - RNA, 19 nt, Artificial Sequence
  Description of Artificial Sequence: Synthetic oligonucleotide
  Sense strand starting at position 2885 of SEQ ID NO: 587254
uaggaaucucugggccacu

SEQ ID NO: 778463 - RNA, 19 nt, Artificial Sequence
  Description of Artificial Sequence: Synthetic oligonucleotide
  Antisense strand to SEQ ID NO: 778462
aguggcccagagauuccua

SEQ ID NO: 778464 - RNA, 19 nt, Artificial Sequence
  Description of Artificial Sequence: Synthetic oligonucleotide
  Sense strand starting at position 3059 of SEQ ID NO: 587254
caggaugcuugaucuaagu

SEQ ID NO: 778465 - RNA, 19 nt, Artificial Sequence
  Description of Artificial Sequence: Synthetic oligonucleotide
  Antisense strand to SEQ ID NO: 778464
acuuagaucaagcauccug

SEQ ID NO: 778466 - RNA, 19 nt, Artificial Sequence
  Description of Artificial Sequence: Synthetic oligonucleotide
  Sense strand starting at position 3061 of SEQ ID NO: 587254
ggaugcuugaucuaaguau

SEQ ID NO: 778467 - RNA, 19 nt, Artificial Sequence
  Description of Artificial Sequence: Synthetic oligonucleotide
  Antisense strand to SEQ ID NO: 778466
auacuuagaucaagcaucc

SEQ ID NO: 778468 - RNA, 19 nt, Artificial Sequence
  Description of Artificial Sequence: Synthetic oligonucleotide
  Sense strand starting at position 3093 of SEQ ID NO: 587254
cguaguauuguagcaguuu

SEQ ID NO: 778469 - RNA, 19 nt, Artificial Sequence
  Description of Artificial Sequence: Synthetic oligonucleotide
  Antisense strand to SEQ ID NO: 778468
aaacugcuacaauacuacg

SEQ ID NO: 778470 - RNA, 19 nt, Artificial Sequence
  Description of Artificial Sequence: Synthetic oligonucleotide
  Sense strand starting at position 3111 of SEQ ID NO: 587254
uuaacauauggucgcagaa

SEQ ID NO: 778471 - RNA, 19 nt, Artificial Sequence
  Description of Artificial Sequence: Synthetic oligonucleotide
  Antisense strand to SEQ ID NO: 778470
uucugcgaccauauguuaa

SEQ ID NO: 778472 - RNA, 19 nt, Artificial Sequence
  Description of Artificial Sequence: Synthetic oligonucleotide
  Sense strand starting at position 3270 of SEQ ID NO: 587254
ugagauuacagguaucugu

SEQ ID NO: 778473 - RNA, 19 nt, Artificial Sequence
  Description of Artificial Sequence: Synthetic oligonucleotide
  Antisense strand to SEQ ID NO: 778472
acagauaccuguaaucuca

SEQ ID NO: 778474 - RNA, 19 nt, Artificial Sequence
  Description of Artificial Sequence: Synthetic oligonucleotide
  Sense strand starting at position 3626 of SEQ ID NO: 587254
ggguuucaccuguguguuu

SEQ ID NO: 778475 - RNA, 19 nt, Artificial Sequence
  Description of Artificial Sequence: Synthetic oligonucleotide
  Antisense strand to SEQ ID NO: 778474
aaacacacaggugaaaccc

SEQ ID NO: 778476 - RNA, 19 nt, Artificial Sequence
  Description of Artificial Sequence: Synthetic oligonucleotide
  Sense strand starting at position 202 of SEQ ID NO: 587255
agaucaguuucuguccaau

SEQ ID NO: 778477 - RNA, 19 nt, Artificial Sequence
  Description of Artificial Sequence: Synthetic oligonucleotide
  Antisense strand to SEQ ID NO: 778476
auuggacagaaacugaucu

SEQ ID NO: 778478 - RNA, 19 nt, Artificial Sequence
  Description of Artificial Sequence: Synthetic oligonucleotide
  Sense strand starting at position 204 of SEQ ID NO: 587255
aucaguuucuguccaauga

SEQ ID NO: 778479 - RNA, 19 nt, Artificial Sequence
  Description of Artificial Sequence: Synthetic oligonucleotide
  Antisense strand to SEQ ID NO: 778478
ucauuggacagaaacugau

SEQ ID NO: 778480 - RNA, 19 nt, Artificial Sequence
  Description of Artificial Sequence: Synthetic oligonucleotide
  Sense strand starting at position 205 of SEQ ID NO: 587255
ucaguuucuguccaaugaa

SEQ ID NO: 778481 - RNA, 19 nt, Artificial Sequence
  Description of Artificial Sequence: Synthetic oligonucleotide
  Antisense strand to SEQ ID NO: 778480
uucauuggacagaaacuga

SEQ ID NO: 778482 - RNA, 19 nt, Artificial Sequence
  Description of Artificial Sequence: Synthetic oligonucleotide
  Sense strand starting at position 208 of SEQ ID NO: 587255
guuucuguccaaugaaacu

SEQ ID NO: 778483 - RNA, 19 nt, Artificial Sequence
  Description of Artificial Sequence: Synthetic oligonucleotide
  Antisense strand to SEQ ID NO: 778482
aguuucauuggacagaaac

SEQ ID NO: 778484 - RNA, 19 nt, Artificial Sequence
  Description of Artificial Sequence: Synthetic oligonucleotide
  Sense strand starting at position 226 of SEQ ID NO: 587255
ugaugaacgcaugguaaga

SEQ ID NO: 778485 - RNA, 19 nt, Artificial Sequence
  Description of Artificial Sequence: Synthetic oligonucleotide
  Antisense strand to SEQ ID NO: 778484
ucuuaccaugcguucauca

SEQ ID NO: 778486 - RNA, 19 nt, Artificial Sequence
  Description of Artificial Sequence: Synthetic oligonucleotide
  Sense strand starting at position 287 of SEQ ID NO: 587255
accaguaucuuguuccaaa

SEQ ID NO: 778487 - RNA, 19 nt, Artificial Sequence
  Description of Artificial Sequence: Synthetic oligonucleotide
  Antisense strand to SEQ ID NO: 778486
uuuggaacaagauacuggu

SEQ ID NO: 778488 - RNA, 19 nt, Artificial Sequence
  Description of Artificial Sequence: Synthetic oligonucleotide
  Sense strand starting at position 288 of SEQ ID NO: 587255
ccaguaucuuguuccaaag

SEQ ID NO: 778489 - RNA, 19 nt, Artificial Sequence
  Description of Artificial Sequence: Synthetic oligonucleotide
  Antisense strand to SEQ ID NO: 778488
cuuuggaacaagauacugg

SEQ ID NO: 778490 - RNA, 19 nt, Artificial Sequence
  Description of Artificial Sequence: Synthetic oligonucleotide
  Sense strand starting at position 303 of SEQ ID NO: 587255
aaagguauuugggaagaac

SEQ ID NO: 778491 - RNA, 19 nt, Artificial Sequence
  Description of Artificial Sequence: Synthetic oligonucleotide
  Antisense strand to SEQ ID NO: 778490
guucuucccaaauaccuuu

SEQ ID NO: 778492 - RNA, 19 nt, Artificial Sequence
  Description of Artificial Sequence: Synthetic oligonucleotide
  Sense strand starting at position 323 of SEQ ID NO: 587255
ucuaguagaugucccuauu

SEQ ID NO: 778493 - RNA, 19 nt, Artificial Sequence
  Description of Artificial Sequence: Synthetic oligonucleotide
  Antisense strand to SEQ ID NO: 778492
aauagggacaucuacuaga

SEQ ID NO: 778494 - RNA, 19 nt, Artificial Sequence
  Description of Artificial Sequence: Synthetic oligonucleotide
  Sense strand starting at position 397 of SEQ ID NO: 587255
ccuguaguucugggaucag

SEQ ID NO: 778495 - RNA, 19 nt, Artificial Sequence
  Description of Artificial Sequence: Synthetic oligonucleotide
  Antisense strand to SEQ ID NO: 778494
cugaucccagaacuacagg

SEQ ID NO: 778496 - RNA, 19 nt, Artificial Sequence
  Description of Artificial Sequence: Synthetic oligonucleotide
  Sense strand starting at position 401 of SEQ ID NO: 587255
uaguucugggaucagucaa

SEQ ID NO: 778497 - RNA, 19 nt, Artificial Sequence
  Description of Artificial Sequence: Synthetic oligonucleotide
  Antisense strand to SEQ ID NO: 778496
uugacugaucccagaacua

SEQ ID NO: 778498 - RNA, 19 nt, Artificial Sequence
  Description of Artificial Sequence: Synthetic oligonucleotide
  Sense strand starting at position 735 of SEQ ID NO: 587255
uagcauuauguugggaauu

SEQ ID NO: 778499 - RNA, 19 nt, Artificial Sequence
  Description of Artificial Sequence: Synthetic oligonucleotide
  Antisense strand to SEQ ID NO: 778498
aauucccaacauaaugcua

SEQ ID NO: 778500 - RNA, 19 nt, Artificial Sequence
  Description of Artificial Sequence: Synthetic oligonucleotide
  Sense strand starting at position 850 of SEQ ID NO: 587255
aaugucacccuuugggaau

SEQ ID NO: 778501 - RNA, 19 nt, Artificial Sequence
  Description of Artificial Sequence: Synthetic oligonucleotide
  Antisense strand to SEQ ID NO: 778500
auucccaaagggugacauu

SEQ ID NO: 778502 - RNA, 19 nt, Artificial Sequence
  Description of Artificial Sequence: Synthetic oligonucleotide
  Sense strand starting at position 1015 of SEQ ID NO: 587255
acuuuaucagacgagucaa

SEQ ID NO: 778503 - RNA, 19 nt, Artificial Sequence
  Description of Artificial Sequence: Synthetic oligonucleotide
  Antisense strand to SEQ ID NO: 778502
uugacucgucugauaaagu

SEQ ID NO: 778504 - RNA, 19 nt, Artificial Sequence
  Description of Artificial Sequence: Synthetic oligonucleotide
  Sense strand starting at position 1121 of SEQ ID NO: 587255
ugauuagacagcugagagu

SEQ ID NO: 778505 - RNA, 19 nt, Artificial Sequence
  Description of Artificial Sequence: Synthetic oligonucleotide
  Antisense strand to SEQ ID NO: 778504
acucucagcugucuaauca

SEQ ID NO: 778506 - RNA, 19 nt, Artificial Sequence
  Description of Artificial Sequence: Synthetic oligonucleotide
  Sense strand starting at position 1380 of SEQ ID NO: 587255
guaggucacuuuccauaaa

SEQ ID NO: 778507 - RNA, 19 nt, Artificial Sequence
  Description of Artificial Sequence: Synthetic oligonucleotide
  Antisense strand to SEQ ID NO: 778506
uuuauggaaagugaccuac

SEQ ID NO: 778508 - RNA, 19 nt, Artificial Sequence
  Description of Artificial Sequence: Synthetic oligonucleotide
  Sense strand starting at position 1411 of SEQ ID NO: 587255
gcuugaaccagguaagucu

SEQ ID NO: 778509 - RNA, 19 nt, Artificial Sequence
  Description of Artificial Sequence: Synthetic oligonucleotide
  Antisense strand to SEQ ID NO: 778508
agacuuaccugguucaagc

SEQ ID NO: 778510 - RNA, 19 nt, Artificial Sequence
  Description of Artificial Sequence: Synthetic oligonucleotide
  Sense strand starting at position 1674 of SEQ ID NO: 587255
ucaguaucuccaggaguuc

SEQ ID NO: 778511 - RNA, 19 nt, Artificial Sequence
  Description of Artificial Sequence: Synthetic oligonucleotide
  Antisense strand to SEQ ID NO: 778510
gaacuccuggagauacuga

SEQ ID NO: 778512 - RNA, 19 nt, Artificial Sequence
  Description of Artificial Sequence: Synthetic oligonucleotide
  Sense strand starting at position 1773 of SEQ ID NO: 587255
agcugucagcuagaucuaa

SEQ ID NO: 778513 - RNA, 19 nt, Artificial Sequence
  Description of Artificial Sequence: Synthetic oligonucleotide
  Antisense strand to SEQ ID NO: 778512
uuagaucuagcugacagcu

SEQ ID NO: 778514 - RNA, 19 nt, Artificial Sequence
  Description of Artificial Sequence: Synthetic oligonucleotide
  Sense strand starting at position 2228 of SEQ ID NO: 587255
gcuuuaacggcuuuagcuu

SEQ ID NO: 778515 - RNA, 19 nt, Artificial Sequence
  Description of Artificial Sequence: Synthetic oligonucleotide
  Antisense strand to SEQ ID NO: 778514
aagcuaaagccguuaaagc

SEQ ID NO: 778516 - RNA, 19 nt, Artificial Sequence
  Description of Artificial Sequence: Synthetic oligonucleotide
  Sense strand starting at position 2356 of SEQ ID NO: 587255
agaccauuagauugcuuga

SEQ ID NO: 778517 - RNA, 19 nt, Artificial Sequence
  Description of Artificial Sequence: Synthetic oligonucleotide
  Antisense strand to SEQ ID NO: 778516
ucaagcaaucuaauggucu

SEQ ID NO: 778518 - RNA, 19 nt, Artificial Sequence
  Description of Artificial Sequence: Synthetic oligonucleotide
  Sense strand starting at position 2358 of SEQ ID NO: 587255
accauuagauugcuugaau

SEQ ID NO: 778519 - RNA, 19 nt, Artificial Sequence
  Description of Artificial Sequence: Synthetic oligonucleotide
  Antisense strand to SEQ ID NO: 778518
auucaagcaaucuaauggu

SEQ ID NO: 778520 - RNA, 19 nt, Artificial Sequence
  Description of Artificial Sequence: Synthetic oligonucleotide
  Sense strand starting at position 2359 of SEQ ID NO: 587255
ccauuagauugcuugaaug

SEQ ID NO: 778521 - RNA, 19 nt, Artificial Sequence
  Description of Artificial Sequence: Synthetic oligonucleotide
  Antisense strand to SEQ ID NO: 778520
cauucaagcaaucuaaugg

SEQ ID NO: 778522 - RNA, 19 nt, Artificial Sequence
  Description of Artificial Sequence: Synthetic oligonucleotide
  Sense strand starting at position 2760 of SEQ ID NO: 587255
uagaguucugauuaguaua

SEQ ID NO: 778523 - RNA, 19 nt, Artificial Sequence
  Description of Artificial Sequence: Synthetic oligonucleotide
  Antisense strand to SEQ ID NO: 778522
uauacuaaucagaacucua

SEQ ID NO: 778524 - RNA, 19 nt, Artificial Sequence
  Description of Artificial Sequence: Synthetic oligonucleotide
  Sense strand starting at position 2762 of SEQ ID NO: 587255
gaguucugauuaguauacu

SEQ ID NO: 778525 - RNA, 19 nt, Artificial Sequence
  Description of Artificial Sequence: Synthetic oligonucleotide
  Antisense strand to SEQ ID NO: 778524
aguauacuaaucagaacuc

SEQ ID NO: 778526 - RNA, 19 nt, Artificial Sequence
  Description of Artificial Sequence: Synthetic oligonucleotide
  Sense strand starting at position 2910 of SEQ ID NO: 587255
aguaauuuccaguggcuua

SEQ ID NO: 778527 - RNA, 19 nt, Artificial Sequence
  Description of Artificial Sequence: Synthetic oligonucleotide
  Antisense strand to SEQ ID NO: 778526
uaagccacuggaaauuacu

SEQ ID NO: 778528 - RNA, 19 nt, Artificial Sequence
  Description of Artificial Sequence: Synthetic oligonucleotide
  Sense strand starting at position 2920 of SEQ ID NO: 587255
aguggcuuacggcaagaau

SEQ ID NO: 778529 - RNA, 19 nt, Artificial Sequence
  Description of Artificial Sequence: Synthetic oligonucleotide
  Antisense strand to SEQ ID NO: 778528
auucuugccguaagccacu

SEQ ID NO: 778530 - RNA, 19 nt, Artificial Sequence
  Description of Artificial Sequence: Synthetic oligonucleotide
  Sense strand starting at position 2923 of SEQ ID NO: 587255
ggcuuacggcaagaauaua

SEQ ID NO: 778531 - RNA, 19 nt, Artificial Sequence
  Description of Artificial Sequence: Synthetic oligonucleotide
  Antisense strand to SEQ ID NO: 778530
uauauucuugccguaagcc

SEQ ID NO: 778532 - RNA, 19 nt, Artificial Sequence
  Description of Artificial Sequence: Synthetic oligonucleotide
  Sense strand starting at position 3047 of SEQ ID NO: 587255
auuaaauccgucugagagu

SEQ ID NO: 778533 - RNA, 19 nt, Artificial Sequence
  Description of Artificial Sequence: Synthetic oligonucleotide
  Antisense strand to SEQ ID NO: 778532
acucucagacggauuuaau

SEQ ID NO: 778534 - RNA, 19 nt, Artificial Sequence
  Description of Artificial Sequence: Synthetic oligonucleotide
  Sense strand starting at position 3253 of SEQ ID NO: 587255
agggauucuuuccucagau

SEQ ID NO: 778535 - RNA, 19 nt, Artificial Sequence
  Description of Artificial Sequence: Synthetic oligonucleotide
  Antisense strand to SEQ ID NO: 778534
aucugaggaaagaaucccu

SEQ ID NO: 778536 - RNA, 19 nt, Artificial Sequence
  Description of Artificial Sequence: Synthetic oligonucleotide
  Sense strand starting at position 3254 of SEQ ID NO: 587255
gggauucuuuccucagaug

SEQ ID NO: 778537 - RNA, 19 nt, Artificial Sequence
  Description of Artificial Sequence: Synthetic oligonucleotide
  Antisense strand to SEQ ID NO: 778536
caucugaggaaagaauccc

SEQ ID NO: 778538 - RNA, 19 nt, Artificial Sequence
  Description of Artificial Sequence: Synthetic oligonucleotide
  Sense strand starting at position 3315 of SEQ ID NO: 587255
cuugauaugucacuuugua

SEQ ID NO: 778539 - RNA, 19 nt, Artificial Sequence
  Description of Artificial Sequence: Synthetic oligonucleotide
  Antisense strand to SEQ ID NO: 778538
uacaaagugacauaucaag

SEQ ID NO: 778540 - RNA, 19 nt, Artificial Sequence
  Description of Artificial Sequence: Synthetic oligonucleotide
  Sense strand starting at position 3364 of SEQ ID NO: 587255
ucaguuucuguccagugaa

SEQ ID NO: 778541 - RNA, 19 nt, Artificial Sequence
  Description of Artificial Sequence: Synthetic oligonucleotide
  Antisense strand to SEQ ID NO: 778540
uucacuggacagaaacuga

SEQ ID NO: 778542 - RNA, 19 nt, Artificial Sequence
  Description of Artificial Sequence: Synthetic oligonucleotide
  Sense strand starting at position 3385 of SEQ ID NO: 587255
uauugaaugcaugguaaga

SEQ ID NO: 778543 - RNA, 19 nt, Artificial Sequence
  Description of Artificial Sequence: Synthetic oligonucleotide
  Antisense strand to SEQ ID NO: 778542
ucuuaccaugcauucaaua

SEQ ID NO: 778544 - RNA, 19 nt, Artificial Sequence
  Description of Artificial Sequence: Synthetic oligonucleotide
  Sense strand starting at position 3590 of SEQ ID NO: 587255
cuugcuaaauuguuaaaug

SEQ ID NO: 778545 - RNA, 19 nt, Artificial Sequence
  Description of Artificial Sequence: Synthetic oligonucleotide
  Antisense strand to SEQ ID NO: 778544
cauuuaacaauuuagcaag

SEQ ID NO: 778546 - RNA, 19 nt, Artificial Sequence
  Description of Artificial Sequence: Synthetic oligonucleotide
  Sense strand starting at position 3917 of SEQ ID NO: 587255
acaaacuaggcaugcaaau

SEQ ID NO: 778547 - RNA, 19 nt, Artificial Sequence
  Description of Artificial Sequence: Synthetic oligonucleotide
  Antisense strand to SEQ ID NO: 778546
auuugcaugccuaguuugu

SEQ ID NO: 778548 - RNA, 19 nt, Artificial Sequence
  Description of Artificial Sequence: Synthetic oligonucleotide
  Sense strand starting at position 3932 of SEQ ID NO: 587255
aaauauuuguuggagucau

SEQ ID NO: 778549 - RNA, 19 nt, Artificial Sequence
  Description of Artificial Sequence: Synthetic oligonucleotide
  Antisense strand to SEQ ID NO: 778548
augacuccaacaaauauuu

SEQ ID NO: 778550 - RNA, 19 nt, Artificial Sequence
  Description of Artificial Sequence: Synthetic oligonucleotide
  Sense strand starting at position 3942 of SEQ ID NO: 587255
uggagucaucagugaaaca

SEQ ID NO: 778551 - RNA, 19 nt, Artificial Sequence
  Description of Artificial Sequence: Synthetic oligonucleotide
  Antisense strand to SEQ ID NO: 778550
uguuucacugaugacucca

SEQ ID NO: 778552 - RNA, 19 nt, Artificial Sequence
  Description of Artificial Sequence: Synthetic oligonucleotide
  Sense strand starting at position 3978 of SEQ ID NO: 587255
ucgugacuagugcauaaau

SEQ ID NO: 778553 - RNA, 19 nt, Artificial Sequence
  Description of Artificial Sequence: Synthetic oligonucleotide
  Antisense strand to SEQ ID NO: 778552
auuuaugcacuagucacga

SEQ ID NO: 778554 - RNA, 19 nt, Artificial Sequence
  Description of Artificial Sequence: Synthetic oligonucleotide
  Sense strand starting at position 3980 of SEQ ID NO: 587255
gugacuagugcauaaauaa

SEQ ID NO: 778555 - RNA, 19 nt, Artificial Sequence
  Description of Artificial Sequence: Synthetic oligonucleotide
  Antisense strand to SEQ ID NO: 778554
uuauuuaugcacuagucac

SEQ ID NO: 778556 - RNA, 19 nt, Artificial Sequence
  Description of Artificial Sequence: Synthetic oligonucleotide
  Sense strand starting at position 38 of SEQ ID NO: 587256
accuaucucuugccuguua

SEQ ID NO: 778557 - RNA, 19 nt, Artificial Sequence
  Description of Artificial Sequence: Synthetic oligonucleotide
  Antisense strand to SEQ ID NO: 778556
uaacaggcaagagauaggu

SEQ ID NO: 778558 - RNA, 19 nt, Artificial Sequence
  Description of Artificial Sequence: Synthetic oligonucleotide
  Sense strand starting at position 80 of SEQ ID NO: 587256
uaggucuagaaacgugaga

SEQ ID NO: 778559 - RNA, 19 nt, Artificial Sequence
  Description of Artificial Sequence: Synthetic oligonucleotide
  Antisense strand to SEQ ID NO: 778558
ucucacguuucuagaccua

SEQ ID NO: 778560 - RNA, 19 nt, Artificial Sequence
  Description of Artificial Sequence: Synthetic oligonucleotide
  Sense strand starting at position 82 of SEQ ID NO: 587256
ggucuagaaacgugagaca

SEQ ID NO: 778561 - RNA, 19 nt, Artificial Sequence
  Description of Artificial Sequence: Synthetic oligonucleotide
  Antisense strand to SEQ ID NO: 778560
ugucucacguuucuagacc

SEQ ID NO: 778562 - RNA, 19 nt, Artificial Sequence
  Description of Artificial Sequence: Synthetic oligonucleotide
  Sense strand starting at position 96 of SEQ ID NO: 587256
agacacauuucccaguauu

SEQ ID NO: 778563 - RNA, 19 nt, Artificial Sequence
  Description of Artificial Sequence: Synthetic oligonucleotide
  Antisense strand to SEQ ID NO: 778562
aauacugggaaaugugucu

SEQ ID NO: 778564 - RNA, 19 nt, Artificial Sequence
  Description of Artificial Sequence: Synthetic oligonucleotide
  Sense strand starting at position 203 of SEQ ID NO: 587256
agacaugcuucucuggcaa

SEQ ID NO: 778565 - RNA, 19 nt, Artificial Sequence
  Description of Artificial Sequence: Synthetic oligonucleotide
  Antisense strand to SEQ ID NO: 778564
uugccagagaagcaugucu

SEQ ID NO: 778566 - RNA, 19 nt, Artificial Sequence
  Description of Artificial Sequence: Synthetic oligonucleotide
  Sense strand starting at position 315 of SEQ ID NO: 587256
auucucauuuagggauguu

SEQ ID NO: 778567 - RNA, 19 nt, Artificial Sequence
  Description of Artificial Sequence: Synthetic oligonucleotide
  Antisense strand to SEQ ID NO: 778566
aacaucccuaaaugagaau

SEQ ID NO: 778568 - RNA, 19 nt, Artificial Sequence
  Description of Artificial Sequence: Synthetic oligonucleotide
  Sense strand starting at position 382 of SEQ ID NO: 587256
agguuuaaguaagugacau

SEQ ID NO: 778569 - RNA, 19 nt, Artificial Sequence
  Description of Artificial Sequence: Synthetic oligonucleotide
  Antisense strand to SEQ ID NO: 778568
augucacuuacuuaaaccu

SEQ ID NO: 778570 - RNA, 19 nt, Artificial Sequence
  Description of Artificial Sequence: Synthetic oligonucleotide
  Sense strand starting at position 383 of SEQ ID NO: 587256
gguuuaaguaagugacauu

SEQ ID NO: 778571 - RNA, 19 nt, Artificial Sequence
  Description of Artificial Sequence: Synthetic oligonucleotide
  Antisense strand to SEQ ID NO: 778570
aaugucacuuacuuaaacc

SEQ ID NO: 778572 - RNA, 19 nt, Artificial Sequence
  Description of Artificial Sequence: Synthetic oligonucleotide
  Sense strand starting at position 447 of SEQ ID NO: 587256
gugaauuaauaugcuugca

SEQ ID NO: 778573 - RNA, 19 nt, Artificial Sequence
  Description of Artificial Sequence: Synthetic oligonucleotide
  Antisense strand to SEQ ID NO: 778572
ugcaagcauauuaauucac

SEQ ID NO: 778574 - RNA, 19 nt, Artificial Sequence
  Description of Artificial Sequence: Synthetic oligonucleotide
  Sense strand starting at position 455 of SEQ ID NO: 587256
auaugcuugcauugaacuu

SEQ ID NO: 778575 - RNA, 19 nt, Artificial Sequence
  Description of Artificial Sequence: Synthetic oligonucleotide
  Antisense strand to SEQ ID NO: 778574
aaguucaaugcaagcauau

SEQ ID NO: 778576 - RNA, 19 nt, Artificial Sequence
  Description of Artificial Sequence: Synthetic oligonucleotide
  Sense strand starting at position 480 of SEQ ID NO: 587256
gugucuacaucuuuacuuu

SEQ ID NO: 778577 - RNA, 19 nt, Artificial Sequence
  Description of Artificial Sequence: Synthetic oligonucleotide
  Antisense strand to SEQ ID NO: 778576
aaaguaaagauguagacac

SEQ ID NO: 778578 - RNA, 19 nt, Artificial Sequence
  Description of Artificial Sequence: Synthetic oligonucleotide
  Sense strand starting at position 607 of SEQ ID NO: 587256
caccuauuaugggaaagga

SEQ ID NO: 778579 - RNA, 19 nt, Artificial Sequence
  Description of Artificial Sequence: Synthetic oligonucleotide
  Antisense strand to SEQ ID NO: 778578
uccuuucccauaauaggug

SEQ ID NO: 778580 - RNA, 19 nt, Artificial Sequence
  Description of Artificial Sequence: Synthetic oligonucleotide
  Sense strand starting at position 673 of SEQ ID NO: 587256
acaugaaaguaauaagaca

SEQ ID NO: 778581 - RNA, 19 nt, Artificial Sequence
  Description of Artificial Sequence: Synthetic oligonucleotide
  Antisense strand to SEQ ID NO: 778580
ugucuuauuacuuucaugu

SEQ ID NO: 778582 - RNA, 19 nt, Artificial Sequence
  Description of Artificial Sequence: Synthetic oligonucleotide
  Sense strand starting at position 726 of SEQ ID NO: 587256
cuucuuugacuauagcuga

SEQ ID NO: 778583 - RNA, 19 nt, Artificial Sequence
  Description of Artificial Sequence: Synthetic oligonucleotide
  Antisense strand to SEQ ID NO: 778582
ucagcuauagucaaagaag

SEQ ID NO: 778584 - RNA, 19 nt, Artificial Sequence
  Description of Artificial Sequence: Synthetic oligonucleotide
  Sense strand starting at position 757 of SEQ ID NO: 587256
guauauuaugaaugcauga

SEQ ID NO: 778585 - RNA, 19 nt, Artificial Sequence
  Description of Artificial Sequence: Synthetic oligonucleotide
  Antisense strand to SEQ ID NO: 778584
ucaugcauucauaauauac

SEQ ID NO: 778586 - RNA, 19 nt, Artificial Sequence
  Description of Artificial Sequence: Synthetic oligonucleotide
  Sense strand starting at position 909 of SEQ ID NO: 587256
acugaaauaugagacgaaa

SEQ ID NO: 778587 - RNA, 19 nt, Artificial Sequence
  Description of Artificial Sequence: Synthetic oligonucleotide
  Antisense strand to SEQ ID NO: 778586
uuucgucucauauuucagu

SEQ ID NO: 778588 - RNA, 19 nt, Artificial Sequence
  Description of Artificial Sequence: Synthetic oligonucleotide
  Sense strand starting at position 1190 of SEQ ID NO: 587256
uccuuugaguugcucugaa

SEQ ID NO: 778589 - RNA, 19 nt, Artificial Sequence
  Description of Artificial Sequence: Synthetic oligonucleotide
  Antisense strand to SEQ ID NO: 778588
uucagagcaacucaaagga

SEQ ID NO: 778590 - RNA, 19 nt, Artificial Sequence
  Description of Artificial Sequence: Synthetic oligonucleotide
  Sense strand starting at position 1238 of SEQ ID NO: 587256
cccugacuuuggcucauuu

SEQ ID NO: 778591 - RNA, 19 nt, Artificial Sequence
  Description of Artificial Sequence: Synthetic oligonucleotide
  Antisense strand to SEQ ID NO: 778590
aaaugagccaaagucaggg

SEQ ID NO: 778592 - RNA, 19 nt, Artificial Sequence
  Description of Artificial Sequence: Synthetic oligonucleotide
  Sense strand starting at position 1283 of SEQ ID NO: 587256
acgauaaauuguucucuua

SEQ ID NO: 778593 - RNA, 19 nt, Artificial Sequence
  Description of Artificial Sequence: Synthetic oligonucleotide
  Antisense strand to SEQ ID NO: 778592
uaagagaacaauuuaucgu

SEQ ID NO: 778594 - RNA, 19 nt, Artificial Sequence
  Description of Artificial Sequence: Synthetic oligonucleotide
  Sense strand starting at position 2422 of SEQ ID NO: 587256
cuaagacauuucuggaaug

SEQ ID NO: 778595 - RNA, 19 nt, Artificial Sequence
  Description of Artificial Sequence: Synthetic oligonucleotide
  Antisense strand to SEQ ID NO: 778594
cauuccagaaaugucuuag

SEQ ID NO: 778596 - RNA, 19 nt, Artificial Sequence
  Description of Artificial Sequence: Synthetic oligonucleotide
  Sense strand starting at position 2461 of SEQ ID NO: 587256
augcuuaaaccguaguagu

SEQ ID NO: 778597 - RNA, 19 nt, Artificial Sequence
  Description of Artificial Sequence: Synthetic oligonucleotide
  Antisense strand to SEQ ID NO: 778596
acuacuacgguuuaagcau

SEQ ID NO: 778598 - RNA, 19 nt, Artificial Sequence
  Description of Artificial Sequence: Synthetic oligonucleotide
  Sense strand starting at position 2501 of SEQ ID NO: 587256
aggaauuuaguucguuugu

SEQ ID NO: 778599 - RNA, 19 nt, Artificial Sequence
  Description of Artificial Sequence: Synthetic oligonucleotide
  Antisense strand to SEQ ID NO: 778598
acaaacgaacuaaauuccu

SEQ ID NO: 778600 - RNA, 19 nt, Artificial Sequence
  Description of Artificial Sequence: Synthetic oligonucleotide
  Sense strand starting at position 2512 of SEQ ID NO: 587256
ucguuugugccaucaguau

SEQ ID NO: 778601 - RNA, 19 nt, Artificial Sequence
  Description of Artificial Sequence: Synthetic oligonucleotide
  Antisense strand to SEQ ID NO: 778600
auacugauggcacaaacga

SEQ ID NO: 778602 - RNA, 19 nt, Artificial Sequence
  Description of Artificial Sequence: Synthetic oligonucleotide
  Sense strand starting at position 2535 of SEQ ID NO: 587256
agauacucuuaguuaagga

SEQ ID NO: 778603 - RNA, 19 nt, Artificial Sequence
  Description of Artificial Sequence: Synthetic oligonucleotide
  Antisense strand to SEQ ID NO: 778602
uccuuaacuaagaguaucu

SEQ ID NO: 778604 - RNA, 19 nt, Artificial Sequence
  Description of Artificial Sequence: Synthetic oligonucleotide
  Sense strand starting at position 2601 of SEQ ID NO: 587256
ggcacccucugucugaaau

SEQ ID NO: 778605 - RNA, 19 nt, Artificial Sequence
  Description of Artificial Sequence: Synthetic oligonucleotide
  Antisense strand to SEQ ID NO: 778604
auuucagacagagggugcc

SEQ ID NO: 778606 - RNA, 19 nt, Artificial Sequence
  Description of Artificial Sequence: Synthetic oligonucleotide
  Sense strand starting at position 2602 of SEQ ID NO: 587256
gcacccucugucugaaauc

SEQ ID NO: 778607 - RNA, 19 nt, Artificial Sequence
  Description of Artificial Sequence: Synthetic oligonucleotide
  Antisense strand to SEQ ID NO: 778606
gauuucagacagagggugc

SEQ ID NO: 778608 - RNA, 19 nt, Artificial Sequence
  Description of Artificial Sequence: Synthetic oligonucleotide
  Sense strand starting at position 2654 of SEQ ID NO: 587256
gccugagaauucccaacag

SEQ ID NO: 778609 - RNA, 19 nt, Artificial Sequence
  Description of Artificial Sequence: Synthetic oligonucleotide
  Antisense strand to SEQ ID NO: 778608
cuguugggaauucucaggc

SEQ ID NO: 778610 - RNA, 19 nt, Artificial Sequence
  Description of Artificial Sequence: Synthetic oligonucleotide
  Sense strand starting at position 2716 of SEQ ID NO: 587256
ugagaucagcgacgucuuu

SEQ ID NO: 778611 - RNA, 19 nt, Artificial Sequence
  Description of Artificial Sequence: Synthetic oligonucleotide
  Antisense strand to SEQ ID NO: 778610
aaagacgucgcugaucuca

SEQ ID NO: 778612 - RNA, 19 nt, Artificial Sequence
  Description of Artificial Sequence: Synthetic oligonucleotide
  Sense strand starting at position 2722 of SEQ ID NO: 587256
cagcgacgucuuuaucauc

SEQ ID NO: 778613 - RNA, 19 nt, Artificial Sequence
  Description of Artificial Sequence: Synthetic oligonucleotide
  Antisense strand to SEQ ID NO: 778612
gaugauaaagacgucgcug

SEQ ID NO: 778614 - RNA, 19 nt, Artificial Sequence
  Description of Artificial Sequence: Synthetic oligonucleotide
  Sense strand starting at position 2742 of SEQ ID NO: 587256
uugugucaccauugcuaac

SEQ ID NO: 778615 - RNA, 19 nt, Artificial Sequence
  Description of Artificial Sequence: Synthetic oligonucleotide
  Antisense strand to SEQ ID NO: 778614
guuagcaauggugacacaa

SEQ ID NO: 778616 - RNA, 19 nt, Artificial Sequence
  Description of Artificial Sequence: Synthetic oligonucleotide
  Sense strand starting at position 2786 of SEQ ID NO: 587256
gcaagaaaugcuuagugau

SEQ ID NO: 778617 - RNA, 19 nt, Artificial Sequence
  Description of Artificial Sequence: Synthetic oligonucleotide
  Antisense strand to SEQ ID NO: 778616
aucacuaagcauuucuugc

SEQ ID NO: 778618 - RNA, 19 nt, Artificial Sequence
  Description of Artificial Sequence: Synthetic oligonucleotide
  Sense strand starting at position 2789 of SEQ ID NO: 587256
agaaaugcuuagugauuug

SEQ ID NO: 778619 - RNA, 19 nt, Artificial Sequence
  Description of Artificial Sequence: Synthetic oligonucleotide
  Antisense strand to SEQ ID NO: 778618
caaaucacuaagcauuucu

SEQ ID NO: 778620 - RNA, 19 nt, Artificial Sequence
  Description of Artificial Sequence: Synthetic oligonucleotide
  Sense strand starting at position 2842 of SEQ ID NO: 587256
ugaucauguuucguagcaa

SEQ ID NO: 778621 - RNA, 19 nt, Artificial Sequence
  Description of Artificial Sequence: Synthetic oligonucleotide
  Antisense strand to SEQ ID NO: 778620
uugcuacgaaacaugauca

SEQ ID NO: 778622 - RNA, 19 nt, Artificial Sequence
  Description of Artificial Sequence: Synthetic oligonucleotide
  Sense strand starting at position 3068 of SEQ ID NO: 587256
ggucauguugcagaauaaa

SEQ ID NO: 778623 - RNA, 19 nt, Artificial Sequence
  Description of Artificial Sequence: Synthetic oligonucleotide
  Antisense strand to SEQ ID NO: 778622
uuuauucugcaacaugacc

SEQ ID NO: 778624 - RNA, 19 nt, Artificial Sequence
  Description of Artificial Sequence: Synthetic oligonucleotide
  Sense strand starting at position 3300 of SEQ ID NO: 587256
agaaauaaaucugagugau

SEQ ID NO: 778625 - RNA, 19 nt, Artificial Sequence
  Description of Artificial Sequence: Synthetic oligonucleotide
  Antisense strand to SEQ ID NO: 778624
aucacucagauuuauuucu

SEQ ID NO: 778626 - RNA, 19 nt, Artificial Sequence
  Description of Artificial Sequence: Synthetic oligonucleotide
  Sense strand starting at position 3303 of SEQ ID NO: 587256
aauaaaucugagugauggu

SEQ ID NO: 778627 - RNA, 19 nt, Artificial Sequence
  Description of Artificial Sequence: Synthetic oligonucleotide
  Antisense strand to SEQ ID NO: 778626
accaucacucagauuuauu

SEQ ID NO: 778628 - RNA, 19 nt, Artificial Sequence
  Description of Artificial Sequence: Synthetic oligonucleotide
  Sense strand starting at position 3462 of SEQ ID NO: 587256
acuggaagcucagagagau

SEQ ID NO: 778629 - RNA, 19 nt, Artificial Sequence
  Description of Artificial Sequence: Synthetic oligonucleotide
  Antisense strand to SEQ ID NO: 778628
aucucucugagcuuccagu

SEQ ID NO: 778630 - RNA, 19 nt, Artificial Sequence
  Description of Artificial Sequence: Synthetic oligonucleotide
  Sense strand starting at position 3486 of SEQ ID NO: 587256
aaaguagggucacuguauu

SEQ ID NO: 778631 - RNA, 19 nt, Artificial Sequence
  Description of Artificial Sequence: Synthetic oligonucleotide
  Antisense strand to SEQ ID NO: 778630
aauacagugacccuacuuu

SEQ ID NO: 778632 - RNA, 19 nt, Artificial Sequence
  Description of Artificial Sequence: Synthetic oligonucleotide
  Sense strand starting at position 3805 of SEQ ID NO: 587256
gauacaauuugauguugag

SEQ ID NO: 778633 - RNA, 19 nt, Artificial Sequence
  Description of Artificial Sequence: Synthetic oligonucleotide
  Antisense strand to SEQ ID NO: 778632
cucaacaucaaauuguauc

SEQ ID NO: 778634 - RNA, 19 nt, Artificial Sequence
  Description of Artificial Sequence: Synthetic oligonucleotide
  Sense strand starting at position 3808 of SEQ ID NO: 587256
acaauuugauguugagauu

SEQ ID NO: 778635 - RNA, 19 nt, Artificial Sequence
  Description of Artificial Sequence: Synthetic oligonucleotide
  Antisense strand to SEQ ID NO: 778634
aaucucaacaucaaauugu

SEQ ID NO: 778636 - RNA, 19 nt, Artificial Sequence
  Description of Artificial Sequence: Synthetic oligonucleotide
  Sense strand starting at position 210 of SEQ ID NO: 587257
auauaucaguacguaucau

SEQ ID NO: 778637 - RNA, 19 nt, Artificial Sequence
  Description of Artificial Sequence: Synthetic oligonucleotide
  Antisense strand to SEQ ID NO: 778636
augauacguacugauauau

SEQ ID NO: 778638 - RNA, 19 nt, Artificial Sequence
  Description of Artificial Sequence: Synthetic oligonucleotide
  Sense strand starting at position 244 of SEQ ID NO: 587257
uaguguuacccuggacaua

SEQ ID NO: 778639 - RNA, 19 nt, Artificial Sequence
  Description of Artificial Sequence: Synthetic oligonucleotide
  Antisense strand to SEQ ID NO: 778638
uauguccaggguaacacua

SEQ ID NO: 778640 - RNA, 19 nt, Artificial Sequence
  Description of Artificial Sequence: Synthetic oligonucleotide
  Sense strand starting at position 245 of SEQ ID NO: 587257
aguguuacccuggacauaa

SEQ ID NO: 778641 - RNA, 19 nt, Artificial Sequence
  Description of Artificial Sequence: Synthetic oligonucleotide
  Antisense strand to SEQ ID NO: 778640
uuauguccaggguaacacu

SEQ ID NO: 778642 - RNA, 19 nt, Artificial Sequence
  Description of Artificial Sequence: Synthetic oligonucleotide
  Sense strand starting at position 396 of SEQ ID NO: 587257
ucaggaaauuacuugucuu

SEQ ID NO: 778643 - RNA, 19 nt, Artificial Sequence
  Description of Artificial Sequence: Synthetic oligonucleotide
  Antisense strand to SEQ ID NO: 778642
aagacaaguaauuuccuga

SEQ ID NO: 778644 - RNA, 19 nt, Artificial Sequence
  Description of Artificial Sequence: Synthetic oligonucleotide
  Sense strand starting at position 546 of SEQ ID NO: 587257
acaagaucuuaauagaaga

SEQ ID NO: 778645 - RNA, 19 nt, Artificial Sequence
  Description of Artificial Sequence: Synthetic oligonucleotide
  Antisense strand to SEQ ID NO: 778644
ucuucuauuaagaucuugu

SEQ ID NO: 778646 - RNA, 19 nt, Artificial Sequence
  Description of Artificial Sequence: Synthetic oligonucleotide
  Sense strand starting at position 601 of SEQ ID NO: 587257
agaggauuacauugucacu

SEQ ID NO: 778647 - RNA, 19 nt, Artificial Sequence
  Description of Artificial Sequence: Synthetic oligonucleotide
  Antisense strand to SEQ ID NO: 778646
agugacaauguaauccucu

SEQ ID NO: 778648 - RNA, 19 nt, Artificial Sequence
  Description of Artificial Sequence: Synthetic oligonucleotide
  Sense strand starting at position 728 of SEQ ID NO: 587257
ucaguccagcuauauauua

SEQ ID NO: 778649 - RNA, 19 nt, Artificial Sequence
  Description of Artificial Sequence: Synthetic oligonucleotide
  Antisense strand to SEQ ID NO: 778648
uaauauauagcuggacuga

SEQ ID NO: 778650 - RNA, 19 nt, Artificial Sequence
  Description of Artificial Sequence: Synthetic oligonucleotide
  Sense strand starting at position 794 of SEQ ID NO: 587257
accuucugugaaugcugaa

SEQ ID NO: 778651 - RNA, 19 nt, Artificial Sequence
  Description of Artificial Sequence: Synthetic oligonucleotide
  Antisense strand to SEQ ID NO: 778650
uucagcauucacagaaggu

SEQ ID NO: 778652 - RNA, 19 nt, Artificial Sequence
  Description of Artificial Sequence: Synthetic oligonucleotide
  Sense strand starting at position 866 of SEQ ID NO: 587257
ggaguaacugcucagcuuu

SEQ ID NO: 778653 - RNA, 19 nt, Artificial Sequence
  Description of Artificial Sequence: Synthetic oligonucleotide
  Antisense strand to SEQ ID NO: 778652
aaagcugagcaguuacucc

SEQ ID NO: 778654 - RNA, 19 nt, Artificial Sequence
  Description of Artificial Sequence: Synthetic oligonucleotide
  Sense strand starting at position 974 of SEQ ID NO: 587257
auagacacugcuuguaacu

SEQ ID NO: 778655 - RNA, 19 nt, Artificial Sequence
  Description of Artificial Sequence: Synthetic oligonucleotide
  Antisense strand to SEQ ID NO: 778654
aguuacaagcagugucuau

SEQ ID NO: 778656 - RNA, 19 nt, Artificial Sequence
  Description of Artificial Sequence: Synthetic oligonucleotide
  Sense strand starting at position 1030 of SEQ ID NO: 587257
caggcaaucugaguuccaa

SEQ ID NO: 778657 - RNA, 19 nt, Artificial Sequence
  Description of Artificial Sequence: Synthetic oligonucleotide
  Antisense strand to SEQ ID NO: 778656
uuggaacucagauugccug

SEQ ID NO: 778658 - RNA, 19 nt, Artificial Sequence
  Description of Artificial Sequence: Synthetic oligonucleotide
  Sense strand starting at position 1234 of SEQ ID NO: 587257
acuccucuggaucguuaau

SEQ ID NO: 778659 - RNA, 19 nt, Artificial Sequence
  Description of Artificial Sequence: Synthetic oligonucleotide
  Antisense strand to SEQ ID NO: 778658
auuaacgauccagaggagu

SEQ ID NO: 778660 - RNA, 19 nt, Artificial Sequence
  Description of Artificial Sequence: Synthetic oligonucleotide
  Sense strand starting at position 1244 of SEQ ID NO: 587257
aucguuaauggaggucaga

SEQ ID NO: 778661 - RNA, 19 nt, Artificial Sequence
  Description of Artificial Sequence: Synthetic oligonucleotide
  Antisense strand to SEQ ID NO: 778660
ucugaccuccauuaacgau

SEQ ID NO: 778662 - RNA, 19 nt, Artificial Sequence
  Description of Artificial Sequence: Synthetic oligonucleotide
  Sense strand starting at position 1309 of SEQ ID NO: 587257
cguuuauggcgcagacaga

SEQ ID NO: 778663 - RNA, 19 nt, Artificial Sequence
  Description of Artificial Sequence: Synthetic oligonucleotide
  Antisense strand to SEQ ID NO: 778662
ucugucugcgccauaaacg

SEQ ID NO: 778664 - RNA, 19 nt, Artificial Sequence
  Description of Artificial Sequence: Synthetic oligonucleotide
  Sense strand starting at position 1310 of SEQ ID NO: 587257
guuuauggcgcagacagaa

SEQ ID NO: 778665 - RNA, 19 nt, Artificial Sequence
  Description of Artificial Sequence: Synthetic oligonucleotide
  Antisense strand to SEQ ID NO: 778664
uucugucugcgccauaaac

SEQ ID NO: 778666 - RNA, 19 nt, Artificial Sequence
  Description of Artificial Sequence: Synthetic oligonucleotide
  Sense strand starting at position 2246 of SEQ ID NO: 587257
gugcguagcccguuuggaa

SEQ ID NO: 778667 - RNA, 19 nt, Artificial Sequence
  Description of Artificial Sequence: Synthetic oligonucleotide
  Antisense strand to SEQ ID NO: 778666
uuccaaacgggcuacgcac

SEQ ID NO: 778668 - RNA, 19 nt, Artificial Sequence
  Description of Artificial Sequence: Synthetic oligonucleotide
  Sense strand starting at position 2247 of SEQ ID NO: 587257
ugcguagcccguuuggaau

SEQ ID NO: 778669 - RNA, 19 nt, Artificial Sequence
  Description of Artificial Sequence: Synthetic oligonucleotide
  Antisense strand to SEQ ID NO: 778668
auuccaaacgggcuacgca

SEQ ID NO: 778670 - RNA, 19 nt, Artificial Sequence
  Description of Artificial Sequence: Synthetic oligonucleotide
  Sense strand starting at position 2481 of SEQ ID NO: 587257
uaaauaauugagggcuuga

SEQ ID NO: 778671 - RNA, 19 nt, Artificial Sequence
  Description of Artificial Sequence: Synthetic oligonucleotide
  Antisense strand to SEQ ID NO: 778670
ucaagcccucaauuauuua

SEQ ID NO: 778672 - RNA, 19 nt, Artificial Sequence
  Description of Artificial Sequence: Synthetic oligonucleotide
  Sense strand starting at position 2885 of SEQ ID NO: 587257
auguacauauaaucggaaa

SEQ ID NO: 778673 - RNA, 19 nt, Artificial Sequence
  Description of Artificial Sequence: Synthetic oligonucleotide
  Antisense strand to SEQ ID NO: 778672
uuuccgauuauauguacau

SEQ ID NO: 778674 - RNA, 19 nt, Artificial Sequence
  Description of Artificial Sequence: Synthetic oligonucleotide
  Sense strand starting at position 2886 of SEQ ID NO: 587257
uguacauauaaucggaaag

SEQ ID NO: 778675 - RNA, 19 nt, Artificial Sequence
  Description of Artificial Sequence: Synthetic oligonucleotide
  Antisense strand to SEQ ID NO: 778674
cuuuccgauuauauguaca

SEQ ID NO: 778676 - RNA, 19 nt, Artificial Sequence
  Description of Artificial Sequence: Synthetic oligonucleotide
  Sense strand starting at position 2887 of SEQ ID NO: 587257
guacauauaaucggaaagu

SEQ ID NO: 778677 - RNA, 19 nt, Artificial Sequence
  Description of Artificial Sequence: Synthetic oligonucleotide
  Antisense strand to SEQ ID NO: 778676
acuuuccgauuauauguac

SEQ ID NO: 778678 - RNA, 19 nt, Artificial Sequence
  Description of Artificial Sequence: Synthetic oligonucleotide
  Sense strand starting at position 2903 of SEQ ID NO: 587257
aguaacuccgauuguaaua

SEQ ID NO: 778679 - RNA, 19 nt, Artificial Sequence
  Description of Artificial Sequence: Synthetic oligonucleotide
  Antisense strand to SEQ ID NO: 778678
uauuacaaucggaguuacu

SEQ ID NO: 778680 - RNA, 19 nt, Artificial Sequence
  Description of Artificial Sequence: Synthetic oligonucleotide
  Sense strand starting at position 2954 of SEQ ID NO: 587257
ggagccgugcuugcacaua

SEQ ID NO: 778681 - RNA, 19 nt, Artificial Sequence
  Description of Artificial Sequence: Synthetic oligonucleotide
  Antisense strand to SEQ ID NO: 778680
uaugugcaagcacggcucc

SEQ ID NO: 778682 - RNA, 19 nt, Artificial Sequence
  Description of Artificial Sequence: Synthetic oligonucleotide
  Sense strand starting at position 2959 of SEQ ID NO: 587257
cgugcuugcacauaauaag

SEQ ID NO: 778683 - RNA, 19 nt, Artificial Sequence
  Description of Artificial Sequence: Synthetic oligonucleotide
  Antisense strand to SEQ ID NO: 778682
cuuauuaugugcaagcacg

SEQ ID NO: 778684 - RNA, 19 nt, Artificial Sequence
  Description of Artificial Sequence: Synthetic oligonucleotide
  Sense strand starting at position 2979 of SEQ ID NO: 587257
gcucaauaagcguucgcua

SEQ ID NO: 778685 - RNA, 19 nt, Artificial Sequence
  Description of Artificial Sequence: Synthetic oligonucleotide
  Antisense strand to SEQ ID NO: 778684
uagcgaacgcuuauugagc

SEQ ID NO: 778686 - RNA, 19 nt, Artificial Sequence
  Description of Artificial Sequence: Synthetic oligonucleotide
  Sense strand starting at position 2980 of SEQ ID NO: 587257
cucaauaagcguucgcuau

SEQ ID NO: 778687 - RNA, 19 nt, Artificial Sequence
  Description of Artificial Sequence: Synthetic oligonucleotide
  Antisense strand to SEQ ID NO: 778686
auagcgaacgcuuauugag

SEQ ID NO: 778688 - RNA, 19 nt, Artificial Sequence
  Description of Artificial Sequence: Synthetic oligonucleotide
  Sense strand starting at position 3014 of SEQ ID NO: 587257
gaagauggcuucucuaaga

SEQ ID NO: 778689 - RNA, 19 nt, Artificial Sequence
  Description of Artificial Sequence: Synthetic oligonucleotide
  Antisense strand to SEQ ID NO: 778688
ucuuagagaagccaucuuc

SEQ ID NO: 778690 - RNA, 19 nt, Artificial Sequence
  Description of Artificial Sequence: Synthetic oligonucleotide
  Sense strand starting at position 3031 of SEQ ID NO: 587257
gauggcaguuacuugacua

SEQ ID NO: 778691 - RNA, 19 nt, Artificial Sequence
  Description of Artificial Sequence: Synthetic oligonucleotide
  Antisense strand to SEQ ID NO: 778690
uagucaaguaacugccauc

SEQ ID NO: 778692 - RNA, 19 nt, Artificial Sequence
  Description of Artificial Sequence: Synthetic oligonucleotide
  Sense strand starting at position 3035 of SEQ ID NO: 587257
gcaguuacuugacuacuuu

SEQ ID NO: 778693 - RNA, 19 nt, Artificial Sequence
  Description of Artificial Sequence: Synthetic oligonucleotide
  Antisense strand to SEQ ID NO: 778692
aaaguagucaaguaacugc

SEQ ID NO: 778694 - RNA, 19 nt, Artificial Sequence
  Description of Artificial Sequence: Synthetic oligonucleotide
  Sense strand starting at position 3058 of SEQ ID NO: 587257
uagguaacacgcugaauga

SEQ ID NO: 778695 - RNA, 19 nt, Artificial Sequence
  Description of Artificial Sequence: Synthetic oligonucleotide
  Antisense strand to SEQ ID NO: 778694
ucauucagcguguuaccua

SEQ ID NO: 778696 - RNA, 19 nt, Artificial Sequence
  Description of Artificial Sequence: Synthetic oligonucleotide
  Sense strand starting at position 3059 of SEQ ID NO: 587257
agguaacacgcugaaugau

SEQ ID NO: 778697 - RNA, 19 nt, Artificial Sequence
  Description of Artificial Sequence: Synthetic oligonucleotide
  Antisense strand to SEQ ID NO: 778696
aucauucagcguguuaccu

SEQ ID NO: 778698 - RNA, 19 nt, Artificial Sequence
  Description of Artificial Sequence: Synthetic oligonucleotide
  Sense strand starting at position 3065 of SEQ ID NO: 587257
cacgcugaaugaucagaau

SEQ ID NO: 778699 - RNA, 19 nt, Artificial Sequence
  Description of Artificial Sequence: Synthetic oligonucleotide
  Antisense strand to SEQ ID NO: 778698
auucugaucauucagcgug

SEQ ID NO: 778700 - RNA, 19 nt, Artificial Sequence
  Description of Artificial Sequence: Synthetic oligonucleotide
  Sense strand starting at position 3071 of SEQ ID NO: 587257
gaaugaucagaauguccga

SEQ ID NO: 778701 - RNA, 19 nt, Artificial Sequence
  Description of Artificial Sequence: Synthetic oligonucleotide
  Antisense strand to SEQ ID NO: 778700
ucggacauucugaucauuc

SEQ ID NO: 778702 - RNA, 19 nt, Artificial Sequence
  Description of Artificial Sequence: Synthetic oligonucleotide
  Sense strand starting at position 3089 of SEQ ID NO: 587257
agggcucuuagcgaaauaa

SEQ ID NO: 778703 - RNA, 19 nt, Artificial Sequence
  Description of Artificial Sequence: Synthetic oligonucleotide
  Antisense strand to SEQ ID NO: 778702
uuauuucgcuaagagcccu

SEQ ID NO: 778704 - RNA, 19 nt, Artificial Sequence
  Description of Artificial Sequence: Synthetic oligonucleotide
  Sense strand starting at position 3382 of SEQ ID NO: 587257
gaaggucuggcugagaagu

SEQ ID NO: 778705 - RNA, 19 nt, Artificial Sequence
  Description of Artificial Sequence: Synthetic oligonucleotide
  Antisense strand to SEQ ID NO: 778704
acuucucagccagaccuuc

SEQ ID NO: 778706 - RNA, 19 nt, Artificial Sequence
  Description of Artificial Sequence: Synthetic oligonucleotide
  Sense strand starting at position 3390 of SEQ ID NO: 587257
ggcugagaagucugacaaa

SEQ ID NO: 778707 - RNA, 19 nt, Artificial Sequence
  Description of Artificial Sequence: Synthetic oligonucleotide
  Antisense strand to SEQ ID NO: 778706
uuugucagacuucucagcc

SEQ ID NO: 778708 - RNA, 19 nt, Artificial Sequence
  Description of Artificial Sequence: Synthetic oligonucleotide
  Sense strand starting at position 3415 of SEQ ID NO: 587257
aagguuagaugguucugga

SEQ ID NO: 778709 - RNA, 19 nt, Artificial Sequence
  Description of Artificial Sequence: Synthetic oligonucleotide
  Antisense strand to SEQ ID NO: 778708
uccagaaccaucuaaccuu

SEQ ID NO: 778710 - RNA, 19 nt, Artificial Sequence
  Description of Artificial Sequence: Synthetic oligonucleotide
  Sense strand starting at position 3517 of SEQ ID NO: 587257
ugggucuuaguuugaaacu

SEQ ID NO: 778711 - RNA, 19 nt, Artificial Sequence
  Description of Artificial Sequence: Synthetic oligonucleotide
  Antisense strand to SEQ ID NO: 778710
aguuucaaacuaagaccca

SEQ ID NO: 778712 - RNA, 19 nt, Artificial Sequence
  Description of Artificial Sequence: Synthetic oligonucleotide
  Sense strand starting at position 3570 of SEQ ID NO: 587257
uccaaacccugagaugaaa

SEQ ID NO: 778713 - RNA, 19 nt, Artificial Sequence
  Description of Artificial Sequence: Synthetic oligonucleotide
  Antisense strand to SEQ ID NO: 778712
uuucaucucaggguuugga

SEQ ID NO: 778714 - RNA, 19 nt, Artificial Sequence
  Description of Artificial Sequence: Synthetic oligonucleotide
  Sense strand starting at position 3605 of SEQ ID NO: 587257
ugaacagagguuugacuua

SEQ ID NO: 778715 - RNA, 19 nt, Artificial Sequence
  Description of Artificial Sequence: Synthetic oligonucleotide
  Antisense strand to SEQ ID NO: 778714
uaagucaaaccucuguuca

SEQ ID NO: 778716 - RNA, 19 nt, Artificial Sequence
  Description of Artificial Sequence: Synthetic oligonucleotide
  Sense strand starting at position 71 of SEQ ID NO: 587258
uuauguauuccuugcauuu

SEQ ID NO: 778717 - RNA, 19 nt, Artificial Sequence
  Description of Artificial Sequence: Synthetic oligonucleotide
  Antisense strand to SEQ ID NO: 778716
aaaugcaaggaauacauaa

SEQ ID NO: 778718 - RNA, 19 nt, Artificial Sequence
  Description of Artificial Sequence: Synthetic oligonucleotide
  Sense strand starting at position 176 of SEQ ID NO: 587258
agcccuguguucuuuauuu

SEQ ID NO: 778719 - RNA, 19 nt, Artificial Sequence
  Description of Artificial Sequence: Synthetic oligonucleotide
  Antisense strand to SEQ ID NO: 778718
aaauaaagaacacagggcu

SEQ ID NO: 778720 - RNA, 19 nt, Artificial Sequence
  Description of Artificial Sequence: Synthetic oligonucleotide
  Sense strand starting at position 254 of SEQ ID NO: 587258
gcugaagugacuuaggauu

SEQ ID NO: 778721 - RNA, 19 nt, Artificial Sequence
  Description of Artificial Sequence: Synthetic oligonucleotide
  Antisense strand to SEQ ID NO: 778720
aauccuaagucacuucagc

SEQ ID NO: 778722 - RNA, 19 nt, Artificial Sequence
  Description of Artificial Sequence: Synthetic oligonucleotide
  Sense strand starting at position 283 of SEQ ID NO: 587258
cuguaauuauuuguagcca

SEQ ID NO: 778723 - RNA, 19 nt, Artificial Sequence
  Description of Artificial Sequence: Synthetic oligonucleotide
  Antisense strand to SEQ ID NO: 778722
uggcuacaaauaauuacag

SEQ ID NO: 778724 - RNA, 19 nt, Artificial Sequence
  Description of Artificial Sequence: Synthetic oligonucleotide
  Sense strand starting at position 383 of SEQ ID NO: 587258
ucugaacucuggcuuuaac

SEQ ID NO: 778725 - RNA, 19 nt, Artificial Sequence
  Description of Artificial Sequence: Synthetic oligonucleotide
  Antisense strand to SEQ ID NO: 778724
guuaaagccagaguucaga

SEQ ID NO: 778726 - RNA, 19 nt, Artificial Sequence
  Description of Artificial Sequence: Synthetic oligonucleotide
  Sense strand starting at position 391 of SEQ ID NO: 587258
cuggcuuuaacuggucaga

SEQ ID NO: 778727 - RNA, 19 nt, Artificial Sequence
  Description of Artificial Sequence: Synthetic oligonucleotide
  Antisense strand to SEQ ID NO: 778726
ucugaccaguuaaagccag

SEQ ID NO: 778728 - RNA, 19 nt, Artificial Sequence
  Description of Artificial Sequence: Synthetic oligonucleotide
  Sense strand starting at position 393 of SEQ ID NO: 587258
ggcuuuaacuggucagaac

SEQ ID NO: 778729 - RNA, 19 nt, Artificial Sequence
  Description of Artificial Sequence: Synthetic oligonucleotide
  Antisense strand to SEQ ID NO: 778728
guucugaccaguuaaagcc

SEQ ID NO: 778730 - RNA, 19 nt, Artificial Sequence
  Description of Artificial Sequence: Synthetic oligonucleotide
  Sense strand starting at position 394 of SEQ ID NO: 587258
gcuuuaacuggucagaacu

SEQ ID NO: 778731 - RNA, 19 nt, Artificial Sequence
  Description of Artificial Sequence: Synthetic oligonucleotide
  Antisense strand to SEQ ID NO: 778730
aguucugaccaguuaaagc

SEQ ID NO: 778732 - RNA, 19 nt, Artificial Sequence
  Description of Artificial Sequence: Synthetic oligonucleotide
  Sense strand starting at position 650 of SEQ ID NO: 587258
uacuguuacagacguggaa

SEQ ID NO: 778733 - RNA, 19 nt, Artificial Sequence
  Description of Artificial Sequence: Synthetic oligonucleotide
  Antisense strand to SEQ ID NO: 778732
uuccacgucuguaacagua

SEQ ID NO: 778734 - RNA, 19 nt, Artificial Sequence
  Description of Artificial Sequence: Synthetic oligonucleotide
  Sense strand starting at position 652 of SEQ ID NO: 587258
cuguuacagacguggaauc

SEQ ID NO: 778735 - RNA, 19 nt, Artificial Sequence
  Description of Artificial Sequence: Synthetic oligonucleotide
  Antisense strand to SEQ ID NO: 778734
gauuccacgucuguaacag

SEQ ID NO: 778736 - RNA, 19 nt, Artificial Sequence
  Description of Artificial Sequence: Synthetic oligonucleotide
  Sense strand starting at position 654 of SEQ ID NO: 587258
guuacagacguggaaucuu

SEQ ID NO: 778737 - RNA, 19 nt, Artificial Sequence
  Description of Artificial Sequence: Synthetic oligonucleotide
  Antisense strand to SEQ ID NO: 778736
aagauuccacgucuguaac

SEQ ID NO: 778738 - RNA, 19 nt, Artificial Sequence
  Description of Artificial Sequence: Synthetic oligonucleotide
  Sense strand starting at position 663 of SEQ ID NO: 587258
guggaaucuuugguaaggu

SEQ ID NO: 778739 - RNA, 19 nt, Artificial Sequence
  Description of Artificial Sequence: Synthetic oligonucleotide
  Antisense strand to SEQ ID NO: 778738
accuuaccaaagauuccac

SEQ ID NO: 778740 - RNA, 19 nt, Artificial Sequence
  Description of Artificial Sequence: Synthetic oligonucleotide
  Sense strand starting at position 712 of SEQ ID NO: 587258
uuuccacuuguugaguauu

SEQ ID NO: 778741 - RNA, 19 nt, Artificial Sequence
  Description of Artificial Sequence: Synthetic oligonucleotide
  Antisense strand to SEQ ID NO: 778740
aauacucaacaaguggaaa

SEQ ID NO: 778742 - RNA, 19 nt, Artificial Sequence
  Description of Artificial Sequence: Synthetic oligonucleotide
  Sense strand starting at position 1419 of SEQ ID NO: 587258
aaaggaugagugugguauc

SEQ ID NO: 778743 - RNA, 19 nt, Artificial Sequence
  Description of Artificial Sequence: Synthetic oligonucleotide
  Antisense strand to SEQ ID NO: 778742
gauaccacacucauccuuu

SEQ ID NO: 778744 - RNA, 19 nt, Artificial Sequence
  Description of Artificial Sequence: Synthetic oligonucleotide
  Sense strand starting at position 1474 of SEQ ID NO: 587258
agguaucugcaagaacuuu

SEQ ID NO: 778745 - RNA, 19 nt, Artificial Sequence
  Description of Artificial Sequence: Synthetic oligonucleotide
  Antisense strand to SEQ ID NO: 778744
aaaguucuugcagauaccu

SEQ ID NO: 778746 - RNA, 19 nt, Artificial Sequence
  Description of Artificial Sequence: Synthetic oligonucleotide
  Sense strand starting at position 1556 of SEQ ID NO: 587258
uacugugauuuguugccua

SEQ ID NO: 778747 - RNA, 19 nt, Artificial Sequence
  Description of Artificial Sequence: Synthetic oligonucleotide
  Antisense strand to SEQ ID NO: 778746
uaggcaacaaaucacagua

SEQ ID NO: 778748 - RNA, 19 nt, Artificial Sequence
  Description of Artificial Sequence: Synthetic oligonucleotide
  Sense strand starting at position 1559 of SEQ ID NO: 587258
ugugauuuguugccuacau

SEQ ID NO: 778749 - RNA, 19 nt, Artificial Sequence
  Description of Artificial Sequence: Synthetic oligonucleotide
  Antisense strand to SEQ ID NO: 778748
auguaggcaacaaaucaca

SEQ ID NO: 778750 - RNA, 19 nt, Artificial Sequence
  Description of Artificial Sequence: Synthetic oligonucleotide
  Sense strand starting at position 1566 of SEQ ID NO: 587258
uguugccuacauuaguaau

SEQ ID NO: 778751 - RNA, 19 nt, Artificial Sequence
  Description of Artificial Sequence: Synthetic oligonucleotide
  Antisense strand to SEQ ID NO: 778750
auuacuaauguaggcaaca

SEQ ID NO: 778752 - RNA, 19 nt, Artificial Sequence
  Description of Artificial Sequence: Synthetic oligonucleotide
  Sense strand starting at position 1568 of SEQ ID NO: 587258
uugccuacauuaguaauga

SEQ ID NO: 778753 - RNA, 19 nt, Artificial Sequence
  Description of Artificial Sequence: Synthetic oligonucleotide
  Antisense strand to SEQ ID NO: 778752
ucauuacuaauguaggcaa

SEQ ID NO: 778754 - RNA, 19 nt, Artificial Sequence
  Description of Artificial Sequence: Synthetic oligonucleotide
  Sense strand starting at position 1677 of SEQ ID NO: 587258
gaauaaggaucugcucaga

SEQ ID NO: 778755 - RNA, 19 nt, Artificial Sequence
  Description of Artificial Sequence: Synthetic oligonucleotide
  Antisense strand to SEQ ID NO: 778754
ucugagcagauccuuauuc

SEQ ID NO: 778756 - RNA, 19 nt, Artificial Sequence
  Description of Artificial Sequence: Synthetic oligonucleotide
  Sense strand starting at position 1997 of SEQ ID NO: 587258
uuugcacuagccugggaaa

SEQ ID NO: 778757 - RNA, 19 nt, Artificial Sequence
  Description of Artificial Sequence: Synthetic oligonucleotide
  Antisense strand to SEQ ID NO: 778756
uuucccaggcuagugcaaa

SEQ ID NO: 778758 - RNA, 19 nt, Artificial Sequence
  Description of Artificial Sequence: Synthetic oligonucleotide
  Sense strand starting at position 2421 of SEQ ID NO: 587258
caugauggcuuaccuguaa

SEQ ID NO: 778759 - RNA, 19 nt, Artificial Sequence
  Description of Artificial Sequence: Synthetic oligonucleotide
  Antisense strand to SEQ ID NO: 778758
uuacagguaagccaucaug

SEQ ID NO: 778760 - RNA, 19 nt, Artificial Sequence
  Description of Artificial Sequence: Synthetic oligonucleotide
  Sense strand starting at position 2864 of SEQ ID NO: 587258
gggcauagcccaggaaaca

SEQ ID NO: 778761 - RNA, 19 nt, Artificial Sequence
  Description of Artificial Sequence: Synthetic oligonucleotide
  Antisense strand to SEQ ID NO: 778760
uguuuccugggcuaugccc

SEQ ID NO: 778762 - RNA, 19 nt, Artificial Sequence
  Description of Artificial Sequence: Synthetic oligonucleotide
  Sense strand starting at position 2995 of SEQ ID NO: 587258
uuuauucugcaaugugaau

SEQ ID NO: 778763 - RNA, 19 nt, Artificial Sequence
  Description of Artificial Sequence: Synthetic oligonucleotide
  Antisense strand to SEQ ID NO: 778762
auucacauugcagaauaaa

SEQ ID NO: 778764 - RNA, 19 nt, Artificial Sequence
  Description of Artificial Sequence: Synthetic oligonucleotide
  Sense strand starting at position 3004 of SEQ ID NO: 587258
caaugugaaucugcacaga

SEQ ID NO: 778765 - RNA, 19 nt, Artificial Sequence
  Description of Artificial Sequence: Synthetic oligonucleotide
  Antisense strand to SEQ ID NO: 778764
ucugugcagauucacauug

SEQ ID NO: 778766 - RNA, 19 nt, Artificial Sequence
  Description of Artificial Sequence: Synthetic oligonucleotide
  Sense strand starting at position 3014 of SEQ ID NO: 587258
cugcacagacaguauuauu

SEQ ID NO: 778767 - RNA, 19 nt, Artificial Sequence
  Description of Artificial Sequence: Synthetic oligonucleotide
  Antisense strand to SEQ ID NO: 778766
aauaauacugucugugcag

SEQ ID NO: 778768 - RNA, 19 nt, Artificial Sequence
  Description of Artificial Sequence: Synthetic oligonucleotide
  Sense strand starting at position 3093 of SEQ ID NO: 587258
cuggcaauacaguaaguau

SEQ ID NO: 778769 - RNA, 19 nt, Artificial Sequence
  Description of Artificial Sequence: Synthetic oligonucleotide
  Antisense strand to SEQ ID NO: 778768
auacuuacuguauugccag

SEQ ID NO: 778770 - RNA, 19 nt, Artificial Sequence
  Description of Artificial Sequence: Synthetic oligonucleotide
  Sense strand starting at position 3156 of SEQ ID NO: 587258
gugcuuguucugcuauaua

SEQ ID NO: 778771 - RNA, 19 nt, Artificial Sequence
  Description of Artificial Sequence: Synthetic oligonucleotide
  Antisense strand to SEQ ID NO: 778770
uauauagcagaacaagcac

SEQ ID NO: 778772 - RNA, 19 nt, Artificial Sequence
  Description of Artificial Sequence: Synthetic oligonucleotide
  Sense strand starting at position 3244 of SEQ ID NO: 587258
ugugucaaaucuuuaauug

SEQ ID NO: 778773 - RNA, 19 nt, Artificial Sequence
  Description of Artificial Sequence: Synthetic oligonucleotide
  Antisense strand to SEQ ID NO: 778772
caauuaaagauuugacaca

SEQ ID NO: 778774 - RNA, 19 nt, Artificial Sequence
  Description of Artificial Sequence: Synthetic oligonucleotide
  Sense strand starting at position 3304 of SEQ ID NO: 587258
uuccgaacuguuugggaga

SEQ ID NO: 778775 - RNA, 19 nt, Artificial Sequence
  Description of Artificial Sequence: Synthetic oligonucleotide
  Antisense strand to SEQ ID NO: 778774
ucucccaaacaguucggaa

SEQ ID NO: 778776 - RNA, 19 nt, Artificial Sequence
  Description of Artificial Sequence: Synthetic oligonucleotide
  Sense strand starting at position 3533 of SEQ ID NO: 587258
ucacuucuguggucuaaag

SEQ ID NO: 778777 - RNA, 19 nt, Artificial Sequence
  Description of Artificial Sequence: Synthetic oligonucleotide
  Antisense strand to SEQ ID NO: 778776
cuuuagaccacagaaguga

SEQ ID NO: 778778 - RNA, 19 nt, Artificial Sequence
  Description of Artificial Sequence: Synthetic oligonucleotide
  Sense strand starting at position 3535 of SEQ ID NO: 587258
acuucuguggucuaaagau

SEQ ID NO: 778779 - RNA, 19 nt, Artificial Sequence
  Description of Artificial Sequence: Synthetic oligonucleotide
  Antisense strand to SEQ ID NO: 778778
aucuuuagaccacagaagu

SEQ ID NO: 778780 - RNA, 19 nt, Artificial Sequence
  Description of Artificial Sequence: Synthetic oligonucleotide
  Sense strand starting at position 3542 of SEQ ID NO: 587258
uggucuaaagaugguuaca

SEQ ID NO: 778781 - RNA, 19 nt, Artificial Sequence
  Description of Artificial Sequence: Synthetic oligonucleotide
  Antisense strand to SEQ ID NO: 778780
uguaaccaucuuuagacca

SEQ ID NO: 778782 - RNA, 19 nt, Artificial Sequence
  Description of Artificial Sequence: Synthetic oligonucleotide
  Sense strand starting at position 3544 of SEQ ID NO: 587258
gucuaaagaugguuacaua

SEQ ID NO: 778783 - RNA, 19 nt, Artificial Sequence
  Description of Artificial Sequence: Synthetic oligonucleotide
  Antisense strand to SEQ ID NO: 778782
uauguaaccaucuuuagac

SEQ ID NO: 778784 - RNA, 19 nt, Artificial Sequence
  Description of Artificial Sequence: Synthetic oligonucleotide
  Sense strand starting at position 3668 of SEQ ID NO: 587258
ugagguuauuaugucuauu

SEQ ID NO: 778785 - RNA, 19 nt, Artificial Sequence
  Description of Artificial Sequence: Synthetic oligonucleotide
  Antisense strand to SEQ ID NO: 778784
aauagacauaauaaccuca

SEQ ID NO: 778786 - RNA, 19 nt, Artificial Sequence
  Description of Artificial Sequence: Synthetic oligonucleotide
  Sense strand starting at position 3671 of SEQ ID NO: 587258
gguuauuaugucuauugua

SEQ ID NO: 778787 - RNA, 19 nt, Artificial Sequence
  Description of Artificial Sequence: Synthetic oligonucleotide
  Antisense strand to SEQ ID NO: 778786
uacaauagacauaauaacc

SEQ ID NO: 778788 - RNA, 19 nt, Artificial Sequence
  Description of Artificial Sequence: Synthetic oligonucleotide
  Sense strand starting at position 3679 of SEQ ID NO: 587258
ugucuauuguauuuguaag

SEQ ID NO: 778789 - RNA, 19 nt, Artificial Sequence
  Description of Artificial Sequence: Synthetic oligonucleotide
  Antisense strand to SEQ ID NO: 778788
cuuacaaauacaauagaca

SEQ ID NO: 778790 - RNA, 19 nt, Artificial Sequence
  Description of Artificial Sequence: Synthetic oligonucleotide
  Sense strand starting at position 3853 of SEQ ID NO: 587258
uugguuaauugucuggacu

SEQ ID NO: 778791 - RNA, 19 nt, Artificial Sequence
  Description of Artificial Sequence: Synthetic oligonucleotide
  Antisense strand to SEQ ID NO: 778790
aguccagacaauuaaccaa

SEQ ID NO: 778792 - RNA, 19 nt, Artificial Sequence
  Description of Artificial Sequence: Synthetic oligonucleotide
  Sense strand starting at position 3854 of SEQ ID NO: 587258
ugguuaauugucuggacuu

SEQ ID NO: 778793 - RNA, 19 nt, Artificial Sequence
  Description of Artificial Sequence: Synthetic oligonucleotide
  Antisense strand to SEQ ID NO: 778792
aaguccagacaauuaacca

SEQ ID NO: 778794 - RNA, 19 nt, Artificial Sequence
  Description of Artificial Sequence: Synthetic oligonucleotide
  Sense strand starting at position 3860 of SEQ ID NO: 587258
auugucuggacuugagaaa

SEQ ID NO: 778795 - RNA, 19 nt, Artificial Sequence
  Description of Artificial Sequence: Synthetic oligonucleotide
  Antisense strand to SEQ ID NO: 778794
uuucucaaguccagacaau

SEQ ID NO: 778796 - RNA, 19 nt, Artificial Sequence
  Description of Artificial Sequence: Synthetic oligonucleotide
  Sense strand starting at position 10 of SEQ ID NO: 587259
cguacaaaccauggagaaa

SEQ ID NO: 778797 - RNA, 19 nt, Artificial Sequence
  Description of Artificial Sequence: Synthetic oligonucleotide
  Antisense strand to SEQ ID NO: 778796
uuucuccaugguuuguacg

SEQ ID NO: 778798 - RNA, 19 nt, Artificial Sequence
  Description of Artificial Sequence: Synthetic oligonucleotide
  Sense strand starting at position 95 of SEQ ID NO: 587259
aguugauauucucugaauu

SEQ ID NO: 778799 - RNA, 19 nt, Artificial Sequence
  Description of Artificial Sequence: Synthetic oligonucleotide
  Antisense strand to SEQ ID NO: 778798
aauucagagaauaucaacu

SEQ ID NO: 778800 - RNA, 19 nt, Artificial Sequence
  Description of Artificial Sequence: Synthetic oligonucleotide
  Sense strand starting at position 96 of SEQ ID NO: 587259
guugauauucucugaauug

SEQ ID NO: 778801 - RNA, 19 nt, Artificial Sequence
  Description of Artificial Sequence: Synthetic oligonucleotide
  Antisense strand to SEQ ID NO: 778800
caauucagagaauaucaac

SEQ ID NO: 778802 - RNA, 19 nt, Artificial Sequence
  Description of Artificial Sequence: Synthetic oligonucleotide
  Sense strand starting at position 241 of SEQ ID NO: 587259
gaauuuguaauucguaggu

SEQ ID NO: 778803 - RNA, 19 nt, Artificial Sequence
  Description of Artificial Sequence: Synthetic oligonucleotide
  Antisense strand to SEQ ID NO: 778802
accuacgaauuacaaauuc

SEQ ID NO: 778804 - RNA, 19 nt, Artificial Sequence
  Description of Artificial Sequence: Synthetic oligonucleotide
  Sense strand starting at position 247 of SEQ ID NO: 587259
guaauucguagguauaaau

SEQ ID NO: 778805 - RNA, 19 nt, Artificial Sequence
  Description of Artificial Sequence: Synthetic oligonucleotide
  Antisense strand to SEQ ID NO: 778804
auuuauaccuacgaauuac

SEQ ID NO: 778806 - RNA, 19 nt, Artificial Sequence
  Description of Artificial Sequence: Synthetic oligonucleotide
  Sense strand starting at position 357 of SEQ ID NO: 587259
uucgaacaauucccaguua

SEQ ID NO: 778807 - RNA, 19 nt, Artificial Sequence
  Description of Artificial Sequence: Synthetic oligonucleotide
  Antisense strand to SEQ ID NO: 778806
uaacugggaauuguucgaa

SEQ ID NO: 778808 - RNA, 19 nt, Artificial Sequence
  Description of Artificial Sequence: Synthetic oligonucleotide
  Sense strand starting at position 384 of SEQ ID NO: 587259
ggcacaucucagcaaucca

SEQ ID NO: 778809 - RNA, 19 nt, Artificial Sequence
  Description of Artificial Sequence: Synthetic oligonucleotide
  Antisense strand to SEQ ID NO: 778808
uggauugcugagaugugcc

SEQ ID NO: 778810 - RNA, 19 nt, Artificial Sequence
  Description of Artificial Sequence: Synthetic oligonucleotide
  Sense strand starting at position 392 of SEQ ID NO: 587259
ucagcaauccaccgaauca

SEQ ID NO: 778811 - RNA, 19 nt, Artificial Sequence
  Description of Artificial Sequence: Synthetic oligonucleotide
  Antisense strand to SEQ ID NO: 778810
ugauucgguggauugcuga

SEQ ID NO: 778812 - RNA, 19 nt, Artificial Sequence
  Description of Artificial Sequence: Synthetic oligonucleotide
  Sense strand starting at position 631 of SEQ ID NO: 587259
agucuauuucgagggcuca

SEQ ID NO: 778813 - RNA, 19 nt, Artificial Sequence
  Description of Artificial Sequence: Synthetic oligonucleotide
  Antisense strand to SEQ ID NO: 778812
ugagcccucgaaauagacu

SEQ ID NO: 778814 - RNA, 19 nt, Artificial Sequence
  Description of Artificial Sequence: Synthetic oligonucleotide
  Sense strand starting at position 632 of SEQ ID NO: 587259
gucuauuucgagggcucau

SEQ ID NO: 778815 - RNA, 19 nt, Artificial Sequence
  Description of Artificial Sequence: Synthetic oligonucleotide
  Antisense strand to SEQ ID NO: 778814
augagcccucgaaauagac

SEQ ID NO: 778816 - RNA, 19 nt, Artificial Sequence
  Description of Artificial Sequence: Synthetic oligonucleotide
  Sense strand starting at position 660 of SEQ ID NO: 587259
cgaagaaagcugugaagaa

SEQ ID NO: 778817 - RNA, 19 nt, Artificial Sequence
  Description of Artificial Sequence: Synthetic oligonucleotide
  Antisense strand to SEQ ID NO: 778816
uucuucacagcuuucuucg

SEQ ID NO: 778818 - RNA, 19 nt, Artificial Sequence
  Description of Artificial Sequence: Synthetic oligonucleotide
  Sense strand starting at position 673 of SEQ ID NO: 587259
gaagaaguuggaugcuaca

SEQ ID NO: 778819 - RNA, 19 nt, Artificial Sequence
  Description of Artificial Sequence: Synthetic oligonucleotide
  Antisense strand to SEQ ID NO: 778818
uguagcauccaacuucuuc

SEQ ID NO: 778820 - RNA, 19 nt, Artificial Sequence
  Description of Artificial Sequence: Synthetic oligonucleotide
  Sense strand starting at position 726 of SEQ ID NO: 587259
uuuggaauugcugagcuau

SEQ ID NO: 778821 - RNA, 19 nt, Artificial Sequence
  Description of Artificial Sequence: Synthetic oligonucleotide
  Antisense strand to SEQ ID NO: 778820
auagcucagcaauuccaaa

SEQ ID NO: 778822 - RNA, 19 nt, Artificial Sequence
  Description of Artificial Sequence: Synthetic oligonucleotide
  Sense strand starting at position 874 of SEQ ID NO: 587259
ugguuaacuggucaguaaa

SEQ ID NO: 778823 - RNA, 19 nt, Artificial Sequence
  Description of Artificial Sequence: Synthetic oligonucleotide
  Antisense strand to SEQ ID NO: 778822
uuuacugaccaguuaacca

SEQ ID NO: 778824 - RNA, 19 nt, Artificial Sequence
  Description of Artificial Sequence: Synthetic oligonucleotide
  Sense strand starting at position 876 of SEQ ID NO: 587259
guuaacuggucaguaaaug

SEQ ID NO: 778825 - RNA, 19 nt, Artificial Sequence
  Description of Artificial Sequence: Synthetic oligonucleotide
  Antisense strand to SEQ ID NO: 778824
cauuuacugaccaguuaac

SEQ ID NO: 778826 - RNA, 19 nt, Artificial Sequence
  Description of Artificial Sequence: Synthetic oligonucleotide
  Sense strand starting at position 964 of SEQ ID NO: 587259
uaauuaagugucugaagca

SEQ ID NO: 778827 - RNA, 19 nt, Artificial Sequence
  Description of Artificial Sequence: Synthetic oligonucleotide
  Antisense strand to SEQ ID NO: 778826
ugcuucagacacuuaauua

SEQ ID NO: 778828 - RNA, 19 nt, Artificial Sequence
  Description of Artificial Sequence: Synthetic oligonucleotide
  Sense strand starting at position 1068 of SEQ ID NO: 587259
agcucuagcguucucugau

SEQ ID NO: 778829 - RNA, 19 nt, Artificial Sequence
  Description of Artificial Sequence: Synthetic oligonucleotide
  Antisense strand to SEQ ID NO: 778828
aucagagaacgcuagagcu

SEQ ID NO: 778830 - RNA, 19 nt, Artificial Sequence
  Description of Artificial Sequence: Synthetic oligonucleotide
  Sense strand starting at position 1463 of SEQ ID NO: 587259
agcccaucuccuggaaaua

SEQ ID NO: 778831 - RNA, 19 nt, Artificial Sequence
  Description of Artificial Sequence: Synthetic oligonucleotide
  Antisense strand to SEQ ID NO: 778830
uauuuccaggagaugggcu

SEQ ID NO: 778832 - RNA, 19 nt, Artificial Sequence
  Description of Artificial Sequence: Synthetic oligonucleotide
  Sense strand starting at position 1464 of SEQ ID NO: 587259
gcccaucuccuggaaauau

SEQ ID NO: 778833 - RNA, 19 nt, Artificial Sequence
  Description of Artificial Sequence: Synthetic oligonucleotide
  Antisense strand to SEQ ID NO: 778832
auauuuccaggagaugggc

SEQ ID NO: 778834 - RNA, 19 nt, Artificial Sequence
  Description of Artificial Sequence: Synthetic oligonucleotide
  Sense strand starting at position 2146 of SEQ ID NO: 587259
ggcuuucgugacgcugaau

SEQ ID NO: 778835 - RNA, 19 nt, Artificial Sequence
  Description of Artificial Sequence: Synthetic oligonucleotide
  Antisense strand to SEQ ID NO: 778834
auucagcgucacgaaagcc

SEQ ID NO: 778836 - RNA, 19 nt, Artificial Sequence
  Description of Artificial Sequence: Synthetic oligonucleotide
  Sense strand starting at position 2290 of SEQ ID NO: 587259
guauccauucgacaaacau

SEQ ID NO: 778837 - RNA, 19 nt, Artificial Sequence
  Description of Artificial Sequence: Synthetic oligonucleotide
  Antisense strand to SEQ ID NO: 778836
auguuugucgaauggauac

SEQ ID NO: 778838 - RNA, 19 nt, Artificial Sequence
  Description of Artificial Sequence: Synthetic oligonucleotide
  Sense strand starting at position 2500 of SEQ ID NO: 587259
ggcguaaucacggcuuacu

SEQ ID NO: 778839 - RNA, 19 nt, Artificial Sequence
  Description of Artificial Sequence: Synthetic oligonucleotide
  Antisense strand to SEQ ID NO: 778838
aguaagccgugauuacgcc

SEQ ID NO: 778840 - RNA, 19 nt, Artificial Sequence
  Description of Artificial Sequence: Synthetic oligonucleotide
  Sense strand starting at position 2501 of SEQ ID NO: 587259
gcguaaucacggcuuacug

SEQ ID NO: 778841 - RNA, 19 nt, Artificial Sequence
  Description of Artificial Sequence: Synthetic oligonucleotide
  Antisense strand to SEQ ID NO: 778840
caguaagccgugauuacgc

SEQ ID NO: 778842 - RNA, 19 nt, Artificial Sequence
  Description of Artificial Sequence: Synthetic oligonucleotide
  Sense strand starting at position 2822 of SEQ ID NO: 587259
gcacaauugguaugauauu

SEQ ID NO: 778843 - RNA, 19 nt, Artificial Sequence
  Description of Artificial Sequence: Synthetic oligonucleotide
  Antisense strand to SEQ ID NO: 778842
aauaucauaccaauugugc

SEQ ID NO: 778844 - RNA, 19 nt, Artificial Sequence
  Description of Artificial Sequence: Synthetic oligonucleotide
  Sense strand starting at position 2831 of SEQ ID NO: 587259
guaugauauuuagaagaac

SEQ ID NO: 778845 - RNA, 19 nt, Artificial Sequence
  Description of Artificial Sequence: Synthetic oligonucleotide
  Antisense strand to SEQ ID NO: 778844
guucuucuaaauaucauac

SEQ ID NO: 778846 - RNA, 19 nt, Artificial Sequence
  Description of Artificial Sequence: Synthetic oligonucleotide
  Sense strand starting at position 2843 of SEQ ID NO: 587259
gaagaacaauuuggugaua

SEQ ID NO: 778847 - RNA, 19 nt, Artificial Sequence
  Description of Artificial Sequence: Synthetic oligonucleotide
  Antisense strand to SEQ ID NO: 778846
uaucaccaaauuguucuuc

SEQ ID NO: 778848 - RNA, 19 nt, Artificial Sequence
  Description of Artificial Sequence: Synthetic oligonucleotide
  Sense strand starting at position 2848 of SEQ ID NO: 587259
acaauuuggugauaucuca

SEQ ID NO: 778849 - RNA, 19 nt, Artificial Sequence
  Description of Artificial Sequence: Synthetic oligonucleotide
  Antisense strand to SEQ ID NO: 778848
ugagauaucaccaaauugu

SEQ ID NO: 778850 - RNA, 19 nt, Artificial Sequence
  Description of Artificial Sequence: Synthetic oligonucleotide
  Sense strand starting at position 2880 of SEQ ID NO: 587259
guacuaggaacuuaucguu

SEQ ID NO: 778851 - RNA, 19 nt, Artificial Sequence
  Description of Artificial Sequence: Synthetic oligonucleotide
  Antisense strand to SEQ ID NO: 778850
aacgauaaguuccuaguac

SEQ ID NO: 778852 - RNA, 19 nt, Artificial Sequence
  Description of Artificial Sequence: Synthetic oligonucleotide
  Sense strand starting at position 2909 of SEQ ID NO: 587259
guagauauaucuguaucua

SEQ ID NO: 778853 - RNA, 19 nt, Artificial Sequence
  Description of Artificial Sequence: Synthetic oligonucleotide
  Antisense strand to SEQ ID NO: 778852
uagauacagauauaucuac

SEQ ID NO: 778854 - RNA, 19 nt, Artificial Sequence
  Description of Artificial Sequence: Synthetic oligonucleotide
  Sense strand starting at position 2934 of SEQ ID NO: 587259
cacucaguguaugugacaa

SEQ ID NO: 778855 - RNA, 19 nt, Artificial Sequence
  Description of Artificial Sequence: Synthetic oligonucleotide
  Antisense strand to SEQ ID NO: 778854
uugucacauacacugagug

SEQ ID NO: 778856 - RNA, 19 nt, Artificial Sequence
  Description of Artificial Sequence: Synthetic oligonucleotide
  Sense strand starting at position 3423 of SEQ ID NO: 587259
ucacaaugguagguaaauu

SEQ ID NO: 778857 - RNA, 19 nt, Artificial Sequence
  Description of Artificial Sequence: Synthetic oligonucleotide
  Antisense strand to SEQ ID NO: 778856
aauuuaccuaccauuguga

SEQ ID NO: 778858 - RNA, 19 nt, Artificial Sequence
  Description of Artificial Sequence: Synthetic oligonucleotide
  Sense strand starting at position 3552 of SEQ ID NO: 587259
aauagaaauuaguuguggu

SEQ ID NO: 778859 - RNA, 19 nt, Artificial Sequence
  Description of Artificial Sequence: Synthetic oligonucleotide
  Antisense strand to SEQ ID NO: 778858
accacaacuaauuucuauu

SEQ ID NO: 778860 - RNA, 19 nt, Artificial Sequence
  Description of Artificial Sequence: Synthetic oligonucleotide
  Sense strand starting at position 3553 of SEQ ID NO: 587259
auagaaauuaguugugguc

SEQ ID NO: 778861 - RNA, 19 nt, Artificial Sequence
  Description of Artificial Sequence: Synthetic oligonucleotide
  Antisense strand to SEQ ID NO: 778860
gaccacaacuaauuucuau

SEQ ID NO: 778862 - RNA, 19 nt, Artificial Sequence
  Description of Artificial Sequence: Synthetic oligonucleotide
  Sense strand starting at position 3653 of SEQ ID NO: 587259
gaucuaaguccuggagaua

SEQ ID NO: 778863 - RNA, 19 nt, Artificial Sequence
  Description of Artificial Sequence: Synthetic oligonucleotide
  Antisense strand to SEQ ID NO: 778862
uaucuccaggacuuagauc

SEQ ID NO: 778864 - RNA, 19 nt, Artificial Sequence
  Description of Artificial Sequence: Synthetic oligonucleotide
  Sense strand starting at position 3692 of SEQ ID NO: 587259
cucugucauccugauaccu

SEQ ID NO: 778865 - RNA, 19 nt, Artificial Sequence
  Description of Artificial Sequence: Synthetic oligonucleotide
  Antisense strand to SEQ ID NO: 778864
agguaucaggaugacagag

SEQ ID NO: 778866 - RNA, 19 nt, Artificial Sequence
  Description of Artificial Sequence: Synthetic oligonucleotide
  Sense strand starting at position 3756 of SEQ ID NO: 587259
gguagugucaaguaugaug

SEQ ID NO: 778867 - RNA, 19 nt, Artificial Sequence
  Description of Artificial Sequence: Synthetic oligonucleotide
  Antisense strand to SEQ ID NO: 778866
caucauacuugacacuacc

SEQ ID NO: 778868 - RNA, 19 nt, Artificial Sequence
  Description of Artificial Sequence: Synthetic oligonucleotide
  Sense strand starting at position 3758 of SEQ ID NO: 587259
uagugucaaguaugaugaa

SEQ ID NO: 778869 - RNA, 19 nt, Artificial Sequence
  Description of Artificial Sequence: Synthetic oligonucleotide
  Antisense strand to SEQ ID NO: 778868
uucaucauacuugacacua

SEQ ID NO: 778870 - RNA, 19 nt, Artificial Sequence
  Description of Artificial Sequence: Synthetic oligonucleotide
  Sense strand starting at position 3804 of SEQ ID NO: 587259
gagugaucuagacgaagau

SEQ ID NO: 778871 - RNA, 19 nt, Artificial Sequence
  Description of Artificial Sequence: Synthetic oligonucleotide
  Antisense strand to SEQ ID NO: 778870
aucuucgucuagaucacuc

SEQ ID NO: 778872 - RNA, 19 nt, Artificial Sequence
  Description of Artificial Sequence: Synthetic oligonucleotide
  Sense strand starting at position 3853 of SEQ ID NO: 587259
acuucucagucaucugaga

SEQ ID NO: 778873 - RNA, 19 nt, Artificial Sequence
  Description of Artificial Sequence: Synthetic oligonucleotide
  Antisense strand to SEQ ID NO: 778872
ucucagaugacugagaagu

SEQ ID NO: 778874 - RNA, 19 nt, Artificial Sequence
  Description of Artificial Sequence: Synthetic oligonucleotide
  Sense strand starting at position 3907 of SEQ ID NO: 587259
cuaagagauguguggcaua

SEQ ID NO: 778875 - RNA, 19 nt, Artificial Sequence
  Description of Artificial Sequence: Synthetic oligonucleotide
  Antisense strand to SEQ ID NO: 778874
uaugccacacaucucuuag

SEQ ID NO: 778876 - RNA, 19 nt, Artificial Sequence
  Description of Artificial Sequence: Synthetic oligonucleotide
  Sense strand starting at position 519 of SEQ ID NO: 587260
gccuguaagcucuauaaag

SEQ ID NO: 778877 - RNA, 19 nt, Artificial Sequence
  Description of Artificial Sequence: Synthetic oligonucleotide
  Antisense strand to SEQ ID NO: 778876
cuuuauagagcuuacaggc

SEQ ID NO: 778878 - RNA, 19 nt, Artificial Sequence
  Description of Artificial Sequence: Synthetic oligonucleotide
  Sense strand starting at position 521 of SEQ ID NO: 587260
cuguaagcucuauaaagac

SEQ ID NO: 778879 - RNA, 19 nt, Artificial Sequence
  Description of Artificial Sequence: Synthetic oligonucleotide
  Antisense strand to SEQ ID NO: 778878
gucuuuauagagcuuacag

SEQ ID NO: 778880 - RNA, 19 nt, Artificial Sequence
  Description of Artificial Sequence: Synthetic oligonucleotide
  Sense strand starting at position 1247 of SEQ ID NO: 587260
auaguugaguucucuggau

SEQ ID NO: 778881 - RNA, 19 nt, Artificial Sequence
  Description of Artificial Sequence: Synthetic oligonucleotide
  Antisense strand to SEQ ID NO: 778880
auccagagaacucaacuau

SEQ ID NO: 778882 - RNA, 19 nt, Artificial Sequence
  Description of Artificial Sequence: Synthetic oligonucleotide
  Sense strand starting at position 1249 of SEQ ID NO: 587260
aguugaguucucuggauuc

SEQ ID NO: 778883 - RNA, 19 nt, Artificial Sequence
  Description of Artificial Sequence: Synthetic oligonucleotide
  Antisense strand to SEQ ID NO: 778882
gaauccagagaacucaacu

SEQ ID NO: 778884 - RNA, 19 nt, Artificial Sequence
  Description of Artificial Sequence: Synthetic oligonucleotide
  Sense strand starting at position 1251 of SEQ ID NO: 587260
uugaguucucuggauuccu

SEQ ID NO: 778885 - RNA, 19 nt, Artificial Sequence
  Description of Artificial Sequence: Synthetic oligonucleotide
  Antisense strand to SEQ ID NO: 778884
aggaauccagagaacucaa

SEQ ID NO: 778886 - RNA, 19 nt, Artificial Sequence
  Description of Artificial Sequence: Synthetic oligonucleotide
  Sense strand starting at position 1262 of SEQ ID NO: 587260
ggauuccuguucuuucuca

SEQ ID NO: 778887 - RNA, 19 nt, Artificial Sequence
  Description of Artificial Sequence: Synthetic oligonucleotide
  Antisense strand to SEQ ID NO: 778886
ugagaaagaacaggaaucc

SEQ ID NO: 778888 - RNA, 19 nt, Artificial Sequence
  Description of Artificial Sequence: Synthetic oligonucleotide
  Sense strand starting at position 1291 of SEQ ID NO: 587260
gaccuuguguacucuguga

SEQ ID NO: 778889 - RNA, 19 nt, Artificial Sequence
  Description of Artificial Sequence: Synthetic oligonucleotide
  Antisense strand to SEQ ID NO: 778888
ucacagaguacacaagguc

SEQ ID NO: 778890 - RNA, 19 nt, Artificial Sequence
  Description of Artificial Sequence: Synthetic oligonucleotide
  Sense strand starting at position 1311 of SEQ ID NO: 587260
gguuccuugccugcaguua

SEQ ID NO: 778891 - RNA, 19 nt, Artificial Sequence
  Description of Artificial Sequence: Synthetic oligonucleotide
  Antisense strand to SEQ ID NO: 778890
uaacugcaggcaaggaacc

SEQ ID NO: 778892 - RNA, 19 nt, Artificial Sequence
  Description of Artificial Sequence: Synthetic oligonucleotide
  Sense strand starting at position 1499 of SEQ ID NO: 587260
gugcauuccuacccaagaa

SEQ ID NO: 778893 - RNA, 19 nt, Artificial Sequence
  Description of Artificial Sequence: Synthetic oligonucleotide
  Antisense strand to SEQ ID NO: 778892
uucuuggguaggaaugcac

SEQ ID NO: 778894 - RNA, 19 nt, Artificial Sequence
  Description of Artificial Sequence: Synthetic oligonucleotide
  Sense strand starting at position 1630 of SEQ ID NO: 587260
cggugaauuggcgccgaga

SEQ ID NO: 778895 - RNA, 19 nt, Artificial Sequence
  Description of Artificial Sequence: Synthetic oligonucleotide
  Antisense strand to SEQ ID NO: 778894
ucucggcgccaauucaccg

SEQ ID NO: 778896 - RNA, 19 nt, Artificial Sequence
  Description of Artificial Sequence: Synthetic oligonucleotide
  Sense strand starting at position 1633 of SEQ ID NO: 587260
ugaauuggcgccgagaaac

SEQ ID NO: 778897 - RNA, 19 nt, Artificial Sequence
  Description of Artificial Sequence: Synthetic oligonucleotide
  Antisense strand to SEQ ID NO: 778896
guuucucggcgccaauuca

SEQ ID NO: 778898 - RNA, 19 nt, Artificial Sequence
  Description of Artificial Sequence: Synthetic oligonucleotide
  Sense strand starting at position 2193 of SEQ ID NO: 587260
guuucugcgggucagaaau

SEQ ID NO: 778899 - RNA, 19 nt, Artificial Sequence
  Description of Artificial Sequence: Synthetic oligonucleotide
  Antisense strand to SEQ ID NO: 778898
auuucugacccgcagaaac

SEQ ID NO: 778900 - RNA, 19 nt, Artificial Sequence
  Description of Artificial Sequence: Synthetic oligonucleotide
  Sense strand starting at position 2203 of SEQ ID NO: 587260
gucagaaauugucuccaac

SEQ ID NO: 778901 - RNA, 19 nt, Artificial Sequence
  Description of Artificial Sequence: Synthetic oligonucleotide
  Antisense strand to SEQ ID NO: 778900
guuggagacaauuucugac

SEQ ID NO: 778902 - RNA, 19 nt, Artificial Sequence
  Description of Artificial Sequence: Synthetic oligonucleotide
  Sense strand starting at position 2344 of SEQ ID NO: 587260
auaaaugguccauggagca

SEQ ID NO: 778903 - RNA, 19 nt, Artificial Sequence
  Description of Artificial Sequence: Synthetic oligonucleotide
  Antisense strand to SEQ ID NO: 778902
ugcuccauggaccauuuau

SEQ ID NO: 778904 - RNA, 19 nt, Artificial Sequence
  Description of Artificial Sequence: Synthetic oligonucleotide
  Sense strand starting at position 2428 of SEQ ID NO: 587260
acgaaagcgccucauagau

SEQ ID NO: 778905 - RNA, 19 nt, Artificial Sequence
  Description of Artificial Sequence: Synthetic oligonucleotide
  Antisense strand to SEQ ID NO: 778904
aucuaugaggcgcuuucgu

SEQ ID NO: 778906 - RNA, 19 nt, Artificial Sequence
  Description of Artificial Sequence: Synthetic oligonucleotide
  Sense strand starting at position 2434 of SEQ ID NO: 587260
gcgccucauagauaguuga

SEQ ID NO: 778907 - RNA, 19 nt, Artificial Sequence
  Description of Artificial Sequence: Synthetic oligonucleotide
  Antisense strand to SEQ ID NO: 778906
ucaacuaucuaugaggcgc

SEQ ID NO: 778908 - RNA, 19 nt, Artificial Sequence
  Description of Artificial Sequence: Synthetic oligonucleotide
  Sense strand starting at position 2437 of SEQ ID NO: 587260
ccucauagauaguugaaac

SEQ ID NO: 778909 - RNA, 19 nt, Artificial Sequence
  Description of Artificial Sequence: Synthetic oligonucleotide
  Antisense strand to SEQ ID NO: 778908
guuucaacuaucuaugagg

SEQ ID NO: 778910 - RNA, 19 nt, Artificial Sequence
  Description of Artificial Sequence: Synthetic oligonucleotide
  Sense strand starting at position 2507 of SEQ ID NO: 587260
gaaagcaucuccuuuggag

SEQ ID NO: 778911 - RNA, 19 nt, Artificial Sequence
  Description of Artificial Sequence: Synthetic oligonucleotide
  Antisense strand to SEQ ID NO: 778910
cuccaaaggagaugcuuuc

SEQ ID NO: 778912 - RNA, 19 nt, Artificial Sequence
  Description of Artificial Sequence: Synthetic oligonucleotide
  Sense strand starting at position 2692 of SEQ ID NO: 587260
aguuguucagcgcaaggga

SEQ ID NO: 778913 - RNA, 19 nt, Artificial Sequence
  Description of Artificial Sequence: Synthetic oligonucleotide
  Antisense strand to SEQ ID NO: 778912
ucccuugcgcugaacaacu

SEQ ID NO: 778914 - RNA, 19 nt, Artificial Sequence
  Description of Artificial Sequence: Synthetic oligonucleotide
  Sense strand starting at position 2711 of SEQ ID NO: 587260
auagauaccagguguugaa

SEQ ID NO: 778915 - RNA, 19 nt, Artificial Sequence
  Description of Artificial Sequence: Synthetic oligonucleotide
  Antisense strand to SEQ ID NO: 778914
uucaacaccugguaucuau

SEQ ID NO: 778916 - RNA, 19 nt, Artificial Sequence
  Description of Artificial Sequence: Synthetic oligonucleotide
  Sense strand starting at position 2790 of SEQ ID NO: 587260
augcaaaguggugguaaua

SEQ ID NO: 778917 - RNA, 19 nt, Artificial Sequence
  Description of Artificial Sequence: Synthetic oligonucleotide
  Antisense strand to SEQ ID NO: 778916
uauuaccaccacuuugcau

SEQ ID NO: 778918 - RNA, 19 nt, Artificial Sequence
  Description of Artificial Sequence: Synthetic oligonucleotide
  Sense strand starting at position 2834 of SEQ ID NO: 587260
uuaaaugaagccugugguu

SEQ ID NO: 778919 - RNA, 19 nt, Artificial Sequence
  Description of Artificial Sequence: Synthetic oligonucleotide
  Antisense strand to SEQ ID NO: 778918
aaccacaggcuucauuuaa

SEQ ID NO: 778920 - RNA, 19 nt, Artificial Sequence
  Description of Artificial Sequence: Synthetic oligonucleotide
  Sense strand starting at position 2836 of SEQ ID NO: 587260
aaaugaagccugugguuag

SEQ ID NO: 778921 - RNA, 19 nt, Artificial Sequence
  Description of Artificial Sequence: Synthetic oligonucleotide
  Antisense strand to SEQ ID NO: 778920
cuaaccacaggcuucauuu

SEQ ID NO: 778922 - RNA, 19 nt, Artificial Sequence
  Description of Artificial Sequence: Synthetic oligonucleotide
  Sense strand starting at position 2880 of SEQ ID NO: 587260
accaguaaauggucgucau

SEQ ID NO: 778923 - RNA, 19 nt, Artificial Sequence
  Description of Artificial Sequence: Synthetic oligonucleotide
  Antisense strand to SEQ ID NO: 778922
augacgaccauuuacuggu

SEQ ID NO: 778924 - RNA, 19 nt, Artificial Sequence
  Description of Artificial Sequence: Synthetic oligonucleotide
  Sense strand starting at position 2883 of SEQ ID NO: 587260
aguaaauggucgucauuau

SEQ ID NO: 778925 - RNA, 19 nt, Artificial Sequence
  Description of Artificial Sequence: Synthetic oligonucleotide
  Antisense strand to SEQ ID NO: 778924
auaaugacgaccauuuacu

SEQ ID NO: 778926 - RNA, 19 nt, Artificial Sequence
  Description of Artificial Sequence: Synthetic oligonucleotide
  Sense strand starting at position 2884 of SEQ ID NO: 587260
guaaauggucgucauuauu

SEQ ID NO: 778927 - RNA, 19 nt, Artificial Sequence
  Description of Artificial Sequence: Synthetic oligonucleotide
  Antisense strand to SEQ ID NO: 778926
aauaaugacgaccauuuac

SEQ ID NO: 778928 - RNA, 19 nt, Artificial Sequence
  Description of Artificial Sequence: Synthetic oligonucleotide
  Sense strand starting at position 2887 of SEQ ID NO: 587260
aauggucgucauuauuacu

SEQ ID NO: 778929 - RNA, 19 nt, Artificial Sequence
  Description of Artificial Sequence: Synthetic oligonucleotide
  Antisense strand to SEQ ID NO: 778928
aguaauaaugacgaccauu

SEQ ID NO: 778930 - RNA, 19 nt, Artificial Sequence
  Description of Artificial Sequence: Synthetic oligonucleotide
  Sense strand starting at position 2892 of SEQ ID NO: 587260
ucgucauuauuacuaugua

SEQ ID NO: 778931 - RNA, 19 nt, Artificial Sequence
  Description of Artificial Sequence: Synthetic oligonucleotide
  Antisense strand to SEQ ID NO: 778930
uacauaguaauaaugacga

SEQ ID NO: 778932 - RNA, 19 nt, Artificial Sequence
  Description of Artificial Sequence: Synthetic oligonucleotide
  Sense strand starting at position 2985 of SEQ ID NO: 587260
uucucagagccucaguauu

SEQ ID NO: 778933 - RNA, 19 nt, Artificial Sequence
  Description of Artificial Sequence: Synthetic oligonucleotide
  Antisense strand to SEQ ID NO: 778932
aauacugaggcucugagaa

SEQ ID NO: 778934 - RNA, 19 nt, Artificial Sequence
  Description of Artificial Sequence: Synthetic oligonucleotide
  Sense strand starting at position 2997 of SEQ ID NO: 587260
caguauuagguuggacaga

SEQ ID NO: 778935 - RNA, 19 nt, Artificial Sequence
  Description of Artificial Sequence: Synthetic oligonucleotide
  Antisense strand to SEQ ID NO: 778934
ucuguccaaccuaauacug

SEQ ID NO: 778936 - RNA, 19 nt, Artificial Sequence
  Description of Artificial Sequence: Synthetic oligonucleotide
  Sense strand starting at position 3137 of SEQ ID NO: 587260
uuuaucugccaucacgaaa

SEQ ID NO: 778937 - RNA, 19 nt, Artificial Sequence
  Description of Artificial Sequence: Synthetic oligonucleotide
  Antisense strand to SEQ ID NO: 778936
uuucgugauggcagauaaa

SEQ ID NO: 778938 - RNA, 19 nt, Artificial Sequence
  Description of Artificial Sequence: Synthetic oligonucleotide
  Sense strand starting at position 3177 of SEQ ID NO: 587260
uuugguuagguccacuaaa

SEQ ID NO: 778939 - RNA, 19 nt, Artificial Sequence
  Description of Artificial Sequence: Synthetic oligonucleotide
  Antisense strand to SEQ ID NO: 778938
uuuaguggaccuaaccaaa

SEQ ID NO: 778940 - RNA, 19 nt, Artificial Sequence
  Description of Artificial Sequence: Synthetic oligonucleotide
  Sense strand starting at position 3196 of SEQ ID NO: 587260
acuuucugccaugaugcaa

SEQ ID NO: 778941 - RNA, 19 nt, Artificial Sequence
  Description of Artificial Sequence: Synthetic oligonucleotide
  Antisense strand to SEQ ID NO: 778940
uugcaucauggcagaaagu

SEQ ID NO: 778942 - RNA, 19 nt, Artificial Sequence
  Description of Artificial Sequence: Synthetic oligonucleotide
  Sense strand starting at position 3279 of SEQ ID NO: 587260
ugguuagugugacuuagua

SEQ ID NO: 778943 - RNA, 19 nt, Artificial Sequence
  Description of Artificial Sequence: Synthetic oligonucleotide
  Antisense strand to SEQ ID NO: 778942
uacuaagucacacuaacca

SEQ ID NO: 778944 - RNA, 19 nt, Artificial Sequence
  Description of Artificial Sequence: Synthetic oligonucleotide
  Sense strand starting at position 3281 of SEQ ID NO: 587260
guuagugugacuuaguaac

SEQ ID NO: 778945 - RNA, 19 nt, Artificial Sequence
  Description of Artificial Sequence: Synthetic oligonucleotide
  Antisense strand to SEQ ID NO: 778944
guuacuaagucacacuaac

SEQ ID NO: 778946 - RNA, 19 nt, Artificial Sequence
  Description of Artificial Sequence: Synthetic oligonucleotide
  Sense strand starting at position 3287 of SEQ ID NO: 587260
gugacuuaguaacugaauu

SEQ ID NO: 778947 - RNA, 19 nt, Artificial Sequence
  Description of Artificial Sequence: Synthetic oligonucleotide
  Antisense strand to SEQ ID NO: 778946
aauucaguuacuaagucac

SEQ ID NO: 778948 - RNA, 19 nt, Artificial Sequence
  Description of Artificial Sequence: Synthetic oligonucleotide
  Sense strand starting at position 3384 of SEQ ID NO: 587260
aagguccaugcuugaacua

SEQ ID NO: 778949 - RNA, 19 nt, Artificial Sequence
  Description of Artificial Sequence: Synthetic oligonucleotide
  Antisense strand to SEQ ID NO: 778948
uaguucaagcauggaccuu

SEQ ID NO: 778950 - RNA, 19 nt, Artificial Sequence
  Description of Artificial Sequence: Synthetic oligonucleotide
  Sense strand starting at position 3385 of SEQ ID NO: 587260
agguccaugcuugaacuau

SEQ ID NO: 778951 - RNA, 19 nt, Artificial Sequence
  Description of Artificial Sequence: Synthetic oligonucleotide
  Antisense strand to SEQ ID NO: 778950
auaguucaagcauggaccu

SEQ ID NO: 778952 - RNA, 19 nt, Artificial Sequence
  Description of Artificial Sequence: Synthetic oligonucleotide
  Sense strand starting at position 3396 of SEQ ID NO: 587260
ugaacuaucuugguuucuu

SEQ ID NO: 778953 - RNA, 19 nt, Artificial Sequence
  Description of Artificial Sequence: Synthetic oligonucleotide
  Antisense strand to SEQ ID NO: 778952
aagaaaccaagauaguuca

SEQ ID NO: 778954 - RNA, 19 nt, Artificial Sequence
  Description of Artificial Sequence: Synthetic oligonucleotide
  Sense strand starting at position 3898 of SEQ ID NO: 587260
gguuuaauguaucucacuu

SEQ ID NO: 778955 - RNA, 19 nt, Artificial Sequence
  Description of Artificial Sequence: Synthetic oligonucleotide
  Antisense strand to SEQ ID NO: 778954
aagugagauacauuaaacc

SEQ ID NO: 778956 - RNA, 19 nt, Artificial Sequence
  Description of Artificial Sequence: Synthetic oligonucleotide
  Sense strand starting at position 143 of SEQ ID NO: 587261
gaggaaguguuucuuccac

SEQ ID NO: 778957 - RNA, 19 nt, Artificial Sequence
  Description of Artificial Sequence: Synthetic oligonucleotide
  Antisense strand to SEQ ID NO: 778956
guggaagaaacacuuccuc

SEQ ID NO: 778958 - RNA, 19 nt, Artificial Sequence
  Description of Artificial Sequence: Synthetic oligonucleotide
  Sense strand starting at position 189 of SEQ ID NO: 587261
cucauagaagcaugaccau

SEQ ID NO: 778959 - RNA, 19 nt, Artificial Sequence
  Description of Artificial Sequence: Synthetic oligonucleotide
  Antisense strand to SEQ ID NO: 778958
auggucaugcuucuaugag

SEQ ID NO: 778960 - RNA, 19 nt, Artificial Sequence
  Description of Artificial Sequence: Synthetic oligonucleotide
  Sense strand starting at position 227 of SEQ ID NO: 587261
gcauaugacuguccaugau

SEQ ID NO: 778961 - RNA, 19 nt, Artificial Sequence
  Description of Artificial Sequence: Synthetic oligonucleotide
  Antisense strand to SEQ ID NO: 778960
aucauggacagucauaugc

SEQ ID NO: 778962 - RNA, 19 nt, Artificial Sequence
  Description of Artificial Sequence: Synthetic oligonucleotide
  Sense strand starting at position 251 of SEQ ID NO: 587261
gcaaauugguacuuacuga

SEQ ID NO: 778963 - RNA, 19 nt, Artificial Sequence
  Description of Artificial Sequence: Synthetic oligonucleotide
  Antisense strand to SEQ ID NO: 778962
ucaguaaguaccaauuugc

SEQ ID NO: 778964 - RNA, 19 nt, Artificial Sequence
  Description of Artificial Sequence: Synthetic oligonucleotide
  Sense strand starting at position 267 of SEQ ID NO: 587261
ugaagauaggauugccagu

SEQ ID NO: 778965 - RNA, 19 nt, Artificial Sequence
  Description of Artificial Sequence: Synthetic oligonucleotide
  Antisense strand to SEQ ID NO: 778964
acuggcaauccuaucuuca

SEQ ID NO: 778966 - RNA, 19 nt, Artificial Sequence
  Description of Artificial Sequence: Synthetic oligonucleotide
  Sense strand starting at position 274 of SEQ ID NO: 587261
aggauugccaguugacuuu

SEQ ID NO: 778967 - RNA, 19 nt, Artificial Sequence
  Description of Artificial Sequence: Synthetic oligonucleotide
  Antisense strand to SEQ ID NO: 778966
aaagucaacuggcaauccu

SEQ ID NO: 778968 - RNA, 19 nt, Artificial Sequence
  Description of Artificial Sequence: Synthetic oligonucleotide
  Sense strand starting at position 285 of SEQ ID NO: 587261
uugacuuuguuugcacgaa

SEQ ID NO: 778969 - RNA, 19 nt, Artificial Sequence
  Description of Artificial Sequence: Synthetic oligonucleotide
  Antisense strand to SEQ ID NO: 778968
uucgugcaaacaaagucaa

SEQ ID NO: 778970 - RNA, 19 nt, Artificial Sequence
  Description of Artificial Sequence: Synthetic oligonucleotide
  Sense strand starting at position 385 of SEQ ID NO: 587261
cuucguaaucuugaauguc

SEQ ID NO: 778971 - RNA, 19 nt, Artificial Sequence
  Description of Artificial Sequence: Synthetic oligonucleotide
  Antisense strand to SEQ ID NO: 778970
gacauucaagauuacgaag

SEQ ID NO: 778972 - RNA, 19 nt, Artificial Sequence
  Description of Artificial Sequence: Synthetic oligonucleotide
  Sense strand starting at position 388 of SEQ ID NO: 587261
cguaaucuugaaugucuuu

SEQ ID NO: 778973 - RNA, 19 nt, Artificial Sequence
  Description of Artificial Sequence: Synthetic oligonucleotide
  Antisense strand to SEQ ID NO: 778972
aaagacauucaagauuacg

SEQ ID NO: 778974 - RNA, 19 nt, Artificial Sequence
  Description of Artificial Sequence: Synthetic oligonucleotide
  Sense strand starting at position 438 of SEQ ID NO: 587261
aacagaauacgagguguuu

SEQ ID NO: 778975 - RNA, 19 nt, Artificial Sequence
  Description of Artificial Sequence: Synthetic oligonucleotide
  Antisense strand to SEQ ID NO: 778974
aaacaccucguauucuguu

SEQ ID NO: 778976 - RNA, 19 nt, Artificial Sequence
  Description of Artificial Sequence: Synthetic oligonucleotide
  Sense strand starting at position 440 of SEQ ID NO: 587261
cagaauacgagguguuucu

SEQ ID NO: 778977 - RNA, 19 nt, Artificial Sequence
  Description of Artificial Sequence: Synthetic oligonucleotide
  Antisense strand to SEQ ID NO: 778976
agaaacaccucguauucug

SEQ ID NO: 778978 - RNA, 19 nt, Artificial Sequence
  Description of Artificial Sequence: Synthetic oligonucleotide
  Sense strand starting at position 486 of SEQ ID NO: 587261
uaugaauaucgugaucacu

SEQ ID NO: 778979 - RNA, 19 nt, Artificial Sequence
  Description of Artificial Sequence: Synthetic oligonucleotide
  Antisense strand to SEQ ID NO: 778978
agugaucacgauauucaua

SEQ ID NO: 778980 - RNA, 19 nt, Artificial Sequence
  Description of Artificial Sequence: Synthetic oligonucleotide
  Sense strand starting at position 488 of SEQ ID NO: 587261
ugaauaucgugaucacuuu

SEQ ID NO: 778981 - RNA, 19 nt, Artificial Sequence
  Description of Artificial Sequence: Synthetic oligonucleotide
  Antisense strand to SEQ ID NO: 778980
aaagugaucacgauauuca

SEQ ID NO: 778982 - RNA, 19 nt, Artificial Sequence
  Description of Artificial Sequence: Synthetic oligonucleotide
  Sense strand starting at position 489 of SEQ ID NO: 587261
gaauaucgugaucacuuua

SEQ ID NO: 778983 - RNA, 19 nt, Artificial Sequence
  Description of Artificial Sequence: Synthetic oligonucleotide
  Antisense strand to SEQ ID NO: 778982
uaaagugaucacgauauuc

SEQ ID NO: 778984 - RNA, 19 nt, Artificial Sequence
  Description of Artificial Sequence: Synthetic oligonucleotide
  Sense strand starting at position 494 of SEQ ID NO: 587261
ucgugaucacuuuaaucuc

SEQ ID NO: 778985 - RNA, 19 nt, Artificial Sequence
  Description of Artificial Sequence: Synthetic oligonucleotide
  Antisense strand to SEQ ID NO: 778984
gagauuaaagugaucacga

SEQ ID NO: 778986 - RNA, 19 nt, Artificial Sequence
  Description of Artificial Sequence: Synthetic oligonucleotide
  Sense strand starting at position 538 of SEQ ID NO: 587261
auguccuaagucugaaagu

SEQ ID NO: 778987 - RNA, 19 nt, Artificial Sequence
  Description of Artificial Sequence: Synthetic oligonucleotide
  Antisense strand to SEQ ID NO: 778986
acuuucagacuuaggacau

SEQ ID NO: 778988 - RNA, 19 nt, Artificial Sequence
  Description of Artificial Sequence: Synthetic oligonucleotide
  Sense strand starting at position 645 of SEQ ID NO: 587261
cuaacacugcaguaagauu

SEQ ID NO: 778989 - RNA, 19 nt, Artificial Sequence
  Description of Artificial Sequence: Synthetic oligonucleotide
  Antisense strand to SEQ ID NO: 778988
aaucuuacugcaguguuag

SEQ ID NO: 778990 - RNA, 19 nt, Artificial Sequence
  Description of Artificial Sequence: Synthetic oligonucleotide
  Sense strand starting at position 787 of SEQ ID NO: 587261
auaugaauaguacggauaa

SEQ ID NO: 778991 - RNA, 19 nt, Artificial Sequence
  Description of Artificial Sequence: Synthetic oligonucleotide
  Antisense strand to SEQ ID NO: 778990
uuauccguacuauucauau

SEQ ID NO: 778992 - RNA, 19 nt, Artificial Sequence
  Description of Artificial Sequence: Synthetic oligonucleotide
  Sense strand starting at position 838 of SEQ ID NO: 587261
uuugaaguggcacauuaaa

SEQ ID NO: 778993 - RNA, 19 nt, Artificial Sequence
  Description of Artificial Sequence: Synthetic oligonucleotide
  Antisense strand to SEQ ID NO: 778992
uuuaaugugccacuucaaa

SEQ ID NO: 778994 - RNA, 19 nt, Artificial Sequence
  Description of Artificial Sequence: Synthetic oligonucleotide
  Sense strand starting at position 919 of SEQ ID NO: 587261
agaagacagugcuuuccuu

SEQ ID NO: 778995 - RNA, 19 nt, Artificial Sequence
  Description of Artificial Sequence: Synthetic oligonucleotide
  Antisense strand to SEQ ID NO: 778994
aaggaaagcacugucuucu

SEQ ID NO: 778996 - RNA, 19 nt, Artificial Sequence
  Description of Artificial Sequence: Synthetic oligonucleotide
  Sense strand starting at position 1207 of SEQ ID NO: 587261
cggguuuccaacgaucuua

SEQ ID NO: 778997 - RNA, 19 nt, Artificial Sequence
  Description of Artificial Sequence: Synthetic oligonucleotide
  Antisense strand to SEQ ID NO: 778996
uaagaucguuggaaacccg

SEQ ID NO: 778998 - RNA, 19 nt, Artificial Sequence
  Description of Artificial Sequence: Synthetic oligonucleotide
  Sense strand starting at position 1234 of SEQ ID NO: 587261
ggaacuuaaucucuguauc

SEQ ID NO: 778999 - RNA, 19 nt, Artificial Sequence
  Description of Artificial Sequence: Synthetic oligonucleotide
  Antisense strand to SEQ ID NO: 778998
gauacagagauuaaguucc

SEQ ID NO: 779000 - RNA, 19 nt, Artificial Sequence
  Description of Artificial Sequence: Synthetic oligonucleotide
  Sense strand starting at position 1452 of SEQ ID NO: 587261
cccaguccuggagaaggua

SEQ ID NO: 779001 - RNA, 19 nt, Artificial Sequence
  Description of Artificial Sequence: Synthetic oligonucleotide
  Antisense strand to SEQ ID NO: 779000
uaccuucuccaggacuggg

SEQ ID NO: 779002 - RNA, 19 nt, Artificial Sequence
  Description of Artificial Sequence: Synthetic oligonucleotide
  Sense strand starting at position 1560 of SEQ ID NO: 587261
cugguugaggccuggaaga

SEQ ID NO: 779003 - RNA, 19 nt, Artificial Sequence
  Description of Artificial Sequence: Synthetic oligonucleotide
  Antisense strand to SEQ ID NO: 779002
ucuuccaggccucaaccag

SEQ ID NO: 779004 - RNA, 19 nt, Artificial Sequence
  Description of Artificial Sequence: Synthetic oligonucleotide
  Sense strand starting at position 2292 of SEQ ID NO: 587261
aaguuugauuucgcgcuuu

SEQ ID NO: 779005 - RNA, 19 nt, Artificial Sequence
  Description of Artificial Sequence: Synthetic oligonucleotide
  Antisense strand to SEQ ID NO: 779004
aaagcgcgaaaucaaacuu

SEQ ID NO: 779006 - RNA, 19 nt, Artificial Sequence
  Description of Artificial Sequence: Synthetic oligonucleotide
  Sense strand starting at position 2582 of SEQ ID NO: 587261
cugucuuugccuuaaagua

SEQ ID NO: 779007 - RNA, 19 nt, Artificial Sequence
  Description of Artificial Sequence: Synthetic oligonucleotide
  Antisense strand to SEQ ID NO: 779006
uacuuuaaggcaaagacag

SEQ ID NO: 779008 - RNA, 19 nt, Artificial Sequence
  Description of Artificial Sequence: Synthetic oligonucleotide
  Sense strand starting at position 3032 of SEQ ID NO: 587261
ucaugcauugauuaugaau

SEQ ID NO: 779009 - RNA, 19 nt, Artificial Sequence
  Description of Artificial Sequence: Synthetic oligonucleotide
  Antisense strand to SEQ ID NO: 779008
auucauaaucaaugcauga

SEQ ID NO: 779010 - RNA, 19 nt, Artificial Sequence
  Description of Artificial Sequence: Synthetic oligonucleotide
  Sense strand starting at position 3067 of SEQ ID NO: 587261
agugucaaagauuguacua

SEQ ID NO: 779011 - RNA, 19 nt, Artificial Sequence
  Description of Artificial Sequence: Synthetic oligonucleotide
  Antisense strand to SEQ ID NO: 779010
uaguacaaucuuugacacu

SEQ ID NO: 779012 - RNA, 19 nt, Artificial Sequence
  Description of Artificial Sequence: Synthetic oligonucleotide
  Sense strand starting at position 3074 of SEQ ID NO: 587261
aagauuguacuaggucacu

SEQ ID NO: 779013 - RNA, 19 nt, Artificial Sequence
  Description of Artificial Sequence: Synthetic oligonucleotide
  Antisense strand to SEQ ID NO: 779012
agugaccuaguacaaucuu

SEQ ID NO: 779014 - RNA, 19 nt, Artificial Sequence
  Description of Artificial Sequence: Synthetic oligonucleotide
  Sense strand starting at position 3097 of SEQ ID NO: 587261
cugucuuagccagaaguga

SEQ ID NO: 779015 - RNA, 19 nt, Artificial Sequence
  Description of Artificial Sequence: Synthetic oligonucleotide
  Antisense strand to SEQ ID NO: 779014
ucacuucuggcuaagacag

SEQ ID NO: 779016 - RNA, 19 nt, Artificial Sequence
  Description of Artificial Sequence: Synthetic oligonucleotide
  Sense strand starting at position 3110 of SEQ ID NO: 587261
aagugaaagucuguuguuu

SEQ ID NO: 779017 - RNA, 19 nt, Artificial Sequence
  Description of Artificial Sequence: Synthetic oligonucleotide
  Antisense strand to SEQ ID NO: 779016
aaacaacagacuuucacuu

SEQ ID NO: 779018 - RNA, 19 nt, Artificial Sequence
  Description of Artificial Sequence: Synthetic oligonucleotide
  Sense strand starting at position 3242 of SEQ ID NO: 587261
ggcagugaggccugaucuu

SEQ ID NO: 779019 - RNA, 19 nt, Artificial Sequence
  Description of Artificial Sequence: Synthetic oligonucleotide
  Antisense strand to SEQ ID NO: 779018
aagaucaggccucacugcc

SEQ ID NO: 779020 - RNA, 19 nt, Artificial Sequence
  Description of Artificial Sequence: Synthetic oligonucleotide
  Sense strand starting at position 3249 of SEQ ID NO: 587261
aggccugaucuucgcauuu

SEQ ID NO: 779021 - RNA, 19 nt, Artificial Sequence
  Description of Artificial Sequence: Synthetic oligonucleotide
  Antisense strand to SEQ ID NO: 779020
aaaugcgaagaucaggccu

SEQ ID NO: 779022 - RNA, 19 nt, Artificial Sequence
  Description of Artificial Sequence: Synthetic oligonucleotide
  Sense strand starting at position 3288 of SEQ ID NO: 587261
cacagacuggcgugauaca

SEQ ID NO: 779023 - RNA, 19 nt, Artificial Sequence
  Description of Artificial Sequence: Synthetic oligonucleotide
  Antisense strand to SEQ ID NO: 779022
uguaucacgccagucugug

SEQ ID NO: 779024 - RNA, 19 nt, Artificial Sequence
  Description of Artificial Sequence: Synthetic oligonucleotide
  Sense strand starting at position 3305 of SEQ ID NO: 587261
cagcgagucucaucagauu

SEQ ID NO: 779025 - RNA, 19 nt, Artificial Sequence
  Description of Artificial Sequence: Synthetic oligonucleotide
  Antisense strand to SEQ ID NO: 779024
aaucugaugagacucgcug

SEQ ID NO: 779026 - RNA, 19 nt, Artificial Sequence
  Description of Artificial Sequence: Synthetic oligonucleotide
  Sense strand starting at position 3494 of SEQ ID NO: 587261
ccggcauuaucucucuuaa

SEQ ID NO: 779027 - RNA, 19 nt, Artificial Sequence
  Description of Artificial Sequence: Synthetic oligonucleotide
  Antisense strand to SEQ ID NO: 779026
uuaagagagauaaugccgg

SEQ ID NO: 779028 - RNA, 19 nt, Artificial Sequence
  Description of Artificial Sequence: Synthetic oligonucleotide
  Sense strand starting at position 3526 of SEQ ID NO: 587261
acacuucuaucggagauuu

SEQ ID NO: 779029 - RNA, 19 nt, Artificial Sequence
  Description of Artificial Sequence: Synthetic oligonucleotide
  Antisense strand to SEQ ID NO: 779028
aaaucuccgauagaagugu

SEQ ID NO: 779030 - RNA, 19 nt, Artificial Sequence
  Description of Artificial Sequence: Synthetic oligonucleotide
  Sense strand starting at position 3676 of SEQ ID NO: 587261
aggauugucccagguugca

SEQ ID NO: 779031 - RNA, 19 nt, Artificial Sequence
  Description of Artificial Sequence: Synthetic oligonucleotide
  Antisense strand to SEQ ID NO: 779030
ugcaaccugggacaauccu

SEQ ID NO: 779032 - RNA, 19 nt, Artificial Sequence
  Description of Artificial Sequence: Synthetic oligonucleotide
  Sense strand starting at position 3804 of SEQ ID NO: 587261
cugaucauuucccaaaggu

SEQ ID NO: 779033 - RNA, 19 nt, Artificial Sequence
  Description of Artificial Sequence: Synthetic oligonucleotide
  Antisense strand to SEQ ID NO: 779032
accuuugggaaaugaucag

SEQ ID NO: 779034 - RNA, 19 nt, Artificial Sequence
  Description of Artificial Sequence: Synthetic oligonucleotide
  Sense strand starting at position 3887 of SEQ ID NO: 587261
gaccauagcggugaucuca

SEQ ID NO: 779035 - RNA, 19 nt, Artificial Sequence
  Description of Artificial Sequence: Synthetic oligonucleotide
  Antisense strand to SEQ ID NO: 779034
ugagaucaccgcuaugguc

SEQ ID NO: 779036 - RNA, 19 nt, Artificial Sequence
  Description of Artificial Sequence: Synthetic oligonucleotide
  Sense strand starting at position 142 of SEQ ID NO: 587262
aguuguaugcaccacucua

SEQ ID NO: 779037 - RNA, 19 nt, Artificial Sequence
  Description of Artificial Sequence: Synthetic oligonucleotide
  Antisense strand to SEQ ID NO: 779036
uagaguggugcauacaacu

SEQ ID NO: 779038 - RNA, 19 nt, Artificial Sequence
  Description of Artificial Sequence: Synthetic oligonucleotide
  Sense strand starting at position 193 of SEQ ID NO: 587262
ggcauaucagaccagucua

SEQ ID NO: 779039 - RNA, 19 nt, Artificial Sequence
  Description of Artificial Sequence: Synthetic oligonucleotide
  Antisense strand to SEQ ID NO: 779038
uagacuggucugauaugcc

SEQ ID NO: 779040 - RNA, 19 nt, Artificial Sequence
  Description of Artificial Sequence: Synthetic oligonucleotide
  Sense strand starting at position 243 of SEQ ID NO: 587262
ccguuagcccaaggacauu

SEQ ID NO: 779041 - RNA, 19 nt, Artificial Sequence
  Description of Artificial Sequence: Synthetic oligonucleotide
  Antisense strand to SEQ ID NO: 779040
aauguccuugggcuaacgg

SEQ ID NO: 779042 - RNA, 19 nt, Artificial Sequence
  Description of Artificial Sequence: Synthetic oligonucleotide
  Sense strand starting at position 412 of SEQ ID NO: 587262
gaggaaguguuucuuccac

SEQ ID NO: 779043 - RNA, 19 nt, Artificial Sequence
  Description of Artificial Sequence: Synthetic oligonucleotide
  Antisense strand to SEQ ID NO: 779042
guggaagaaacacuuccuc

SEQ ID NO: 779044 - RNA, 19 nt, Artificial Sequence
  Description of Artificial Sequence: Synthetic oligonucleotide
  Sense strand starting at position 458 of SEQ ID NO: 587262
cucauagaagcaugaccau

SEQ ID NO: 779045 - RNA, 19 nt, Artificial Sequence
  Description of Artificial Sequence: Synthetic oligonucleotide
  Antisense strand to SEQ ID NO: 779044
auggucaugcuucuaugag

SEQ ID NO: 779046 - RNA, 19 nt, Artificial Sequence
  Description of Artificial Sequence: Synthetic oligonucleotide
  Sense strand starting at position 496 of SEQ ID NO: 587262
gcauaugacuguccaugau

SEQ ID NO: 779047 - RNA, 19 nt, Artificial Sequence
  Description of Artificial Sequence: Synthetic oligonucleotide
  Antisense strand to SEQ ID NO: 779046
aucauggacagucauaugc

SEQ ID NO: 779048 - RNA, 19 nt, Artificial Sequence
  Description of Artificial Sequence: Synthetic oligonucleotide
  Sense strand starting at position 520 of SEQ ID NO: 587262
gcaaauugguacuuacuga

SEQ ID NO: 779049 - RNA, 19 nt, Artificial Sequence
  Description of Artificial Sequence: Synthetic oligonucleotide
  Antisense strand to SEQ ID NO: 779048
ucaguaaguaccaauuugc

SEQ ID NO: 779050 - RNA, 19 nt, Artificial Sequence
  Description of Artificial Sequence: Synthetic oligonucleotide
  Sense strand starting at position 536 of SEQ ID NO: 587262
ugaagauaggauugccagu

SEQ ID NO: 779051 - RNA, 19 nt, Artificial Sequence
  Description of Artificial Sequence: Synthetic oligonucleotide
  Antisense strand to SEQ ID NO: 779050
acuggcaauccuaucuuca

SEQ ID NO: 779052 - RNA, 19 nt, Artificial Sequence
  Description of Artificial Sequence: Synthetic oligonucleotide
  Sense strand starting at position 543 of SEQ ID NO: 587262
aggauugccaguugacuuu

SEQ ID NO: 779053 - RNA, 19 nt, Artificial Sequence
  Description of Artificial Sequence: Synthetic oligonucleotide
  Antisense strand to SEQ ID NO: 779052
aaagucaacuggcaauccu

SEQ ID NO: 779054 - RNA, 19 nt, Artificial Sequence
  Description of Artificial Sequence: Synthetic oligonucleotide
  Sense strand starting at position 554 of SEQ ID NO: 587262
uugacuuuguuugcacgaa

SEQ ID NO: 779055 - RNA, 19 nt, Artificial Sequence
  Description of Artificial Sequence: Synthetic oligonucleotide
  Antisense strand to SEQ ID NO: 779054
uucgugcaaacaaagucaa

SEQ ID NO: 779056 - RNA, 19 nt, Artificial Sequence
  Description of Artificial Sequence: Synthetic oligonucleotide
  Sense strand starting at position 654 of SEQ ID NO: 587262
cuucguaaucuugaauguc

SEQ ID NO: 779057 - RNA, 19 nt, Artificial Sequence
  Description of Artificial Sequence: Synthetic oligonucleotide
  Antisense strand to SEQ ID NO: 779056
gacauucaagauuacgaag

SEQ ID NO: 779058 - RNA, 19 nt, Artificial Sequence
  Description of Artificial Sequence: Synthetic oligonucleotide
  Sense strand starting at position 707 of SEQ ID NO: 587262
aacagaauacgagguguuu

SEQ ID NO: 779059 - RNA, 19 nt, Artificial Sequence
  Description of Artificial Sequence: Synthetic oligonucleotide
  Antisense strand to SEQ ID NO: 779058
aaacaccucguauucuguu

SEQ ID NO: 779060 - RNA, 19 nt, Artificial Sequence
  Description of Artificial Sequence: Synthetic oligonucleotide
  Sense strand starting at position 709 of SEQ ID NO: 587262
cagaauacgagguguuucu

SEQ ID NO: 779061 - RNA, 19 nt, Artificial Sequence
  Description of Artificial Sequence: Synthetic oligonucleotide
  Antisense strand to SEQ ID NO: 779060
agaaacaccucguauucug

SEQ ID NO: 779062 - RNA, 19 nt, Artificial Sequence
  Description of Artificial Sequence: Synthetic oligonucleotide
  Sense strand starting at position 755 of SEQ ID NO: 587262
uaugaauaucgugaucacu

SEQ ID NO: 779063 - RNA, 19 nt, Artificial Sequence
  Description of Artificial Sequence: Synthetic oligonucleotide
  Antisense strand to SEQ ID NO: 779062
agugaucacgauauucaua

SEQ ID NO: 779064 - RNA, 19 nt, Artificial Sequence
  Description of Artificial Sequence: Synthetic oligonucleotide
  Sense strand starting at position 757 of SEQ ID NO: 587262
ugaauaucgugaucacuuu

SEQ ID NO: 779065 - RNA, 19 nt, Artificial Sequence
  Description of Artificial Sequence: Synthetic oligonucleotide
  Antisense strand to SEQ ID NO: 779064
aaagugaucacgauauuca

SEQ ID NO: 779066 - RNA, 19 nt, Artificial Sequence
  Description of Artificial Sequence: Synthetic oligonucleotide
  Sense strand starting at position 758 of SEQ ID NO: 587262
gaauaucgugaucacuuua

SEQ ID NO: 779067 - RNA, 19 nt, Artificial Sequence
  Description of Artificial Sequence: Synthetic oligonucleotide
  Antisense strand to SEQ ID NO: 779066
uaaagugaucacgauauuc

SEQ ID NO: 779068 - RNA, 19 nt, Artificial Sequence
  Description of Artificial Sequence: Synthetic oligonucleotide
  Sense strand starting at position 763 of SEQ ID NO: 587262
ucgugaucacuuuaaucuc

SEQ ID NO: 779069 - RNA, 19 nt, Artificial Sequence
  Description of Artificial Sequence: Synthetic oligonucleotide
  Antisense strand to SEQ ID NO: 779068
gagauuaaagugaucacga

SEQ ID NO: 779070 - RNA, 19 nt, Artificial Sequence
  Description of Artificial Sequence: Synthetic oligonucleotide
  Sense strand starting at position 807 of SEQ ID NO: 587262
auguccuaagucugaaagu

SEQ ID NO: 779071 - RNA, 19 nt, Artificial Sequence
  Description of Artificial Sequence: Synthetic oligonucleotide
  Antisense strand to SEQ ID NO: 779070
acuuucagacuuaggacau

SEQ ID NO: 779072 - RNA, 19 nt, Artificial Sequence
  Description of Artificial Sequence: Synthetic oligonucleotide
  Sense strand starting at position 914 of SEQ ID NO: 587262
cuaacacugcaguaagauu

SEQ ID NO: 779073 - RNA, 19 nt, Artificial Sequence
  Description of Artificial Sequence: Synthetic oligonucleotide
  Antisense strand to SEQ ID NO: 779072
aaucuuacugcaguguuag

SEQ ID NO: 779074 - RNA, 19 nt, Artificial Sequence
  Description of Artificial Sequence: Synthetic oligonucleotide
  Sense strand starting at position 1056 of SEQ ID NO: 587262
auaugaauaguacggauaa

SEQ ID NO: 779075 - RNA, 19 nt, Artificial Sequence
  Description of Artificial Sequence: Synthetic oligonucleotide
  Antisense strand to SEQ ID NO: 779074
uuauccguacuauucauau

SEQ ID NO: 779076 - RNA, 19 nt, Artificial Sequence
  Description of Artificial Sequence: Synthetic oligonucleotide
  Sense strand starting at position 1107 of SEQ ID NO: 587262
uuugaaguggcacauuaaa

SEQ ID NO: 779077 - RNA, 19 nt, Artificial Sequence
  Description of Artificial Sequence: Synthetic oligonucleotide
  Antisense strand to SEQ ID NO: 779076
uuuaaugugccacuucaaa

SEQ ID NO: 779078 - RNA, 19 nt, Artificial Sequence
  Description of Artificial Sequence: Synthetic oligonucleotide
  Sense strand starting at position 1188 of SEQ ID NO: 587262
agaagacagugcuuuccuu

SEQ ID NO: 779079 - RNA, 19 nt, Artificial Sequence
  Description of Artificial Sequence: Synthetic oligonucleotide
  Antisense strand to SEQ ID NO: 779078
aaggaaagcacugucuucu

SEQ ID NO: 779080 - RNA, 19 nt, Artificial Sequence
  Description of Artificial Sequence: Synthetic oligonucleotide
  Sense strand starting at position 1476 of SEQ ID NO: 587262
cggguuuccaacgaucuua

SEQ ID NO: 779081 - RNA, 19 nt, Artificial Sequence
  Description of Artificial Sequence: Synthetic oligonucleotide
  Antisense strand to SEQ ID NO: 779080
uaagaucguuggaaacccg

SEQ ID NO: 779082 - RNA, 19 nt, Artificial Sequence
  Description of Artificial Sequence: Synthetic oligonucleotide
  Sense strand starting at position 1503 of SEQ ID NO: 587262
ggaacuuaaucucuguauc

SEQ ID NO: 779083 - RNA, 19 nt, Artificial Sequence
  Description of Artificial Sequence: Synthetic oligonucleotide
  Antisense strand to SEQ ID NO: 779082
gauacagagauuaaguucc

SEQ ID NO: 779084 - RNA, 19 nt, Artificial Sequence
  Description of Artificial Sequence: Synthetic oligonucleotide
  Sense strand starting at position 1721 of SEQ ID NO: 587262
cccaguccuggagaaggua

SEQ ID NO: 779085 - RNA, 19 nt, Artificial Sequence
  Description of Artificial Sequence: Synthetic oligonucleotide
  Antisense strand to SEQ ID NO: 779084
uaccuucuccaggacuggg

SEQ ID NO: 779086 - RNA, 19 nt, Artificial Sequence
  Description of Artificial Sequence: Synthetic oligonucleotide
  Sense strand starting at position 1829 of SEQ ID NO: 587262
cugguugaggccuggaaga

SEQ ID NO: 779087 - RNA, 19 nt, Artificial Sequence
  Description of Artificial Sequence: Synthetic oligonucleotide
  Antisense strand to SEQ ID NO: 779086
ucuuccaggccucaaccag

SEQ ID NO: 779088 - RNA, 19 nt, Artificial Sequence
  Description of Artificial Sequence: Synthetic oligonucleotide
  Sense strand starting at position 2561 of SEQ ID NO: 587262
aaguuugauuucgcgcuuu

SEQ ID NO: 779089 - RNA, 19 nt, Artificial Sequence
  Description of Artificial Sequence: Synthetic oligonucleotide
  Antisense strand to SEQ ID NO: 779088
aaagcgcgaaaucaaacuu

SEQ ID NO: 779090 - RNA, 19 nt, Artificial Sequence
  Description of Artificial Sequence: Synthetic oligonucleotide
  Sense strand starting at position 2851 of SEQ ID NO: 587262
cugucuuugccuuaaagua

SEQ ID NO: 779091 - RNA, 19 nt, Artificial Sequence
  Description of Artificial Sequence: Synthetic oligonucleotide
  Antisense strand to SEQ ID NO: 779090
uacuuuaaggcaaagacag

SEQ ID NO: 779092 - RNA, 19 nt, Artificial Sequence
  Description of Artificial Sequence: Synthetic oligonucleotide
  Sense strand starting at position 3301 of SEQ ID NO: 587262
ucaugcauugauuaugaau

SEQ ID NO: 779093 - RNA, 19 nt, Artificial Sequence
  Description of Artificial Sequence: Synthetic oligonucleotide
  Antisense strand to SEQ ID NO: 779092
auucauaaucaaugcauga

SEQ ID NO: 779094 - RNA, 19 nt, Artificial Sequence
  Description of Artificial Sequence: Synthetic oligonucleotide
  Sense strand starting at position 3336 of SEQ ID NO: 587262
agugucaaagauuguacua

SEQ ID NO: 779095 - RNA, 19 nt, Artificial Sequence
  Description of Artificial Sequence: Synthetic oligonucleotide
  Antisense strand to SEQ ID NO: 779094
uaguacaaucuuugacacu

SEQ ID NO: 779096 - RNA, 19 nt, Artificial Sequence
  Description of Artificial Sequence: Synthetic oligonucleotide
  Sense strand starting at position 3343 of SEQ ID NO: 587262
aagauuguacuaggucacu

SEQ ID NO: 779097 - RNA, 19 nt, Artificial Sequence
  Description of Artificial Sequence: Synthetic oligonucleotide
  Antisense strand to SEQ ID NO: 779096
agugaccuaguacaaucuu

SEQ ID NO: 779098 - RNA, 19 nt, Artificial Sequence
  Description of Artificial Sequence: Synthetic oligonucleotide
  Sense strand starting at position 3366 of SEQ ID NO: 587262
cugucuuagccagaaguga

SEQ ID NO: 779099 - RNA, 19 nt, Artificial Sequence
  Description of Artificial Sequence: Synthetic oligonucleotide
  Antisense strand to SEQ ID NO: 779098
ucacuucuggcuaagacag

SEQ ID NO: 779100 - RNA, 19 nt, Artificial Sequence
  Description of Artificial Sequence: Synthetic oligonucleotide
  Sense strand starting at position 3379 of SEQ ID NO: 587262
aagugaaagucuguuguuu

SEQ ID NO: 779101 - RNA, 19 nt, Artificial Sequence
  Description of Artificial Sequence: Synthetic oligonucleotide
  Antisense strand to SEQ ID NO: 779100
aaacaacagacuuucacuu

SEQ ID NO: 779102 - RNA, 19 nt, Artificial Sequence
  Description of Artificial Sequence: Synthetic oligonucleotide
  Sense strand starting at position 3511 of SEQ ID NO: 587262
ggcagugaggccugaucuu

SEQ ID NO: 779103 - RNA, 19 nt, Artificial Sequence
  Description of Artificial Sequence: Synthetic oligonucleotide
  Antisense strand to SEQ ID NO: 779102
aagaucaggccucacugcc

SEQ ID NO: 779104 - RNA, 19 nt, Artificial Sequence
  Description of Artificial Sequence: Synthetic oligonucleotide
  Sense strand starting at position 3518 of SEQ ID NO: 587262
aggccugaucuucgcauuu

SEQ ID NO: 779105 - RNA, 19 nt, Artificial Sequence
  Description of Artificial Sequence: Synthetic oligonucleotide
  Antisense strand to SEQ ID NO: 779104
aaaugcgaagaucaggccu

SEQ ID NO: 779106 - RNA, 19 nt, Artificial Sequence
  Description of Artificial Sequence: Synthetic oligonucleotide
  Sense strand starting at position 3557 of SEQ ID NO: 587262
cacagacuggcgugauaca

SEQ ID NO: 779107 - RNA, 19 nt, Artificial Sequence
  Description of Artificial Sequence: Synthetic oligonucleotide
  Antisense strand to SEQ ID NO: 779106
uguaucacgccagucugug

SEQ ID NO: 779108 - RNA, 19 nt, Artificial Sequence
  Description of Artificial Sequence: Synthetic oligonucleotide
  Sense strand starting at position 3574 of SEQ ID NO: 587262
cagcgagucucaucagauu

SEQ ID NO: 779109 - RNA, 19 nt, Artificial Sequence
  Description of Artificial Sequence: Synthetic oligonucleotide
  Antisense strand to SEQ ID NO: 779108
aaucugaugagacucgcug

SEQ ID NO: 779110 - RNA, 19 nt, Artificial Sequence
  Description of Artificial Sequence: Synthetic oligonucleotide
  Sense strand starting at position 3763 of SEQ ID NO: 587262
ccggcauuaucucucuuaa

SEQ ID NO: 779111 - RNA, 19 nt, Artificial Sequence
  Description of Artificial Sequence: Synthetic oligonucleotide
  Antisense strand to SEQ ID NO: 779110
uuaagagagauaaugccgg

SEQ ID NO: 779112 - RNA, 19 nt, Artificial Sequence
  Description of Artificial Sequence: Synthetic oligonucleotide
  Sense strand starting at position 3795 of SEQ ID NO: 587262
acacuucuaucggagauuu

SEQ ID NO: 779113 - RNA, 19 nt, Artificial Sequence
  Description of Artificial Sequence: Synthetic oligonucleotide
  Antisense strand to SEQ ID NO: 779112
aaaucuccgauagaagugu

SEQ ID NO: 779114 - RNA, 19 nt, Artificial Sequence
  Description of Artificial Sequence: Synthetic oligonucleotide
  Sense strand starting at position 3945 of SEQ ID NO: 587262
aggauugucccagguugca

SEQ ID NO: 779115 - RNA, 19 nt, Artificial Sequence
  Description of Artificial Sequence: Synthetic oligonucleotide
  Antisense strand to SEQ ID NO: 779114
ugcaaccugggacaauccu

SEQ ID NO: 779116 - RNA, 19 nt, Artificial Sequence
  Description of Artificial Sequence: Synthetic oligonucleotide
  Sense strand starting at position 109 of SEQ ID NO: 587263
uuugaaaugcaucgacaaa

SEQ ID NO: 779117 - RNA, 19 nt, Artificial Sequence
  Description of Artificial Sequence: Synthetic oligonucleotide
  Antisense strand to SEQ ID NO: 779116
uuugucgaugcauuucaaa

SEQ ID NO: 779118 - RNA, 19 nt, Artificial Sequence
  Description of Artificial Sequence: Synthetic oligonucleotide
  Sense strand starting at position 146 of SEQ ID NO: 587263
acagaaucuagguggaagu

SEQ ID NO: 779119 - RNA, 19 nt, Artificial Sequence
  Description of Artificial Sequence: Synthetic oligonucleotide
  Antisense strand to SEQ ID NO: 779118
acuuccaccuagauucugu

SEQ ID NO: 779120 - RNA, 19 nt, Artificial Sequence
  Description of Artificial Sequence: Synthetic oligonucleotide
  Sense strand starting at position 147 of SEQ ID NO: 587263
cagaaucuagguggaagua

SEQ ID NO: 779121 - RNA, 19 nt, Artificial Sequence
  Description of Artificial Sequence: Synthetic oligonucleotide
  Antisense strand to SEQ ID NO: 779120
uacuuccaccuagauucug

SEQ ID NO: 779122 - RNA, 19 nt, Artificial Sequence
  Description of Artificial Sequence: Synthetic oligonucleotide
  Sense strand starting at position 269 of SEQ ID NO: 587263
uuuggagucuuuccuaaac

SEQ ID NO: 779123 - RNA, 19 nt, Artificial Sequence
  Description of Artificial Sequence: Synthetic oligonucleotide
  Antisense strand to SEQ ID NO: 779122
guuuaggaaagacuccaaa

SEQ ID NO: 779124 - RNA, 19 nt, Artificial Sequence
  Description of Artificial Sequence: Synthetic oligonucleotide
  Sense strand starting at position 408 of SEQ ID NO: 587263
uguauuugaugugcuuuga

SEQ ID NO: 779125 - RNA, 19 nt, Artificial Sequence
  Description of Artificial Sequence: Synthetic oligonucleotide
  Antisense strand to SEQ ID NO: 779124
ucaaagcacaucaaauaca

SEQ ID NO: 779126 - RNA, 19 nt, Artificial Sequence
  Description of Artificial Sequence: Synthetic oligonucleotide
  Sense strand starting at position 494 of SEQ ID NO: 587263
uccuuugaguccuuagauu

SEQ ID NO: 779127 - RNA, 19 nt, Artificial Sequence
  Description of Artificial Sequence: Synthetic oligonucleotide
  Antisense strand to SEQ ID NO: 779126
aaucuaaggacucaaagga

SEQ ID NO: 779128 - RNA, 19 nt, Artificial Sequence
  Description of Artificial Sequence: Synthetic oligonucleotide
  Sense strand starting at position 592 of SEQ ID NO: 587263
guuaaaugugcugaaacau

SEQ ID NO: 779129 - RNA, 19 nt, Artificial Sequence
  Description of Artificial Sequence: Synthetic oligonucleotide
  Antisense strand to SEQ ID NO: 779128
auguuucagcacauuuaac

SEQ ID NO: 779130 - RNA, 19 nt, Artificial Sequence
  Description of Artificial Sequence: Synthetic oligonucleotide
  Sense strand starting at position 603 of SEQ ID NO: 587263
ugaaacaugaggcgguaaa

SEQ ID NO: 779131 - RNA, 19 nt, Artificial Sequence
  Description of Artificial Sequence: Synthetic oligonucleotide
  Antisense strand to SEQ ID NO: 779130
uuuaccgccucauguuuca

SEQ ID NO: 779132 - RNA, 19 nt, Artificial Sequence
  Description of Artificial Sequence: Synthetic oligonucleotide
  Sense strand starting at position 688 of SEQ ID NO: 587263
ccguguaaggguuagaaca

SEQ ID NO: 779133 - RNA, 19 nt, Artificial Sequence
  Description of Artificial Sequence: Synthetic oligonucleotide
  Antisense strand to SEQ ID NO: 779132
uguucuaacccuuacacgg

SEQ ID NO: 779134 - RNA, 19 nt, Artificial Sequence
  Description of Artificial Sequence: Synthetic oligonucleotide
  Sense strand starting at position 721 of SEQ ID NO: 587263
acuguuggcagucaagaca

SEQ ID NO: 779135 - RNA, 19 nt, Artificial Sequence
  Description of Artificial Sequence: Synthetic oligonucleotide
  Antisense strand to SEQ ID NO: 779134
ugucuugacugccaacagu

SEQ ID NO: 779136 - RNA, 19 nt, Artificial Sequence
  Description of Artificial Sequence: Synthetic oligonucleotide
  Sense strand starting at position 732 of SEQ ID NO: 587263
ucaagacaguaguugauaa

SEQ ID NO: 779137 - RNA, 19 nt, Artificial Sequence
  Description of Artificial Sequence: Synthetic oligonucleotide
  Antisense strand to SEQ ID NO: 779136
uuaucaacuacugucuuga

SEQ ID NO: 779138 - RNA, 19 nt, Artificial Sequence
  Description of Artificial Sequence: Synthetic oligonucleotide
  Sense strand starting at position 1597 of SEQ ID NO: 587263
cgguacucacgugagauaa

SEQ ID NO: 779139 - RNA, 19 nt, Artificial Sequence
  Description of Artificial Sequence: Synthetic oligonucleotide
  Antisense strand to SEQ ID NO: 779138
uuaucucacgugaguaccg

SEQ ID NO: 779140 - RNA, 19 nt, Artificial Sequence
  Description of Artificial Sequence: Synthetic oligonucleotide
  Sense strand starting at position 1629 of SEQ ID NO: 587263
cggguaaagcgucuucucu

SEQ ID NO: 779141 - RNA, 19 nt, Artificial Sequence
  Description of Artificial Sequence: Synthetic oligonucleotide
  Antisense strand to SEQ ID NO: 779140
agagaagacgcuuuacccg

SEQ ID NO: 779142 - RNA, 19 nt, Artificial Sequence
  Description of Artificial Sequence: Synthetic oligonucleotide
  Sense strand starting at position 1662 of SEQ ID NO: 587263
uuuaaagagggaugugguu

SEQ ID NO: 779143 - RNA, 19 nt, Artificial Sequence
  Description of Artificial Sequence: Synthetic oligonucleotide
  Antisense strand to SEQ ID NO: 779142
aaccacaucccucuuuaaa

SEQ ID NO: 779144 - RNA, 19 nt, Artificial Sequence
  Description of Artificial Sequence: Synthetic oligonucleotide
  Sense strand starting at position 1674 of SEQ ID NO: 587263
ugugguuaccuugagcaga

SEQ ID NO: 779145 - RNA, 19 nt, Artificial Sequence
  Description of Artificial Sequence: Synthetic oligonucleotide
  Antisense strand to SEQ ID NO: 779144
ucugcucaagguaaccaca

SEQ ID NO: 779146 - RNA, 19 nt, Artificial Sequence
  Description of Artificial Sequence: Synthetic oligonucleotide
  Sense strand starting at position 1676 of SEQ ID NO: 587263
ugguuaccuugagcagaaa

SEQ ID NO: 779147 - RNA, 19 nt, Artificial Sequence
  Description of Artificial Sequence: Synthetic oligonucleotide
  Antisense strand to SEQ ID NO: 779146
uuucugcucaagguaacca

SEQ ID NO: 779148 - RNA, 19 nt, Artificial Sequence
  Description of Artificial Sequence: Synthetic oligonucleotide
  Sense strand starting at position 1677 of SEQ ID NO: 587263
gguuaccuugagcagaaau

SEQ ID NO: 779149 - RNA, 19 nt, Artificial Sequence
  Description of Artificial Sequence: Synthetic oligonucleotide
  Antisense strand to SEQ ID NO: 779148
auuucugcucaagguaacc

SEQ ID NO: 779150 - RNA, 19 nt, Artificial Sequence
  Description of Artificial Sequence: Synthetic oligonucleotide
  Sense strand starting at position 1977 of SEQ ID NO: 587263
cagcgacgccaguauuuau

SEQ ID NO: 779151 - RNA, 19 nt, Artificial Sequence
  Description of Artificial Sequence: Synthetic oligonucleotide
  Antisense strand to SEQ ID NO: 779150
auaaauacuggcgucgcug

SEQ ID NO: 779152 - RNA, 19 nt, Artificial Sequence
  Description of Artificial Sequence: Synthetic oligonucleotide
  Sense strand starting at position 1980 of SEQ ID NO: 587263
cgacgccaguauuuauauu

SEQ ID NO: 779153 - RNA, 19 nt, Artificial Sequence
  Description of Artificial Sequence: Synthetic oligonucleotide
  Antisense strand to SEQ ID NO: 779152
aauauaaauacuggcgucg

SEQ ID NO: 779154 - RNA, 19 nt, Artificial Sequence
  Description of Artificial Sequence: Synthetic oligonucleotide
  Sense strand starting at position 2538 of SEQ ID NO: 587263
gcgguacuccuuuagggaa

SEQ ID NO: 779155 - RNA, 19 nt, Artificial Sequence
  Description of Artificial Sequence: Synthetic oligonucleotide
  Antisense strand to SEQ ID NO: 779154
uucccuaaaggaguaccgc

SEQ ID NO: 779156 - RNA, 19 nt, Artificial Sequence
  Description of Artificial Sequence: Synthetic oligonucleotide
  Sense strand starting at position 2635 of SEQ ID NO: 587263
agugcucgaacguugcaau

SEQ ID NO: 779157 - RNA, 19 nt, Artificial Sequence
  Description of Artificial Sequence: Synthetic oligonucleotide
  Antisense strand to SEQ ID NO: 779156
auugcaacguucgagcacu

SEQ ID NO: 779158 - RNA, 19 nt, Artificial Sequence
  Description of Artificial Sequence: Synthetic oligonucleotide
  Sense strand starting at position 2903 of SEQ ID NO: 587263
augccucagcacuaaugau

SEQ ID NO: 779159 - RNA, 19 nt, Artificial Sequence
  Description of Artificial Sequence: Synthetic oligonucleotide
  Antisense strand to SEQ ID NO: 779158
aucauuagugcugaggcau

SEQ ID NO: 779160 - RNA, 19 nt, Artificial Sequence
  Description of Artificial Sequence: Synthetic oligonucleotide
  Sense strand starting at position 2938 of SEQ ID NO: 587263
gaguucucucgugcugcua

SEQ ID NO: 779161 - RNA, 19 nt, Artificial Sequence
  Description of Artificial Sequence: Synthetic oligonucleotide
  Antisense strand to SEQ ID NO: 779160
uagcagcacgagagaacuc

SEQ ID NO: 779162 - RNA, 19 nt, Artificial Sequence
  Description of Artificial Sequence: Synthetic oligonucleotide
  Sense strand starting at position 2978 of SEQ ID NO: 587263
aauggaauauguguugaca

SEQ ID NO: 779163 - RNA, 19 nt, Artificial Sequence
  Description of Artificial Sequence: Synthetic oligonucleotide
  Antisense strand to SEQ ID NO: 779162
ugucaacacauauuccauu

SEQ ID NO: 779164 - RNA, 19 nt, Artificial Sequence
  Description of Artificial Sequence: Synthetic oligonucleotide
  Sense strand starting at position 3081 of SEQ ID NO: 587263
agcacugugguugauuaau

SEQ ID NO: 779165 - RNA, 19 nt, Artificial Sequence
  Description of Artificial Sequence: Synthetic oligonucleotide
  Antisense strand to SEQ ID NO: 779164
auuaaucaaccacagugcu

SEQ ID NO: 779166 - RNA, 19 nt, Artificial Sequence
  Description of Artificial Sequence: Synthetic oligonucleotide
  Sense strand starting at position 3083 of SEQ ID NO: 587263
cacugugguugauuaauaa

SEQ ID NO: 779167 - RNA, 19 nt, Artificial Sequence
  Description of Artificial Sequence: Synthetic oligonucleotide
  Antisense strand to SEQ ID NO: 779166
uuauuaaucaaccacagug

SEQ ID NO: 779168 - RNA, 19 nt, Artificial Sequence
  Description of Artificial Sequence: Synthetic oligonucleotide
  Sense strand starting at position 3152 of SEQ ID NO: 587263
guaucuugcgaggcuguau

SEQ ID NO: 779169 - RNA, 19 nt, Artificial Sequence
  Description of Artificial Sequence: Synthetic oligonucleotide
  Antisense strand to SEQ ID NO: 779168
auacagccucgcaagauac

SEQ ID NO: 779170 - RNA, 19 nt, Artificial Sequence
  Description of Artificial Sequence: Synthetic oligonucleotide
  Sense strand starting at position 3163 of SEQ ID NO: 587263
ggcuguaugagagaguauu

SEQ ID NO: 779171 - RNA, 19 nt, Artificial Sequence
  Description of Artificial Sequence: Synthetic oligonucleotide
  Antisense strand to SEQ ID NO: 779170
aauacucucucauacagcc

SEQ ID NO: 779172 - RNA, 19 nt, Artificial Sequence
  Description of Artificial Sequence: Synthetic oligonucleotide
  Sense strand starting at position 3173 of SEQ ID NO: 587263
gagaguauucgguagaauc

SEQ ID NO: 779173 - RNA, 19 nt, Artificial Sequence
  Description of Artificial Sequence: Synthetic oligonucleotide
  Antisense strand to SEQ ID NO: 779172
gauucuaccgaauacucuc

SEQ ID NO: 779174 - RNA, 19 nt, Artificial Sequence
  Description of Artificial Sequence: Synthetic oligonucleotide
  Sense strand starting at position 3175 of SEQ ID NO: 587263
gaguauucgguagaaucag

SEQ ID NO: 779175 - RNA, 19 nt, Artificial Sequence
  Description of Artificial Sequence: Synthetic oligonucleotide
  Antisense strand to SEQ ID NO: 779174
cugauucuaccgaauacuc

SEQ ID NO: 779176 - RNA, 19 nt, Artificial Sequence
  Description of Artificial Sequence: Synthetic oligonucleotide
  Sense strand starting at position 3408 of SEQ ID NO: 587263
aaauaaauuguuggcugau

SEQ ID NO: 779177 - RNA, 19 nt, Artificial Sequence
  Description of Artificial Sequence: Synthetic oligonucleotide
  Antisense strand to SEQ ID NO: 779176
aucagccaacaauuuauuu

SEQ ID NO: 779178 - RNA, 19 nt, Artificial Sequence
  Description of Artificial Sequence: Synthetic oligonucleotide
  Sense strand starting at position 3409 of SEQ ID NO: 587263
aauaaauuguuggcugaua

SEQ ID NO: 779179 - RNA, 19 nt, Artificial Sequence
  Description of Artificial Sequence: Synthetic oligonucleotide
  Antisense strand to SEQ ID NO: 779178
uaucagccaacaauuuauu

SEQ ID NO: 779180 - RNA, 19 nt, Artificial Sequence
  Description of Artificial Sequence: Synthetic oligonucleotide
  Sense strand starting at position 3411 of SEQ ID NO: 587263
uaaauuguuggcugauaca

SEQ ID NO: 779181 - RNA, 19 nt, Artificial Sequence
  Description of Artificial Sequence: Synthetic oligonucleotide
  Antisense strand to SEQ ID NO: 779180
uguaucagccaacaauuua

SEQ ID NO: 779182 - RNA, 19 nt, Artificial Sequence
  Description of Artificial Sequence: Synthetic oligonucleotide
  Sense strand starting at position 3596 of SEQ ID NO: 587263
caguguuccaggcaaggga

SEQ ID NO: 779183 - RNA, 19 nt, Artificial Sequence
  Description of Artificial Sequence: Synthetic oligonucleotide
  Antisense strand to SEQ ID NO: 779182
ucccuugccuggaacacug

SEQ ID NO: 779184 - RNA, 19 nt, Artificial Sequence
  Description of Artificial Sequence: Synthetic oligonucleotide
  Sense strand starting at position 3637 of SEQ ID NO: 587263
aguggguggguuuagagaa

SEQ ID NO: 779185 - RNA, 19 nt, Artificial Sequence
  Description of Artificial Sequence: Synthetic oligonucleotide
  Antisense strand to SEQ ID NO: 779184
uucucuaaacccacccacu

SEQ ID NO: 779186 - RNA, 19 nt, Artificial Sequence
  Description of Artificial Sequence: Synthetic oligonucleotide
  Sense strand starting at position 3645 of SEQ ID NO: 587263
gguuuagagaauugugaau

SEQ ID NO: 779187 - RNA, 19 nt, Artificial Sequence
  Description of Artificial Sequence: Synthetic oligonucleotide
  Antisense strand to SEQ ID NO: 779186
auucacaauucucuaaacc

SEQ ID NO: 779188 - RNA, 19 nt, Artificial Sequence
  Description of Artificial Sequence: Synthetic oligonucleotide
  Sense strand starting at position 3651 of SEQ ID NO: 587263
gagaauugugaauagccuu

SEQ ID NO: 779189 - RNA, 19 nt, Artificial Sequence
  Description of Artificial Sequence: Synthetic oligonucleotide
  Antisense strand to SEQ ID NO: 779188
aaggcuauucacaauucuc

SEQ ID NO: 779190 - RNA, 19 nt, Artificial Sequence
  Description of Artificial Sequence: Synthetic oligonucleotide
  Sense strand starting at position 3701 of SEQ ID NO: 587263
ugagauugaaacgguagau

SEQ ID NO: 779191 - RNA, 19 nt, Artificial Sequence
  Description of Artificial Sequence: Synthetic oligonucleotide
  Antisense strand to SEQ ID NO: 779190
aucuaccguuucaaucuca

SEQ ID NO: 779192 - RNA, 19 nt, Artificial Sequence
  Description of Artificial Sequence: Synthetic oligonucleotide
  Sense strand starting at position 3713 of SEQ ID NO: 587263
gguagauuagggugacauc

SEQ ID NO: 779193 - RNA, 19 nt, Artificial Sequence
  Description of Artificial Sequence: Synthetic oligonucleotide
  Antisense strand to SEQ ID NO: 779192
gaugucacccuaaucuacc

SEQ ID NO: 779194 - RNA, 19 nt, Artificial Sequence
  Description of Artificial Sequence: Synthetic oligonucleotide
  Sense strand starting at position 3893 of SEQ ID NO: 587263
ggcacauggcuguaaucca

SEQ ID NO: 779195 - RNA, 19 nt, Artificial Sequence
  Description of Artificial Sequence: Synthetic oligonucleotide
  Antisense strand to SEQ ID NO: 779194
uggauuacagccaugugcc

SEQ ID NO: 779196 - RNA, 19 nt, Artificial Sequence
  Description of Artificial Sequence: Synthetic oligonucleotide
  Sense strand starting at position 105 of SEQ ID NO: 587264
acccuuauuucuucggagu

SEQ ID NO: 779197 - RNA, 19 nt, Artificial Sequence
  Description of Artificial Sequence: Synthetic oligonucleotide
  Antisense strand to SEQ ID NO: 779196
acuccgaagaaauaagggu

SEQ ID NO: 779198 - RNA, 19 nt, Artificial Sequence
  Description of Artificial Sequence: Synthetic oligonucleotide
  Sense strand starting at position 106 of SEQ ID NO: 587264
cccuuauuucuucggagua

SEQ ID NO: 779199 - RNA, 19 nt, Artificial Sequence
  Description of Artificial Sequence: Synthetic oligonucleotide
  Antisense strand to SEQ ID NO: 779198
uacuccgaagaaauaaggg

SEQ ID NO: 779200 - RNA, 19 nt, Artificial Sequence
  Description of Artificial Sequence: Synthetic oligonucleotide
  Sense strand starting at position 135 of SEQ ID NO: 587264
cuuugacucucugcugaga

SEQ ID NO: 779201 - RNA, 19 nt, Artificial Sequence
  Description of Artificial Sequence: Synthetic oligonucleotide
  Antisense strand to SEQ ID NO: 779200
ucucagcagagagucaaag

SEQ ID NO: 779202 - RNA, 19 nt, Artificial Sequence
  Description of Artificial Sequence: Synthetic oligonucleotide
  Sense strand starting at position 138 of SEQ ID NO: 587264
ugacucucugcugagaagu

SEQ ID NO: 779203 - RNA, 19 nt, Artificial Sequence
  Description of Artificial Sequence: Synthetic oligonucleotide
  Antisense strand to SEQ ID NO: 779202
acuucucagcagagaguca

SEQ ID NO: 779204 - RNA, 19 nt, Artificial Sequence
  Description of Artificial Sequence: Synthetic oligonucleotide
  Sense strand starting at position 157 of SEQ ID NO: 587264
accauaccuccuugggaaa

SEQ ID NO: 779205 - RNA, 19 nt, Artificial Sequence
  Description of Artificial Sequence: Synthetic oligonucleotide
  Antisense strand to SEQ ID NO: 779204
uuucccaaggagguauggu

SEQ ID NO: 779206 - RNA, 19 nt, Artificial Sequence
  Description of Artificial Sequence: Synthetic oligonucleotide
  Sense strand starting at position 611 of SEQ ID NO: 587264
caauaauaucaguggguga

SEQ ID NO: 779207 - RNA, 19 nt, Artificial Sequence
  Description of Artificial Sequence: Synthetic oligonucleotide
  Antisense strand to SEQ ID NO: 779206
ucacccacugauauuauug

SEQ ID NO: 779208 - RNA, 19 nt, Artificial Sequence
  Description of Artificial Sequence: Synthetic oligonucleotide
  Sense strand starting at position 613 of SEQ ID NO: 587264
auaauaucagugggugaag

SEQ ID NO: 779209 - RNA, 19 nt, Artificial Sequence
  Description of Artificial Sequence: Synthetic oligonucleotide
  Antisense strand to SEQ ID NO: 779208
cuucacccacugauauuau

SEQ ID NO: 779210 - RNA, 19 nt, Artificial Sequence
  Description of Artificial Sequence: Synthetic oligonucleotide
  Sense strand starting at position 614 of SEQ ID NO: 587264
uaauaucagugggugaaga

SEQ ID NO: 779211 - RNA, 19 nt, Artificial Sequence
  Description of Artificial Sequence: Synthetic oligonucleotide
  Antisense strand to SEQ ID NO: 779210
ucuucacccacugauauua

SEQ ID NO: 779212 - RNA, 19 nt, Artificial Sequence
  Description of Artificial Sequence: Synthetic oligonucleotide
  Sense strand starting at position 762 of SEQ ID NO: 587264
ugcaucucugcgcuauaau

SEQ ID NO: 779213 - RNA, 19 nt, Artificial Sequence
  Description of Artificial Sequence: Synthetic oligonucleotide
  Antisense strand to SEQ ID NO: 779212
auuauagcgcagagaugca

SEQ ID NO: 779214 - RNA, 19 nt, Artificial Sequence
  Description of Artificial Sequence: Synthetic oligonucleotide
  Sense strand starting at position 891 of SEQ ID NO: 587264
ugaccuaggcaagaguauu

SEQ ID NO: 779215 - RNA, 19 nt, Artificial Sequence
  Description of Artificial Sequence: Synthetic oligonucleotide
  Antisense strand to SEQ ID NO: 779214
aauacucuugccuagguca

SEQ ID NO: 779216 - RNA, 19 nt, Artificial Sequence
  Description of Artificial Sequence: Synthetic oligonucleotide
  Sense strand starting at position 978 of SEQ ID NO: 587264
agagaaguccuuugcuaug

SEQ ID NO: 779217 - RNA, 19 nt, Artificial Sequence
  Description of Artificial Sequence: Synthetic oligonucleotide
  Antisense strand to SEQ ID NO: 779216
cauagcaaaggacuucucu

SEQ ID NO: 779218 - RNA, 19 nt, Artificial Sequence
  Description of Artificial Sequence: Synthetic oligonucleotide
  Sense strand starting at position 980 of SEQ ID NO: 587264
agaaguccuuugcuaugga

SEQ ID NO: 779219 - RNA, 19 nt, Artificial Sequence
  Description of Artificial Sequence: Synthetic oligonucleotide
  Antisense strand to SEQ ID NO: 779218
uccauagcaaaggacuucu

SEQ ID NO: 779220 - RNA, 19 nt, Artificial Sequence
  Description of Artificial Sequence: Synthetic oligonucleotide
  Sense strand starting at position 1069 of SEQ ID NO: 587264
cugggauucuggucuuuga

SEQ ID NO: 779221 - RNA, 19 nt, Artificial Sequence
  Description of Artificial Sequence: Synthetic oligonucleotide
  Antisense strand to SEQ ID NO: 779220
ucaaagaccagaaucccag

SEQ ID NO: 779222 - RNA, 19 nt, Artificial Sequence
  Description of Artificial Sequence: Synthetic oligonucleotide
  Sense strand starting at position 1538 of SEQ ID NO: 587264
gccaucaauuccucaggga

SEQ ID NO: 779223 - RNA, 19 nt, Artificial Sequence
  Description of Artificial Sequence: Synthetic oligonucleotide
  Antisense strand to SEQ ID NO: 779222
ucccugaggaauugauggc

SEQ ID NO: 779224 - RNA, 19 nt, Artificial Sequence
  Description of Artificial Sequence: Synthetic oligonucleotide
  Sense strand starting at position 2298 of SEQ ID NO: 587264
uccauccauccuggaaaga

SEQ ID NO: 779225 - RNA, 19 nt, Artificial Sequence
  Description of Artificial Sequence: Synthetic oligonucleotide
  Antisense strand to SEQ ID NO: 779224
ucuuuccaggauggaugga

SEQ ID NO: 779226 - RNA, 19 nt, Artificial Sequence
  Description of Artificial Sequence: Synthetic oligonucleotide
  Sense strand starting at position 2402 of SEQ ID NO: 587264
cagggaguauugccacuaa

SEQ ID NO: 779227 - RNA, 19 nt, Artificial Sequence
  Description of Artificial Sequence: Synthetic oligonucleotide
  Antisense strand to SEQ ID NO: 779226
uuaguggcaauacucccug

SEQ ID NO: 779228 - RNA, 19 nt, Artificial Sequence
  Description of Artificial Sequence: Synthetic oligonucleotide
  Sense strand starting at position 2406 of SEQ ID NO: 587264
gaguauugccacuaagacu

SEQ ID NO: 779229 - RNA, 19 nt, Artificial Sequence
  Description of Artificial Sequence: Synthetic oligonucleotide
  Antisense strand to SEQ ID NO: 779228
agucuuaguggcaauacuc

SEQ ID NO: 779230 - RNA, 19 nt, Artificial Sequence
  Description of Artificial Sequence: Synthetic oligonucleotide
  Sense strand starting at position 2438 of SEQ ID NO: 587264
gagccuaugccugucguau

SEQ ID NO: 779231 - RNA, 19 nt, Artificial Sequence
  Description of Artificial Sequence: Synthetic oligonucleotide
  Antisense strand to SEQ ID NO: 779230
auacgacaggcauaggcuc

SEQ ID NO: 779232 - RNA, 19 nt, Artificial Sequence
  Description of Artificial Sequence: Synthetic oligonucleotide
  Sense strand starting at position 2439 of SEQ ID NO: 587264
agccuaugccugucguauc

SEQ ID NO: 779233 - RNA, 19 nt, Artificial Sequence
  Description of Artificial Sequence: Synthetic oligonucleotide
  Antisense strand to SEQ ID NO: 779232
gauacgacaggcauaggcu

SEQ ID NO: 779234 - RNA, 19 nt, Artificial Sequence
  Description of Artificial Sequence: Synthetic oligonucleotide
  Sense strand starting at position 2559 of SEQ ID NO: 587264
cuuuaaacucgagaaagca

SEQ ID NO: 779235 - RNA, 19 nt, Artificial Sequence
  Description of Artificial Sequence: Synthetic oligonucleotide
  Antisense strand to SEQ ID NO: 779234
ugcuuucucgaguuuaaag

SEQ ID NO: 779236 - RNA, 19 nt, Artificial Sequence
  Description of Artificial Sequence: Synthetic oligonucleotide
  Sense strand starting at position 2667 of SEQ ID NO: 587264
uugacauucccgggaucca

SEQ ID NO: 779237 - RNA, 19 nt, Artificial Sequence
  Description of Artificial Sequence: Synthetic oligonucleotide
  Antisense strand to SEQ ID NO: 779236
uggaucccgggaaugucaa

SEQ ID NO: 779238 - RNA, 19 nt, Artificial Sequence
  Description of Artificial Sequence: Synthetic oligonucleotide
  Sense strand starting at position 2872 of SEQ ID NO: 587264
ugaccaagcucugcuagaa

SEQ ID NO: 779239 - RNA, 19 nt, Artificial Sequence
  Description of Artificial Sequence: Synthetic oligonucleotide
  Antisense strand to SEQ ID NO: 779238
uucuagcagagcuugguca

SEQ ID NO: 779240 - RNA, 19 nt, Artificial Sequence
  Description of Artificial Sequence: Synthetic oligonucleotide
  Sense strand starting at position 2964 of SEQ ID NO: 587264
acuguucuaguagacauaa

SEQ ID NO: 779241 - RNA, 19 nt, Artificial Sequence
  Description of Artificial Sequence: Synthetic oligonucleotide
  Antisense strand to SEQ ID NO: 779240
uuaugucuacuagaacagu

SEQ ID NO: 779242 - RNA, 19 nt, Artificial Sequence
  Description of Artificial Sequence: Synthetic oligonucleotide
  Sense strand starting at position 3030 of SEQ ID NO: 587264
gggugugauguuuaauaua

SEQ ID NO: 779243 - RNA, 19 nt, Artificial Sequence
  Description of Artificial Sequence: Synthetic oligonucleotide
  Antisense strand to SEQ ID NO: 779242
uauauuaaacaucacaccc

SEQ ID NO: 779244 - RNA, 19 nt, Artificial Sequence
  Description of Artificial Sequence: Synthetic oligonucleotide
  Sense strand starting at position 3049 of SEQ ID NO: 587264
gcauguaaagcauagagaa

SEQ ID NO: 779245 - RNA, 19 nt, Artificial Sequence
  Description of Artificial Sequence: Synthetic oligonucleotide
  Antisense strand to SEQ ID NO: 779244
uucucuaugcuuuacaugc

SEQ ID NO: 779246 - RNA, 19 nt, Artificial Sequence
  Description of Artificial Sequence: Synthetic oligonucleotide
  Sense strand starting at position 3108 of SEQ ID NO: 587264
gagaguacauugucuauaa

SEQ ID NO: 779247 - RNA, 19 nt, Artificial Sequence
  Description of Artificial Sequence: Synthetic oligonucleotide
  Antisense strand to SEQ ID NO: 779246
uuauagacaauguacucuc

SEQ ID NO: 779248 - RNA, 19 nt, Artificial Sequence
  Description of Artificial Sequence: Synthetic oligonucleotide
  Sense strand starting at position 3109 of SEQ ID NO: 587264
agaguacauugucuauaac

SEQ ID NO: 779249 - RNA, 19 nt, Artificial Sequence
  Description of Artificial Sequence: Synthetic oligonucleotide
  Antisense strand to SEQ ID NO: 779248
guuauagacaauguacucu

SEQ ID NO: 779250 - RNA, 19 nt, Artificial Sequence
  Description of Artificial Sequence: Synthetic oligonucleotide
  Sense strand starting at position 3112 of SEQ ID NO: 587264
guacauugucuauaacauu

SEQ ID NO: 779251 - RNA, 19 nt, Artificial Sequence
  Description of Artificial Sequence: Synthetic oligonucleotide
  Antisense strand to SEQ ID NO: 779250
aauguuauagacaauguac

SEQ ID NO: 779252 - RNA, 19 nt, Artificial Sequence
  Description of Artificial Sequence: Synthetic oligonucleotide
  Sense strand starting at position 3192 of SEQ ID NO: 587264
ucaguaaauguccagugaa

SEQ ID NO: 779253 - RNA, 19 nt, Artificial Sequence
  Description of Artificial Sequence: Synthetic oligonucleotide
  Antisense strand to SEQ ID NO: 779252
uucacuggacauuuacuga

SEQ ID NO: 779254 - RNA, 19 nt, Artificial Sequence
  Description of Artificial Sequence: Synthetic oligonucleotide
  Sense strand starting at position 3195 of SEQ ID NO: 587264
guaaauguccagugaauua

SEQ ID NO: 779255 - RNA, 19 nt, Artificial Sequence
  Description of Artificial Sequence: Synthetic oligonucleotide
  Antisense strand to SEQ ID NO: 779254
uaauucacuggacauuuac

SEQ ID NO: 779256 - RNA, 19 nt, Artificial Sequence
  Description of Artificial Sequence: Synthetic oligonucleotide
  Sense strand starting at position 3267 of SEQ ID NO: 587264
ggcuaaagaugauccaguu

SEQ ID NO: 779257 - RNA, 19 nt, Artificial Sequence
  Description of Artificial Sequence: Synthetic oligonucleotide
  Antisense strand to SEQ ID NO: 779256
aacuggaucaucuuuagcc

SEQ ID NO: 779258 - RNA, 19 nt, Artificial Sequence
  Description of Artificial Sequence: Synthetic oligonucleotide
  Sense strand starting at position 3273 of SEQ ID NO: 587264
agaugauccaguugagggu

SEQ ID NO: 779259 - RNA, 19 nt, Artificial Sequence
  Description of Artificial Sequence: Synthetic oligonucleotide
  Antisense strand to SEQ ID NO: 779258
acccucaacuggaucaucu

SEQ ID NO: 779260 - RNA, 19 nt, Artificial Sequence
  Description of Artificial Sequence: Synthetic oligonucleotide
  Sense strand starting at position 3517 of SEQ ID NO: 587264
gcaguuauccgggaagugg

SEQ ID NO: 779261 - RNA, 19 nt, Artificial Sequence
  Description of Artificial Sequence: Synthetic oligonucleotide
  Antisense strand to SEQ ID NO: 779260
ccacuucccggauaacugc

SEQ ID NO: 779262 - RNA, 19 nt, Artificial Sequence
  Description of Artificial Sequence: Synthetic oligonucleotide
  Sense strand starting at position 3539 of SEQ ID NO: 587264
cuucccuaguccuuuggaa

SEQ ID NO: 779263 - RNA, 19 nt, Artificial Sequence
  Description of Artificial Sequence: Synthetic oligonucleotide
  Antisense strand to SEQ ID NO: 779262
uuccaaaggacuagggaag

SEQ ID NO: 779264 - RNA, 19 nt, Artificial Sequence
  Description of Artificial Sequence: Synthetic oligonucleotide
  Sense strand starting at position 3541 of SEQ ID NO: 587264
ucccuaguccuuuggaauu

SEQ ID NO: 779265 - RNA, 19 nt, Artificial Sequence
  Description of Artificial Sequence: Synthetic oligonucleotide
  Antisense strand to SEQ ID NO: 779264
aauuccaaaggacuaggga

SEQ ID NO: 779266 - RNA, 19 nt, Artificial Sequence
  Description of Artificial Sequence: Synthetic oligonucleotide
  Sense strand starting at position 3708 of SEQ ID NO: 587264
ucgugaugucaccacccaa

SEQ ID NO: 779267 - RNA, 19 nt, Artificial Sequence
  Description of Artificial Sequence: Synthetic oligonucleotide
  Antisense strand to SEQ ID NO: 779266
uuggguggugacaucacga

SEQ ID NO: 779268 - RNA, 19 nt, Artificial Sequence
  Description of Artificial Sequence: Synthetic oligonucleotide
  Sense strand starting at position 3744 of SEQ ID NO: 587264
aagagugucugaguuagac

SEQ ID NO: 779269 - RNA, 19 nt, Artificial Sequence
  Description of Artificial Sequence: Synthetic oligonucleotide
  Antisense strand to SEQ ID NO: 779268
gucuaacucagacacucuu

SEQ ID NO: 779270 - RNA, 19 nt, Artificial Sequence
  Description of Artificial Sequence: Synthetic oligonucleotide
  Sense strand starting at position 3828 of SEQ ID NO: 587264
cagaguaaacgugagguga

SEQ ID NO: 779271 - RNA, 19 nt, Artificial Sequence
  Description of Artificial Sequence: Synthetic oligonucleotide
  Antisense strand to SEQ ID NO: 779270
ucaccucacguuuacucug

SEQ ID NO: 779272 - RNA, 19 nt, Artificial Sequence
  Description of Artificial Sequence: Synthetic oligonucleotide
  Sense strand starting at position 3884 of SEQ ID NO: 587264
ugcccauaugucuaaauug

SEQ ID NO: 779273 - RNA, 19 nt, Artificial Sequence
  Description of Artificial Sequence: Synthetic oligonucleotide
  Antisense strand to SEQ ID NO: 779272
caauuuagacauaugggca

SEQ ID NO: 779274 - RNA, 19 nt, Artificial Sequence
  Description of Artificial Sequence: Synthetic oligonucleotide
  Sense strand starting at position 3948 of SEQ ID NO: 587264
guccucauaccuugacaag

SEQ ID NO: 779275 - RNA, 19 nt, Artificial Sequence
  Description of Artificial Sequence: Synthetic oligonucleotide
  Antisense strand to SEQ ID NO: 779274
cuugucaagguaugaggac

SEQ ID NO: 779276 - RNA, 19 nt, Artificial Sequence
  Description of Artificial Sequence: Synthetic oligonucleotide
  Sense strand starting at position 30 of SEQ ID NO: 587265
ucguuauguccuuacaaca

SEQ ID NO: 779277 - RNA, 19 nt, Artificial Sequence
  Description of Artificial Sequence: Synthetic oligonucleotide
  Antisense strand to SEQ ID NO: 779276
uguuguaaggacauaacga

SEQ ID NO: 779278 - RNA, 19 nt, Artificial Sequence
  Description of Artificial Sequence: Synthetic oligonucleotide
  Sense strand starting at position 43 of SEQ ID NO: 587265
acaacauuccuguauucga

SEQ ID NO: 779279 - RNA, 19 nt, Artificial Sequence
  Description of Artificial Sequence: Synthetic oligonucleotide
  Antisense strand to SEQ ID NO: 779278
ucgaauacaggaauguugu

SEQ ID NO: 779280 - RNA, 19 nt, Artificial Sequence
  Description of Artificial Sequence: Synthetic oligonucleotide
  Sense strand starting at position 46 of SEQ ID NO: 587265
acauuccuguauucgaaua

SEQ ID NO: 779281 - RNA, 19 nt, Artificial Sequence
  Description of Artificial Sequence: Synthetic oligonucleotide
  Antisense strand to SEQ ID NO: 779280
uauucgaauacaggaaugu

SEQ ID NO: 779282 - RNA, 19 nt, Artificial Sequence
  Description of Artificial Sequence: Synthetic oligonucleotide
  Sense strand starting at position 488 of SEQ ID NO: 587265
gcggacaagcuuuauguga

SEQ ID NO: 779283 - RNA, 19 nt, Artificial Sequence
  Description of Artificial Sequence: Synthetic oligonucleotide
  Antisense strand to SEQ ID NO: 779282
ucacauaaagcuuguccgc

SEQ ID NO: 779284 - RNA, 19 nt, Artificial Sequence
  Description of Artificial Sequence: Synthetic oligonucleotide
  Sense strand starting at position 496 of SEQ ID NO: 587265
gcuuuaugugaacauacgu

SEQ ID NO: 779285 - RNA, 19 nt, Artificial Sequence
  Description of Artificial Sequence: Synthetic oligonucleotide
  Antisense strand to SEQ ID NO: 779284
acguauguucacauaaagc

SEQ ID NO: 779286 - RNA, 19 nt, Artificial Sequence
  Description of Artificial Sequence: Synthetic oligonucleotide
  Sense strand starting at position 501 of SEQ ID NO: 587265
augugaacauacguuauca

SEQ ID NO: 779287 - RNA, 19 nt, Artificial Sequence
  Description of Artificial Sequence: Synthetic oligonucleotide
  Antisense strand to SEQ ID NO: 779286
ugauaacguauguucacau

SEQ ID NO: 779288 - RNA, 19 nt, Artificial Sequence
  Description of Artificial Sequence: Synthetic oligonucleotide
  Sense strand starting at position 503 of SEQ ID NO: 587265
gugaacauacguuaucagu

SEQ ID NO: 779289 - RNA, 19 nt, Artificial Sequence
  Description of Artificial Sequence: Synthetic oligonucleotide
  Antisense strand to SEQ ID NO: 779288
acugauaacguauguucac

SEQ ID NO: 779290 - RNA, 19 nt, Artificial Sequence
  Description of Artificial Sequence: Synthetic oligonucleotide
  Sense strand starting at position 505 of SEQ ID NO: 587265
gaacauacguuaucaguuu

SEQ ID NO: 779291 - RNA, 19 nt, Artificial Sequence
  Description of Artificial Sequence: Synthetic oligonucleotide
  Antisense strand to SEQ ID NO: 779290
aaacugauaacguauguuc

SEQ ID NO: 779292 - RNA, 19 nt, Artificial Sequence
  Description of Artificial Sequence: Synthetic oligonucleotide
  Sense strand starting at position 527 of SEQ ID NO: 587265
uggguauauagccaggagu

SEQ ID NO: 779293 - RNA, 19 nt, Artificial Sequence
  Description of Artificial Sequence: Synthetic oligonucleotide
  Antisense strand to SEQ ID NO: 779292
acuccuggcuauauaccca

SEQ ID NO: 779294 - RNA, 19 nt, Artificial Sequence
  Description of Artificial Sequence: Synthetic oligonucleotide
  Sense strand starting at position 627 of SEQ ID NO: 587265
accagcaauguacgagaau

SEQ ID NO: 779295 - RNA, 19 nt, Artificial Sequence
  Description of Artificial Sequence: Synthetic oligonucleotide
  Antisense strand to SEQ ID NO: 779294
auucucguacauugcuggu

SEQ ID NO: 779296 - RNA, 19 nt, Artificial Sequence
  Description of Artificial Sequence: Synthetic oligonucleotide
  Sense strand starting at position 732 of SEQ ID NO: 587265
agaagacuguauuaacaaa

SEQ ID NO: 779297 - RNA, 19 nt, Artificial Sequence
  Description of Artificial Sequence: Synthetic oligonucleotide
  Antisense strand to SEQ ID NO: 779296
uuuguuaauacagucuucu

SEQ ID NO: 779298 - RNA, 19 nt, Artificial Sequence
  Description of Artificial Sequence: Synthetic oligonucleotide
  Sense strand starting at position 757 of SEQ ID NO: 587265
guauauguccggcaggaaa

SEQ ID NO: 779299 - RNA, 19 nt, Artificial Sequence
  Description of Artificial Sequence: Synthetic oligonucleotide
  Antisense strand to SEQ ID NO: 779298
uuuccugccggacauauac

SEQ ID NO: 779300 - RNA, 19 nt, Artificial Sequence
  Description of Artificial Sequence: Synthetic oligonucleotide
  Sense strand starting at position 803 of SEQ ID NO: 587265
guguauuaggcaagugagu

SEQ ID NO: 779301 - RNA, 19 nt, Artificial Sequence
  Description of Artificial Sequence: Synthetic oligonucleotide
  Antisense strand to SEQ ID NO: 779300
acucacuugccuaauacac

SEQ ID NO: 779302 - RNA, 19 nt, Artificial Sequence
  Description of Artificial Sequence: Synthetic oligonucleotide
  Sense strand starting at position 805 of SEQ ID NO: 587265
guauuaggcaagugaguua

SEQ ID NO: 779303 - RNA, 19 nt, Artificial Sequence
  Description of Artificial Sequence: Synthetic oligonucleotide
  Antisense strand to SEQ ID NO: 779302
uaacucacuugccuaauac

SEQ ID NO: 779304 - RNA, 19 nt, Artificial Sequence
  Description of Artificial Sequence: Synthetic oligonucleotide
  Sense strand starting at position 1199 of SEQ ID NO: 587265
uaguaaguccgcgcaggau

SEQ ID NO: 779305 - RNA, 19 nt, Artificial Sequence
  Description of Artificial Sequence: Synthetic oligonucleotide
  Antisense strand to SEQ ID NO: 779304
auccugcgcggacuuacua

SEQ ID NO: 779306 - RNA, 19 nt, Artificial Sequence
  Description of Artificial Sequence: Synthetic oligonucleotide
  Sense strand starting at position 2092 of SEQ ID NO: 587265
ggguaauauggaggagcuu

SEQ ID NO: 779307 - RNA, 19 nt, Artificial Sequence
  Description of Artificial Sequence: Synthetic oligonucleotide
  Antisense strand to SEQ ID NO: 779306
aagcuccuccauauuaccc

SEQ ID NO: 779308 - RNA, 19 nt, Artificial Sequence
  Description of Artificial Sequence: Synthetic oligonucleotide
  Sense strand starting at position 2292 of SEQ ID NO: 587265
cagccucaucgaggacauu

SEQ ID NO: 779309 - RNA, 19 nt, Artificial Sequence
  Description of Artificial Sequence: Synthetic oligonucleotide
  Antisense strand to SEQ ID NO: 779308
aauguccucgaugaggcug

SEQ ID NO: 779310 - RNA, 19 nt, Artificial Sequence
  Description of Artificial Sequence: Synthetic oligonucleotide
  Sense strand starting at position 2304 of SEQ ID NO: 587265
ggacauugacagugaguag

SEQ ID NO: 779311 - RNA, 19 nt, Artificial Sequence
  Description of Artificial Sequence: Synthetic oligonucleotide
  Antisense strand to SEQ ID NO: 779310
cuacucacugucaaugucc

SEQ ID NO: 779312 - RNA, 19 nt, Artificial Sequence
  Description of Artificial Sequence: Synthetic oligonucleotide
  Sense strand starting at position 2305 of SEQ ID NO: 587265
gacauugacagugaguagu

SEQ ID NO: 779313 - RNA, 19 nt, Artificial Sequence
  Description of Artificial Sequence: Synthetic oligonucleotide
  Antisense strand to SEQ ID NO: 779312
acuacucacugucaauguc

SEQ ID NO: 779314 - RNA, 19 nt, Artificial Sequence
  Description of Artificial Sequence: Synthetic oligonucleotide
  Sense strand starting at position 2307 of SEQ ID NO: 587265
cauugacagugaguaguuu

SEQ ID NO: 779315 - RNA, 19 nt, Artificial Sequence
  Description of Artificial Sequence: Synthetic oligonucleotide
  Antisense strand to SEQ ID NO: 779314
aaacuacucacugucaaug

SEQ ID NO: 779316 - RNA, 19 nt, Artificial Sequence
  Description of Artificial Sequence: Synthetic oligonucleotide
  Sense strand starting at position 2308 of SEQ ID NO: 587265
auugacagugaguaguuua

SEQ ID NO: 779317 - RNA, 19 nt, Artificial Sequence
  Description of Artificial Sequence: Synthetic oligonucleotide
  Antisense strand to SEQ ID NO: 779316
uaaacuacucacugucaau

SEQ ID NO: 779318 - RNA, 19 nt, Artificial Sequence
  Description of Artificial Sequence: Synthetic oligonucleotide
  Sense strand starting at position 2311 of SEQ ID NO: 587265
gacagugaguaguuuaucu

SEQ ID NO: 779319 - RNA, 19 nt, Artificial Sequence
  Description of Artificial Sequence: Synthetic oligonucleotide
  Antisense strand to SEQ ID NO: 779318
agauaaacuacucacuguc

SEQ ID NO: 779320 - RNA, 19 nt, Artificial Sequence
  Description of Artificial Sequence: Synthetic oligonucleotide
  Sense strand starting at position 2374 of SEQ ID NO: 587265
gccucuuccgaagaagcuu

SEQ ID NO: 779321 - RNA, 19 nt, Artificial Sequence
  Description of Artificial Sequence: Synthetic oligonucleotide
  Antisense strand to SEQ ID NO: 779320
aagcuucuucggaagaggc

SEQ ID NO: 779322 - RNA, 19 nt, Artificial Sequence
  Description of Artificial Sequence: Synthetic oligonucleotide
  Sense strand starting at position 2380 of SEQ ID NO: 587265
uccgaagaagcuuguagaa

SEQ ID NO: 779323 - RNA, 19 nt, Artificial Sequence
  Description of Artificial Sequence: Synthetic oligonucleotide
  Antisense strand to SEQ ID NO: 779322
uucuacaagcuucuucgga

SEQ ID NO: 779324 - RNA, 19 nt, Artificial Sequence
  Description of Artificial Sequence: Synthetic oligonucleotide
  Sense strand starting at position 2666 of SEQ ID NO: 587265
cgaaguaucagcguguuac

SEQ ID NO: 779325 - RNA, 19 nt, Artificial Sequence
  Description of Artificial Sequence: Synthetic oligonucleotide
  Antisense strand to SEQ ID NO: 779324
guaacacgcugauacuucg

SEQ ID NO: 779326 - RNA, 19 nt, Artificial Sequence
  Description of Artificial Sequence: Synthetic oligonucleotide
  Sense strand starting at position 2678 of SEQ ID NO: 587265
guguuaccgguggauggau

SEQ ID NO: 779327 - RNA, 19 nt, Artificial Sequence
  Description of Artificial Sequence: Synthetic oligonucleotide
  Antisense strand to SEQ ID NO: 779326
auccauccaccgguaacac

SEQ ID NO: 779328 - RNA, 19 nt, Artificial Sequence
  Description of Artificial Sequence: Synthetic oligonucleotide
  Sense strand starting at position 2685 of SEQ ID NO: 587265
cgguggauggaucggaaua

SEQ ID NO: 779329 - RNA, 19 nt, Artificial Sequence
  Description of Artificial Sequence: Synthetic oligonucleotide
  Antisense strand to SEQ ID NO: 779328
uauuccgauccauccaccg

SEQ ID NO: 779330 - RNA, 19 nt, Artificial Sequence
  Description of Artificial Sequence: Synthetic oligonucleotide
  Sense strand starting at position 2753 of SEQ ID NO: 587265
uggacuuaauuggcaguaa

SEQ ID NO: 779331 - RNA, 19 nt, Artificial Sequence
  Description of Artificial Sequence: Synthetic oligonucleotide
  Antisense strand to SEQ ID NO: 779330
uuacugccaauuaagucca

SEQ ID NO: 779332 - RNA, 19 nt, Artificial Sequence
  Description of Artificial Sequence: Synthetic oligonucleotide
  Sense strand starting at position 2757 of SEQ ID NO: 587265
cuuaauuggcaguaaaugu

SEQ ID NO: 779333 - RNA, 19 nt, Artificial Sequence
  Description of Artificial Sequence: Synthetic oligonucleotide
  Antisense strand to SEQ ID NO: 779332
acauuuacugccaauuaag

SEQ ID NO: 779334 - RNA, 19 nt, Artificial Sequence
  Description of Artificial Sequence: Synthetic oligonucleotide
  Sense strand starting at position 2847 of SEQ ID NO: 587265
aguagagaccacuguuaga

SEQ ID NO: 779335 - RNA, 19 nt, Artificial Sequence
  Description of Artificial Sequence: Synthetic oligonucleotide
  Antisense strand to SEQ ID NO: 779334
ucuaacaguggucucuacu

SEQ ID NO: 779336 - RNA, 19 nt, Artificial Sequence
  Description of Artificial Sequence: Synthetic oligonucleotide
  Sense strand starting at position 3154 of SEQ ID NO: 587265
aguugcaaucgucucaguu

SEQ ID NO: 779337 - RNA, 19 nt, Artificial Sequence
  Description of Artificial Sequence: Synthetic oligonucleotide
  Antisense strand to SEQ ID NO: 779336
aacugagacgauugcaacu

SEQ ID NO: 779338 - RNA, 19 nt, Artificial Sequence
  Description of Artificial Sequence: Synthetic oligonucleotide
  Sense strand starting at position 3155 of SEQ ID NO: 587265
guugcaaucgucucaguua

SEQ ID NO: 779339 - RNA, 19 nt, Artificial Sequence
  Description of Artificial Sequence: Synthetic oligonucleotide
  Antisense strand to SEQ ID NO: 779338
uaacugagacgauugcaac

SEQ ID NO: 779340 - RNA, 19 nt, Artificial Sequence
  Description of Artificial Sequence: Synthetic oligonucleotide
  Sense strand starting at position 3166 of SEQ ID NO: 587265
cucaguuacucugugaaua

SEQ ID NO: 779341 - RNA, 19 nt, Artificial Sequence
  Description of Artificial Sequence: Synthetic oligonucleotide
  Antisense strand to SEQ ID NO: 779340
uauucacagaguaacugag

SEQ ID NO: 779342 - RNA, 19 nt, Artificial Sequence
  Description of Artificial Sequence: Synthetic oligonucleotide
  Sense strand starting at position 3167 of SEQ ID NO: 587265
ucaguuacucugugaauac

SEQ ID NO: 779343 - RNA, 19 nt, Artificial Sequence
  Description of Artificial Sequence: Synthetic oligonucleotide
  Antisense strand to SEQ ID NO: 779342
guauucacagaguaacuga

SEQ ID NO: 779344 - RNA, 19 nt, Artificial Sequence
  Description of Artificial Sequence: Synthetic oligonucleotide
  Sense strand starting at position 3174 of SEQ ID NO: 587265
cucugugaauacgcaauuu

SEQ ID NO: 779345 - RNA, 19 nt, Artificial Sequence
  Description of Artificial Sequence: Synthetic oligonucleotide
  Antisense strand to SEQ ID NO: 779344
aaauugcguauucacagag

SEQ ID NO: 779346 - RNA, 19 nt, Artificial Sequence
  Description of Artificial Sequence: Synthetic oligonucleotide
  Sense strand starting at position 3182 of SEQ ID NO: 587265
auacgcaauuuagaaucua

SEQ ID NO: 779347 - RNA, 19 nt, Artificial Sequence
  Description of Artificial Sequence: Synthetic oligonucleotide
  Antisense strand to SEQ ID NO: 779346
uagauucuaaauugcguau

SEQ ID NO: 779348 - RNA, 19 nt, Artificial Sequence
  Description of Artificial Sequence: Synthetic oligonucleotide
  Sense strand starting at position 3879 of SEQ ID NO: 587265
uauugugcuauguaaggga

SEQ ID NO: 779349 - RNA, 19 nt, Artificial Sequence
  Description of Artificial Sequence: Synthetic oligonucleotide
  Antisense strand to SEQ ID NO: 779348
ucccuuacauagcacaaua

SEQ ID NO: 779350 - RNA, 19 nt, Artificial Sequence
  Description of Artificial Sequence: Synthetic oligonucleotide
  Sense strand starting at position 3883 of SEQ ID NO: 587265
gugcuauguaagggaaaug

SEQ ID NO: 779351 - RNA, 19 nt, Artificial Sequence
  Description of Artificial Sequence: Synthetic oligonucleotide
  Antisense strand to SEQ ID NO: 779350
cauuucccuuacauagcac

SEQ ID NO: 779352 - RNA, 19 nt, Artificial Sequence
  Description of Artificial Sequence: Synthetic oligonucleotide
  Sense strand starting at position 3884 of SEQ ID NO: 587265
ugcuauguaagggaaaugu

SEQ ID NO: 779353 - RNA, 19 nt, Artificial Sequence
  Description of Artificial Sequence: Synthetic oligonucleotide
  Antisense strand to SEQ ID NO: 779352
acauuucccuuacauagca

SEQ ID NO: 779354 - RNA, 19 nt, Artificial Sequence
  Description of Artificial Sequence: Synthetic oligonucleotide
  Sense strand starting at position 3900 of SEQ ID NO: 587265
uguaguguaauuggacuaa

SEQ ID NO: 779355 - RNA, 19 nt, Artificial Sequence
  Description of Artificial Sequence: Synthetic oligonucleotide
  Antisense strand to SEQ ID NO: 779354
uuaguccaauuacacuaca

SEQ ID NO: 779356 - RNA, 19 nt, Artificial Sequence
  Description of Artificial Sequence: Synthetic oligonucleotide
  Sense strand starting at position 75 of SEQ ID NO: 587266
cugucucaugagcaggaaa

SEQ ID NO: 779357 - RNA, 19 nt, Artificial Sequence
  Description of Artificial Sequence: Synthetic oligonucleotide
  Antisense strand to SEQ ID NO: 779356
uuuccugcucaugagacag

SEQ ID NO: 779358 - RNA, 19 nt, Artificial Sequence
  Description of Artificial Sequence: Synthetic oligonucleotide
  Sense strand starting at position 220 of SEQ ID NO: 587266
cucgcagagcuuugaacaa

SEQ ID NO: 779359 - RNA, 19 nt, Artificial Sequence
  Description of Artificial Sequence: Synthetic oligonucleotide
  Antisense strand to SEQ ID NO: 779358
uuguucaaagcucugcgag

SEQ ID NO: 779360 - RNA, 19 nt, Artificial Sequence
  Description of Artificial Sequence: Synthetic oligonucleotide
  Sense strand starting at position 353 of SEQ ID NO: 587266
gcucgugucuucgugcuua

SEQ ID NO: 779361 - RNA, 19 nt, Artificial Sequence
  Description of Artificial Sequence: Synthetic oligonucleotide
  Antisense strand to SEQ ID NO: 779360
uaagcacgaagacacgagc

SEQ ID NO: 779362 - RNA, 19 nt, Artificial Sequence
  Description of Artificial Sequence: Synthetic oligonucleotide
  Sense strand starting at position 458 of SEQ ID NO: 587266
gcguguggcagaggugauu

SEQ ID NO: 779363 - RNA, 19 nt, Artificial Sequence
  Description of Artificial Sequence: Synthetic oligonucleotide
  Antisense strand to SEQ ID NO: 779362
aaucaccucugccacacgc

SEQ ID NO: 779364 - RNA, 19 nt, Artificial Sequence
  Description of Artificial Sequence: Synthetic oligonucleotide
  Sense strand starting at position 639 of SEQ ID NO: 587266
aguuguccugccggagaga

SEQ ID NO: 779365 - RNA, 19 nt, Artificial Sequence
  Description of Artificial Sequence: Synthetic oligonucleotide
  Antisense strand to SEQ ID NO: 779364
ucucuccggcaggacaacu

SEQ ID NO: 779366 - RNA, 19 nt, Artificial Sequence
  Description of Artificial Sequence: Synthetic oligonucleotide
  Sense strand starting at position 640 of SEQ ID NO: 587266
guuguccugccggagagaa

SEQ ID NO: 779367 - RNA, 19 nt, Artificial Sequence
  Description of Artificial Sequence: Synthetic oligonucleotide
  Antisense strand to SEQ ID NO: 779366
uucucuccggcaggacaac

SEQ ID NO: 779368 - RNA, 19 nt, Artificial Sequence
  Description of Artificial Sequence: Synthetic oligonucleotide
  Sense strand starting at position 2496 of SEQ ID NO: 587266
uccuccuucccaggaagau

SEQ ID NO: 779369 - RNA, 19 nt, Artificial Sequence
  Description of Artificial Sequence: Synthetic oligonucleotide
  Antisense strand to SEQ ID NO: 779368
aucuuccugggaaggagga

SEQ ID NO: 779370 - RNA, 19 nt, Artificial Sequence
  Description of Artificial Sequence: Synthetic oligonucleotide
  Sense strand starting at position 2505 of SEQ ID NO: 587266
ccaggaagauucugcaaac

SEQ ID NO: 779371 - RNA, 19 nt, Artificial Sequence
  Description of Artificial Sequence: Synthetic oligonucleotide
  Antisense strand to SEQ ID NO: 779370
guuugcagaaucuuccugg

SEQ ID NO: 779372 - RNA, 19 nt, Artificial Sequence
  Description of Artificial Sequence: Synthetic oligonucleotide
  Sense strand starting at position 2559 of SEQ ID NO: 587266
aaagguuacucgggccauu

SEQ ID NO: 779373 - RNA, 19 nt, Artificial Sequence
  Description of Artificial Sequence: Synthetic oligonucleotide
  Antisense strand to SEQ ID NO: 779372
aauggcccgaguaaccuuu

SEQ ID NO: 779374 - RNA, 19 nt, Artificial Sequence
  Description of Artificial Sequence: Synthetic oligonucleotide
  Sense strand starting at position 3158 of SEQ ID NO: 587266
aguuccuucugccuacaga

SEQ ID NO: 779375 - RNA, 19 nt, Artificial Sequence
  Description of Artificial Sequence: Synthetic oligonucleotide
  Antisense strand to SEQ ID NO: 779374
ucuguaggcagaaggaacu

SEQ ID NO: 779376 - RNA, 19 nt, Artificial Sequence
  Description of Artificial Sequence: Synthetic oligonucleotide
  Sense strand starting at position 3770 of SEQ ID NO: 587266
ggcccucuguggucucauu

SEQ ID NO: 779377 - RNA, 19 nt, Artificial Sequence
  Description of Artificial Sequence: Synthetic oligonucleotide
  Antisense strand to SEQ ID NO: 779376
aaugagaccacagagggcc

SEQ ID NO: 779378 - RNA, 19 nt, Artificial Sequence
  Description of Artificial Sequence: Synthetic oligonucleotide
  Sense strand starting at position 3778 of SEQ ID NO: 587266
guggucucauuccuggcaa

SEQ ID NO: 779379 - RNA, 19 nt, Artificial Sequence
  Description of Artificial Sequence: Synthetic oligonucleotide
  Antisense strand to SEQ ID NO: 779378
uugccaggaaugagaccac

SEQ ID NO: 779380 - RNA, 19 nt, Artificial Sequence
  Description of Artificial Sequence: Synthetic oligonucleotide
  Sense strand starting at position 3779 of SEQ ID NO: 587266
uggucucauuccuggcaaa

SEQ ID NO: 779381 - RNA, 19 nt, Artificial Sequence
  Description of Artificial Sequence: Synthetic oligonucleotide
  Antisense strand to SEQ ID NO: 779380
uuugccaggaaugagacca

SEQ ID NO: 779382 - RNA, 19 nt, Artificial Sequence
  Description of Artificial Sequence: Synthetic oligonucleotide
  Sense strand starting at position 3780 of SEQ ID NO: 587266
ggucucauuccuggcaaac

SEQ ID NO: 779383 - RNA, 19 nt, Artificial Sequence
  Description of Artificial Sequence: Synthetic oligonucleotide
  Antisense strand to SEQ ID NO: 779382
guuugccaggaaugagacc

SEQ ID NO: 779384 - RNA, 19 nt, Artificial Sequence
  Description of Artificial Sequence: Synthetic oligonucleotide
  Sense strand starting at position 3874 of SEQ ID NO: 587266
guggcagaccugggaagau

SEQ ID NO: 779385 - RNA, 19 nt, Artificial Sequence
  Description of Artificial Sequence: Synthetic oligonucleotide
  Antisense strand to SEQ ID NO: 779384
aucuucccaggucugccac

SEQ ID NO: 779386 - RNA, 19 nt, Artificial Sequence
  Description of Artificial Sequence: Synthetic oligonucleotide
  Sense strand starting at position 1991 of SEQ ID NO: 587267
gcgcuaucuggccgcaagu

SEQ ID NO: 779387 - RNA, 19 nt, Artificial Sequence
  Description of Artificial Sequence: Synthetic oligonucleotide
  Antisense strand to SEQ ID NO: 779386
acuugcggccagauagcgc

SEQ ID NO: 779388 - RNA, 19 nt, Artificial Sequence
  Description of Artificial Sequence: Synthetic oligonucleotide
  Sense strand starting at position 2104 of SEQ ID NO: 587267
cagcuuagcgcauauguuu

SEQ ID NO: 779389 - RNA, 19 nt, Artificial Sequence
  Description of Artificial Sequence: Synthetic oligonucleotide
  Antisense strand to SEQ ID NO: 779388
aaacauaugcgcuaagcug

SEQ ID NO: 779390 - RNA, 19 nt, Artificial Sequence
  Description of Artificial Sequence: Synthetic oligonucleotide
  Sense strand starting at position 2157 of SEQ ID NO: 587267
ugccuuuagcuugacaugu

SEQ ID NO: 779391 - RNA, 19 nt, Artificial Sequence
  Description of Artificial Sequence: Synthetic oligonucleotide
  Antisense strand to SEQ ID NO: 779390
acaugucaagcuaaaggca

SEQ ID NO: 779392 - RNA, 19 nt, Artificial Sequence
  Description of Artificial Sequence: Synthetic oligonucleotide
  Sense strand starting at position 2273 of SEQ ID NO: 587267
cugggaguccuguggaaag

SEQ ID NO: 779393 - RNA, 19 nt, Artificial Sequence
  Description of Artificial Sequence: Synthetic oligonucleotide
  Antisense strand to SEQ ID NO: 779392
cuuuccacaggacucccag

SEQ ID NO: 779394 - RNA, 19 nt, Artificial Sequence
  Description of Artificial Sequence: Synthetic oligonucleotide
  Sense strand starting at position 2275 of SEQ ID NO: 587267
gggaguccuguggaaagca

SEQ ID NO: 779395 - RNA, 19 nt, Artificial Sequence
  Description of Artificial Sequence: Synthetic oligonucleotide
  Antisense strand to SEQ ID NO: 779394
ugcuuuccacaggacuccc

SEQ ID NO: 779396 - RNA, 19 nt, Artificial Sequence
  Description of Artificial Sequence: Synthetic oligonucleotide
  Sense strand starting at position 2344 of SEQ ID NO: 587267
gcugucucagcuugugcua

SEQ ID NO: 779397 - RNA, 19 nt, Artificial Sequence
  Description of Artificial Sequence: Synthetic oligonucleotide
  Antisense strand to SEQ ID NO: 779396
uagcacaagcugagacagc

SEQ ID NO: 779398 - RNA, 19 nt, Artificial Sequence
  Description of Artificial Sequence: Synthetic oligonucleotide
  Sense strand starting at position 2345 of SEQ ID NO: 587267
cugucucagcuugugcuaa

SEQ ID NO: 779399 - RNA, 19 nt, Artificial Sequence
  Description of Artificial Sequence: Synthetic oligonucleotide
  Antisense strand to SEQ ID NO: 779398
uuagcacaagcugagacag

SEQ ID NO: 779400 - RNA, 19 nt, Artificial Sequence
  Description of Artificial Sequence: Synthetic oligonucleotide
  Sense strand starting at position 2347 of SEQ ID NO: 587267
gucucagcuugugcuaaau

SEQ ID NO: 779401 - RNA, 19 nt, Artificial Sequence
  Description of Artificial Sequence: Synthetic oligonucleotide
  Antisense strand to SEQ ID NO: 779400
auuuagcacaagcugagac

SEQ ID NO: 779402 - RNA, 19 nt, Artificial Sequence
  Description of Artificial Sequence: Synthetic oligonucleotide
  Sense strand starting at position 2349 of SEQ ID NO: 587267
cucagcuugugcuaaauua

SEQ ID NO: 779403 - RNA, 19 nt, Artificial Sequence
  Description of Artificial Sequence: Synthetic oligonucleotide
  Antisense strand to SEQ ID NO: 779402
uaauuuagcacaagcugag

SEQ ID NO: 779404 - RNA, 19 nt, Artificial Sequence
  Description of Artificial Sequence: Synthetic oligonucleotide
  Sense strand starting at position 2366 of SEQ ID NO: 587267
uacccuuccgggcgagaau

SEQ ID NO: 779405 - RNA, 19 nt, Artificial Sequence
  Description of Artificial Sequence: Synthetic oligonucleotide
  Antisense strand to SEQ ID NO: 779404
auucucgcccggaagggua

SEQ ID NO: 779406 - RNA, 19 nt, Artificial Sequence
  Description of Artificial Sequence: Synthetic oligonucleotide
  Sense strand starting at position 2367 of SEQ ID NO: 587267
acccuuccgggcgagaauu

SEQ ID NO: 779407 - RNA, 19 nt, Artificial Sequence
  Description of Artificial Sequence: Synthetic oligonucleotide
  Antisense strand to SEQ ID NO: 779406
aauucucgcccggaagggu

SEQ ID NO: 779408 - RNA, 19 nt, Artificial Sequence
  Description of Artificial Sequence: Synthetic oligonucleotide
  Sense strand starting at position 2375 of SEQ ID NO: 587267
gggcgagaauuauacucca

SEQ ID NO: 779409 - RNA, 19 nt, Artificial Sequence
  Description of Artificial Sequence: Synthetic oligonucleotide
  Antisense strand to SEQ ID NO: 779408
uggaguauaauucucgccc

SEQ ID NO: 779410 - RNA, 19 nt, Artificial Sequence
  Description of Artificial Sequence: Synthetic oligonucleotide
  Sense strand starting at position 2404 of SEQ ID NO: 587267
uaggaugacuggucuggau

SEQ ID NO: 779411 - RNA, 19 nt, Artificial Sequence
  Description of Artificial Sequence: Synthetic oligonucleotide
  Antisense strand to SEQ ID NO: 779410
auccagaccagucauccua

SEQ ID NO: 779412 - RNA, 19 nt, Artificial Sequence
  Description of Artificial Sequence: Synthetic oligonucleotide
  Sense strand starting at position 2429 of SEQ ID NO: 587267
augggacuuuccgagagaa

SEQ ID NO: 779413 - RNA, 19 nt, Artificial Sequence
  Description of Artificial Sequence: Synthetic oligonucleotide
  Antisense strand to SEQ ID NO: 779412
uucucucggaaagucccau

SEQ ID NO: 779414 - RNA, 19 nt, Artificial Sequence
  Description of Artificial Sequence: Synthetic oligonucleotide
  Sense strand starting at position 2658 of SEQ ID NO: 587267
ugcaguggucuccaaauaa

SEQ ID NO: 779415 - RNA, 19 nt, Artificial Sequence
  Description of Artificial Sequence: Synthetic oligonucleotide
  Antisense strand to SEQ ID NO: 779414
uuauuuggagaccacugca

SEQ ID NO: 779416 - RNA, 19 nt, Artificial Sequence
  Description of Artificial Sequence: Synthetic oligonucleotide
  Sense strand starting at position 2677 of SEQ ID NO: 587267
cuguuacagugaugguaau

SEQ ID NO: 779417 - RNA, 19 nt, Artificial Sequence
  Description of Artificial Sequence: Synthetic oligonucleotide
  Antisense strand to SEQ ID NO: 779416
auuaccaucacuguaacag

SEQ ID NO: 779418 - RNA, 19 nt, Artificial Sequence
  Description of Artificial Sequence: Synthetic oligonucleotide
  Sense strand starting at position 2678 of SEQ ID NO: 587267
uguuacagugaugguaauu

SEQ ID NO: 779419 - RNA, 19 nt, Artificial Sequence
  Description of Artificial Sequence: Synthetic oligonucleotide
  Antisense strand to SEQ ID NO: 779418
aauuaccaucacuguaaca

SEQ ID NO: 779420 - RNA, 19 nt, Artificial Sequence
  Description of Artificial Sequence: Synthetic oligonucleotide
  Sense strand starting at position 2683 of SEQ ID NO: 587267
cagugaugguaauugugaa

SEQ ID NO: 779421 - RNA, 19 nt, Artificial Sequence
  Description of Artificial Sequence: Synthetic oligonucleotide
  Antisense strand to SEQ ID NO: 779420
uucacaauuaccaucacug

SEQ ID NO: 779422 - RNA, 19 nt, Artificial Sequence
  Description of Artificial Sequence: Synthetic oligonucleotide
  Sense strand starting at position 2684 of SEQ ID NO: 587267
agugaugguaauugugaag

SEQ ID NO: 779423 - RNA, 19 nt, Artificial Sequence
  Description of Artificial Sequence: Synthetic oligonucleotide
  Antisense strand to SEQ ID NO: 779422
cuucacaauuaccaucacu

SEQ ID NO: 779424 - RNA, 19 nt, Artificial Sequence
  Description of Artificial Sequence: Synthetic oligonucleotide
  Sense strand starting at position 2687 of SEQ ID NO: 587267
gaugguaauugugaaguac

SEQ ID NO: 779425 - RNA, 19 nt, Artificial Sequence
  Description of Artificial Sequence: Synthetic oligonucleotide
  Antisense strand to SEQ ID NO: 779424
guacuucacaauuaccauc

SEQ ID NO: 779426 - RNA, 19 nt, Artificial Sequence
  Description of Artificial Sequence: Synthetic oligonucleotide
  Sense strand starting at position 2962 of SEQ ID NO: 587267
gcggucaucucacuccuga

SEQ ID NO: 779427 - RNA, 19 nt, Artificial Sequence
  Description of Artificial Sequence: Synthetic oligonucleotide
  Antisense strand to SEQ ID NO: 779426
ucaggagugagaugaccgc

SEQ ID NO: 779428 - RNA, 19 nt, Artificial Sequence
  Description of Artificial Sequence: Synthetic oligonucleotide
  Sense strand starting at position 2978 of SEQ ID NO: 587267
ugaguucggucucugggua

SEQ ID NO: 779429 - RNA, 19 nt, Artificial Sequence
  Description of Artificial Sequence: Synthetic oligonucleotide
  Antisense strand to SEQ ID NO: 779428
uacccagagaccgaacuca

SEQ ID NO: 779430 - RNA, 19 nt, Artificial Sequence
  Description of Artificial Sequence: Synthetic oligonucleotide
  Sense strand starting at position 3072 of SEQ ID NO: 587267
ucuuucuuauauggcagaa

SEQ ID NO: 779431 - RNA, 19 nt, Artificial Sequence
  Description of Artificial Sequence: Synthetic oligonucleotide
  Antisense strand to SEQ ID NO: 779430
uucugccauauaagaaaga

SEQ ID NO: 779432 - RNA, 19 nt, Artificial Sequence
  Description of Artificial Sequence: Synthetic oligonucleotide
  Sense strand starting at position 3074 of SEQ ID NO: 587267
uuucuuauauggcagaagu

SEQ ID NO: 779433 - RNA, 19 nt, Artificial Sequence
  Description of Artificial Sequence: Synthetic oligonucleotide
  Antisense strand to SEQ ID NO: 779432
acuucugccauauaagaaa

SEQ ID NO: 779434 - RNA, 19 nt, Artificial Sequence
  Description of Artificial Sequence: Synthetic oligonucleotide
  Sense strand starting at position 3194 of SEQ ID NO: 587267
uugcucuaaugugaugaaa

SEQ ID NO: 779435 - RNA, 19 nt, Artificial Sequence
  Description of Artificial Sequence: Synthetic oligonucleotide
  Antisense strand to SEQ ID NO: 779434
uuucaucacauuagagcaa

SEQ ID NO: 779436 - RNA, 19 nt, Artificial Sequence
  Description of Artificial Sequence: Synthetic oligonucleotide
  Sense strand starting at position 3196 of SEQ ID NO: 587267
gcucuaaugugaugaaauu

SEQ ID NO: 779437 - RNA, 19 nt, Artificial Sequence
  Description of Artificial Sequence: Synthetic oligonucleotide
  Antisense strand to SEQ ID NO: 779436
aauuucaucacauuagagc

SEQ ID NO: 779438 - RNA, 19 nt, Artificial Sequence
  Description of Artificial Sequence: Synthetic oligonucleotide
  Sense strand starting at position 3306 of SEQ ID NO: 587267
aaaugagguucgccacaga

SEQ ID NO: 779439 - RNA, 19 nt, Artificial Sequence
  Description of Artificial Sequence: Synthetic oligonucleotide
  Antisense strand to SEQ ID NO: 779438
ucuguggcgaaccucauuu

SEQ ID NO: 779440 - RNA, 19 nt, Artificial Sequence
  Description of Artificial Sequence: Synthetic oligonucleotide
  Sense strand starting at position 3332 of SEQ ID NO: 587267
uuugaaugguaauaucaga

SEQ ID NO: 779441 - RNA, 19 nt, Artificial Sequence
  Description of Artificial Sequence: Synthetic oligonucleotide
  Antisense strand to SEQ ID NO: 779440
ucugauauuaccauucaaa

SEQ ID NO: 779442 - RNA, 19 nt, Artificial Sequence
  Description of Artificial Sequence: Synthetic oligonucleotide
  Sense strand starting at position 3337 of SEQ ID NO: 587267
augguaauaucagaacagu

SEQ ID NO: 779443 - RNA, 19 nt, Artificial Sequence
  Description of Artificial Sequence: Synthetic oligonucleotide
  Antisense strand to SEQ ID NO: 779442
acuguucugauauuaccau

SEQ ID NO: 779444 - RNA, 19 nt, Artificial Sequence
  Description of Artificial Sequence: Synthetic oligonucleotide
  Sense strand starting at position 3484 of SEQ ID NO: 587267
agaaauacuacguagacgu

SEQ ID NO: 779445 - RNA, 19 nt, Artificial Sequence
  Description of Artificial Sequence: Synthetic oligonucleotide
  Antisense strand to SEQ ID NO: 779444
acgucuacguaguauuucu

SEQ ID NO: 779446 - RNA, 19 nt, Artificial Sequence
  Description of Artificial Sequence: Synthetic oligonucleotide
  Sense strand starting at position 3494 of SEQ ID NO: 587267
cguagacgucgguuaccua

SEQ ID NO: 779447 - RNA, 19 nt, Artificial Sequence
  Description of Artificial Sequence: Synthetic oligonucleotide
  Antisense strand to SEQ ID NO: 779446
uagguaaccgacgucuacg

SEQ ID NO: 779448 - RNA, 19 nt, Artificial Sequence
  Description of Artificial Sequence: Synthetic oligonucleotide
  Sense strand starting at position 3535 of SEQ ID NO: 587267
ccuaaagacugagaaagau

SEQ ID NO: 779449 - RNA, 19 nt, Artificial Sequence
  Description of Artificial Sequence: Synthetic oligonucleotide
  Antisense strand to SEQ ID NO: 779448
aucuuucucagucuuuagg

SEQ ID NO: 779450 - RNA, 19 nt, Artificial Sequence
  Description of Artificial Sequence: Synthetic oligonucleotide
  Sense strand starting at position 3621 of SEQ ID NO: 587267
ccacuugucucgucuggga

SEQ ID NO: 779451 - RNA, 19 nt, Artificial Sequence
  Description of Artificial Sequence: Synthetic oligonucleotide
  Antisense strand to SEQ ID NO: 779450
ucccagacgagacaagugg

SEQ ID NO: 779452 - RNA, 19 nt, Artificial Sequence
  Description of Artificial Sequence: Synthetic oligonucleotide
  Sense strand starting at position 3704 of SEQ ID NO: 587267
cggcguucgcagcuguuaa

SEQ ID NO: 779453 - RNA, 19 nt, Artificial Sequence
  Description of Artificial Sequence: Synthetic oligonucleotide
  Antisense strand to SEQ ID NO: 779452
uuaacagcugcgaacgccg

SEQ ID NO: 779454 - RNA, 19 nt, Artificial Sequence
  Description of Artificial Sequence: Synthetic oligonucleotide
  Sense strand starting at position 3705 of SEQ ID NO: 587267
ggcguucgcagcuguuaac

SEQ ID NO: 779455 - RNA, 19 nt, Artificial Sequence
  Description of Artificial Sequence: Synthetic oligonucleotide
  Antisense strand to SEQ ID NO: 779454
guuaacagcugcgaacgcc

SEQ ID NO: 779456 - RNA, 19 nt, Artificial Sequence
  Description of Artificial Sequence: Synthetic oligonucleotide
  Sense strand starting at position 3822 of SEQ ID NO: 587267
aggugggucguguaugcau

SEQ ID NO: 779457 - RNA, 19 nt, Artificial Sequence
  Description of Artificial Sequence: Synthetic oligonucleotide
  Antisense strand to SEQ ID NO: 779456
augcauacacgacccaccu

SEQ ID NO: 779458 - RNA, 19 nt, Artificial Sequence
  Description of Artificial Sequence: Synthetic oligonucleotide
  Sense strand starting at position 3824 of SEQ ID NO: 587267
gugggucguguaugcauga

SEQ ID NO: 779459 - RNA, 19 nt, Artificial Sequence
  Description of Artificial Sequence: Synthetic oligonucleotide
  Antisense strand to SEQ ID NO: 779458
ucaugcauacacgacccac

SEQ ID NO: 779460 - RNA, 19 nt, Artificial Sequence
  Description of Artificial Sequence: Synthetic oligonucleotide
  Sense strand starting at position 3829 of SEQ ID NO: 587267
ucguguaugcaugacacua

SEQ ID NO: 779461 - RNA, 19 nt, Artificial Sequence
  Description of Artificial Sequence: Synthetic oligonucleotide
  Antisense strand to SEQ ID NO: 779460
uagugucaugcauacacga

SEQ ID NO: 779462 - RNA, 19 nt, Artificial Sequence
  Description of Artificial Sequence: Synthetic oligonucleotide
  Sense strand starting at position 3851 of SEQ ID NO: 587267
uaucaaaguccuuggguca

SEQ ID NO: 779463 - RNA, 19 nt, Artificial Sequence
  Description of Artificial Sequence: Synthetic oligonucleotide
  Antisense strand to SEQ ID NO: 779462
ugacccaaggacuuugaua

SEQ ID NO: 779464 - RNA, 19 nt, Artificial Sequence
  Description of Artificial Sequence: Synthetic oligonucleotide
  Sense strand starting at position 3937 of SEQ ID NO: 587267
ugacuuaguucuccagcca

SEQ ID NO: 779465 - RNA, 19 nt, Artificial Sequence
  Description of Artificial Sequence: Synthetic oligonucleotide
  Antisense strand to SEQ ID NO: 779464
uggcuggagaacuaaguca

SEQ ID NO: 779466 - RNA, 19 nt, Artificial Sequence
  Description of Artificial Sequence: Synthetic oligonucleotide
  Sense strand starting at position 11 of SEQ ID NO: 587268
cucucaguccaaggagaua

SEQ ID NO: 779467 - RNA, 19 nt, Artificial Sequence
  Description of Artificial Sequence: Synthetic oligonucleotide
  Antisense strand to SEQ ID NO: 779466
uaucuccuuggacugagag

SEQ ID NO: 779468 - RNA, 19 nt, Artificial Sequence
  Description of Artificial Sequence: Synthetic oligonucleotide
  Sense strand starting at position 162 of SEQ ID NO: 587268
gggaaacuuucugugagac

SEQ ID NO: 779469 - RNA, 19 nt, Artificial Sequence
  Description of Artificial Sequence: Synthetic oligonucleotide
  Antisense strand to SEQ ID NO: 779468
gucucacagaaaguuuccc

SEQ ID NO: 779470 - RNA, 19 nt, Artificial Sequence
  Description of Artificial Sequence: Synthetic oligonucleotide
  Sense strand starting at position 163 of SEQ ID NO: 587268
ggaaacuuucugugagaca

SEQ ID NO: 779471 - RNA, 19 nt, Artificial Sequence
  Description of Artificial Sequence: Synthetic oligonucleotide
  Antisense strand to SEQ ID NO: 779470
ugucucacagaaaguuucc

SEQ ID NO: 779472 - RNA, 19 nt, Artificial Sequence
  Description of Artificial Sequence: Synthetic oligonucleotide
  Sense strand starting at position 186 of SEQ ID NO: 587268
gaaacaaccugcuucggau

SEQ ID NO: 779473 - RNA, 19 nt, Artificial Sequence
  Description of Artificial Sequence: Synthetic oligonucleotide
  Antisense strand to SEQ ID NO: 779472
auccgaagcagguuguuuc

SEQ ID NO: 779474 - RNA, 19 nt, Artificial Sequence
  Description of Artificial Sequence: Synthetic oligonucleotide
  Sense strand starting at position 263 of SEQ ID NO: 587268
aggaaagauugguucagua

SEQ ID NO: 779475 - RNA, 19 nt, Artificial Sequence
  Description of Artificial Sequence: Synthetic oligonucleotide
  Antisense strand to SEQ ID NO: 779474
uacugaaccaaucuuuccu

SEQ ID NO: 779476 - RNA, 19 nt, Artificial Sequence
  Description of Artificial Sequence: Synthetic oligonucleotide
  Sense strand starting at position 283 of SEQ ID NO: 587268
aggccaaucuaggcaauau

SEQ ID NO: 779477 - RNA, 19 nt, Artificial Sequence
  Description of Artificial Sequence: Synthetic oligonucleotide
  Antisense strand to SEQ ID NO: 779476
auauugccuagauuggccu

SEQ ID NO: 779478 - RNA, 19 nt, Artificial Sequence
  Description of Artificial Sequence: Synthetic oligonucleotide
  Sense strand starting at position 426 of SEQ ID NO: 587268
ggacguaauuccucuggga

SEQ ID NO: 779479 - RNA, 19 nt, Artificial Sequence
  Description of Artificial Sequence: Synthetic oligonucleotide
  Antisense strand to SEQ ID NO: 779478
ucccagaggaauuacgucc

SEQ ID NO: 779480 - RNA, 19 nt, Artificial Sequence
  Description of Artificial Sequence: Synthetic oligonucleotide
  Sense strand starting at position 428 of SEQ ID NO: 587268
acguaauuccucugggaaa

SEQ ID NO: 779481 - RNA, 19 nt, Artificial Sequence
  Description of Artificial Sequence: Synthetic oligonucleotide
  Antisense strand to SEQ ID NO: 779480
uuucccagaggaauuacgu

SEQ ID NO: 779482 - RNA, 19 nt, Artificial Sequence
  Description of Artificial Sequence: Synthetic oligonucleotide
  Sense strand starting at position 430 of SEQ ID NO: 587268
guaauuccucugggaaagg

SEQ ID NO: 779483 - RNA, 19 nt, Artificial Sequence
  Description of Artificial Sequence: Synthetic oligonucleotide
  Antisense strand to SEQ ID NO: 779482
ccuuucccagaggaauuac

SEQ ID NO: 779484 - RNA, 19 nt, Artificial Sequence
  Description of Artificial Sequence: Synthetic oligonucleotide
  Sense strand starting at position 644 of SEQ ID NO: 587268
ccaucaaucuuggucuaag

SEQ ID NO: 779485 - RNA, 19 nt, Artificial Sequence
  Description of Artificial Sequence: Synthetic oligonucleotide
  Antisense strand to SEQ ID NO: 779484
cuuagaccaagauugaugg

SEQ ID NO: 779486 - RNA, 19 nt, Artificial Sequence
  Description of Artificial Sequence: Synthetic oligonucleotide
  Sense strand starting at position 704 of SEQ ID NO: 587268
agagaaguaucccugacac

SEQ ID NO: 779487 - RNA, 19 nt, Artificial Sequence
  Description of Artificial Sequence: Synthetic oligonucleotide
  Antisense strand to SEQ ID NO: 779486
gugucagggauacuucucu

SEQ ID NO: 779488 - RNA, 19 nt, Artificial Sequence
  Description of Artificial Sequence: Synthetic oligonucleotide
  Sense strand starting at position 714 of SEQ ID NO: 587268
cccugacacugacugauau

SEQ ID NO: 779489 - RNA, 19 nt, Artificial Sequence
  Description of Artificial Sequence: Synthetic oligonucleotide
  Antisense strand to SEQ ID NO: 779488
auaucagucagugucaggg

SEQ ID NO: 779490 - RNA, 19 nt, Artificial Sequence
  Description of Artificial Sequence: Synthetic oligonucleotide
  Sense strand starting at position 786 of SEQ ID NO: 587268
gaaggacauucuguuaucu

SEQ ID NO: 779491 - RNA, 19 nt, Artificial Sequence
  Description of Artificial Sequence: Synthetic oligonucleotide
  Antisense strand to SEQ ID NO: 779490
agauaacagaauguccuuc

SEQ ID NO: 779492 - RNA, 19 nt, Artificial Sequence
  Description of Artificial Sequence: Synthetic oligonucleotide
  Sense strand starting at position 821 of SEQ ID NO: 587268
gguuaucaugcgcuuugca

SEQ ID NO: 779493 - RNA, 19 nt, Artificial Sequence
  Description of Artificial Sequence: Synthetic oligonucleotide
  Antisense strand to SEQ ID NO: 779492
ugcaaagcgcaugauaacc

SEQ ID NO: 779494 - RNA, 19 nt, Artificial Sequence
  Description of Artificial Sequence: Synthetic oligonucleotide
  Sense strand starting at position 822 of SEQ ID NO: 587268
guuaucaugcgcuuugcau

SEQ ID NO: 779495 - RNA, 19 nt, Artificial Sequence
  Description of Artificial Sequence: Synthetic oligonucleotide
  Antisense strand to SEQ ID NO: 779494
augcaaagcgcaugauaac

SEQ ID NO: 779496 - RNA, 19 nt, Artificial Sequence
  Description of Artificial Sequence: Synthetic oligonucleotide
  Sense strand starting at position 823 of SEQ ID NO: 587268
uuaucaugcgcuuugcaua

SEQ ID NO: 779497 - RNA, 19 nt, Artificial Sequence
  Description of Artificial Sequence: Synthetic oligonucleotide
  Antisense strand to SEQ ID NO: 779496
uaugcaaagcgcaugauaa

SEQ ID NO: 779498 - RNA, 19 nt, Artificial Sequence
  Description of Artificial Sequence: Synthetic oligonucleotide
  Sense strand starting at position 889 of SEQ ID NO: 587268
uguccaugggcugauuaau

SEQ ID NO: 779499 - RNA, 19 nt, Artificial Sequence
  Description of Artificial Sequence: Synthetic oligonucleotide
  Antisense strand to SEQ ID NO: 779498
auuaaucagcccauggaca

SEQ ID NO: 779500 - RNA, 19 nt, Artificial Sequence
  Description of Artificial Sequence: Synthetic oligonucleotide
  Sense strand starting at position 965 of SEQ ID NO: 587268
caggguuguggcuauauag

SEQ ID NO: 779501 - RNA, 19 nt, Artificial Sequence
  Description of Artificial Sequence: Synthetic oligonucleotide
  Antisense strand to SEQ ID NO: 779500
cuauauagccacaacccug

SEQ ID NO: 779502 - RNA, 19 nt, Artificial Sequence
  Description of Artificial Sequence: Synthetic oligonucleotide
  Sense strand starting at position 1156 of SEQ ID NO: 587268
uuaugaagugucuacuaug

SEQ ID NO: 779503 - RNA, 19 nt, Artificial Sequence
  Description of Artificial Sequence: Synthetic oligonucleotide
  Antisense strand to SEQ ID NO: 779502
cauaguagacacuucauaa

SEQ ID NO: 779504 - RNA, 19 nt, Artificial Sequence
  Description of Artificial Sequence: Synthetic oligonucleotide
  Sense strand starting at position 1203 of SEQ ID NO: 587268
cuggaauugugacucuauu

SEQ ID NO: 779505 - RNA, 19 nt, Artificial Sequence
  Description of Artificial Sequence: Synthetic oligonucleotide
  Antisense strand to SEQ ID NO: 779504
aauagagucacaauuccag

SEQ ID NO: 779506 - RNA, 19 nt, Artificial Sequence
  Description of Artificial Sequence: Synthetic oligonucleotide
  Sense strand starting at position 1245 of SEQ ID NO: 587268
uucucauggcaugauaguu

SEQ ID NO: 779507 - RNA, 19 nt, Artificial Sequence
  Description of Artificial Sequence: Synthetic oligonucleotide
  Antisense strand to SEQ ID NO: 779506
aacuaucaugccaugagaa

SEQ ID NO: 779508 - RNA, 19 nt, Artificial Sequence
  Description of Artificial Sequence: Synthetic oligonucleotide
  Sense strand starting at position 1253 of SEQ ID NO: 587268
gcaugauaguucccauaag

SEQ ID NO: 779509 - RNA, 19 nt, Artificial Sequence
  Description of Artificial Sequence: Synthetic oligonucleotide
  Antisense strand to SEQ ID NO: 779508
cuuaugggaacuaucaugc

SEQ ID NO: 779510 - RNA, 19 nt, Artificial Sequence
  Description of Artificial Sequence: Synthetic oligonucleotide
  Sense strand starting at position 1309 of SEQ ID NO: 587268
gaguaauagcucuggaaug

SEQ ID NO: 779511 - RNA, 19 nt, Artificial Sequence
  Description of Artificial Sequence: Synthetic oligonucleotide
  Antisense strand to SEQ ID NO: 779510
cauuccagagcuauuacuc

SEQ ID NO: 779512 - RNA, 19 nt, Artificial Sequence
  Description of Artificial Sequence: Synthetic oligonucleotide
  Sense strand starting at position 1311 of SEQ ID NO: 587268
guaauagcucuggaaugau

SEQ ID NO: 779513 - RNA, 19 nt, Artificial Sequence
  Description of Artificial Sequence: Synthetic oligonucleotide
  Antisense strand to SEQ ID NO: 779512
aucauuccagagcuauuac

SEQ ID NO: 779514 - RNA, 19 nt, Artificial Sequence
  Description of Artificial Sequence: Synthetic oligonucleotide
  Sense strand starting at position 1314 of SEQ ID NO: 587268
auagcucuggaaugauuaa

SEQ ID NO: 779515 - RNA, 19 nt, Artificial Sequence
  Description of Artificial Sequence: Synthetic oligonucleotide
  Antisense strand to SEQ ID NO: 779514
uuaaucauuccagagcuau

SEQ ID NO: 779516 - RNA, 19 nt, Artificial Sequence
  Description of Artificial Sequence: Synthetic oligonucleotide
  Sense strand starting at position 1358 of SEQ ID NO: 587268
ggugugugcggaguguaau

SEQ ID NO: 779517 - RNA, 19 nt, Artificial Sequence
  Description of Artificial Sequence: Synthetic oligonucleotide
  Antisense strand to SEQ ID NO: 779516
auuacacuccgcacacacc

SEQ ID NO: 779518 - RNA, 19 nt, Artificial Sequence
  Description of Artificial Sequence: Synthetic oligonucleotide
  Sense strand starting at position 1422 of SEQ ID NO: 587268
gccugcuaagucgugcaaa

SEQ ID NO: 779519 - RNA, 19 nt, Artificial Sequence
  Description of Artificial Sequence: Synthetic oligonucleotide
  Antisense strand to SEQ ID NO: 779518
uuugcacgacuuagcaggc

SEQ ID NO: 779520 - RNA, 19 nt, Artificial Sequence
  Description of Artificial Sequence: Synthetic oligonucleotide
  Sense strand starting at position 1957 of SEQ ID NO: 587268
gggucacuuccggauucaa

SEQ ID NO: 779521 - RNA, 19 nt, Artificial Sequence
  Description of Artificial Sequence: Synthetic oligonucleotide
  Antisense strand to SEQ ID NO: 779520
uugaauccggaagugaccc

SEQ ID NO: 779522 - RNA, 19 nt, Artificial Sequence
  Description of Artificial Sequence: Synthetic oligonucleotide
  Sense strand starting at position 2247 of SEQ ID NO: 587268
agugguuucuaauccagag

SEQ ID NO: 779523 - RNA, 19 nt, Artificial Sequence
  Description of Artificial Sequence: Synthetic oligonucleotide
  Antisense strand to SEQ ID NO: 779522
cucuggauuagaaaccacu

SEQ ID NO: 779524 - RNA, 19 nt, Artificial Sequence
  Description of Artificial Sequence: Synthetic oligonucleotide
  Sense strand starting at position 2459 of SEQ ID NO: 587268
guuggaauguuuccuagag

SEQ ID NO: 779525 - RNA, 19 nt, Artificial Sequence
  Description of Artificial Sequence: Synthetic oligonucleotide
  Antisense strand to SEQ ID NO: 779524
cucuaggaaacauuccaac

SEQ ID NO: 779526 - RNA, 19 nt, Artificial Sequence
  Description of Artificial Sequence: Synthetic oligonucleotide
  Sense strand starting at position 2463 of SEQ ID NO: 587268
gaauguuuccuagaguuau

SEQ ID NO: 779527 - RNA, 19 nt, Artificial Sequence
  Description of Artificial Sequence: Synthetic oligonucleotide
  Antisense strand to SEQ ID NO: 779526
auaacucuaggaaacauuc

SEQ ID NO: 779528 - RNA, 19 nt, Artificial Sequence
  Description of Artificial Sequence: Synthetic oligonucleotide
  Sense strand starting at position 2697 of SEQ ID NO: 587268
agcuacuuuccuggaggga

SEQ ID NO: 779529 - RNA, 19 nt, Artificial Sequence
  Description of Artificial Sequence: Synthetic oligonucleotide
  Antisense strand to SEQ ID NO: 779528
ucccuccaggaaaguagcu

SEQ ID NO: 779530 - RNA, 19 nt, Artificial Sequence
  Description of Artificial Sequence: Synthetic oligonucleotide
  Sense strand starting at position 2916 of SEQ ID NO: 587268
gggaacuuaccauggcuaa

SEQ ID NO: 779531 - RNA, 19 nt, Artificial Sequence
  Description of Artificial Sequence: Synthetic oligonucleotide
  Antisense strand to SEQ ID NO: 779530
uuagccaugguaaguuccc

SEQ ID NO: 779532 - RNA, 19 nt, Artificial Sequence
  Description of Artificial Sequence: Synthetic oligonucleotide
  Sense strand starting at position 3123 of SEQ ID NO: 587268
gugaccuucucucuaggaa

SEQ ID NO: 779533 - RNA, 19 nt, Artificial Sequence
  Description of Artificial Sequence: Synthetic oligonucleotide
  Antisense strand to SEQ ID NO: 779532
uuccuagagagaaggucac

SEQ ID NO: 779534 - RNA, 19 nt, Artificial Sequence
  Description of Artificial Sequence: Synthetic oligonucleotide
  Sense strand starting at position 3237 of SEQ ID NO: 587268
gcagaaguaguguaugauu

SEQ ID NO: 779535 - RNA, 19 nt, Artificial Sequence
  Description of Artificial Sequence: Synthetic oligonucleotide
  Antisense strand to SEQ ID NO: 779534
aaucauacacuacuucugc

SEQ ID NO: 779536 - RNA, 19 nt, Artificial Sequence
  Description of Artificial Sequence: Synthetic oligonucleotide
  Sense strand starting at position 3242 of SEQ ID NO: 587268
aguaguguaugauuuguuu

SEQ ID NO: 779537 - RNA, 19 nt, Artificial Sequence
  Description of Artificial Sequence: Synthetic oligonucleotide
  Antisense strand to SEQ ID NO: 779536
aaacaaaucauacacuacu

SEQ ID NO: 779538 - RNA, 19 nt, Artificial Sequence
  Description of Artificial Sequence: Synthetic oligonucleotide
  Sense strand starting at position 3357 of SEQ ID NO: 587268
gagaguccauaguuugacu

SEQ ID NO: 779539 - RNA, 19 nt, Artificial Sequence
  Description of Artificial Sequence: Synthetic oligonucleotide
  Antisense strand to SEQ ID NO: 779538
agucaaacuauggacucuc

SEQ ID NO: 779540 - RNA, 19 nt, Artificial Sequence
  Description of Artificial Sequence: Synthetic oligonucleotide
  Sense strand starting at position 3437 of SEQ ID NO: 587268
cauguuguuccucaggaaa

SEQ ID NO: 779541 - RNA, 19 nt, Artificial Sequence
  Description of Artificial Sequence: Synthetic oligonucleotide
  Antisense strand to SEQ ID NO: 779540
uuuccugaggaacaacaug

SEQ ID NO: 779542 - RNA, 19 nt, Artificial Sequence
  Description of Artificial Sequence: Synthetic oligonucleotide
  Sense strand starting at position 3730 of SEQ ID NO: 587268
agguaacugcuauauccua

SEQ ID NO: 779543 - RNA, 19 nt, Artificial Sequence
  Description of Artificial Sequence: Synthetic oligonucleotide
  Antisense strand to SEQ ID NO: 779542
uaggauauagcaguuaccu

SEQ ID NO: 779544 - RNA, 19 nt, Artificial Sequence
  Description of Artificial Sequence: Synthetic oligonucleotide
  Sense strand starting at position 3807 of SEQ ID NO: 587268
uaaguucuggacuacaagu

SEQ ID NO: 779545 - RNA, 19 nt, Artificial Sequence
  Description of Artificial Sequence: Synthetic oligonucleotide
  Antisense strand to SEQ ID NO: 779544
acuuguaguccagaacuua

SEQ ID NO: 779546 - RNA, 19 nt, Artificial Sequence
  Description of Artificial Sequence: Synthetic oligonucleotide
  Sense strand starting at position 13 of SEQ ID NO: 587269
cuacuccugcucugaggaa

SEQ ID NO: 779547 - RNA, 19 nt, Artificial Sequence
  Description of Artificial Sequence: Synthetic oligonucleotide
  Antisense strand to SEQ ID NO: 779546
uuccucagagcaggaguag

SEQ ID NO: 779548 - RNA, 19 nt, Artificial Sequence
  Description of Artificial Sequence: Synthetic oligonucleotide
  Sense strand starting at position 143 of SEQ ID NO: 587269
augugaacaccuuacguaa

SEQ ID NO: 779549 - RNA, 19 nt, Artificial Sequence
  Description of Artificial Sequence: Synthetic oligonucleotide
  Antisense strand to SEQ ID NO: 779548
uuacguaagguguucacau

SEQ ID NO: 779550 - RNA, 19 nt, Artificial Sequence
  Description of Artificial Sequence: Synthetic oligonucleotide
  Sense strand starting at position 178 of SEQ ID NO: 587269
agaacuaagcaguaauugu

SEQ ID NO: 779551 - RNA, 19 nt, Artificial Sequence
  Description of Artificial Sequence: Synthetic oligonucleotide
  Antisense strand to SEQ ID NO: 779550
acaauuacugcuuaguucu

SEQ ID NO: 779552 - RNA, 19 nt, Artificial Sequence
  Description of Artificial Sequence: Synthetic oligonucleotide
  Sense strand starting at position 262 of SEQ ID NO: 587269
ugcgguguugcuuuaggau

SEQ ID NO: 779553 - RNA, 19 nt, Artificial Sequence
  Description of Artificial Sequence: Synthetic oligonucleotide
  Antisense strand to SEQ ID NO: 779552
auccuaaagcaacaccgca

SEQ ID NO: 779554 - RNA, 19 nt, Artificial Sequence
  Description of Artificial Sequence: Synthetic oligonucleotide
  Sense strand starting at position 395 of SEQ ID NO: 587269
aaauauguuguggaaucuu

SEQ ID NO: 779555 - RNA, 19 nt, Artificial Sequence
  Description of Artificial Sequence: Synthetic oligonucleotide
  Antisense strand to SEQ ID NO: 779554
aagauuccacaacauauuu

SEQ ID NO: 779556 - RNA, 19 nt, Artificial Sequence
  Description of Artificial Sequence: Synthetic oligonucleotide
  Sense strand starting at position 456 of SEQ ID NO: 587269
ggguuaugaguugguggga

SEQ ID NO: 779557 - RNA, 19 nt, Artificial Sequence
  Description of Artificial Sequence: Synthetic oligonucleotide
  Antisense strand to SEQ ID NO: 779556
ucccaccaacucauaaccc

SEQ ID NO: 779558 - RNA, 19 nt, Artificial Sequence
  Description of Artificial Sequence: Synthetic oligonucleotide
  Sense strand starting at position 457 of SEQ ID NO: 587269
gguuaugaguuggugggaa

SEQ ID NO: 779559 - RNA, 19 nt, Artificial Sequence
  Description of Artificial Sequence: Synthetic oligonucleotide
  Antisense strand to SEQ ID NO: 779558
uucccaccaacucauaacc

SEQ ID NO: 779560 - RNA, 19 nt, Artificial Sequence
  Description of Artificial Sequence: Synthetic oligonucleotide
  Sense strand starting at position 459 of SEQ ID NO: 587269
uuaugaguuggugggaaga

SEQ ID NO: 779561 - RNA, 19 nt, Artificial Sequence
  Description of Artificial Sequence: Synthetic oligonucleotide
  Antisense strand to SEQ ID NO: 779560
ucuucccaccaacucauaa

SEQ ID NO: 779562 - RNA, 19 nt, Artificial Sequence
  Description of Artificial Sequence: Synthetic oligonucleotide
  Sense strand starting at position 564 of SEQ ID NO: 587269
agguuucuccucuacagag

SEQ ID NO: 779563 - RNA, 19 nt, Artificial Sequence
  Description of Artificial Sequence: Synthetic oligonucleotide
  Antisense strand to SEQ ID NO: 779562
cucuguagaggagaaaccu

SEQ ID NO: 779564 - RNA, 19 nt, Artificial Sequence
  Description of Artificial Sequence: Synthetic oligonucleotide
  Sense strand starting at position 683 of SEQ ID NO: 587269
gcaauuucuucuguuacug

SEQ ID NO: 779565 - RNA, 19 nt, Artificial Sequence
  Description of Artificial Sequence: Synthetic oligonucleotide
  Antisense strand to SEQ ID NO: 779564
caguaacagaagaaauugc

SEQ ID NO: 779566 - RNA, 19 nt, Artificial Sequence
  Description of Artificial Sequence: Synthetic oligonucleotide
  Sense strand starting at position 726 of SEQ ID NO: 587269
ugguaauguggguggauga

SEQ ID NO: 779567 - RNA, 19 nt, Artificial Sequence
  Description of Artificial Sequence: Synthetic oligonucleotide
  Antisense strand to SEQ ID NO: 779566
ucauccacccacauuacca

SEQ ID NO: 779568 - RNA, 19 nt, Artificial Sequence
  Description of Artificial Sequence: Synthetic oligonucleotide
  Sense strand starting at position 761 of SEQ ID NO: 587269
cccgcauuaccagauaaau

SEQ ID NO: 779569 - RNA, 19 nt, Artificial Sequence
  Description of Artificial Sequence: Synthetic oligonucleotide
  Antisense strand to SEQ ID NO: 779568
auuuaucugguaaugcggg

SEQ ID NO: 779570 - RNA, 19 nt, Artificial Sequence
  Description of Artificial Sequence: Synthetic oligonucleotide
  Sense strand starting at position 859 of SEQ ID NO: 587269
guguuuccuggugaaauag

SEQ ID NO: 779571 - RNA, 19 nt, Artificial Sequence
  Description of Artificial Sequence: Synthetic oligonucleotide
  Antisense strand to SEQ ID NO: 779570
cuauuucaccaggaaacac

SEQ ID NO: 779572 - RNA, 19 nt, Artificial Sequence
  Description of Artificial Sequence: Synthetic oligonucleotide
  Sense strand starting at position 987 of SEQ ID NO: 587269
agucauuugccuugagcca

SEQ ID NO: 779573 - RNA, 19 nt, Artificial Sequence
  Description of Artificial Sequence: Synthetic oligonucleotide
  Antisense strand to SEQ ID NO: 779572
uggcucaaggcaaaugacu

SEQ ID NO: 779574 - RNA, 19 nt, Artificial Sequence
  Description of Artificial Sequence: Synthetic oligonucleotide
  Sense strand starting at position 1186 of SEQ ID NO: 587269
agcagaaucuacccuggau

SEQ ID NO: 779575 - RNA, 19 nt, Artificial Sequence
  Description of Artificial Sequence: Synthetic oligonucleotide
  Antisense strand to SEQ ID NO: 779574
auccaggguagauucugcu

SEQ ID NO: 779576 - RNA, 19 nt, Artificial Sequence
  Description of Artificial Sequence: Synthetic oligonucleotide
  Sense strand starting at position 2036 of SEQ ID NO: 587269
uugcuuugucuuuaaauga

SEQ ID NO: 779577 - RNA, 19 nt, Artificial Sequence
  Description of Artificial Sequence: Synthetic oligonucleotide
  Antisense strand to SEQ ID NO: 779576
ucauuuaaagacaaagcaa

SEQ ID NO: 779578 - RNA, 19 nt, Artificial Sequence
  Description of Artificial Sequence: Synthetic oligonucleotide
  Sense strand starting at position 2076 of SEQ ID NO: 587269
aggauacuaucagcauuaa

SEQ ID NO: 779579 - RNA, 19 nt, Artificial Sequence
  Description of Artificial Sequence: Synthetic oligonucleotide
  Antisense strand to SEQ ID NO: 779578
uuaaugcugauaguauccu

SEQ ID NO: 779580 - RNA, 19 nt, Artificial Sequence
  Description of Artificial Sequence: Synthetic oligonucleotide
  Sense strand starting at position 2108 of SEQ ID NO: 587269
uaugaauggugggcauaga

SEQ ID NO: 779581 - RNA, 19 nt, Artificial Sequence
  Description of Artificial Sequence: Synthetic oligonucleotide
  Antisense strand to SEQ ID NO: 779580
ucuaugcccaccauucaua

SEQ ID NO: 779582 - RNA, 19 nt, Artificial Sequence
  Description of Artificial Sequence: Synthetic oligonucleotide
  Sense strand starting at position 2123 of SEQ ID NO: 587269
uagaauugguguuugguaa

SEQ ID NO: 779583 - RNA, 19 nt, Artificial Sequence
  Description of Artificial Sequence: Synthetic oligonucleotide
  Antisense strand to SEQ ID NO: 779582
uuaccaaacaccaauucua

SEQ ID NO: 779584 - RNA, 19 nt, Artificial Sequence
  Description of Artificial Sequence: Synthetic oligonucleotide
  Sense strand starting at position 2124 of SEQ ID NO: 587269
agaauugguguuugguaaa

SEQ ID NO: 779585 - RNA, 19 nt, Artificial Sequence
  Description of Artificial Sequence: Synthetic oligonucleotide
  Antisense strand to SEQ ID NO: 779584
uuuaccaaacaccaauucu

SEQ ID NO: 779586 - RNA, 19 nt, Artificial Sequence
  Description of Artificial Sequence: Synthetic oligonucleotide
  Sense strand starting at position 2215 of SEQ ID NO: 587269
gguggaaauuugcuuggcu

SEQ ID NO: 779587 - RNA, 19 nt, Artificial Sequence
  Description of Artificial Sequence: Synthetic oligonucleotide
  Antisense strand to SEQ ID NO: 779586
agccaagcaaauuuccacc

SEQ ID NO: 779588 - RNA, 19 nt, Artificial Sequence
  Description of Artificial Sequence: Synthetic oligonucleotide
  Sense strand starting at position 2216 of SEQ ID NO: 587269
guggaaauuugcuuggcua

SEQ ID NO: 779589 - RNA, 19 nt, Artificial Sequence
  Description of Artificial Sequence: Synthetic oligonucleotide
  Antisense strand to SEQ ID NO: 779588
uagccaagcaaauuuccac

SEQ ID NO: 779590 - RNA, 19 nt, Artificial Sequence
  Description of Artificial Sequence: Synthetic oligonucleotide
  Sense strand starting at position 2510 of SEQ ID NO: 587269
agucuuggauccuugagag

SEQ ID NO: 779591 - RNA, 19 nt, Artificial Sequence
  Description of Artificial Sequence: Synthetic oligonucleotide
  Antisense strand to SEQ ID NO: 779590
cucucaaggauccaagacu

SEQ ID NO: 779592 - RNA, 19 nt, Artificial Sequence
  Description of Artificial Sequence: Synthetic oligonucleotide
  Sense strand starting at position 2574 of SEQ ID NO: 587269
augucagcuuucucaagga

SEQ ID NO: 779593 - RNA, 19 nt, Artificial Sequence
  Description of Artificial Sequence: Synthetic oligonucleotide
  Antisense strand to SEQ ID NO: 779592
uccuugagaaagcugacau

SEQ ID NO: 779594 - RNA, 19 nt, Artificial Sequence
  Description of Artificial Sequence: Synthetic oligonucleotide
  Sense strand starting at position 3024 of SEQ ID NO: 587269
agugacugauuugagauga

SEQ ID NO: 779595 - RNA, 19 nt, Artificial Sequence
  Description of Artificial Sequence: Synthetic oligonucleotide
  Antisense strand to SEQ ID NO: 779594
ucaucucaaaucagucacu

SEQ ID NO: 779596 - RNA, 19 nt, Artificial Sequence
  Description of Artificial Sequence: Synthetic oligonucleotide
  Sense strand starting at position 3041 of SEQ ID NO: 587269
gagguaacuuagucuuccu

SEQ ID NO: 779597 - RNA, 19 nt, Artificial Sequence
  Description of Artificial Sequence: Synthetic oligonucleotide
  Antisense strand to SEQ ID NO: 779596
aggaagacuaaguuaccuc

SEQ ID NO: 779598 - RNA, 19 nt, Artificial Sequence
  Description of Artificial Sequence: Synthetic oligonucleotide
  Sense strand starting at position 3162 of SEQ ID NO: 587269
cugagagucucagccuaag

SEQ ID NO: 779599 - RNA, 19 nt, Artificial Sequence
  Description of Artificial Sequence: Synthetic oligonucleotide
  Antisense strand to SEQ ID NO: 779598
cuuaggcugagacucucag

SEQ ID NO: 779600 - RNA, 19 nt, Artificial Sequence
  Description of Artificial Sequence: Synthetic oligonucleotide
  Sense strand starting at position 3196 of SEQ ID NO: 587269
gccugauaagcagaucacu

SEQ ID NO: 779601 - RNA, 19 nt, Artificial Sequence
  Description of Artificial Sequence: Synthetic oligonucleotide
  Antisense strand to SEQ ID NO: 779600
agugaucugcuuaucaggc

SEQ ID NO: 779602 - RNA, 19 nt, Artificial Sequence
  Description of Artificial Sequence: Synthetic oligonucleotide
  Sense strand starting at position 3329 of SEQ ID NO: 587269
cuuugaacaugauucguga

SEQ ID NO: 779603 - RNA, 19 nt, Artificial Sequence
  Description of Artificial Sequence: Synthetic oligonucleotide
  Antisense strand to SEQ ID NO: 779602
ucacgaaucauguucaaag

SEQ ID NO: 779604 - RNA, 19 nt, Artificial Sequence
  Description of Artificial Sequence: Synthetic oligonucleotide
  Sense strand starting at position 3332 of SEQ ID NO: 587269
ugaacaugauucgugacua

SEQ ID NO: 779605 - RNA, 19 nt, Artificial Sequence
  Description of Artificial Sequence: Synthetic oligonucleotide
  Antisense strand to SEQ ID NO: 779604
uagucacgaaucauguuca

SEQ ID NO: 779606 - RNA, 19 nt, Artificial Sequence
  Description of Artificial Sequence: Synthetic oligonucleotide
  Sense strand starting at position 3336 of SEQ ID NO: 587269
caugauucgugacuaagac

SEQ ID NO: 779607 - RNA, 19 nt, Artificial Sequence
  Description of Artificial Sequence: Synthetic oligonucleotide
  Antisense strand to SEQ ID NO: 779606
gucuuagucacgaaucaug

SEQ ID NO: 779608 - RNA, 19 nt, Artificial Sequence
  Description of Artificial Sequence: Synthetic oligonucleotide
  Sense strand starting at position 3337 of SEQ ID NO: 587269
augauucgugacuaagacu

SEQ ID NO: 779609 - RNA, 19 nt, Artificial Sequence
  Description of Artificial Sequence: Synthetic oligonucleotide
  Antisense strand to SEQ ID NO: 779608
agucuuagucacgaaucau

SEQ ID NO: 779610 - RNA, 19 nt, Artificial Sequence
  Description of Artificial Sequence: Synthetic oligonucleotide
  Sense strand starting at position 3423 of SEQ ID NO: 587269
cugaaccgccucuaacauu

SEQ ID NO: 779611 - RNA, 19 nt, Artificial Sequence
  Description of Artificial Sequence: Synthetic oligonucleotide
  Antisense strand to SEQ ID NO: 779610
aauguuagaggcgguucag

SEQ ID NO: 779612 - RNA, 19 nt, Artificial Sequence
  Description of Artificial Sequence: Synthetic oligonucleotide
  Sense strand starting at position 3559 of SEQ ID NO: 587269
cugucuacccaagguuaga

SEQ ID NO: 779613 - RNA, 19 nt, Artificial Sequence
  Description of Artificial Sequence: Synthetic oligonucleotide
  Antisense strand to SEQ ID NO: 779612
ucuaaccuuggguagacag

SEQ ID NO: 779614 - RNA, 19 nt, Artificial Sequence
  Description of Artificial Sequence: Synthetic oligonucleotide
  Sense strand starting at position 3620 of SEQ ID NO: 587269
uuaugugaucugugauaag

SEQ ID NO: 779615 - RNA, 19 nt, Artificial Sequence
  Description of Artificial Sequence: Synthetic oligonucleotide
  Antisense strand to SEQ ID NO: 779614
cuuaucacagaucacauaa

SEQ ID NO: 779616 - RNA, 19 nt, Artificial Sequence
  Description of Artificial Sequence: Synthetic oligonucleotide
  Sense strand starting at position 3770 of SEQ ID NO: 587269
aggaaaugacuuugcucau

SEQ ID NO: 779617 - RNA, 19 nt, Artificial Sequence
  Description of Artificial Sequence: Synthetic oligonucleotide
  Antisense strand to SEQ ID NO: 779616
augagcaaagucauuuccu

SEQ ID NO: 779618 - RNA, 19 nt, Artificial Sequence
  Description of Artificial Sequence: Synthetic oligonucleotide
  Sense strand starting at position 3771 of SEQ ID NO: 587269
ggaaaugacuuugcucaug

SEQ ID NO: 779619 - RNA, 19 nt, Artificial Sequence
  Description of Artificial Sequence: Synthetic oligonucleotide
  Antisense strand to SEQ ID NO: 779618
caugagcaaagucauuucc

SEQ ID NO: 779620 - RNA, 19 nt, Artificial Sequence
  Description of Artificial Sequence: Synthetic oligonucleotide
  Sense strand starting at position 3787 of SEQ ID NO: 587269
auggguuccagaugucuga

SEQ ID NO: 779621 - RNA, 19 nt, Artificial Sequence
  Description of Artificial Sequence: Synthetic oligonucleotide
  Antisense strand to SEQ ID NO: 779620
ucagacaucuggaacccau

SEQ ID NO: 779622 - RNA, 19 nt, Artificial Sequence
  Description of Artificial Sequence: Synthetic oligonucleotide
  Sense strand starting at position 3794 of SEQ ID NO: 587269
ccagaugucugagcagaag

SEQ ID NO: 779623 - RNA, 19 nt, Artificial Sequence
  Description of Artificial Sequence: Synthetic oligonucleotide
  Antisense strand to SEQ ID NO: 779622
cuucugcucagacaucugg

SEQ ID NO: 779624 - RNA, 19 nt, Artificial Sequence
  Description of Artificial Sequence: Synthetic oligonucleotide
  Sense strand starting at position 3797 of SEQ ID NO: 587269
gaugucugagcagaaguga

SEQ ID NO: 779625 - RNA, 19 nt, Artificial Sequence
  Description of Artificial Sequence: Synthetic oligonucleotide
  Antisense strand to SEQ ID NO: 779624
ucacuucugcucagacauc

SEQ ID NO: 779626 - RNA, 19 nt, Artificial Sequence
  Description of Artificial Sequence: Synthetic oligonucleotide
  Sense strand starting at position 40 of SEQ ID NO: 587270
uuuauuuagcgcugacugu

SEQ ID NO: 779627 - RNA, 19 nt, Artificial Sequence
  Description of Artificial Sequence: Synthetic oligonucleotide
  Antisense strand to SEQ ID NO: 779626
acagucagcgcuaaauaaa

SEQ ID NO: 779628 - RNA, 19 nt, Artificial Sequence
  Description of Artificial Sequence: Synthetic oligonucleotide
  Sense strand starting at position 46 of SEQ ID NO: 587270
uagcgcugacuguguguua

SEQ ID NO: 779629 - RNA, 19 nt, Artificial Sequence
  Description of Artificial Sequence: Synthetic oligonucleotide
  Antisense strand to SEQ ID NO: 779628
uaacacacagucagcgcua

SEQ ID NO: 779630 - RNA, 19 nt, Artificial Sequence
  Description of Artificial Sequence: Synthetic oligonucleotide
  Sense strand starting at position 47 of SEQ ID NO: 587270
agcgcugacuguguguuaa

SEQ ID NO: 779631 - RNA, 19 nt, Artificial Sequence
  Description of Artificial Sequence: Synthetic oligonucleotide
  Antisense strand to SEQ ID NO: 779630
uuaacacacagucagcgcu

SEQ ID NO: 779632 - RNA, 19 nt, Artificial Sequence
  Description of Artificial Sequence: Synthetic oligonucleotide
  Sense strand starting at position 55 of SEQ ID NO: 587270
cuguguguuaagcacuauu

SEQ ID NO: 779633 - RNA, 19 nt, Artificial Sequence
  Description of Artificial Sequence: Synthetic oligonucleotide
  Antisense strand to SEQ ID NO: 779632
aauagugcuuaacacacag

SEQ ID NO: 779634 - RNA, 19 nt, Artificial Sequence
  Description of Artificial Sequence: Synthetic oligonucleotide
  Sense strand starting at position 58 of SEQ ID NO: 587270
uguguuaagcacuauuaag

SEQ ID NO: 779635 - RNA, 19 nt, Artificial Sequence
  Description of Artificial Sequence: Synthetic oligonucleotide
  Antisense strand to SEQ ID NO: 779634
cuuaauagugcuuaacaca

SEQ ID NO: 779636 - RNA, 19 nt, Artificial Sequence
  Description of Artificial Sequence: Synthetic oligonucleotide
  Sense strand starting at position 127 of SEQ ID NO: 587270
gaugcaugaucaguuccau

SEQ ID NO: 779637 - RNA, 19 nt, Artificial Sequence
  Description of Artificial Sequence: Synthetic oligonucleotide
  Antisense strand to SEQ ID NO: 779636
auggaacugaucaugcauc

SEQ ID NO: 779638 - RNA, 19 nt, Artificial Sequence
  Description of Artificial Sequence: Synthetic oligonucleotide
  Sense strand starting at position 182 of SEQ ID NO: 587270
uuaccauucugagguggua

SEQ ID NO: 779639 - RNA, 19 nt, Artificial Sequence
  Description of Artificial Sequence: Synthetic oligonucleotide
  Antisense strand to SEQ ID NO: 779638
uaccaccucagaaugguaa

SEQ ID NO: 779640 - RNA, 19 nt, Artificial Sequence
  Description of Artificial Sequence: Synthetic oligonucleotide
  Sense strand starting at position 184 of SEQ ID NO: 587270
accauucugaggugguaca

SEQ ID NO: 779641 - RNA, 19 nt, Artificial Sequence
  Description of Artificial Sequence: Synthetic oligonucleotide
  Antisense strand to SEQ ID NO: 779640
uguaccaccucagaauggu

SEQ ID NO: 779642 - RNA, 19 nt, Artificial Sequence
  Description of Artificial Sequence: Synthetic oligonucleotide
  Sense strand starting at position 314 of SEQ ID NO: 587270
cagcaaauguccugguuua

SEQ ID NO: 779643 - RNA, 19 nt, Artificial Sequence
  Description of Artificial Sequence: Synthetic oligonucleotide
  Antisense strand to SEQ ID NO: 779642
uaaaccaggacauuugcug

SEQ ID NO: 779644 - RNA, 19 nt, Artificial Sequence
  Description of Artificial Sequence: Synthetic oligonucleotide
  Sense strand starting at position 315 of SEQ ID NO: 587270
agcaaauguccugguuuac

SEQ ID NO: 779645 - RNA, 19 nt, Artificial Sequence
  Description of Artificial Sequence: Synthetic oligonucleotide
  Antisense strand to SEQ ID NO: 779644
guaaaccaggacauuugcu

SEQ ID NO: 779646 - RNA, 19 nt, Artificial Sequence
  Description of Artificial Sequence: Synthetic oligonucleotide
  Sense strand starting at position 388 of SEQ ID NO: 587270
uccauuggauggucucuua

SEQ ID NO: 779647 - RNA, 19 nt, Artificial Sequence
  Description of Artificial Sequence: Synthetic oligonucleotide
  Antisense strand to SEQ ID NO: 779646
uaagagaccauccaaugga

SEQ ID NO: 779648 - RNA, 19 nt, Artificial Sequence
  Description of Artificial Sequence: Synthetic oligonucleotide
  Sense strand starting at position 391 of SEQ ID NO: 587270
auuggauggucucuuauuc

SEQ ID NO: 779649 - RNA, 19 nt, Artificial Sequence
  Description of Artificial Sequence: Synthetic oligonucleotide
  Antisense strand to SEQ ID NO: 779648
gaauaagagaccauccaau

SEQ ID NO: 779650 - RNA, 19 nt, Artificial Sequence
  Description of Artificial Sequence: Synthetic oligonucleotide
  Sense strand starting at position 429 of SEQ ID NO: 587270
ccaggagagucccugaaca

SEQ ID NO: 779651 - RNA, 19 nt, Artificial Sequence
  Description of Artificial Sequence: Synthetic oligonucleotide
  Antisense strand to SEQ ID NO: 779650
uguucagggacucuccugg

SEQ ID NO: 779652 - RNA, 19 nt, Artificial Sequence
  Description of Artificial Sequence: Synthetic oligonucleotide
  Sense strand starting at position 597 of SEQ ID NO: 587270
ucugauaucuugucccugu

SEQ ID NO: 779653 - RNA, 19 nt, Artificial Sequence
  Description of Artificial Sequence: Synthetic oligonucleotide
  Antisense strand to SEQ ID NO: 779652
acagggacaagauaucaga

SEQ ID NO: 779654 - RNA, 19 nt, Artificial Sequence
  Description of Artificial Sequence: Synthetic oligonucleotide
  Sense strand starting at position 601 of SEQ ID NO: 587270
auaucuugucccugugugu

SEQ ID NO: 779655 - RNA, 19 nt, Artificial Sequence
  Description of Artificial Sequence: Synthetic oligonucleotide
  Antisense strand to SEQ ID NO: 779654
acacacagggacaagauau

SEQ ID NO: 779656 - RNA, 19 nt, Artificial Sequence
  Description of Artificial Sequence: Synthetic oligonucleotide
  Sense strand starting at position 638 of SEQ ID NO: 587270
gggucauccaaucaggcaa

SEQ ID NO: 779657 - RNA, 19 nt, Artificial Sequence
  Description of Artificial Sequence: Synthetic oligonucleotide
  Antisense strand to SEQ ID NO: 779656
uugccugauuggaugaccc

SEQ ID NO: 779658 - RNA, 19 nt, Artificial Sequence
  Description of Artificial Sequence: Synthetic oligonucleotide
  Sense strand starting at position 824 of SEQ ID NO: 587270
gggugacagagcugauaua

SEQ ID NO: 779659 - RNA, 19 nt, Artificial Sequence
  Description of Artificial Sequence: Synthetic oligonucleotide
  Antisense strand to SEQ ID NO: 779658
uauaucagcucugucaccc

SEQ ID NO: 779660 - RNA, 19 nt, Artificial Sequence
  Description of Artificial Sequence: Synthetic oligonucleotide
  Sense strand starting at position 849 of SEQ ID NO: 587270
cuggguucucuuuguauuu

SEQ ID NO: 779661 - RNA, 19 nt, Artificial Sequence
  Description of Artificial Sequence: Synthetic oligonucleotide
  Antisense strand to SEQ ID NO: 779660
aaauacaaagagaacccag

SEQ ID NO: 779662 - RNA, 19 nt, Artificial Sequence
  Description of Artificial Sequence: Synthetic oligonucleotide
  Sense strand starting at position 971 of SEQ ID NO: 587270
uccuaagucccagaaagcu

SEQ ID NO: 779663 - RNA, 19 nt, Artificial Sequence
  Description of Artificial Sequence: Synthetic oligonucleotide
  Antisense strand to SEQ ID NO: 779662
agcuuucugggacuuagga

SEQ ID NO: 779664 - RNA, 19 nt, Artificial Sequence
  Description of Artificial Sequence: Synthetic oligonucleotide
  Sense strand starting at position 990 of SEQ ID NO: 587270
ucagcuacugguuaaacua

SEQ ID NO: 779665 - RNA, 19 nt, Artificial Sequence
  Description of Artificial Sequence: Synthetic oligonucleotide
  Antisense strand to SEQ ID NO: 779664
uaguuuaaccaguagcuga

SEQ ID NO: 779666 - RNA, 19 nt, Artificial Sequence
  Description of Artificial Sequence: Synthetic oligonucleotide
  Sense strand starting at position 997 of SEQ ID NO: 587270
cugguuaaacuacgggaua

SEQ ID NO: 779667 - RNA, 19 nt, Artificial Sequence
  Description of Artificial Sequence: Synthetic oligonucleotide
  Antisense strand to SEQ ID NO: 779666
uaucccguaguuuaaccag

SEQ ID NO: 779668 - RNA, 19 nt, Artificial Sequence
  Description of Artificial Sequence: Synthetic oligonucleotide
  Sense strand starting at position 1086 of SEQ ID NO: 587270
gggaccugcuccuuggaga

SEQ ID NO: 779669 - RNA, 19 nt, Artificial Sequence
  Description of Artificial Sequence: Synthetic oligonucleotide
  Antisense strand to SEQ ID NO: 779668
ucuccaaggagcagguccc

SEQ ID NO: 779670 - RNA, 19 nt, Artificial Sequence
  Description of Artificial Sequence: Synthetic oligonucleotide
  Sense strand starting at position 1265 of SEQ ID NO: 587270
acaggaguuuggccagaaa

SEQ ID NO: 779671 - RNA, 19 nt, Artificial Sequence
  Description of Artificial Sequence: Synthetic oligonucleotide
  Antisense strand to SEQ ID NO: 779670
uuucuggccaaacuccugu

SEQ ID NO: 779672 - RNA, 19 nt, Artificial Sequence
  Description of Artificial Sequence: Synthetic oligonucleotide
  Sense strand starting at position 1337 of SEQ ID NO: 587270
ggagacuuccucuggaauc

SEQ ID NO: 779673 - RNA, 19 nt, Artificial Sequence
  Description of Artificial Sequence: Synthetic oligonucleotide
  Antisense strand to SEQ ID NO: 779672
gauuccagaggaagucucc

SEQ ID NO: 779674 - RNA, 19 nt, Artificial Sequence
  Description of Artificial Sequence: Synthetic oligonucleotide
  Sense strand starting at position 1348 of SEQ ID NO: 587270
cuggaauccucugggaaga

SEQ ID NO: 779675 - RNA, 19 nt, Artificial Sequence
  Description of Artificial Sequence: Synthetic oligonucleotide
  Antisense strand to SEQ ID NO: 779674
ucuucccagaggauuccag

SEQ ID NO: 779676 - RNA, 19 nt, Artificial Sequence
  Description of Artificial Sequence: Synthetic oligonucleotide
  Sense strand starting at position 1350 of SEQ ID NO: 587270
ggaauccucugggaagaug

SEQ ID NO: 779677 - RNA, 19 nt, Artificial Sequence
  Description of Artificial Sequence: Synthetic oligonucleotide
  Antisense strand to SEQ ID NO: 779676
caucuucccagaggauucc

SEQ ID NO: 779678 - RNA, 19 nt, Artificial Sequence
  Description of Artificial Sequence: Synthetic oligonucleotide
  Sense strand starting at position 2019 of SEQ ID NO: 587270
gggaaaugagcucgcugga

SEQ ID NO: 779679 - RNA, 19 nt, Artificial Sequence
  Description of Artificial Sequence: Synthetic oligonucleotide
  Antisense strand to SEQ ID NO: 779678
uccagcgagcucauuuccc

SEQ ID NO: 779680 - RNA, 19 nt, Artificial Sequence
  Description of Artificial Sequence: Synthetic oligonucleotide
  Sense strand starting at position 3250 of SEQ ID NO: 587270
gcauuccaucuggaaugua

SEQ ID NO: 779681 - RNA, 19 nt, Artificial Sequence
  Description of Artificial Sequence: Synthetic oligonucleotide
  Antisense strand to SEQ ID NO: 779680
uacauuccagauggaaugc

SEQ ID NO: 779682 - RNA, 19 nt, Artificial Sequence
  Description of Artificial Sequence: Synthetic oligonucleotide
  Sense strand starting at position 3262 of SEQ ID NO: 587270
gaauguaggaagugaguuu

SEQ ID NO: 779683 - RNA, 19 nt, Artificial Sequence
  Description of Artificial Sequence: Synthetic oligonucleotide
  Antisense strand to SEQ ID NO: 779682
aaacucacuuccuacauuc

SEQ ID NO: 779684 - RNA, 19 nt, Artificial Sequence
  Description of Artificial Sequence: Synthetic oligonucleotide
  Sense strand starting at position 3273 of SEQ ID NO: 587270
gugaguuucuaucccaugu

SEQ ID NO: 779685 - RNA, 19 nt, Artificial Sequence
  Description of Artificial Sequence: Synthetic oligonucleotide
  Antisense strand to SEQ ID NO: 779684
acaugggauagaaacucac

SEQ ID NO: 779686 - RNA, 19 nt, Artificial Sequence
  Description of Artificial Sequence: Synthetic oligonucleotide
  Sense strand starting at position 3312 of SEQ ID NO: 587270
ucagguauaucaggcaauc

SEQ ID NO: 779687 - RNA, 19 nt, Artificial Sequence
  Description of Artificial Sequence: Synthetic oligonucleotide
  Antisense strand to SEQ ID NO: 779686
gauugccugauauaccuga

SEQ ID NO: 779688 - RNA, 19 nt, Artificial Sequence
  Description of Artificial Sequence: Synthetic oligonucleotide
  Sense strand starting at position 3495 of SEQ ID NO: 587270
ggaacagugcuuuacaggu

SEQ ID NO: 779689 - RNA, 19 nt, Artificial Sequence
  Description of Artificial Sequence: Synthetic oligonucleotide
  Antisense strand to SEQ ID NO: 779688
accuguaaagcacuguucc

SEQ ID NO: 779690 - RNA, 19 nt, Artificial Sequence
  Description of Artificial Sequence: Synthetic oligonucleotide
  Sense strand starting at position 3501 of SEQ ID NO: 587270
gugcuuuacaggugacaaa

SEQ ID NO: 779691 - RNA, 19 nt, Artificial Sequence
  Description of Artificial Sequence: Synthetic oligonucleotide
  Antisense strand to SEQ ID NO: 779690
uuugucaccuguaaagcac

SEQ ID NO: 779692 - RNA, 19 nt, Artificial Sequence
  Description of Artificial Sequence: Synthetic oligonucleotide
  Sense strand starting at position 3502 of SEQ ID NO: 587270
ugcuuuacaggugacaaau

SEQ ID NO: 779693 - RNA, 19 nt, Artificial Sequence
  Description of Artificial Sequence: Synthetic oligonucleotide
  Antisense strand to SEQ ID NO: 779692
auuugucaccuguaaagca

SEQ ID NO: 779694 - RNA, 19 nt, Artificial Sequence
  Description of Artificial Sequence: Synthetic oligonucleotide
  Sense strand starting at position 3709 of SEQ ID NO: 587270
ggcacagaaugcuggagau

SEQ ID NO: 779695 - RNA, 19 nt, Artificial Sequence
  Description of Artificial Sequence: Synthetic oligonucleotide
  Antisense strand to SEQ ID NO: 779694
aucuccagcauucugugcc

SEQ ID NO: 779696 - RNA, 19 nt, Artificial Sequence
  Description of Artificial Sequence: Synthetic oligonucleotide
  Sense strand starting at position 3849 of SEQ ID NO: 587270
agagauggauguggaugaa

SEQ ID NO: 779697 - RNA, 19 nt, Artificial Sequence
  Description of Artificial Sequence: Synthetic oligonucleotide
  Antisense strand to SEQ ID NO: 779696
uucauccacauccaucucu

SEQ ID NO: 779698 - RNA, 19 nt, Artificial Sequence
  Description of Artificial Sequence: Synthetic oligonucleotide
  Sense strand starting at position 3887 of SEQ ID NO: 587270
cuagcagagccuugucauu

SEQ ID NO: 779699 - RNA, 19 nt, Artificial Sequence
  Description of Artificial Sequence: Synthetic oligonucleotide
  Antisense strand to SEQ ID NO: 779698
aaugacaaggcucugcuag

SEQ ID NO: 779700 - RNA, 19 nt, Artificial Sequence
  Description of Artificial Sequence: Synthetic oligonucleotide
  Sense strand starting at position 480 of SEQ ID NO: 587271
ugcauaggaauaugugaua

SEQ ID NO: 779701 - RNA, 19 nt, Artificial Sequence
  Description of Artificial Sequence: Synthetic oligonucleotide
  Antisense strand to SEQ ID NO: 779700
uaucacauauuccuaugca

SEQ ID NO: 779702 - RNA, 19 nt, Artificial Sequence
  Description of Artificial Sequence: Synthetic oligonucleotide
  Sense strand starting at position 483 of SEQ ID NO: 587271
auaggaauaugugauacaa

SEQ ID NO: 779703 - RNA, 19 nt, Artificial Sequence
  Description of Artificial Sequence: Synthetic oligonucleotide
  Antisense strand to SEQ ID NO: 779702
uuguaucacauauuccuau

SEQ ID NO: 779704 - RNA, 19 nt, Artificial Sequence
  Description of Artificial Sequence: Synthetic oligonucleotide
  Sense strand starting at position 491 of SEQ ID NO: 587271
augugauacaaguaacguu

SEQ ID NO: 779705 - RNA, 19 nt, Artificial Sequence
  Description of Artificial Sequence: Synthetic oligonucleotide
  Antisense strand to SEQ ID NO: 779704
aacguuacuuguaucacau

SEQ ID NO: 779706 - RNA, 19 nt, Artificial Sequence
  Description of Artificial Sequence: Synthetic oligonucleotide
  Sense strand starting at position 498 of SEQ ID NO: 587271
acaaguaacguuuaaagac

SEQ ID NO: 779707 - RNA, 19 nt, Artificial Sequence
  Description of Artificial Sequence: Synthetic oligonucleotide
  Antisense strand to SEQ ID NO: 779706
gucuuuaaacguuacuugu

SEQ ID NO: 779708 - RNA, 19 nt, Artificial Sequence
  Description of Artificial Sequence: Synthetic oligonucleotide
  Sense strand starting at position 527 of SEQ ID NO: 587271
auccuaauuuacuguggga

SEQ ID NO: 779709 - RNA, 19 nt, Artificial Sequence
  Description of Artificial Sequence: Synthetic oligonucleotide
  Antisense strand to SEQ ID NO: 779708
ucccacaguaaauuaggau

SEQ ID NO: 779710 - RNA, 19 nt, Artificial Sequence
  Description of Artificial Sequence: Synthetic oligonucleotide
  Sense strand starting at position 530 of SEQ ID NO: 587271
cuaauuuacugugggaaau

SEQ ID NO: 779711 - RNA, 19 nt, Artificial Sequence
  Description of Artificial Sequence: Synthetic oligonucleotide
  Antisense strand to SEQ ID NO: 779710
auuucccacaguaaauuag

SEQ ID NO: 779712 - RNA, 19 nt, Artificial Sequence
  Description of Artificial Sequence: Synthetic oligonucleotide
  Sense strand starting at position 569 of SEQ ID NO: 587271
uggaauauaugacacuuaa

SEQ ID NO: 779713 - RNA, 19 nt, Artificial Sequence
  Description of Artificial Sequence: Synthetic oligonucleotide
  Antisense strand to SEQ ID NO: 779712
uuaagugucauauauucca

SEQ ID NO: 779714 - RNA, 19 nt, Artificial Sequence
  Description of Artificial Sequence: Synthetic oligonucleotide
  Sense strand starting at position 737 of SEQ ID NO: 587271
cugcaugaccuuuaagcau

SEQ ID NO: 779715 - RNA, 19 nt, Artificial Sequence
  Description of Artificial Sequence: Synthetic oligonucleotide
  Antisense strand to SEQ ID NO: 779714
augcuuaaaggucaugcag

SEQ ID NO: 779716 - RNA, 19 nt, Artificial Sequence
  Description of Artificial Sequence: Synthetic oligonucleotide
  Sense strand starting at position 808 of SEQ ID NO: 587271
ccucuuucccaagaguuga

SEQ ID NO: 779717 - RNA, 19 nt, Artificial Sequence
  Description of Artificial Sequence: Synthetic oligonucleotide
  Antisense strand to SEQ ID NO: 779716
ucaacucuugggaaagagg

SEQ ID NO: 779718 - RNA, 19 nt, Artificial Sequence
  Description of Artificial Sequence: Synthetic oligonucleotide
  Sense strand starting at position 883 of SEQ ID NO: 587271
ggaacaaucugaggacaag

SEQ ID NO: 779719 - RNA, 19 nt, Artificial Sequence
  Description of Artificial Sequence: Synthetic oligonucleotide
  Antisense strand to SEQ ID NO: 779718
cuuguccucagauuguucc

SEQ ID NO: 779720 - RNA, 19 nt, Artificial Sequence
  Description of Artificial Sequence: Synthetic oligonucleotide
  Sense strand starting at position 952 of SEQ ID NO: 587271
cagccucguccguuaacuu

SEQ ID NO: 779721 - RNA, 19 nt, Artificial Sequence
  Description of Artificial Sequence: Synthetic oligonucleotide
  Antisense strand to SEQ ID NO: 779720
aaguuaacggacgaggcug

SEQ ID NO: 779722 - RNA, 19 nt, Artificial Sequence
  Description of Artificial Sequence: Synthetic oligonucleotide
  Sense strand starting at position 1117 of SEQ ID NO: 587271
gggcaacuucgagaaaucu

SEQ ID NO: 779723 - RNA, 19 nt, Artificial Sequence
  Description of Artificial Sequence: Synthetic oligonucleotide
  Antisense strand to SEQ ID NO: 779722
agauuucucgaaguugccc

SEQ ID NO: 779724 - RNA, 19 nt, Artificial Sequence
  Description of Artificial Sequence: Synthetic oligonucleotide
  Sense strand starting at position 2365 of SEQ ID NO: 587271
acguguaaacuccaaauaa

SEQ ID NO: 779725 - RNA, 19 nt, Artificial Sequence
  Description of Artificial Sequence: Synthetic oligonucleotide
  Antisense strand to SEQ ID NO: 779724
uuauuuggaguuuacacgu

SEQ ID NO: 779726 - RNA, 19 nt, Artificial Sequence
  Description of Artificial Sequence: Synthetic oligonucleotide
  Sense strand starting at position 2579 of SEQ ID NO: 587271
cuaaucgauuucugggaca

SEQ ID NO: 779727 - RNA, 19 nt, Artificial Sequence
  Description of Artificial Sequence: Synthetic oligonucleotide
  Antisense strand to SEQ ID NO: 779726
ugucccagaaaucgauuag

SEQ ID NO: 779728 - RNA, 19 nt, Artificial Sequence
  Description of Artificial Sequence: Synthetic oligonucleotide
  Sense strand starting at position 2582 of SEQ ID NO: 587271
aucgauuucugggacauga

SEQ ID NO: 779729 - RNA, 19 nt, Artificial Sequence
  Description of Artificial Sequence: Synthetic oligonucleotide
  Antisense strand to SEQ ID NO: 779728
ucaugucccagaaaucgau

SEQ ID NO: 779730 - RNA, 19 nt, Artificial Sequence
  Description of Artificial Sequence: Synthetic oligonucleotide
  Sense strand starting at position 2611 of SEQ ID NO: 587271
cguuuauccuguacgugga

SEQ ID NO: 779731 - RNA, 19 nt, Artificial Sequence
  Description of Artificial Sequence: Synthetic oligonucleotide
  Antisense strand to SEQ ID NO: 779730
uccacguacaggauaaacg

SEQ ID NO: 779732 - RNA, 19 nt, Artificial Sequence
  Description of Artificial Sequence: Synthetic oligonucleotide
  Sense strand starting at position 2618 of SEQ ID NO: 587271
ccuguacguggaugacauu

SEQ ID NO: 779733 - RNA, 19 nt, Artificial Sequence
  Description of Artificial Sequence: Synthetic oligonucleotide
  Antisense strand to SEQ ID NO: 779732
aaugucauccacguacagg

SEQ ID NO: 779734 - RNA, 19 nt, Artificial Sequence
  Description of Artificial Sequence: Synthetic oligonucleotide
  Sense strand starting at position 2686 of SEQ ID NO: 587271
ccagucuccuuggucugau

SEQ ID NO: 779735 - RNA, 19 nt, Artificial Sequence
  Description of Artificial Sequence: Synthetic oligonucleotide
  Antisense strand to SEQ ID NO: 779734
aucagaccaaggagacugg

SEQ ID NO: 779736 - RNA, 19 nt, Artificial Sequence
  Description of Artificial Sequence: Synthetic oligonucleotide
  Sense strand starting at position 2689 of SEQ ID NO: 587271
gucuccuuggucugauuua

SEQ ID NO: 779737 - RNA, 19 nt, Artificial Sequence
  Description of Artificial Sequence: Synthetic oligonucleotide
  Antisense strand to SEQ ID NO: 779736
uaaaucagaccaaggagac

SEQ ID NO: 779738 - RNA, 19 nt, Artificial Sequence
  Description of Artificial Sequence: Synthetic oligonucleotide
  Sense strand starting at position 2703 of SEQ ID NO: 587271
auuuaugagugacauaugu

SEQ ID NO: 779739 - RNA, 19 nt, Artificial Sequence
  Description of Artificial Sequence: Synthetic oligonucleotide
  Antisense strand to SEQ ID NO: 779738
acauaugucacucauaaau

SEQ ID NO: 779740 - RNA, 19 nt, Artificial Sequence
  Description of Artificial Sequence: Synthetic oligonucleotide
  Sense strand starting at position 2764 of SEQ ID NO: 587271
ucuguagaagcuuaagguu

SEQ ID NO: 779741 - RNA, 19 nt, Artificial Sequence
  Description of Artificial Sequence: Synthetic oligonucleotide
  Antisense strand to SEQ ID NO: 779740
aaccuuaagcuucuacaga

SEQ ID NO: 779742 - RNA, 19 nt, Artificial Sequence
  Description of Artificial Sequence: Synthetic oligonucleotide
  Sense strand starting at position 3037 of SEQ ID NO: 587271
uuugucacucucugaauga

SEQ ID NO: 779743 - RNA, 19 nt, Artificial Sequence
  Description of Artificial Sequence: Synthetic oligonucleotide
  Antisense strand to SEQ ID NO: 779742
ucauucagagagugacaaa

SEQ ID NO: 779744 - RNA, 19 nt, Artificial Sequence
  Description of Artificial Sequence: Synthetic oligonucleotide
  Sense strand starting at position 3087 of SEQ ID NO: 587271
cugcaauaccucuguuaga

SEQ ID NO: 779745 - RNA, 19 nt, Artificial Sequence
  Description of Artificial Sequence: Synthetic oligonucleotide
  Antisense strand to SEQ ID NO: 779744
ucuaacagagguauugcag

SEQ ID NO: 779746 - RNA, 19 nt, Artificial Sequence
  Description of Artificial Sequence: Synthetic oligonucleotide
  Sense strand starting at position 3088 of SEQ ID NO: 587271
ugcaauaccucuguuagau

SEQ ID NO: 779747 - RNA, 19 nt, Artificial Sequence
  Description of Artificial Sequence: Synthetic oligonucleotide
  Antisense strand to SEQ ID NO: 779746
aucuaacagagguauugca

SEQ ID NO: 779748 - RNA, 19 nt, Artificial Sequence
  Description of Artificial Sequence: Synthetic oligonucleotide
  Sense strand starting at position 3140 of SEQ ID NO: 587271
agauguuaauggcuaguua

SEQ ID NO: 779749 - RNA, 19 nt, Artificial Sequence
  Description of Artificial Sequence: Synthetic oligonucleotide
  Antisense strand to SEQ ID NO: 779748
uaacuagccauuaacaucu

SEQ ID NO: 779750 - RNA, 19 nt, Artificial Sequence
  Description of Artificial Sequence: Synthetic oligonucleotide
  Sense strand starting at position 3190 of SEQ ID NO: 587271
caagauugaccuuguguug

SEQ ID NO: 779751 - RNA, 19 nt, Artificial Sequence
  Description of Artificial Sequence: Synthetic oligonucleotide
  Antisense strand to SEQ ID NO: 779750
caacacaaggucaaucuug

SEQ ID NO: 779752 - RNA, 19 nt, Artificial Sequence
  Description of Artificial Sequence: Synthetic oligonucleotide
  Sense strand starting at position 3193 of SEQ ID NO: 587271
gauugaccuuguguuggua

SEQ ID NO: 779753 - RNA, 19 nt, Artificial Sequence
  Description of Artificial Sequence: Synthetic oligonucleotide
  Antisense strand to SEQ ID NO: 779752
uaccaacacaaggucaauc

SEQ ID NO: 779754 - RNA, 19 nt, Artificial Sequence
  Description of Artificial Sequence: Synthetic oligonucleotide
  Sense strand starting at position 3197 of SEQ ID NO: 587271
gaccuuguguugguaauua

SEQ ID NO: 779755 - RNA, 19 nt, Artificial Sequence
  Description of Artificial Sequence: Synthetic oligonucleotide
  Antisense strand to SEQ ID NO: 779754
uaauuaccaacacaagguc

SEQ ID NO: 779756 - RNA, 19 nt, Artificial Sequence
  Description of Artificial Sequence: Synthetic oligonucleotide
  Sense strand starting at position 3201 of SEQ ID NO: 587271
uuguguugguaauuauuga

SEQ ID NO: 779757 - RNA, 19 nt, Artificial Sequence
  Description of Artificial Sequence: Synthetic oligonucleotide
  Antisense strand to SEQ ID NO: 779756
ucaauaauuaccaacacaa

SEQ ID NO: 779758 - RNA, 19 nt, Artificial Sequence
  Description of Artificial Sequence: Synthetic oligonucleotide
  Sense strand starting at position 3202 of SEQ ID NO: 587271
uguguugguaauuauugaa

SEQ ID NO: 779759 - RNA, 19 nt, Artificial Sequence
  Description of Artificial Sequence: Synthetic oligonucleotide
  Antisense strand to SEQ ID NO: 779758
uucaauaauuaccaacaca

SEQ ID NO: 779760 - RNA, 19 nt, Artificial Sequence
  Description of Artificial Sequence: Synthetic oligonucleotide
  Sense strand starting at position 3577 of SEQ ID NO: 587271
gaguuucuacagcaguaua

SEQ ID NO: 779761 - RNA, 19 nt, Artificial Sequence
  Description of Artificial Sequence: Synthetic oligonucleotide
  Antisense strand to SEQ ID NO: 779760
uauacugcuguagaaacuc

SEQ ID NO: 779762 - RNA, 19 nt, Artificial Sequence
  Description of Artificial Sequence: Synthetic oligonucleotide
  Sense strand starting at position 3690 of SEQ ID NO: 587271
ccuaaauaugugcaucuga

SEQ ID NO: 779763 - RNA, 19 nt, Artificial Sequence
  Description of Artificial Sequence: Synthetic oligonucleotide
  Antisense strand to SEQ ID NO: 779762
ucagaugcacauauuuagg

SEQ ID NO: 779764 - RNA, 19 nt, Artificial Sequence
  Description of Artificial Sequence: Synthetic oligonucleotide
  Sense strand starting at position 3704 of SEQ ID NO: 587271
ucugaauaauaggagagaa

SEQ ID NO: 779765 - RNA, 19 nt, Artificial Sequence
  Description of Artificial Sequence: Synthetic oligonucleotide
  Antisense strand to SEQ ID NO: 779764
uucucuccuauuauucaga

SEQ ID NO: 779766 - RNA, 19 nt, Artificial Sequence
  Description of Artificial Sequence: Synthetic oligonucleotide
  Sense strand starting at position 3807 of SEQ ID NO: 587271
gaaagaucuucuguccugu

SEQ ID NO: 779767 - RNA, 19 nt, Artificial Sequence
  Description of Artificial Sequence: Synthetic oligonucleotide
  Antisense strand to SEQ ID NO: 779766
acaggacagaagaucuuuc

SEQ ID NO: 779768 - RNA, 19 nt, Artificial Sequence
  Description of Artificial Sequence: Synthetic oligonucleotide
  Sense strand starting at position 3813 of SEQ ID NO: 587271
ucuucuguccuguaaucau

SEQ ID NO: 779769 - RNA, 19 nt, Artificial Sequence
  Description of Artificial Sequence: Synthetic oligonucleotide
  Antisense strand to SEQ ID NO: 779768
augauuacaggacagaaga

SEQ ID NO: 779770 - RNA, 19 nt, Artificial Sequence
  Description of Artificial Sequence: Synthetic oligonucleotide
  Sense strand starting at position 3824 of SEQ ID NO: 587271
guaaucauacuguauugga

SEQ ID NO: 779771 - RNA, 19 nt, Artificial Sequence
  Description of Artificial Sequence: Synthetic oligonucleotide
  Antisense strand to SEQ ID NO: 779770
uccaauacaguaugauuac

SEQ ID NO: 779772 - RNA, 19 nt, Artificial Sequence
  Description of Artificial Sequence: Synthetic oligonucleotide
  Sense strand starting at position 3841 of SEQ ID NO: 587271
gauccagaucuucgaauga

SEQ ID NO: 779773 - RNA, 19 nt, Artificial Sequence
  Description of Artificial Sequence: Synthetic oligonucleotide
  Antisense strand to SEQ ID NO: 779772
ucauucgaagaucuggauc

SEQ ID NO: 779774 - RNA, 19 nt, Artificial Sequence
  Description of Artificial Sequence: Synthetic oligonucleotide
  Sense strand starting at position 3978 of SEQ ID NO: 587271
cacauauaucgugacugau

SEQ ID NO: 779775 - RNA, 19 nt, Artificial Sequence
  Description of Artificial Sequence: Synthetic oligonucleotide
  Antisense strand to SEQ ID NO: 779774
aucagucacgauauaugug

SEQ ID NO: 779776 - RNA, 19 nt, Artificial Sequence
  Description of Artificial Sequence: Synthetic oligonucleotide
  Sense strand starting at position 3980 of SEQ ID NO: 587271
cauauaucgugacugauau

SEQ ID NO: 779777 - RNA, 19 nt, Artificial Sequence
  Description of Artificial Sequence: Synthetic oligonucleotide
  Antisense strand to SEQ ID NO: 779776
auaucagucacgauauaug

SEQ ID NO: 779778 - RNA, 19 nt, Artificial Sequence
  Description of Artificial Sequence: Synthetic oligonucleotide
  Sense strand starting at position 3981 of SEQ ID NO: 587271
auauaucgugacugauauc

SEQ ID NO: 779779 - RNA, 19 nt, Artificial Sequence
  Description of Artificial Sequence: Synthetic oligonucleotide
  Antisense strand to SEQ ID NO: 779778
gauaucagucacgauauau

SEQ ID NO: 779780 - RNA, 19 nt, Artificial Sequence
  Description of Artificial Sequence: Synthetic oligonucleotide
  Sense strand starting at position 78 of SEQ ID NO: 587272
ugccuuugccaucgacauu

SEQ ID NO: 779781 - RNA, 19 nt, Artificial Sequence
  Description of Artificial Sequence: Synthetic oligonucleotide
  Antisense strand to SEQ ID NO: 779780
aaugucgauggcaaaggca

SEQ ID NO: 779782 - RNA, 19 nt, Artificial Sequence
  Description of Artificial Sequence: Synthetic oligonucleotide
  Sense strand starting at position 381 of SEQ ID NO: 587272
gcagacgccuccucauuua

SEQ ID NO: 779783 - RNA, 19 nt, Artificial Sequence
  Description of Artificial Sequence: Synthetic oligonucleotide
  Antisense strand to SEQ ID NO: 779782
uaaaugaggaggcgucugc

SEQ ID NO: 779784 - RNA, 19 nt, Artificial Sequence
  Description of Artificial Sequence: Synthetic oligonucleotide
  Sense strand starting at position 411 of SEQ ID NO: 587272
accaacgauugaucaguaa

SEQ ID NO: 779785 - RNA, 19 nt, Artificial Sequence
  Description of Artificial Sequence: Synthetic oligonucleotide
  Antisense strand to SEQ ID NO: 779784
uuacugaucaaucguuggu

SEQ ID NO: 779786 - RNA, 19 nt, Artificial Sequence
  Description of Artificial Sequence: Synthetic oligonucleotide
  Sense strand starting at position 414 of SEQ ID NO: 587272
aacgauugaucaguaaauu

SEQ ID NO: 779787 - RNA, 19 nt, Artificial Sequence
  Description of Artificial Sequence: Synthetic oligonucleotide
  Antisense strand to SEQ ID NO: 779786
aauuuacugaucaaucguu

SEQ ID NO: 779788 - RNA, 19 nt, Artificial Sequence
  Description of Artificial Sequence: Synthetic oligonucleotide
  Sense strand starting at position 443 of SEQ ID NO: 587272
gcugaagagucacaggaau

SEQ ID NO: 779789 - RNA, 19 nt, Artificial Sequence
  Description of Artificial Sequence: Synthetic oligonucleotide
  Antisense strand to SEQ ID NO: 779788
auuccugugacucuucagc

SEQ ID NO: 779790 - RNA, 19 nt, Artificial Sequence
  Description of Artificial Sequence: Synthetic oligonucleotide
  Sense strand starting at position 949 of SEQ ID NO: 587272
gaagcaguugaaugcagaa

SEQ ID NO: 779791 - RNA, 19 nt, Artificial Sequence
  Description of Artificial Sequence: Synthetic oligonucleotide
  Antisense strand to SEQ ID NO: 779790
uucugcauucaacugcuuc

SEQ ID NO: 779792 - RNA, 19 nt, Artificial Sequence
  Description of Artificial Sequence: Synthetic oligonucleotide
  Sense strand starting at position 951 of SEQ ID NO: 587272
agcaguugaaugcagaauu

SEQ ID NO: 779793 - RNA, 19 nt, Artificial Sequence
  Description of Artificial Sequence: Synthetic oligonucleotide
  Antisense strand to SEQ ID NO: 779792
aauucugcauucaacugcu

SEQ ID NO: 779794 - RNA, 19 nt, Artificial Sequence
  Description of Artificial Sequence: Synthetic oligonucleotide
  Sense strand starting at position 985 of SEQ ID NO: 587272
uuccuaauaguuuacaagu

SEQ ID NO: 779795 - RNA, 19 nt, Artificial Sequence
  Description of Artificial Sequence: Synthetic oligonucleotide
  Antisense strand to SEQ ID NO: 779794
acuuguaaacuauuaggaa

SEQ ID NO: 779796 - RNA, 19 nt, Artificial Sequence
  Description of Artificial Sequence: Synthetic oligonucleotide
  Sense strand starting at position 1014 of SEQ ID NO: 587272
guacgaccugcauguauua

SEQ ID NO: 779797 - RNA, 19 nt, Artificial Sequence
  Description of Artificial Sequence: Synthetic oligonucleotide
  Antisense strand to SEQ ID NO: 779796
uaauacaugcaggucguac

SEQ ID NO: 779798 - RNA, 19 nt, Artificial Sequence
  Description of Artificial Sequence: Synthetic oligonucleotide
  Sense strand starting at position 1091 of SEQ ID NO: 587272
ugguauucagucggcuaca

SEQ ID NO: 779799 - RNA, 19 nt, Artificial Sequence
  Description of Artificial Sequence: Synthetic oligonucleotide
  Antisense strand to SEQ ID NO: 779798
uguagccgacugaauacca

SEQ ID NO: 779800 - RNA, 19 nt, Artificial Sequence
  Description of Artificial Sequence: Synthetic oligonucleotide
  Sense strand starting at position 1171 of SEQ ID NO: 587272
gaccguuuaguccaagggu

SEQ ID NO: 779801 - RNA, 19 nt, Artificial Sequence
  Description of Artificial Sequence: Synthetic oligonucleotide
  Antisense strand to SEQ ID NO: 779800
acccuuggacuaaacgguc

SEQ ID NO: 779802 - RNA, 19 nt, Artificial Sequence
  Description of Artificial Sequence: Synthetic oligonucleotide
  Sense strand starting at position 1174 of SEQ ID NO: 587272
cguuuaguccaagggugga

SEQ ID NO: 779803 - RNA, 19 nt, Artificial Sequence
  Description of Artificial Sequence: Synthetic oligonucleotide
  Antisense strand to SEQ ID NO: 779802
uccacccuuggacuaaacg

SEQ ID NO: 779804 - RNA, 19 nt, Artificial Sequence
  Description of Artificial Sequence: Synthetic oligonucleotide
  Sense strand starting at position 1243 of SEQ ID NO: 587272
gagccaggaugaguugaau

SEQ ID NO: 779805 - RNA, 19 nt, Artificial Sequence
  Description of Artificial Sequence: Synthetic oligonucleotide
  Antisense strand to SEQ ID NO: 779804
auucaacucauccuggcuc

SEQ ID NO: 779806 - RNA, 19 nt, Artificial Sequence
  Description of Artificial Sequence: Synthetic oligonucleotide
  Sense strand starting at position 1399 of SEQ ID NO: 587272
gagcaacagugaguucuaa

SEQ ID NO: 779807 - RNA, 19 nt, Artificial Sequence
  Description of Artificial Sequence: Synthetic oligonucleotide
  Antisense strand to SEQ ID NO: 779806
uuagaacucacuguugcuc

SEQ ID NO: 779808 - RNA, 19 nt, Artificial Sequence
  Description of Artificial Sequence: Synthetic oligonucleotide
  Sense strand starting at position 1467 of SEQ ID NO: 587272
augucuaucccaugagcau

SEQ ID NO: 779809 - RNA, 19 nt, Artificial Sequence
  Description of Artificial Sequence: Synthetic oligonucleotide
  Antisense strand to SEQ ID NO: 779808
augcucaugggauagacau

SEQ ID NO: 779810 - RNA, 19 nt, Artificial Sequence
  Description of Artificial Sequence: Synthetic oligonucleotide
  Sense strand starting at position 1468 of SEQ ID NO: 587272
ugucuaucccaugagcaua

SEQ ID NO: 779811 - RNA, 19 nt, Artificial Sequence
  Description of Artificial Sequence: Synthetic oligonucleotide
  Antisense strand to SEQ ID NO: 779810
uaugcucaugggauagaca

SEQ ID NO: 779812 - RNA, 19 nt, Artificial Sequence
  Description of Artificial Sequence: Synthetic oligonucleotide
  Sense strand starting at position 2608 of SEQ ID NO: 587272
agagccuuaaguugggaaa

SEQ ID NO: 779813 - RNA, 19 nt, Artificial Sequence
  Description of Artificial Sequence: Synthetic oligonucleotide
  Antisense strand to SEQ ID NO: 779812
uuucccaacuuaaggcucu

SEQ ID NO: 779814 - RNA, 19 nt, Artificial Sequence
  Description of Artificial Sequence: Synthetic oligonucleotide
  Sense strand starting at position 2664 of SEQ ID NO: 587272
cagcgaaguuucccuggga

SEQ ID NO: 779815 - RNA, 19 nt, Artificial Sequence
  Description of Artificial Sequence: Synthetic oligonucleotide
  Antisense strand to SEQ ID NO: 779814
ucccagggaaacuucgcug

SEQ ID NO: 779816 - RNA, 19 nt, Artificial Sequence
  Description of Artificial Sequence: Synthetic oligonucleotide
  Sense strand starting at position 2665 of SEQ ID NO: 587272
agcgaaguuucccugggau

SEQ ID NO: 779817 - RNA, 19 nt, Artificial Sequence
  Description of Artificial Sequence: Synthetic oligonucleotide
  Antisense strand to SEQ ID NO: 779816
aucccagggaaacuucgcu

SEQ ID NO: 779818 - RNA, 19 nt, Artificial Sequence
  Description of Artificial Sequence: Synthetic oligonucleotide
  Sense strand starting at position 2861 of SEQ ID NO: 587272
ggacuuggcacgugaagug

SEQ ID NO: 779819 - RNA, 19 nt, Artificial Sequence
  Description of Artificial Sequence: Synthetic oligonucleotide
  Antisense strand to SEQ ID NO: 779818
cacuucacgugccaagucc

SEQ ID NO: 779820 - RNA, 19 nt, Artificial Sequence
  Description of Artificial Sequence: Synthetic oligonucleotide
  Sense strand starting at position 2921 of SEQ ID NO: 587272
guaagacgucaugaagcuu

SEQ ID NO: 779821 - RNA, 19 nt, Artificial Sequence
  Description of Artificial Sequence: Synthetic oligonucleotide
  Antisense strand to SEQ ID NO: 779820
aagcuucaugacgucuuac

SEQ ID NO: 779822 - RNA, 19 nt, Artificial Sequence
  Description of Artificial Sequence: Synthetic oligonucleotide
  Sense strand starting at position 3020 of SEQ ID NO: 587272
ucuuuauucguguuucugu

SEQ ID NO: 779823 - RNA, 19 nt, Artificial Sequence
  Description of Artificial Sequence: Synthetic oligonucleotide
  Antisense strand to SEQ ID NO: 779822
acagaaacacgaauaaaga

SEQ ID NO: 779824 - RNA, 19 nt, Artificial Sequence
  Description of Artificial Sequence: Synthetic oligonucleotide
  Sense strand starting at position 3028 of SEQ ID NO: 587272
cguguuucugucuucaguu

SEQ ID NO: 779825 - RNA, 19 nt, Artificial Sequence
  Description of Artificial Sequence: Synthetic oligonucleotide
  Antisense strand to SEQ ID NO: 779824
aacugaagacagaaacacg

SEQ ID NO: 779826 - RNA, 19 nt, Artificial Sequence
  Description of Artificial Sequence: Synthetic oligonucleotide
  Sense strand starting at position 3052 of SEQ ID NO: 587272
gcagcaggcuuguuuacau

SEQ ID NO: 779827 - RNA, 19 nt, Artificial Sequence
  Description of Artificial Sequence: Synthetic oligonucleotide
  Antisense strand to SEQ ID NO: 779826
auguaaacaagccugcugc

SEQ ID NO: 779828 - RNA, 19 nt, Artificial Sequence
  Description of Artificial Sequence: Synthetic oligonucleotide
  Sense strand starting at position 3059 of SEQ ID NO: 587272
gcuuguuuacaugguccga

SEQ ID NO: 779829 - RNA, 19 nt, Artificial Sequence
  Description of Artificial Sequence: Synthetic oligonucleotide
  Antisense strand to SEQ ID NO: 779828
ucggaccauguaaacaagc

SEQ ID NO: 779830 - RNA, 19 nt, Artificial Sequence
  Description of Artificial Sequence: Synthetic oligonucleotide
  Sense strand starting at position 3105 of SEQ ID NO: 587272
gcagaaguaaaucagugau

SEQ ID NO: 779831 - RNA, 19 nt, Artificial Sequence
  Description of Artificial Sequence: Synthetic oligonucleotide
  Antisense strand to SEQ ID NO: 779830
aucacugauuuacuucugc

SEQ ID NO: 779832 - RNA, 19 nt, Artificial Sequence
  Description of Artificial Sequence: Synthetic oligonucleotide
  Sense strand starting at position 3107 of SEQ ID NO: 587272
agaaguaaaucagugauug

SEQ ID NO: 779833 - RNA, 19 nt, Artificial Sequence
  Description of Artificial Sequence: Synthetic oligonucleotide
  Antisense strand to SEQ ID NO: 779832
caaucacugauuuacuucu

SEQ ID NO: 779834 - RNA, 19 nt, Artificial Sequence
  Description of Artificial Sequence: Synthetic oligonucleotide
  Sense strand starting at position 3108 of SEQ ID NO: 587272
gaaguaaaucagugauugu

SEQ ID NO: 779835 - RNA, 19 nt, Artificial Sequence
  Description of Artificial Sequence: Synthetic oligonucleotide
  Antisense strand to SEQ ID NO: 779834
acaaucacugauuuacuuc

SEQ ID NO: 779836 - RNA, 19 nt, Artificial Sequence
  Description of Artificial Sequence: Synthetic oligonucleotide
  Sense strand starting at position 3115 of SEQ ID NO: 587272
aucagugauugucuggagu

SEQ ID NO: 779837 - RNA, 19 nt, Artificial Sequence
  Description of Artificial Sequence: Synthetic oligonucleotide
  Antisense strand to SEQ ID NO: 779836
acuccagacaaucacugau

SEQ ID NO: 779838 - RNA, 19 nt, Artificial Sequence
  Description of Artificial Sequence: Synthetic oligonucleotide
  Sense strand starting at position 3119 of SEQ ID NO: 587272
gugauugucuggaguugga

SEQ ID NO: 779839 - RNA, 19 nt, Artificial Sequence
  Description of Artificial Sequence: Synthetic oligonucleotide
  Antisense strand to SEQ ID NO: 779838
uccaacuccagacaaucac

SEQ ID NO: 779840 - RNA, 19 nt, Artificial Sequence
  Description of Artificial Sequence: Synthetic oligonucleotide
  Sense strand starting at position 3122 of SEQ ID NO: 587272
auugucuggaguuggagau

SEQ ID NO: 779841 - RNA, 19 nt, Artificial Sequence
  Description of Artificial Sequence: Synthetic oligonucleotide
  Antisense strand to SEQ ID NO: 779840
aucuccaacuccagacaau

SEQ ID NO: 779842 - RNA, 19 nt, Artificial Sequence
  Description of Artificial Sequence: Synthetic oligonucleotide
  Sense strand starting at position 3250 of SEQ ID NO: 587272
gggugacucuugcuuguaa

SEQ ID NO: 779843 - RNA, 19 nt, Artificial Sequence
  Description of Artificial Sequence: Synthetic oligonucleotide
  Antisense strand to SEQ ID NO: 779842
uuacaagcaagagucaccc

SEQ ID NO: 779844 - RNA, 19 nt, Artificial Sequence
  Description of Artificial Sequence: Synthetic oligonucleotide
  Sense strand starting at position 3675 of SEQ ID NO: 587272
ugcuguuaggaaugaagaa

SEQ ID NO: 779845 - RNA, 19 nt, Artificial Sequence
  Description of Artificial Sequence: Synthetic oligonucleotide
  Antisense strand to SEQ ID NO: 779844
uucuucauuccuaacagca

SEQ ID NO: 779846 - RNA, 19 nt, Artificial Sequence
  Description of Artificial Sequence: Synthetic oligonucleotide
  Sense strand starting at position 3767 of SEQ ID NO: 587272
ccuacagaguguuuggaaa

SEQ ID NO: 779847 - RNA, 19 nt, Artificial Sequence
  Description of Artificial Sequence: Synthetic oligonucleotide
  Antisense strand to SEQ ID NO: 779846
uuuccaaacacucuguagg

SEQ ID NO: 779848 - RNA, 19 nt, Artificial Sequence
  Description of Artificial Sequence: Synthetic oligonucleotide
  Sense strand starting at position 3796 of SEQ ID NO: 587272
acuggaaaucuuugcucuu

SEQ ID NO: 779849 - RNA, 19 nt, Artificial Sequence
  Description of Artificial Sequence: Synthetic oligonucleotide
  Antisense strand to SEQ ID NO: 779848
aagagcaaagauuuccagu

SEQ ID NO: 779850 - RNA, 19 nt, Artificial Sequence
  Description of Artificial Sequence: Synthetic oligonucleotide
  Sense strand starting at position 3798 of SEQ ID NO: 587272
uggaaaucuuugcucuugu

SEQ ID NO: 779851 - RNA, 19 nt, Artificial Sequence
  Description of Artificial Sequence: Synthetic oligonucleotide
  Antisense strand to SEQ ID NO: 779850
acaagagcaaagauuucca

SEQ ID NO: 779852 - RNA, 19 nt, Artificial Sequence
  Description of Artificial Sequence: Synthetic oligonucleotide
  Sense strand starting at position 3799 of SEQ ID NO: 587272
ggaaaucuuugcucuuguu

SEQ ID NO: 779853 - RNA, 19 nt, Artificial Sequence
  Description of Artificial Sequence: Synthetic oligonucleotide
  Antisense strand to SEQ ID NO: 779852
aacaagagcaaagauuucc

SEQ ID NO: 779854 - RNA, 19 nt, Artificial Sequence
  Description of Artificial Sequence: Synthetic oligonucleotide
  Sense strand starting at position 3816 of SEQ ID NO: 587272
uuagaaacacuuuguguuu

SEQ ID NO: 779855 - RNA, 19 nt, Artificial Sequence
  Description of Artificial Sequence: Synthetic oligonucleotide
  Antisense strand to SEQ ID NO: 779854
aaacacaaaguguuucuaa

SEQ ID NO: 779856 - RNA, 19 nt, Artificial Sequence
  Description of Artificial Sequence: Synthetic oligonucleotide
  Sense strand starting at position 3828 of SEQ ID NO: 587272
uguguuugucccgcugaca

SEQ ID NO: 779857 - RNA, 19 nt, Artificial Sequence
  Description of Artificial Sequence: Synthetic oligonucleotide
  Antisense strand to SEQ ID NO: 779856
ugucagcgggacaaacaca

SEQ ID NO: 779858 - RNA, 19 nt, Artificial Sequence
  Description of Artificial Sequence: Synthetic oligonucleotide
  Sense strand starting at position 3942 of SEQ ID NO: 587272
uggauucuugugcaaagga

SEQ ID NO: 779859 - RNA, 19 nt, Artificial Sequence
  Description of Artificial Sequence: Synthetic oligonucleotide
  Antisense strand to SEQ ID NO: 779858
uccuuugcacaagaaucca

SEQ ID NO: 779860 - RNA, 19 nt, Artificial Sequence
  Description of Artificial Sequence: Synthetic oligonucleotide
  Sense strand starting at position 728 of SEQ ID NO: 587273
gggaauauguuaccucugu

SEQ ID NO: 779861 - RNA, 19 nt, Artificial Sequence
  Description of Artificial Sequence: Synthetic oligonucleotide
  Antisense strand to SEQ ID NO: 779860
acagagguaacauauuccc

SEQ ID NO: 779862 - RNA, 19 nt, Artificial Sequence
  Description of Artificial Sequence: Synthetic oligonucleotide
  Sense strand starting at position 729 of SEQ ID NO: 587273
ggaauauguuaccucugua

SEQ ID NO: 779863 - RNA, 19 nt, Artificial Sequence
  Description of Artificial Sequence: Synthetic oligonucleotide
  Antisense strand to SEQ ID NO: 779862
uacagagguaacauauucc

SEQ ID NO: 779864 - RNA, 19 nt, Artificial Sequence
  Description of Artificial Sequence: Synthetic oligonucleotide
  Sense strand starting at position 732 of SEQ ID NO: 587273
auauguuaccucuguaaga

SEQ ID NO: 779865 - RNA, 19 nt, Artificial Sequence
  Description of Artificial Sequence: Synthetic oligonucleotide
  Antisense strand to SEQ ID NO: 779864
ucuuacagagguaacauau

SEQ ID NO: 779866 - RNA, 19 nt, Artificial Sequence
  Description of Artificial Sequence: Synthetic oligonucleotide
  Sense strand starting at position 734 of SEQ ID NO: 587273
auguuaccucuguaagaua

SEQ ID NO: 779867 - RNA, 19 nt, Artificial Sequence
  Description of Artificial Sequence: Synthetic oligonucleotide
  Antisense strand to SEQ ID NO: 779866
uaucuuacagagguaacau

SEQ ID NO: 779868 - RNA, 19 nt, Artificial Sequence
  Description of Artificial Sequence: Synthetic oligonucleotide
  Sense strand starting at position 919 of SEQ ID NO: 587273
aaagguuaggacugcauua

SEQ ID NO: 779869 - RNA, 19 nt, Artificial Sequence
  Description of Artificial Sequence: Synthetic oligonucleotide
  Antisense strand to SEQ ID NO: 779868
uaaugcaguccuaaccuuu

SEQ ID NO: 779870 - RNA, 19 nt, Artificial Sequence
  Description of Artificial Sequence: Synthetic oligonucleotide
  Sense strand starting at position 1033 of SEQ ID NO: 587273
ggaguuucccucuauaguc

SEQ ID NO: 779871 - RNA, 19 nt, Artificial Sequence
  Description of Artificial Sequence: Synthetic oligonucleotide
  Antisense strand to SEQ ID NO: 779870
gacuauagagggaaacucc

SEQ ID NO: 779872 - RNA, 19 nt, Artificial Sequence
  Description of Artificial Sequence: Synthetic oligonucleotide
  Sense strand starting at position 1196 of SEQ ID NO: 587273
ggcacuugucucguuacgu

SEQ ID NO: 779873 - RNA, 19 nt, Artificial Sequence
  Description of Artificial Sequence: Synthetic oligonucleotide
  Antisense strand to SEQ ID NO: 779872
acguaacgagacaagugcc

SEQ ID NO: 779874 - RNA, 19 nt, Artificial Sequence
  Description of Artificial Sequence: Synthetic oligonucleotide
  Sense strand starting at position 1202 of SEQ ID NO: 587273
ugucucguuacguuaccaa

SEQ ID NO: 779875 - RNA, 19 nt, Artificial Sequence
  Description of Artificial Sequence: Synthetic oligonucleotide
  Antisense strand to SEQ ID NO: 779874
uugguaacguaacgagaca

SEQ ID NO: 779876 - RNA, 19 nt, Artificial Sequence
  Description of Artificial Sequence: Synthetic oligonucleotide
  Sense strand starting at position 1402 of SEQ ID NO: 587273
ggguaauaauaccugcuau

SEQ ID NO: 779877 - RNA, 19 nt, Artificial Sequence
  Description of Artificial Sequence: Synthetic oligonucleotide
  Antisense strand to SEQ ID NO: 779876
auagcagguauuauuaccc

SEQ ID NO: 779878 - RNA, 19 nt, Artificial Sequence
  Description of Artificial Sequence: Synthetic oligonucleotide
  Sense strand starting at position 1514 of SEQ ID NO: 587273
ccaucuaugcccgauacua

SEQ ID NO: 779879 - RNA, 19 nt, Artificial Sequence
  Description of Artificial Sequence: Synthetic oligonucleotide
  Antisense strand to SEQ ID NO: 779878
uaguaucgggcauagaugg

SEQ ID NO: 779880 - RNA, 19 nt, Artificial Sequence
  Description of Artificial Sequence: Synthetic oligonucleotide
  Sense strand starting at position 1516 of SEQ ID NO: 587273
aucuaugcccgauacuaag

SEQ ID NO: 779881 - RNA, 19 nt, Artificial Sequence
  Description of Artificial Sequence: Synthetic oligonucleotide
  Antisense strand to SEQ ID NO: 779880
cuuaguaucgggcauagau

SEQ ID NO: 779882 - RNA, 19 nt, Artificial Sequence
  Description of Artificial Sequence: Synthetic oligonucleotide
  Sense strand starting at position 1707 of SEQ ID NO: 587273
ccacaaguaccucggagau

SEQ ID NO: 779883 - RNA, 19 nt, Artificial Sequence
  Description of Artificial Sequence: Synthetic oligonucleotide
  Antisense strand to SEQ ID NO: 779882
aucuccgagguacuugugg

SEQ ID NO: 779884 - RNA, 19 nt, Artificial Sequence
  Description of Artificial Sequence: Synthetic oligonucleotide
  Sense strand starting at position 1804 of SEQ ID NO: 587273
gcgaauagugcgagucuuc

SEQ ID NO: 779885 - RNA, 19 nt, Artificial Sequence
  Description of Artificial Sequence: Synthetic oligonucleotide
  Antisense strand to SEQ ID NO: 779884
gaagacucgcacuauucgc

SEQ ID NO: 779886 - RNA, 19 nt, Artificial Sequence
  Description of Artificial Sequence: Synthetic oligonucleotide
  Sense strand starting at position 2162 of SEQ ID NO: 587273
gguugaauuugggaaaguu

SEQ ID NO: 779887 - RNA, 19 nt, Artificial Sequence
  Description of Artificial Sequence: Synthetic oligonucleotide
  Antisense strand to SEQ ID NO: 779886
aacuuucccaaauucaacc

SEQ ID NO: 779888 - RNA, 19 nt, Artificial Sequence
  Description of Artificial Sequence: Synthetic oligonucleotide
  Sense strand starting at position 2266 of SEQ ID NO: 587273
guugguaaugaauguuuaa

SEQ ID NO: 779889 - RNA, 19 nt, Artificial Sequence
  Description of Artificial Sequence: Synthetic oligonucleotide
  Antisense strand to SEQ ID NO: 779888
uuaaacauucauuaccaac

SEQ ID NO: 779890 - RNA, 19 nt, Artificial Sequence
  Description of Artificial Sequence: Synthetic oligonucleotide
  Sense strand starting at position 2269 of SEQ ID NO: 587273
gguaaugaauguuuaauug

SEQ ID NO: 779891 - RNA, 19 nt, Artificial Sequence
  Description of Artificial Sequence: Synthetic oligonucleotide
  Antisense strand to SEQ ID NO: 779890
caauuaaacauucauuacc

SEQ ID NO: 779892 - RNA, 19 nt, Artificial Sequence
  Description of Artificial Sequence: Synthetic oligonucleotide
  Sense strand starting at position 2277 of SEQ ID NO: 587273
auguuuaauuggccauaga

SEQ ID NO: 779893 - RNA, 19 nt, Artificial Sequence
  Description of Artificial Sequence: Synthetic oligonucleotide
  Antisense strand to SEQ ID NO: 779892
ucuauggccaauuaaacau

SEQ ID NO: 779894 - RNA, 19 nt, Artificial Sequence
  Description of Artificial Sequence: Synthetic oligonucleotide
  Sense strand starting at position 2278 of SEQ ID NO: 587273
uguuuaauuggccauagaa

SEQ ID NO: 779895 - RNA, 19 nt, Artificial Sequence
  Description of Artificial Sequence: Synthetic oligonucleotide
  Antisense strand to SEQ ID NO: 779894
uucuauggccaauuaaaca

SEQ ID NO: 779896 - RNA, 19 nt, Artificial Sequence
  Description of Artificial Sequence: Synthetic oligonucleotide
  Sense strand starting at position 2969 of SEQ ID NO: 587273
cuaagagacugcuuucuca

SEQ ID NO: 779897 - RNA, 19 nt, Artificial Sequence
  Description of Artificial Sequence: Synthetic oligonucleotide
  Antisense strand to SEQ ID NO: 779896
ugagaaagcagucucuuag

SEQ ID NO: 779898 - RNA, 19 nt, Artificial Sequence
  Description of Artificial Sequence: Synthetic oligonucleotide
  Sense strand starting at position 2973 of SEQ ID NO: 587273
gagacugcuuucucagagu

SEQ ID NO: 779899 - RNA, 19 nt, Artificial Sequence
  Description of Artificial Sequence: Synthetic oligonucleotide
  Antisense strand to SEQ ID NO: 779898
acucugagaaagcagucuc

SEQ ID NO: 779900 - RNA, 19 nt, Artificial Sequence
  Description of Artificial Sequence: Synthetic oligonucleotide
  Sense strand starting at position 2981 of SEQ ID NO: 587273
uuucucagagugugagaau

SEQ ID NO: 779901 - RNA, 19 nt, Artificial Sequence
  Description of Artificial Sequence: Synthetic oligonucleotide
  Antisense strand to SEQ ID NO: 779900
auucucacacucugagaaa

SEQ ID NO: 779902 - RNA, 19 nt, Artificial Sequence
  Description of Artificial Sequence: Synthetic oligonucleotide
  Sense strand starting at position 3139 of SEQ ID NO: 587273
acauuaaucguggguggga

SEQ ID NO: 779903 - RNA, 19 nt, Artificial Sequence
  Description of Artificial Sequence: Synthetic oligonucleotide
  Antisense strand to SEQ ID NO: 779902
ucccacccacgauuaaugu

SEQ ID NO: 779904 - RNA, 19 nt, Artificial Sequence
  Description of Artificial Sequence: Synthetic oligonucleotide
  Sense strand starting at position 3140 of SEQ ID NO: 587273
cauuaaucgugggugggau

SEQ ID NO: 779905 - RNA, 19 nt, Artificial Sequence
  Description of Artificial Sequence: Synthetic oligonucleotide
  Antisense strand to SEQ ID NO: 779904
aucccacccacgauuaaug

SEQ ID NO: 779906 - RNA, 19 nt, Artificial Sequence
  Description of Artificial Sequence: Synthetic oligonucleotide
  Sense strand starting at position 3223 of SEQ ID NO: 587273
cuuauuucuggcugucuga

SEQ ID NO: 779907 - RNA, 19 nt, Artificial Sequence
  Description of Artificial Sequence: Synthetic oligonucleotide
  Antisense strand to SEQ ID NO: 779906
ucagacagccagaaauaag

SEQ ID NO: 779908 - RNA, 19 nt, Artificial Sequence
  Description of Artificial Sequence: Synthetic oligonucleotide
  Sense strand starting at position 3325 of SEQ ID NO: 587273
acauucuuauuuggaugaa

SEQ ID NO: 779909 - RNA, 19 nt, Artificial Sequence
  Description of Artificial Sequence: Synthetic oligonucleotide
  Antisense strand to SEQ ID NO: 779908
uucauccaaauaagaaugu

SEQ ID NO: 779910 - RNA, 19 nt, Artificial Sequence
  Description of Artificial Sequence: Synthetic oligonucleotide
  Sense strand starting at position 3340 of SEQ ID NO: 587273
ugaagaaagugucccugaa

SEQ ID NO: 779911 - RNA, 19 nt, Artificial Sequence
  Description of Artificial Sequence: Synthetic oligonucleotide
  Antisense strand to SEQ ID NO: 779910
uucagggacacuuucuuca

SEQ ID NO: 779912 - RNA, 19 nt, Artificial Sequence
  Description of Artificial Sequence: Synthetic oligonucleotide
  Sense strand starting at position 3342 of SEQ ID NO: 587273
aagaaagugucccugaaag

SEQ ID NO: 779913 - RNA, 19 nt, Artificial Sequence
  Description of Artificial Sequence: Synthetic oligonucleotide
  Antisense strand to SEQ ID NO: 779912
cuuucagggacacuuucuu

SEQ ID NO: 779914 - RNA, 19 nt, Artificial Sequence
  Description of Artificial Sequence: Synthetic oligonucleotide
  Sense strand starting at position 3376 of SEQ ID NO: 587273
ugggaacaguuccuugcau

SEQ ID NO: 779915 - RNA, 19 nt, Artificial Sequence
  Description of Artificial Sequence: Synthetic oligonucleotide
  Antisense strand to SEQ ID NO: 779914
augcaaggaacuguuccca

SEQ ID NO: 779916 - RNA, 19 nt, Artificial Sequence
  Description of Artificial Sequence: Synthetic oligonucleotide
  Sense strand starting at position 3378 of SEQ ID NO: 587273
ggaacaguuccuugcauga

SEQ ID NO: 779917 - RNA, 19 nt, Artificial Sequence
  Description of Artificial Sequence: Synthetic oligonucleotide
  Antisense strand to SEQ ID NO: 779916
ucaugcaaggaacuguucc

SEQ ID NO: 779918 - RNA, 19 nt, Artificial Sequence
  Description of Artificial Sequence: Synthetic oligonucleotide
  Sense strand starting at position 3383 of SEQ ID NO: 587273
aguuccuugcaugaucaca

SEQ ID NO: 779919 - RNA, 19 nt, Artificial Sequence
  Description of Artificial Sequence: Synthetic oligonucleotide
  Antisense strand to SEQ ID NO: 779918
ugugaucaugcaaggaacu

SEQ ID NO: 779920 - RNA, 19 nt, Artificial Sequence
  Description of Artificial Sequence: Synthetic oligonucleotide
  Sense strand starting at position 3436 of SEQ ID NO: 587273
ugugcagaucuugaaccua

SEQ ID NO: 779921 - RNA, 19 nt, Artificial Sequence
  Description of Artificial Sequence: Synthetic oligonucleotide
  Antisense strand to SEQ ID NO: 779920
uagguucaagaucugcaca

SEQ ID NO: 779922 - RNA, 19 nt, Artificial Sequence
  Description of Artificial Sequence: Synthetic oligonucleotide
  Sense strand starting at position 3513 of SEQ ID NO: 587273
ugaaauccugccugaccca

SEQ ID NO: 779923 - RNA, 19 nt, Artificial Sequence
  Description of Artificial Sequence: Synthetic oligonucleotide
  Antisense strand to SEQ ID NO: 779922
ugggucaggcaggauuuca

SEQ ID NO: 779924 - RNA, 19 nt, Artificial Sequence
  Description of Artificial Sequence: Synthetic oligonucleotide
  Sense strand starting at position 3589 of SEQ ID NO: 587273
ggagaaagcugguugucuu

SEQ ID NO: 779925 - RNA, 19 nt, Artificial Sequence
  Description of Artificial Sequence: Synthetic oligonucleotide
  Antisense strand to SEQ ID NO: 779924
aagacaaccagcuuucucc

SEQ ID NO: 779926 - RNA, 19 nt, Artificial Sequence
  Description of Artificial Sequence: Synthetic oligonucleotide
  Sense strand starting at position 3596 of SEQ ID NO: 587273
gcugguugucuuucccagu

SEQ ID NO: 779927 - RNA, 19 nt, Artificial Sequence
  Description of Artificial Sequence: Synthetic oligonucleotide
  Antisense strand to SEQ ID NO: 779926
acugggaaagacaaccagc

SEQ ID NO: 779928 - RNA, 19 nt, Artificial Sequence
  Description of Artificial Sequence: Synthetic oligonucleotide
  Sense strand starting at position 3711 of SEQ ID NO: 587273
cuacuaagauguguaaguu

SEQ ID NO: 779929 - RNA, 19 nt, Artificial Sequence
  Description of Artificial Sequence: Synthetic oligonucleotide
  Antisense strand to SEQ ID NO: 779928
aacuuacacaucuuaguag

SEQ ID NO: 779930 - RNA, 19 nt, Artificial Sequence
  Description of Artificial Sequence: Synthetic oligonucleotide
  Sense strand starting at position 3712 of SEQ ID NO: 587273
uacuaagauguguaaguuu

SEQ ID NO: 779931 - RNA, 19 nt, Artificial Sequence
  Description of Artificial Sequence: Synthetic oligonucleotide
  Antisense strand to SEQ ID NO: 779930
aaacuuacacaucuuagua

SEQ ID NO: 779932 - RNA, 19 nt, Artificial Sequence
  Description of Artificial Sequence: Synthetic oligonucleotide
  Sense strand starting at position 3757 of SEQ ID NO: 587273
guccauuuauuugggaaau

SEQ ID NO: 779933 - RNA, 19 nt, Artificial Sequence
  Description of Artificial Sequence: Synthetic oligonucleotide
  Antisense strand to SEQ ID NO: 779932
auuucccaaauaaauggac

SEQ ID NO: 779934 - RNA, 19 nt, Artificial Sequence
  Description of Artificial Sequence: Synthetic oligonucleotide
  Sense strand starting at position 3774 of SEQ ID NO: 587273
auguauuugccuugcucca

SEQ ID NO: 779935 - RNA, 19 nt, Artificial Sequence
  Description of Artificial Sequence: Synthetic oligonucleotide
  Antisense strand to SEQ ID NO: 779934
uggagcaaggcaaauacau

SEQ ID NO: 779936 - RNA, 19 nt, Artificial Sequence
  Description of Artificial Sequence: Synthetic oligonucleotide
  Sense strand starting at position 3779 of SEQ ID NO: 587273
uuugccuugcuccaggaaa

SEQ ID NO: 779937 - RNA, 19 nt, Artificial Sequence
  Description of Artificial Sequence: Synthetic oligonucleotide
  Antisense strand to SEQ ID NO: 779936
uuuccuggagcaaggcaaa

SEQ ID NO: 779938 - RNA, 19 nt, Artificial Sequence
  Description of Artificial Sequence: Synthetic oligonucleotide
  Sense strand starting at position 3855 of SEQ ID NO: 587273
gaguuaucauuccugguag

SEQ ID NO: 779939 - RNA, 19 nt, Artificial Sequence
  Description of Artificial Sequence: Synthetic oligonucleotide
  Antisense strand to SEQ ID NO: 779938
cuaccaggaaugauaacuc

SEQ ID NO: 779940 - RNA, 19 nt, Artificial Sequence
  Description of Artificial Sequence: Synthetic oligonucleotide
  Sense strand starting at position 364 of SEQ ID NO: 587274
caaguagcaugguuugaaa

SEQ ID NO: 779941 - RNA, 19 nt, Artificial Sequence
  Description of Artificial Sequence: Synthetic oligonucleotide
  Antisense strand to SEQ ID NO: 779940
uuucaaaccaugcuacuug

SEQ ID NO: 779942 - RNA, 19 nt, Artificial Sequence
  Description of Artificial Sequence: Synthetic oligonucleotide
  Sense strand starting at position 383 of SEQ ID NO: 587274
ucauuuauuccuggcuugu

SEQ ID NO: 779943 - RNA, 19 nt, Artificial Sequence
  Description of Artificial Sequence: Synthetic oligonucleotide
  Antisense strand to SEQ ID NO: 779942
acaagccaggaauaaauga

SEQ ID NO: 779944 - RNA, 19 nt, Artificial Sequence
  Description of Artificial Sequence: Synthetic oligonucleotide
  Sense strand starting at position 385 of SEQ ID NO: 587274
auuuauuccuggcuuguga

SEQ ID NO: 779945 - RNA, 19 nt, Artificial Sequence
  Description of Artificial Sequence: Synthetic oligonucleotide
  Antisense strand to SEQ ID NO: 779944
ucacaagccaggaauaaau

SEQ ID NO: 779946 - RNA, 19 nt, Artificial Sequence
  Description of Artificial Sequence: Synthetic oligonucleotide
  Sense strand starting at position 520 of SEQ ID NO: 587274
cuuggauaucaauguugaa

SEQ ID NO: 779947 - RNA, 19 nt, Artificial Sequence
  Description of Artificial Sequence: Synthetic oligonucleotide
  Antisense strand to SEQ ID NO: 779946
uucaacauugauauccaag

SEQ ID NO: 779948 - RNA, 19 nt, Artificial Sequence
  Description of Artificial Sequence: Synthetic oligonucleotide
  Sense strand starting at position 603 of SEQ ID NO: 587274
auuguuguacuacauuaga

SEQ ID NO: 779949 - RNA, 19 nt, Artificial Sequence
  Description of Artificial Sequence: Synthetic oligonucleotide
  Antisense strand to SEQ ID NO: 779948
ucuaauguaguacaacaau

SEQ ID NO: 779950 - RNA, 19 nt, Artificial Sequence
  Description of Artificial Sequence: Synthetic oligonucleotide
  Sense strand starting at position 606 of SEQ ID NO: 587274
guuguacuacauuagaaau

SEQ ID NO: 779951 - RNA, 19 nt, Artificial Sequence
  Description of Artificial Sequence: Synthetic oligonucleotide
  Antisense strand to SEQ ID NO: 779950
auuucuaauguaguacaac

SEQ ID NO: 779952 - RNA, 19 nt, Artificial Sequence
  Description of Artificial Sequence: Synthetic oligonucleotide
  Sense strand starting at position 641 of SEQ ID NO: 587274
uuuaaaguucuacagaagu

SEQ ID NO: 779953 - RNA, 19 nt, Artificial Sequence
  Description of Artificial Sequence: Synthetic oligonucleotide
  Antisense strand to SEQ ID NO: 779952
acuucuguagaacuuuaaa

SEQ ID NO: 779954 - RNA, 19 nt, Artificial Sequence
  Description of Artificial Sequence: Synthetic oligonucleotide
  Sense strand starting at position 677 of SEQ ID NO: 587274
aaggaauuauuuggaaaga

SEQ ID NO: 779955 - RNA, 19 nt, Artificial Sequence
  Description of Artificial Sequence: Synthetic oligonucleotide
  Antisense strand to SEQ ID NO: 779954
ucuuuccaaauaauuccuu

SEQ ID NO: 779956 - RNA, 19 nt, Artificial Sequence
  Description of Artificial Sequence: Synthetic oligonucleotide
  Sense strand starting at position 708 of SEQ ID NO: 587274
ucuuauuaggcuuguauuu

SEQ ID NO: 779957 - RNA, 19 nt, Artificial Sequence
  Description of Artificial Sequence: Synthetic oligonucleotide
  Antisense strand to SEQ ID NO: 779956
aaauacaagccuaauaaga

SEQ ID NO: 779958 - RNA, 19 nt, Artificial Sequence
  Description of Artificial Sequence: Synthetic oligonucleotide
  Sense strand starting at position 760 of SEQ ID NO: 587274
aaguaacuccuguggauaa

SEQ ID NO: 779959 - RNA, 19 nt, Artificial Sequence
  Description of Artificial Sequence: Synthetic oligonucleotide
  Antisense strand to SEQ ID NO: 779958
uuauccacaggaguuacuu

SEQ ID NO: 779960 - RNA, 19 nt, Artificial Sequence
  Description of Artificial Sequence: Synthetic oligonucleotide
  Sense strand starting at position 762 of SEQ ID NO: 587274
guaacuccuguggauaaau

SEQ ID NO: 779961 - RNA, 19 nt, Artificial Sequence
  Description of Artificial Sequence: Synthetic oligonucleotide
  Antisense strand to SEQ ID NO: 779960
auuuauccacaggaguuac

SEQ ID NO: 779962 - RNA, 19 nt, Artificial Sequence
  Description of Artificial Sequence: Synthetic oligonucleotide
  Sense strand starting at position 788 of SEQ ID NO: 587274
aguaaaugagcguaaacuu

SEQ ID NO: 779963 - RNA, 19 nt, Artificial Sequence
  Description of Artificial Sequence: Synthetic oligonucleotide
  Antisense strand to SEQ ID NO: 779962
aaguuuacgcucauuuacu

SEQ ID NO: 779964 - RNA, 19 nt, Artificial Sequence
  Description of Artificial Sequence: Synthetic oligonucleotide
  Sense strand starting at position 815 of SEQ ID NO: 587274
ugaauaaaucaguaguugu

SEQ ID NO: 779965 - RNA, 19 nt, Artificial Sequence
  Description of Artificial Sequence: Synthetic oligonucleotide
  Antisense strand to SEQ ID NO: 779964
acaacuacugauuuauuca

SEQ ID NO: 779966 - RNA, 19 nt, Artificial Sequence
  Description of Artificial Sequence: Synthetic oligonucleotide
  Sense strand starting at position 825 of SEQ ID NO: 587274
aguaguugucucuaacacu

SEQ ID NO: 779967 - RNA, 19 nt, Artificial Sequence
  Description of Artificial Sequence: Synthetic oligonucleotide
  Antisense strand to SEQ ID NO: 779966
aguguuagagacaacuacu

SEQ ID NO: 779968 - RNA, 19 nt, Artificial Sequence
  Description of Artificial Sequence: Synthetic oligonucleotide
  Sense strand starting at position 1037 of SEQ ID NO: 587274
gauagaaguuggccuauua

SEQ ID NO: 779969 - RNA, 19 nt, Artificial Sequence
  Description of Artificial Sequence: Synthetic oligonucleotide
  Antisense strand to SEQ ID NO: 779968
uaauaggccaacuucuauc

SEQ ID NO: 779970 - RNA, 19 nt, Artificial Sequence
  Description of Artificial Sequence: Synthetic oligonucleotide
  Sense strand starting at position 1048 of SEQ ID NO: 587274
gccuauuauccauagcaga

SEQ ID NO: 779971 - RNA, 19 nt, Artificial Sequence
  Description of Artificial Sequence: Synthetic oligonucleotide
  Antisense strand to SEQ ID NO: 779970
ucugcuauggauaauaggc

SEQ ID NO: 779972 - RNA, 19 nt, Artificial Sequence
  Description of Artificial Sequence: Synthetic oligonucleotide
  Sense strand starting at position 1357 of SEQ ID NO: 587274
uuaaguucugaagguaaca

SEQ ID NO: 779973 - RNA, 19 nt, Artificial Sequence
  Description of Artificial Sequence: Synthetic oligonucleotide
  Antisense strand to SEQ ID NO: 779972
uguuaccuucagaacuuaa

SEQ ID NO: 779974 - RNA, 19 nt, Artificial Sequence
  Description of Artificial Sequence: Synthetic oligonucleotide
  Sense strand starting at position 1373 of SEQ ID NO: 587274
acaugauaccuguguuaac

SEQ ID NO: 779975 - RNA, 19 nt, Artificial Sequence
  Description of Artificial Sequence: Synthetic oligonucleotide
  Antisense strand to SEQ ID NO: 779974
guuaacacagguaucaugu

SEQ ID NO: 779976 - RNA, 19 nt, Artificial Sequence
  Description of Artificial Sequence: Synthetic oligonucleotide
  Sense strand starting at position 1382 of SEQ ID NO: 587274
cuguguuaacaauauccca

SEQ ID NO: 779977 - RNA, 19 nt, Artificial Sequence
  Description of Artificial Sequence: Synthetic oligonucleotide
  Antisense strand to SEQ ID NO: 779976
ugggauauuguuaacacag

SEQ ID NO: 779978 - RNA, 19 nt, Artificial Sequence
  Description of Artificial Sequence: Synthetic oligonucleotide
  Sense strand starting at position 1417 of SEQ ID NO: 587274
ucauauuaucuagggacgu

SEQ ID NO: 779979 - RNA, 19 nt, Artificial Sequence
  Description of Artificial Sequence: Synthetic oligonucleotide
  Antisense strand to SEQ ID NO: 779978
acgucccuagauaauauga

SEQ ID NO: 779980 - RNA, 19 nt, Artificial Sequence
  Description of Artificial Sequence: Synthetic oligonucleotide
  Sense strand starting at position 1427 of SEQ ID NO: 587274
uagggacgucucuaugaug

SEQ ID NO: 779981 - RNA, 19 nt, Artificial Sequence
  Description of Artificial Sequence: Synthetic oligonucleotide
  Antisense strand to SEQ ID NO: 779980
caucauagagacgucccua

SEQ ID NO: 779982 - RNA, 19 nt, Artificial Sequence
  Description of Artificial Sequence: Synthetic oligonucleotide
  Sense strand starting at position 1818 of SEQ ID NO: 587274
aggucagagaaguguuaac

SEQ ID NO: 779983 - RNA, 19 nt, Artificial Sequence
  Description of Artificial Sequence: Synthetic oligonucleotide
  Antisense strand to SEQ ID NO: 779982
guuaacacuucucugaccu

SEQ ID NO: 779984 - RNA, 19 nt, Artificial Sequence
  Description of Artificial Sequence: Synthetic oligonucleotide
  Sense strand starting at position 1832 of SEQ ID NO: 587274
uuaacucagccaugaggua

SEQ ID NO: 779985 - RNA, 19 nt, Artificial Sequence
  Description of Artificial Sequence: Synthetic oligonucleotide
  Antisense strand to SEQ ID NO: 779984
uaccucauggcugaguuaa

SEQ ID NO: 779986 - RNA, 19 nt, Artificial Sequence
  Description of Artificial Sequence: Synthetic oligonucleotide
  Sense strand starting at position 1845 of SEQ ID NO: 587274
gagguagucacucaccgau

SEQ ID NO: 779987 - RNA, 19 nt, Artificial Sequence
  Description of Artificial Sequence: Synthetic oligonucleotide
  Antisense strand to SEQ ID NO: 779986
aucggugagugacuaccuc

SEQ ID NO: 779988 - RNA, 19 nt, Artificial Sequence
  Description of Artificial Sequence: Synthetic oligonucleotide
  Sense strand starting at position 1847 of SEQ ID NO: 587274
gguagucacucaccgauuu

SEQ ID NO: 779989 - RNA, 19 nt, Artificial Sequence
  Description of Artificial Sequence: Synthetic oligonucleotide
  Antisense strand to SEQ ID NO: 779988
aaaucggugagugacuacc

SEQ ID NO: 779990 - RNA, 19 nt, Artificial Sequence
  Description of Artificial Sequence: Synthetic oligonucleotide
  Sense strand starting at position 2458 of SEQ ID NO: 587274
auugaagucuuccugaaag

SEQ ID NO: 779991 - RNA, 19 nt, Artificial Sequence
  Description of Artificial Sequence: Synthetic oligonucleotide
  Antisense strand to SEQ ID NO: 779990
cuuucaggaagacuucaau

SEQ ID NO: 779992 - RNA, 19 nt, Artificial Sequence
  Description of Artificial Sequence: Synthetic oligonucleotide
  Sense strand starting at position 2460 of SEQ ID NO: 587274
ugaagucuuccugaaagug

SEQ ID NO: 779993 - RNA, 19 nt, Artificial Sequence
  Description of Artificial Sequence: Synthetic oligonucleotide
  Antisense strand to SEQ ID NO: 779992
cacuuucaggaagacuuca

SEQ ID NO: 779994 - RNA, 19 nt, Artificial Sequence
  Description of Artificial Sequence: Synthetic oligonucleotide
  Sense strand starting at position 2480 of SEQ ID NO: 587274
gacagagucaguggaacuu

SEQ ID NO: 779995 - RNA, 19 nt, Artificial Sequence
  Description of Artificial Sequence: Synthetic oligonucleotide
  Antisense strand to SEQ ID NO: 779994
aaguuccacugacucuguc

SEQ ID NO: 779996 - RNA, 19 nt, Artificial Sequence
  Description of Artificial Sequence: Synthetic oligonucleotide
  Sense strand starting at position 2504 of SEQ ID NO: 587274
acagauggacagugaguua

SEQ ID NO: 779997 - RNA, 19 nt, Artificial Sequence
  Description of Artificial Sequence: Synthetic oligonucleotide
  Antisense strand to SEQ ID NO: 779996
uaacucacuguccaucugu

SEQ ID NO: 779998 - RNA, 19 nt, Artificial Sequence
  Description of Artificial Sequence: Synthetic oligonucleotide
  Sense strand starting at position 2569 of SEQ ID NO: 587274
agaggauauuuaugacauu

SEQ ID NO: 779999 - RNA, 19 nt, Artificial Sequence
  Description of Artificial Sequence: Synthetic oligonucleotide
  Antisense strand to SEQ ID NO: 779998
aaugucauaaauauccucu

SEQ ID NO: 780000 - RNA, 19 nt, Artificial Sequence
  Description of Artificial Sequence: Synthetic oligonucleotide
  Sense strand starting at position 2640 of SEQ ID NO: 587274
acaaauuucucggauagau

SEQ ID NO: 780001 - RNA, 19 nt, Artificial Sequence
  Description of Artificial Sequence: Synthetic oligonucleotide
  Antisense strand to SEQ ID NO: 780000
aucuauccgagaaauuugu

SEQ ID NO: 780002 - RNA, 19 nt, Artificial Sequence
  Description of Artificial Sequence: Synthetic oligonucleotide
  Sense strand starting at position 2992 of SEQ ID NO: 587274
ugacuuacgcaucaaauug

SEQ ID NO: 780003 - RNA, 19 nt, Artificial Sequence
  Description of Artificial Sequence: Synthetic oligonucleotide
  Antisense strand to SEQ ID NO: 780002
caauuugaugcguaaguca

SEQ ID NO: 780004 - RNA, 19 nt, Artificial Sequence
  Description of Artificial Sequence: Synthetic oligonucleotide
  Sense strand starting at position 3053 of SEQ ID NO: 587274
ucgauuuguucaguggcua

SEQ ID NO: 780005 - RNA, 19 nt, Artificial Sequence
  Description of Artificial Sequence: Synthetic oligonucleotide
  Antisense strand to SEQ ID NO: 780004
uagccacugaacaaaucga

SEQ ID NO: 780006 - RNA, 19 nt, Artificial Sequence
  Description of Artificial Sequence: Synthetic oligonucleotide
  Sense strand starting at position 3054 of SEQ ID NO: 587274
cgauuuguucaguggcuau

SEQ ID NO: 780007 - RNA, 19 nt, Artificial Sequence
  Description of Artificial Sequence: Synthetic oligonucleotide
  Antisense strand to SEQ ID NO: 780006
auagccacugaacaaaucg

SEQ ID NO: 780008 - RNA, 19 nt, Artificial Sequence
  Description of Artificial Sequence: Synthetic oligonucleotide
  Sense strand starting at position 3279 of SEQ ID NO: 587274
gagugauuacccgaggcag

SEQ ID NO: 780009 - RNA, 19 nt, Artificial Sequence
  Description of Artificial Sequence: Synthetic oligonucleotide
  Antisense strand to SEQ ID NO: 780008
cugccucggguaaucacuc

SEQ ID NO: 780010 - RNA, 19 nt, Artificial Sequence
  Description of Artificial Sequence: Synthetic oligonucleotide
  Sense strand starting at position 3344 of SEQ ID NO: 587274
aguuaugugggaugaauac

SEQ ID NO: 780011 - RNA, 19 nt, Artificial Sequence
  Description of Artificial Sequence: Synthetic oligonucleotide
  Antisense strand to SEQ ID NO: 780010
guauucaucccacauaacu

SEQ ID NO: 780012 - RNA, 19 nt, Artificial Sequence
  Description of Artificial Sequence: Synthetic oligonucleotide
  Sense strand starting at position 3509 of SEQ ID NO: 587274
uguguuaauuugcuugagu

SEQ ID NO: 780013 - RNA, 19 nt, Artificial Sequence
  Description of Artificial Sequence: Synthetic oligonucleotide
  Antisense strand to SEQ ID NO: 780012
acucaagcaaauuaacaca

SEQ ID NO: 780014 - RNA, 19 nt, Artificial Sequence
  Description of Artificial Sequence: Synthetic oligonucleotide
  Sense strand starting at position 3510 of SEQ ID NO: 587274
guguuaauuugcuugagug

SEQ ID NO: 780015 - RNA, 19 nt, Artificial Sequence
  Description of Artificial Sequence: Synthetic oligonucleotide
  Antisense strand to SEQ ID NO: 780014
cacucaagcaaauuaacac

SEQ ID NO: 780016 - RNA, 19 nt, Artificial Sequence
  Description of Artificial Sequence: Synthetic oligonucleotide
  Sense strand starting at position 3511 of SEQ ID NO: 587274
uguuaauuugcuugagugu

SEQ ID NO: 780017 - RNA, 19 nt, Artificial Sequence
  Description of Artificial Sequence: Synthetic oligonucleotide
  Antisense strand to SEQ ID NO: 780016
acacucaagcaaauuaaca

SEQ ID NO: 780018 - RNA, 19 nt, Artificial Sequence
  Description of Artificial Sequence: Synthetic oligonucleotide
  Sense strand starting at position 3514 of SEQ ID NO: 587274
uaauuugcuugaguguagu

SEQ ID NO: 780019 - RNA, 19 nt, Artificial Sequence
  Description of Artificial Sequence: Synthetic oligonucleotide
  Antisense strand to SEQ ID NO: 780018
acuacacucaagcaaauua

SEQ ID NO: 780020 - RNA, 19 nt, Artificial Sequence
  Description of Artificial Sequence: Synthetic oligonucleotide
  Sense strand starting at position 59 of SEQ ID NO: 587275
aaggaagggugcucuaaau

SEQ ID NO: 780021 - RNA, 19 nt, Artificial Sequence
  Description of Artificial Sequence: Synthetic oligonucleotide
  Antisense strand to SEQ ID NO: 780020
auuuagagcacccuuccuu

SEQ ID NO: 780022 - RNA, 19 nt, Artificial Sequence
  Description of Artificial Sequence: Synthetic oligonucleotide
  Sense strand starting at position 70 of SEQ ID NO: 587275
cucuaaaugcuuggaaaca

SEQ ID NO: 780023 - RNA, 19 nt, Artificial Sequence
  Description of Artificial Sequence: Synthetic oligonucleotide
  Antisense strand to SEQ ID NO: 780022
uguuuccaagcauuuagag

SEQ ID NO: 780024 - RNA, 19 nt, Artificial Sequence
  Description of Artificial Sequence: Synthetic oligonucleotide
  Sense strand starting at position 201 of SEQ ID NO: 587275
agggauauggauuggguuu

SEQ ID NO: 780025 - RNA, 19 nt, Artificial Sequence
  Description of Artificial Sequence: Synthetic oligonucleotide
  Antisense strand to SEQ ID NO: 780024
aaacccaauccauaucccu

SEQ ID NO: 780026 - RNA, 19 nt, Artificial Sequence
  Description of Artificial Sequence: Synthetic oligonucleotide
  Sense strand starting at position 236 of SEQ ID NO: 587275
ggaagcuuuauaugaguuu

SEQ ID NO: 780027 - RNA, 19 nt, Artificial Sequence
  Description of Artificial Sequence: Synthetic oligonucleotide
  Antisense strand to SEQ ID NO: 780026
aaacucauauaaagcuucc

SEQ ID NO: 780028 - RNA, 19 nt, Artificial Sequence
  Description of Artificial Sequence: Synthetic oligonucleotide
  Sense strand starting at position 302 of SEQ ID NO: 587275
agcuguucuguggaauaag

SEQ ID NO: 780029 - RNA, 19 nt, Artificial Sequence
  Description of Artificial Sequence: Synthetic oligonucleotide
  Antisense strand to SEQ ID NO: 780028
cuuauuccacagaacagcu

SEQ ID NO: 780030 - RNA, 19 nt, Artificial Sequence
  Description of Artificial Sequence: Synthetic oligonucleotide
  Sense strand starting at position 339 of SEQ ID NO: 587275
agugcaagcaaguagaauu

SEQ ID NO: 780031 - RNA, 19 nt, Artificial Sequence
  Description of Artificial Sequence: Synthetic oligonucleotide
  Antisense strand to SEQ ID NO: 780030
aauucuacuugcuugcacu

SEQ ID NO: 780032 - RNA, 19 nt, Artificial Sequence
  Description of Artificial Sequence: Synthetic oligonucleotide
  Sense strand starting at position 366 of SEQ ID NO: 587275
auugcaguucuccaugaga

SEQ ID NO: 780033 - RNA, 19 nt, Artificial Sequence
  Description of Artificial Sequence: Synthetic oligonucleotide
  Antisense strand to SEQ ID NO: 780032
ucucauggagaacugcaau

SEQ ID NO: 780034 - RNA, 19 nt, Artificial Sequence
  Description of Artificial Sequence: Synthetic oligonucleotide
  Sense strand starting at position 375 of SEQ ID NO: 587275
cuccaugagagcgauaaca

SEQ ID NO: 780035 - RNA, 19 nt, Artificial Sequence
  Description of Artificial Sequence: Synthetic oligonucleotide
  Antisense strand to SEQ ID NO: 780034
uguuaucgcucucauggag

SEQ ID NO: 780036 - RNA, 19 nt, Artificial Sequence
  Description of Artificial Sequence: Synthetic oligonucleotide
  Sense strand starting at position 408 of SEQ ID NO: 587275
uguagugguagggaucaaa

SEQ ID NO: 780037 - RNA, 19 nt, Artificial Sequence
  Description of Artificial Sequence: Synthetic oligonucleotide
  Antisense strand to SEQ ID NO: 780036
uuugaucccuaccacuaca

SEQ ID NO: 780038 - RNA, 19 nt, Artificial Sequence
  Description of Artificial Sequence: Synthetic oligonucleotide
  Sense strand starting at position 429 of SEQ ID NO: 587275
uuguaaguuggcuauacaa

SEQ ID NO: 780039 - RNA, 19 nt, Artificial Sequence
  Description of Artificial Sequence: Synthetic oligonucleotide
  Antisense strand to SEQ ID NO: 780038
uuguauagccaacuuacaa

SEQ ID NO: 780040 - RNA, 19 nt, Artificial Sequence
  Description of Artificial Sequence: Synthetic oligonucleotide
  Sense strand starting at position 431 of SEQ ID NO: 587275
guaaguuggcuauacaacu

SEQ ID NO: 780041 - RNA, 19 nt, Artificial Sequence
  Description of Artificial Sequence: Synthetic oligonucleotide
  Antisense strand to SEQ ID NO: 780040
aguuguauagccaacuuac

SEQ ID NO: 780042 - RNA, 19 nt, Artificial Sequence
  Description of Artificial Sequence: Synthetic oligonucleotide
  Sense strand starting at position 465 of SEQ ID NO: 587275
uuagcauugggaggaaagu

SEQ ID NO: 780043 - RNA, 19 nt, Artificial Sequence
  Description of Artificial Sequence: Synthetic oligonucleotide
  Antisense strand to SEQ ID NO: 780042
acuuuccucccaaugcuaa

SEQ ID NO: 780044 - RNA, 19 nt, Artificial Sequence
  Description of Artificial Sequence: Synthetic oligonucleotide
  Sense strand starting at position 701 of SEQ ID NO: 587275
agaugcaagaccuggcauu

SEQ ID NO: 780045 - RNA, 19 nt, Artificial Sequence
  Description of Artificial Sequence: Synthetic oligonucleotide
  Antisense strand to SEQ ID NO: 780044
aaugccaggucuugcaucu

SEQ ID NO: 780046 - RNA, 19 nt, Artificial Sequence
  Description of Artificial Sequence: Synthetic oligonucleotide
  Sense strand starting at position 752 of SEQ ID NO: 587275
gauauaaguccuggaaauu

SEQ ID NO: 780047 - RNA, 19 nt, Artificial Sequence
  Description of Artificial Sequence: Synthetic oligonucleotide
  Antisense strand to SEQ ID NO: 780046
aauuuccaggacuuauauc

SEQ ID NO: 780048 - RNA, 19 nt, Artificial Sequence
  Description of Artificial Sequence: Synthetic oligonucleotide
  Sense strand starting at position 810 of SEQ ID NO: 587275
ggauuaccugaugguauag

SEQ ID NO: 780049 - RNA, 19 nt, Artificial Sequence
  Description of Artificial Sequence: Synthetic oligonucleotide
  Antisense strand to SEQ ID NO: 780048
cuauaccaucagguaaucc

SEQ ID NO: 780050 - RNA, 19 nt, Artificial Sequence
  Description of Artificial Sequence: Synthetic oligonucleotide
  Sense strand starting at position 1031 of SEQ ID NO: 587275
ugcagaaaccuuugaugua

SEQ ID NO: 780051 - RNA, 19 nt, Artificial Sequence
  Description of Artificial Sequence: Synthetic oligonucleotide
  Antisense strand to SEQ ID NO: 780050
uacaucaaagguuucugca

SEQ ID NO: 780052 - RNA, 19 nt, Artificial Sequence
  Description of Artificial Sequence: Synthetic oligonucleotide
  Sense strand starting at position 1112 of SEQ ID NO: 587275
ucaauaagacuguagcaau

SEQ ID NO: 780053 - RNA, 19 nt, Artificial Sequence
  Description of Artificial Sequence: Synthetic oligonucleotide
  Antisense strand to SEQ ID NO: 780052
auugcuacagucuuauuga

SEQ ID NO: 780054 - RNA, 19 nt, Artificial Sequence
  Description of Artificial Sequence: Synthetic oligonucleotide
  Sense strand starting at position 1229 of SEQ ID NO: 587275
gccauucucuaaguagaaa

SEQ ID NO: 780055 - RNA, 19 nt, Artificial Sequence
  Description of Artificial Sequence: Synthetic oligonucleotide
  Antisense strand to SEQ ID NO: 780054
uuucuacuuagagaauggc

SEQ ID NO: 780056 - RNA, 19 nt, Artificial Sequence
  Description of Artificial Sequence: Synthetic oligonucleotide
  Sense strand starting at position 1298 of SEQ ID NO: 587275
acauauugagcuugagguu

SEQ ID NO: 780057 - RNA, 19 nt, Artificial Sequence
  Description of Artificial Sequence: Synthetic oligonucleotide
  Antisense strand to SEQ ID NO: 780056
aaccucaagcucaauaugu

SEQ ID NO: 780058 - RNA, 19 nt, Artificial Sequence
  Description of Artificial Sequence: Synthetic oligonucleotide
  Sense strand starting at position 1299 of SEQ ID NO: 587275
cauauugagcuugagguuu

SEQ ID NO: 780059 - RNA, 19 nt, Artificial Sequence
  Description of Artificial Sequence: Synthetic oligonucleotide
  Antisense strand to SEQ ID NO: 780058
aaaccucaagcucaauaug

SEQ ID NO: 780060 - RNA, 19 nt, Artificial Sequence
  Description of Artificial Sequence: Synthetic oligonucleotide
  Sense strand starting at position 1353 of SEQ ID NO: 587275
uggccucagccagaauuaa

SEQ ID NO: 780061 - RNA, 19 nt, Artificial Sequence
  Description of Artificial Sequence: Synthetic oligonucleotide
  Antisense strand to SEQ ID NO: 780060
uuaauucuggcugaggcca

SEQ ID NO: 780062 - RNA, 19 nt, Artificial Sequence
  Description of Artificial Sequence: Synthetic oligonucleotide
  Sense strand starting at position 1421 of SEQ ID NO: 587275
agaauauauugggcaaagu

SEQ ID NO: 780063 - RNA, 19 nt, Artificial Sequence
  Description of Artificial Sequence: Synthetic oligonucleotide
  Antisense strand to SEQ ID NO: 780062
acuuugcccaauauauucu

SEQ ID NO: 780064 - RNA, 19 nt, Artificial Sequence
  Description of Artificial Sequence: Synthetic oligonucleotide
  Sense strand starting at position 1503 of SEQ ID NO: 587275
augccuuugagugauaaug

SEQ ID NO: 780065 - RNA, 19 nt, Artificial Sequence
  Description of Artificial Sequence: Synthetic oligonucleotide
  Antisense strand to SEQ ID NO: 780064
cauuaucacucaaaggcau

SEQ ID NO: 780066 - RNA, 19 nt, Artificial Sequence
  Description of Artificial Sequence: Synthetic oligonucleotide
  Sense strand starting at position 1616 of SEQ ID NO: 587275
cucccacugugaucaagaa

SEQ ID NO: 780067 - RNA, 19 nt, Artificial Sequence
  Description of Artificial Sequence: Synthetic oligonucleotide
  Antisense strand to SEQ ID NO: 780066
uucuugaucacagugggag

SEQ ID NO: 780068 - RNA, 19 nt, Artificial Sequence
  Description of Artificial Sequence: Synthetic oligonucleotide
  Sense strand starting at position 1642 of SEQ ID NO: 587275
aagaaagcccuguaagagu

SEQ ID NO: 780069 - RNA, 19 nt, Artificial Sequence
  Description of Artificial Sequence: Synthetic oligonucleotide
  Antisense strand to SEQ ID NO: 780068
acucuuacagggcuuucuu

SEQ ID NO: 780070 - RNA, 19 nt, Artificial Sequence
  Description of Artificial Sequence: Synthetic oligonucleotide
  Sense strand starting at position 1716 of SEQ ID NO: 587275
gaacaaugugaagguuaac

SEQ ID NO: 780071 - RNA, 19 nt, Artificial Sequence
  Description of Artificial Sequence: Synthetic oligonucleotide
  Antisense strand to SEQ ID NO: 780070
guuaaccuucacauuguuc

SEQ ID NO: 780072 - RNA, 19 nt, Artificial Sequence
  Description of Artificial Sequence: Synthetic oligonucleotide
  Sense strand starting at position 1963 of SEQ ID NO: 587275
uuuacuaugccuuaaguag

SEQ ID NO: 780073 - RNA, 19 nt, Artificial Sequence
  Description of Artificial Sequence: Synthetic oligonucleotide
  Antisense strand to SEQ ID NO: 780072
cuacuuaaggcauaguaaa

SEQ ID NO: 780074 - RNA, 19 nt, Artificial Sequence
  Description of Artificial Sequence: Synthetic oligonucleotide
  Sense strand starting at position 2092 of SEQ ID NO: 587275
aguaaauccacguauguau

SEQ ID NO: 780075 - RNA, 19 nt, Artificial Sequence
  Description of Artificial Sequence: Synthetic oligonucleotide
  Antisense strand to SEQ ID NO: 780074
auacauacguggauuuacu

SEQ ID NO: 780076 - RNA, 19 nt, Artificial Sequence
  Description of Artificial Sequence: Synthetic oligonucleotide
  Sense strand starting at position 2183 of SEQ ID NO: 587275
caguuucuucugggacaca

SEQ ID NO: 780077 - RNA, 19 nt, Artificial Sequence
  Description of Artificial Sequence: Synthetic oligonucleotide
  Antisense strand to SEQ ID NO: 780076
ugugucccagaagaaacug

SEQ ID NO: 780078 - RNA, 19 nt, Artificial Sequence
  Description of Artificial Sequence: Synthetic oligonucleotide
  Sense strand starting at position 2386 of SEQ ID NO: 587275
uugguuguuguagauacua

SEQ ID NO: 780079 - RNA, 19 nt, Artificial Sequence
  Description of Artificial Sequence: Synthetic oligonucleotide
  Antisense strand to SEQ ID NO: 780078
uaguaucuacaacaaccaa

SEQ ID NO: 780080 - RNA, 19 nt, Artificial Sequence
  Description of Artificial Sequence: Synthetic oligonucleotide
  Sense strand starting at position 2388 of SEQ ID NO: 587275
gguuguuguagauacuaca

SEQ ID NO: 780081 - RNA, 19 nt, Artificial Sequence
  Description of Artificial Sequence: Synthetic oligonucleotide
  Antisense strand to SEQ ID NO: 780080
uguaguaucuacaacaacc

SEQ ID NO: 780082 - RNA, 19 nt, Artificial Sequence
  Description of Artificial Sequence: Synthetic oligonucleotide
  Sense strand starting at position 2693 of SEQ ID NO: 587275
guaagaagugccuucgccu

SEQ ID NO: 780083 - RNA, 19 nt, Artificial Sequence
  Description of Artificial Sequence: Synthetic oligonucleotide
  Antisense strand to SEQ ID NO: 780082
aggcgaaggcacuucuuac

SEQ ID NO: 780084 - RNA, 19 nt, Artificial Sequence
  Description of Artificial Sequence: Synthetic oligonucleotide
  Sense strand starting at position 3084 of SEQ ID NO: 587275
cuguguaaccaccauucca

SEQ ID NO: 780085 - RNA, 19 nt, Artificial Sequence
  Description of Artificial Sequence: Synthetic oligonucleotide
  Antisense strand to SEQ ID NO: 780084
uggaauggugguuacacag

SEQ ID NO: 780086 - RNA, 19 nt, Artificial Sequence
  Description of Artificial Sequence: Synthetic oligonucleotide
  Sense strand starting at position 3142 of SEQ ID NO: 587275
cucauacauccugauagug

SEQ ID NO: 780087 - RNA, 19 nt, Artificial Sequence
  Description of Artificial Sequence: Synthetic oligonucleotide
  Antisense strand to SEQ ID NO: 780086
cacuaucaggauguaugag

SEQ ID NO: 780088 - RNA, 19 nt, Artificial Sequence
  Description of Artificial Sequence: Synthetic oligonucleotide
  Sense strand starting at position 3154 of SEQ ID NO: 587275
gauaguggugagcaucuuu

SEQ ID NO: 780089 - RNA, 19 nt, Artificial Sequence
  Description of Artificial Sequence: Synthetic oligonucleotide
  Antisense strand to SEQ ID NO: 780088
aaagaugcucaccacuauc

SEQ ID NO: 780090 - RNA, 19 nt, Artificial Sequence
  Description of Artificial Sequence: Synthetic oligonucleotide
  Sense strand starting at position 3344 of SEQ ID NO: 587275
ucuuaaugauguuucugau

SEQ ID NO: 780091 - RNA, 19 nt, Artificial Sequence
  Description of Artificial Sequence: Synthetic oligonucleotide
  Antisense strand to SEQ ID NO: 780090
aucagaaacaucauuaaga

SEQ ID NO: 780092 - RNA, 19 nt, Artificial Sequence
  Description of Artificial Sequence: Synthetic oligonucleotide
  Sense strand starting at position 3351 of SEQ ID NO: 587275
gauguuucugaugagcuga

SEQ ID NO: 780093 - RNA, 19 nt, Artificial Sequence
  Description of Artificial Sequence: Synthetic oligonucleotide
  Antisense strand to SEQ ID NO: 780092
ucagcucaucagaaacauc

SEQ ID NO: 780094 - RNA, 19 nt, Artificial Sequence
  Description of Artificial Sequence: Synthetic oligonucleotide
  Sense strand starting at position 3353 of SEQ ID NO: 587275
uguuucugaugagcugaga

SEQ ID NO: 780095 - RNA, 19 nt, Artificial Sequence
  Description of Artificial Sequence: Synthetic oligonucleotide
  Antisense strand to SEQ ID NO: 780094
ucucagcucaucagaaaca

SEQ ID NO: 780096 - RNA, 19 nt, Artificial Sequence
  Description of Artificial Sequence: Synthetic oligonucleotide
  Sense strand starting at position 3521 of SEQ ID NO: 587275
uguuuagauguauaaucca

SEQ ID NO: 780097 - RNA, 19 nt, Artificial Sequence
  Description of Artificial Sequence: Synthetic oligonucleotide
  Antisense strand to SEQ ID NO: 780096
uggauuauacaucuaaaca

SEQ ID NO: 780098 - RNA, 19 nt, Artificial Sequence
  Description of Artificial Sequence: Synthetic oligonucleotide
  Sense strand starting at position 3657 of SEQ ID NO: 587275
gagguuuaugaugaagcuu

SEQ ID NO: 780099 - RNA, 19 nt, Artificial Sequence
  Description of Artificial Sequence: Synthetic oligonucleotide
  Antisense strand to SEQ ID NO: 780098
aagcuucaucauaaaccuc

SEQ ID NO: 780100 - RNA, 19 nt, Artificial Sequence
  Description of Artificial Sequence: Synthetic oligonucleotide
  Sense strand starting at position 351 of SEQ ID NO: 587276
gacgcccagcuuugaaauu

SEQ ID NO: 780101 - RNA, 19 nt, Artificial Sequence
  Description of Artificial Sequence: Synthetic oligonucleotide
  Antisense strand to SEQ ID NO: 780100
aauuucaaagcugggcguc

SEQ ID NO: 780102 - RNA, 19 nt, Artificial Sequence
  Description of Artificial Sequence: Synthetic oligonucleotide
  Sense strand starting at position 505 of SEQ ID NO: 587276
ucagaauggucugggugga

SEQ ID NO: 780103 - RNA, 19 nt, Artificial Sequence
  Description of Artificial Sequence: Synthetic oligonucleotide
  Antisense strand to SEQ ID NO: 780102
uccacccagaccauucuga

SEQ ID NO: 780104 - RNA, 19 nt, Artificial Sequence
  Description of Artificial Sequence: Synthetic oligonucleotide
  Sense strand starting at position 552 of SEQ ID NO: 587276
ggcucaaggucugggugaa

SEQ ID NO: 780105 - RNA, 19 nt, Artificial Sequence
  Description of Artificial Sequence: Synthetic oligonucleotide
  Antisense strand to SEQ ID NO: 780104
uucacccagaccuugagcc

SEQ ID NO: 780106 - RNA, 19 nt, Artificial Sequence
  Description of Artificial Sequence: Synthetic oligonucleotide
  Sense strand starting at position 553 of SEQ ID NO: 587276
gcucaaggucugggugaau

SEQ ID NO: 780107 - RNA, 19 nt, Artificial Sequence
  Description of Artificial Sequence: Synthetic oligonucleotide
  Antisense strand to SEQ ID NO: 780106
auucacccagaccuugagc

SEQ ID NO: 780108 - RNA, 19 nt, Artificial Sequence
  Description of Artificial Sequence: Synthetic oligonucleotide
  Sense strand starting at position 747 of SEQ ID NO: 587276
ccuguacuccuggauguga

SEQ ID NO: 780109 - RNA, 19 nt, Artificial Sequence
  Description of Artificial Sequence: Synthetic oligonucleotide
  Antisense strand to SEQ ID NO: 780108
ucacauccaggaguacagg

SEQ ID NO: 780110 - RNA, 19 nt, Artificial Sequence
  Description of Artificial Sequence: Synthetic oligonucleotide
  Sense strand starting at position 749 of SEQ ID NO: 587276
uguacuccuggaugugauu

SEQ ID NO: 780111 - RNA, 19 nt, Artificial Sequence
  Description of Artificial Sequence: Synthetic oligonucleotide
  Antisense strand to SEQ ID NO: 780110
aaucacauccaggaguaca

SEQ ID NO: 780112 - RNA, 19 nt, Artificial Sequence
  Description of Artificial Sequence: Synthetic oligonucleotide
  Sense strand starting at position 766 of SEQ ID NO: 587276
uuugcuaauuagggucaau

SEQ ID NO: 780113 - RNA, 19 nt, Artificial Sequence
  Description of Artificial Sequence: Synthetic oligonucleotide
  Antisense strand to SEQ ID NO: 780112
auugacccuaauuagcaaa

SEQ ID NO: 780114 - RNA, 19 nt, Artificial Sequence
  Description of Artificial Sequence: Synthetic oligonucleotide
  Sense strand starting at position 841 of SEQ ID NO: 587276
ugucccaaacauugguaaa

SEQ ID NO: 780115 - RNA, 19 nt, Artificial Sequence
  Description of Artificial Sequence: Synthetic oligonucleotide
  Antisense strand to SEQ ID NO: 780114
uuuaccaauguuugggaca

SEQ ID NO: 780116 - RNA, 19 nt, Artificial Sequence
  Description of Artificial Sequence: Synthetic oligonucleotide
  Sense strand starting at position 870 of SEQ ID NO: 587276
uguuguuuaucugagauuc

SEQ ID NO: 780117 - RNA, 19 nt, Artificial Sequence
  Description of Artificial Sequence: Synthetic oligonucleotide
  Antisense strand to SEQ ID NO: 780116
gaaucucagauaaacaaca

SEQ ID NO: 780118 - RNA, 19 nt, Artificial Sequence
  Description of Artificial Sequence: Synthetic oligonucleotide
  Sense strand starting at position 976 of SEQ ID NO: 587276
caaaucugugucggacaca

SEQ ID NO: 780119 - RNA, 19 nt, Artificial Sequence
  Description of Artificial Sequence: Synthetic oligonucleotide
  Antisense strand to SEQ ID NO: 780118
uguguccgacacagauuug

SEQ ID NO: 780120 - RNA, 19 nt, Artificial Sequence
  Description of Artificial Sequence: Synthetic oligonucleotide
  Sense strand starting at position 1019 of SEQ ID NO: 587276
gguuguaccuggugacuca

SEQ ID NO: 780121 - RNA, 19 nt, Artificial Sequence
  Description of Artificial Sequence: Synthetic oligonucleotide
  Antisense strand to SEQ ID NO: 780120
ugagucaccagguacaacc

SEQ ID NO: 780122 - RNA, 19 nt, Artificial Sequence
  Description of Artificial Sequence: Synthetic oligonucleotide
  Sense strand starting at position 1026 of SEQ ID NO: 587276
ccuggugacucaggacauu

SEQ ID NO: 780123 - RNA, 19 nt, Artificial Sequence
  Description of Artificial Sequence: Synthetic oligonucleotide
  Antisense strand to SEQ ID NO: 780122
aauguccugagucaccagg

SEQ ID NO: 780124 - RNA, 19 nt, Artificial Sequence
  Description of Artificial Sequence: Synthetic oligonucleotide
  Sense strand starting at position 1317 of SEQ ID NO: 587276
cuucccugguucugggaaa

SEQ ID NO: 780125 - RNA, 19 nt, Artificial Sequence
  Description of Artificial Sequence: Synthetic oligonucleotide
  Antisense strand to SEQ ID NO: 780124
uuucccagaaccagggaag

SEQ ID NO: 780126 - RNA, 19 nt, Artificial Sequence
  Description of Artificial Sequence: Synthetic oligonucleotide
  Sense strand starting at position 1507 of SEQ ID NO: 587276
gagggagccuuuggagaaa

SEQ ID NO: 780127 - RNA, 19 nt, Artificial Sequence
  Description of Artificial Sequence: Synthetic oligonucleotide
  Antisense strand to SEQ ID NO: 780126
uuucuccaaaggcucccuc

SEQ ID NO: 780128 - RNA, 19 nt, Artificial Sequence
  Description of Artificial Sequence: Synthetic oligonucleotide
  Sense strand starting at position 1510 of SEQ ID NO: 587276
ggagccuuuggagaaaugu

SEQ ID NO: 780129 - RNA, 19 nt, Artificial Sequence
  Description of Artificial Sequence: Synthetic oligonucleotide
  Antisense strand to SEQ ID NO: 780128
acauuucuccaaaggcucc

SEQ ID NO: 780130 - RNA, 19 nt, Artificial Sequence
  Description of Artificial Sequence: Synthetic oligonucleotide
  Sense strand starting at position 1520 of SEQ ID NO: 587276
gagaaauguugccugacgu

SEQ ID NO: 780131 - RNA, 19 nt, Artificial Sequence
  Description of Artificial Sequence: Synthetic oligonucleotide
  Antisense strand to SEQ ID NO: 780130
acgucaggcaacauuucuc

SEQ ID NO: 780132 - RNA, 19 nt, Artificial Sequence
  Description of Artificial Sequence: Synthetic oligonucleotide
  Sense strand starting at position 1521 of SEQ ID NO: 587276
agaaauguugccugacguc

SEQ ID NO: 780133 - RNA, 19 nt, Artificial Sequence
  Description of Artificial Sequence: Synthetic oligonucleotide
  Antisense strand to SEQ ID NO: 780132
gacgucaggcaacauuucu

SEQ ID NO: 780134 - RNA, 19 nt, Artificial Sequence
  Description of Artificial Sequence: Synthetic oligonucleotide
  Sense strand starting at position 1984 of SEQ ID NO: 587276
ggacuuccgccuuguaaug

SEQ ID NO: 780135 - RNA, 19 nt, Artificial Sequence
  Description of Artificial Sequence: Synthetic oligonucleotide
  Antisense strand to SEQ ID NO: 780134
cauuacaaggcggaagucc

SEQ ID NO: 780136 - RNA, 19 nt, Artificial Sequence
  Description of Artificial Sequence: Synthetic oligonucleotide
  Sense strand starting at position 1994 of SEQ ID NO: 587276
cuuguaaugacaugucgcu

SEQ ID NO: 780137 - RNA, 19 nt, Artificial Sequence
  Description of Artificial Sequence: Synthetic oligonucleotide
  Antisense strand to SEQ ID NO: 780136
agcgacaugucauuacaag

SEQ ID NO: 780138 - RNA, 19 nt, Artificial Sequence
  Description of Artificial Sequence: Synthetic oligonucleotide
  Sense strand starting at position 1999 of SEQ ID NO: 587276
aaugacaugucgcugauuu

SEQ ID NO: 780139 - RNA, 19 nt, Artificial Sequence
  Description of Artificial Sequence: Synthetic oligonucleotide
  Antisense strand to SEQ ID NO: 780138
aaaucagcgacaugucauu

SEQ ID NO: 780140 - RNA, 19 nt, Artificial Sequence
  Description of Artificial Sequence: Synthetic oligonucleotide
  Sense strand starting at position 2000 of SEQ ID NO: 587276
augacaugucgcugauuua

SEQ ID NO: 780141 - RNA, 19 nt, Artificial Sequence
  Description of Artificial Sequence: Synthetic oligonucleotide
  Antisense strand to SEQ ID NO: 780140
uaaaucagcgacaugucau

SEQ ID NO: 780142 - RNA, 19 nt, Artificial Sequence
  Description of Artificial Sequence: Synthetic oligonucleotide
  Sense strand starting at position 2036 of SEQ ID NO: 587276
ccagcucugguuugugcaa

SEQ ID NO: 780143 - RNA, 19 nt, Artificial Sequence
  Description of Artificial Sequence: Synthetic oligonucleotide
  Antisense strand to SEQ ID NO: 780142
uugcacaaaccagagcugg

SEQ ID NO: 780144 - RNA, 19 nt, Artificial Sequence
  Description of Artificial Sequence: Synthetic oligonucleotide
  Sense strand starting at position 2053 of SEQ ID NO: 587276
aagucuggugcguucuuau

SEQ ID NO: 780145 - RNA, 19 nt, Artificial Sequence
  Description of Artificial Sequence: Synthetic oligonucleotide
  Antisense strand to SEQ ID NO: 780144
auaagaacgcaccagacuu

SEQ ID NO: 780146 - RNA, 19 nt, Artificial Sequence
  Description of Artificial Sequence: Synthetic oligonucleotide
  Sense strand starting at position 2064 of SEQ ID NO: 587276
guucuuaucucccuuguau

SEQ ID NO: 780147 - RNA, 19 nt, Artificial Sequence
  Description of Artificial Sequence: Synthetic oligonucleotide
  Antisense strand to SEQ ID NO: 780146
auacaagggagauaagaac

SEQ ID NO: 780148 - RNA, 19 nt, Artificial Sequence
  Description of Artificial Sequence: Synthetic oligonucleotide
  Sense strand starting at position 2107 of SEQ ID NO: 587276
cugguauguugagacaucu

SEQ ID NO: 780149 - RNA, 19 nt, Artificial Sequence
  Description of Artificial Sequence: Synthetic oligonucleotide
  Antisense strand to SEQ ID NO: 780148
agaugucucaacauaccag

SEQ ID NO: 780150 - RNA, 19 nt, Artificial Sequence
  Description of Artificial Sequence: Synthetic oligonucleotide
  Sense strand starting at position 2113 of SEQ ID NO: 587276
uguugagacaucuggagcu

SEQ ID NO: 780151 - RNA, 19 nt, Artificial Sequence
  Description of Artificial Sequence: Synthetic oligonucleotide
  Antisense strand to SEQ ID NO: 780150
agcuccagaugucucaaca

SEQ ID NO: 780152 - RNA, 19 nt, Artificial Sequence
  Description of Artificial Sequence: Synthetic oligonucleotide
  Sense strand starting at position 2551 of SEQ ID NO: 587276
ggagcauccuaaucacaaa

SEQ ID NO: 780153 - RNA, 19 nt, Artificial Sequence
  Description of Artificial Sequence: Synthetic oligonucleotide
  Antisense strand to SEQ ID NO: 780152
uuugugauuaggaugcucc

SEQ ID NO: 780154 - RNA, 19 nt, Artificial Sequence
  Description of Artificial Sequence: Synthetic oligonucleotide
  Sense strand starting at position 2819 of SEQ ID NO: 587276
cugugugucucucaaguag

SEQ ID NO: 780155 - RNA, 19 nt, Artificial Sequence
  Description of Artificial Sequence: Synthetic oligonucleotide
  Antisense strand to SEQ ID NO: 780154
cuacuugagagacacacag

SEQ ID NO: 780156 - RNA, 19 nt, Artificial Sequence
  Description of Artificial Sequence: Synthetic oligonucleotide
  Sense strand starting at position 2823 of SEQ ID NO: 587276
gugucucucaaguagaagu

SEQ ID NO: 780157 - RNA, 19 nt, Artificial Sequence
  Description of Artificial Sequence: Synthetic oligonucleotide
  Antisense strand to SEQ ID NO: 780156
acuucuacuugagagacac

SEQ ID NO: 780158 - RNA, 19 nt, Artificial Sequence
  Description of Artificial Sequence: Synthetic oligonucleotide
  Sense strand starting at position 2920 of SEQ ID NO: 587276
cgauuacaggugugaacua

SEQ ID NO: 780159 - RNA, 19 nt, Artificial Sequence
  Description of Artificial Sequence: Synthetic oligonucleotide
  Antisense strand to SEQ ID NO: 780158
uaguucacaccuguaaucg

SEQ ID NO: 780160 - RNA, 19 nt, Artificial Sequence
  Description of Artificial Sequence: Synthetic oligonucleotide
  Sense strand starting at position 2969 of SEQ ID NO: 587276
gugggcugccuagaaacau

SEQ ID NO: 780161 - RNA, 19 nt, Artificial Sequence
  Description of Artificial Sequence: Synthetic oligonucleotide
  Antisense strand to SEQ ID NO: 780160
auguuucuaggcagcccac

SEQ ID NO: 780162 - RNA, 19 nt, Artificial Sequence
  Description of Artificial Sequence: Synthetic oligonucleotide
  Sense strand starting at position 3416 of SEQ ID NO: 587276
ucaugucuccuccagaaug

SEQ ID NO: 780163 - RNA, 19 nt, Artificial Sequence
  Description of Artificial Sequence: Synthetic oligonucleotide
  Antisense strand to SEQ ID NO: 780162
cauucuggaggagacauga

SEQ ID NO: 780164 - RNA, 19 nt, Artificial Sequence
  Description of Artificial Sequence: Synthetic oligonucleotide
  Sense strand starting at position 3418 of SEQ ID NO: 587276
augucuccuccagaaugau

SEQ ID NO: 780165 - RNA, 19 nt, Artificial Sequence
  Description of Artificial Sequence: Synthetic oligonucleotide
  Antisense strand to SEQ ID NO: 780164
aucauucuggaggagacau

SEQ ID NO: 780166 - RNA, 19 nt, Artificial Sequence
  Description of Artificial Sequence: Synthetic oligonucleotide
  Sense strand starting at position 3427 of SEQ ID NO: 587276
ccagaaugaugcucuuaac

SEQ ID NO: 780167 - RNA, 19 nt, Artificial Sequence
  Description of Artificial Sequence: Synthetic oligonucleotide
  Antisense strand to SEQ ID NO: 780166
guuaagagcaucauucugg

SEQ ID NO: 780168 - RNA, 19 nt, Artificial Sequence
  Description of Artificial Sequence: Synthetic oligonucleotide
  Sense strand starting at position 3562 of SEQ ID NO: 587276
ugaagucacucacauuugu

SEQ ID NO: 780169 - RNA, 19 nt, Artificial Sequence
  Description of Artificial Sequence: Synthetic oligonucleotide
  Antisense strand to SEQ ID NO: 780168
acaaaugugagugacuuca

SEQ ID NO: 780170 - RNA, 19 nt, Artificial Sequence
  Description of Artificial Sequence: Synthetic oligonucleotide
  Sense strand starting at position 3706 of SEQ ID NO: 587276
agccauucucuccggcuua

SEQ ID NO: 780171 - RNA, 19 nt, Artificial Sequence
  Description of Artificial Sequence: Synthetic oligonucleotide
  Antisense strand to SEQ ID NO: 780170
uaagccggagagaauggcu

SEQ ID NO: 780172 - RNA, 19 nt, Artificial Sequence
  Description of Artificial Sequence: Synthetic oligonucleotide
  Sense strand starting at position 3737 of SEQ ID NO: 587276
caggaugggauguguugau

SEQ ID NO: 780173 - RNA, 19 nt, Artificial Sequence
  Description of Artificial Sequence: Synthetic oligonucleotide
  Antisense strand to SEQ ID NO: 780172
aucaacacaucccauccug

SEQ ID NO: 780174 - RNA, 19 nt, Artificial Sequence
  Description of Artificial Sequence: Synthetic oligonucleotide
  Sense strand starting at position 470 of SEQ ID NO: 587277
acauuaccuguacaguuau

SEQ ID NO: 780175 - RNA, 19 nt, Artificial Sequence
  Description of Artificial Sequence: Synthetic oligonucleotide
  Antisense strand to SEQ ID NO: 780174
auaacuguacagguaaugu

SEQ ID NO: 780176 - RNA, 19 nt, Artificial Sequence
  Description of Artificial Sequence: Synthetic oligonucleotide
  Sense strand starting at position 481 of SEQ ID NO: 587277
acaguuauguuugcccaua

SEQ ID NO: 780177 - RNA, 19 nt, Artificial Sequence
  Description of Artificial Sequence: Synthetic oligonucleotide
  Antisense strand to SEQ ID NO: 780176
uaugggcaaacauaacugu

SEQ ID NO: 780178 - RNA, 19 nt, Artificial Sequence
  Description of Artificial Sequence: Synthetic oligonucleotide
  Sense strand starting at position 483 of SEQ ID NO: 587277
aguuauguuugcccauaca

SEQ ID NO: 780179 - RNA, 19 nt, Artificial Sequence
  Description of Artificial Sequence: Synthetic oligonucleotide
  Antisense strand to SEQ ID NO: 780178
uguaugggcaaacauaacu

SEQ ID NO: 780180 - RNA, 19 nt, Artificial Sequence
  Description of Artificial Sequence: Synthetic oligonucleotide
  Sense strand starting at position 575 of SEQ ID NO: 587277
cuuagagagguucaguagu

SEQ ID NO: 780181 - RNA, 19 nt, Artificial Sequence
  Description of Artificial Sequence: Synthetic oligonucleotide
  Antisense strand to SEQ ID NO: 780180
acuacugaaccucucuaag

SEQ ID NO: 780182 - RNA, 19 nt, Artificial Sequence
  Description of Artificial Sequence: Synthetic oligonucleotide
  Sense strand starting at position 606 of SEQ ID NO: 587277
uuaguacuacuauguggua

SEQ ID NO: 780183 - RNA, 19 nt, Artificial Sequence
  Description of Artificial Sequence: Synthetic oligonucleotide
  Antisense strand to SEQ ID NO: 780182
uaccacauaguaguacuaa

SEQ ID NO: 780184 - RNA, 19 nt, Artificial Sequence
  Description of Artificial Sequence: Synthetic oligonucleotide
  Sense strand starting at position 608 of SEQ ID NO: 587277
aguacuacuaugugguaga

SEQ ID NO: 780185 - RNA, 19 nt, Artificial Sequence
  Description of Artificial Sequence: Synthetic oligonucleotide
  Antisense strand to SEQ ID NO: 780184
ucuaccacauaguaguacu

SEQ ID NO: 780186 - RNA, 19 nt, Artificial Sequence
  Description of Artificial Sequence: Synthetic oligonucleotide
  Sense strand starting at position 814 of SEQ ID NO: 587277
gguucaguccuaggaagag

SEQ ID NO: 780187 - RNA, 19 nt, Artificial Sequence
  Description of Artificial Sequence: Synthetic oligonucleotide
  Antisense strand to SEQ ID NO: 780186
cucuuccuaggacugaacc

SEQ ID NO: 780188 - RNA, 19 nt, Artificial Sequence
  Description of Artificial Sequence: Synthetic oligonucleotide
  Sense strand starting at position 1991 of SEQ ID NO: 587277
cgccgaauuccguccuuca

SEQ ID NO: 780189 - RNA, 19 nt, Artificial Sequence
  Description of Artificial Sequence: Synthetic oligonucleotide
  Antisense strand to SEQ ID NO: 780188
ugaaggacggaauucggcg

SEQ ID NO: 780190 - RNA, 19 nt, Artificial Sequence
  Description of Artificial Sequence: Synthetic oligonucleotide
  Sense strand starting at position 2323 of SEQ ID NO: 587277
acccuugugagcgagugau

SEQ ID NO: 780191 - RNA, 19 nt, Artificial Sequence
  Description of Artificial Sequence: Synthetic oligonucleotide
  Antisense strand to SEQ ID NO: 780190
aucacucgcucacaagggu

SEQ ID NO: 780192 - RNA, 19 nt, Artificial Sequence
  Description of Artificial Sequence: Synthetic oligonucleotide
  Sense strand starting at position 2399 of SEQ ID NO: 587277
gagggugugucuucucaag

SEQ ID NO: 780193 - RNA, 19 nt, Artificial Sequence
  Description of Artificial Sequence: Synthetic oligonucleotide
  Antisense strand to SEQ ID NO: 780192
cuugagaagacacacccuc

SEQ ID NO: 780194 - RNA, 19 nt, Artificial Sequence
  Description of Artificial Sequence: Synthetic oligonucleotide
  Sense strand starting at position 2477 of SEQ ID NO: 587277
agaggguggucggcaaaga

SEQ ID NO: 780195 - RNA, 19 nt, Artificial Sequence
  Description of Artificial Sequence: Synthetic oligonucleotide
  Antisense strand to SEQ ID NO: 780194
ucuuugccgaccacccucu

SEQ ID NO: 780196 - RNA, 19 nt, Artificial Sequence
  Description of Artificial Sequence: Synthetic oligonucleotide
  Sense strand starting at position 2568 of SEQ ID NO: 587277
ucgggugaggucugagagu

SEQ ID NO: 780197 - RNA, 19 nt, Artificial Sequence
  Description of Artificial Sequence: Synthetic oligonucleotide
  Antisense strand to SEQ ID NO: 780196
acucucagaccucacccga

SEQ ID NO: 780198 - RNA, 19 nt, Artificial Sequence
  Description of Artificial Sequence: Synthetic oligonucleotide
  Sense strand starting at position 2650 of SEQ ID NO: 587277
aaaucugaagaguggcaua

SEQ ID NO: 780199 - RNA, 19 nt, Artificial Sequence
  Description of Artificial Sequence: Synthetic oligonucleotide
  Antisense strand to SEQ ID NO: 780198
uaugccacucuucagauuu

SEQ ID NO: 780200 - RNA, 19 nt, Artificial Sequence
  Description of Artificial Sequence: Synthetic oligonucleotide
  Sense strand starting at position 2655 of SEQ ID NO: 587277
ugaagaguggcauaaucgu

SEQ ID NO: 780201 - RNA, 19 nt, Artificial Sequence
  Description of Artificial Sequence: Synthetic oligonucleotide
  Antisense strand to SEQ ID NO: 780200
acgauuaugccacucuuca

SEQ ID NO: 780202 - RNA, 19 nt, Artificial Sequence
  Description of Artificial Sequence: Synthetic oligonucleotide
  Sense strand starting at position 2663 of SEQ ID NO: 587277
ggcauaaucguagacguau

SEQ ID NO: 780203 - RNA, 19 nt, Artificial Sequence
  Description of Artificial Sequence: Synthetic oligonucleotide
  Antisense strand to SEQ ID NO: 780202
auacgucuacgauuaugcc

SEQ ID NO: 780204 - RNA, 19 nt, Artificial Sequence
  Description of Artificial Sequence: Synthetic oligonucleotide
  Sense strand starting at position 2676 of SEQ ID NO: 587277
acguauguucugcagaucu

SEQ ID NO: 780205 - RNA, 19 nt, Artificial Sequence
  Description of Artificial Sequence: Synthetic oligonucleotide
  Antisense strand to SEQ ID NO: 780204
agaucugcagaacauacgu

SEQ ID NO: 780206 - RNA, 19 nt, Artificial Sequence
  Description of Artificial Sequence: Synthetic oligonucleotide
  Sense strand starting at position 2678 of SEQ ID NO: 587277
guauguucugcagaucucu

SEQ ID NO: 780207 - RNA, 19 nt, Artificial Sequence
  Description of Artificial Sequence: Synthetic oligonucleotide
  Antisense strand to SEQ ID NO: 780206
agagaucugcagaacauac

SEQ ID NO: 780208 - RNA, 19 nt, Artificial Sequence
  Description of Artificial Sequence: Synthetic oligonucleotide
  Sense strand starting at position 3014 of SEQ ID NO: 587277
guugcuugagaagguaaga

SEQ ID NO: 780209 - RNA, 19 nt, Artificial Sequence
  Description of Artificial Sequence: Synthetic oligonucleotide
  Antisense strand to SEQ ID NO: 780208
ucuuaccuucucaagcaac

SEQ ID NO: 780210 - RNA, 19 nt, Artificial Sequence
  Description of Artificial Sequence: Synthetic oligonucleotide
  Sense strand starting at position 3024 of SEQ ID NO: 587277
aagguaagaguccgagaug

SEQ ID NO: 780211 - RNA, 19 nt, Artificial Sequence
  Description of Artificial Sequence: Synthetic oligonucleotide
  Antisense strand to SEQ ID NO: 780210
caucucggacucuuaccuu

SEQ ID NO: 780212 - RNA, 19 nt, Artificial Sequence
  Description of Artificial Sequence: Synthetic oligonucleotide
  Sense strand starting at position 3027 of SEQ ID NO: 587277
guaagaguccgagaugucu

SEQ ID NO: 780213 - RNA, 19 nt, Artificial Sequence
  Description of Artificial Sequence: Synthetic oligonucleotide
  Antisense strand to SEQ ID NO: 780212
agacaucucggacucuuac

SEQ ID NO: 780214 - RNA, 19 nt, Artificial Sequence
  Description of Artificial Sequence: Synthetic oligonucleotide
  Sense strand starting at position 3029 of SEQ ID NO: 587277
aagaguccgagaugucuga

SEQ ID NO: 780215 - RNA, 19 nt, Artificial Sequence
  Description of Artificial Sequence: Synthetic oligonucleotide
  Antisense strand to SEQ ID NO: 780214
ucagacaucucggacucuu

SEQ ID NO: 780216 - RNA, 19 nt, Artificial Sequence
  Description of Artificial Sequence: Synthetic oligonucleotide
  Sense strand starting at position 3033 of SEQ ID NO: 587277
guccgagaugucugaugau

SEQ ID NO: 780217 - RNA, 19 nt, Artificial Sequence
  Description of Artificial Sequence: Synthetic oligonucleotide
  Antisense strand to SEQ ID NO: 780216
aucaucagacaucucggac

SEQ ID NO: 780218 - RNA, 19 nt, Artificial Sequence
  Description of Artificial Sequence: Synthetic oligonucleotide
  Sense strand starting at position 3039 of SEQ ID NO: 587277
gaugucugaugauuccuuu

SEQ ID NO: 780219 - RNA, 19 nt, Artificial Sequence
  Description of Artificial Sequence: Synthetic oligonucleotide
  Antisense strand to SEQ ID NO: 780218
aaaggaaucaucagacauc

SEQ ID NO: 780220 - RNA, 19 nt, Artificial Sequence
  Description of Artificial Sequence: Synthetic oligonucleotide
  Sense strand starting at position 3079 of SEQ ID NO: 587277
cgguguuuccugagacggu

SEQ ID NO: 780221 - RNA, 19 nt, Artificial Sequence
  Description of Artificial Sequence: Synthetic oligonucleotide
  Antisense strand to SEQ ID NO: 780220
accgucucaggaaacaccg

SEQ ID NO: 780222 - RNA, 19 nt, Artificial Sequence
  Description of Artificial Sequence: Synthetic oligonucleotide
  Sense strand starting at position 3138 of SEQ ID NO: 587277
aggguuacaguuuggucau

SEQ ID NO: 780223 - RNA, 19 nt, Artificial Sequence
  Description of Artificial Sequence: Synthetic oligonucleotide
  Antisense strand to SEQ ID NO: 780222
augaccaaacuguaacccu

SEQ ID NO: 780224 - RNA, 19 nt, Artificial Sequence
  Description of Artificial Sequence: Synthetic oligonucleotide
  Sense strand starting at position 3141 of SEQ ID NO: 587277
guuacaguuuggucaucac

SEQ ID NO: 780225 - RNA, 19 nt, Artificial Sequence
  Description of Artificial Sequence: Synthetic oligonucleotide
  Antisense strand to SEQ ID NO: 780224
gugaugaccaaacuguaac

SEQ ID NO: 780226 - RNA, 19 nt, Artificial Sequence
  Description of Artificial Sequence: Synthetic oligonucleotide
  Sense strand starting at position 3144 of SEQ ID NO: 587277
acaguuuggucaucacuga

SEQ ID NO: 780227 - RNA, 19 nt, Artificial Sequence
  Description of Artificial Sequence: Synthetic oligonucleotide
  Antisense strand to SEQ ID NO: 780226
ucagugaugaccaaacugu

SEQ ID NO: 780228 - RNA, 19 nt, Artificial Sequence
  Description of Artificial Sequence: Synthetic oligonucleotide
  Sense strand starting at position 3145 of SEQ ID NO: 587277
caguuuggucaucacugau

SEQ ID NO: 780229 - RNA, 19 nt, Artificial Sequence
  Description of Artificial Sequence: Synthetic oligonucleotide
  Antisense strand to SEQ ID NO: 780228
aucagugaugaccaaacug

SEQ ID NO: 780230 - RNA, 19 nt, Artificial Sequence
  Description of Artificial Sequence: Synthetic oligonucleotide
  Sense strand starting at position 3148 of SEQ ID NO: 587277
uuuggucaucacugauagu

SEQ ID NO: 780231 - RNA, 19 nt, Artificial Sequence
  Description of Artificial Sequence: Synthetic oligonucleotide
  Antisense strand to SEQ ID NO: 780230
acuaucagugaugaccaaa

SEQ ID NO: 780232 - RNA, 19 nt, Artificial Sequence
  Description of Artificial Sequence: Synthetic oligonucleotide
  Sense strand starting at position 3161 of SEQ ID NO: 587277
gauaguuauuuacugcagu

SEQ ID NO: 780233 - RNA, 19 nt, Artificial Sequence
  Description of Artificial Sequence: Synthetic oligonucleotide
  Antisense strand to SEQ ID NO: 780232
acugcaguaaauaacuauc

SEQ ID NO: 780234 - RNA, 19 nt, Artificial Sequence
  Description of Artificial Sequence: Synthetic oligonucleotide
  Sense strand starting at position 3167 of SEQ ID NO: 587277
uauuuacugcagugugaua

SEQ ID NO: 780235 - RNA, 19 nt, Artificial Sequence
  Description of Artificial Sequence: Synthetic oligonucleotide
  Antisense strand to SEQ ID NO: 780234
uaucacacugcaguaaaua

SEQ ID NO: 780236 - RNA, 19 nt, Artificial Sequence
  Description of Artificial Sequence: Synthetic oligonucleotide
  Sense strand starting at position 3169 of SEQ ID NO: 587277
uuuacugcagugugauaca

SEQ ID NO: 780237 - RNA, 19 nt, Artificial Sequence
  Description of Artificial Sequence: Synthetic oligonucleotide
  Antisense strand to SEQ ID NO: 780236
uguaucacacugcaguaaa

SEQ ID NO: 780238 - RNA, 19 nt, Artificial Sequence
  Description of Artificial Sequence: Synthetic oligonucleotide
  Sense strand starting at position 3546 of SEQ ID NO: 587277
ggagaugcggcauacagua

SEQ ID NO: 780239 - RNA, 19 nt, Artificial Sequence
  Description of Artificial Sequence: Synthetic oligonucleotide
  Antisense strand to SEQ ID NO: 780238
uacuguaugccgcaucucc

SEQ ID NO: 780240 - RNA, 19 nt, Artificial Sequence
  Description of Artificial Sequence: Synthetic oligonucleotide
  Sense strand starting at position 3580 of SEQ ID NO: 587277
gaaagaauauuuggaaagu

SEQ ID NO: 780241 - RNA, 19 nt, Artificial Sequence
  Description of Artificial Sequence: Synthetic oligonucleotide
  Antisense strand to SEQ ID NO: 780240
acuuuccaaauauucuuuc

SEQ ID NO: 780242 - RNA, 19 nt, Artificial Sequence
  Description of Artificial Sequence: Synthetic oligonucleotide
  Sense strand starting at position 3749 of SEQ ID NO: 587277
uagugaguauguucuggau

SEQ ID NO: 780243 - RNA, 19 nt, Artificial Sequence
  Description of Artificial Sequence: Synthetic oligonucleotide
  Antisense strand to SEQ ID NO: 780242
auccagaacauacucacua

SEQ ID NO: 780244 - RNA, 19 nt, Artificial Sequence
  Description of Artificial Sequence: Synthetic oligonucleotide
  Sense strand starting at position 3753 of SEQ ID NO: 587277
gaguauguucuggaugguc

SEQ ID NO: 780245 - RNA, 19 nt, Artificial Sequence
  Description of Artificial Sequence: Synthetic oligonucleotide
  Antisense strand to SEQ ID NO: 780244
gaccauccagaacauacuc

SEQ ID NO: 780246 - RNA, 19 nt, Artificial Sequence
  Description of Artificial Sequence: Synthetic oligonucleotide
  Sense strand starting at position 3761 of SEQ ID NO: 587277
ucuggaugguccucugagu

SEQ ID NO: 780247 - RNA, 19 nt, Artificial Sequence
  Description of Artificial Sequence: Synthetic oligonucleotide
  Antisense strand to SEQ ID NO: 780246
acucagaggaccauccaga

SEQ ID NO: 780248 - RNA, 19 nt, Artificial Sequence
  Description of Artificial Sequence: Synthetic oligonucleotide
  Sense strand starting at position 3793 of SEQ ID NO: 587277
agcuguauguucuuacaug

SEQ ID NO: 780249 - RNA, 19 nt, Artificial Sequence
  Description of Artificial Sequence: Synthetic oligonucleotide
  Antisense strand to SEQ ID NO: 780248
cauguaagaacauacagcu

SEQ ID NO: 780250 - RNA, 19 nt, Artificial Sequence
  Description of Artificial Sequence: Synthetic oligonucleotide
  Sense strand starting at position 3860 of SEQ ID NO: 587277
guauaugauuguucguaca

SEQ ID NO: 780251 - RNA, 19 nt, Artificial Sequence
  Description of Artificial Sequence: Synthetic oligonucleotide
  Antisense strand to SEQ ID NO: 780250
uguacgaacaaucauauac

SEQ ID NO: 780252 - RNA, 19 nt, Artificial Sequence
  Description of Artificial Sequence: Synthetic oligonucleotide
  Sense strand starting at position 3862 of SEQ ID NO: 587277
auaugauuguucguacaug

SEQ ID NO: 780253 - RNA, 19 nt, Artificial Sequence
  Description of Artificial Sequence: Synthetic oligonucleotide
  Antisense strand to SEQ ID NO: 780252
cauguacgaacaaucauau

SEQ ID NO: 780254 - RNA, 19 nt, Artificial Sequence
  Description of Artificial Sequence: Synthetic oligonucleotide
  Sense strand starting at position 37 of SEQ ID NO: 587278
uugcaaaucuuguuaugug

SEQ ID NO: 780255 - RNA, 19 nt, Artificial Sequence
  Description of Artificial Sequence: Synthetic oligonucleotide
  Antisense strand to SEQ ID NO: 780254
cacauaacaagauuugcaa

SEQ ID NO: 780256 - RNA, 19 nt, Artificial Sequence
  Description of Artificial Sequence: Synthetic oligonucleotide
  Sense strand starting at position 118 of SEQ ID NO: 587278
gggucauuaacucgcauua

SEQ ID NO: 780257 - RNA, 19 nt, Artificial Sequence
  Description of Artificial Sequence: Synthetic oligonucleotide
  Antisense strand to SEQ ID NO: 780256
uaaugcgaguuaaugaccc

SEQ ID NO: 780258 - RNA, 19 nt, Artificial Sequence
  Description of Artificial Sequence: Synthetic oligonucleotide
  Sense strand starting at position 223 of SEQ ID NO: 587278
cgcgauucugccucucuca

SEQ ID NO: 780259 - RNA, 19 nt, Artificial Sequence
  Description of Artificial Sequence: Synthetic oligonucleotide
  Antisense strand to SEQ ID NO: 780258
ugagagaggcagaaucgcg

SEQ ID NO: 780260 - RNA, 19 nt, Artificial Sequence
  Description of Artificial Sequence: Synthetic oligonucleotide
  Sense strand starting at position 640 of SEQ ID NO: 587278
agcucagagcuauagucuu

SEQ ID NO: 780261 - RNA, 19 nt, Artificial Sequence
  Description of Artificial Sequence: Synthetic oligonucleotide
  Antisense strand to SEQ ID NO: 780260
aagacuauagcucugagcu

SEQ ID NO: 780262 - RNA, 19 nt, Artificial Sequence
  Description of Artificial Sequence: Synthetic oligonucleotide
  Sense strand starting at position 648 of SEQ ID NO: 587278
gcuauagucuucuuccaca

SEQ ID NO: 780263 - RNA, 19 nt, Artificial Sequence
  Description of Artificial Sequence: Synthetic oligonucleotide
  Antisense strand to SEQ ID NO: 780262
uguggaagaagacuauagc

SEQ ID NO: 780264 - RNA, 19 nt, Artificial Sequence
  Description of Artificial Sequence: Synthetic oligonucleotide
  Sense strand starting at position 663 of SEQ ID NO: 587278
cacaaauacgugugugcuu

SEQ ID NO: 780265 - RNA, 19 nt, Artificial Sequence
  Description of Artificial Sequence: Synthetic oligonucleotide
  Antisense strand to SEQ ID NO: 780264
aagcacacacguauuugug

SEQ ID NO: 780266 - RNA, 19 nt, Artificial Sequence
  Description of Artificial Sequence: Synthetic oligonucleotide
  Sense strand starting at position 747 of SEQ ID NO: 587278
ccuuucguccagugaccaa

SEQ ID NO: 780267 - RNA, 19 nt, Artificial Sequence
  Description of Artificial Sequence: Synthetic oligonucleotide
  Antisense strand to SEQ ID NO: 780266
uuggucacuggacgaaagg

SEQ ID NO: 780268 - RNA, 19 nt, Artificial Sequence
  Description of Artificial Sequence: Synthetic oligonucleotide
  Sense strand starting at position 1032 of SEQ ID NO: 587278
cugagugugugcauccgua

SEQ ID NO: 780269 - RNA, 19 nt, Artificial Sequence
  Description of Artificial Sequence: Synthetic oligonucleotide
  Antisense strand to SEQ ID NO: 780268
uacggaugcacacacucag

SEQ ID NO: 780270 - RNA, 19 nt, Artificial Sequence
  Description of Artificial Sequence: Synthetic oligonucleotide
  Sense strand starting at position 2282 of SEQ ID NO: 587278
cugguuuggccuggagcaa

SEQ ID NO: 780271 - RNA, 19 nt, Artificial Sequence
  Description of Artificial Sequence: Synthetic oligonucleotide
  Antisense strand to SEQ ID NO: 780270
uugcuccaggccaaaccag

SEQ ID NO: 780272 - RNA, 19 nt, Artificial Sequence
  Description of Artificial Sequence: Synthetic oligonucleotide
  Sense strand starting at position 2452 of SEQ ID NO: 587278
uugagucaugucuguauac

SEQ ID NO: 780273 - RNA, 19 nt, Artificial Sequence
  Description of Artificial Sequence: Synthetic oligonucleotide
  Antisense strand to SEQ ID NO: 780272
guauacagacaugacucaa

SEQ ID NO: 780274 - RNA, 19 nt, Artificial Sequence
  Description of Artificial Sequence: Synthetic oligonucleotide
  Sense strand starting at position 2454 of SEQ ID NO: 587278
gagucaugucuguauaccu

SEQ ID NO: 780275 - RNA, 19 nt, Artificial Sequence
  Description of Artificial Sequence: Synthetic oligonucleotide
  Antisense strand to SEQ ID NO: 780274
agguauacagacaugacuc

SEQ ID NO: 780276 - RNA, 19 nt, Artificial Sequence
  Description of Artificial Sequence: Synthetic oligonucleotide
  Sense strand starting at position 2511 of SEQ ID NO: 587278
auguuuccucuagauacug

SEQ ID NO: 780277 - RNA, 19 nt, Artificial Sequence
  Description of Artificial Sequence: Synthetic oligonucleotide
  Antisense strand to SEQ ID NO: 780276
caguaucuagaggaaacau

SEQ ID NO: 780278 - RNA, 19 nt, Artificial Sequence
  Description of Artificial Sequence: Synthetic oligonucleotide
  Sense strand starting at position 2527 of SEQ ID NO: 587278
cugcgugagcugcucaaau

SEQ ID NO: 780279 - RNA, 19 nt, Artificial Sequence
  Description of Artificial Sequence: Synthetic oligonucleotide
  Antisense strand to SEQ ID NO: 780278
auuugagcagcucacgcag

SEQ ID NO: 780280 - RNA, 19 nt, Artificial Sequence
  Description of Artificial Sequence: Synthetic oligonucleotide
  Sense strand starting at position 2529 of SEQ ID NO: 587278
gcgugagcugcucaaauuu

SEQ ID NO: 780281 - RNA, 19 nt, Artificial Sequence
  Description of Artificial Sequence: Synthetic oligonucleotide
  Antisense strand to SEQ ID NO: 780280
aaauuugagcagcucacgc

SEQ ID NO: 780282 - RNA, 19 nt, Artificial Sequence
  Description of Artificial Sequence: Synthetic oligonucleotide
  Sense strand starting at position 2573 of SEQ ID NO: 587278
ggauuuccgagucgaaggu

SEQ ID NO: 780283 - RNA, 19 nt, Artificial Sequence
  Description of Artificial Sequence: Synthetic oligonucleotide
  Antisense strand to SEQ ID NO: 780282
accuucgacucggaaaucc

SEQ ID NO: 780284 - RNA, 19 nt, Artificial Sequence
  Description of Artificial Sequence: Synthetic oligonucleotide
  Sense strand starting at position 2582 of SEQ ID NO: 587278
agucgaagguuugcagaua

SEQ ID NO: 780285 - RNA, 19 nt, Artificial Sequence
  Description of Artificial Sequence: Synthetic oligonucleotide
  Antisense strand to SEQ ID NO: 780284
uaucugcaaaccuucgacu

SEQ ID NO: 780286 - RNA, 19 nt, Artificial Sequence
  Description of Artificial Sequence: Synthetic oligonucleotide
  Sense strand starting at position 2617 of SEQ ID NO: 587278
agagcucucuuucuuguga

SEQ ID NO: 780287 - RNA, 19 nt, Artificial Sequence
  Description of Artificial Sequence: Synthetic oligonucleotide
  Antisense strand to SEQ ID NO: 780286
ucacaagaaagagagcucu

SEQ ID NO: 780288 - RNA, 19 nt, Artificial Sequence
  Description of Artificial Sequence: Synthetic oligonucleotide
  Sense strand starting at position 2618 of SEQ ID NO: 587278
gagcucucuuucuugugaa

SEQ ID NO: 780289 - RNA, 19 nt, Artificial Sequence
  Description of Artificial Sequence: Synthetic oligonucleotide
  Antisense strand to SEQ ID NO: 780288
uucacaagaaagagagcuc

SEQ ID NO: 780290 - RNA, 19 nt, Artificial Sequence
  Description of Artificial Sequence: Synthetic oligonucleotide
  Sense strand starting at position 2803 of SEQ ID NO: 587278
cuggauuucuguuacucau

SEQ ID NO: 780291 - RNA, 19 nt, Artificial Sequence
  Description of Artificial Sequence: Synthetic oligonucleotide
  Antisense strand to SEQ ID NO: 780290
augaguaacagaaauccag

SEQ ID NO: 780292 - RNA, 19 nt, Artificial Sequence
  Description of Artificial Sequence: Synthetic oligonucleotide
  Sense strand starting at position 2869 of SEQ ID NO: 587278
ggaaacauguaauagauaa

SEQ ID NO: 780293 - RNA, 19 nt, Artificial Sequence
  Description of Artificial Sequence: Synthetic oligonucleotide
  Antisense strand to SEQ ID NO: 780292
uuaucuauuacauguuucc

SEQ ID NO: 780294 - RNA, 19 nt, Artificial Sequence
  Description of Artificial Sequence: Synthetic oligonucleotide
  Sense strand starting at position 2877 of SEQ ID NO: 587278
guaauagauaaguguggaa

SEQ ID NO: 780295 - RNA, 19 nt, Artificial Sequence
  Description of Artificial Sequence: Synthetic oligonucleotide
  Antisense strand to SEQ ID NO: 780294
uuccacacuuaucuauuac

SEQ ID NO: 780296 - RNA, 19 nt, Artificial Sequence
  Description of Artificial Sequence: Synthetic oligonucleotide
  Sense strand starting at position 2889 of SEQ ID NO: 587278
uguggaauaucccaggaac

SEQ ID NO: 780297 - RNA, 19 nt, Artificial Sequence
  Description of Artificial Sequence: Synthetic oligonucleotide
  Antisense strand to SEQ ID NO: 780296
guuccugggauauuccaca

SEQ ID NO: 780298 - RNA, 19 nt, Artificial Sequence
  Description of Artificial Sequence: Synthetic oligonucleotide
  Sense strand starting at position 2945 of SEQ ID NO: 587278
cuagaauagcuaggagcuu

SEQ ID NO: 780299 - RNA, 19 nt, Artificial Sequence
  Description of Artificial Sequence: Synthetic oligonucleotide
  Antisense strand to SEQ ID NO: 780298
aagcuccuagcuauucuag

SEQ ID NO: 780300 - RNA, 19 nt, Artificial Sequence
  Description of Artificial Sequence: Synthetic oligonucleotide
  Sense strand starting at position 3001 of SEQ ID NO: 587278
guggaaagauguccacauu

SEQ ID NO: 780301 - RNA, 19 nt, Artificial Sequence
  Description of Artificial Sequence: Synthetic oligonucleotide
  Antisense strand to SEQ ID NO: 780300
aauguggacaucuuuccac

SEQ ID NO: 780302 - RNA, 19 nt, Artificial Sequence
  Description of Artificial Sequence: Synthetic oligonucleotide
  Sense strand starting at position 3060 of SEQ ID NO: 587278
gguuaaguuaaauagcagu

SEQ ID NO: 780303 - RNA, 19 nt, Artificial Sequence
  Description of Artificial Sequence: Synthetic oligonucleotide
  Antisense strand to SEQ ID NO: 780302
acugcuauuuaacuuaacc

SEQ ID NO: 780304 - RNA, 19 nt, Artificial Sequence
  Description of Artificial Sequence: Synthetic oligonucleotide
  Sense strand starting at position 3066 of SEQ ID NO: 587278
guuaaauagcagugaggug

SEQ ID NO: 780305 - RNA, 19 nt, Artificial Sequence
  Description of Artificial Sequence: Synthetic oligonucleotide
  Antisense strand to SEQ ID NO: 780304
caccucacugcuauuuaac

SEQ ID NO: 780306 - RNA, 19 nt, Artificial Sequence
  Description of Artificial Sequence: Synthetic oligonucleotide
  Sense strand starting at position 3075 of SEQ ID NO: 587278
cagugagguguccaggguu

SEQ ID NO: 780307 - RNA, 19 nt, Artificial Sequence
  Description of Artificial Sequence: Synthetic oligonucleotide
  Antisense strand to SEQ ID NO: 780306
aacccuggacaccucacug

SEQ ID NO: 780308 - RNA, 19 nt, Artificial Sequence
  Description of Artificial Sequence: Synthetic oligonucleotide
  Sense strand starting at position 3209 of SEQ ID NO: 587278
agcguagagccauaaggaa

SEQ ID NO: 780309 - RNA, 19 nt, Artificial Sequence
  Description of Artificial Sequence: Synthetic oligonucleotide
  Antisense strand to SEQ ID NO: 780308
uuccuuauggcucuacgcu

SEQ ID NO: 780310 - RNA, 19 nt, Artificial Sequence
  Description of Artificial Sequence: Synthetic oligonucleotide
  Sense strand starting at position 3286 of SEQ ID NO: 587278
augguacgcuuccugaaau

SEQ ID NO: 780311 - RNA, 19 nt, Artificial Sequence
  Description of Artificial Sequence: Synthetic oligonucleotide
  Antisense strand to SEQ ID NO: 780310
auuucaggaagcguaccau

SEQ ID NO: 780312 - RNA, 19 nt, Artificial Sequence
  Description of Artificial Sequence: Synthetic oligonucleotide
  Sense strand starting at position 3331 of SEQ ID NO: 587278
ucaggaggaugcuucuuua

SEQ ID NO: 780313 - RNA, 19 nt, Artificial Sequence
  Description of Artificial Sequence: Synthetic oligonucleotide
  Antisense strand to SEQ ID NO: 780312
uaaagaagcauccuccuga

SEQ ID NO: 780314 - RNA, 19 nt, Artificial Sequence
  Description of Artificial Sequence: Synthetic oligonucleotide
  Sense strand starting at position 3334 of SEQ ID NO: 587278
ggaggaugcuucuuuaaau

SEQ ID NO: 780315 - RNA, 19 nt, Artificial Sequence
  Description of Artificial Sequence: Synthetic oligonucleotide
  Antisense strand to SEQ ID NO: 780314
auuuaaagaagcauccucc

SEQ ID NO: 780316 - RNA, 19 nt, Artificial Sequence
  Description of Artificial Sequence: Synthetic oligonucleotide
  Sense strand starting at position 3335 of SEQ ID NO: 587278
gaggaugcuucuuuaaaug

SEQ ID NO: 780317 - RNA, 19 nt, Artificial Sequence
  Description of Artificial Sequence: Synthetic oligonucleotide
  Antisense strand to SEQ ID NO: 780316
cauuuaaagaagcauccuc

SEQ ID NO: 780318 - RNA, 19 nt, Artificial Sequence
  Description of Artificial Sequence: Synthetic oligonucleotide
  Sense strand starting at position 3397 of SEQ ID NO: 587278
cacuuagggcuuugaauag

SEQ ID NO: 780319 - RNA, 19 nt, Artificial Sequence
  Description of Artificial Sequence: Synthetic oligonucleotide
  Antisense strand to SEQ ID NO: 780318
cuauucaaagcccuaagug

SEQ ID NO: 780320 - RNA, 19 nt, Artificial Sequence
  Description of Artificial Sequence: Synthetic oligonucleotide
  Sense strand starting at position 3671 of SEQ ID NO: 587278
ugcagugaacuaugagugu

SEQ ID NO: 780321 - RNA, 19 nt, Artificial Sequence
  Description of Artificial Sequence: Synthetic oligonucleotide
  Antisense strand to SEQ ID NO: 780320
acacucauaguucacugca

SEQ ID NO: 780322 - RNA, 19 nt, Artificial Sequence
  Description of Artificial Sequence: Synthetic oligonucleotide
  Sense strand starting at position 3675 of SEQ ID NO: 587278
gugaacuaugagugugcca

SEQ ID NO: 780323 - RNA, 19 nt, Artificial Sequence
  Description of Artificial Sequence: Synthetic oligonucleotide
  Antisense strand to SEQ ID NO: 780322
uggcacacucauaguucac

SEQ ID NO: 780324 - RNA, 19 nt, Artificial Sequence
  Description of Artificial Sequence: Synthetic oligonucleotide
  Sense strand starting at position 3677 of SEQ ID NO: 587278
gaacuaugagugugccacu

SEQ ID NO: 780325 - RNA, 19 nt, Artificial Sequence
  Description of Artificial Sequence: Synthetic oligonucleotide
  Antisense strand to SEQ ID NO: 780324
aguggcacacucauaguuc

SEQ ID NO: 780326 - RNA, 19 nt, Artificial Sequence
  Description of Artificial Sequence: Synthetic oligonucleotide
  Sense strand starting at position 3908 of SEQ ID NO: 587278
cuucuugguucuuucuauu

SEQ ID NO: 780327 - RNA, 19 nt, Artificial Sequence
  Description of Artificial Sequence: Synthetic oligonucleotide
  Antisense strand to SEQ ID NO: 780326
aauagaaagaaccaagaag

SEQ ID NO: 780328 - RNA, 19 nt, Artificial Sequence
  Description of Artificial Sequence: Synthetic oligonucleotide
  Sense strand starting at position 3911 of SEQ ID NO: 587278
cuugguucuuucuauuuau

SEQ ID NO: 780329 - RNA, 19 nt, Artificial Sequence
  Description of Artificial Sequence: Synthetic oligonucleotide
  Antisense strand to SEQ ID NO: 780328
auaaauagaaagaaccaag

SEQ ID NO: 780330 - RNA, 19 nt, Artificial Sequence
  Description of Artificial Sequence: Synthetic oligonucleotide
  Sense strand starting at position 3966 of SEQ ID NO: 587278
uugcauagcuucucaguga

SEQ ID NO: 780331 - RNA, 19 nt, Artificial Sequence
  Description of Artificial Sequence: Synthetic oligonucleotide
  Antisense strand to SEQ ID NO: 780330
ucacugagaagcuaugcaa

SEQ ID NO: 780332 - RNA, 19 nt, Artificial Sequence
  Description of Artificial Sequence: Synthetic oligonucleotide
  Sense strand starting at position 3970 of SEQ ID NO: 587278
auagcuucucagugacaga

SEQ ID NO: 780333 - RNA, 19 nt, Artificial Sequence
  Description of Artificial Sequence: Synthetic oligonucleotide
  Antisense strand to SEQ ID NO: 780332
ucugucacugagaagcuau

SEQ ID NO: 780334 - RNA, 19 nt, Artificial Sequence
  Description of Artificial Sequence: Synthetic oligonucleotide
  Sense strand starting at position 46 of SEQ ID NO: 587279
uuuaucuucgcagagugaa

SEQ ID NO: 780335 - RNA, 19 nt, Artificial Sequence
  Description of Artificial Sequence: Synthetic oligonucleotide
  Antisense strand to SEQ ID NO: 780334
uucacucugcgaagauaaa

SEQ ID NO: 780336 - RNA, 19 nt, Artificial Sequence
  Description of Artificial Sequence: Synthetic oligonucleotide
  Sense strand starting at position 49 of SEQ ID NO: 587279
aucuucgcagagugaauuu

SEQ ID NO: 780337 - RNA, 19 nt, Artificial Sequence
  Description of Artificial Sequence: Synthetic oligonucleotide
  Antisense strand to SEQ ID NO: 780336
aaauucacucugcgaagau

SEQ ID NO: 780338 - RNA, 19 nt, Artificial Sequence
  Description of Artificial Sequence: Synthetic oligonucleotide
  Sense strand starting at position 414 of SEQ ID NO: 587279
aguaacagaguuggauaau

SEQ ID NO: 780339 - RNA, 19 nt, Artificial Sequence
  Description of Artificial Sequence: Synthetic oligonucleotide
  Antisense strand to SEQ ID NO: 780338
auuauccaacucuguuacu

SEQ ID NO: 780340 - RNA, 19 nt, Artificial Sequence
  Description of Artificial Sequence: Synthetic oligonucleotide
  Sense strand starting at position 423 of SEQ ID NO: 587279
guuggauaauacuuuggga

SEQ ID NO: 780341 - RNA, 19 nt, Artificial Sequence
  Description of Artificial Sequence: Synthetic oligonucleotide
  Antisense strand to SEQ ID NO: 780340
ucccaaaguauuauccaac

SEQ ID NO: 780342 - RNA, 19 nt, Artificial Sequence
  Description of Artificial Sequence: Synthetic oligonucleotide
  Sense strand starting at position 510 of SEQ ID NO: 587279
acguucuuagauugaucca

SEQ ID NO: 780343 - RNA, 19 nt, Artificial Sequence
  Description of Artificial Sequence: Synthetic oligonucleotide
  Antisense strand to SEQ ID NO: 780342
uggaucaaucuaagaacgu

SEQ ID NO: 780344 - RNA, 19 nt, Artificial Sequence
  Description of Artificial Sequence: Synthetic oligonucleotide
  Sense strand starting at position 601 of SEQ ID NO: 587279
gcaagaguuacugaagguc

SEQ ID NO: 780345 - RNA, 19 nt, Artificial Sequence
  Description of Artificial Sequence: Synthetic oligonucleotide
  Antisense strand to SEQ ID NO: 780344
gaccuucaguaacucuugc

SEQ ID NO: 780346 - RNA, 19 nt, Artificial Sequence
  Description of Artificial Sequence: Synthetic oligonucleotide
  Sense strand starting at position 604 of SEQ ID NO: 587279
agaguuacugaaggucaau

SEQ ID NO: 780347 - RNA, 19 nt, Artificial Sequence
  Description of Artificial Sequence: Synthetic oligonucleotide
  Antisense strand to SEQ ID NO: 780346
auugaccuucaguaacucu

SEQ ID NO: 780348 - RNA, 19 nt, Artificial Sequence
  Description of Artificial Sequence: Synthetic oligonucleotide
  Sense strand starting at position 607 of SEQ ID NO: 587279
guuacugaaggucaauauu

SEQ ID NO: 780349 - RNA, 19 nt, Artificial Sequence
  Description of Artificial Sequence: Synthetic oligonucleotide
  Antisense strand to SEQ ID NO: 780348
aauauugaccuucaguaac

SEQ ID NO: 780350 - RNA, 19 nt, Artificial Sequence
  Description of Artificial Sequence: Synthetic oligonucleotide
  Sense strand starting at position 615 of SEQ ID NO: 587279
aggucaauauucuuaugca

SEQ ID NO: 780351 - RNA, 19 nt, Artificial Sequence
  Description of Artificial Sequence: Synthetic oligonucleotide
  Antisense strand to SEQ ID NO: 780350
ugcauaagaauauugaccu

SEQ ID NO: 780352 - RNA, 19 nt, Artificial Sequence
  Description of Artificial Sequence: Synthetic oligonucleotide
  Sense strand starting at position 1086 of SEQ ID NO: 587279
caguuuacguaaucccaga

SEQ ID NO: 780353 - RNA, 19 nt, Artificial Sequence
  Description of Artificial Sequence: Synthetic oligonucleotide
  Antisense strand to SEQ ID NO: 780352
ucugggauuacguaaacug

SEQ ID NO: 780354 - RNA, 19 nt, Artificial Sequence
  Description of Artificial Sequence: Synthetic oligonucleotide
  Sense strand starting at position 1153 of SEQ ID NO: 587279
gaucuuugaacccgggagu

SEQ ID NO: 780355 - RNA, 19 nt, Artificial Sequence
  Description of Artificial Sequence: Synthetic oligonucleotide
  Antisense strand to SEQ ID NO: 780354
acucccggguucaaagauc

SEQ ID NO: 780356 - RNA, 19 nt, Artificial Sequence
  Description of Artificial Sequence: Synthetic oligonucleotide
  Sense strand starting at position 1312 of SEQ ID NO: 587279
augggaugaggcugucuaa

SEQ ID NO: 780357 - RNA, 19 nt, Artificial Sequence
  Description of Artificial Sequence: Synthetic oligonucleotide
  Antisense strand to SEQ ID NO: 780356
uuagacagccucaucccau

SEQ ID NO: 780358 - RNA, 19 nt, Artificial Sequence
  Description of Artificial Sequence: Synthetic oligonucleotide
  Sense strand starting at position 1669 of SEQ ID NO: 587279
gggucugaacccugaugca

SEQ ID NO: 780359 - RNA, 19 nt, Artificial Sequence
  Description of Artificial Sequence: Synthetic oligonucleotide
  Antisense strand to SEQ ID NO: 780358
ugcaucaggguucagaccc

SEQ ID NO: 780360 - RNA, 19 nt, Artificial Sequence
  Description of Artificial Sequence: Synthetic oligonucleotide
  Sense strand starting at position 1760 of SEQ ID NO: 587279
agggcuuuaccagaacagu

SEQ ID NO: 780361 - RNA, 19 nt, Artificial Sequence
  Description of Artificial Sequence: Synthetic oligonucleotide
  Antisense strand to SEQ ID NO: 780360
acuguucugguaaagcccu

SEQ ID NO: 780362 - RNA, 19 nt, Artificial Sequence
  Description of Artificial Sequence: Synthetic oligonucleotide
  Sense strand starting at position 1998 of SEQ ID NO: 587279
ggugguuuccaggaguaac

SEQ ID NO: 780363 - RNA, 19 nt, Artificial Sequence
  Description of Artificial Sequence: Synthetic oligonucleotide
  Antisense strand to SEQ ID NO: 780362
guuacuccuggaaaccacc

SEQ ID NO: 780364 - RNA, 19 nt, Artificial Sequence
  Description of Artificial Sequence: Synthetic oligonucleotide
  Sense strand starting at position 2322 of SEQ ID NO: 587279
uguguuucagccguuugua

SEQ ID NO: 780365 - RNA, 19 nt, Artificial Sequence
  Description of Artificial Sequence: Synthetic oligonucleotide
  Antisense strand to SEQ ID NO: 780364
uacaaacggcugaaacaca

SEQ ID NO: 780366 - RNA, 19 nt, Artificial Sequence
  Description of Artificial Sequence: Synthetic oligonucleotide
  Sense strand starting at position 2323 of SEQ ID NO: 587279
guguuucagccguuuguaa

SEQ ID NO: 780367 - RNA, 19 nt, Artificial Sequence
  Description of Artificial Sequence: Synthetic oligonucleotide
  Antisense strand to SEQ ID NO: 780366
uuacaaacggcugaaacac

SEQ ID NO: 780368 - RNA, 19 nt, Artificial Sequence
  Description of Artificial Sequence: Synthetic oligonucleotide
  Sense strand starting at position 2334 of SEQ ID NO: 587279
guuuguaaauuccugaaau

SEQ ID NO: 780369 - RNA, 19 nt, Artificial Sequence
  Description of Artificial Sequence: Synthetic oligonucleotide
  Antisense strand to SEQ ID NO: 780368
auuucaggaauuuacaaac

SEQ ID NO: 780370 - RNA, 19 nt, Artificial Sequence
  Description of Artificial Sequence: Synthetic oligonucleotide
  Sense strand starting at position 2346 of SEQ ID NO: 587279
cugaaaucuguggaagguu

SEQ ID NO: 780371 - RNA, 19 nt, Artificial Sequence
  Description of Artificial Sequence: Synthetic oligonucleotide
  Antisense strand to SEQ ID NO: 780370
aaccuuccacagauuucag

SEQ ID NO: 780372 - RNA, 19 nt, Artificial Sequence
  Description of Artificial Sequence: Synthetic oligonucleotide
  Sense strand starting at position 2534 of SEQ ID NO: 587279
cauguagacucugcauaag

SEQ ID NO: 780373 - RNA, 19 nt, Artificial Sequence
  Description of Artificial Sequence: Synthetic oligonucleotide
  Antisense strand to SEQ ID NO: 780372
cuuaugcagagucuacaug

SEQ ID NO: 780374 - RNA, 19 nt, Artificial Sequence
  Description of Artificial Sequence: Synthetic oligonucleotide
  Sense strand starting at position 2680 of SEQ ID NO: 587279
guccaacucuuuguuggaa

SEQ ID NO: 780375 - RNA, 19 nt, Artificial Sequence
  Description of Artificial Sequence: Synthetic oligonucleotide
  Antisense strand to SEQ ID NO: 780374
uuccaacaaagaguuggac

SEQ ID NO: 780376 - RNA, 19 nt, Artificial Sequence
  Description of Artificial Sequence: Synthetic oligonucleotide
  Sense strand starting at position 2681 of SEQ ID NO: 587279
uccaacucuuuguuggaaa

SEQ ID NO: 780377 - RNA, 19 nt, Artificial Sequence
  Description of Artificial Sequence: Synthetic oligonucleotide
  Antisense strand to SEQ ID NO: 780376
uuuccaacaaagaguugga

SEQ ID NO: 780378 - RNA, 19 nt, Artificial Sequence
  Description of Artificial Sequence: Synthetic oligonucleotide
  Sense strand starting at position 2703 of SEQ ID NO: 587279
cggaaauucuaauuaaauc

SEQ ID NO: 780379 - RNA, 19 nt, Artificial Sequence
  Description of Artificial Sequence: Synthetic oligonucleotide
  Antisense strand to SEQ ID NO: 780378
gauuuaauuagaauuuccg

SEQ ID NO: 780380 - RNA, 19 nt, Artificial Sequence
  Description of Artificial Sequence: Synthetic oligonucleotide
  Sense strand starting at position 2945 of SEQ ID NO: 587279
gcuauuacccagcgauuua

SEQ ID NO: 780381 - RNA, 19 nt, Artificial Sequence
  Description of Artificial Sequence: Synthetic oligonucleotide
  Antisense strand to SEQ ID NO: 780380
uaaaucgcuggguaauagc

SEQ ID NO: 780382 - RNA, 19 nt, Artificial Sequence
  Description of Artificial Sequence: Synthetic oligonucleotide
  Sense strand starting at position 3020 of SEQ ID NO: 587279
aguguaaagcgugauacaa

SEQ ID NO: 780383 - RNA, 19 nt, Artificial Sequence
  Description of Artificial Sequence: Synthetic oligonucleotide
  Antisense strand to SEQ ID NO: 780382
uuguaucacgcuuuacacu

SEQ ID NO: 780384 - RNA, 19 nt, Artificial Sequence
  Description of Artificial Sequence: Synthetic oligonucleotide
  Sense strand starting at position 3030 of SEQ ID NO: 587279
gugauacaaguguaaggua

SEQ ID NO: 780385 - RNA, 19 nt, Artificial Sequence
  Description of Artificial Sequence: Synthetic oligonucleotide
  Antisense strand to SEQ ID NO: 780384
uaccuuacacuuguaucac

SEQ ID NO: 780386 - RNA, 19 nt, Artificial Sequence
  Description of Artificial Sequence: Synthetic oligonucleotide
  Sense strand starting at position 3035 of SEQ ID NO: 587279
acaaguguaagguauugua

SEQ ID NO: 780387 - RNA, 19 nt, Artificial Sequence
  Description of Artificial Sequence: Synthetic oligonucleotide
  Antisense strand to SEQ ID NO: 780386
uacaauaccuuacacuugu

SEQ ID NO: 780388 - RNA, 19 nt, Artificial Sequence
  Description of Artificial Sequence: Synthetic oligonucleotide
  Sense strand starting at position 3044 of SEQ ID NO: 587279
agguauuguaaauggcauu

SEQ ID NO: 780389 - RNA, 19 nt, Artificial Sequence
  Description of Artificial Sequence: Synthetic oligonucleotide
  Antisense strand to SEQ ID NO: 780388
aaugccauuuacaauaccu

SEQ ID NO: 780390 - RNA, 19 nt, Artificial Sequence
  Description of Artificial Sequence: Synthetic oligonucleotide
  Sense strand starting at position 3150 of SEQ ID NO: 587279
gagauaguuugauccagau

SEQ ID NO: 780391 - RNA, 19 nt, Artificial Sequence
  Description of Artificial Sequence: Synthetic oligonucleotide
  Antisense strand to SEQ ID NO: 780390
aucuggaucaaacuaucuc

SEQ ID NO: 780392 - RNA, 19 nt, Artificial Sequence
  Description of Artificial Sequence: Synthetic oligonucleotide
  Sense strand starting at position 3279 of SEQ ID NO: 587279
uugggagcuaguuguuaaa

SEQ ID NO: 780393 - RNA, 19 nt, Artificial Sequence
  Description of Artificial Sequence: Synthetic oligonucleotide
  Antisense strand to SEQ ID NO: 780392
uuuaacaacuagcucccaa

SEQ ID NO: 780394 - RNA, 19 nt, Artificial Sequence
  Description of Artificial Sequence: Synthetic oligonucleotide
  Sense strand starting at position 3281 of SEQ ID NO: 587279
gggagcuaguuguuaaaug

SEQ ID NO: 780395 - RNA, 19 nt, Artificial Sequence
  Description of Artificial Sequence: Synthetic oligonucleotide
  Antisense strand to SEQ ID NO: 780394
cauuuaacaacuagcuccc

SEQ ID NO: 780396 - RNA, 19 nt, Artificial Sequence
  Description of Artificial Sequence: Synthetic oligonucleotide
  Sense strand starting at position 3375 of SEQ ID NO: 587279
auaugcuagugauuccacu

SEQ ID NO: 780397 - RNA, 19 nt, Artificial Sequence
  Description of Artificial Sequence: Synthetic oligonucleotide
  Antisense strand to SEQ ID NO: 780396
aguggaaucacuagcauau

SEQ ID NO: 780398 - RNA, 19 nt, Artificial Sequence
  Description of Artificial Sequence: Synthetic oligonucleotide
  Sense strand starting at position 3488 of SEQ ID NO: 587279
cuugaaaugagccauagug

SEQ ID NO: 780399 - RNA, 19 nt, Artificial Sequence
  Description of Artificial Sequence: Synthetic oligonucleotide
  Antisense strand to SEQ ID NO: 780398
cacuauggcucauuucaag

SEQ ID NO: 780400 - RNA, 19 nt, Artificial Sequence
  Description of Artificial Sequence: Synthetic oligonucleotide
  Sense strand starting at position 3511 of SEQ ID NO: 587279
uuauuuacaugagggaaau

SEQ ID NO: 780401 - RNA, 19 nt, Artificial Sequence
  Description of Artificial Sequence: Synthetic oligonucleotide
  Antisense strand to SEQ ID NO: 780400
auuucccucauguaaauaa

SEQ ID NO: 780402 - RNA, 19 nt, Artificial Sequence
  Description of Artificial Sequence: Synthetic oligonucleotide
  Sense strand starting at position 3524 of SEQ ID NO: 587279
ggaaauugcaaaugugaca

SEQ ID NO: 780403 - RNA, 19 nt, Artificial Sequence
  Description of Artificial Sequence: Synthetic oligonucleotide
  Antisense strand to SEQ ID NO: 780402
ugucacauuugcaauuucc

SEQ ID NO: 780404 - RNA, 19 nt, Artificial Sequence
  Description of Artificial Sequence: Synthetic oligonucleotide
  Sense strand starting at position 3599 of SEQ ID NO: 587279
agaucaaacugucauuuag

SEQ ID NO: 780405 - RNA, 19 nt, Artificial Sequence
  Description of Artificial Sequence: Synthetic oligonucleotide
  Antisense strand to SEQ ID NO: 780404
cuaaaugacaguuugaucu

SEQ ID NO: 780406 - RNA, 19 nt, Artificial Sequence
  Description of Artificial Sequence: Synthetic oligonucleotide
  Sense strand starting at position 3606 of SEQ ID NO: 587279
acugucauuuaguagaaca

SEQ ID NO: 780407 - RNA, 19 nt, Artificial Sequence
  Description of Artificial Sequence: Synthetic oligonucleotide
  Antisense strand to SEQ ID NO: 780406
uguucuacuaaaugacagu

SEQ ID NO: 780408 - RNA, 19 nt, Artificial Sequence
  Description of Artificial Sequence: Synthetic oligonucleotide
  Sense strand starting at position 3638 of SEQ ID NO: 587279
ucagaccaacugugaauau

SEQ ID NO: 780409 - RNA, 19 nt, Artificial Sequence
  Description of Artificial Sequence: Synthetic oligonucleotide
  Antisense strand to SEQ ID NO: 780408
auauucacaguuggucuga

SEQ ID NO: 780410 - RNA, 19 nt, Artificial Sequence
  Description of Artificial Sequence: Synthetic oligonucleotide
  Sense strand starting at position 3647 of SEQ ID NO: 587279
cugugaauauucucagcaa

SEQ ID NO: 780411 - RNA, 19 nt, Artificial Sequence
  Description of Artificial Sequence: Synthetic oligonucleotide
  Antisense strand to SEQ ID NO: 780410
uugcugagaauauucacag

SEQ ID NO: 780412 - RNA, 19 nt, Artificial Sequence
  Description of Artificial Sequence: Synthetic oligonucleotide
  Sense strand starting at position 3729 of SEQ ID NO: 587279
uuagaauccuggccuaaac

SEQ ID NO: 780413 - RNA, 19 nt, Artificial Sequence
  Description of Artificial Sequence: Synthetic oligonucleotide
  Antisense strand to SEQ ID NO: 780412
guuuaggccaggauucuaa

SEQ ID NO: 780414 - RNA, 19 nt, Artificial Sequence
  Description of Artificial Sequence: Synthetic oligonucleotide
  Sense strand starting at position 55 of SEQ ID NO: 587280
gacuuacugugaucagcau

SEQ ID NO: 780415 - RNA, 19 nt, Artificial Sequence
  Description of Artificial Sequence: Synthetic oligonucleotide
  Antisense strand to SEQ ID NO: 780414
augcugaucacaguaaguc

SEQ ID NO: 780416 - RNA, 19 nt, Artificial Sequence
  Description of Artificial Sequence: Synthetic oligonucleotide
  Sense strand starting at position 56 of SEQ ID NO: 587280
acuuacugugaucagcauu

SEQ ID NO: 780417 - RNA, 19 nt, Artificial Sequence
  Description of Artificial Sequence: Synthetic oligonucleotide
  Antisense strand to SEQ ID NO: 780416
aaugcugaucacaguaagu

SEQ ID NO: 780418 - RNA, 19 nt, Artificial Sequence
  Description of Artificial Sequence: Synthetic oligonucleotide
  Sense strand starting at position 1995 of SEQ ID NO: 587280
ucauucugggacugcuauu

SEQ ID NO: 780419 - RNA, 19 nt, Artificial Sequence
  Description of Artificial Sequence: Synthetic oligonucleotide
  Antisense strand to SEQ ID NO: 780418
aauagcagucccagaauga

SEQ ID NO: 780420 - RNA, 19 nt, Artificial Sequence
  Description of Artificial Sequence: Synthetic oligonucleotide
  Sense strand starting at position 2052 of SEQ ID NO: 587280
gugacaucagagugaucuc

SEQ ID NO: 780421 - RNA, 19 nt, Artificial Sequence
  Description of Artificial Sequence: Synthetic oligonucleotide
  Antisense strand to SEQ ID NO: 780420
gagaucacucugaugucac

SEQ ID NO: 780422 - RNA, 19 nt, Artificial Sequence
  Description of Artificial Sequence: Synthetic oligonucleotide
  Sense strand starting at position 2055 of SEQ ID NO: 587280
acaucagagugaucucaag

SEQ ID NO: 780423 - RNA, 19 nt, Artificial Sequence
  Description of Artificial Sequence: Synthetic oligonucleotide
  Antisense strand to SEQ ID NO: 780422
cuugagaucacucugaugu

SEQ ID NO: 780424 - RNA, 19 nt, Artificial Sequence
  Description of Artificial Sequence: Synthetic oligonucleotide
  Sense strand starting at position 2166 of SEQ ID NO: 587280
caaggcugugaguacucau

SEQ ID NO: 780425 - RNA, 19 nt, Artificial Sequence
  Description of Artificial Sequence: Synthetic oligonucleotide
  Antisense strand to SEQ ID NO: 780424
augaguacucacagccuug

SEQ ID NO: 780426 - RNA, 19 nt, Artificial Sequence
  Description of Artificial Sequence: Synthetic oligonucleotide
  Sense strand starting at position 2220 of SEQ ID NO: 587280
ugggccuuccuuuaagaaa

SEQ ID NO: 780427 - RNA, 19 nt, Artificial Sequence
  Description of Artificial Sequence: Synthetic oligonucleotide
  Antisense strand to SEQ ID NO: 780426
uuucuuaaaggaaggccca

SEQ ID NO: 780428 - RNA, 19 nt, Artificial Sequence
  Description of Artificial Sequence: Synthetic oligonucleotide
  Sense strand starting at position 2274 of SEQ ID NO: 587280
aaacgagguugcuuagacu

SEQ ID NO: 780429 - RNA, 19 nt, Artificial Sequence
  Description of Artificial Sequence: Synthetic oligonucleotide
  Antisense strand to SEQ ID NO: 780428
agucuaagcaaccucguuu

SEQ ID NO: 780430 - RNA, 19 nt, Artificial Sequence
  Description of Artificial Sequence: Synthetic oligonucleotide
  Sense strand starting at position 2347 of SEQ ID NO: 587280
gcuuucguucgcagagaag

SEQ ID NO: 780431 - RNA, 19 nt, Artificial Sequence
  Description of Artificial Sequence: Synthetic oligonucleotide
  Antisense strand to SEQ ID NO: 780430
cuucucugcgaacgaaagc

SEQ ID NO: 780432 - RNA, 19 nt, Artificial Sequence
  Description of Artificial Sequence: Synthetic oligonucleotide
  Sense strand starting at position 2354 of SEQ ID NO: 587280
uucgcagagaaguaauuaa

SEQ ID NO: 780433 - RNA, 19 nt, Artificial Sequence
  Description of Artificial Sequence: Synthetic oligonucleotide
  Antisense strand to SEQ ID NO: 780432
uuaauuacuucucugcgaa

SEQ ID NO: 780434 - RNA, 19 nt, Artificial Sequence
  Description of Artificial Sequence: Synthetic oligonucleotide
  Sense strand starting at position 2449 of SEQ ID NO: 587280
agagaaagcugagcaauca

SEQ ID NO: 780435 - RNA, 19 nt, Artificial Sequence
  Description of Artificial Sequence: Synthetic oligonucleotide
  Antisense strand to SEQ ID NO: 780434
ugauugcucagcuuucucu

SEQ ID NO: 780436 - RNA, 19 nt, Artificial Sequence
  Description of Artificial Sequence: Synthetic oligonucleotide
  Sense strand starting at position 2572 of SEQ ID NO: 587280
ugcuaagugucacugaaga

SEQ ID NO: 780437 - RNA, 19 nt, Artificial Sequence
  Description of Artificial Sequence: Synthetic oligonucleotide
  Antisense strand to SEQ ID NO: 780436
ucuucagugacacuuagca

SEQ ID NO: 780438 - RNA, 19 nt, Artificial Sequence
  Description of Artificial Sequence: Synthetic oligonucleotide
  Sense strand starting at position 2583 of SEQ ID NO: 587280
acugaagaccauuguaauu

SEQ ID NO: 780439 - RNA, 19 nt, Artificial Sequence
  Description of Artificial Sequence: Synthetic oligonucleotide
  Antisense strand to SEQ ID NO: 780438
aauuacaauggucuucagu

SEQ ID NO: 780440 - RNA, 19 nt, Artificial Sequence
  Description of Artificial Sequence: Synthetic oligonucleotide
  Sense strand starting at position 2593 of SEQ ID NO: 587280
auuguaauuuggguguagu

SEQ ID NO: 780441 - RNA, 19 nt, Artificial Sequence
  Description of Artificial Sequence: Synthetic oligonucleotide
  Antisense strand to SEQ ID NO: 780440
acuacacccaaauuacaau

SEQ ID NO: 780442 - RNA, 19 nt, Artificial Sequence
  Description of Artificial Sequence: Synthetic oligonucleotide
  Sense strand starting at position 2594 of SEQ ID NO: 587280
uuguaauuuggguguagua

SEQ ID NO: 780443 - RNA, 19 nt, Artificial Sequence
  Description of Artificial Sequence: Synthetic oligonucleotide
  Antisense strand to SEQ ID NO: 780442
uacuacacccaaauuacaa

SEQ ID NO: 780444 - RNA, 19 nt, Artificial Sequence
  Description of Artificial Sequence: Synthetic oligonucleotide
  Sense strand starting at position 2624 of SEQ ID NO: 587280
aguagaggcuaucuccuua

SEQ ID NO: 780445 - RNA, 19 nt, Artificial Sequence
  Description of Artificial Sequence: Synthetic oligonucleotide
  Antisense strand to SEQ ID NO: 780444
uaaggagauagccucuacu

SEQ ID NO: 780446 - RNA, 19 nt, Artificial Sequence
  Description of Artificial Sequence: Synthetic oligonucleotide
  Sense strand starting at position 2629 of SEQ ID NO: 587280
aggcuaucuccuuaggcuu

SEQ ID NO: 780447 - RNA, 19 nt, Artificial Sequence
  Description of Artificial Sequence: Synthetic oligonucleotide
  Antisense strand to SEQ ID NO: 780446
aagccuaaggagauagccu

SEQ ID NO: 780448 - RNA, 19 nt, Artificial Sequence
  Description of Artificial Sequence: Synthetic oligonucleotide
  Sense strand starting at position 2782 of SEQ ID NO: 587280
agcaauaacuucuuuggaa

SEQ ID NO: 780449 - RNA, 19 nt, Artificial Sequence
  Description of Artificial Sequence: Synthetic oligonucleotide
  Antisense strand to SEQ ID NO: 780448
uuccaaagaaguuauugcu

SEQ ID NO: 780450 - RNA, 19 nt, Artificial Sequence
  Description of Artificial Sequence: Synthetic oligonucleotide
  Sense strand starting at position 2783 of SEQ ID NO: 587280
gcaauaacuucuuuggaag

SEQ ID NO: 780451 - RNA, 19 nt, Artificial Sequence
  Description of Artificial Sequence: Synthetic oligonucleotide
  Antisense strand to SEQ ID NO: 780450
cuuccaaagaaguuauugc

SEQ ID NO: 780452 - RNA, 19 nt, Artificial Sequence
  Description of Artificial Sequence: Synthetic oligonucleotide
  Sense strand starting at position 2853 of SEQ ID NO: 587280
cucacugaccuauggaguu

SEQ ID NO: 780453 - RNA, 19 nt, Artificial Sequence
  Description of Artificial Sequence: Synthetic oligonucleotide
  Antisense strand to SEQ ID NO: 780452
aacuccauaggucagugag

SEQ ID NO: 780454 - RNA, 19 nt, Artificial Sequence
  Description of Artificial Sequence: Synthetic oligonucleotide
  Sense strand starting at position 2904 of SEQ ID NO: 587280
uggagauucucuuugugga

SEQ ID NO: 780455 - RNA, 19 nt, Artificial Sequence
  Description of Artificial Sequence: Synthetic oligonucleotide
  Antisense strand to SEQ ID NO: 780454
uccacaaagagaaucucca

SEQ ID NO: 780456 - RNA, 19 nt, Artificial Sequence
  Description of Artificial Sequence: Synthetic oligonucleotide
  Sense strand starting at position 2905 of SEQ ID NO: 587280
ggagauucucuuuguggau

SEQ ID NO: 780457 - RNA, 19 nt, Artificial Sequence
  Description of Artificial Sequence: Synthetic oligonucleotide
  Antisense strand to SEQ ID NO: 780456
auccacaaagagaaucucc

SEQ ID NO: 780458 - RNA, 19 nt, Artificial Sequence
  Description of Artificial Sequence: Synthetic oligonucleotide
  Sense strand starting at position 2906 of SEQ ID NO: 587280
gagauucucuuuguggauc

SEQ ID NO: 780459 - RNA, 19 nt, Artificial Sequence
  Description of Artificial Sequence: Synthetic oligonucleotide
  Antisense strand to SEQ ID NO: 780458
gauccacaaagagaaucuc

SEQ ID NO: 780460 - RNA, 19 nt, Artificial Sequence
  Description of Artificial Sequence: Synthetic oligonucleotide
  Sense strand starting at position 3039 of SEQ ID NO: 587280
gguaccucacuaggaaauu

SEQ ID NO: 780461 - RNA, 19 nt, Artificial Sequence
  Description of Artificial Sequence: Synthetic oligonucleotide
  Antisense strand to SEQ ID NO: 780460
aauuuccuagugagguacc

SEQ ID NO: 780462 - RNA, 19 nt, Artificial Sequence
  Description of Artificial Sequence: Synthetic oligonucleotide
  Sense strand starting at position 3060 of SEQ ID NO: 587280
guuagagacucuccuuaua

SEQ ID NO: 780463 - RNA, 19 nt, Artificial Sequence
  Description of Artificial Sequence: Synthetic oligonucleotide
  Antisense strand to SEQ ID NO: 780462
uauaaggagagucucuaac

SEQ ID NO: 780464 - RNA, 19 nt, Artificial Sequence
  Description of Artificial Sequence: Synthetic oligonucleotide
  Sense strand starting at position 3145 of SEQ ID NO: 587280
uguuauuagccagaacuuu

SEQ ID NO: 780465 - RNA, 19 nt, Artificial Sequence
  Description of Artificial Sequence: Synthetic oligonucleotide
  Antisense strand to SEQ ID NO: 780464
aaaguucuggcuaauaaca

SEQ ID NO: 780466 - RNA, 19 nt, Artificial Sequence
  Description of Artificial Sequence: Synthetic oligonucleotide
  Sense strand starting at position 3251 of SEQ ID NO: 587280
uauguucuacugggaaaua

SEQ ID NO: 780467 - RNA, 19 nt, Artificial Sequence
  Description of Artificial Sequence: Synthetic oligonucleotide
  Antisense strand to SEQ ID NO: 780466
uauuucccaguagaacaua

SEQ ID NO: 780468 - RNA, 19 nt, Artificial Sequence
  Description of Artificial Sequence: Synthetic oligonucleotide
  Sense strand starting at position 3336 of SEQ ID NO: 587280
agcagaguuguacaggagu

SEQ ID NO: 780469 - RNA, 19 nt, Artificial Sequence
  Description of Artificial Sequence: Synthetic oligonucleotide
  Antisense strand to SEQ ID NO: 780468
acuccuguacaacucugcu

SEQ ID NO: 780470 - RNA, 19 nt, Artificial Sequence
  Description of Artificial Sequence: Synthetic oligonucleotide
  Sense strand starting at position 3406 of SEQ ID NO: 587280
augagacauugugcaaaga

SEQ ID NO: 780471 - RNA, 19 nt, Artificial Sequence
  Description of Artificial Sequence: Synthetic oligonucleotide
  Antisense strand to SEQ ID NO: 780470
ucuuugcacaaugucucau

SEQ ID NO: 780472 - RNA, 19 nt, Artificial Sequence
  Description of Artificial Sequence: Synthetic oligonucleotide
  Sense strand starting at position 3415 of SEQ ID NO: 587280
ugugcaaagacuugaaggu

SEQ ID NO: 780473 - RNA, 19 nt, Artificial Sequence
  Description of Artificial Sequence: Synthetic oligonucleotide
  Antisense strand to SEQ ID NO: 780472
accuucaagucuuugcaca

SEQ ID NO: 780474 - RNA, 19 nt, Artificial Sequence
  Description of Artificial Sequence: Synthetic oligonucleotide
  Sense strand starting at position 3437 of SEQ ID NO: 587280
gaaggaggcagucagcuau

SEQ ID NO: 780475 - RNA, 19 nt, Artificial Sequence
  Description of Artificial Sequence: Synthetic oligonucleotide
  Antisense strand to SEQ ID NO: 780474
auagcugacugccuccuuc

SEQ ID NO: 780476 - RNA, 19 nt, Artificial Sequence
  Description of Artificial Sequence: Synthetic oligonucleotide
  Sense strand starting at position 3443 of SEQ ID NO: 587280
ggcagucagcuauauggau

SEQ ID NO: 780477 - RNA, 19 nt, Artificial Sequence
  Description of Artificial Sequence: Synthetic oligonucleotide
  Antisense strand to SEQ ID NO: 780476
auccauauagcugacugcc

SEQ ID NO: 780478 - RNA, 19 nt, Artificial Sequence
  Description of Artificial Sequence: Synthetic oligonucleotide
  Sense strand starting at position 3449 of SEQ ID NO: 587280
cagcuauauggauaucugu

SEQ ID NO: 780479 - RNA, 19 nt, Artificial Sequence
  Description of Artificial Sequence: Synthetic oligonucleotide
  Antisense strand to SEQ ID NO: 780478
acagauauccauauagcug

SEQ ID NO: 780480 - RNA, 19 nt, Artificial Sequence
  Description of Artificial Sequence: Synthetic oligonucleotide
  Sense strand starting at position 3649 of SEQ ID NO: 587280
acaggcuuugauuguggau

SEQ ID NO: 780481 - RNA, 19 nt, Artificial Sequence
  Description of Artificial Sequence: Synthetic oligonucleotide
  Antisense strand to SEQ ID NO: 780480
auccacaaucaaagccugu

SEQ ID NO: 780482 - RNA, 19 nt, Artificial Sequence
  Description of Artificial Sequence: Synthetic oligonucleotide
  Sense strand starting at position 3662 of SEQ ID NO: 587280
guggauuuagcucguacac

SEQ ID NO: 780483 - RNA, 19 nt, Artificial Sequence
  Description of Artificial Sequence: Synthetic oligonucleotide
  Antisense strand to SEQ ID NO: 780482
guguacgagcuaaauccac

SEQ ID NO: 780484 - RNA, 19 nt, Artificial Sequence
  Description of Artificial Sequence: Synthetic oligonucleotide
  Sense strand starting at position 3690 of SEQ ID NO: 587280
acaggugggcuuuggagaa

SEQ ID NO: 780485 - RNA, 19 nt, Artificial Sequence
  Description of Artificial Sequence: Synthetic oligonucleotide
  Antisense strand to SEQ ID NO: 780484
uucuccaaagcccaccugu

SEQ ID NO: 780486 - RNA, 19 nt, Artificial Sequence
  Description of Artificial Sequence: Synthetic oligonucleotide
  Sense strand starting at position 3860 of SEQ ID NO: 587280
aggcuuccacuagggagaa

SEQ ID NO: 780487 - RNA, 19 nt, Artificial Sequence
  Description of Artificial Sequence: Synthetic oligonucleotide
  Antisense strand to SEQ ID NO: 780486
uucucccuaguggaagccu

SEQ ID NO: 780488 - RNA, 19 nt, Artificial Sequence
  Description of Artificial Sequence: Synthetic oligonucleotide
  Sense strand starting at position 3885 of SEQ ID NO: 587280
gguagugagaacugaucca

SEQ ID NO: 780489 - RNA, 19 nt, Artificial Sequence
  Description of Artificial Sequence: Synthetic oligonucleotide
  Antisense strand to SEQ ID NO: 780488
uggaucaguucucacuacc

SEQ ID NO: 780490 - RNA, 19 nt, Artificial Sequence
  Description of Artificial Sequence: Synthetic oligonucleotide
  Sense strand starting at position 3910 of SEQ ID NO: 587280
gcauauugugaagguaaag

SEQ ID NO: 780491 - RNA, 19 nt, Artificial Sequence
  Description of Artificial Sequence: Synthetic oligonucleotide
  Antisense strand to SEQ ID NO: 780490
cuuuaccuucacaauaugc

SEQ ID NO: 780492 - RNA, 19 nt, Artificial Sequence
  Description of Artificial Sequence: Synthetic oligonucleotide
  Sense strand starting at position 3927 of SEQ ID NO: 587280
agcuaagacgauugcugaa

SEQ ID NO: 780493 - RNA, 19 nt, Artificial Sequence
  Description of Artificial Sequence: Synthetic oligonucleotide
  Antisense strand to SEQ ID NO: 780492
uucagcaaucgucuuagcu

SEQ ID NO: 780494 - RNA, 19 nt, Artificial Sequence
  Description of Artificial Sequence: Synthetic oligonucleotide
  Sense strand starting at position 244 of SEQ ID NO: 587281
guaauuaagguccauuaug

SEQ ID NO: 780495 - RNA, 19 nt, Artificial Sequence
  Description of Artificial Sequence: Synthetic oligonucleotide
  Antisense strand to SEQ ID NO: 780494
cauaauggaccuuaauuac

SEQ ID NO: 780496 - RNA, 19 nt, Artificial Sequence
  Description of Artificial Sequence: Synthetic oligonucleotide
  Sense strand starting at position 582 of SEQ ID NO: 587281
uuccguaauaagugaaaga

SEQ ID NO: 780497 - RNA, 19 nt, Artificial Sequence
  Description of Artificial Sequence: Synthetic oligonucleotide
  Antisense strand to SEQ ID NO: 780496
ucuuucacuuauuacggaa

SEQ ID NO: 780498 - RNA, 19 nt, Artificial Sequence
  Description of Artificial Sequence: Synthetic oligonucleotide
  Sense strand starting at position 643 of SEQ ID NO: 587281
gaauauuguucuguaugaa

SEQ ID NO: 780499 - RNA, 19 nt, Artificial Sequence
  Description of Artificial Sequence: Synthetic oligonucleotide
  Antisense strand to SEQ ID NO: 780498
uucauacagaacaauauuc

SEQ ID NO: 780500 - RNA, 19 nt, Artificial Sequence
  Description of Artificial Sequence: Synthetic oligonucleotide
  Sense strand starting at position 644 of SEQ ID NO: 587281
aauauuguucuguaugaag

SEQ ID NO: 780501 - RNA, 19 nt, Artificial Sequence
  Description of Artificial Sequence: Synthetic oligonucleotide
  Antisense strand to SEQ ID NO: 780500
cuucauacagaacaauauu

SEQ ID NO: 780502 - RNA, 19 nt, Artificial Sequence
  Description of Artificial Sequence: Synthetic oligonucleotide
  Sense strand starting at position 646 of SEQ ID NO: 587281
uauuguucuguaugaagag

SEQ ID NO: 780503 - RNA, 19 nt, Artificial Sequence
  Description of Artificial Sequence: Synthetic oligonucleotide
  Antisense strand to SEQ ID NO: 780502
cucuucauacagaacaaua

SEQ ID NO: 780504 - RNA, 19 nt, Artificial Sequence
  Description of Artificial Sequence: Synthetic oligonucleotide
  Sense strand starting at position 1150 of SEQ ID NO: 587281
gugacuugaccuugggcaa

SEQ ID NO: 780505 - RNA, 19 nt, Artificial Sequence
  Description of Artificial Sequence: Synthetic oligonucleotide
  Antisense strand to SEQ ID NO: 780504
uugcccaaggucaagucac

SEQ ID NO: 780506 - RNA, 19 nt, Artificial Sequence
  Description of Artificial Sequence: Synthetic oligonucleotide
  Sense strand starting at position 1189 of SEQ ID NO: 587281
cucaguuucccugauugua

SEQ ID NO: 780507 - RNA, 19 nt, Artificial Sequence
  Description of Artificial Sequence: Synthetic oligonucleotide
  Antisense strand to SEQ ID NO: 780506
uacaaucagggaaacugag

SEQ ID NO: 780508 - RNA, 19 nt, Artificial Sequence
  Description of Artificial Sequence: Synthetic oligonucleotide
  Sense strand starting at position 1192 of SEQ ID NO: 587281
aguuucccugauuguaaau

SEQ ID NO: 780509 - RNA, 19 nt, Artificial Sequence
  Description of Artificial Sequence: Synthetic oligonucleotide
  Antisense strand to SEQ ID NO: 780508
auuuacaaucagggaaacu

SEQ ID NO: 780510 - RNA, 19 nt, Artificial Sequence
  Description of Artificial Sequence: Synthetic oligonucleotide
  Sense strand starting at position 1239 of SEQ ID NO: 587281
acaggacuggugugaggau

SEQ ID NO: 780511 - RNA, 19 nt, Artificial Sequence
  Description of Artificial Sequence: Synthetic oligonucleotide
  Antisense strand to SEQ ID NO: 780510
auccucacaccaguccugu

SEQ ID NO: 780512 - RNA, 19 nt, Artificial Sequence
  Description of Artificial Sequence: Synthetic oligonucleotide
  Sense strand starting at position 1335 of SEQ ID NO: 587281
guaauacaggccuaaccuu

SEQ ID NO: 780513 - RNA, 19 nt, Artificial Sequence
  Description of Artificial Sequence: Synthetic oligonucleotide
  Antisense strand to SEQ ID NO: 780512
aagguuaggccuguauuac

SEQ ID NO: 780514 - RNA, 19 nt, Artificial Sequence
  Description of Artificial Sequence: Synthetic oligonucleotide
  Sense strand starting at position 1386 of SEQ ID NO: 587281
cagguugagaucugaaugu

SEQ ID NO: 780515 - RNA, 19 nt, Artificial Sequence
  Description of Artificial Sequence: Synthetic oligonucleotide
  Antisense strand to SEQ ID NO: 780514
acauucagaucucaaccug

SEQ ID NO: 780516 - RNA, 19 nt, Artificial Sequence
  Description of Artificial Sequence: Synthetic oligonucleotide
  Sense strand starting at position 1390 of SEQ ID NO: 587281
uugagaucugaaugucuau

SEQ ID NO: 780517 - RNA, 19 nt, Artificial Sequence
  Description of Artificial Sequence: Synthetic oligonucleotide
  Antisense strand to SEQ ID NO: 780516
auagacauucagaucucaa

SEQ ID NO: 780518 - RNA, 19 nt, Artificial Sequence
  Description of Artificial Sequence: Synthetic oligonucleotide
  Sense strand starting at position 1455 of SEQ ID NO: 587281
ugggccuguuuccuaagaa

SEQ ID NO: 780519 - RNA, 19 nt, Artificial Sequence
  Description of Artificial Sequence: Synthetic oligonucleotide
  Antisense strand to SEQ ID NO: 780518
uucuuaggaaacaggccca

SEQ ID NO: 780520 - RNA, 19 nt, Artificial Sequence
  Description of Artificial Sequence: Synthetic oligonucleotide
  Sense strand starting at position 1462 of SEQ ID NO: 587281
guuuccuaagaagguuauu

SEQ ID NO: 780521 - RNA, 19 nt, Artificial Sequence
  Description of Artificial Sequence: Synthetic oligonucleotide
  Antisense strand to SEQ ID NO: 780520
aauaaccuucuuaggaaac

SEQ ID NO: 780522 - RNA, 19 nt, Artificial Sequence
  Description of Artificial Sequence: Synthetic oligonucleotide
  Sense strand starting at position 1656 of SEQ ID NO: 587281
cguuauuugcacuguaaac

SEQ ID NO: 780523 - RNA, 19 nt, Artificial Sequence
  Description of Artificial Sequence: Synthetic oligonucleotide
  Antisense strand to SEQ ID NO: 780522
guuuacagugcaaauaacg

SEQ ID NO: 780524 - RNA, 19 nt, Artificial Sequence
  Description of Artificial Sequence: Synthetic oligonucleotide
  Sense strand starting at position 1715 of SEQ ID NO: 587281
agugauucgcacuagagag

SEQ ID NO: 780525 - RNA, 19 nt, Artificial Sequence
  Description of Artificial Sequence: Synthetic oligonucleotide
  Antisense strand to SEQ ID NO: 780524
cucucuagugcgaaucacu

SEQ ID NO: 780526 - RNA, 19 nt, Artificial Sequence
  Description of Artificial Sequence: Synthetic oligonucleotide
  Sense strand starting at position 1744 of SEQ ID NO: 587281
cagagcuuccgagaaucaa

SEQ ID NO: 780527 - RNA, 19 nt, Artificial Sequence
  Description of Artificial Sequence: Synthetic oligonucleotide
  Antisense strand to SEQ ID NO: 780526
uugauucucggaagcucug

SEQ ID NO: 780528 - RNA, 19 nt, Artificial Sequence
  Description of Artificial Sequence: Synthetic oligonucleotide
  Sense strand starting at position 1778 of SEQ ID NO: 587281
uggccuccagccuagauua

SEQ ID NO: 780529 - RNA, 19 nt, Artificial Sequence
  Description of Artificial Sequence: Synthetic oligonucleotide
  Antisense strand to SEQ ID NO: 780528
uaaucuaggcuggaggcca

SEQ ID NO: 780530 - RNA, 19 nt, Artificial Sequence
  Description of Artificial Sequence: Synthetic oligonucleotide
  Sense strand starting at position 1780 of SEQ ID NO: 587281
gccuccagccuagauuaga

SEQ ID NO: 780531 - RNA, 19 nt, Artificial Sequence
  Description of Artificial Sequence: Synthetic oligonucleotide
  Antisense strand to SEQ ID NO: 780530
ucuaaucuaggcuggaggc

SEQ ID NO: 780532 - RNA, 19 nt, Artificial Sequence
  Description of Artificial Sequence: Synthetic oligonucleotide
  Sense strand starting at position 2013 of SEQ ID NO: 587281
uaggaaauguggucucuca

SEQ ID NO: 780533 - RNA, 19 nt, Artificial Sequence
  Description of Artificial Sequence: Synthetic oligonucleotide
  Antisense strand to SEQ ID NO: 780532
ugagagaccacauuuccua

SEQ ID NO: 780534 - RNA, 19 nt, Artificial Sequence
  Description of Artificial Sequence: Synthetic oligonucleotide
  Sense strand starting at position 2257 of SEQ ID NO: 587281
cucuaauucccagagggca

SEQ ID NO: 780535 - RNA, 19 nt, Artificial Sequence
  Description of Artificial Sequence: Synthetic oligonucleotide
  Antisense strand to SEQ ID NO: 780534
ugcccucugggaauuagag

SEQ ID NO: 780536 - RNA, 19 nt, Artificial Sequence
  Description of Artificial Sequence: Synthetic oligonucleotide
  Sense strand starting at position 2719 of SEQ ID NO: 587281
ggagaauccuuuccgggag

SEQ ID NO: 780537 - RNA, 19 nt, Artificial Sequence
  Description of Artificial Sequence: Synthetic oligonucleotide
  Antisense strand to SEQ ID NO: 780536
cucccggaaaggauucucc

SEQ ID NO: 780538 - RNA, 19 nt, Artificial Sequence
  Description of Artificial Sequence: Synthetic oligonucleotide
  Sense strand starting at position 2991 of SEQ ID NO: 587281
auauuagcucgcuauggaa

SEQ ID NO: 780539 - RNA, 19 nt, Artificial Sequence
  Description of Artificial Sequence: Synthetic oligonucleotide
  Antisense strand to SEQ ID NO: 780538
uuccauagcgagcuaauau

SEQ ID NO: 780540 - RNA, 19 nt, Artificial Sequence
  Description of Artificial Sequence: Synthetic oligonucleotide
  Sense strand starting at position 2999 of SEQ ID NO: 587281
ucgcuauggaauggacaaa

SEQ ID NO: 780541 - RNA, 19 nt, Artificial Sequence
  Description of Artificial Sequence: Synthetic oligonucleotide
  Antisense strand to SEQ ID NO: 780540
uuuguccauuccauagcga

SEQ ID NO: 780542 - RNA, 19 nt, Artificial Sequence
  Description of Artificial Sequence: Synthetic oligonucleotide
  Sense strand starting at position 3033 of SEQ ID NO: 587281
aagcuucuccgggacauga

SEQ ID NO: 780543 - RNA, 19 nt, Artificial Sequence
  Description of Artificial Sequence: Synthetic oligonucleotide
  Antisense strand to SEQ ID NO: 780542
ucaugucccggagaagcuu

SEQ ID NO: 780544 - RNA, 19 nt, Artificial Sequence
  Description of Artificial Sequence: Synthetic oligonucleotide
  Sense strand starting at position 3158 of SEQ ID NO: 587281
ccuguauuugcaugacacu

SEQ ID NO: 780545 - RNA, 19 nt, Artificial Sequence
  Description of Artificial Sequence: Synthetic oligonucleotide
  Antisense strand to SEQ ID NO: 780544
agugucaugcaaauacagg

SEQ ID NO: 780546 - RNA, 19 nt, Artificial Sequence
  Description of Artificial Sequence: Synthetic oligonucleotide
  Sense strand starting at position 3208 of SEQ ID NO: 587281
aggaaugucucauuccagu

SEQ ID NO: 780547 - RNA, 19 nt, Artificial Sequence
  Description of Artificial Sequence: Synthetic oligonucleotide
  Antisense strand to SEQ ID NO: 780546
acuggaaugagacauuccu

SEQ ID NO: 780548 - RNA, 19 nt, Artificial Sequence
  Description of Artificial Sequence: Synthetic oligonucleotide
  Sense strand starting at position 3295 of SEQ ID NO: 587281
ucuggcaugccuuaagaga

SEQ ID NO: 780549 - RNA, 19 nt, Artificial Sequence
  Description of Artificial Sequence: Synthetic oligonucleotide
  Antisense strand to SEQ ID NO: 780548
ucucuuaaggcaugccaga

SEQ ID NO: 780550 - RNA, 19 nt, Artificial Sequence
  Description of Artificial Sequence: Synthetic oligonucleotide
  Sense strand starting at position 3395 of SEQ ID NO: 587281
ggacauuaucaaugagugu

SEQ ID NO: 780551 - RNA, 19 nt, Artificial Sequence
  Description of Artificial Sequence: Synthetic oligonucleotide
  Antisense strand to SEQ ID NO: 780550
acacucauugauaaugucc

SEQ ID NO: 780552 - RNA, 19 nt, Artificial Sequence
  Description of Artificial Sequence: Synthetic oligonucleotide
  Sense strand starting at position 3443 of SEQ ID NO: 587281
ucccuugggccugaggaau

SEQ ID NO: 780553 - RNA, 19 nt, Artificial Sequence
  Description of Artificial Sequence: Synthetic oligonucleotide
  Antisense strand to SEQ ID NO: 780552
auuccucaggcccaaggga

SEQ ID NO: 780554 - RNA, 19 nt, Artificial Sequence
  Description of Artificial Sequence: Synthetic oligonucleotide
  Sense strand starting at position 3497 of SEQ ID NO: 587281
uccuauuauucuguuagau

SEQ ID NO: 780555 - RNA, 19 nt, Artificial Sequence
  Description of Artificial Sequence: Synthetic oligonucleotide
  Antisense strand to SEQ ID NO: 780554
aucuaacagaauaauagga

SEQ ID NO: 780556 - RNA, 19 nt, Artificial Sequence
  Description of Artificial Sequence: Synthetic oligonucleotide
  Sense strand starting at position 3517 of SEQ ID NO: 587281
cccucaguggcaugagaag

SEQ ID NO: 780557 - RNA, 19 nt, Artificial Sequence
  Description of Artificial Sequence: Synthetic oligonucleotide
  Antisense strand to SEQ ID NO: 780556
cuucucaugccacugaggg

SEQ ID NO: 780558 - RNA, 19 nt, Artificial Sequence
  Description of Artificial Sequence: Synthetic oligonucleotide
  Sense strand starting at position 3531 of SEQ ID NO: 587281
agaagcucuggugauuauu

SEQ ID NO: 780559 - RNA, 19 nt, Artificial Sequence
  Description of Artificial Sequence: Synthetic oligonucleotide
  Antisense strand to SEQ ID NO: 780558
aauaaucaccagagcuucu

SEQ ID NO: 780560 - RNA, 19 nt, Artificial Sequence
  Description of Artificial Sequence: Synthetic oligonucleotide
  Sense strand starting at position 3568 of SEQ ID NO: 587281
ggcucaucccugcagagaa

SEQ ID NO: 780561 - RNA, 19 nt, Artificial Sequence
  Description of Artificial Sequence: Synthetic oligonucleotide
  Antisense strand to SEQ ID NO: 780560
uucucugcagggaugagcc

SEQ ID NO: 780562 - RNA, 19 nt, Artificial Sequence
  Description of Artificial Sequence: Synthetic oligonucleotide
  Sense strand starting at position 3692 of SEQ ID NO: 587281
gcccaaacugccuaugaau

SEQ ID NO: 780563 - RNA, 19 nt, Artificial Sequence
  Description of Artificial Sequence: Synthetic oligonucleotide
  Antisense strand to SEQ ID NO: 780562
auucauaggcaguuugggc

SEQ ID NO: 780564 - RNA, 19 nt, Artificial Sequence
  Description of Artificial Sequence: Synthetic oligonucleotide
  Sense strand starting at position 3734 of SEQ ID NO: 587281
gccucaggaccuuauuaaa

SEQ ID NO: 780565 - RNA, 19 nt, Artificial Sequence
  Description of Artificial Sequence: Synthetic oligonucleotide
  Antisense strand to SEQ ID NO: 780564
uuuaauaagguccugaggc

SEQ ID NO: 780566 - RNA, 19 nt, Artificial Sequence
  Description of Artificial Sequence: Synthetic oligonucleotide
  Sense strand starting at position 3783 of SEQ ID NO: 587281
uguguuauuggaggugaca

SEQ ID NO: 780567 - RNA, 19 nt, Artificial Sequence
  Description of Artificial Sequence: Synthetic oligonucleotide
  Antisense strand to SEQ ID NO: 780566
ugucaccuccaauaacaca

SEQ ID NO: 780568 - RNA, 19 nt, Artificial Sequence
  Description of Artificial Sequence: Synthetic oligonucleotide
  Sense strand starting at position 3785 of SEQ ID NO: 587281
uguuauuggaggugacaga

SEQ ID NO: 780569 - RNA, 19 nt, Artificial Sequence
  Description of Artificial Sequence: Synthetic oligonucleotide
  Antisense strand to SEQ ID NO: 780568
ucugucaccuccaauaaca

SEQ ID NO: 780570 - RNA, 19 nt, Artificial Sequence
  Description of Artificial Sequence: Synthetic oligonucleotide
  Sense strand starting at position 3796 of SEQ ID NO: 587281
gugacagaaguuugcaaga

SEQ ID NO: 780571 - RNA, 19 nt, Artificial Sequence
  Description of Artificial Sequence: Synthetic oligonucleotide
  Antisense strand to SEQ ID NO: 780570
ucuugcaaacuucugucac

SEQ ID NO: 780572 - RNA, 19 nt, Artificial Sequence
  Description of Artificial Sequence: Synthetic oligonucleotide
  Sense strand starting at position 3932 of SEQ ID NO: 587281
aggaguucagccugaggaa

SEQ ID NO: 780573 - RNA, 19 nt, Artificial Sequence
  Description of Artificial Sequence: Synthetic oligonucleotide
  Antisense strand to SEQ ID NO: 780572
uuccucaggcugaacuccu

SEQ ID NO: 780574 - RNA, 19 nt, Artificial Sequence
  Description of Artificial Sequence: Synthetic oligonucleotide
  Sense strand starting at position 244 of SEQ ID NO: 587282
guaauuaagguccauuaug

SEQ ID NO: 780575 - RNA, 19 nt, Artificial Sequence
  Description of Artificial Sequence: Synthetic oligonucleotide
  Antisense strand to SEQ ID NO: 780574
cauaauggaccuuaauuac

SEQ ID NO: 780576 - RNA, 19 nt, Artificial Sequence
  Description of Artificial Sequence: Synthetic oligonucleotide
  Sense strand starting at position 582 of SEQ ID NO: 587282
uuccguaauaagugaaaga

SEQ ID NO: 780577 - RNA, 19 nt, Artificial Sequence
  Description of Artificial Sequence: Synthetic oligonucleotide
  Antisense strand to SEQ ID NO: 780576
ucuuucacuuauuacggaa

SEQ ID NO: 780578 - RNA, 19 nt, Artificial Sequence
  Description of Artificial Sequence: Synthetic oligonucleotide
  Sense strand starting at position 643 of SEQ ID NO: 587282
gaauauuguucuguaugaa

SEQ ID NO: 780579 - RNA, 19 nt, Artificial Sequence
  Description of Artificial Sequence: Synthetic oligonucleotide
  Antisense strand to SEQ ID NO: 780578
uucauacagaacaauauuc

SEQ ID NO: 780580 - RNA, 19 nt, Artificial Sequence
  Description of Artificial Sequence: Synthetic oligonucleotide
  Sense strand starting at position 644 of SEQ ID NO: 587282
aauauuguucuguaugaag

SEQ ID NO: 780581 - RNA, 19 nt, Artificial Sequence
  Description of Artificial Sequence: Synthetic oligonucleotide
  Antisense strand to SEQ ID NO: 780580
cuucauacagaacaauauu

SEQ ID NO: 780582 - RNA, 19 nt, Artificial Sequence
  Description of Artificial Sequence: Synthetic oligonucleotide
  Sense strand starting at position 646 of SEQ ID NO: 587282
uauuguucuguaugaagag

SEQ ID NO: 780583 - RNA, 19 nt, Artificial Sequence
  Description of Artificial Sequence: Synthetic oligonucleotide
  Antisense strand to SEQ ID NO: 780582
cucuucauacagaacaaua

SEQ ID NO: 780584 - RNA, 19 nt, Artificial Sequence
  Description of Artificial Sequence: Synthetic oligonucleotide
  Sense strand starting at position 1150 of SEQ ID NO: 587282
gugacuugaccuugggcaa

SEQ ID NO: 780585 - RNA, 19 nt, Artificial Sequence
  Description of Artificial Sequence: Synthetic oligonucleotide
  Antisense strand to SEQ ID NO: 780584
uugcccaaggucaagucac

SEQ ID NO: 780586 - RNA, 19 nt, Artificial Sequence
  Description of Artificial Sequence: Synthetic oligonucleotide
  Sense strand starting at position 1189 of SEQ ID NO: 587282
cucaguuucccugauugua

SEQ ID NO: 780587 - RNA, 19 nt, Artificial Sequence
  Description of Artificial Sequence: Synthetic oligonucleotide
  Antisense strand to SEQ ID NO: 780586
uacaaucagggaaacugag

SEQ ID NO: 780588 - RNA, 19 nt, Artificial Sequence
  Description of Artificial Sequence: Synthetic oligonucleotide
  Sense strand starting at position 1192 of SEQ ID NO: 587282
aguuucccugauuguaaau

SEQ ID NO: 780589 - RNA, 19 nt, Artificial Sequence
  Description of Artificial Sequence: Synthetic oligonucleotide
  Antisense strand to SEQ ID NO: 780588
auuuacaaucagggaaacu

SEQ ID NO: 780590 - RNA, 19 nt, Artificial Sequence
  Description of Artificial Sequence: Synthetic oligonucleotide
  Sense strand starting at position 1239 of SEQ ID NO: 587282
acaggacuggugugaggau

SEQ ID NO: 780591 - RNA, 19 nt, Artificial Sequence
  Description of Artificial Sequence: Synthetic oligonucleotide
  Antisense strand to SEQ ID NO: 780590
auccucacaccaguccugu

SEQ ID NO: 780592 - RNA, 19 nt, Artificial Sequence
  Description of Artificial Sequence: Synthetic oligonucleotide
  Sense strand starting at position 1335 of SEQ ID NO: 587282
guaauacaggccuaaccuu

SEQ ID NO: 780593 - RNA, 19 nt, Artificial Sequence
  Description of Artificial Sequence: Synthetic oligonucleotide
  Antisense strand to SEQ ID NO: 780592
aagguuaggccuguauuac

SEQ ID NO: 780594 - RNA, 19 nt, Artificial Sequence
  Description of Artificial Sequence: Synthetic oligonucleotide
  Sense strand starting at position 1386 of SEQ ID NO: 587282
cagguugagaucugaaugu

SEQ ID NO: 780595 - RNA, 19 nt, Artificial Sequence
  Description of Artificial Sequence: Synthetic oligonucleotide
  Antisense strand to SEQ ID NO: 780594
acauucagaucucaaccug

SEQ ID NO: 780596 - RNA, 19 nt, Artificial Sequence
  Description of Artificial Sequence: Synthetic oligonucleotide
  Sense strand starting at position 1390 of SEQ ID NO: 587282
uugagaucugaaugucuau

SEQ ID NO: 780597 - RNA, 19 nt, Artificial Sequence
  Description of Artificial Sequence: Synthetic oligonucleotide
  Antisense strand to SEQ ID NO: 780596
auagacauucagaucucaa

SEQ ID NO: 780598 - RNA, 19 nt, Artificial Sequence
  Description of Artificial Sequence: Synthetic oligonucleotide
  Sense strand starting at position 1455 of SEQ ID NO: 587282
ugggccuguuuccuaagaa

SEQ ID NO: 780599 - RNA, 19 nt, Artificial Sequence
  Description of Artificial Sequence: Synthetic oligonucleotide
  Antisense strand to SEQ ID NO: 780598
uucuuaggaaacaggccca

SEQ ID NO: 780600 - RNA, 19 nt, Artificial Sequence
  Description of Artificial Sequence: Synthetic oligonucleotide
  Sense strand starting at position 1462 of SEQ ID NO: 587282
guuuccuaagaagguuauu

SEQ ID NO: 780601 - RNA, 19 nt, Artificial Sequence
  Description of Artificial Sequence: Synthetic oligonucleotide
  Antisense strand to SEQ ID NO: 780600
aauaaccuucuuaggaaac

SEQ ID NO: 780602 - RNA, 19 nt, Artificial Sequence
  Description of Artificial Sequence: Synthetic oligonucleotide
  Sense strand starting at position 1656 of SEQ ID NO: 587282
cguuauuugcacuguaaac

SEQ ID NO: 780603 - RNA, 19 nt, Artificial Sequence
  Description of Artificial Sequence: Synthetic oligonucleotide
  Antisense strand to SEQ ID NO: 780602
guuuacagugcaaauaacg

SEQ ID NO: 780604 - RNA, 19 nt, Artificial Sequence
  Description of Artificial Sequence: Synthetic oligonucleotide
  Sense strand starting at position 1715 of SEQ ID NO: 587282
agugauucgcacuagagag

SEQ ID NO: 780605 - RNA, 19 nt, Artificial Sequence
  Description of Artificial Sequence: Synthetic oligonucleotide
  Antisense strand to SEQ ID NO: 780604
cucucuagugcgaaucacu

SEQ ID NO: 780606 - RNA, 19 nt, Artificial Sequence
  Description of Artificial Sequence: Synthetic oligonucleotide
  Sense strand starting at position 1744 of SEQ ID NO: 587282
cagagcuuccgagaaucaa

SEQ ID NO: 780607 - RNA, 19 nt, Artificial Sequence
  Description of Artificial Sequence: Synthetic oligonucleotide
  Antisense strand to SEQ ID NO: 780606
uugauucucggaagcucug

SEQ ID NO: 780608 - RNA, 19 nt, Artificial Sequence
  Description of Artificial Sequence: Synthetic oligonucleotide
  Sense strand starting at position 1778 of SEQ ID NO: 587282
uggccuccagccuagauua

SEQ ID NO: 780609 - RNA, 19 nt, Artificial Sequence
  Description of Artificial Sequence: Synthetic oligonucleotide
  Antisense strand to SEQ ID NO: 780608
uaaucuaggcuggaggcca

SEQ ID NO: 780610 - RNA, 19 nt, Artificial Sequence
  Description of Artificial Sequence: Synthetic oligonucleotide
  Sense strand starting at position 1780 of SEQ ID NO: 587282
gccuccagccuagauuaga

SEQ ID NO: 780611 - RNA, 19 nt, Artificial Sequence
  Description of Artificial Sequence: Synthetic oligonucleotide
  Antisense strand to SEQ ID NO: 780610
ucuaaucuaggcuggaggc

SEQ ID NO: 780612 - RNA, 19 nt, Artificial Sequence
  Description of Artificial Sequence: Synthetic oligonucleotide
  Sense strand starting at position 2013 of SEQ ID NO: 587282
uaggaaauguggucucuca

SEQ ID NO: 780613 - RNA, 19 nt, Artificial Sequence
  Description of Artificial Sequence: Synthetic oligonucleotide
  Antisense strand to SEQ ID NO: 780612
ugagagaccacauuuccua

SEQ ID NO: 780614 - RNA, 19 nt, Artificial Sequence
  Description of Artificial Sequence: Synthetic oligonucleotide
  Sense strand starting at position 2257 of SEQ ID NO: 587282
cucuaauucccagagggca

SEQ ID NO: 780615 - RNA, 19 nt, Artificial Sequence
  Description of Artificial Sequence: Synthetic oligonucleotide
  Antisense strand to SEQ ID NO: 780614
ugcccucugggaauuagag

SEQ ID NO: 780616 - RNA, 19 nt, Artificial Sequence
  Description of Artificial Sequence: Synthetic oligonucleotide
  Sense strand starting at position 2719 of SEQ ID NO: 587282
ggagaauccuuuccgggag

SEQ ID NO: 780617 - RNA, 19 nt, Artificial Sequence
  Description of Artificial Sequence: Synthetic oligonucleotide
  Antisense strand to SEQ ID NO: 780616
cucccggaaaggauucucc

SEQ ID NO: 780618 - RNA, 19 nt, Artificial Sequence
  Description of Artificial Sequence: Synthetic oligonucleotide
  Sense strand starting at position 2991 of SEQ ID NO: 587282
auauuagcucgcuauggaa

SEQ ID NO: 780619 - RNA, 19 nt, Artificial Sequence
  Description of Artificial Sequence: Synthetic oligonucleotide
  Antisense strand to SEQ ID NO: 780618
uuccauagcgagcuaauau

SEQ ID NO: 780620 - RNA, 19 nt, Artificial Sequence
  Description of Artificial Sequence: Synthetic oligonucleotide
  Sense strand starting at position 2999 of SEQ ID NO: 587282
ucgcuauggaauggacaaa

SEQ ID NO: 780621 - RNA, 19 nt, Artificial Sequence
  Description of Artificial Sequence: Synthetic oligonucleotide
  Antisense strand to SEQ ID NO: 780620
uuuguccauuccauagcga

SEQ ID NO: 780622 - RNA, 19 nt, Artificial Sequence
  Description of Artificial Sequence: Synthetic oligonucleotide
  Sense strand starting at position 3033 of SEQ ID NO: 587282
aagcuucuccgggacauga

SEQ ID NO: 780623 - RNA, 19 nt, Artificial Sequence
  Description of Artificial Sequence: Synthetic oligonucleotide
  Antisense strand to SEQ ID NO: 780622
ucaugucccggagaagcuu

SEQ ID NO: 780624 - RNA, 19 nt, Artificial Sequence
  Description of Artificial Sequence: Synthetic oligonucleotide
  Sense strand starting at position 3158 of SEQ ID NO: 587282
ccuguauuugcaugacacu

SEQ ID NO: 780625 - RNA, 19 nt, Artificial Sequence
  Description of Artificial Sequence: Synthetic oligonucleotide
  Antisense strand to SEQ ID NO: 780624
agugucaugcaaauacagg

SEQ ID NO: 780626 - RNA, 19 nt, Artificial Sequence
  Description of Artificial Sequence: Synthetic oligonucleotide
  Sense strand starting at position 3208 of SEQ ID NO: 587282
aggaaugucucauuccagu

SEQ ID NO: 780627 - RNA, 19 nt, Artificial Sequence
  Description of Artificial Sequence: Synthetic oligonucleotide
  Antisense strand to SEQ ID NO: 780626
acuggaaugagacauuccu

SEQ ID NO: 780628 - RNA, 19 nt, Artificial Sequence
  Description of Artificial Sequence: Synthetic oligonucleotide
  Sense strand starting at position 3295 of SEQ ID NO: 587282
ucuggcaugccuuaagaga

SEQ ID NO: 780629 - RNA, 19 nt, Artificial Sequence
  Description of Artificial Sequence: Synthetic oligonucleotide
  Antisense strand to SEQ ID NO: 780628
ucucuuaaggcaugccaga

SEQ ID NO: 780630 - RNA, 19 nt, Artificial Sequence
  Description of Artificial Sequence: Synthetic oligonucleotide
  Sense strand starting at position 3395 of SEQ ID NO: 587282
ggacauuaucaaugagugu

SEQ ID NO: 780631 - RNA, 19 nt, Artificial Sequence
  Description of Artificial Sequence: Synthetic oligonucleotide
  Antisense strand to SEQ ID NO: 780630
acacucauugauaaugucc

SEQ ID NO: 780632 - RNA, 19 nt, Artificial Sequence
  Description of Artificial Sequence: Synthetic oligonucleotide
  Sense strand starting at position 3443 of SEQ ID NO: 587282
ucccuugggccugaggaau

SEQ ID NO: 780633 - RNA, 19 nt, Artificial Sequence
  Description of Artificial Sequence: Synthetic oligonucleotide
  Antisense strand to SEQ ID NO: 780632
auuccucaggcccaaggga

SEQ ID NO: 780634 - RNA, 19 nt, Artificial Sequence
  Description of Artificial Sequence: Synthetic oligonucleotide
  Sense strand starting at position 3497 of SEQ ID NO: 587282
uccuauuauucuguuagau

SEQ ID NO: 780635 - RNA, 19 nt, Artificial Sequence
  Description of Artificial Sequence: Synthetic oligonucleotide
  Antisense strand to SEQ ID NO: 780634
aucuaacagaauaauagga

SEQ ID NO: 780636 - RNA, 19 nt, Artificial Sequence
  Description of Artificial Sequence: Synthetic oligonucleotide
  Sense strand starting at position 3517 of SEQ ID NO: 587282
cccucaguggcaugagaag

SEQ ID NO: 780637 - RNA, 19 nt, Artificial Sequence
  Description of Artificial Sequence: Synthetic oligonucleotide
  Antisense strand to SEQ ID NO: 780636
cuucucaugccacugaggg

SEQ ID NO: 780638 - RNA, 19 nt, Artificial Sequence
  Description of Artificial Sequence: Synthetic oligonucleotide
  Sense strand starting at position 3531 of SEQ ID NO: 587282
agaagcucuggugauuauu

SEQ ID NO: 780639 - RNA, 19 nt, Artificial Sequence
  Description of Artificial Sequence: Synthetic oligonucleotide
  Antisense strand to SEQ ID NO: 780638
aauaaucaccagagcuucu

SEQ ID NO: 780640 - RNA, 19 nt, Artificial Sequence
  Description of Artificial Sequence: Synthetic oligonucleotide
  Sense strand starting at position 3568 of SEQ ID NO: 587282
ggcucaucccugcagagaa

SEQ ID NO: 780641 - RNA, 19 nt, Artificial Sequence
  Description of Artificial Sequence: Synthetic oligonucleotide
  Antisense strand to SEQ ID NO: 780640
uucucugcagggaugagcc

SEQ ID NO: 780642 - RNA, 19 nt, Artificial Sequence
  Description of Artificial Sequence: Synthetic oligonucleotide
  Sense strand starting at position 3692 of SEQ ID NO: 587282
gcccaaacugccuaugaau

SEQ ID NO: 780643 - RNA, 19 nt, Artificial Sequence
  Description of Artificial Sequence: Synthetic oligonucleotide
  Antisense strand to SEQ ID NO: 780642
auucauaggcaguuugggc

SEQ ID NO: 780644 - RNA, 19 nt, Artificial Sequence
  Description of Artificial Sequence: Synthetic oligonucleotide
  Sense strand starting at position 3734 of SEQ ID NO: 587282
gccucaggaccuuauuaaa

SEQ ID NO: 780645 - RNA, 19 nt, Artificial Sequence
  Description of Artificial Sequence: Synthetic oligonucleotide
  Antisense strand to SEQ ID NO: 780644
uuuaauaagguccugaggc

SEQ ID NO: 780646 - RNA, 19 nt, Artificial Sequence
  Description of Artificial Sequence: Synthetic oligonucleotide
  Sense strand starting at position 3783 of SEQ ID NO: 587282
uguguuauuggaggugaca

SEQ ID NO: 780647 - RNA, 19 nt, Artificial Sequence
  Description of Artificial Sequence: Synthetic oligonucleotide
  Antisense strand to SEQ ID NO: 780646
ugucaccuccaauaacaca

SEQ ID NO: 780648 - RNA, 19 nt, Artificial Sequence
  Description of Artificial Sequence: Synthetic oligonucleotide
  Sense strand starting at position 3785 of SEQ ID NO: 587282
uguuauuggaggugacaga

SEQ ID NO: 780649 - RNA, 19 nt, Artificial Sequence
  Description of Artificial Sequence: Synthetic oligonucleotide
  Antisense strand to SEQ ID NO: 780648
ucugucaccuccaauaaca

SEQ ID NO: 780650 - RNA, 19 nt, Artificial Sequence
  Description of Artificial Sequence: Synthetic oligonucleotide
  Sense strand starting at position 3796 of SEQ ID NO: 587282
gugacagaaguuugcaaga

SEQ ID NO: 780651 - RNA, 19 nt, Artificial Sequence
  Description of Artificial Sequence: Synthetic oligonucleotide
  Antisense strand to SEQ ID NO: 780650
ucuugcaaacuucugucac

SEQ ID NO: 780652 - RNA, 19 nt, Artificial Sequence
  Description of Artificial Sequence: Synthetic oligonucleotide
  Sense strand starting at position 3932 of SEQ ID NO: 587282
aggaguucagccugaggaa

SEQ ID NO: 780653 - RNA, 19 nt, Artificial Sequence
  Description of Artificial Sequence: Synthetic oligonucleotide
  Antisense strand to SEQ ID NO: 780652
uuccucaggcugaacuccu

SEQ ID NO: 780654 - RNA, 19 nt, Artificial Sequence
  Description of Artificial Sequence: Synthetic oligonucleotide
  Sense strand starting at position 323 of SEQ ID NO: 587283
guugacauuguauaguauu

SEQ ID NO: 780655 - RNA, 19 nt, Artificial Sequence
  Description of Artificial Sequence: Synthetic oligonucleotide
  Antisense strand to SEQ ID NO: 780654
aauacuauacaaugucaac

SEQ ID NO: 780656 - RNA, 19 nt, Artificial Sequence
  Description of Artificial Sequence: Synthetic oligonucleotide
  Sense strand starting at position 336 of SEQ ID NO: 587283
aguauuccacagcaugaca

SEQ ID NO: 780657 - RNA, 19 nt, Artificial Sequence
  Description of Artificial Sequence: Synthetic oligonucleotide
  Antisense strand to SEQ ID NO: 780656
ugucaugcuguggaauacu

SEQ ID NO: 780658 - RNA, 19 nt, Artificial Sequence
  Description of Artificial Sequence: Synthetic oligonucleotide
  Sense strand starting at position 581 of SEQ ID NO: 587283
gcaguaaaugucuaaagcu

SEQ ID NO: 780659 - RNA, 19 nt, Artificial Sequence
  Description of Artificial Sequence: Synthetic oligonucleotide
  Antisense strand to SEQ ID NO: 780658
agcuuuagacauuuacugc

SEQ ID NO: 780660 - RNA, 19 nt, Artificial Sequence
  Description of Artificial Sequence: Synthetic oligonucleotide
  Sense strand starting at position 695 of SEQ ID NO: 587283
aaaggaauuguuugaaugu

SEQ ID NO: 780661 - RNA, 19 nt, Artificial Sequence
  Description of Artificial Sequence: Synthetic oligonucleotide
  Antisense strand to SEQ ID NO: 780660
acauucaaacaauuccuuu

SEQ ID NO: 780662 - RNA, 19 nt, Artificial Sequence
  Description of Artificial Sequence: Synthetic oligonucleotide
  Sense strand starting at position 970 of SEQ ID NO: 587283
aagacucucgugucgcauu

SEQ ID NO: 780663 - RNA, 19 nt, Artificial Sequence
  Description of Artificial Sequence: Synthetic oligonucleotide
  Antisense strand to SEQ ID NO: 780662
aaugcgacacgagagucuu

SEQ ID NO: 780664 - RNA, 19 nt, Artificial Sequence
  Description of Artificial Sequence: Synthetic oligonucleotide
  Sense strand starting at position 1103 of SEQ ID NO: 587283
gggaguauuucuccgcacu

SEQ ID NO: 780665 - RNA, 19 nt, Artificial Sequence
  Description of Artificial Sequence: Synthetic oligonucleotide
  Antisense strand to SEQ ID NO: 780664
agugcggagaaauacuccc

SEQ ID NO: 780666 - RNA, 19 nt, Artificial Sequence
  Description of Artificial Sequence: Synthetic oligonucleotide
  Sense strand starting at position 1104 of SEQ ID NO: 587283
ggaguauuucuccgcacuu

SEQ ID NO: 780667 - RNA, 19 nt, Artificial Sequence
  Description of Artificial Sequence: Synthetic oligonucleotide
  Antisense strand to SEQ ID NO: 780666
aagugcggagaaauacucc

SEQ ID NO: 780668 - RNA, 19 nt, Artificial Sequence
  Description of Artificial Sequence: Synthetic oligonucleotide
  Sense strand starting at position 1105 of SEQ ID NO: 587283
gaguauuucuccgcacuuu

SEQ ID NO: 780669 - RNA, 19 nt, Artificial Sequence
  Description of Artificial Sequence: Synthetic oligonucleotide
  Antisense strand to SEQ ID NO: 780668
aaagugcggagaaauacuc

SEQ ID NO: 780670 - RNA, 19 nt, Artificial Sequence
  Description of Artificial Sequence: Synthetic oligonucleotide
  Sense strand starting at position 1176 of SEQ ID NO: 587283
cccacuugcucacuggaaa

SEQ ID NO: 780671 - RNA, 19 nt, Artificial Sequence
  Description of Artificial Sequence: Synthetic oligonucleotide
  Antisense strand to SEQ ID NO: 780670
uuuccagugagcaaguggg

SEQ ID NO: 780672 - RNA, 19 nt, Artificial Sequence
  Description of Artificial Sequence: Synthetic oligonucleotide
  Sense strand starting at position 1311 of SEQ ID NO: 587283
gggaguauuuagcugcucu

SEQ ID NO: 780673 - RNA, 19 nt, Artificial Sequence
  Description of Artificial Sequence: Synthetic oligonucleotide
  Antisense strand to SEQ ID NO: 780672
agagcagcuaaauacuccc

SEQ ID NO: 780674 - RNA, 19 nt, Artificial Sequence
  Description of Artificial Sequence: Synthetic oligonucleotide
  Sense strand starting at position 1312 of SEQ ID NO: 587283
ggaguauuuagcugcucuc

SEQ ID NO: 780675 - RNA, 19 nt, Artificial Sequence
  Description of Artificial Sequence: Synthetic oligonucleotide
  Antisense strand to SEQ ID NO: 780674
gagagcagcuaaauacucc

SEQ ID NO: 780676 - RNA, 19 nt, Artificial Sequence
  Description of Artificial Sequence: Synthetic oligonucleotide
  Sense strand starting at position 1342 of SEQ ID NO: 587283
gauggauuguuucucagug

SEQ ID NO: 780677 - RNA, 19 nt, Artificial Sequence
  Description of Artificial Sequence: Synthetic oligonucleotide
  Antisense strand to SEQ ID NO: 780676
cacugagaaacaauccauc

SEQ ID NO: 780678 - RNA, 19 nt, Artificial Sequence
  Description of Artificial Sequence: Synthetic oligonucleotide
  Sense strand starting at position 1343 of SEQ ID NO: 587283
auggauuguuucucaguga

SEQ ID NO: 780679 - RNA, 19 nt, Artificial Sequence
  Description of Artificial Sequence: Synthetic oligonucleotide
  Antisense strand to SEQ ID NO: 780678
ucacugagaaacaauccau

SEQ ID NO: 780680 - RNA, 19 nt, Artificial Sequence
  Description of Artificial Sequence: Synthetic oligonucleotide
  Sense strand starting at position 1357 of SEQ ID NO: 587283
agugauugauguuuauccu

SEQ ID NO: 780681 - RNA, 19 nt, Artificial Sequence
  Description of Artificial Sequence: Synthetic oligonucleotide
  Antisense strand to SEQ ID NO: 780680
aggauaaacaucaaucacu

SEQ ID NO: 780682 - RNA, 19 nt, Artificial Sequence
  Description of Artificial Sequence: Synthetic oligonucleotide
  Sense strand starting at position 1358 of SEQ ID NO: 587283
gugauugauguuuauccuu

SEQ ID NO: 780683 - RNA, 19 nt, Artificial Sequence
  Description of Artificial Sequence: Synthetic oligonucleotide
  Antisense strand to SEQ ID NO: 780682
aaggauaaacaucaaucac

SEQ ID NO: 780684 - RNA, 19 nt, Artificial Sequence
  Description of Artificial Sequence: Synthetic oligonucleotide
  Sense strand starting at position 2186 of SEQ ID NO: 587283
acaugacaaggcugacauu

SEQ ID NO: 780685 - RNA, 19 nt, Artificial Sequence
  Description of Artificial Sequence: Synthetic oligonucleotide
  Antisense strand to SEQ ID NO: 780684
aaugucagccuugucaugu

SEQ ID NO: 780686 - RNA, 19 nt, Artificial Sequence
  Description of Artificial Sequence: Synthetic oligonucleotide
  Sense strand starting at position 2240 of SEQ ID NO: 587283
acccuuaggugcucacaga

SEQ ID NO: 780687 - RNA, 19 nt, Artificial Sequence
  Description of Artificial Sequence: Synthetic oligonucleotide
  Antisense strand to SEQ ID NO: 780686
ucugugagcaccuaagggu

SEQ ID NO: 780688 - RNA, 19 nt, Artificial Sequence
  Description of Artificial Sequence: Synthetic oligonucleotide
  Sense strand starting at position 2778 of SEQ ID NO: 587283
uaugauaucguauauguga

SEQ ID NO: 780689 - RNA, 19 nt, Artificial Sequence
  Description of Artificial Sequence: Synthetic oligonucleotide
  Antisense strand to SEQ ID NO: 780688
ucacauauacgauaucaua

SEQ ID NO: 780690 - RNA, 19 nt, Artificial Sequence
  Description of Artificial Sequence: Synthetic oligonucleotide
  Sense strand starting at position 2780 of SEQ ID NO: 587283
ugauaucguauaugugaua

SEQ ID NO: 780691 - RNA, 19 nt, Artificial Sequence
  Description of Artificial Sequence: Synthetic oligonucleotide
  Antisense strand to SEQ ID NO: 780690
uaucacauauacgauauca

SEQ ID NO: 780692 - RNA, 19 nt, Artificial Sequence
  Description of Artificial Sequence: Synthetic oligonucleotide
  Sense strand starting at position 2787 of SEQ ID NO: 587283
guauaugugauacauguac

SEQ ID NO: 780693 - RNA, 19 nt, Artificial Sequence
  Description of Artificial Sequence: Synthetic oligonucleotide
  Antisense strand to SEQ ID NO: 780692
guacauguaucacauauac

SEQ ID NO: 780694 - RNA, 19 nt, Artificial Sequence
  Description of Artificial Sequence: Synthetic oligonucleotide
  Sense strand starting at position 2826 of SEQ ID NO: 587283
ggauuaggaugccucgaga

SEQ ID NO: 780695 - RNA, 19 nt, Artificial Sequence
  Description of Artificial Sequence: Synthetic oligonucleotide
  Antisense strand to SEQ ID NO: 780694
ucucgaggcauccuaaucc

SEQ ID NO: 780696 - RNA, 19 nt, Artificial Sequence
  Description of Artificial Sequence: Synthetic oligonucleotide
  Sense strand starting at position 2829 of SEQ ID NO: 587283
uuaggaugccucgagacua

SEQ ID NO: 780697 - RNA, 19 nt, Artificial Sequence
  Description of Artificial Sequence: Synthetic oligonucleotide
  Antisense strand to SEQ ID NO: 780696
uagucucgaggcauccuaa

SEQ ID NO: 780698 - RNA, 19 nt, Artificial Sequence
  Description of Artificial Sequence: Synthetic oligonucleotide
  Sense strand starting at position 2966 of SEQ ID NO: 587283
uuccaagggugagugaaau

SEQ ID NO: 780699 - RNA, 19 nt, Artificial Sequence
  Description of Artificial Sequence: Synthetic oligonucleotide
  Antisense strand to SEQ ID NO: 780698
auuucacucacccuuggaa

SEQ ID NO: 780700 - RNA, 19 nt, Artificial Sequence
  Description of Artificial Sequence: Synthetic oligonucleotide
  Sense strand starting at position 2976 of SEQ ID NO: 587283
gagugaaauuguccuugac

SEQ ID NO: 780701 - RNA, 19 nt, Artificial Sequence
  Description of Artificial Sequence: Synthetic oligonucleotide
  Antisense strand to SEQ ID NO: 780700
gucaaggacaauuucacuc

SEQ ID NO: 780702 - RNA, 19 nt, Artificial Sequence
  Description of Artificial Sequence: Synthetic oligonucleotide
  Sense strand starting at position 2978 of SEQ ID NO: 587283
gugaaauuguccuugacug

SEQ ID NO: 780703 - RNA, 19 nt, Artificial Sequence
  Description of Artificial Sequence: Synthetic oligonucleotide
  Antisense strand to SEQ ID NO: 780702
cagucaaggacaauuucac

SEQ ID NO: 780704 - RNA, 19 nt, Artificial Sequence
  Description of Artificial Sequence: Synthetic oligonucleotide
  Sense strand starting at position 2980 of SEQ ID NO: 587283
gaaauuguccuugacuguu

SEQ ID NO: 780705 - RNA, 19 nt, Artificial Sequence
  Description of Artificial Sequence: Synthetic oligonucleotide
  Antisense strand to SEQ ID NO: 780704
aacagucaaggacaauuuc

SEQ ID NO: 780706 - RNA, 19 nt, Artificial Sequence
  Description of Artificial Sequence: Synthetic oligonucleotide
  Sense strand starting at position 3294 of SEQ ID NO: 587283
ggcagcuagauauacgaua

SEQ ID NO: 780707 - RNA, 19 nt, Artificial Sequence
  Description of Artificial Sequence: Synthetic oligonucleotide
  Antisense strand to SEQ ID NO: 780706
uaucguauaucuagcugcc

SEQ ID NO: 780708 - RNA, 19 nt, Artificial Sequence
  Description of Artificial Sequence: Synthetic oligonucleotide
  Sense strand starting at position 3307 of SEQ ID NO: 587283
acgauaucauaugcauaug

SEQ ID NO: 780709 - RNA, 19 nt, Artificial Sequence
  Description of Artificial Sequence: Synthetic oligonucleotide
  Antisense strand to SEQ ID NO: 780708
cauaugcauaugauaucgu

SEQ ID NO: 780710 - RNA, 19 nt, Artificial Sequence
  Description of Artificial Sequence: Synthetic oligonucleotide
  Sense strand starting at position 3331 of SEQ ID NO: 587283
cuauguaugcccuguauuu

SEQ ID NO: 780711 - RNA, 19 nt, Artificial Sequence
  Description of Artificial Sequence: Synthetic oligonucleotide
  Antisense strand to SEQ ID NO: 780710
aaauacagggcauacauag

SEQ ID NO: 780712 - RNA, 19 nt, Artificial Sequence
  Description of Artificial Sequence: Synthetic oligonucleotide
  Sense strand starting at position 3379 of SEQ ID NO: 587283
uaagguuaugguugaaaca

SEQ ID NO: 780713 - RNA, 19 nt, Artificial Sequence
  Description of Artificial Sequence: Synthetic oligonucleotide
  Antisense strand to SEQ ID NO: 780712
uguuucaaccauaaccuua

SEQ ID NO: 780714 - RNA, 19 nt, Artificial Sequence
  Description of Artificial Sequence: Synthetic oligonucleotide
  Sense strand starting at position 3389 of SEQ ID NO: 587283
guugaaacauauguaucau

SEQ ID NO: 780715 - RNA, 19 nt, Artificial Sequence
  Description of Artificial Sequence: Synthetic oligonucleotide
  Antisense strand to SEQ ID NO: 780714
augauacauauguuucaac

SEQ ID NO: 780716 - RNA, 19 nt, Artificial Sequence
  Description of Artificial Sequence: Synthetic oligonucleotide
  Sense strand starting at position 3484 of SEQ ID NO: 587283
uaaugagaguugccacuua

SEQ ID NO: 780717 - RNA, 19 nt, Artificial Sequence
  Description of Artificial Sequence: Synthetic oligonucleotide
  Antisense strand to SEQ ID NO: 780716
uaaguggcaacucucauua

SEQ ID NO: 780718 - RNA, 19 nt, Artificial Sequence
  Description of Artificial Sequence: Synthetic oligonucleotide
  Sense strand starting at position 3502 of SEQ ID NO: 587283
auuaaaugcuugcuauaag

SEQ ID NO: 780719 - RNA, 19 nt, Artificial Sequence
  Description of Artificial Sequence: Synthetic oligonucleotide
  Antisense strand to SEQ ID NO: 780718
cuuauagcaagcauuuaau

SEQ ID NO: 780720 - RNA, 19 nt, Artificial Sequence
  Description of Artificial Sequence: Synthetic oligonucleotide
  Sense strand starting at position 3517 of SEQ ID NO: 587283
uaaguuagguagucugaua

SEQ ID NO: 780721 - RNA, 19 nt, Artificial Sequence
  Description of Artificial Sequence: Synthetic oligonucleotide
  Antisense strand to SEQ ID NO: 780720
uaucagacuaccuaacuua

SEQ ID NO: 780722 - RNA, 19 nt, Artificial Sequence
  Description of Artificial Sequence: Synthetic oligonucleotide
  Sense strand starting at position 3587 of SEQ ID NO: 587283
ugccaucuuauaggugaga

SEQ ID NO: 780723 - RNA, 19 nt, Artificial Sequence
  Description of Artificial Sequence: Synthetic oligonucleotide
  Antisense strand to SEQ ID NO: 780722
ucucaccuauaagauggca

SEQ ID NO: 780724 - RNA, 19 nt, Artificial Sequence
  Description of Artificial Sequence: Synthetic oligonucleotide
  Sense strand starting at position 3588 of SEQ ID NO: 587283
gccaucuuauaggugagaa

SEQ ID NO: 780725 - RNA, 19 nt, Artificial Sequence
  Description of Artificial Sequence: Synthetic oligonucleotide
  Antisense strand to SEQ ID NO: 780724
uucucaccuauaagauggc

SEQ ID NO: 780726 - RNA, 19 nt, Artificial Sequence
  Description of Artificial Sequence: Synthetic oligonucleotide
  Sense strand starting at position 3614 of SEQ ID NO: 587283
gcauaaagccacugaguaa

SEQ ID NO: 780727 - RNA, 19 nt, Artificial Sequence
  Description of Artificial Sequence: Synthetic oligonucleotide
  Antisense strand to SEQ ID NO: 780726
uuacucaguggcuuuaugc

SEQ ID NO: 780728 - RNA, 19 nt, Artificial Sequence
  Description of Artificial Sequence: Synthetic oligonucleotide
  Sense strand starting at position 3647 of SEQ ID NO: 587283
aaauaucuaguuuguggua

SEQ ID NO: 780729 - RNA, 19 nt, Artificial Sequence
  Description of Artificial Sequence: Synthetic oligonucleotide
  Antisense strand to SEQ ID NO: 780728
uaccacaaacuagauauuu

SEQ ID NO: 780730 - RNA, 19 nt, Artificial Sequence
  Description of Artificial Sequence: Synthetic oligonucleotide
  Sense strand starting at position 3654 of SEQ ID NO: 587283
uaguuugugguagaauuag

SEQ ID NO: 780731 - RNA, 19 nt, Artificial Sequence
  Description of Artificial Sequence: Synthetic oligonucleotide
  Antisense strand to SEQ ID NO: 780730
cuaauucuaccacaaacua

SEQ ID NO: 780732 - RNA, 19 nt, Artificial Sequence
  Description of Artificial Sequence: Synthetic oligonucleotide
  Sense strand starting at position 3683 of SEQ ID NO: 587283
cuaguuugacuccaaaguc

SEQ ID NO: 780733 - RNA, 19 nt, Artificial Sequence
  Description of Artificial Sequence: Synthetic oligonucleotide
  Antisense strand to SEQ ID NO: 780732
gacuuuggagucaaacuag

SEQ ID NO: 780734 - RNA, 19 nt, Artificial Sequence
  Description of Artificial Sequence: Synthetic oligonucleotide
  Sense strand starting at position 53 of SEQ ID NO: 587284
ggcuucucuguugauugau

SEQ ID NO: 780735 - RNA, 19 nt, Artificial Sequence
  Description of Artificial Sequence: Synthetic oligonucleotide
  Antisense strand to SEQ ID NO: 780734
aucaaucaacagagaagcc

SEQ ID NO: 780736 - RNA, 19 nt, Artificial Sequence
  Description of Artificial Sequence: Synthetic oligonucleotide
  Sense strand starting at position 217 of SEQ ID NO: 587284
uucucaagaguuuguauca

SEQ ID NO: 780737 - RNA, 19 nt, Artificial Sequence
  Description of Artificial Sequence: Synthetic oligonucleotide
  Antisense strand to SEQ ID NO: 780736
ugauacaaacucuugagaa

SEQ ID NO: 780738 - RNA, 19 nt, Artificial Sequence
  Description of Artificial Sequence: Synthetic oligonucleotide
  Sense strand starting at position 218 of SEQ ID NO: 587284
ucucaagaguuuguaucaa

SEQ ID NO: 780739 - RNA, 19 nt, Artificial Sequence
  Description of Artificial Sequence: Synthetic oligonucleotide
  Antisense strand to SEQ ID NO: 780738
uugauacaaacucuugaga

SEQ ID NO: 780740 - RNA, 19 nt, Artificial Sequence
  Description of Artificial Sequence: Synthetic oligonucleotide
  Sense strand starting at position 2156 of SEQ ID NO: 587284
ucgaguagucaacgggaaa

SEQ ID NO: 780741 - RNA, 19 nt, Artificial Sequence
  Description of Artificial Sequence: Synthetic oligonucleotide
  Antisense strand to SEQ ID NO: 780740
uuucccguugacuacucga

SEQ ID NO: 780742 - RNA, 19 nt, Artificial Sequence
  Description of Artificial Sequence: Synthetic oligonucleotide
  Sense strand starting at position 2220 of SEQ ID NO: 587284
gugugagaccaauagaguu

SEQ ID NO: 780743 - RNA, 19 nt, Artificial Sequence
  Description of Artificial Sequence: Synthetic oligonucleotide
  Antisense strand to SEQ ID NO: 780742
aacucuauuggucucacac

SEQ ID NO: 780744 - RNA, 19 nt, Artificial Sequence
  Description of Artificial Sequence: Synthetic oligonucleotide
  Sense strand starting at position 2262 of SEQ ID NO: 587284
cguguacgcccgccuaaau

SEQ ID NO: 780745 - RNA, 19 nt, Artificial Sequence
  Description of Artificial Sequence: Synthetic oligonucleotide
  Antisense strand to SEQ ID NO: 780744
auuuaggcgggcguacacg

SEQ ID NO: 780746 - RNA, 19 nt, Artificial Sequence
  Description of Artificial Sequence: Synthetic oligonucleotide
  Sense strand starting at position 2345 of SEQ ID NO: 587284
aguguuuauagccaagaga

SEQ ID NO: 780747 - RNA, 19 nt, Artificial Sequence
  Description of Artificial Sequence: Synthetic oligonucleotide
  Antisense strand to SEQ ID NO: 780746
ucucuuggcuauaaacacu

SEQ ID NO: 780748 - RNA, 19 nt, Artificial Sequence
  Description of Artificial Sequence: Synthetic oligonucleotide
  Sense strand starting at position 2359 of SEQ ID NO: 587284
agagacaccuccuuguaga

SEQ ID NO: 780749 - RNA, 19 nt, Artificial Sequence
  Description of Artificial Sequence: Synthetic oligonucleotide
  Antisense strand to SEQ ID NO: 780748
ucuacaaggaggugucucu

SEQ ID NO: 780750 - RNA, 19 nt, Artificial Sequence
  Description of Artificial Sequence: Synthetic oligonucleotide
  Sense strand starting at position 2360 of SEQ ID NO: 587284
gagacaccuccuuguagag

SEQ ID NO: 780751 - RNA, 19 nt, Artificial Sequence
  Description of Artificial Sequence: Synthetic oligonucleotide
  Antisense strand to SEQ ID NO: 780750
cucuacaaggaggugucuc

SEQ ID NO: 780752 - RNA, 19 nt, Artificial Sequence
  Description of Artificial Sequence: Synthetic oligonucleotide
  Sense strand starting at position 2414 of SEQ ID NO: 587284
uucuguaagaaguaguguu

SEQ ID NO: 780753 - RNA, 19 nt, Artificial Sequence
  Description of Artificial Sequence: Synthetic oligonucleotide
  Antisense strand to SEQ ID NO: 780752
aacacuacuucuuacagaa

SEQ ID NO: 780754 - RNA, 19 nt, Artificial Sequence
  Description of Artificial Sequence: Synthetic oligonucleotide
  Sense strand starting at position 2428 of SEQ ID NO: 587284
guguucugugcuccagcau

SEQ ID NO: 780755 - RNA, 19 nt, Artificial Sequence
  Description of Artificial Sequence: Synthetic oligonucleotide
  Antisense strand to SEQ ID NO: 780754
augcuggagcacagaacac

SEQ ID NO: 780756 - RNA, 19 nt, Artificial Sequence
  Description of Artificial Sequence: Synthetic oligonucleotide
  Sense strand starting at position 2446 of SEQ ID NO: 587284
uucugaggaccucgaaguu

SEQ ID NO: 780757 - RNA, 19 nt, Artificial Sequence
  Description of Artificial Sequence: Synthetic oligonucleotide
  Antisense strand to SEQ ID NO: 780756
aacuucgagguccucagaa

SEQ ID NO: 780758 - RNA, 19 nt, Artificial Sequence
  Description of Artificial Sequence: Synthetic oligonucleotide
  Sense strand starting at position 2681 of SEQ ID NO: 587284
uuaaauaguguccaacuau

SEQ ID NO: 780759 - RNA, 19 nt, Artificial Sequence
  Description of Artificial Sequence: Synthetic oligonucleotide
  Antisense strand to SEQ ID NO: 780758
auaguuggacacuauuuaa

SEQ ID NO: 780760 - RNA, 19 nt, Artificial Sequence
  Description of Artificial Sequence: Synthetic oligonucleotide
  Sense strand starting at position 2692 of SEQ ID NO: 587284
ccaacuaugugauuguaug

SEQ ID NO: 780761 - RNA, 19 nt, Artificial Sequence
  Description of Artificial Sequence: Synthetic oligonucleotide
  Antisense strand to SEQ ID NO: 780760
cauacaaucacauaguugg

SEQ ID NO: 780762 - RNA, 19 nt, Artificial Sequence
  Description of Artificial Sequence: Synthetic oligonucleotide
  Sense strand starting at position 2693 of SEQ ID NO: 587284
caacuaugugauuguauga

SEQ ID NO: 780763 - RNA, 19 nt, Artificial Sequence
  Description of Artificial Sequence: Synthetic oligonucleotide
  Antisense strand to SEQ ID NO: 780762
ucauacaaucacauaguug

SEQ ID NO: 780764 - RNA, 19 nt, Artificial Sequence
  Description of Artificial Sequence: Synthetic oligonucleotide
  Sense strand starting at position 2704 of SEQ ID NO: 587284
uuguaugaguaucugauua

SEQ ID NO: 780765 - RNA, 19 nt, Artificial Sequence
  Description of Artificial Sequence: Synthetic oligonucleotide
  Antisense strand to SEQ ID NO: 780764
uaaucagauacucauacaa

SEQ ID NO: 780766 - RNA, 19 nt, Artificial Sequence
  Description of Artificial Sequence: Synthetic oligonucleotide
  Sense strand starting at position 2708 of SEQ ID NO: 587284
augaguaucugauuaugaa

SEQ ID NO: 780767 - RNA, 19 nt, Artificial Sequence
  Description of Artificial Sequence: Synthetic oligonucleotide
  Antisense strand to SEQ ID NO: 780766
uucauaaucagauacucau

SEQ ID NO: 780768 - RNA, 19 nt, Artificial Sequence
  Description of Artificial Sequence: Synthetic oligonucleotide
  Sense strand starting at position 2715 of SEQ ID NO: 587284
ucugauuaugaaggcugaa

SEQ ID NO: 780769 - RNA, 19 nt, Artificial Sequence
  Description of Artificial Sequence: Synthetic oligonucleotide
  Antisense strand to SEQ ID NO: 780768
uucagccuucauaaucaga

SEQ ID NO: 780770 - RNA, 19 nt, Artificial Sequence
  Description of Artificial Sequence: Synthetic oligonucleotide
  Sense strand starting at position 2748 of SEQ ID NO: 587284
cgguguugccgacuaguau

SEQ ID NO: 780771 - RNA, 19 nt, Artificial Sequence
  Description of Artificial Sequence: Synthetic oligonucleotide
  Antisense strand to SEQ ID NO: 780770
auacuagucggcaacaccg

SEQ ID NO: 780772 - RNA, 19 nt, Artificial Sequence
  Description of Artificial Sequence: Synthetic oligonucleotide
  Sense strand starting at position 2760 of SEQ ID NO: 587284
cuaguaugagcccagcaau

SEQ ID NO: 780773 - RNA, 19 nt, Artificial Sequence
  Description of Artificial Sequence: Synthetic oligonucleotide
  Antisense strand to SEQ ID NO: 780772
auugcugggcucauacuag

SEQ ID NO: 780774 - RNA, 19 nt, Artificial Sequence
  Description of Artificial Sequence: Synthetic oligonucleotide
  Sense strand starting at position 2800 of SEQ ID NO: 587284
ucaagaaaucucuguugag

SEQ ID NO: 780775 - RNA, 19 nt, Artificial Sequence
  Description of Artificial Sequence: Synthetic oligonucleotide
  Antisense strand to SEQ ID NO: 780774
cucaacagagauuucuuga

SEQ ID NO: 780776 - RNA, 19 nt, Artificial Sequence
  Description of Artificial Sequence: Synthetic oligonucleotide
  Sense strand starting at position 2801 of SEQ ID NO: 587284
caagaaaucucuguugagu

SEQ ID NO: 780777 - RNA, 19 nt, Artificial Sequence
  Description of Artificial Sequence: Synthetic oligonucleotide
  Antisense strand to SEQ ID NO: 780776
acucaacagagauuucuug

SEQ ID NO: 780778 - RNA, 19 nt, Artificial Sequence
  Description of Artificial Sequence: Synthetic oligonucleotide
  Sense strand starting at position 2817 of SEQ ID NO: 587284
agugaauggcuauggaaca

SEQ ID NO: 780779 - RNA, 19 nt, Artificial Sequence
  Description of Artificial Sequence: Synthetic oligonucleotide
  Antisense strand to SEQ ID NO: 780778
uguuccauagccauucacu

SEQ ID NO: 780780 - RNA, 19 nt, Artificial Sequence
  Description of Artificial Sequence: Synthetic oligonucleotide
  Sense strand starting at position 2850 of SEQ ID NO: 587284
uacacacguccagaggauu

SEQ ID NO: 780781 - RNA, 19 nt, Artificial Sequence
  Description of Artificial Sequence: Synthetic oligonucleotide
  Antisense strand to SEQ ID NO: 780780
aauccucuggacgugugua

SEQ ID NO: 780782 - RNA, 19 nt, Artificial Sequence
  Description of Artificial Sequence: Synthetic oligonucleotide
  Sense strand starting at position 2858 of SEQ ID NO: 587284
uccagaggauuuggagaaa

SEQ ID NO: 780783 - RNA, 19 nt, Artificial Sequence
  Description of Artificial Sequence: Synthetic oligonucleotide
  Antisense strand to SEQ ID NO: 780782
uuucuccaaauccucugga

SEQ ID NO: 780784 - RNA, 19 nt, Artificial Sequence
  Description of Artificial Sequence: Synthetic oligonucleotide
  Sense strand starting at position 3048 of SEQ ID NO: 587284
agguuauaauaguucuuga

SEQ ID NO: 780785 - RNA, 19 nt, Artificial Sequence
  Description of Artificial Sequence: Synthetic oligonucleotide
  Antisense strand to SEQ ID NO: 780784
ucaagaacuauuauaaccu

SEQ ID NO: 780786 - RNA, 19 nt, Artificial Sequence
  Description of Artificial Sequence: Synthetic oligonucleotide
  Sense strand starting at position 3051 of SEQ ID NO: 587284
uuauaauaguucuugaguc

SEQ ID NO: 780787 - RNA, 19 nt, Artificial Sequence
  Description of Artificial Sequence: Synthetic oligonucleotide
  Antisense strand to SEQ ID NO: 780786
gacucaagaacuauuauaa

SEQ ID NO: 780788 - RNA, 19 nt, Artificial Sequence
  Description of Artificial Sequence: Synthetic oligonucleotide
  Sense strand starting at position 3053 of SEQ ID NO: 587284
auaauaguucuugagucua

SEQ ID NO: 780789 - RNA, 19 nt, Artificial Sequence
  Description of Artificial Sequence: Synthetic oligonucleotide
  Antisense strand to SEQ ID NO: 780788
uagacucaagaacuauuau

SEQ ID NO: 780790 - RNA, 19 nt, Artificial Sequence
  Description of Artificial Sequence: Synthetic oligonucleotide
  Sense strand starting at position 3072 of SEQ ID NO: 587284
ggacuuagucaaugucuag

SEQ ID NO: 780791 - RNA, 19 nt, Artificial Sequence
  Description of Artificial Sequence: Synthetic oligonucleotide
  Antisense strand to SEQ ID NO: 780790
cuagacauugacuaagucc

SEQ ID NO: 780792 - RNA, 19 nt, Artificial Sequence
  Description of Artificial Sequence: Synthetic oligonucleotide
  Sense strand starting at position 3075 of SEQ ID NO: 587284
cuuagucaaugucuaggau

SEQ ID NO: 780793 - RNA, 19 nt, Artificial Sequence
  Description of Artificial Sequence: Synthetic oligonucleotide
  Antisense strand to SEQ ID NO: 780792
auccuagacauugacuaag

SEQ ID NO: 780794 - RNA, 19 nt, Artificial Sequence
  Description of Artificial Sequence: Synthetic oligonucleotide
  Sense strand starting at position 3076 of SEQ ID NO: 587284
uuagucaaugucuaggaua

SEQ ID NO: 780795 - RNA, 19 nt, Artificial Sequence
  Description of Artificial Sequence: Synthetic oligonucleotide
  Antisense strand to SEQ ID NO: 780794
uauccuagacauugacuaa

SEQ ID NO: 780796 - RNA, 19 nt, Artificial Sequence
  Description of Artificial Sequence: Synthetic oligonucleotide
  Sense strand starting at position 3078 of SEQ ID NO: 587284
agucaaugucuaggauaau

SEQ ID NO: 780797 - RNA, 19 nt, Artificial Sequence
  Description of Artificial Sequence: Synthetic oligonucleotide
  Antisense strand to SEQ ID NO: 780796
auuauccuagacauugacu

SEQ ID NO: 780798 - RNA, 19 nt, Artificial Sequence
  Description of Artificial Sequence: Synthetic oligonucleotide
  Sense strand starting at position 3182 of SEQ ID NO: 587284
caggucuagccagauauau

SEQ ID NO: 780799 - RNA, 19 nt, Artificial Sequence
  Description of Artificial Sequence: Synthetic oligonucleotide
  Antisense strand to SEQ ID NO: 780798
auauaucuggcuagaccug

SEQ ID NO: 780800 - RNA, 19 nt, Artificial Sequence
  Description of Artificial Sequence: Synthetic oligonucleotide
  Sense strand starting at position 3270 of SEQ ID NO: 587284
cagcuuccuguugaagaua

SEQ ID NO: 780801 - RNA, 19 nt, Artificial Sequence
  Description of Artificial Sequence: Synthetic oligonucleotide
  Antisense strand to SEQ ID NO: 780800
uaucuucaacaggaagcug

SEQ ID NO: 780802 - RNA, 19 nt, Artificial Sequence
  Description of Artificial Sequence: Synthetic oligonucleotide
  Sense strand starting at position 3358 of SEQ ID NO: 587284
gguggcauguaauuuguga

SEQ ID NO: 780803 - RNA, 19 nt, Artificial Sequence
  Description of Artificial Sequence: Synthetic oligonucleotide
  Antisense strand to SEQ ID NO: 780802
ucacaaauuacaugccacc

SEQ ID NO: 780804 - RNA, 19 nt, Artificial Sequence
  Description of Artificial Sequence: Synthetic oligonucleotide
  Sense strand starting at position 3360 of SEQ ID NO: 587284
uggcauguaauuugugagu

SEQ ID NO: 780805 - RNA, 19 nt, Artificial Sequence
  Description of Artificial Sequence: Synthetic oligonucleotide
  Antisense strand to SEQ ID NO: 780804
acucacaaauuacaugcca

SEQ ID NO: 780806 - RNA, 19 nt, Artificial Sequence
  Description of Artificial Sequence: Synthetic oligonucleotide
  Sense strand starting at position 3393 of SEQ ID NO: 587284
uccaauagggcucaauauu

SEQ ID NO: 780807 - RNA, 19 nt, Artificial Sequence
  Description of Artificial Sequence: Synthetic oligonucleotide
  Antisense strand to SEQ ID NO: 780806
aauauugagcccuauugga

SEQ ID NO: 780808 - RNA, 19 nt, Artificial Sequence
  Description of Artificial Sequence: Synthetic oligonucleotide
  Sense strand starting at position 3645 of SEQ ID NO: 587284
gagauauauguggguggga

SEQ ID NO: 780809 - RNA, 19 nt, Artificial Sequence
  Description of Artificial Sequence: Synthetic oligonucleotide
  Antisense strand to SEQ ID NO: 780808
ucccacccacauauaucuc

SEQ ID NO: 780810 - RNA, 19 nt, Artificial Sequence
  Description of Artificial Sequence: Synthetic oligonucleotide
  Sense strand starting at position 3646 of SEQ ID NO: 587284
agauauaugugggugggaa

SEQ ID NO: 780811 - RNA, 19 nt, Artificial Sequence
  Description of Artificial Sequence: Synthetic oligonucleotide
  Antisense strand to SEQ ID NO: 780810
uucccacccacauauaucu

SEQ ID NO: 780812 - RNA, 19 nt, Artificial Sequence
  Description of Artificial Sequence: Synthetic oligonucleotide
  Sense strand starting at position 3648 of SEQ ID NO: 587284
auauaugugggugggaaau

SEQ ID NO: 780813 - RNA, 19 nt, Artificial Sequence
  Description of Artificial Sequence: Synthetic oligonucleotide
  Antisense strand to SEQ ID NO: 780812
auuucccacccacauauau

SEQ ID NO: 780814 - RNA, 19 nt, Artificial Sequence
  Description of Artificial Sequence: Synthetic oligonucleotide
  Sense strand starting at position 802 of SEQ ID NO: 587285
ggagaagugucccggagca

SEQ ID NO: 780815 - RNA, 19 nt, Artificial Sequence
  Description of Artificial Sequence: Synthetic oligonucleotide
  Antisense strand to SEQ ID NO: 780814
ugcuccgggacacuucucc

SEQ ID NO: 780816 - RNA, 19 nt, Artificial Sequence
  Description of Artificial Sequence: Synthetic oligonucleotide
  Sense strand starting at position 804 of SEQ ID NO: 587285
agaagugucccggagcagu

SEQ ID NO: 780817 - RNA, 19 nt, Artificial Sequence
  Description of Artificial Sequence: Synthetic oligonucleotide
  Antisense strand to SEQ ID NO: 780816
acugcuccgggacacuucu

SEQ ID NO: 780818 - RNA, 19 nt, Artificial Sequence
  Description of Artificial Sequence: Synthetic oligonucleotide
  Sense strand starting at position 911 of SEQ ID NO: 587285
gguuguuagcgacagggaa

SEQ ID NO: 780819 - RNA, 19 nt, Artificial Sequence
  Description of Artificial Sequence: Synthetic oligonucleotide
  Antisense strand to SEQ ID NO: 780818
uucccugucgcuaacaacc

SEQ ID NO: 780820 - RNA, 19 nt, Artificial Sequence
  Description of Artificial Sequence: Synthetic oligonucleotide
  Sense strand starting at position 934 of SEQ ID NO: 587285
ugcucugagcuguguggua

SEQ ID NO: 780821 - RNA, 19 nt, Artificial Sequence
  Description of Artificial Sequence: Synthetic oligonucleotide
  Antisense strand to SEQ ID NO: 780820
uaccacacagcucagagca

SEQ ID NO: 780822 - RNA, 19 nt, Artificial Sequence
  Description of Artificial Sequence: Synthetic oligonucleotide
  Sense strand starting at position 939 of SEQ ID NO: 587285
ugagcugugugguaggcaa

SEQ ID NO: 780823 - RNA, 19 nt, Artificial Sequence
  Description of Artificial Sequence: Synthetic oligonucleotide
  Antisense strand to SEQ ID NO: 780822
uugccuaccacacagcuca

SEQ ID NO: 780824 - RNA, 19 nt, Artificial Sequence
  Description of Artificial Sequence: Synthetic oligonucleotide
  Sense strand starting at position 1187 of SEQ ID NO: 587285
ggugaagucucuccugcag

SEQ ID NO: 780825 - RNA, 19 nt, Artificial Sequence
  Description of Artificial Sequence: Synthetic oligonucleotide
  Antisense strand to SEQ ID NO: 780824
cugcaggagagacuucacc

SEQ ID NO: 780826 - RNA, 19 nt, Artificial Sequence
  Description of Artificial Sequence: Synthetic oligonucleotide
  Sense strand starting at position 1252 of SEQ ID NO: 587285
uuuguuguaagugagcaau

SEQ ID NO: 780827 - RNA, 19 nt, Artificial Sequence
  Description of Artificial Sequence: Synthetic oligonucleotide
  Antisense strand to SEQ ID NO: 780826
auugcucacuuacaacaaa

SEQ ID NO: 780828 - RNA, 19 nt, Artificial Sequence
  Description of Artificial Sequence: Synthetic oligonucleotide
  Sense strand starting at position 1254 of SEQ ID NO: 587285
uguuguaagugagcaauag

SEQ ID NO: 780829 - RNA, 19 nt, Artificial Sequence
  Description of Artificial Sequence: Synthetic oligonucleotide
  Antisense strand to SEQ ID NO: 780828
cuauugcucacuuacaaca

SEQ ID NO: 780830 - RNA, 19 nt, Artificial Sequence
  Description of Artificial Sequence: Synthetic oligonucleotide
  Sense strand starting at position 1255 of SEQ ID NO: 587285
guuguaagugagcaauagu

SEQ ID NO: 780831 - RNA, 19 nt, Artificial Sequence
  Description of Artificial Sequence: Synthetic oligonucleotide
  Antisense strand to SEQ ID NO: 780830
acuauugcucacuuacaac

SEQ ID NO: 780832 - RNA, 19 nt, Artificial Sequence
  Description of Artificial Sequence: Synthetic oligonucleotide
  Sense strand starting at position 1258 of SEQ ID NO: 587285
guaagugagcaauagugaa

SEQ ID NO: 780833 - RNA, 19 nt, Artificial Sequence
  Description of Artificial Sequence: Synthetic oligonucleotide
  Antisense strand to SEQ ID NO: 780832
uucacuauugcucacuuac

SEQ ID NO: 780834 - RNA, 19 nt, Artificial Sequence
  Description of Artificial Sequence: Synthetic oligonucleotide
  Sense strand starting at position 1262 of SEQ ID NO: 587285
gugagcaauagugaagauu

SEQ ID NO: 780835 - RNA, 19 nt, Artificial Sequence
  Description of Artificial Sequence: Synthetic oligonucleotide
  Antisense strand to SEQ ID NO: 780834
aaucuucacuauugcucac

SEQ ID NO: 780836 - RNA, 19 nt, Artificial Sequence
  Description of Artificial Sequence: Synthetic oligonucleotide
  Sense strand starting at position 3019 of SEQ ID NO: 587285
gcgcguguguccucagcua

SEQ ID NO: 780837 - RNA, 19 nt, Artificial Sequence
  Description of Artificial Sequence: Synthetic oligonucleotide
  Antisense strand to SEQ ID NO: 780836
uagcugaggacacacgcgc

SEQ ID NO: 780838 - RNA, 19 nt, Artificial Sequence
  Description of Artificial Sequence: Synthetic oligonucleotide
  Sense strand starting at position 3107 of SEQ ID NO: 587285
gucucaaggucuggaaaga

SEQ ID NO: 780839 - RNA, 19 nt, Artificial Sequence
  Description of Artificial Sequence: Synthetic oligonucleotide
  Antisense strand to SEQ ID NO: 780838
ucuuuccagaccuugagac

SEQ ID NO: 780840 - RNA, 19 nt, Artificial Sequence
  Description of Artificial Sequence: Synthetic oligonucleotide
  Sense strand starting at position 3196 of SEQ ID NO: 587285
gccuuuggcccgugggauu

SEQ ID NO: 780841 - RNA, 19 nt, Artificial Sequence
  Description of Artificial Sequence: Synthetic oligonucleotide
  Antisense strand to SEQ ID NO: 780840
aaucccacgggccaaaggc

SEQ ID NO: 780842 - RNA, 19 nt, Artificial Sequence
  Description of Artificial Sequence: Synthetic oligonucleotide
  Sense strand starting at position 3245 of SEQ ID NO: 587285
ccaagaagcuacugaagau

SEQ ID NO: 780843 - RNA, 19 nt, Artificial Sequence
  Description of Artificial Sequence: Synthetic oligonucleotide
  Antisense strand to SEQ ID NO: 780842
aucuucaguagcuucuugg

SEQ ID NO: 780844 - RNA, 19 nt, Artificial Sequence
  Description of Artificial Sequence: Synthetic oligonucleotide
  Sense strand starting at position 3291 of SEQ ID NO: 587285
gcugguguccucuaaagaa

SEQ ID NO: 780845 - RNA, 19 nt, Artificial Sequence
  Description of Artificial Sequence: Synthetic oligonucleotide
  Antisense strand to SEQ ID NO: 780844
uucuuuagaggacaccagc

SEQ ID NO: 780846 - RNA, 19 nt, Artificial Sequence
  Description of Artificial Sequence: Synthetic oligonucleotide
  Sense strand starting at position 216 of SEQ ID NO: 587286
cagccucaccauggugaaa

SEQ ID NO: 780847 - RNA, 19 nt, Artificial Sequence
  Description of Artificial Sequence: Synthetic oligonucleotide
  Antisense strand to SEQ ID NO: 780846
uuucaccauggugaggcug

SEQ ID NO: 780848 - RNA, 19 nt, Artificial Sequence
  Description of Artificial Sequence: Synthetic oligonucleotide
  Sense strand starting at position 437 of SEQ ID NO: 587286
guuuaauuggaauacaguu

SEQ ID NO: 780849 - RNA, 19 nt, Artificial Sequence
  Description of Artificial Sequence: Synthetic oligonucleotide
  Antisense strand to SEQ ID NO: 780848
aacuguauuccaauuaaac

SEQ ID NO: 780850 - RNA, 19 nt, Artificial Sequence
  Description of Artificial Sequence: Synthetic oligonucleotide
  Sense strand starting at position 522 of SEQ ID NO: 587286
auauuuaguguccgaccuu

SEQ ID NO: 780851 - RNA, 19 nt, Artificial Sequence
  Description of Artificial Sequence: Synthetic oligonucleotide
  Antisense strand to SEQ ID NO: 780850
aaggucggacacuaaauau

SEQ ID NO: 780852 - RNA, 19 nt, Artificial Sequence
  Description of Artificial Sequence: Synthetic oligonucleotide
  Sense strand starting at position 529 of SEQ ID NO: 587286
guguccgaccuuuaacaga

SEQ ID NO: 780853 - RNA, 19 nt, Artificial Sequence
  Description of Artificial Sequence: Synthetic oligonucleotide
  Antisense strand to SEQ ID NO: 780852
ucuguuaaaggucggacac

SEQ ID NO: 780854 - RNA, 19 nt, Artificial Sequence
  Description of Artificial Sequence: Synthetic oligonucleotide
  Sense strand starting at position 611 of SEQ ID NO: 587286
cgaccuucccaauguuaaa

SEQ ID NO: 780855 - RNA, 19 nt, Artificial Sequence
  Description of Artificial Sequence: Synthetic oligonucleotide
  Antisense strand to SEQ ID NO: 780854
uuuaacauugggaaggucg

SEQ ID NO: 780856 - RNA, 19 nt, Artificial Sequence
  Description of Artificial Sequence: Synthetic oligonucleotide
  Sense strand starting at position 727 of SEQ ID NO: 587286
ccuguuacgucccuauaaa

SEQ ID NO: 780857 - RNA, 19 nt, Artificial Sequence
  Description of Artificial Sequence: Synthetic oligonucleotide
  Antisense strand to SEQ ID NO: 780856
uuuauagggacguaacagg

SEQ ID NO: 780858 - RNA, 19 nt, Artificial Sequence
  Description of Artificial Sequence: Synthetic oligonucleotide
  Sense strand starting at position 728 of SEQ ID NO: 587286
cuguuacgucccuauaaac

SEQ ID NO: 780859 - RNA, 19 nt, Artificial Sequence
  Description of Artificial Sequence: Synthetic oligonucleotide
  Antisense strand to SEQ ID NO: 780858
guuuauagggacguaacag

SEQ ID NO: 780860 - RNA, 19 nt, Artificial Sequence
  Description of Artificial Sequence: Synthetic oligonucleotide
  Sense strand starting at position 812 of SEQ ID NO: 587286
accuuugcucagucguagu

SEQ ID NO: 780861 - RNA, 19 nt, Artificial Sequence
  Description of Artificial Sequence: Synthetic oligonucleotide
  Antisense strand to SEQ ID NO: 780860
acuacgacugagcaaaggu

SEQ ID NO: 780862 - RNA, 19 nt, Artificial Sequence
  Description of Artificial Sequence: Synthetic oligonucleotide
  Sense strand starting at position 822 of SEQ ID NO: 587286
agucguagucuugacugaa

SEQ ID NO: 780863 - RNA, 19 nt, Artificial Sequence
  Description of Artificial Sequence: Synthetic oligonucleotide
  Antisense strand to SEQ ID NO: 780862
uucagucaagacuacgacu

SEQ ID NO: 780864 - RNA, 19 nt, Artificial Sequence
  Description of Artificial Sequence: Synthetic oligonucleotide
  Sense strand starting at position 825 of SEQ ID NO: 587286
cguagucuugacugaaauu

SEQ ID NO: 780865 - RNA, 19 nt, Artificial Sequence
  Description of Artificial Sequence: Synthetic oligonucleotide
  Antisense strand to SEQ ID NO: 780864
aauuucagucaagacuacg

SEQ ID NO: 780866 - RNA, 19 nt, Artificial Sequence
  Description of Artificial Sequence: Synthetic oligonucleotide
  Sense strand starting at position 872 of SEQ ID NO: 587286
cauuguaaguaauuaagga

SEQ ID NO: 780867 - RNA, 19 nt, Artificial Sequence
  Description of Artificial Sequence: Synthetic oligonucleotide
  Antisense strand to SEQ ID NO: 780866
uccuuaauuacuuacaaug

SEQ ID NO: 780868 - RNA, 19 nt, Artificial Sequence
  Description of Artificial Sequence: Synthetic oligonucleotide
  Sense strand starting at position 1403 of SEQ ID NO: 587286
acgugugguagagaaccua

SEQ ID NO: 780869 - RNA, 19 nt, Artificial Sequence
  Description of Artificial Sequence: Synthetic oligonucleotide
  Antisense strand to SEQ ID NO: 780868
uagguucucuaccacacgu

SEQ ID NO: 780870 - RNA, 19 nt, Artificial Sequence
  Description of Artificial Sequence: Synthetic oligonucleotide
  Sense strand starting at position 1590 of SEQ ID NO: 587286
aagguucguggagaaagua

SEQ ID NO: 780871 - RNA, 19 nt, Artificial Sequence
  Description of Artificial Sequence: Synthetic oligonucleotide
  Antisense strand to SEQ ID NO: 780870
uacuuucuccacgaaccuu

SEQ ID NO: 780872 - RNA, 19 nt, Artificial Sequence
  Description of Artificial Sequence: Synthetic oligonucleotide
  Sense strand starting at position 1598 of SEQ ID NO: 587286
uggagaaaguaauacacua

SEQ ID NO: 780873 - RNA, 19 nt, Artificial Sequence
  Description of Artificial Sequence: Synthetic oligonucleotide
  Antisense strand to SEQ ID NO: 780872
uaguguauuacuuucucca

SEQ ID NO: 780874 - RNA, 19 nt, Artificial Sequence
  Description of Artificial Sequence: Synthetic oligonucleotide
  Sense strand starting at position 1625 of SEQ ID NO: 587286
gugcgaguggagggaaauu

SEQ ID NO: 780875 - RNA, 19 nt, Artificial Sequence
  Description of Artificial Sequence: Synthetic oligonucleotide
  Antisense strand to SEQ ID NO: 780874
aauuucccuccacucgcac

SEQ ID NO: 780876 - RNA, 19 nt, Artificial Sequence
  Description of Artificial Sequence: Synthetic oligonucleotide
  Sense strand starting at position 1656 of SEQ ID NO: 587286
cguagaaacugaucaugaa

SEQ ID NO: 780877 - RNA, 19 nt, Artificial Sequence
  Description of Artificial Sequence: Synthetic oligonucleotide
  Antisense strand to SEQ ID NO: 780876
uucaugaucaguuucuacg

SEQ ID NO: 780878 - RNA, 19 nt, Artificial Sequence
  Description of Artificial Sequence: Synthetic oligonucleotide
  Sense strand starting at position 1659 of SEQ ID NO: 587286
agaaacugaucaugaaaga

SEQ ID NO: 780879 - RNA, 19 nt, Artificial Sequence
  Description of Artificial Sequence: Synthetic oligonucleotide
  Antisense strand to SEQ ID NO: 780878
ucuuucaugaucaguuucu

SEQ ID NO: 780880 - RNA, 19 nt, Artificial Sequence
  Description of Artificial Sequence: Synthetic oligonucleotide
  Sense strand starting at position 2070 of SEQ ID NO: 587286
uggcguagucccgcccaua

SEQ ID NO: 780881 - RNA, 19 nt, Artificial Sequence
  Description of Artificial Sequence: Synthetic oligonucleotide
  Antisense strand to SEQ ID NO: 780880
uaugggcgggacuacgcca

SEQ ID NO: 780882 - RNA, 19 nt, Artificial Sequence
  Description of Artificial Sequence: Synthetic oligonucleotide
  Sense strand starting at position 2260 of SEQ ID NO: 587286
guggguacuugugcagaaa

SEQ ID NO: 780883 - RNA, 19 nt, Artificial Sequence
  Description of Artificial Sequence: Synthetic oligonucleotide
  Antisense strand to SEQ ID NO: 780882
uuucugcacaaguacccac

SEQ ID NO: 780884 - RNA, 19 nt, Artificial Sequence
  Description of Artificial Sequence: Synthetic oligonucleotide
  Sense strand starting at position 2261 of SEQ ID NO: 587286
uggguacuugugcagaaac

SEQ ID NO: 780885 - RNA, 19 nt, Artificial Sequence
  Description of Artificial Sequence: Synthetic oligonucleotide
  Antisense strand to SEQ ID NO: 780884
guuucugcacaaguaccca

SEQ ID NO: 780886 - RNA, 19 nt, Artificial Sequence
  Description of Artificial Sequence: Synthetic oligonucleotide
  Sense strand starting at position 2263 of SEQ ID NO: 587286
gguacuugugcagaaacuu

SEQ ID NO: 780887 - RNA, 19 nt, Artificial Sequence
  Description of Artificial Sequence: Synthetic oligonucleotide
  Antisense strand to SEQ ID NO: 780886
aaguuucugcacaaguacc

SEQ ID NO: 780888 - RNA, 19 nt, Artificial Sequence
  Description of Artificial Sequence: Synthetic oligonucleotide
  Sense strand starting at position 2454 of SEQ ID NO: 587286
gagcuauaaucuccgaaag

SEQ ID NO: 780889 - RNA, 19 nt, Artificial Sequence
  Description of Artificial Sequence: Synthetic oligonucleotide
  Antisense strand to SEQ ID NO: 780888
cuuucggagauuauagcuc

SEQ ID NO: 780890 - RNA, 19 nt, Artificial Sequence
  Description of Artificial Sequence: Synthetic oligonucleotide
  Sense strand starting at position 2470 of SEQ ID NO: 587286
aaggaagauuuguaaugca

SEQ ID NO: 780891 - RNA, 19 nt, Artificial Sequence
  Description of Artificial Sequence: Synthetic oligonucleotide
  Antisense strand to SEQ ID NO: 780890
ugcauuacaaaucuuccuu

SEQ ID NO: 780892 - RNA, 19 nt, Artificial Sequence
  Description of Artificial Sequence: Synthetic oligonucleotide
  Sense strand starting at position 2479 of SEQ ID NO: 587286
uuguaaugcacugcgaguu

SEQ ID NO: 780893 - RNA, 19 nt, Artificial Sequence
  Description of Artificial Sequence: Synthetic oligonucleotide
  Antisense strand to SEQ ID NO: 780892
aacucgcagugcauuacaa

SEQ ID NO: 780894 - RNA, 19 nt, Artificial Sequence
  Description of Artificial Sequence: Synthetic oligonucleotide
  Sense strand starting at position 2485 of SEQ ID NO: 587286
ugcacugcgaguuagaaau

SEQ ID NO: 780895 - RNA, 19 nt, Artificial Sequence
  Description of Artificial Sequence: Synthetic oligonucleotide
  Antisense strand to SEQ ID NO: 780894
auuucuaacucgcagugca

SEQ ID NO: 780896 - RNA, 19 nt, Artificial Sequence
  Description of Artificial Sequence: Synthetic oligonucleotide
  Sense strand starting at position 2802 of SEQ ID NO: 587286
cacgaaggguggcuuuaua

SEQ ID NO: 780897 - RNA, 19 nt, Artificial Sequence
  Description of Artificial Sequence: Synthetic oligonucleotide
  Antisense strand to SEQ ID NO: 780896
uauaaagccacccuucgug

SEQ ID NO: 780898 - RNA, 19 nt, Artificial Sequence
  Description of Artificial Sequence: Synthetic oligonucleotide
  Sense strand starting at position 3137 of SEQ ID NO: 587286
gagggugagguuugguagu

SEQ ID NO: 780899 - RNA, 19 nt, Artificial Sequence
  Description of Artificial Sequence: Synthetic oligonucleotide
  Antisense strand to SEQ ID NO: 780898
acuaccaaaccucacccuc

SEQ ID NO: 780900 - RNA, 19 nt, Artificial Sequence
  Description of Artificial Sequence: Synthetic oligonucleotide
  Sense strand starting at position 3139 of SEQ ID NO: 587286
gggugagguuugguaguua

SEQ ID NO: 780901 - RNA, 19 nt, Artificial Sequence
  Description of Artificial Sequence: Synthetic oligonucleotide
  Antisense strand to SEQ ID NO: 780900
uaacuaccaaaccucaccc

SEQ ID NO: 780902 - RNA, 19 nt, Artificial Sequence
  Description of Artificial Sequence: Synthetic oligonucleotide
  Sense strand starting at position 3144 of SEQ ID NO: 587286
agguuugguaguuagccaa

SEQ ID NO: 780903 - RNA, 19 nt, Artificial Sequence
  Description of Artificial Sequence: Synthetic oligonucleotide
  Antisense strand to SEQ ID NO: 780902
uuggcuaacuaccaaaccu

SEQ ID NO: 780904 - RNA, 19 nt, Artificial Sequence
  Description of Artificial Sequence: Synthetic oligonucleotide
  Sense strand starting at position 3148 of SEQ ID NO: 587286
uugguaguuagccaagaga

SEQ ID NO: 780905 - RNA, 19 nt, Artificial Sequence
  Description of Artificial Sequence: Synthetic oligonucleotide
  Antisense strand to SEQ ID NO: 780904
ucucuuggcuaacuaccaa

SEQ ID NO: 780906 - RNA, 19 nt, Artificial Sequence
  Description of Artificial Sequence: Synthetic oligonucleotide
  Sense strand starting at position 3327 of SEQ ID NO: 587286
gcuccugcucugucaguaa

SEQ ID NO: 780907 - RNA, 19 nt, Artificial Sequence
  Description of Artificial Sequence: Synthetic oligonucleotide
  Antisense strand to SEQ ID NO: 780906
uuacugacagagcaggagc

SEQ ID NO: 780908 - RNA, 19 nt, Artificial Sequence
  Description of Artificial Sequence: Synthetic oligonucleotide
  Sense strand starting at position 3431 of SEQ ID NO: 587286
uuugcaagugaugauacua

SEQ ID NO: 780909 - RNA, 19 nt, Artificial Sequence
  Description of Artificial Sequence: Synthetic oligonucleotide
  Antisense strand to SEQ ID NO: 780908
uaguaucaucacuugcaaa

SEQ ID NO: 780910 - RNA, 19 nt, Artificial Sequence
  Description of Artificial Sequence: Synthetic oligonucleotide
  Sense strand starting at position 3570 of SEQ ID NO: 587286
acuugauaauucgcaaauc

SEQ ID NO: 780911 - RNA, 19 nt, Artificial Sequence
  Description of Artificial Sequence: Synthetic oligonucleotide
  Antisense strand to SEQ ID NO: 780910
gauuugcgaauuaucaagu

SEQ ID NO: 780912 - RNA, 19 nt, Artificial Sequence
  Description of Artificial Sequence: Synthetic oligonucleotide
  Sense strand starting at position 3731 of SEQ ID NO: 587286
gaggaauaauugcuugcca

SEQ ID NO: 780913 - RNA, 19 nt, Artificial Sequence
  Description of Artificial Sequence: Synthetic oligonucleotide
  Antisense strand to SEQ ID NO: 780912
uggcaagcaauuauuccuc

SEQ ID NO: 780914 - RNA, 19 nt, Artificial Sequence
  Description of Artificial Sequence: Synthetic oligonucleotide
  Sense strand starting at position 3732 of SEQ ID NO: 587286
aggaauaauugcuugccaa

SEQ ID NO: 780915 - RNA, 19 nt, Artificial Sequence
  Description of Artificial Sequence: Synthetic oligonucleotide
  Antisense strand to SEQ ID NO: 780914
uuggcaagcaauuauuccu

SEQ ID NO: 780916 - RNA, 19 nt, Artificial Sequence
  Description of Artificial Sequence: Synthetic oligonucleotide
  Sense strand starting at position 3733 of SEQ ID NO: 587286
ggaauaauugcuugccaau

SEQ ID NO: 780917 - RNA, 19 nt, Artificial Sequence
  Description of Artificial Sequence: Synthetic oligonucleotide
  Antisense strand to SEQ ID NO: 780916
auuggcaagcaauuauucc

SEQ ID NO: 780918 - RNA, 19 nt, Artificial Sequence
  Description of Artificial Sequence: Synthetic oligonucleotide
  Sense strand starting at position 3769 of SEQ ID NO: 587286
uuuguauucuuucugacga

SEQ ID NO: 780919 - RNA, 19 nt, Artificial Sequence
  Description of Artificial Sequence: Synthetic oligonucleotide
  Antisense strand to SEQ ID NO: 780918
ucgucagaaagaauacaaa

SEQ ID NO: 780920 - RNA, 19 nt, Artificial Sequence
  Description of Artificial Sequence: Synthetic oligonucleotide
  Sense strand starting at position 3875 of SEQ ID NO: 587286
uuuauaaggccagaguuau

SEQ ID NO: 780921 - RNA, 19 nt, Artificial Sequence
  Description of Artificial Sequence: Synthetic oligonucleotide
  Antisense strand to SEQ ID NO: 780920
auaacucuggccuuauaaa

SEQ ID NO: 780922 - RNA, 19 nt, Artificial Sequence
  Description of Artificial Sequence: Synthetic oligonucleotide
  Sense strand starting at position 3907 of SEQ ID NO: 587286
ggugaauaaguuggguaca

SEQ ID NO: 780923 - RNA, 19 nt, Artificial Sequence
  Description of Artificial Sequence: Synthetic oligonucleotide
  Antisense strand to SEQ ID NO: 780922
uguacccaacuuauucacc

SEQ ID NO: 780924 - RNA, 19 nt, Artificial Sequence
  Description of Artificial Sequence: Synthetic oligonucleotide
  Sense strand starting at position 3909 of SEQ ID NO: 587286
ugaauaaguuggguacaau

SEQ ID NO: 780925 - RNA, 19 nt, Artificial Sequence
  Description of Artificial Sequence: Synthetic oligonucleotide
  Antisense strand to SEQ ID NO: 780924
auuguacccaacuuauuca

SEQ ID NO: 780926 - RNA, 19 nt, Artificial Sequence
  Description of Artificial Sequence: Synthetic oligonucleotide
  Sense strand starting at position 33 of SEQ ID NO: 587287
gguugcagggcaugauaua

SEQ ID NO: 780927 - RNA, 19 nt, Artificial Sequence
  Description of Artificial Sequence: Synthetic oligonucleotide
  Antisense strand to SEQ ID NO: 780926
uauaucaugcccugcaacc

SEQ ID NO: 780928 - RNA, 19 nt, Artificial Sequence
  Description of Artificial Sequence: Synthetic oligonucleotide
  Sense strand starting at position 75 of SEQ ID NO: 587287
ggcuauagggugugauaug

SEQ ID NO: 780929 - RNA, 19 nt, Artificial Sequence
  Description of Artificial Sequence: Synthetic oligonucleotide
  Antisense strand to SEQ ID NO: 780928
cauaucacacccuauagcc

SEQ ID NO: 780930 - RNA, 19 nt, Artificial Sequence
  Description of Artificial Sequence: Synthetic oligonucleotide
  Sense strand starting at position 419 of SEQ ID NO: 587287
gcaugauaugagggcuaca

SEQ ID NO: 780931 - RNA, 19 nt, Artificial Sequence
  Description of Artificial Sequence: Synthetic oligonucleotide
  Antisense strand to SEQ ID NO: 780930
uguagcccucauaucaugc

SEQ ID NO: 780932 - RNA, 19 nt, Artificial Sequence
  Description of Artificial Sequence: Synthetic oligonucleotide
  Sense strand starting at position 429 of SEQ ID NO: 587287
agggcuacagggugugaua

SEQ ID NO: 780933 - RNA, 19 nt, Artificial Sequence
  Description of Artificial Sequence: Synthetic oligonucleotide
  Antisense strand to SEQ ID NO: 780932
uaucacacccuguagcccu

SEQ ID NO: 780934 - RNA, 19 nt, Artificial Sequence
  Description of Artificial Sequence: Synthetic oligonucleotide
  Sense strand starting at position 492 of SEQ ID NO: 587287
uggucugugggaugugaua

SEQ ID NO: 780935 - RNA, 19 nt, Artificial Sequence
  Description of Artificial Sequence: Synthetic oligonucleotide
  Antisense strand to SEQ ID NO: 780934
uaucacaucccacagacca

SEQ ID NO: 780936 - RNA, 19 nt, Artificial Sequence
  Description of Artificial Sequence: Synthetic oligonucleotide
  Sense strand starting at position 494 of SEQ ID NO: 587287
gucugugggaugugauaug

SEQ ID NO: 780937 - RNA, 19 nt, Artificial Sequence
  Description of Artificial Sequence: Synthetic oligonucleotide
  Antisense strand to SEQ ID NO: 780936
cauaucacaucccacagac

SEQ ID NO: 780938 - RNA, 19 nt, Artificial Sequence
  Description of Artificial Sequence: Synthetic oligonucleotide
  Sense strand starting at position 541 of SEQ ID NO: 587287
caggguaugacaugauggu

SEQ ID NO: 780939 - RNA, 19 nt, Artificial Sequence
  Description of Artificial Sequence: Synthetic oligonucleotide
  Antisense strand to SEQ ID NO: 780938
accaucaugucauacccug

SEQ ID NO: 780940 - RNA, 19 nt, Artificial Sequence
  Description of Artificial Sequence: Synthetic oligonucleotide
  Sense strand starting at position 662 of SEQ ID NO: 587287
gguugugggauaugauaug

SEQ ID NO: 780941 - RNA, 19 nt, Artificial Sequence
  Description of Artificial Sequence: Synthetic oligonucleotide
  Antisense strand to SEQ ID NO: 780940
cauaucauaucccacaacc

SEQ ID NO: 780942 - RNA, 19 nt, Artificial Sequence
  Description of Artificial Sequence: Synthetic oligonucleotide
  Sense strand starting at position 710 of SEQ ID NO: 587287
ggguaugauaucgagguug

SEQ ID NO: 780943 - RNA, 19 nt, Artificial Sequence
  Description of Artificial Sequence: Synthetic oligonucleotide
  Antisense strand to SEQ ID NO: 780942
caaccucgauaucauaccc

SEQ ID NO: 780944 - RNA, 19 nt, Artificial Sequence
  Description of Artificial Sequence: Synthetic oligonucleotide
  Sense strand starting at position 722 of SEQ ID NO: 587287
gagguugcaggguaugaua

SEQ ID NO: 780945 - RNA, 19 nt, Artificial Sequence
  Description of Artificial Sequence: Synthetic oligonucleotide
  Antisense strand to SEQ ID NO: 780944
uaucauacccugcaaccuc

SEQ ID NO: 780946 - RNA, 19 nt, Artificial Sequence
  Description of Artificial Sequence: Synthetic oligonucleotide
  Sense strand starting at position 733 of SEQ ID NO: 587287
guaugauauggaggcugga

SEQ ID NO: 780947 - RNA, 19 nt, Artificial Sequence
  Description of Artificial Sequence: Synthetic oligonucleotide
  Antisense strand to SEQ ID NO: 780946
uccagccuccauaucauac

SEQ ID NO: 780948 - RNA, 19 nt, Artificial Sequence
  Description of Artificial Sequence: Synthetic oligonucleotide
  Sense strand starting at position 743 of SEQ ID NO: 587287
gaggcuggagagugugaua

SEQ ID NO: 780949 - RNA, 19 nt, Artificial Sequence
  Description of Artificial Sequence: Synthetic oligonucleotide
  Antisense strand to SEQ ID NO: 780948
uaucacacucuccagccuc

SEQ ID NO: 780950 - RNA, 19 nt, Artificial Sequence
  Description of Artificial Sequence: Synthetic oligonucleotide
  Sense strand starting at position 857 of SEQ ID NO: 587287
ccugaagaguaacuaggua

SEQ ID NO: 780951 - RNA, 19 nt, Artificial Sequence
  Description of Artificial Sequence: Synthetic oligonucleotide
  Antisense strand to SEQ ID NO: 780950
uaccuaguuacucuucagg

SEQ ID NO: 780952 - RNA, 19 nt, Artificial Sequence
  Description of Artificial Sequence: Synthetic oligonucleotide
  Sense strand starting at position 933 of SEQ ID NO: 587287
gggacuugcucuucuucua

SEQ ID NO: 780953 - RNA, 19 nt, Artificial Sequence
  Description of Artificial Sequence: Synthetic oligonucleotide
  Antisense strand to SEQ ID NO: 780952
uagaagaagagcaaguccc

SEQ ID NO: 780954 - RNA, 19 nt, Artificial Sequence
  Description of Artificial Sequence: Synthetic oligonucleotide
  Sense strand starting at position 951 of SEQ ID NO: 587287
aggacuuucuuuccucuga

SEQ ID NO: 780955 - RNA, 19 nt, Artificial Sequence
  Description of Artificial Sequence: Synthetic oligonucleotide
  Antisense strand to SEQ ID NO: 780954
ucagaggaaagaaaguccu

SEQ ID NO: 780956 - RNA, 19 nt, Artificial Sequence
  Description of Artificial Sequence: Synthetic oligonucleotide
  Sense strand starting at position 955 of SEQ ID NO: 587287
cuuucuuuccucugagagu

SEQ ID NO: 780957 - RNA, 19 nt, Artificial Sequence
  Description of Artificial Sequence: Synthetic oligonucleotide
  Antisense strand to SEQ ID NO: 780956
acucucagaggaaagaaag

SEQ ID NO: 780958 - RNA, 19 nt, Artificial Sequence
  Description of Artificial Sequence: Synthetic oligonucleotide
  Sense strand starting at position 1066 of SEQ ID NO: 587287
uuugacuuuccugagucua

SEQ ID NO: 780959 - RNA, 19 nt, Artificial Sequence
  Description of Artificial Sequence: Synthetic oligonucleotide
  Antisense strand to SEQ ID NO: 780958
uagacucaggaaagucaaa

SEQ ID NO: 780960 - RNA, 19 nt, Artificial Sequence
  Description of Artificial Sequence: Synthetic oligonucleotide
  Sense strand starting at position 1068 of SEQ ID NO: 587287
ugacuuuccugagucuacu

SEQ ID NO: 780961 - RNA, 19 nt, Artificial Sequence
  Description of Artificial Sequence: Synthetic oligonucleotide
  Antisense strand to SEQ ID NO: 780960
aguagacucaggaaaguca

SEQ ID NO: 780962 - RNA, 19 nt, Artificial Sequence
  Description of Artificial Sequence: Synthetic oligonucleotide
  Sense strand starting at position 1127 of SEQ ID NO: 587287
uuuauacuacaguguaagu

SEQ ID NO: 780963 - RNA, 19 nt, Artificial Sequence
  Description of Artificial Sequence: Synthetic oligonucleotide
  Antisense strand to SEQ ID NO: 780962
acuuacacuguaguauaaa

SEQ ID NO: 780964 - RNA, 19 nt, Artificial Sequence
  Description of Artificial Sequence: Synthetic oligonucleotide
  Sense strand starting at position 1137 of SEQ ID NO: 587287
aguguaagugacugaccaa

SEQ ID NO: 780965 - RNA, 19 nt, Artificial Sequence
  Description of Artificial Sequence: Synthetic oligonucleotide
  Antisense strand to SEQ ID NO: 780964
uuggucagucacuuacacu

SEQ ID NO: 780966 - RNA, 19 nt, Artificial Sequence
  Description of Artificial Sequence: Synthetic oligonucleotide
  Sense strand starting at position 1140 of SEQ ID NO: 587287
guaagugacugaccaagaa

SEQ ID NO: 780967 - RNA, 19 nt, Artificial Sequence
  Description of Artificial Sequence: Synthetic oligonucleotide
  Antisense strand to SEQ ID NO: 780966
uucuuggucagucacuuac

SEQ ID NO: 780968 - RNA, 19 nt, Artificial Sequence
  Description of Artificial Sequence: Synthetic oligonucleotide
  Sense strand starting at position 1253 of SEQ ID NO: 587287
uuucccugccuagaaguaa

SEQ ID NO: 780969 - RNA, 19 nt, Artificial Sequence
  Description of Artificial Sequence: Synthetic oligonucleotide
  Antisense strand to SEQ ID NO: 780968
uuacuucuaggcagggaaa

SEQ ID NO: 780970 - RNA, 19 nt, Artificial Sequence
  Description of Artificial Sequence: Synthetic oligonucleotide
  Sense strand starting at position 1345 of SEQ ID NO: 587287
gcaagugccacuuaaagga

SEQ ID NO: 780971 - RNA, 19 nt, Artificial Sequence
  Description of Artificial Sequence: Synthetic oligonucleotide
  Antisense strand to SEQ ID NO: 780970
uccuuuaaguggcacuugc

SEQ ID NO: 780972 - RNA, 19 nt, Artificial Sequence
  Description of Artificial Sequence: Synthetic oligonucleotide
  Sense strand starting at position 1418 of SEQ ID NO: 587287
uguugcuuuccugaggcaa

SEQ ID NO: 780973 - RNA, 19 nt, Artificial Sequence
  Description of Artificial Sequence: Synthetic oligonucleotide
  Antisense strand to SEQ ID NO: 780972
uugccucaggaaagcaaca

SEQ ID NO: 780974 - RNA, 19 nt, Artificial Sequence
  Description of Artificial Sequence: Synthetic oligonucleotide
  Sense strand starting at position 1476 of SEQ ID NO: 587287
gaccaaugguggccuuagu

SEQ ID NO: 780975 - RNA, 19 nt, Artificial Sequence
  Description of Artificial Sequence: Synthetic oligonucleotide
  Antisense strand to SEQ ID NO: 780974
acuaaggccaccauugguc

SEQ ID NO: 780976 - RNA, 19 nt, Artificial Sequence
  Description of Artificial Sequence: Synthetic oligonucleotide
  Sense strand starting at position 2003 of SEQ ID NO: 587287
gccagacugacucagaguu

SEQ ID NO: 780977 - RNA, 19 nt, Artificial Sequence
  Description of Artificial Sequence: Synthetic oligonucleotide
  Antisense strand to SEQ ID NO: 780976
aacucugagucagucuggc

SEQ ID NO: 780978 - RNA, 19 nt, Artificial Sequence
  Description of Artificial Sequence: Synthetic oligonucleotide
  Sense strand starting at position 2040 of SEQ ID NO: 587287
gccagugccagcuuuguua

SEQ ID NO: 780979 - RNA, 19 nt, Artificial Sequence
  Description of Artificial Sequence: Synthetic oligonucleotide
  Antisense strand to SEQ ID NO: 780978
uaacaaagcuggcacuggc

SEQ ID NO: 780980 - RNA, 19 nt, Artificial Sequence
  Description of Artificial Sequence: Synthetic oligonucleotide
  Sense strand starting at position 2199 of SEQ ID NO: 587287
uucugaggcuucccauaaa

SEQ ID NO: 780981 - RNA, 19 nt, Artificial Sequence
  Description of Artificial Sequence: Synthetic oligonucleotide
  Antisense strand to SEQ ID NO: 780980
uuuaugggaagccucagaa

SEQ ID NO: 780982 - RNA, 19 nt, Artificial Sequence
  Description of Artificial Sequence: Synthetic oligonucleotide
  Sense strand starting at position 2202 of SEQ ID NO: 587287
ugaggcuucccauaaacac

SEQ ID NO: 780983 - RNA, 19 nt, Artificial Sequence
  Description of Artificial Sequence: Synthetic oligonucleotide
  Antisense strand to SEQ ID NO: 780982
guguuuaugggaagccuca

SEQ ID NO: 780984 - RNA, 19 nt, Artificial Sequence
  Description of Artificial Sequence: Synthetic oligonucleotide
  Sense strand starting at position 2360 of SEQ ID NO: 587287
uccucauguucuucugacu

SEQ ID NO: 780985 - RNA, 19 nt, Artificial Sequence
  Description of Artificial Sequence: Synthetic oligonucleotide
  Antisense strand to SEQ ID NO: 780984
agucagaagaacaugagga

SEQ ID NO: 780986 - RNA, 19 nt, Artificial Sequence
  Description of Artificial Sequence: Synthetic oligonucleotide
  Sense strand starting at position 2413 of SEQ ID NO: 587287
gguguuugucuccacggaa

SEQ ID NO: 780987 - RNA, 19 nt, Artificial Sequence
  Description of Artificial Sequence: Synthetic oligonucleotide
  Antisense strand to SEQ ID NO: 780986
uuccguggagacaaacacc

SEQ ID NO: 780988 - RNA, 19 nt, Artificial Sequence
  Description of Artificial Sequence: Synthetic oligonucleotide
  Sense strand starting at position 2662 of SEQ ID NO: 587287
uucucuguccuggaaguca

SEQ ID NO: 780989 - RNA, 19 nt, Artificial Sequence
  Description of Artificial Sequence: Synthetic oligonucleotide
  Antisense strand to SEQ ID NO: 780988
ugacuuccaggacagagaa

SEQ ID NO: 780990 - RNA, 19 nt, Artificial Sequence
  Description of Artificial Sequence: Synthetic oligonucleotide
  Sense strand starting at position 2747 of SEQ ID NO: 587287
ugaggaaagccugguccua

SEQ ID NO: 780991 - RNA, 19 nt, Artificial Sequence
  Description of Artificial Sequence: Synthetic oligonucleotide
  Antisense strand to SEQ ID NO: 780990
uaggaccaggcuuuccuca

SEQ ID NO: 780992 - RNA, 19 nt, Artificial Sequence
  Description of Artificial Sequence: Synthetic oligonucleotide
  Sense strand starting at position 2919 of SEQ ID NO: 587287
cgucgugauggugauauuu

SEQ ID NO: 780993 - RNA, 19 nt, Artificial Sequence
  Description of Artificial Sequence: Synthetic oligonucleotide
  Antisense strand to SEQ ID NO: 780992
aaauaucaccaucacgacg

SEQ ID NO: 780994 - RNA, 19 nt, Artificial Sequence
  Description of Artificial Sequence: Synthetic oligonucleotide
  Sense strand starting at position 3409 of SEQ ID NO: 587287
guccuauccugcuccauuu

SEQ ID NO: 780995 - RNA, 19 nt, Artificial Sequence
  Description of Artificial Sequence: Synthetic oligonucleotide
  Antisense strand to SEQ ID NO: 780994
aaauggagcaggauaggac

SEQ ID NO: 780996 - RNA, 19 nt, Artificial Sequence
  Description of Artificial Sequence: Synthetic oligonucleotide
  Sense strand starting at position 3462 of SEQ ID NO: 587287
gcaauugucagagacucag

SEQ ID NO: 780997 - RNA, 19 nt, Artificial Sequence
  Description of Artificial Sequence: Synthetic oligonucleotide
  Antisense strand to SEQ ID NO: 780996
cugagucucugacaauugc

SEQ ID NO: 780998 - RNA, 19 nt, Artificial Sequence
  Description of Artificial Sequence: Synthetic oligonucleotide
  Sense strand starting at position 3472 of SEQ ID NO: 587287
gagacucagccugaccuua

SEQ ID NO: 780999 - RNA, 19 nt, Artificial Sequence
  Description of Artificial Sequence: Synthetic oligonucleotide
  Antisense strand to SEQ ID NO: 780998
uaaggucaggcugagucuc

SEQ ID NO: 781000 - RNA, 19 nt, Artificial Sequence
  Description of Artificial Sequence: Synthetic oligonucleotide
  Sense strand starting at position 3499 of SEQ ID NO: 587287
gcgaaugugcugucucaca

SEQ ID NO: 781001 - RNA, 19 nt, Artificial Sequence
  Description of Artificial Sequence: Synthetic oligonucleotide
  Antisense strand to SEQ ID NO: 781000
ugugagacagcacauucgc

SEQ ID NO: 781002 - RNA, 19 nt, Artificial Sequence
  Description of Artificial Sequence: Synthetic oligonucleotide
  Sense strand starting at position 3509 of SEQ ID NO: 587287
ugucucacaugacugagaa

SEQ ID NO: 781003 - RNA, 19 nt, Artificial Sequence
  Description of Artificial Sequence: Synthetic oligonucleotide
  Antisense strand to SEQ ID NO: 781002
uucucagucaugugagaca

SEQ ID NO: 781004 - RNA, 19 nt, Artificial Sequence
  Description of Artificial Sequence: Synthetic oligonucleotide
  Sense strand starting at position 3510 of SEQ ID NO: 587287
gucucacaugacugagaaa

SEQ ID NO: 781005 - RNA, 19 nt, Artificial Sequence
  Description of Artificial Sequence: Synthetic oligonucleotide
  Antisense strand to SEQ ID NO: 781004
uuucucagucaugugagac

SEQ ID NO: 781006 - RNA, 19 nt, Artificial Sequence
  Description of Artificial Sequence: Synthetic oligonucleotide
  Sense strand starting at position 9 of SEQ ID NO: 587288
acuuuagugugacuggaau

SEQ ID NO: 781007 - RNA, 19 nt, Artificial Sequence
  Description of Artificial Sequence: Synthetic oligonucleotide
  Antisense strand to SEQ ID NO: 781006
auuccagucacacuaaagu

SEQ ID NO: 781008 - RNA, 19 nt, Artificial Sequence
  Description of Artificial Sequence: Synthetic oligonucleotide
  Sense strand starting at position 11 of SEQ ID NO: 587288
uuuagugugacuggaauag

SEQ ID NO: 781009 - RNA, 19 nt, Artificial Sequence
  Description of Artificial Sequence: Synthetic oligonucleotide
  Antisense strand to SEQ ID NO: 781008
cuauuccagucacacuaaa

SEQ ID NO: 781010 - RNA, 19 nt, Artificial Sequence
  Description of Artificial Sequence: Synthetic oligonucleotide
  Sense strand starting at position 210 of SEQ ID NO: 587288
gcccaucuaggauacuuua

SEQ ID NO: 781011 - RNA, 19 nt, Artificial Sequence
  Description of Artificial Sequence: Synthetic oligonucleotide
  Antisense strand to SEQ ID NO: 781010
uaaaguauccuagaugggc

SEQ ID NO: 781012 - RNA, 19 nt, Artificial Sequence
  Description of Artificial Sequence: Synthetic oligonucleotide
  Sense strand starting at position 242 of SEQ ID NO: 587288
ugauuuaaauccuauggau

SEQ ID NO: 781013 - RNA, 19 nt, Artificial Sequence
  Description of Artificial Sequence: Synthetic oligonucleotide
  Antisense strand to SEQ ID NO: 781012
auccauaggauuuaaauca

SEQ ID NO: 781014 - RNA, 19 nt, Artificial Sequence
  Description of Artificial Sequence: Synthetic oligonucleotide
  Sense strand starting at position 275 of SEQ ID NO: 587288
gacugagauugcuugacua

SEQ ID NO: 781015 - RNA, 19 nt, Artificial Sequence
  Description of Artificial Sequence: Synthetic oligonucleotide
  Antisense strand to SEQ ID NO: 781014
uagucaagcaaucucaguc

SEQ ID NO: 781016 - RNA, 19 nt, Artificial Sequence
  Description of Artificial Sequence: Synthetic oligonucleotide
  Sense strand starting at position 277 of SEQ ID NO: 587288
cugagauugcuugacuauu

SEQ ID NO: 781017 - RNA, 19 nt, Artificial Sequence
  Description of Artificial Sequence: Synthetic oligonucleotide
  Antisense strand to SEQ ID NO: 781016
aauagucaagcaaucucag

SEQ ID NO: 781018 - RNA, 19 nt, Artificial Sequence
  Description of Artificial Sequence: Synthetic oligonucleotide
  Sense strand starting at position 279 of SEQ ID NO: 587288
gagauugcuugacuauuga

SEQ ID NO: 781019 - RNA, 19 nt, Artificial Sequence
  Description of Artificial Sequence: Synthetic oligonucleotide
  Antisense strand to SEQ ID NO: 781018
ucaauagucaagcaaucuc

SEQ ID NO: 781020 - RNA, 19 nt, Artificial Sequence
  Description of Artificial Sequence: Synthetic oligonucleotide
  Sense strand starting at position 711 of SEQ ID NO: 587288
acgauaacucugugagcca

SEQ ID NO: 781021 - RNA, 19 nt, Artificial Sequence
  Description of Artificial Sequence: Synthetic oligonucleotide
  Antisense strand to SEQ ID NO: 781020
uggcucacagaguuaucgu

SEQ ID NO: 781022 - RNA, 19 nt, Artificial Sequence
  Description of Artificial Sequence: Synthetic oligonucleotide
  Sense strand starting at position 883 of SEQ ID NO: 587288
cuacaugauccagggcuga

SEQ ID NO: 781023 - RNA, 19 nt, Artificial Sequence
  Description of Artificial Sequence: Synthetic oligonucleotide
  Antisense strand to SEQ ID NO: 781022
ucagcccuggaucauguag

SEQ ID NO: 781024 - RNA, 19 nt, Artificial Sequence
  Description of Artificial Sequence: Synthetic oligonucleotide
  Sense strand starting at position 896 of SEQ ID NO: 587288
ggcugaagguaacuuugaa

SEQ ID NO: 781025 - RNA, 19 nt, Artificial Sequence
  Description of Artificial Sequence: Synthetic oligonucleotide
  Antisense strand to SEQ ID NO: 781024
uucaaaguuaccuucagcc

SEQ ID NO: 781026 - RNA, 19 nt, Artificial Sequence
  Description of Artificial Sequence: Synthetic oligonucleotide
  Sense strand starting at position 900 of SEQ ID NO: 587288
gaagguaacuuugaaagau

SEQ ID NO: 781027 - RNA, 19 nt, Artificial Sequence
  Description of Artificial Sequence: Synthetic oligonucleotide
  Antisense strand to SEQ ID NO: 781026
aucuuucaaaguuaccuuc

SEQ ID NO: 781028 - RNA, 19 nt, Artificial Sequence
  Description of Artificial Sequence: Synthetic oligonucleotide
  Sense strand starting at position 904 of SEQ ID NO: 587288
guaacuuugaaagaucgua

SEQ ID NO: 781029 - RNA, 19 nt, Artificial Sequence
  Description of Artificial Sequence: Synthetic oligonucleotide
  Antisense strand to SEQ ID NO: 781028
uacgaucuuucaaaguuac

SEQ ID NO: 781030 - RNA, 19 nt, Artificial Sequence
  Description of Artificial Sequence: Synthetic oligonucleotide
  Sense strand starting at position 912 of SEQ ID NO: 587288
gaaagaucguaugugauaa

SEQ ID NO: 781031 - RNA, 19 nt, Artificial Sequence
  Description of Artificial Sequence: Synthetic oligonucleotide
  Antisense strand to SEQ ID NO: 781030
uuaucacauacgaucuuuc

SEQ ID NO: 781032 - RNA, 19 nt, Artificial Sequence
  Description of Artificial Sequence: Synthetic oligonucleotide
  Sense strand starting at position 986 of SEQ ID NO: 587288
ggcaucuugucaguacaau

SEQ ID NO: 781033 - RNA, 19 nt, Artificial Sequence
  Description of Artificial Sequence: Synthetic oligonucleotide
  Antisense strand to SEQ ID NO: 781032
auuguacugacaagaugcc

SEQ ID NO: 781034 - RNA, 19 nt, Artificial Sequence
  Description of Artificial Sequence: Synthetic oligonucleotide
  Sense strand starting at position 987 of SEQ ID NO: 587288
gcaucuugucaguacaauu

SEQ ID NO: 781035 - RNA, 19 nt, Artificial Sequence
  Description of Artificial Sequence: Synthetic oligonucleotide
  Antisense strand to SEQ ID NO: 781034
aauuguacugacaagaugc

SEQ ID NO: 781036 - RNA, 19 nt, Artificial Sequence
  Description of Artificial Sequence: Synthetic oligonucleotide
  Sense strand starting at position 1261 of SEQ ID NO: 587288
acugacaagugcuuuaagu

SEQ ID NO: 781037 - RNA, 19 nt, Artificial Sequence
  Description of Artificial Sequence: Synthetic oligonucleotide
  Antisense strand to SEQ ID NO: 781036
acuuaaagcacuugucagu

SEQ ID NO: 781038 - RNA, 19 nt, Artificial Sequence
  Description of Artificial Sequence: Synthetic oligonucleotide
  Sense strand starting at position 1263 of SEQ ID NO: 587288
ugacaagugcuuuaaguag

SEQ ID NO: 781039 - RNA, 19 nt, Artificial Sequence
  Description of Artificial Sequence: Synthetic oligonucleotide
  Antisense strand to SEQ ID NO: 781038
cuacuuaaagcacuuguca

SEQ ID NO: 781040 - RNA, 19 nt, Artificial Sequence
  Description of Artificial Sequence: Synthetic oligonucleotide
  Sense strand starting at position 1269 of SEQ ID NO: 587288
gugcuuuaaguagaagcua

SEQ ID NO: 781041 - RNA, 19 nt, Artificial Sequence
  Description of Artificial Sequence: Synthetic oligonucleotide
  Antisense strand to SEQ ID NO: 781040
uagcuucuacuuaaagcac

SEQ ID NO: 781042 - RNA, 19 nt, Artificial Sequence
  Description of Artificial Sequence: Synthetic oligonucleotide
  Sense strand starting at position 1465 of SEQ ID NO: 587288
guggguuugccggagguca

SEQ ID NO: 781043 - RNA, 19 nt, Artificial Sequence
  Description of Artificial Sequence: Synthetic oligonucleotide
  Antisense strand to SEQ ID NO: 781042
ugaccuccggcaaacccac

SEQ ID NO: 781044 - RNA, 19 nt, Artificial Sequence
  Description of Artificial Sequence: Synthetic oligonucleotide
  Sense strand starting at position 1531 of SEQ ID NO: 587288
acgggagguaccggagauu

SEQ ID NO: 781045 - RNA, 19 nt, Artificial Sequence
  Description of Artificial Sequence: Synthetic oligonucleotide
  Antisense strand to SEQ ID NO: 781044
aaucuccgguaccucccgu

SEQ ID NO: 781046 - RNA, 19 nt, Artificial Sequence
  Description of Artificial Sequence: Synthetic oligonucleotide
  Sense strand starting at position 2029 of SEQ ID NO: 587288
ugggacuuguagucuuuga

SEQ ID NO: 781047 - RNA, 19 nt, Artificial Sequence
  Description of Artificial Sequence: Synthetic oligonucleotide
  Antisense strand to SEQ ID NO: 781046
ucaaagacuacaaguccca

SEQ ID NO: 781048 - RNA, 19 nt, Artificial Sequence
  Description of Artificial Sequence: Synthetic oligonucleotide
  Sense strand starting at position 2082 of SEQ ID NO: 587288
aguagugguugagcugaga

SEQ ID NO: 781049 - RNA, 19 nt, Artificial Sequence
  Description of Artificial Sequence: Synthetic oligonucleotide
  Antisense strand to SEQ ID NO: 781048
ucucagcucaaccacuacu

SEQ ID NO: 781050 - RNA, 19 nt, Artificial Sequence
  Description of Artificial Sequence: Synthetic oligonucleotide
  Sense strand starting at position 2085 of SEQ ID NO: 587288
agugguugagcugagauga

SEQ ID NO: 781051 - RNA, 19 nt, Artificial Sequence
  Description of Artificial Sequence: Synthetic oligonucleotide
  Antisense strand to SEQ ID NO: 781050
ucaucucagcucaaccacu

SEQ ID NO: 781052 - RNA, 19 nt, Artificial Sequence
  Description of Artificial Sequence: Synthetic oligonucleotide
  Sense strand starting at position 2146 of SEQ ID NO: 587288
ugacuucucugugucagga

SEQ ID NO: 781053 - RNA, 19 nt, Artificial Sequence
  Description of Artificial Sequence: Synthetic oligonucleotide
  Antisense strand to SEQ ID NO: 781052
uccugacacagagaaguca

SEQ ID NO: 781054 - RNA, 19 nt, Artificial Sequence
  Description of Artificial Sequence: Synthetic oligonucleotide
  Sense strand starting at position 2369 of SEQ ID NO: 587288
uaaccaggucuguacugaa

SEQ ID NO: 781055 - RNA, 19 nt, Artificial Sequence
  Description of Artificial Sequence: Synthetic oligonucleotide
  Antisense strand to SEQ ID NO: 781054
uucaguacagaccugguua

SEQ ID NO: 781056 - RNA, 19 nt, Artificial Sequence
  Description of Artificial Sequence: Synthetic oligonucleotide
  Sense strand starting at position 2891 of SEQ ID NO: 587288
ugugcauucccgucacugu

SEQ ID NO: 781057 - RNA, 19 nt, Artificial Sequence
  Description of Artificial Sequence: Synthetic oligonucleotide
  Antisense strand to SEQ ID NO: 781056
acagugacgggaaugcaca

SEQ ID NO: 781058 - RNA, 19 nt, Artificial Sequence
  Description of Artificial Sequence: Synthetic oligonucleotide
  Sense strand starting at position 2985 of SEQ ID NO: 587288
uuugaagauauuggaguuu

SEQ ID NO: 781059 - RNA, 19 nt, Artificial Sequence
  Description of Artificial Sequence: Synthetic oligonucleotide
  Antisense strand to SEQ ID NO: 781058
aaacuccaauaucuucaaa

SEQ ID NO: 781060 - RNA, 19 nt, Artificial Sequence
  Description of Artificial Sequence: Synthetic oligonucleotide
  Sense strand starting at position 2994 of SEQ ID NO: 587288
auuggaguuuggagagguu

SEQ ID NO: 781061 - RNA, 19 nt, Artificial Sequence
  Description of Artificial Sequence: Synthetic oligonucleotide
  Antisense strand to SEQ ID NO: 781060
aaccucuccaaacuccaau

SEQ ID NO: 781062 - RNA, 19 nt, Artificial Sequence
  Description of Artificial Sequence: Synthetic oligonucleotide
  Sense strand starting at position 2997 of SEQ ID NO: 587288
ggaguuuggagagguuaag

SEQ ID NO: 781063 - RNA, 19 nt, Artificial Sequence
  Description of Artificial Sequence: Synthetic oligonucleotide
  Antisense strand to SEQ ID NO: 781062
cuuaaccucuccaaacucc

SEQ ID NO: 781064 - RNA, 19 nt, Artificial Sequence
  Description of Artificial Sequence: Synthetic oligonucleotide
  Sense strand starting at position 3007 of SEQ ID NO: 587288
gagguuaaguaacuuguua

SEQ ID NO: 781065 - RNA, 19 nt, Artificial Sequence
  Description of Artificial Sequence: Synthetic oligonucleotide
  Antisense strand to SEQ ID NO: 781064
uaacaaguuacuuaaccuc

SEQ ID NO: 781066 - RNA, 19 nt, Artificial Sequence
  Description of Artificial Sequence: Synthetic oligonucleotide
  Sense strand starting at position 3009 of SEQ ID NO: 587288
gguuaaguaacuuguuaag

SEQ ID NO: 781067 - RNA, 19 nt, Artificial Sequence
  Description of Artificial Sequence: Synthetic oligonucleotide
  Antisense strand to SEQ ID NO: 781066
cuuaacaaguuacuuaacc

SEQ ID NO: 781068 - RNA, 19 nt, Artificial Sequence
  Description of Artificial Sequence: Synthetic oligonucleotide
  Sense strand starting at position 3023 of SEQ ID NO: 587288
uuaaguuucggucauuaug

SEQ ID NO: 781069 - RNA, 19 nt, Artificial Sequence
  Description of Artificial Sequence: Synthetic oligonucleotide
  Antisense strand to SEQ ID NO: 781068
cauaaugaccgaaacuuaa

SEQ ID NO: 781070 - RNA, 19 nt, Artificial Sequence
  Description of Artificial Sequence: Synthetic oligonucleotide
  Sense strand starting at position 3033 of SEQ ID NO: 587288
gucauuauguggcugaaac

SEQ ID NO: 781071 - RNA, 19 nt, Artificial Sequence
  Description of Artificial Sequence: Synthetic oligonucleotide
  Antisense strand to SEQ ID NO: 781070
guuucagccacauaaugac

SEQ ID NO: 781072 - RNA, 19 nt, Artificial Sequence
  Description of Artificial Sequence: Synthetic oligonucleotide
  Sense strand starting at position 3034 of SEQ ID NO: 587288
ucauuauguggcugaaacu

SEQ ID NO: 781073 - RNA, 19 nt, Artificial Sequence
  Description of Artificial Sequence: Synthetic oligonucleotide
  Antisense strand to SEQ ID NO: 781072
aguuucagccacauaauga

SEQ ID NO: 781074 - RNA, 19 nt, Artificial Sequence
  Description of Artificial Sequence: Synthetic oligonucleotide
  Sense strand starting at position 3035 of SEQ ID NO: 587288
cauuauguggcugaaacuu

SEQ ID NO: 781075 - RNA, 19 nt, Artificial Sequence
  Description of Artificial Sequence: Synthetic oligonucleotide
  Antisense strand to SEQ ID NO: 781074
aaguuucagccacauaaug

SEQ ID NO: 781076 - RNA, 19 nt, Artificial Sequence
  Description of Artificial Sequence: Synthetic oligonucleotide
  Sense strand starting at position 3041 of SEQ ID NO: 587288
guggcugaaacuugggaaa

SEQ ID NO: 781077 - RNA, 19 nt, Artificial Sequence
  Description of Artificial Sequence: Synthetic oligonucleotide
  Antisense strand to SEQ ID NO: 781076
uuucccaaguuucagccac

SEQ ID NO: 781078 - RNA, 19 nt, Artificial Sequence
  Description of Artificial Sequence: Synthetic oligonucleotide
  Sense strand starting at position 3083 of SEQ ID NO: 587288
cgugcuuccggacaagaga

SEQ ID NO: 781079 - RNA, 19 nt, Artificial Sequence
  Description of Artificial Sequence: Synthetic oligonucleotide
  Antisense strand to SEQ ID NO: 781078
ucucuuguccggaagcacg

SEQ ID NO: 781080 - RNA, 19 nt, Artificial Sequence
  Description of Artificial Sequence: Synthetic oligonucleotide
  Sense strand starting at position 3133 of SEQ ID NO: 587288
ucacgcauuuaugaaagaa

SEQ ID NO: 781081 - RNA, 19 nt, Artificial Sequence
  Description of Artificial Sequence: Synthetic oligonucleotide
  Antisense strand to SEQ ID NO: 781080
uucuuucauaaaugcguga

SEQ ID NO: 781082 - RNA, 19 nt, Artificial Sequence
  Description of Artificial Sequence: Synthetic oligonucleotide
  Sense strand starting at position 3324 of SEQ ID NO: 587288
gcacaauauugugccauau

SEQ ID NO: 781083 - RNA, 19 nt, Artificial Sequence
  Description of Artificial Sequence: Synthetic oligonucleotide
  Antisense strand to SEQ ID NO: 781082
auauggcacaauauugugc

SEQ ID NO: 781084 - RNA, 19 nt, Artificial Sequence
  Description of Artificial Sequence: Synthetic oligonucleotide
  Sense strand starting at position 3810 of SEQ ID NO: 587288
aggcauuaguuacugauga

SEQ ID NO: 781085 - RNA, 19 nt, Artificial Sequence
  Description of Artificial Sequence: Synthetic oligonucleotide
  Antisense strand to SEQ ID NO: 781084
ucaucaguaacuaaugccu

SEQ ID NO: 781086 - RNA, 19 nt, Artificial Sequence
  Description of Artificial Sequence: Synthetic oligonucleotide
  Sense strand starting at position 953 of SEQ ID NO: 587289
ugaagcaggugaugaaauu

SEQ ID NO: 781087 - RNA, 19 nt, Artificial Sequence
  Description of Artificial Sequence: Synthetic oligonucleotide
  Antisense strand to SEQ ID NO: 781086
aauuucaucaccugcuuca

SEQ ID NO: 781088 - RNA, 19 nt, Artificial Sequence
  Description of Artificial Sequence: Synthetic oligonucleotide
  Sense strand starting at position 1010 of SEQ ID NO: 587289
gggccaggccgugauaagu

SEQ ID NO: 781089 - RNA, 19 nt, Artificial Sequence
  Description of Artificial Sequence: Synthetic oligonucleotide
  Antisense strand to SEQ ID NO: 781088
acuuaucacggccuggccc

SEQ ID NO: 781090 - RNA, 19 nt, Artificial Sequence
  Description of Artificial Sequence: Synthetic oligonucleotide
  Sense strand starting at position 1018 of SEQ ID NO: 587289
ccgugauaagucccagcgu

SEQ ID NO: 781091 - RNA, 19 nt, Artificial Sequence
  Description of Artificial Sequence: Synthetic oligonucleotide
  Antisense strand to SEQ ID NO: 781090
acgcugggacuuaucacgg

SEQ ID NO: 781092 - RNA, 19 nt, Artificial Sequence
  Description of Artificial Sequence: Synthetic oligonucleotide
  Sense strand starting at position 1168 of SEQ ID NO: 587289
gccgacuuauccgcgucua

SEQ ID NO: 781093 - RNA, 19 nt, Artificial Sequence
  Description of Artificial Sequence: Synthetic oligonucleotide
  Antisense strand to SEQ ID NO: 781092
uagacgcggauaagucggc

SEQ ID NO: 781094 - RNA, 19 nt, Artificial Sequence
  Description of Artificial Sequence: Synthetic oligonucleotide
  Sense strand starting at position 1169 of SEQ ID NO: 587289
ccgacuuauccgcgucuau

SEQ ID NO: 781095 - RNA, 19 nt, Artificial Sequence
  Description of Artificial Sequence: Synthetic oligonucleotide
  Antisense strand to SEQ ID NO: 781094
auagacgcggauaagucgg

SEQ ID NO: 781096 - RNA, 19 nt, Artificial Sequence
  Description of Artificial Sequence: Synthetic oligonucleotide
  Sense strand starting at position 1170 of SEQ ID NO: 587289
cgacuuauccgcgucuaug

SEQ ID NO: 781097 - RNA, 19 nt, Artificial Sequence
  Description of Artificial Sequence: Synthetic oligonucleotide
  Antisense strand to SEQ ID NO: 781096
cauagacgcggauaagucg

SEQ ID NO: 781098 - RNA, 19 nt, Artificial Sequence
  Description of Artificial Sequence: Synthetic oligonucleotide
  Sense strand starting at position 1241 of SEQ ID NO: 587289
ucaaguuuguaaucaguug

SEQ ID NO: 781099 - RNA, 19 nt, Artificial Sequence
  Description of Artificial Sequence: Synthetic oligonucleotide
  Antisense strand to SEQ ID NO: 781098
caacugauuacaaacuuga

SEQ ID NO: 781100 - RNA, 19 nt, Artificial Sequence
  Description of Artificial Sequence: Synthetic oligonucleotide
  Sense strand starting at position 1695 of SEQ ID NO: 587289
ggugguccacguaguagaa

SEQ ID NO: 781101 - RNA, 19 nt, Artificial Sequence
  Description of Artificial Sequence: Synthetic oligonucleotide
  Antisense strand to SEQ ID NO: 781100
uucuacuacguggaccacc

SEQ ID NO: 781102 - RNA, 19 nt, Artificial Sequence
  Description of Artificial Sequence: Synthetic oligonucleotide
  Sense strand starting at position 1697 of SEQ ID NO: 587289
ugguccacguaguagaaau

SEQ ID NO: 781103 - RNA, 19 nt, Artificial Sequence
  Description of Artificial Sequence: Synthetic oligonucleotide
  Antisense strand to SEQ ID NO: 781102
auuucuacuacguggacca

SEQ ID NO: 781104 - RNA, 19 nt, Artificial Sequence
  Description of Artificial Sequence: Synthetic oligonucleotide
  Sense strand starting at position 2652 of SEQ ID NO: 587289
caggauagauucuggauuu

SEQ ID NO: 781105 - RNA, 19 nt, Artificial Sequence
  Description of Artificial Sequence: Synthetic oligonucleotide
  Antisense strand to SEQ ID NO: 781104
aaauccagaaucuauccug

SEQ ID NO: 781106 - RNA, 19 nt, Artificial Sequence
  Description of Artificial Sequence: Synthetic oligonucleotide
  Sense strand starting at position 2653 of SEQ ID NO: 587289
aggauagauucuggauuua

SEQ ID NO: 781107 - RNA, 19 nt, Artificial Sequence
  Description of Artificial Sequence: Synthetic oligonucleotide
  Antisense strand to SEQ ID NO: 781106
uaaauccagaaucuauccu

SEQ ID NO: 781108 - RNA, 19 nt, Artificial Sequence
  Description of Artificial Sequence: Synthetic oligonucleotide
  Sense strand starting at position 3062 of SEQ ID NO: 587289
ggcacuuucucggagcuga

SEQ ID NO: 781109 - RNA, 19 nt, Artificial Sequence
  Description of Artificial Sequence: Synthetic oligonucleotide
  Antisense strand to SEQ ID NO: 781108
ucagcuccgagaaagugcc

SEQ ID NO: 781110 - RNA, 19 nt, Artificial Sequence
  Description of Artificial Sequence: Synthetic oligonucleotide
  Sense strand starting at position 3415 of SEQ ID NO: 587289
uugcggguguucucgaaga

SEQ ID NO: 781111 - RNA, 19 nt, Artificial Sequence
  Description of Artificial Sequence: Synthetic oligonucleotide
  Antisense strand to SEQ ID NO: 781110
ucuucgagaacacccgcaa

SEQ ID NO: 781112 - RNA, 19 nt, Artificial Sequence
  Description of Artificial Sequence: Synthetic oligonucleotide
  Sense strand starting at position 3416 of SEQ ID NO: 587289
ugcggguguucucgaagau

SEQ ID NO: 781113 - RNA, 19 nt, Artificial Sequence
  Description of Artificial Sequence: Synthetic oligonucleotide
  Antisense strand to SEQ ID NO: 781112
aucuucgagaacacccgca

SEQ ID NO: 781114 - RNA, 19 nt, Artificial Sequence
  Description of Artificial Sequence: Synthetic oligonucleotide
  Sense strand starting at position 3417 of SEQ ID NO: 587289
gcggguguucucgaagaug

SEQ ID NO: 781115 - RNA, 19 nt, Artificial Sequence
  Description of Artificial Sequence: Synthetic oligonucleotide
  Antisense strand to SEQ ID NO: 781114
caucuucgagaacacccgc

SEQ ID NO: 781116 - RNA, 19 nt, Artificial Sequence
  Description of Artificial Sequence: Synthetic oligonucleotide
  Sense strand starting at position 3488 of SEQ ID NO: 587289
ccagguugcugacauccau

SEQ ID NO: 781117 - RNA, 19 nt, Artificial Sequence
  Description of Artificial Sequence: Synthetic oligonucleotide
  Antisense strand to SEQ ID NO: 781116
auggaugucagcaaccugg

SEQ ID NO: 781118 - RNA, 19 nt, Artificial Sequence
  Description of Artificial Sequence: Synthetic oligonucleotide
  Sense strand starting at position 3720 of SEQ ID NO: 587289
gcgcgaugcacugcucgua

SEQ ID NO: 781119 - RNA, 19 nt, Artificial Sequence
  Description of Artificial Sequence: Synthetic oligonucleotide
  Antisense strand to SEQ ID NO: 781118
uacgagcagugcaucgcgc

SEQ ID NO: 781120 - RNA, 19 nt, Artificial Sequence
  Description of Artificial Sequence: Synthetic oligonucleotide
  Sense strand starting at position 3723 of SEQ ID NO: 587289
cgaugcacugcucguagaa

SEQ ID NO: 781121 - RNA, 19 nt, Artificial Sequence
  Description of Artificial Sequence: Synthetic oligonucleotide
  Antisense strand to SEQ ID NO: 781120
uucuacgagcagugcaucg

SEQ ID NO: 781122 - RNA, 19 nt, Artificial Sequence
  Description of Artificial Sequence: Synthetic oligonucleotide
  Sense strand starting at position 3725 of SEQ ID NO: 587289
augcacugcucguagaacu

SEQ ID NO: 781123 - RNA, 19 nt, Artificial Sequence
  Description of Artificial Sequence: Synthetic oligonucleotide
  Antisense strand to SEQ ID NO: 781122
aguucuacgagcagugcau

SEQ ID NO: 781124 - RNA, 19 nt, Artificial Sequence
  Description of Artificial Sequence: Synthetic oligonucleotide
  Sense strand starting at position 3735 of SEQ ID NO: 587289
cguagaacucgugcgggau

SEQ ID NO: 781125 - RNA, 19 nt, Artificial Sequence
  Description of Artificial Sequence: Synthetic oligonucleotide
  Antisense strand to SEQ ID NO: 781124
aucccgcacgaguucuacg

SEQ ID NO: 781126 - RNA, 19 nt, Artificial Sequence
  Description of Artificial Sequence: Synthetic oligonucleotide
  Sense strand starting at position 3736 of SEQ ID NO: 587289
guagaacucgugcgggauc

SEQ ID NO: 781127 - RNA, 19 nt, Artificial Sequence
  Description of Artificial Sequence: Synthetic oligonucleotide
  Antisense strand to SEQ ID NO: 781126
gaucccgcacgaguucuac

SEQ ID NO: 781128 - RNA, 19 nt, Artificial Sequence
  Description of Artificial Sequence: Synthetic oligonucleotide
  Sense strand starting at position 189 of SEQ ID NO: 587290
ccaguuuaugaauguagaa

SEQ ID NO: 781129 - RNA, 19 nt, Artificial Sequence
  Description of Artificial Sequence: Synthetic oligonucleotide
  Antisense strand to SEQ ID NO: 781128
uucuacauucauaaacugg

SEQ ID NO: 781130 - RNA, 19 nt, Artificial Sequence
  Description of Artificial Sequence: Synthetic oligonucleotide
  Sense strand starting at position 239 of SEQ ID NO: 587290
agaucuagucuggagcagu

SEQ ID NO: 781131 - RNA, 19 nt, Artificial Sequence
  Description of Artificial Sequence: Synthetic oligonucleotide
  Antisense strand to SEQ ID NO: 781130
acugcuccagacuagaucu

SEQ ID NO: 781132 - RNA, 19 nt, Artificial Sequence
  Description of Artificial Sequence: Synthetic oligonucleotide
  Sense strand starting at position 313 of SEQ ID NO: 587290
ccuccauggucagugacaa

SEQ ID NO: 781133 - RNA, 19 nt, Artificial Sequence
  Description of Artificial Sequence: Synthetic oligonucleotide
  Antisense strand to SEQ ID NO: 781132
uugucacugaccauggagg

SEQ ID NO: 781134 - RNA, 19 nt, Artificial Sequence
  Description of Artificial Sequence: Synthetic oligonucleotide
  Sense strand starting at position 344 of SEQ ID NO: 587290
gugaaagggcuuugaaguu

SEQ ID NO: 781135 - RNA, 19 nt, Artificial Sequence
  Description of Artificial Sequence: Synthetic oligonucleotide
  Antisense strand to SEQ ID NO: 781134
aacuucaaagcccuuucac

SEQ ID NO: 781136 - RNA, 19 nt, Artificial Sequence
  Description of Artificial Sequence: Synthetic oligonucleotide
  Sense strand starting at position 382 of SEQ ID NO: 587290
aucucugcucuccagggau

SEQ ID NO: 781137 - RNA, 19 nt, Artificial Sequence
  Description of Artificial Sequence: Synthetic oligonucleotide
  Antisense strand to SEQ ID NO: 781136
aucccuggagagcagagau

SEQ ID NO: 781138 - RNA, 19 nt, Artificial Sequence
  Description of Artificial Sequence: Synthetic oligonucleotide
  Sense strand starting at position 421 of SEQ ID NO: 587290
auugaauggccucaacagu

SEQ ID NO: 781139 - RNA, 19 nt, Artificial Sequence
  Description of Artificial Sequence: Synthetic oligonucleotide
  Antisense strand to SEQ ID NO: 781138
acuguugaggccauucaau

SEQ ID NO: 781140 - RNA, 19 nt, Artificial Sequence
  Description of Artificial Sequence: Synthetic oligonucleotide
  Sense strand starting at position 481 of SEQ ID NO: 587290
uuaugaaauaagugguuga

SEQ ID NO: 781141 - RNA, 19 nt, Artificial Sequence
  Description of Artificial Sequence: Synthetic oligonucleotide
  Antisense strand to SEQ ID NO: 781140
ucaaccacuuauuucauaa

SEQ ID NO: 781142 - RNA, 19 nt, Artificial Sequence
  Description of Artificial Sequence: Synthetic oligonucleotide
  Sense strand starting at position 485 of SEQ ID NO: 587290
gaaauaagugguugaagug

SEQ ID NO: 781143 - RNA, 19 nt, Artificial Sequence
  Description of Artificial Sequence: Synthetic oligonucleotide
  Antisense strand to SEQ ID NO: 781142
cacuucaaccacuuauuuc

SEQ ID NO: 781144 - RNA, 19 nt, Artificial Sequence
  Description of Artificial Sequence: Synthetic oligonucleotide
  Sense strand starting at position 526 of SEQ ID NO: 587290
cucugagccaucugagaag

SEQ ID NO: 781145 - RNA, 19 nt, Artificial Sequence
  Description of Artificial Sequence: Synthetic oligonucleotide
  Antisense strand to SEQ ID NO: 781144
cuucucagauggcucagag

SEQ ID NO: 781146 - RNA, 19 nt, Artificial Sequence
  Description of Artificial Sequence: Synthetic oligonucleotide
  Sense strand starting at position 703 of SEQ ID NO: 587290
aggagaaauugagcuguga

SEQ ID NO: 781147 - RNA, 19 nt, Artificial Sequence
  Description of Artificial Sequence: Synthetic oligonucleotide
  Antisense strand to SEQ ID NO: 781146
ucacagcucaauuucuccu

SEQ ID NO: 781148 - RNA, 19 nt, Artificial Sequence
  Description of Artificial Sequence: Synthetic oligonucleotide
  Sense strand starting at position 707 of SEQ ID NO: 587290
gaaauugagcugugaaaug

SEQ ID NO: 781149 - RNA, 19 nt, Artificial Sequence
  Description of Artificial Sequence: Synthetic oligonucleotide
  Antisense strand to SEQ ID NO: 781148
cauuucacagcucaauuuc

SEQ ID NO: 781150 - RNA, 19 nt, Artificial Sequence
  Description of Artificial Sequence: Synthetic oligonucleotide
  Sense strand starting at position 754 of SEQ ID NO: 587290
ucaggaguccugugugaga

SEQ ID NO: 781151 - RNA, 19 nt, Artificial Sequence
  Description of Artificial Sequence: Synthetic oligonucleotide
  Antisense strand to SEQ ID NO: 781150
ucucacacaggacuccuga

SEQ ID NO: 781152 - RNA, 19 nt, Artificial Sequence
  Description of Artificial Sequence: Synthetic oligonucleotide
  Sense strand starting at position 756 of SEQ ID NO: 587290
aggaguccugugugagaca

SEQ ID NO: 781153 - RNA, 19 nt, Artificial Sequence
  Description of Artificial Sequence: Synthetic oligonucleotide
  Antisense strand to SEQ ID NO: 781152
ugucucacacaggacuccu

SEQ ID NO: 781154 - RNA, 19 nt, Artificial Sequence
  Description of Artificial Sequence: Synthetic oligonucleotide
  Sense strand starting at position 767 of SEQ ID NO: 587290
gugagacauccgcaaacau

SEQ ID NO: 781155 - RNA, 19 nt, Artificial Sequence
  Description of Artificial Sequence: Synthetic oligonucleotide
  Antisense strand to SEQ ID NO: 781154
auguuugcggaugucucac

SEQ ID NO: 781156 - RNA, 19 nt, Artificial Sequence
  Description of Artificial Sequence: Synthetic oligonucleotide
  Sense strand starting at position 1029 of SEQ ID NO: 587290
ugggaagaucugggugcau

SEQ ID NO: 781157 - RNA, 19 nt, Artificial Sequence
  Description of Artificial Sequence: Synthetic oligonucleotide
  Antisense strand to SEQ ID NO: 781156
augcacccagaucuuccca

SEQ ID NO: 781158 - RNA, 19 nt, Artificial Sequence
  Description of Artificial Sequence: Synthetic oligonucleotide
  Sense strand starting at position 1242 of SEQ ID NO: 587290
aaacgaagggcuugaaaug

SEQ ID NO: 781159 - RNA, 19 nt, Artificial Sequence
  Description of Artificial Sequence: Synthetic oligonucleotide
  Antisense strand to SEQ ID NO: 781158
cauuucaagcccuucguuu

SEQ ID NO: 781160 - RNA, 19 nt, Artificial Sequence
  Description of Artificial Sequence: Synthetic oligonucleotide
  Sense strand starting at position 1249 of SEQ ID NO: 587290
gggcuugaaaugcaggauu

SEQ ID NO: 781161 - RNA, 19 nt, Artificial Sequence
  Description of Artificial Sequence: Synthetic oligonucleotide
  Antisense strand to SEQ ID NO: 781160
aauccugcauuucaagccc

SEQ ID NO: 781162 - RNA, 19 nt, Artificial Sequence
  Description of Artificial Sequence: Synthetic oligonucleotide
  Sense strand starting at position 1251 of SEQ ID NO: 587290
gcuugaaaugcaggauucu

SEQ ID NO: 781163 - RNA, 19 nt, Artificial Sequence
  Description of Artificial Sequence: Synthetic oligonucleotide
  Antisense strand to SEQ ID NO: 781162
agaauccugcauuucaagc

SEQ ID NO: 781164 - RNA, 19 nt, Artificial Sequence
  Description of Artificial Sequence: Synthetic oligonucleotide
  Sense strand starting at position 1278 of SEQ ID NO: 587290
ggccaucucugacucugau

SEQ ID NO: 781165 - RNA, 19 nt, Artificial Sequence
  Description of Artificial Sequence: Synthetic oligonucleotide
  Antisense strand to SEQ ID NO: 781164
aucagagucagagauggcc

SEQ ID NO: 781166 - RNA, 19 nt, Artificial Sequence
  Description of Artificial Sequence: Synthetic oligonucleotide
  Sense strand starting at position 1377 of SEQ ID NO: 587290
cuggaacguguucagaaau

SEQ ID NO: 781167 - RNA, 19 nt, Artificial Sequence
  Description of Artificial Sequence: Synthetic oligonucleotide
  Antisense strand to SEQ ID NO: 781166
auuucugaacacguuccag

SEQ ID NO: 781168 - RNA, 19 nt, Artificial Sequence
  Description of Artificial Sequence: Synthetic oligonucleotide
  Sense strand starting at position 1738 of SEQ ID NO: 587290
gucugcaaaugauuugcau

SEQ ID NO: 781169 - RNA, 19 nt, Artificial Sequence
  Description of Artificial Sequence: Synthetic oligonucleotide
  Antisense strand to SEQ ID NO: 781168
augcaaaucauuugcagac

SEQ ID NO: 781170 - RNA, 19 nt, Artificial Sequence
  Description of Artificial Sequence: Synthetic oligonucleotide
  Sense strand starting at position 2217 of SEQ ID NO: 587290
ccagcuguuacuggagaag

SEQ ID NO: 781171 - RNA, 19 nt, Artificial Sequence
  Description of Artificial Sequence: Synthetic oligonucleotide
  Antisense strand to SEQ ID NO: 781170
cuucuccaguaacagcugg

SEQ ID NO: 781172 - RNA, 19 nt, Artificial Sequence
  Description of Artificial Sequence: Synthetic oligonucleotide
  Sense strand starting at position 2261 of SEQ ID NO: 587290
cagccauaauggucuggga

SEQ ID NO: 781173 - RNA, 19 nt, Artificial Sequence
  Description of Artificial Sequence: Synthetic oligonucleotide
  Antisense strand to SEQ ID NO: 781172
ucccagaccauuauggcug

SEQ ID NO: 781174 - RNA, 19 nt, Artificial Sequence
  Description of Artificial Sequence: Synthetic oligonucleotide
  Sense strand starting at position 2356 of SEQ ID NO: 587290
cugaguucugaugggaaga

SEQ ID NO: 781175 - RNA, 19 nt, Artificial Sequence
  Description of Artificial Sequence: Synthetic oligonucleotide
  Antisense strand to SEQ ID NO: 781174
ucuucccaucagaacucag

SEQ ID NO: 781176 - RNA, 19 nt, Artificial Sequence
  Description of Artificial Sequence: Synthetic oligonucleotide
  Sense strand starting at position 2357 of SEQ ID NO: 587290
ugaguucugaugggaagau

SEQ ID NO: 781177 - RNA, 19 nt, Artificial Sequence
  Description of Artificial Sequence: Synthetic oligonucleotide
  Antisense strand to SEQ ID NO: 781176
aucuucccaucagaacuca

SEQ ID NO: 781178 - RNA, 19 nt, Artificial Sequence
  Description of Artificial Sequence: Synthetic oligonucleotide
  Sense strand starting at position 2432 of SEQ ID NO: 587290
uaagguuacuuugccuaga

SEQ ID NO: 781179 - RNA, 19 nt, Artificial Sequence
  Description of Artificial Sequence: Synthetic oligonucleotide
  Antisense strand to SEQ ID NO: 781178
ucuaggcaaaguaaccuua

SEQ ID NO: 781180 - RNA, 19 nt, Artificial Sequence
  Description of Artificial Sequence: Synthetic oligonucleotide
  Sense strand starting at position 2433 of SEQ ID NO: 587290
aagguuacuuugccuagaa

SEQ ID NO: 781181 - RNA, 19 nt, Artificial Sequence
  Description of Artificial Sequence: Synthetic oligonucleotide
  Antisense strand to SEQ ID NO: 781180
uucuaggcaaaguaaccuu

SEQ ID NO: 781182 - RNA, 19 nt, Artificial Sequence
  Description of Artificial Sequence: Synthetic oligonucleotide
  Sense strand starting at position 2434 of SEQ ID NO: 587290
agguuacuuugccuagaau

SEQ ID NO: 781183 - RNA, 19 nt, Artificial Sequence
  Description of Artificial Sequence: Synthetic oligonucleotide
  Antisense strand to SEQ ID NO: 781182
auucuaggcaaaguaaccu

SEQ ID NO: 781184 - RNA, 19 nt, Artificial Sequence
  Description of Artificial Sequence: Synthetic oligonucleotide
  Sense strand starting at position 2435 of SEQ ID NO: 587290
gguuacuuugccuagaaua

SEQ ID NO: 781185 - RNA, 19 nt, Artificial Sequence
  Description of Artificial Sequence: Synthetic oligonucleotide
  Antisense strand to SEQ ID NO: 781184
uauucuaggcaaaguaacc

SEQ ID NO: 781186 - RNA, 19 nt, Artificial Sequence
  Description of Artificial Sequence: Synthetic oligonucleotide
  Sense strand starting at position 2561 of SEQ ID NO: 587290
gguccugggcuagacauua

SEQ ID NO: 781187 - RNA, 19 nt, Artificial Sequence
  Description of Artificial Sequence: Synthetic oligonucleotide
  Antisense strand to SEQ ID NO: 781186
uaaugucuagcccaggacc

SEQ ID NO: 781188 - RNA, 19 nt, Artificial Sequence
  Description of Artificial Sequence: Synthetic oligonucleotide
  Sense strand starting at position 2663 of SEQ ID NO: 587290
ugagcuaguagaugugaca

SEQ ID NO: 781189 - RNA, 19 nt, Artificial Sequence
  Description of Artificial Sequence: Synthetic oligonucleotide
  Antisense strand to SEQ ID NO: 781188
ugucacaucuacuagcuca

SEQ ID NO: 781190 - RNA, 19 nt, Artificial Sequence
  Description of Artificial Sequence: Synthetic oligonucleotide
  Sense strand starting at position 2960 of SEQ ID NO: 587290
gguccuuccauguggauuu

SEQ ID NO: 781191 - RNA, 19 nt, Artificial Sequence
  Description of Artificial Sequence: Synthetic oligonucleotide
  Antisense strand to SEQ ID NO: 781190
aaauccacauggaaggacc

SEQ ID NO: 781192 - RNA, 19 nt, Artificial Sequence
  Description of Artificial Sequence: Synthetic oligonucleotide
  Sense strand starting at position 3130 of SEQ ID NO: 587290
gggugagagcuuuaucuuu

SEQ ID NO: 781193 - RNA, 19 nt, Artificial Sequence
  Description of Artificial Sequence: Synthetic oligonucleotide
  Antisense strand to SEQ ID NO: 781192
aaagauaaagcucucaccc

SEQ ID NO: 781194 - RNA, 19 nt, Artificial Sequence
  Description of Artificial Sequence: Synthetic oligonucleotide
  Sense strand starting at position 3132 of SEQ ID NO: 587290
gugagagcuuuaucuuuga

SEQ ID NO: 781195 - RNA, 19 nt, Artificial Sequence
  Description of Artificial Sequence: Synthetic oligonucleotide
  Antisense strand to SEQ ID NO: 781194
ucaaagauaaagcucucac

SEQ ID NO: 781196 - RNA, 19 nt, Artificial Sequence
  Description of Artificial Sequence: Synthetic oligonucleotide
  Sense strand starting at position 3135 of SEQ ID NO: 587290
agagcuuuaucuuugaccu

SEQ ID NO: 781197 - RNA, 19 nt, Artificial Sequence
  Description of Artificial Sequence: Synthetic oligonucleotide
  Antisense strand to SEQ ID NO: 781196
aggucaaagauaaagcucu

SEQ ID NO: 781198 - RNA, 19 nt, Artificial Sequence
  Description of Artificial Sequence: Synthetic oligonucleotide
  Sense strand starting at position 3245 of SEQ ID NO: 587290
ugugaauauccucagcucu

SEQ ID NO: 781199 - RNA, 19 nt, Artificial Sequence
  Description of Artificial Sequence: Synthetic oligonucleotide
  Antisense strand to SEQ ID NO: 781198
agagcugaggauauucaca

SEQ ID NO: 781200 - RNA, 19 nt, Artificial Sequence
  Description of Artificial Sequence: Synthetic oligonucleotide
  Sense strand starting at position 3700 of SEQ ID NO: 587290
ccuuaacugucaguuaaau

SEQ ID NO: 781201 - RNA, 19 nt, Artificial Sequence
  Description of Artificial Sequence: Synthetic oligonucleotide
  Antisense strand to SEQ ID NO: 781200
auuuaacugacaguuaagg

SEQ ID NO: 781202 - RNA, 19 nt, Artificial Sequence
  Description of Artificial Sequence: Synthetic oligonucleotide
  Sense strand starting at position 3880 of SEQ ID NO: 587290
ggcagauuagccuacagug

SEQ ID NO: 781203 - RNA, 19 nt, Artificial Sequence
  Description of Artificial Sequence: Synthetic oligonucleotide
  Antisense strand to SEQ ID NO: 781202
cacuguaggcuaaucugcc

SEQ ID NO: 781204 - RNA, 19 nt, Artificial Sequence
  Description of Artificial Sequence: Synthetic oligonucleotide
  Sense strand starting at position 3933 of SEQ ID NO: 587290
gggaaauuagccugugacc

SEQ ID NO: 781205 - RNA, 19 nt, Artificial Sequence
  Description of Artificial Sequence: Synthetic oligonucleotide
  Antisense strand to SEQ ID NO: 781204
ggucacaggcuaauuuccc

SEQ ID NO: 781206 - RNA, 19 nt, Artificial Sequence
  Description of Artificial Sequence: Synthetic oligonucleotide
  Sense strand starting at position 3978 of SEQ ID NO: 587290
uggugauuccaacagcaac

SEQ ID NO: 781207 - RNA, 19 nt, Artificial Sequence
  Description of Artificial Sequence: Synthetic oligonucleotide
  Antisense strand to SEQ ID NO: 781206
guugcuguuggaaucacca

SEQ ID NO: 781208 - RNA, 19 nt, Artificial Sequence
  Description of Artificial Sequence: Synthetic oligonucleotide
  Sense strand starting at position 66 of SEQ ID NO: 587291
gagagcauucuguauaaac

SEQ ID NO: 781209 - RNA, 19 nt, Artificial Sequence
  Description of Artificial Sequence: Synthetic oligonucleotide
  Antisense strand to SEQ ID NO: 781208
guuuauacagaaugcucuc

SEQ ID NO: 781210 - RNA, 19 nt, Artificial Sequence
  Description of Artificial Sequence: Synthetic oligonucleotide
  Sense strand starting at position 84 of SEQ ID NO: 587291
ccacacaugggcuaucaau

SEQ ID NO: 781211 - RNA, 19 nt, Artificial Sequence
  Description of Artificial Sequence: Synthetic oligonucleotide
  Antisense strand to SEQ ID NO: 781210
auugauagcccaugugugg

SEQ ID NO: 781212 - RNA, 19 nt, Artificial Sequence
  Description of Artificial Sequence: Synthetic oligonucleotide
  Sense strand starting at position 205 of SEQ ID NO: 587291
cuuggaaucugccuaacua

SEQ ID NO: 781213 - RNA, 19 nt, Artificial Sequence
  Description of Artificial Sequence: Synthetic oligonucleotide
  Antisense strand to SEQ ID NO: 781212
uaguuaggcagauuccaag

SEQ ID NO: 781214 - RNA, 19 nt, Artificial Sequence
  Description of Artificial Sequence: Synthetic oligonucleotide
  Sense strand starting at position 206 of SEQ ID NO: 587291
uuggaaucugccuaacuau

SEQ ID NO: 781215 - RNA, 19 nt, Artificial Sequence
  Description of Artificial Sequence: Synthetic oligonucleotide
  Antisense strand to SEQ ID NO: 781214
auaguuaggcagauuccaa

SEQ ID NO: 781216 - RNA, 19 nt, Artificial Sequence
  Description of Artificial Sequence: Synthetic oligonucleotide
  Sense strand starting at position 556 of SEQ ID NO: 587291
ucuaaauggcagugaacaa

SEQ ID NO: 781217 - RNA, 19 nt, Artificial Sequence
  Description of Artificial Sequence: Synthetic oligonucleotide
  Antisense strand to SEQ ID NO: 781216
uuguucacugccauuuaga

SEQ ID NO: 781218 - RNA, 19 nt, Artificial Sequence
  Description of Artificial Sequence: Synthetic oligonucleotide
  Sense strand starting at position 766 of SEQ ID NO: 587291
uugaaauuguuccuucuga

SEQ ID NO: 781219 - RNA, 19 nt, Artificial Sequence
  Description of Artificial Sequence: Synthetic oligonucleotide
  Antisense strand to SEQ ID NO: 781218
ucagaaggaacaauuucaa

SEQ ID NO: 781220 - RNA, 19 nt, Artificial Sequence
  Description of Artificial Sequence: Synthetic oligonucleotide
  Sense strand starting at position 767 of SEQ ID NO: 587291
ugaaauuguuccuucugaa

SEQ ID NO: 781221 - RNA, 19 nt, Artificial Sequence
  Description of Artificial Sequence: Synthetic oligonucleotide
  Antisense strand to SEQ ID NO: 781220
uucagaaggaacaauuuca

SEQ ID NO: 781222 - RNA, 19 nt, Artificial Sequence
  Description of Artificial Sequence: Synthetic oligonucleotide
  Sense strand starting at position 907 of SEQ ID NO: 587291
acacuugaguauguuuaau

SEQ ID NO: 781223 - RNA, 19 nt, Artificial Sequence
  Description of Artificial Sequence: Synthetic oligonucleotide
  Antisense strand to SEQ ID NO: 781222
auuaaacauacucaagugu

SEQ ID NO: 781224 - RNA, 19 nt, Artificial Sequence
  Description of Artificial Sequence: Synthetic oligonucleotide
  Sense strand starting at position 1486 of SEQ ID NO: 587291
auucuuuauggcugaauca

SEQ ID NO: 781225 - RNA, 19 nt, Artificial Sequence
  Description of Artificial Sequence: Synthetic oligonucleotide
  Antisense strand to SEQ ID NO: 781224
ugauucagccauaaagaau

SEQ ID NO: 781226 - RNA, 19 nt, Artificial Sequence
  Description of Artificial Sequence: Synthetic oligonucleotide
  Sense strand starting at position 1487 of SEQ ID NO: 587291
uucuuuauggcugaaucau

SEQ ID NO: 781227 - RNA, 19 nt, Artificial Sequence
  Description of Artificial Sequence: Synthetic oligonucleotide
  Antisense strand to SEQ ID NO: 781226
augauucagccauaaagaa

SEQ ID NO: 781228 - RNA, 19 nt, Artificial Sequence
  Description of Artificial Sequence: Synthetic oligonucleotide
  Sense strand starting at position 1493 of SEQ ID NO: 587291
auggcugaaucauuaucuu

SEQ ID NO: 781229 - RNA, 19 nt, Artificial Sequence
  Description of Artificial Sequence: Synthetic oligonucleotide
  Antisense strand to SEQ ID NO: 781228
aagauaaugauucagccau

SEQ ID NO: 781230 - RNA, 19 nt, Artificial Sequence
  Description of Artificial Sequence: Synthetic oligonucleotide
  Sense strand starting at position 1682 of SEQ ID NO: 587291
uggauaacauaguuaaguu

SEQ ID NO: 781231 - RNA, 19 nt, Artificial Sequence
  Description of Artificial Sequence: Synthetic oligonucleotide
  Antisense strand to SEQ ID NO: 781230
aacuuaacuauguuaucca

SEQ ID NO: 781232 - RNA, 19 nt, Artificial Sequence
  Description of Artificial Sequence: Synthetic oligonucleotide
  Sense strand starting at position 1718 of SEQ ID NO: 587291
uuacuuguauuugcucuua

SEQ ID NO: 781233 - RNA, 19 nt, Artificial Sequence
  Description of Artificial Sequence: Synthetic oligonucleotide
  Antisense strand to SEQ ID NO: 781232
uaagagcaaauacaaguaa

SEQ ID NO: 781234 - RNA, 19 nt, Artificial Sequence
  Description of Artificial Sequence: Synthetic oligonucleotide
  Sense strand starting at position 1720 of SEQ ID NO: 587291
acuuguauuugcucuuaag

SEQ ID NO: 781235 - RNA, 19 nt, Artificial Sequence
  Description of Artificial Sequence: Synthetic oligonucleotide
  Antisense strand to SEQ ID NO: 781234
cuuaagagcaaauacaagu

SEQ ID NO: 781236 - RNA, 19 nt, Artificial Sequence
  Description of Artificial Sequence: Synthetic oligonucleotide
  Sense strand starting at position 1737 of SEQ ID NO: 587291
aguacuggguagucagaaa

SEQ ID NO: 781237 - RNA, 19 nt, Artificial Sequence
  Description of Artificial Sequence: Synthetic oligonucleotide
  Antisense strand to SEQ ID NO: 781236
uuucugacuacccaguacu

SEQ ID NO: 781238 - RNA, 19 nt, Artificial Sequence
  Description of Artificial Sequence: Synthetic oligonucleotide
  Sense strand starting at position 1873 of SEQ ID NO: 587291
auacuuacuugucuuugga

SEQ ID NO: 781239 - RNA, 19 nt, Artificial Sequence
  Description of Artificial Sequence: Synthetic oligonucleotide
  Antisense strand to SEQ ID NO: 781238
uccaaagacaaguaaguau

SEQ ID NO: 781240 - RNA, 19 nt, Artificial Sequence
  Description of Artificial Sequence: Synthetic oligonucleotide
  Sense strand starting at position 1875 of SEQ ID NO: 587291
acuuacuugucuuuggaga

SEQ ID NO: 781241 - RNA, 19 nt, Artificial Sequence
  Description of Artificial Sequence: Synthetic oligonucleotide
  Antisense strand to SEQ ID NO: 781240
ucuccaaagacaaguaagu

SEQ ID NO: 781242 - RNA, 19 nt, Artificial Sequence
  Description of Artificial Sequence: Synthetic oligonucleotide
  Sense strand starting at position 2284 of SEQ ID NO: 587291
acagaagugucacuaacau

SEQ ID NO: 781243 - RNA, 19 nt, Artificial Sequence
  Description of Artificial Sequence: Synthetic oligonucleotide
  Antisense strand to SEQ ID NO: 781242
auguuagugacacuucugu

SEQ ID NO: 781244 - RNA, 19 nt, Artificial Sequence
  Description of Artificial Sequence: Synthetic oligonucleotide
  Sense strand starting at position 2296 of SEQ ID NO: 587291
cuaacauagcguuaauuac

SEQ ID NO: 781245 - RNA, 19 nt, Artificial Sequence
  Description of Artificial Sequence: Synthetic oligonucleotide
  Antisense strand to SEQ ID NO: 781244
guaauuaacgcuauguuag

SEQ ID NO: 781246 - RNA, 19 nt, Artificial Sequence
  Description of Artificial Sequence: Synthetic oligonucleotide
  Sense strand starting at position 2305 of SEQ ID NO: 587291
cguuaauuaccacaguaug

SEQ ID NO: 781247 - RNA, 19 nt, Artificial Sequence
  Description of Artificial Sequence: Synthetic oligonucleotide
  Antisense strand to SEQ ID NO: 781246
cauacugugguaauuaacg

SEQ ID NO: 781248 - RNA, 19 nt, Artificial Sequence
  Description of Artificial Sequence: Synthetic oligonucleotide
  Sense strand starting at position 2315 of SEQ ID NO: 587291
cacaguaugugacuuggaa

SEQ ID NO: 781249 - RNA, 19 nt, Artificial Sequence
  Description of Artificial Sequence: Synthetic oligonucleotide
  Antisense strand to SEQ ID NO: 781248
uuccaagucacauacugug

SEQ ID NO: 781250 - RNA, 19 nt, Artificial Sequence
  Description of Artificial Sequence: Synthetic oligonucleotide
  Sense strand starting at position 2323 of SEQ ID NO: 587291
gugacuuggaaaugguauc

SEQ ID NO: 781251 - RNA, 19 nt, Artificial Sequence
  Description of Artificial Sequence: Synthetic oligonucleotide
  Antisense strand to SEQ ID NO: 781250
gauaccauuuccaagucac

SEQ ID NO: 781252 - RNA, 19 nt, Artificial Sequence
  Description of Artificial Sequence: Synthetic oligonucleotide
  Sense strand starting at position 2329 of SEQ ID NO: 587291
uggaaaugguaucuugagu

SEQ ID NO: 781253 - RNA, 19 nt, Artificial Sequence
  Description of Artificial Sequence: Synthetic oligonucleotide
  Antisense strand to SEQ ID NO: 781252
acucaagauaccauuucca

SEQ ID NO: 781254 - RNA, 19 nt, Artificial Sequence
  Description of Artificial Sequence: Synthetic oligonucleotide
  Sense strand starting at position 2335 of SEQ ID NO: 587291
ugguaucuugaguaaagug

SEQ ID NO: 781255 - RNA, 19 nt, Artificial Sequence
  Description of Artificial Sequence: Synthetic oligonucleotide
  Antisense strand to SEQ ID NO: 781254
cacuuuacucaagauacca

SEQ ID NO: 781256 - RNA, 19 nt, Artificial Sequence
  Description of Artificial Sequence: Synthetic oligonucleotide
  Sense strand starting at position 2340 of SEQ ID NO: 587291
ucuugaguaaagugggaua

SEQ ID NO: 781257 - RNA, 19 nt, Artificial Sequence
  Description of Artificial Sequence: Synthetic oligonucleotide
  Antisense strand to SEQ ID NO: 781256
uaucccacuuuacucaaga

SEQ ID NO: 781258 - RNA, 19 nt, Artificial Sequence
  Description of Artificial Sequence: Synthetic oligonucleotide
  Sense strand starting at position 2342 of SEQ ID NO: 587291
uugaguaaagugggauauu

SEQ ID NO: 781259 - RNA, 19 nt, Artificial Sequence
  Description of Artificial Sequence: Synthetic oligonucleotide
  Antisense strand to SEQ ID NO: 781258
aauaucccacuuuacucaa

SEQ ID NO: 781260 - RNA, 19 nt, Artificial Sequence
  Description of Artificial Sequence: Synthetic oligonucleotide
  Sense strand starting at position 2490 of SEQ ID NO: 587291
aguuuauaccuccagguca

SEQ ID NO: 781261 - RNA, 19 nt, Artificial Sequence
  Description of Artificial Sequence: Synthetic oligonucleotide
  Antisense strand to SEQ ID NO: 781260
ugaccuggagguauaaacu

SEQ ID NO: 781262 - RNA, 19 nt, Artificial Sequence
  Description of Artificial Sequence: Synthetic oligonucleotide
  Sense strand starting at position 2612 of SEQ ID NO: 587291
auguuaguguacucauuua

SEQ ID NO: 781263 - RNA, 19 nt, Artificial Sequence
  Description of Artificial Sequence: Synthetic oligonucleotide
  Antisense strand to SEQ ID NO: 781262
uaaaugaguacacuaacau

SEQ ID NO: 781264 - RNA, 19 nt, Artificial Sequence
  Description of Artificial Sequence: Synthetic oligonucleotide
  Sense strand starting at position 2622 of SEQ ID NO: 587291
acucauuuaucgguguaau

SEQ ID NO: 781265 - RNA, 19 nt, Artificial Sequence
  Description of Artificial Sequence: Synthetic oligonucleotide
  Antisense strand to SEQ ID NO: 781264
auuacaccgauaaaugagu

SEQ ID NO: 781266 - RNA, 19 nt, Artificial Sequence
  Description of Artificial Sequence: Synthetic oligonucleotide
  Sense strand starting at position 2623 of SEQ ID NO: 587291
cucauuuaucgguguaauu

SEQ ID NO: 781267 - RNA, 19 nt, Artificial Sequence
  Description of Artificial Sequence: Synthetic oligonucleotide
  Antisense strand to SEQ ID NO: 781266
aauuacaccgauaaaugag

SEQ ID NO: 781268 - RNA, 19 nt, Artificial Sequence
  Description of Artificial Sequence: Synthetic oligonucleotide
  Sense strand starting at position 2874 of SEQ ID NO: 587291
augcuagaccuguauguga

SEQ ID NO: 781269 - RNA, 19 nt, Artificial Sequence
  Description of Artificial Sequence: Synthetic oligonucleotide
  Antisense strand to SEQ ID NO: 781268
ucacauacaggucuagcau

SEQ ID NO: 781270 - RNA, 19 nt, Artificial Sequence
  Description of Artificial Sequence: Synthetic oligonucleotide
  Sense strand starting at position 2994 of SEQ ID NO: 587291
uuugucuaauaugugagaa

SEQ ID NO: 781271 - RNA, 19 nt, Artificial Sequence
  Description of Artificial Sequence: Synthetic oligonucleotide
  Antisense strand to SEQ ID NO: 781270
uucucacauauuagacaaa

SEQ ID NO: 781272 - RNA, 19 nt, Artificial Sequence
  Description of Artificial Sequence: Synthetic oligonucleotide
  Sense strand starting at position 3224 of SEQ ID NO: 587291
aagagaauguaagaagaaa

SEQ ID NO: 781273 - RNA, 19 nt, Artificial Sequence
  Description of Artificial Sequence: Synthetic oligonucleotide
  Antisense strand to SEQ ID NO: 781272
uuucuucuuacauucucuu

SEQ ID NO: 781274 - RNA, 19 nt, Artificial Sequence
  Description of Artificial Sequence: Synthetic oligonucleotide
  Sense strand starting at position 3294 of SEQ ID NO: 587291
cagaguuuacuaugcagac

SEQ ID NO: 781275 - RNA, 19 nt, Artificial Sequence
  Description of Artificial Sequence: Synthetic oligonucleotide
  Antisense strand to SEQ ID NO: 781274
gucugcauaguaaacucug

SEQ ID NO: 781276 - RNA, 19 nt, Artificial Sequence
  Description of Artificial Sequence: Synthetic oligonucleotide
  Sense strand starting at position 3295 of SEQ ID NO: 587291
agaguuuacuaugcagaca

SEQ ID NO: 781277 - RNA, 19 nt, Artificial Sequence
  Description of Artificial Sequence: Synthetic oligonucleotide
  Antisense strand to SEQ ID NO: 781276
ugucugcauaguaaacucu

SEQ ID NO: 781278 - RNA, 19 nt, Artificial Sequence
  Description of Artificial Sequence: Synthetic oligonucleotide
  Sense strand starting at position 3425 of SEQ ID NO: 587291
guuaguaucuaauccaaac

SEQ ID NO: 781279 - RNA, 19 nt, Artificial Sequence
  Description of Artificial Sequence: Synthetic oligonucleotide
  Antisense strand to SEQ ID NO: 781278
guuuggauuagauacuaac

SEQ ID NO: 781280 - RNA, 19 nt, Artificial Sequence
  Description of Artificial Sequence: Synthetic oligonucleotide
  Sense strand starting at position 3450 of SEQ ID NO: 587291
guagaugacaucuggauuc

SEQ ID NO: 781281 - RNA, 19 nt, Artificial Sequence
  Description of Artificial Sequence: Synthetic oligonucleotide
  Antisense strand to SEQ ID NO: 781280
gaauccagaugucaucuac

SEQ ID NO: 781282 - RNA, 19 nt, Artificial Sequence
  Description of Artificial Sequence: Synthetic oligonucleotide
  Sense strand starting at position 3498 of SEQ ID NO: 587291
accucuaaucauuaugugu

SEQ ID NO: 781283 - RNA, 19 nt, Artificial Sequence
  Description of Artificial Sequence: Synthetic oligonucleotide
  Antisense strand to SEQ ID NO: 781282
acacauaaugauuagaggu

SEQ ID NO: 781284 - RNA, 19 nt, Artificial Sequence
  Description of Artificial Sequence: Synthetic oligonucleotide
  Sense strand starting at position 3503 of SEQ ID NO: 587291
uaaucauuaugugucagga

SEQ ID NO: 781285 - RNA, 19 nt, Artificial Sequence
  Description of Artificial Sequence: Synthetic oligonucleotide
  Antisense strand to SEQ ID NO: 781284
uccugacacauaaugauua

SEQ ID NO: 781286 - RNA, 19 nt, Artificial Sequence
  Description of Artificial Sequence: Synthetic oligonucleotide
  Sense strand starting at position 3879 of SEQ ID NO: 587291
cguguaauaccagagacac

SEQ ID NO: 781287 - RNA, 19 nt, Artificial Sequence
  Description of Artificial Sequence: Synthetic oligonucleotide
  Antisense strand to SEQ ID NO: 781286
gugucucugguauuacacg

SEQ ID NO: 781288 - RNA, 19 nt, Artificial Sequence
  Description of Artificial Sequence: Synthetic oligonucleotide
  Sense strand starting at position 52 of SEQ ID NO: 587292
cugagaaaugguugcugaa

SEQ ID NO: 781289 - RNA, 19 nt, Artificial Sequence
  Description of Artificial Sequence: Synthetic oligonucleotide
  Antisense strand to SEQ ID NO: 781288
uucagcaaccauuucucag

SEQ ID NO: 781290 - RNA, 19 nt, Artificial Sequence
  Description of Artificial Sequence: Synthetic oligonucleotide
  Sense strand starting at position 54 of SEQ ID NO: 587292
gagaaaugguugcugaaua

SEQ ID NO: 781291 - RNA, 19 nt, Artificial Sequence
  Description of Artificial Sequence: Synthetic oligonucleotide
  Antisense strand to SEQ ID NO: 781290
uauucagcaaccauuucuc

SEQ ID NO: 781292 - RNA, 19 nt, Artificial Sequence
  Description of Artificial Sequence: Synthetic oligonucleotide
  Sense strand starting at position 115 of SEQ ID NO: 587292
gaccaaguuguaugaauag

SEQ ID NO: 781293 - RNA, 19 nt, Artificial Sequence
  Description of Artificial Sequence: Synthetic oligonucleotide
  Antisense strand to SEQ ID NO: 781292
cuauucauacaacuugguc

SEQ ID NO: 781294 - RNA, 19 nt, Artificial Sequence
  Description of Artificial Sequence: Synthetic oligonucleotide
  Sense strand starting at position 139 of SEQ ID NO: 587292
ugguaaaucaguuaguuau

SEQ ID NO: 781295 - RNA, 19 nt, Artificial Sequence
  Description of Artificial Sequence: Synthetic oligonucleotide
  Antisense strand to SEQ ID NO: 781294
auaacuaacugauuuacca

SEQ ID NO: 781296 - RNA, 19 nt, Artificial Sequence
  Description of Artificial Sequence: Synthetic oligonucleotide
  Sense strand starting at position 146 of SEQ ID NO: 587292
ucaguuaguuauuuacagu

SEQ ID NO: 781297 - RNA, 19 nt, Artificial Sequence
  Description of Artificial Sequence: Synthetic oligonucleotide
  Antisense strand to SEQ ID NO: 781296
acuguaaauaacuaacuga

SEQ ID NO: 781298 - RNA, 19 nt, Artificial Sequence
  Description of Artificial Sequence: Synthetic oligonucleotide
  Sense strand starting at position 248 of SEQ ID NO: 587292
cuuaucaguccugauauua

SEQ ID NO: 781299 - RNA, 19 nt, Artificial Sequence
  Description of Artificial Sequence: Synthetic oligonucleotide
  Antisense strand to SEQ ID NO: 781298
uaauaucaggacugauaag

SEQ ID NO: 781300 - RNA, 19 nt, Artificial Sequence
  Description of Artificial Sequence: Synthetic oligonucleotide
  Sense strand starting at position 267 of SEQ ID NO: 587292
ccaguaaaccuagaauugu

SEQ ID NO: 781301 - RNA, 19 nt, Artificial Sequence
  Description of Artificial Sequence: Synthetic oligonucleotide
  Antisense strand to SEQ ID NO: 781300
acaauucuagguuuacugg

SEQ ID NO: 781302 - RNA, 19 nt, Artificial Sequence
  Description of Artificial Sequence: Synthetic oligonucleotide
  Sense strand starting at position 415 of SEQ ID NO: 587292
gccauauaugaacggugga

SEQ ID NO: 781303 - RNA, 19 nt, Artificial Sequence
  Description of Artificial Sequence: Synthetic oligonucleotide
  Antisense strand to SEQ ID NO: 781302
uccaccguucauauauggc

SEQ ID NO: 781304 - RNA, 19 nt, Artificial Sequence
  Description of Artificial Sequence: Synthetic oligonucleotide
  Sense strand starting at position 416 of SEQ ID NO: 587292
ccauauaugaacgguggaa

SEQ ID NO: 781305 - RNA, 19 nt, Artificial Sequence
  Description of Artificial Sequence: Synthetic oligonucleotide
  Antisense strand to SEQ ID NO: 781304
uuccaccguucauauaugg

SEQ ID NO: 781306 - RNA, 19 nt, Artificial Sequence
  Description of Artificial Sequence: Synthetic oligonucleotide
  Sense strand starting at position 523 of SEQ ID NO: 587292
gcuagauauuaggauuuga

SEQ ID NO: 781307 - RNA, 19 nt, Artificial Sequence
  Description of Artificial Sequence: Synthetic oligonucleotide
  Antisense strand to SEQ ID NO: 781306
ucaaauccuaauaucuagc

SEQ ID NO: 781308 - RNA, 19 nt, Artificial Sequence
  Description of Artificial Sequence: Synthetic oligonucleotide
  Sense strand starting at position 528 of SEQ ID NO: 587292
auauuaggauuugacuaca

SEQ ID NO: 781309 - RNA, 19 nt, Artificial Sequence
  Description of Artificial Sequence: Synthetic oligonucleotide
  Antisense strand to SEQ ID NO: 781308
uguagucaaauccuaauau

SEQ ID NO: 781310 - RNA, 19 nt, Artificial Sequence
  Description of Artificial Sequence: Synthetic oligonucleotide
  Sense strand starting at position 570 of SEQ ID NO: 587292
cuugccuauuuguuacaua

SEQ ID NO: 781311 - RNA, 19 nt, Artificial Sequence
  Description of Artificial Sequence: Synthetic oligonucleotide
  Antisense strand to SEQ ID NO: 781310
uauguaacaaauaggcaag

SEQ ID NO: 781312 - RNA, 19 nt, Artificial Sequence
  Description of Artificial Sequence: Synthetic oligonucleotide
  Sense strand starting at position 672 of SEQ ID NO: 587292
uuuauaaggccaugcagaa

SEQ ID NO: 781313 - RNA, 19 nt, Artificial Sequence
  Description of Artificial Sequence: Synthetic oligonucleotide
  Antisense strand to SEQ ID NO: 781312
uucugcauggccuuauaaa

SEQ ID NO: 781314 - RNA, 19 nt, Artificial Sequence
  Description of Artificial Sequence: Synthetic oligonucleotide
  Sense strand starting at position 793 of SEQ ID NO: 587292
gguauacugccauacuaac

SEQ ID NO: 781315 - RNA, 19 nt, Artificial Sequence
  Description of Artificial Sequence: Synthetic oligonucleotide
  Antisense strand to SEQ ID NO: 781314
guuaguauggcaguauacc

SEQ ID NO: 781316 - RNA, 19 nt, Artificial Sequence
  Description of Artificial Sequence: Synthetic oligonucleotide
  Sense strand starting at position 849 of SEQ ID NO: 587292
uuuagaagcugaguacuau

SEQ ID NO: 781317 - RNA, 19 nt, Artificial Sequence
  Description of Artificial Sequence: Synthetic oligonucleotide
  Antisense strand to SEQ ID NO: 781316
auaguacucagcuucuaaa

SEQ ID NO: 781318 - RNA, 19 nt, Artificial Sequence
  Description of Artificial Sequence: Synthetic oligonucleotide
  Sense strand starting at position 850 of SEQ ID NO: 587292
uuagaagcugaguacuaua

SEQ ID NO: 781319 - RNA, 19 nt, Artificial Sequence
  Description of Artificial Sequence: Synthetic oligonucleotide
  Antisense strand to SEQ ID NO: 781318
uauaguacucagcuucuaa

SEQ ID NO: 781320 - RNA, 19 nt, Artificial Sequence
  Description of Artificial Sequence: Synthetic oligonucleotide
  Sense strand starting at position 855 of SEQ ID NO: 587292
agcugaguacuauacuuaa

SEQ ID NO: 781321 - RNA, 19 nt, Artificial Sequence
  Description of Artificial Sequence: Synthetic oligonucleotide
  Antisense strand to SEQ ID NO: 781320
uuaaguauaguacucagcu

SEQ ID NO: 781322 - RNA, 19 nt, Artificial Sequence
  Description of Artificial Sequence: Synthetic oligonucleotide
  Sense strand starting at position 886 of SEQ ID NO: 587292
auucuagucuucuuuggaa

SEQ ID NO: 781323 - RNA, 19 nt, Artificial Sequence
  Description of Artificial Sequence: Synthetic oligonucleotide
  Antisense strand to SEQ ID NO: 781322
uuccaaagaagacuagaau

SEQ ID NO: 781324 - RNA, 19 nt, Artificial Sequence
  Description of Artificial Sequence: Synthetic oligonucleotide
  Sense strand starting at position 888 of SEQ ID NO: 587292
ucuagucuucuuuggaaag

SEQ ID NO: 781325 - RNA, 19 nt, Artificial Sequence
  Description of Artificial Sequence: Synthetic oligonucleotide
  Antisense strand to SEQ ID NO: 781324
cuuuccaaagaagacuaga

SEQ ID NO: 781326 - RNA, 19 nt, Artificial Sequence
  Description of Artificial Sequence: Synthetic oligonucleotide
  Sense strand starting at position 899 of SEQ ID NO: 587292
uuggaaaguacugaugcua

SEQ ID NO: 781327 - RNA, 19 nt, Artificial Sequence
  Description of Artificial Sequence: Synthetic oligonucleotide
  Antisense strand to SEQ ID NO: 781326
uagcaucaguacuuuccaa

SEQ ID NO: 781328 - RNA, 19 nt, Artificial Sequence
  Description of Artificial Sequence: Synthetic oligonucleotide
  Sense strand starting at position 923 of SEQ ID NO: 587292
gccguugagaaauaagauc

SEQ ID NO: 781329 - RNA, 19 nt, Artificial Sequence
  Description of Artificial Sequence: Synthetic oligonucleotide
  Antisense strand to SEQ ID NO: 781328
gaucuuauuucucaacggc

SEQ ID NO: 781330 - RNA, 19 nt, Artificial Sequence
  Description of Artificial Sequence: Synthetic oligonucleotide
  Sense strand starting at position 1055 of SEQ ID NO: 587292
aaguuaggauuccuugaaa

SEQ ID NO: 781331 - RNA, 19 nt, Artificial Sequence
  Description of Artificial Sequence: Synthetic oligonucleotide
  Antisense strand to SEQ ID NO: 781330
uuucaaggaauccuaacuu

SEQ ID NO: 781332 - RNA, 19 nt, Artificial Sequence
  Description of Artificial Sequence: Synthetic oligonucleotide
  Sense strand starting at position 1073 of SEQ ID NO: 587292
acccaauacugcuuguaag

SEQ ID NO: 781333 - RNA, 19 nt, Artificial Sequence
  Description of Artificial Sequence: Synthetic oligonucleotide
  Antisense strand to SEQ ID NO: 781332
cuuacaagcaguauugggu

SEQ ID NO: 781334 - RNA, 19 nt, Artificial Sequence
  Description of Artificial Sequence: Synthetic oligonucleotide
  Sense strand starting at position 1167 of SEQ ID NO: 587292
cuaugacucaaguggugaa

SEQ ID NO: 781335 - RNA, 19 nt, Artificial Sequence
  Description of Artificial Sequence: Synthetic oligonucleotide
  Antisense strand to SEQ ID NO: 781334
uucaccacuugagucauag

SEQ ID NO: 781336 - RNA, 19 nt, Artificial Sequence
  Description of Artificial Sequence: Synthetic oligonucleotide
  Sense strand starting at position 1325 of SEQ ID NO: 587292
uggucuauuugagggauuu

SEQ ID NO: 781337 - RNA, 19 nt, Artificial Sequence
  Description of Artificial Sequence: Synthetic oligonucleotide
  Antisense strand to SEQ ID NO: 781336
aaaucccucaaauagacca

SEQ ID NO: 781338 - RNA, 19 nt, Artificial Sequence
  Description of Artificial Sequence: Synthetic oligonucleotide
  Sense strand starting at position 1362 of SEQ ID NO: 587292
uuaacauucggaugggcua

SEQ ID NO: 781339 - RNA, 19 nt, Artificial Sequence
  Description of Artificial Sequence: Synthetic oligonucleotide
  Antisense strand to SEQ ID NO: 781338
uagcccauccgaauguuaa

SEQ ID NO: 781340 - RNA, 19 nt, Artificial Sequence
  Description of Artificial Sequence: Synthetic oligonucleotide
  Sense strand starting at position 1403 of SEQ ID NO: 587292
cugugauuacuuuagucau

SEQ ID NO: 781341 - RNA, 19 nt, Artificial Sequence
  Description of Artificial Sequence: Synthetic oligonucleotide
  Antisense strand to SEQ ID NO: 781340
augacuaaaguaaucacag

SEQ ID NO: 781342 - RNA, 19 nt, Artificial Sequence
  Description of Artificial Sequence: Synthetic oligonucleotide
  Sense strand starting at position 2526 of SEQ ID NO: 587292
auguuugagaccugguuua

SEQ ID NO: 781343 - RNA, 19 nt, Artificial Sequence
  Description of Artificial Sequence: Synthetic oligonucleotide
  Antisense strand to SEQ ID NO: 781342
uaaaccaggucucaaacau

SEQ ID NO: 781344 - RNA, 19 nt, Artificial Sequence
  Description of Artificial Sequence: Synthetic oligonucleotide
  Sense strand starting at position 2536 of SEQ ID NO: 587292
ccugguuuaccucagacca

SEQ ID NO: 781345 - RNA, 19 nt, Artificial Sequence
  Description of Artificial Sequence: Synthetic oligonucleotide
  Antisense strand to SEQ ID NO: 781344
uggucugagguaaaccagg

SEQ ID NO: 781346 - RNA, 19 nt, Artificial Sequence
  Description of Artificial Sequence: Synthetic oligonucleotide
  Sense strand starting at position 3179 of SEQ ID NO: 587292
ugcauaucacuguaugaag

SEQ ID NO: 781347 - RNA, 19 nt, Artificial Sequence
  Description of Artificial Sequence: Synthetic oligonucleotide
  Antisense strand to SEQ ID NO: 781346
cuucauacagugauaugca

SEQ ID NO: 781348 - RNA, 19 nt, Artificial Sequence
  Description of Artificial Sequence: Synthetic oligonucleotide
  Sense strand starting at position 3187 of SEQ ID NO: 587292
acuguaugaagucaguaga

SEQ ID NO: 781349 - RNA, 19 nt, Artificial Sequence
  Description of Artificial Sequence: Synthetic oligonucleotide
  Antisense strand to SEQ ID NO: 781348
ucuacugacuucauacagu

SEQ ID NO: 781350 - RNA, 19 nt, Artificial Sequence
  Description of Artificial Sequence: Synthetic oligonucleotide
  Sense strand starting at position 3259 of SEQ ID NO: 587292
guaauuuauugagaggaag

SEQ ID NO: 781351 - RNA, 19 nt, Artificial Sequence
  Description of Artificial Sequence: Synthetic oligonucleotide
  Antisense strand to SEQ ID NO: 781350
cuuccucucaauaaauuac

SEQ ID NO: 781352 - RNA, 19 nt, Artificial Sequence
  Description of Artificial Sequence: Synthetic oligonucleotide
  Sense strand starting at position 3390 of SEQ ID NO: 587292
uggcaucuacaaggauaau

SEQ ID NO: 781353 - RNA, 19 nt, Artificial Sequence
  Description of Artificial Sequence: Synthetic oligonucleotide
  Antisense strand to SEQ ID NO: 781352
auuauccuuguagaugcca

SEQ ID NO: 781354 - RNA, 19 nt, Artificial Sequence
  Description of Artificial Sequence: Synthetic oligonucleotide
  Sense strand starting at position 3477 of SEQ ID NO: 587292
uuagucacugccugagaaa

SEQ ID NO: 781355 - RNA, 19 nt, Artificial Sequence
  Description of Artificial Sequence: Synthetic oligonucleotide
  Antisense strand to SEQ ID NO: 781354
uuucucaggcagugacuaa

SEQ ID NO: 781356 - RNA, 19 nt, Artificial Sequence
  Description of Artificial Sequence: Synthetic oligonucleotide
  Sense strand starting at position 3598 of SEQ ID NO: 587292
gugaaacugcaauaacuuu

SEQ ID NO: 781357 - RNA, 19 nt, Artificial Sequence
  Description of Artificial Sequence: Synthetic oligonucleotide
  Antisense strand to SEQ ID NO: 781356
aaaguuauugcaguuucac

SEQ ID NO: 781358 - RNA, 19 nt, Artificial Sequence
  Description of Artificial Sequence: Synthetic oligonucleotide
  Sense strand starting at position 3646 of SEQ ID NO: 587292
uugacuaacuuugcuuuga

SEQ ID NO: 781359 - RNA, 19 nt, Artificial Sequence
  Description of Artificial Sequence: Synthetic oligonucleotide
  Antisense strand to SEQ ID NO: 781358
ucaaagcaaaguuagucaa

SEQ ID NO: 781360 - RNA, 19 nt, Artificial Sequence
  Description of Artificial Sequence: Synthetic oligonucleotide
  Sense strand starting at position 3647 of SEQ ID NO: 587292
ugacuaacuuugcuuugaa

SEQ ID NO: 781361 - RNA, 19 nt, Artificial Sequence
  Description of Artificial Sequence: Synthetic oligonucleotide
  Antisense strand to SEQ ID NO: 781360
uucaaagcaaaguuaguca

SEQ ID NO: 781362 - RNA, 19 nt, Artificial Sequence
  Description of Artificial Sequence: Synthetic oligonucleotide
  Sense strand starting at position 3683 of SEQ ID NO: 587292
cauuaucaccagggaaagu

SEQ ID NO: 781363 - RNA, 19 nt, Artificial Sequence
  Description of Artificial Sequence: Synthetic oligonucleotide
  Antisense strand to SEQ ID NO: 781362
acuuucccuggugauaaug

SEQ ID NO: 781364 - RNA, 19 nt, Artificial Sequence
  Description of Artificial Sequence: Synthetic oligonucleotide
  Sense strand starting at position 3854 of SEQ ID NO: 587292
uguaauuuguugucacuga

SEQ ID NO: 781365 - RNA, 19 nt, Artificial Sequence
  Description of Artificial Sequence: Synthetic oligonucleotide
  Antisense strand to SEQ ID NO: 781364
ucagugacaacaaauuaca

SEQ ID NO: 781366 - RNA, 19 nt, Artificial Sequence
  Description of Artificial Sequence: Synthetic oligonucleotide
  Sense strand starting at position 3983 of SEQ ID NO: 587292
ggaaauagauaucccaguu

SEQ ID NO: 781367 - RNA, 19 nt, Artificial Sequence
  Description of Artificial Sequence: Synthetic oligonucleotide
  Antisense strand to SEQ ID NO: 781366
aacugggauaucuauuucc

SEQ ID NO: 781368 - RNA, 19 nt, Artificial Sequence
  Description of Artificial Sequence: Synthetic oligonucleotide
  Sense strand starting at position 13 of SEQ ID NO: 587293
auguaaauaagagguguaa

SEQ ID NO: 781369 - RNA, 19 nt, Artificial Sequence
  Description of Artificial Sequence: Synthetic oligonucleotide
  Antisense strand to SEQ ID NO: 781368
uuacaccucuuauuuacau

SEQ ID NO: 781370 - RNA, 19 nt, Artificial Sequence
  Description of Artificial Sequence: Synthetic oligonucleotide
  Sense strand starting at position 15 of SEQ ID NO: 587293
guaaauaagagguguaaac

SEQ ID NO: 781371 - RNA, 19 nt, Artificial Sequence
  Description of Artificial Sequence: Synthetic oligonucleotide
  Antisense strand to SEQ ID NO: 781370
guuuacaccucuuauuuac

SEQ ID NO: 781372 - RNA, 19 nt, Artificial Sequence
  Description of Artificial Sequence: Synthetic oligonucleotide
  Sense strand starting at position 25 of SEQ ID NO: 587293
gguguaaacagaugaucau

SEQ ID NO: 781373 - RNA, 19 nt, Artificial Sequence
  Description of Artificial Sequence: Synthetic oligonucleotide
  Antisense strand to SEQ ID NO: 781372
augaucaucuguuuacacc

SEQ ID NO: 781374 - RNA, 19 nt, Artificial Sequence
  Description of Artificial Sequence: Synthetic oligonucleotide
  Sense strand starting at position 28 of SEQ ID NO: 587293
guaaacagaugaucaucuu

SEQ ID NO: 781375 - RNA, 19 nt, Artificial Sequence
  Description of Artificial Sequence: Synthetic oligonucleotide
  Antisense strand to SEQ ID NO: 781374
aagaugaucaucuguuuac

SEQ ID NO: 781376 - RNA, 19 nt, Artificial Sequence
  Description of Artificial Sequence: Synthetic oligonucleotide
  Sense strand starting at position 37 of SEQ ID NO: 587293
ugaucaucuuagcuagcaa

SEQ ID NO: 781377 - RNA, 19 nt, Artificial Sequence
  Description of Artificial Sequence: Synthetic oligonucleotide
  Antisense strand to SEQ ID NO: 781376
uugcuagcuaagaugauca

SEQ ID NO: 781378 - RNA, 19 nt, Artificial Sequence
  Description of Artificial Sequence: Synthetic oligonucleotide
  Sense strand starting at position 44 of SEQ ID NO: 587293
cuuagcuagcaaugagagu

SEQ ID NO: 781379 - RNA, 19 nt, Artificial Sequence
  Description of Artificial Sequence: Synthetic oligonucleotide
  Antisense strand to SEQ ID NO: 781378
acucucauugcuagcuaag

SEQ ID NO: 781380 - RNA, 19 nt, Artificial Sequence
  Description of Artificial Sequence: Synthetic oligonucleotide
  Sense strand starting at position 143 of SEQ ID NO: 587293
gcaucaagauuguuucuuc

SEQ ID NO: 781381 - RNA, 19 nt, Artificial Sequence
  Description of Artificial Sequence: Synthetic oligonucleotide
  Antisense strand to SEQ ID NO: 781380
gaagaaacaaucuugaugc

SEQ ID NO: 781382 - RNA, 19 nt, Artificial Sequence
  Description of Artificial Sequence: Synthetic oligonucleotide
  Sense strand starting at position 240 of SEQ ID NO: 587293
aaaggagauuaagagguua

SEQ ID NO: 781383 - RNA, 19 nt, Artificial Sequence
  Description of Artificial Sequence: Synthetic oligonucleotide
  Antisense strand to SEQ ID NO: 781382
uaaccucuuaaucuccuuu

SEQ ID NO: 781384 - RNA, 19 nt, Artificial Sequence
  Description of Artificial Sequence: Synthetic oligonucleotide
  Sense strand starting at position 260 of SEQ ID NO: 587293
agguuuggguguucuuuga

SEQ ID NO: 781385 - RNA, 19 nt, Artificial Sequence
  Description of Artificial Sequence: Synthetic oligonucleotide
  Antisense strand to SEQ ID NO: 781384
ucaaagaacacccaaaccu

SEQ ID NO: 781386 - RNA, 19 nt, Artificial Sequence
  Description of Artificial Sequence: Synthetic oligonucleotide
  Sense strand starting at position 264 of SEQ ID NO: 587293
uuggguguucuuugaacua

SEQ ID NO: 781387 - RNA, 19 nt, Artificial Sequence
  Description of Artificial Sequence: Synthetic oligonucleotide
  Antisense strand to SEQ ID NO: 781386
uaguucaaagaacacccaa

SEQ ID NO: 781388 - RNA, 19 nt, Artificial Sequence
  Description of Artificial Sequence: Synthetic oligonucleotide
  Sense strand starting at position 341 of SEQ ID NO: 587293
aaugguauuuaaugggacu

SEQ ID NO: 781389 - RNA, 19 nt, Artificial Sequence
  Description of Artificial Sequence: Synthetic oligonucleotide
  Antisense strand to SEQ ID NO: 781388
agucccauuaaauaccauu

SEQ ID NO: 781390 - RNA, 19 nt, Artificial Sequence
  Description of Artificial Sequence: Synthetic oligonucleotide
  Sense strand starting at position 344 of SEQ ID NO: 587293
gguauuuaaugggacuaaa

SEQ ID NO: 781391 - RNA, 19 nt, Artificial Sequence
  Description of Artificial Sequence: Synthetic oligonucleotide
  Antisense strand to SEQ ID NO: 781390
uuuagucccauuaaauacc

SEQ ID NO: 781392 - RNA, 19 nt, Artificial Sequence
  Description of Artificial Sequence: Synthetic oligonucleotide
  Sense strand starting at position 427 of SEQ ID NO: 587293
auaguuucuguuggucaaa

SEQ ID NO: 781393 - RNA, 19 nt, Artificial Sequence
  Description of Artificial Sequence: Synthetic oligonucleotide
  Antisense strand to SEQ ID NO: 781392
uuugaccaacagaaacuau

SEQ ID NO: 781394 - RNA, 19 nt, Artificial Sequence
  Description of Artificial Sequence: Synthetic oligonucleotide
  Sense strand starting at position 497 of SEQ ID NO: 587293
auaaacugcugucugagua

SEQ ID NO: 781395 - RNA, 19 nt, Artificial Sequence
  Description of Artificial Sequence: Synthetic oligonucleotide
  Antisense strand to SEQ ID NO: 781394
uacucagacagcaguuuau

SEQ ID NO: 781396 - RNA, 19 nt, Artificial Sequence
  Description of Artificial Sequence: Synthetic oligonucleotide
  Sense strand starting at position 505 of SEQ ID NO: 587293
cugucugaguaccuuuaau

SEQ ID NO: 781397 - RNA, 19 nt, Artificial Sequence
  Description of Artificial Sequence: Synthetic oligonucleotide
  Antisense strand to SEQ ID NO: 781396
auuaaagguacucagacag

SEQ ID NO: 781398 - RNA, 19 nt, Artificial Sequence
  Description of Artificial Sequence: Synthetic oligonucleotide
  Sense strand starting at position 522 of SEQ ID NO: 587293
auggaaaccugguaagaaa

SEQ ID NO: 781399 - RNA, 19 nt, Artificial Sequence
  Description of Artificial Sequence: Synthetic oligonucleotide
  Antisense strand to SEQ ID NO: 781398
uuucuuaccagguuuccau

SEQ ID NO: 781400 - RNA, 19 nt, Artificial Sequence
  Description of Artificial Sequence: Synthetic oligonucleotide
  Sense strand starting at position 587 of SEQ ID NO: 587293
aucauugaguaguuugcau

SEQ ID NO: 781401 - RNA, 19 nt, Artificial Sequence
  Description of Artificial Sequence: Synthetic oligonucleotide
  Antisense strand to SEQ ID NO: 781400
augcaaacuacucaaugau

SEQ ID NO: 781402 - RNA, 19 nt, Artificial Sequence
  Description of Artificial Sequence: Synthetic oligonucleotide
  Sense strand starting at position 589 of SEQ ID NO: 587293
cauugaguaguuugcauuu

SEQ ID NO: 781403 - RNA, 19 nt, Artificial Sequence
  Description of Artificial Sequence: Synthetic oligonucleotide
  Antisense strand to SEQ ID NO: 781402
aaaugcaaacuacucaaug

SEQ ID NO: 781404 - RNA, 19 nt, Artificial Sequence
  Description of Artificial Sequence: Synthetic oligonucleotide
  Sense strand starting at position 1421 of SEQ ID NO: 587293
ccuggcuuugguuagaauu

SEQ ID NO: 781405 - RNA, 19 nt, Artificial Sequence
  Description of Artificial Sequence: Synthetic oligonucleotide
  Antisense strand to SEQ ID NO: 781404
aauucuaaccaaagccagg

SEQ ID NO: 781406 - RNA, 19 nt, Artificial Sequence
  Description of Artificial Sequence: Synthetic oligonucleotide
  Sense strand starting at position 1550 of SEQ ID NO: 587293
acaguacugcaauggauau

SEQ ID NO: 781407 - RNA, 19 nt, Artificial Sequence
  Description of Artificial Sequence: Synthetic oligonucleotide
  Antisense strand to SEQ ID NO: 781406
auauccauugcaguacugu

SEQ ID NO: 781408 - RNA, 19 nt, Artificial Sequence
  Description of Artificial Sequence: Synthetic oligonucleotide
  Sense strand starting at position 1743 of SEQ ID NO: 587293
augucccuugccugaugaa

SEQ ID NO: 781409 - RNA, 19 nt, Artificial Sequence
  Description of Artificial Sequence: Synthetic oligonucleotide
  Antisense strand to SEQ ID NO: 781408
uucaucaggcaagggacau

SEQ ID NO: 781410 - RNA, 19 nt, Artificial Sequence
  Description of Artificial Sequence: Synthetic oligonucleotide
  Sense strand starting at position 1744 of SEQ ID NO: 587293
ugucccuugccugaugaaa

SEQ ID NO: 781411 - RNA, 19 nt, Artificial Sequence
  Description of Artificial Sequence: Synthetic oligonucleotide
  Antisense strand to SEQ ID NO: 781410
uuucaucaggcaagggaca

SEQ ID NO: 781412 - RNA, 19 nt, Artificial Sequence
  Description of Artificial Sequence: Synthetic oligonucleotide
  Sense strand starting at position 1899 of SEQ ID NO: 587293
aggaacuucuggugaauuu

SEQ ID NO: 781413 - RNA, 19 nt, Artificial Sequence
  Description of Artificial Sequence: Synthetic oligonucleotide
  Antisense strand to SEQ ID NO: 781412
aaauucaccagaaguuccu

SEQ ID NO: 781414 - RNA, 19 nt, Artificial Sequence
  Description of Artificial Sequence: Synthetic oligonucleotide
  Sense strand starting at position 1916 of SEQ ID NO: 587293
uuagaagucucacauuuga

SEQ ID NO: 781415 - RNA, 19 nt, Artificial Sequence
  Description of Artificial Sequence: Synthetic oligonucleotide
  Antisense strand to SEQ ID NO: 781414
ucaaaugugagacuucuaa

SEQ ID NO: 781416 - RNA, 19 nt, Artificial Sequence
  Description of Artificial Sequence: Synthetic oligonucleotide
  Sense strand starting at position 1939 of SEQ ID NO: 587293
aggagauagcacugacauu

SEQ ID NO: 781417 - RNA, 19 nt, Artificial Sequence
  Description of Artificial Sequence: Synthetic oligonucleotide
  Antisense strand to SEQ ID NO: 781416
aaugucagugcuaucuccu

SEQ ID NO: 781418 - RNA, 19 nt, Artificial Sequence
  Description of Artificial Sequence: Synthetic oligonucleotide
  Sense strand starting at position 2048 of SEQ ID NO: 587293
ggcaaacagaugugucaua

SEQ ID NO: 781419 - RNA, 19 nt, Artificial Sequence
  Description of Artificial Sequence: Synthetic oligonucleotide
  Antisense strand to SEQ ID NO: 781418
uaugacacaucuguuugcc

SEQ ID NO: 781420 - RNA, 19 nt, Artificial Sequence
  Description of Artificial Sequence: Synthetic oligonucleotide
  Sense strand starting at position 2049 of SEQ ID NO: 587293
gcaaacagaugugucauaa

SEQ ID NO: 781421 - RNA, 19 nt, Artificial Sequence
  Description of Artificial Sequence: Synthetic oligonucleotide
  Antisense strand to SEQ ID NO: 781420
uuaugacacaucuguuugc

SEQ ID NO: 781422 - RNA, 19 nt, Artificial Sequence
  Description of Artificial Sequence: Synthetic oligonucleotide
  Sense strand starting at position 2118 of SEQ ID NO: 587293
guuacagauauuggguaau

SEQ ID NO: 781423 - RNA, 19 nt, Artificial Sequence
  Description of Artificial Sequence: Synthetic oligonucleotide
  Antisense strand to SEQ ID NO: 781422
auuacccaauaucuguaac

SEQ ID NO: 781424 - RNA, 19 nt, Artificial Sequence
  Description of Artificial Sequence: Synthetic oligonucleotide
  Sense strand starting at position 2120 of SEQ ID NO: 587293
uacagauauuggguaauau

SEQ ID NO: 781425 - RNA, 19 nt, Artificial Sequence
  Description of Artificial Sequence: Synthetic oligonucleotide
  Antisense strand to SEQ ID NO: 781424
auauuacccaauaucugua

SEQ ID NO: 781426 - RNA, 19 nt, Artificial Sequence
  Description of Artificial Sequence: Synthetic oligonucleotide
  Sense strand starting at position 2446 of SEQ ID NO: 587293
ugaggagucccaugggaau

SEQ ID NO: 781427 - RNA, 19 nt, Artificial Sequence
  Description of Artificial Sequence: Synthetic oligonucleotide
  Antisense strand to SEQ ID NO: 781426
auucccaugggacuccuca

SEQ ID NO: 781428 - RNA, 19 nt, Artificial Sequence
  Description of Artificial Sequence: Synthetic oligonucleotide
  Sense strand starting at position 2757 of SEQ ID NO: 587293
cucugaucucggcaaacua

SEQ ID NO: 781429 - RNA, 19 nt, Artificial Sequence
  Description of Artificial Sequence: Synthetic oligonucleotide
  Antisense strand to SEQ ID NO: 781428
uaguuugccgagaucagag

SEQ ID NO: 781430 - RNA, 19 nt, Artificial Sequence
  Description of Artificial Sequence: Synthetic oligonucleotide
  Sense strand starting at position 3154 of SEQ ID NO: 587293
ggaagcauuucuggaggaa

SEQ ID NO: 781431 - RNA, 19 nt, Artificial Sequence
  Description of Artificial Sequence: Synthetic oligonucleotide
  Antisense strand to SEQ ID NO: 781430
uuccuccagaaaugcuucc

SEQ ID NO: 781432 - RNA, 19 nt, Artificial Sequence
  Description of Artificial Sequence: Synthetic oligonucleotide
  Sense strand starting at position 3227 of SEQ ID NO: 587293
gaggaagagcauugugaug

SEQ ID NO: 781433 - RNA, 19 nt, Artificial Sequence
  Description of Artificial Sequence: Synthetic oligonucleotide
  Antisense strand to SEQ ID NO: 781432
caucacaaugcucuuccuc

SEQ ID NO: 781434 - RNA, 19 nt, Artificial Sequence
  Description of Artificial Sequence: Synthetic oligonucleotide
  Sense strand starting at position 3233 of SEQ ID NO: 587293
gagcauugugaugguuaau

SEQ ID NO: 781435 - RNA, 19 nt, Artificial Sequence
  Description of Artificial Sequence: Synthetic oligonucleotide
  Antisense strand to SEQ ID NO: 781434
auuaaccaucacaaugcuc

SEQ ID NO: 781436 - RNA, 19 nt, Artificial Sequence
  Description of Artificial Sequence: Synthetic oligonucleotide
  Sense strand starting at position 3651 of SEQ ID NO: 587293
gcgagacuuuaccuuguga

SEQ ID NO: 781437 - RNA, 19 nt, Artificial Sequence
  Description of Artificial Sequence: Synthetic oligonucleotide
  Antisense strand to SEQ ID NO: 781436
ucacaagguaaagucucgc

SEQ ID NO: 781438 - RNA, 19 nt, Artificial Sequence
  Description of Artificial Sequence: Synthetic oligonucleotide
  Sense strand starting at position 3776 of SEQ ID NO: 587293
gccuuucuccggugagaga

SEQ ID NO: 781439 - RNA, 19 nt, Artificial Sequence
  Description of Artificial Sequence: Synthetic oligonucleotide
  Antisense strand to SEQ ID NO: 781438
ucucucaccggagaaaggc

SEQ ID NO: 781440 - RNA, 19 nt, Artificial Sequence
  Description of Artificial Sequence: Synthetic oligonucleotide
  Sense strand starting at position 3799 of SEQ ID NO: 587293
aggguuccagaauguaguu

SEQ ID NO: 781441 - RNA, 19 nt, Artificial Sequence
  Description of Artificial Sequence: Synthetic oligonucleotide
  Antisense strand to SEQ ID NO: 781440
aacuacauucuggaacccu

SEQ ID NO: 781442 - RNA, 19 nt, Artificial Sequence
  Description of Artificial Sequence: Synthetic oligonucleotide
  Sense strand starting at position 3801 of SEQ ID NO: 587293
gguuccagaauguaguuua

SEQ ID NO: 781443 - RNA, 19 nt, Artificial Sequence
  Description of Artificial Sequence: Synthetic oligonucleotide
  Antisense strand to SEQ ID NO: 781442
uaaacuacauucuggaacc

SEQ ID NO: 781444 - RNA, 19 nt, Artificial Sequence
  Description of Artificial Sequence: Synthetic oligonucleotide
  Sense strand starting at position 3804 of SEQ ID NO: 587293
uccagaauguaguuuaaca

SEQ ID NO: 781445 - RNA, 19 nt, Artificial Sequence
  Description of Artificial Sequence: Synthetic oligonucleotide
  Antisense strand to SEQ ID NO: 781444
uguuaaacuacauucugga

SEQ ID NO: 781446 - RNA, 19 nt, Artificial Sequence
  Description of Artificial Sequence: Synthetic oligonucleotide
  Sense strand starting at position 3870 of SEQ ID NO: 587293
acaagaauguggcccagaa

SEQ ID NO: 781447 - RNA, 19 nt, Artificial Sequence
  Description of Artificial Sequence: Synthetic oligonucleotide
  Antisense strand to SEQ ID NO: 781446
uucugggccacauucuugu

SEQ ID NO: 781448 - RNA, 19 nt, Artificial Sequence
  Description of Artificial Sequence: Synthetic oligonucleotide
  Sense strand starting at position 575 of SEQ ID NO: 587294
gauauacuagacugcauga

SEQ ID NO: 781449 - RNA, 19 nt, Artificial Sequence
  Description of Artificial Sequence: Synthetic oligonucleotide
  Antisense strand to SEQ ID NO: 781448
ucaugcagucuaguauauc

SEQ ID NO: 781450 - RNA, 19 nt, Artificial Sequence
  Description of Artificial Sequence: Synthetic oligonucleotide
  Sense strand starting at position 616 of SEQ ID NO: 587294
cuguuaccucaaggagaug

SEQ ID NO: 781451 - RNA, 19 nt, Artificial Sequence
  Description of Artificial Sequence: Synthetic oligonucleotide
  Antisense strand to SEQ ID NO: 781450
caucuccuugagguaacag

SEQ ID NO: 781452 - RNA, 19 nt, Artificial Sequence
  Description of Artificial Sequence: Synthetic oligonucleotide
  Sense strand starting at position 644 of SEQ ID NO: 587294
uugacuuucgggucgugua

SEQ ID NO: 781453 - RNA, 19 nt, Artificial Sequence
  Description of Artificial Sequence: Synthetic oligonucleotide
  Antisense strand to SEQ ID NO: 781452
uacacgacccgaaagucaa

SEQ ID NO: 781454 - RNA, 19 nt, Artificial Sequence
  Description of Artificial Sequence: Synthetic oligonucleotide
  Sense strand starting at position 677 of SEQ ID NO: 587294
augugugguaccuaauuag

SEQ ID NO: 781455 - RNA, 19 nt, Artificial Sequence
  Description of Artificial Sequence: Synthetic oligonucleotide
  Antisense strand to SEQ ID NO: 781454
cuaauuagguaccacacau

SEQ ID NO: 781456 - RNA, 19 nt, Artificial Sequence
  Description of Artificial Sequence: Synthetic oligonucleotide
  Sense strand starting at position 816 of SEQ ID NO: 587294
gauuuacaauacugggaga

SEQ ID NO: 781457 - RNA, 19 nt, Artificial Sequence
  Description of Artificial Sequence: Synthetic oligonucleotide
  Antisense strand to SEQ ID NO: 781456
ucucccaguauuguaaauc

SEQ ID NO: 781458 - RNA, 19 nt, Artificial Sequence
  Description of Artificial Sequence: Synthetic oligonucleotide
  Sense strand starting at position 1024 of SEQ ID NO: 587294
uuuaaaguacaagagcauu

SEQ ID NO: 781459 - RNA, 19 nt, Artificial Sequence
  Description of Artificial Sequence: Synthetic oligonucleotide
  Antisense strand to SEQ ID NO: 781458
aaugcucuuguacuuuaaa

SEQ ID NO: 781460 - RNA, 19 nt, Artificial Sequence
  Description of Artificial Sequence: Synthetic oligonucleotide
  Sense strand starting at position 1121 of SEQ ID NO: 587294
cuggaauugcuuuaauuau

SEQ ID NO: 781461 - RNA, 19 nt, Artificial Sequence
  Description of Artificial Sequence: Synthetic oligonucleotide
  Antisense strand to SEQ ID NO: 781460
auaauuaaagcaauuccag

SEQ ID NO: 781462 - RNA, 19 nt, Artificial Sequence
  Description of Artificial Sequence: Synthetic oligonucleotide
  Sense strand starting at position 1161 of SEQ ID NO: 587294
auaaacuugcaagauguau

SEQ ID NO: 781463 - RNA, 19 nt, Artificial Sequence
  Description of Artificial Sequence: Synthetic oligonucleotide
  Antisense strand to SEQ ID NO: 781462
auacaucuugcaaguuuau

SEQ ID NO: 781464 - RNA, 19 nt, Artificial Sequence
  Description of Artificial Sequence: Synthetic oligonucleotide
  Sense strand starting at position 1319 of SEQ ID NO: 587294
cgucaaauugaacauuagu

SEQ ID NO: 781465 - RNA, 19 nt, Artificial Sequence
  Description of Artificial Sequence: Synthetic oligonucleotide
  Antisense strand to SEQ ID NO: 781464
acuaauguucaauuugacg

SEQ ID NO: 781466 - RNA, 19 nt, Artificial Sequence
  Description of Artificial Sequence: Synthetic oligonucleotide
  Sense strand starting at position 1325 of SEQ ID NO: 587294
auugaacauuagucaugga

SEQ ID NO: 781467 - RNA, 19 nt, Artificial Sequence
  Description of Artificial Sequence: Synthetic oligonucleotide
  Antisense strand to SEQ ID NO: 781466
uccaugacuaauguucaau

SEQ ID NO: 781468 - RNA, 19 nt, Artificial Sequence
  Description of Artificial Sequence: Synthetic oligonucleotide
  Sense strand starting at position 1686 of SEQ ID NO: 587294
uuuacagauuuacagagau

SEQ ID NO: 781469 - RNA, 19 nt, Artificial Sequence
  Description of Artificial Sequence: Synthetic oligonucleotide
  Antisense strand to SEQ ID NO: 781468
aucucuguaaaucuguaaa

SEQ ID NO: 781470 - RNA, 19 nt, Artificial Sequence
  Description of Artificial Sequence: Synthetic oligonucleotide
  Sense strand starting at position 1779 of SEQ ID NO: 587294
guaauuaagauguagguag

SEQ ID NO: 781471 - RNA, 19 nt, Artificial Sequence
  Description of Artificial Sequence: Synthetic oligonucleotide
  Antisense strand to SEQ ID NO: 781470
cuaccuacaucuuaauuac

SEQ ID NO: 781472 - RNA, 19 nt, Artificial Sequence
  Description of Artificial Sequence: Synthetic oligonucleotide
  Sense strand starting at position 1889 of SEQ ID NO: 587294
uacagcucugaaugagaga

SEQ ID NO: 781473 - RNA, 19 nt, Artificial Sequence
  Description of Artificial Sequence: Synthetic oligonucleotide
  Antisense strand to SEQ ID NO: 781472
ucucucauucagagcugua

SEQ ID NO: 781474 - RNA, 19 nt, Artificial Sequence
  Description of Artificial Sequence: Synthetic oligonucleotide
  Sense strand starting at position 2006 of SEQ ID NO: 587294
guuagcuagguugaauaau

SEQ ID NO: 781475 - RNA, 19 nt, Artificial Sequence
  Description of Artificial Sequence: Synthetic oligonucleotide
  Antisense strand to SEQ ID NO: 781474
auuauucaaccuagcuaac

SEQ ID NO: 781476 - RNA, 19 nt, Artificial Sequence
  Description of Artificial Sequence: Synthetic oligonucleotide
  Sense strand starting at position 2100 of SEQ ID NO: 587294
ggugauuagaguggguaca

SEQ ID NO: 781477 - RNA, 19 nt, Artificial Sequence
  Description of Artificial Sequence: Synthetic oligonucleotide
  Antisense strand to SEQ ID NO: 781476
uguacccacucuaaucacc

SEQ ID NO: 781478 - RNA, 19 nt, Artificial Sequence
  Description of Artificial Sequence: Synthetic oligonucleotide
  Sense strand starting at position 2102 of SEQ ID NO: 587294
ugauuagaguggguacaua

SEQ ID NO: 781479 - RNA, 19 nt, Artificial Sequence
  Description of Artificial Sequence: Synthetic oligonucleotide
  Antisense strand to SEQ ID NO: 781478
uauguacccacucuaauca

SEQ ID NO: 781480 - RNA, 19 nt, Artificial Sequence
  Description of Artificial Sequence: Synthetic oligonucleotide
  Sense strand starting at position 2217 of SEQ ID NO: 587294
ccuccauacuaggucaaga

SEQ ID NO: 781481 - RNA, 19 nt, Artificial Sequence
  Description of Artificial Sequence: Synthetic oligonucleotide
  Antisense strand to SEQ ID NO: 781480
ucuugaccuaguauggagg

SEQ ID NO: 781482 - RNA, 19 nt, Artificial Sequence
  Description of Artificial Sequence: Synthetic oligonucleotide
  Sense strand starting at position 2278 of SEQ ID NO: 587294
agucacugauuccuuuaua

SEQ ID NO: 781483 - RNA, 19 nt, Artificial Sequence
  Description of Artificial Sequence: Synthetic oligonucleotide
  Antisense strand to SEQ ID NO: 781482
uauaaaggaaucagugacu

SEQ ID NO: 781484 - RNA, 19 nt, Artificial Sequence
  Description of Artificial Sequence: Synthetic oligonucleotide
  Sense strand starting at position 2686 of SEQ ID NO: 587294
acaccucuuugacuaguua

SEQ ID NO: 781485 - RNA, 19 nt, Artificial Sequence
  Description of Artificial Sequence: Synthetic oligonucleotide
  Antisense strand to SEQ ID NO: 781484
uaacuagucaaagaggugu

SEQ ID NO: 781486 - RNA, 19 nt, Artificial Sequence
  Description of Artificial Sequence: Synthetic oligonucleotide
  Sense strand starting at position 2757 of SEQ ID NO: 587294
cugguuuagcaggacuaau

SEQ ID NO: 781487 - RNA, 19 nt, Artificial Sequence
  Description of Artificial Sequence: Synthetic oligonucleotide
  Antisense strand to SEQ ID NO: 781486
auuaguccugcuaaaccag

SEQ ID NO: 781488 - RNA, 19 nt, Artificial Sequence
  Description of Artificial Sequence: Synthetic oligonucleotide
  Sense strand starting at position 2909 of SEQ ID NO: 587294
ccaguauuauagguacaaa

SEQ ID NO: 781489 - RNA, 19 nt, Artificial Sequence
  Description of Artificial Sequence: Synthetic oligonucleotide
  Antisense strand to SEQ ID NO: 781488
uuuguaccuauaauacugg

SEQ ID NO: 781490 - RNA, 19 nt, Artificial Sequence
  Description of Artificial Sequence: Synthetic oligonucleotide
  Sense strand starting at position 2912 of SEQ ID NO: 587294
guauuauagguacaaaugu

SEQ ID NO: 781491 - RNA, 19 nt, Artificial Sequence
  Description of Artificial Sequence: Synthetic oligonucleotide
  Antisense strand to SEQ ID NO: 781490
acauuuguaccuauaauac

SEQ ID NO: 781492 - RNA, 19 nt, Artificial Sequence
  Description of Artificial Sequence: Synthetic oligonucleotide
  Sense strand starting at position 2923 of SEQ ID NO: 587294
acaaauguggcacaucaau

SEQ ID NO: 781493 - RNA, 19 nt, Artificial Sequence
  Description of Artificial Sequence: Synthetic oligonucleotide
  Antisense strand to SEQ ID NO: 781492
auugaugugccacauuugu

SEQ ID NO: 781494 - RNA, 19 nt, Artificial Sequence
  Description of Artificial Sequence: Synthetic oligonucleotide
  Sense strand starting at position 3236 of SEQ ID NO: 587294
gugguauguauugaggaaa

SEQ ID NO: 781495 - RNA, 19 nt, Artificial Sequence
  Description of Artificial Sequence: Synthetic oligonucleotide
  Antisense strand to SEQ ID NO: 781494
uuuccucaauacauaccac

SEQ ID NO: 781496 - RNA, 19 nt, Artificial Sequence
  Description of Artificial Sequence: Synthetic oligonucleotide
  Sense strand starting at position 3355 of SEQ ID NO: 587294
caauuaucaguuggguaaa

SEQ ID NO: 781497 - RNA, 19 nt, Artificial Sequence
  Description of Artificial Sequence: Synthetic oligonucleotide
  Antisense strand to SEQ ID NO: 781496
uuuacccaacugauaauug

SEQ ID NO: 781498 - RNA, 19 nt, Artificial Sequence
  Description of Artificial Sequence: Synthetic oligonucleotide
  Sense strand starting at position 3358 of SEQ ID NO: 587294
uuaucaguuggguaaaugu

SEQ ID NO: 781499 - RNA, 19 nt, Artificial Sequence
  Description of Artificial Sequence: Synthetic oligonucleotide
  Antisense strand to SEQ ID NO: 781498
acauuuacccaacugauaa

SEQ ID NO: 781500 - RNA, 19 nt, Artificial Sequence
  Description of Artificial Sequence: Synthetic oligonucleotide
  Sense strand starting at position 3371 of SEQ ID NO: 587294
aaaugugugaugugggaua

SEQ ID NO: 781501 - RNA, 19 nt, Artificial Sequence
  Description of Artificial Sequence: Synthetic oligonucleotide
  Antisense strand to SEQ ID NO: 781500
uaucccacaucacacauuu

SEQ ID NO: 781502 - RNA, 19 nt, Artificial Sequence
  Description of Artificial Sequence: Synthetic oligonucleotide
  Sense strand starting at position 3378 of SEQ ID NO: 587294
ugaugugggauauguggaa

SEQ ID NO: 781503 - RNA, 19 nt, Artificial Sequence
  Description of Artificial Sequence: Synthetic oligonucleotide
  Antisense strand to SEQ ID NO: 781502
uuccacauaucccacauca

SEQ ID NO: 781504 - RNA, 19 nt, Artificial Sequence
  Description of Artificial Sequence: Synthetic oligonucleotide
  Sense strand starting at position 3403 of SEQ ID NO: 587294
ugaugaguuauggauaguc

SEQ ID NO: 781505 - RNA, 19 nt, Artificial Sequence
  Description of Artificial Sequence: Synthetic oligonucleotide
  Antisense strand to SEQ ID NO: 781504
gacuauccauaacucauca

SEQ ID NO: 781506 - RNA, 19 nt, Artificial Sequence
  Description of Artificial Sequence: Synthetic oligonucleotide
  Sense strand starting at position 3443 of SEQ ID NO: 587294
gucaaauguguuuguauuu

SEQ ID NO: 781507 - RNA, 19 nt, Artificial Sequence
  Description of Artificial Sequence: Synthetic oligonucleotide
  Antisense strand to SEQ ID NO: 781506
aaauacaaacacauuugac

SEQ ID NO: 781508 - RNA, 19 nt, Artificial Sequence
  Description of Artificial Sequence: Synthetic oligonucleotide
  Sense strand starting at position 3460 of SEQ ID NO: 587294
uuuggaugucuguauaaau

SEQ ID NO: 781509 - RNA, 19 nt, Artificial Sequence
  Description of Artificial Sequence: Synthetic oligonucleotide
  Antisense strand to SEQ ID NO: 781508
auuuauacagacauccaaa

SEQ ID NO: 781510 - RNA, 19 nt, Artificial Sequence
  Description of Artificial Sequence: Synthetic oligonucleotide
  Sense strand starting at position 3624 of SEQ ID NO: 587294
gaauaaaugguuugacagu

SEQ ID NO: 781511 - RNA, 19 nt, Artificial Sequence
  Description of Artificial Sequence: Synthetic oligonucleotide
  Antisense strand to SEQ ID NO: 781510
acugucaaaccauuuauuc

SEQ ID NO: 781512 - RNA, 19 nt, Artificial Sequence
  Description of Artificial Sequence: Synthetic oligonucleotide
  Sense strand starting at position 3687 of SEQ ID NO: 587294
gguggaauacuucagucag

SEQ ID NO: 781513 - RNA, 19 nt, Artificial Sequence
  Description of Artificial Sequence: Synthetic oligonucleotide
  Antisense strand to SEQ ID NO: 781512
cugacugaaguauuccacc

SEQ ID NO: 781514 - RNA, 19 nt, Artificial Sequence
  Description of Artificial Sequence: Synthetic oligonucleotide
  Sense strand starting at position 3710 of SEQ ID NO: 587294
cccuuuaggcaggagaagu

SEQ ID NO: 781515 - RNA, 19 nt, Artificial Sequence
  Description of Artificial Sequence: Synthetic oligonucleotide
  Antisense strand to SEQ ID NO: 781514
acuucuccugccuaaaggg

SEQ ID NO: 781516 - RNA, 19 nt, Artificial Sequence
  Description of Artificial Sequence: Synthetic oligonucleotide
  Sense strand starting at position 3721 of SEQ ID NO: 587294
ggagaagugggugggauua

SEQ ID NO: 781517 - RNA, 19 nt, Artificial Sequence
  Description of Artificial Sequence: Synthetic oligonucleotide
  Antisense strand to SEQ ID NO: 781516
uaaucccacccacuucucc

SEQ ID NO: 781518 - RNA, 19 nt, Artificial Sequence
  Description of Artificial Sequence: Synthetic oligonucleotide
  Sense strand starting at position 3794 of SEQ ID NO: 587294
ggcuaagccagguauagag

SEQ ID NO: 781519 - RNA, 19 nt, Artificial Sequence
  Description of Artificial Sequence: Synthetic oligonucleotide
  Antisense strand to SEQ ID NO: 781518
cucuauaccuggcuuagcc

SEQ ID NO: 781520 - RNA, 19 nt, Artificial Sequence
  Description of Artificial Sequence: Synthetic oligonucleotide
  Sense strand starting at position 3801 of SEQ ID NO: 587294
ccagguauagaguggaauu

SEQ ID NO: 781521 - RNA, 19 nt, Artificial Sequence
  Description of Artificial Sequence: Synthetic oligonucleotide
  Antisense strand to SEQ ID NO: 781520
aauuccacucuauaccugg

SEQ ID NO: 781522 - RNA, 19 nt, Artificial Sequence
  Description of Artificial Sequence: Synthetic oligonucleotide
  Sense strand starting at position 3802 of SEQ ID NO: 587294
cagguauagaguggaauua

SEQ ID NO: 781523 - RNA, 19 nt, Artificial Sequence
  Description of Artificial Sequence: Synthetic oligonucleotide
  Antisense strand to SEQ ID NO: 781522
uaauuccacucuauaccug

SEQ ID NO: 781524 - RNA, 19 nt, Artificial Sequence
  Description of Artificial Sequence: Synthetic oligonucleotide
  Sense strand starting at position 3858 of SEQ ID NO: 587294
cuguaaagucuggaaaguu

SEQ ID NO: 781525 - RNA, 19 nt, Artificial Sequence
  Description of Artificial Sequence: Synthetic oligonucleotide
  Antisense strand to SEQ ID NO: 781524
aacuuuccagacuuuacag

SEQ ID NO: 781526 - RNA, 19 nt, Artificial Sequence
  Description of Artificial Sequence: Synthetic oligonucleotide
  Sense strand starting at position 3907 of SEQ ID NO: 587294
aacagaagucagcagugua

SEQ ID NO: 781527 - RNA, 19 nt, Artificial Sequence
  Description of Artificial Sequence: Synthetic oligonucleotide
  Antisense strand to SEQ ID NO: 781526
uacacugcugacuucuguu

SEQ ID NO: 781528 - RNA, 19 nt, Artificial Sequence
  Description of Artificial Sequence: Synthetic oligonucleotide
  Sense strand starting at position 67 of SEQ ID NO: 587295
uggagaaaguuugcauagu

SEQ ID NO: 781529 - RNA, 19 nt, Artificial Sequence
  Description of Artificial Sequence: Synthetic oligonucleotide
  Antisense strand to SEQ ID NO: 781528
acuaugcaaacuuucucca

SEQ ID NO: 781530 - RNA, 19 nt, Artificial Sequence
  Description of Artificial Sequence: Synthetic oligonucleotide
  Sense strand starting at position 73 of SEQ ID NO: 587295
aaguuugcauagucuggau

SEQ ID NO: 781531 - RNA, 19 nt, Artificial Sequence
  Description of Artificial Sequence: Synthetic oligonucleotide
  Antisense strand to SEQ ID NO: 781530
auccagacuaugcaaacuu

SEQ ID NO: 781532 - RNA, 19 nt, Artificial Sequence
  Description of Artificial Sequence: Synthetic oligonucleotide
  Sense strand starting at position 77 of SEQ ID NO: 587295
uugcauagucuggauagaa

SEQ ID NO: 781533 - RNA, 19 nt, Artificial Sequence
  Description of Artificial Sequence: Synthetic oligonucleotide
  Antisense strand to SEQ ID NO: 781532
uucuauccagacuaugcaa

SEQ ID NO: 781534 - RNA, 19 nt, Artificial Sequence
  Description of Artificial Sequence: Synthetic oligonucleotide
  Sense strand starting at position 135 of SEQ ID NO: 587295
uaaugagagcaaggcuaua

SEQ ID NO: 781535 - RNA, 19 nt, Artificial Sequence
  Description of Artificial Sequence: Synthetic oligonucleotide
  Antisense strand to SEQ ID NO: 781534
uauagccuugcucucauua

SEQ ID NO: 781536 - RNA, 19 nt, Artificial Sequence
  Description of Artificial Sequence: Synthetic oligonucleotide
  Sense strand starting at position 165 of SEQ ID NO: 587295
uucugugaagccugagaaa

SEQ ID NO: 781537 - RNA, 19 nt, Artificial Sequence
  Description of Artificial Sequence: Synthetic oligonucleotide
  Antisense strand to SEQ ID NO: 781536
uuucucaggcuucacagaa

SEQ ID NO: 781538 - RNA, 19 nt, Artificial Sequence
  Description of Artificial Sequence: Synthetic oligonucleotide
  Sense strand starting at position 633 of SEQ ID NO: 587295
cuauuuacagccugguuua

SEQ ID NO: 781539 - RNA, 19 nt, Artificial Sequence
  Description of Artificial Sequence: Synthetic oligonucleotide
  Antisense strand to SEQ ID NO: 781538
uaaaccaggcuguaaauag

SEQ ID NO: 781540 - RNA, 19 nt, Artificial Sequence
  Description of Artificial Sequence: Synthetic oligonucleotide
  Sense strand starting at position 775 of SEQ ID NO: 587295
gauugauguuaugcuuaug

SEQ ID NO: 781541 - RNA, 19 nt, Artificial Sequence
  Description of Artificial Sequence: Synthetic oligonucleotide
  Antisense strand to SEQ ID NO: 781540
cauaagcauaacaucaauc

SEQ ID NO: 781542 - RNA, 19 nt, Artificial Sequence
  Description of Artificial Sequence: Synthetic oligonucleotide
  Sense strand starting at position 909 of SEQ ID NO: 587295
uuaugauggaucugaguaa

SEQ ID NO: 781543 - RNA, 19 nt, Artificial Sequence
  Description of Artificial Sequence: Synthetic oligonucleotide
  Antisense strand to SEQ ID NO: 781542
uuacucagauccaucauaa

SEQ ID NO: 781544 - RNA, 19 nt, Artificial Sequence
  Description of Artificial Sequence: Synthetic oligonucleotide
  Sense strand starting at position 932 of SEQ ID NO: 587295
aauggaaguugucuggaaa

SEQ ID NO: 781545 - RNA, 19 nt, Artificial Sequence
  Description of Artificial Sequence: Synthetic oligonucleotide
  Antisense strand to SEQ ID NO: 781544
uuuccagacaacuuccauu

SEQ ID NO: 781546 - RNA, 19 nt, Artificial Sequence
  Description of Artificial Sequence: Synthetic oligonucleotide
  Sense strand starting at position 933 of SEQ ID NO: 587295
auggaaguugucuggaaag

SEQ ID NO: 781547 - RNA, 19 nt, Artificial Sequence
  Description of Artificial Sequence: Synthetic oligonucleotide
  Antisense strand to SEQ ID NO: 781546
cuuuccagacaacuuccau

SEQ ID NO: 781548 - RNA, 19 nt, Artificial Sequence
  Description of Artificial Sequence: Synthetic oligonucleotide
  Sense strand starting at position 1034 of SEQ ID NO: 587295
uuccaaagucauggauaac

SEQ ID NO: 781549 - RNA, 19 nt, Artificial Sequence
  Description of Artificial Sequence: Synthetic oligonucleotide
  Antisense strand to SEQ ID NO: 781548
guuauccaugacuuuggaa

SEQ ID NO: 781550 - RNA, 19 nt, Artificial Sequence
  Description of Artificial Sequence: Synthetic oligonucleotide
  Sense strand starting at position 1411 of SEQ ID NO: 587295
cagagaggacucuguguca

SEQ ID NO: 781551 - RNA, 19 nt, Artificial Sequence
  Description of Artificial Sequence: Synthetic oligonucleotide
  Antisense strand to SEQ ID NO: 781550
ugacacagaguccucucug

SEQ ID NO: 781552 - RNA, 19 nt, Artificial Sequence
  Description of Artificial Sequence: Synthetic oligonucleotide
  Sense strand starting at position 1414 of SEQ ID NO: 587295
agaggacucugugucaaag

SEQ ID NO: 781553 - RNA, 19 nt, Artificial Sequence
  Description of Artificial Sequence: Synthetic oligonucleotide
  Antisense strand to SEQ ID NO: 781552
cuuugacacagaguccucu

SEQ ID NO: 781554 - RNA, 19 nt, Artificial Sequence
  Description of Artificial Sequence: Synthetic oligonucleotide
  Sense strand starting at position 1459 of SEQ ID NO: 587295
ucaggugaucacuagcaua

SEQ ID NO: 781555 - RNA, 19 nt, Artificial Sequence
  Description of Artificial Sequence: Synthetic oligonucleotide
  Antisense strand to SEQ ID NO: 781554
uaugcuagugaucaccuga

SEQ ID NO: 781556 - RNA, 19 nt, Artificial Sequence
  Description of Artificial Sequence: Synthetic oligonucleotide
  Sense strand starting at position 1557 of SEQ ID NO: 587295
guguaaacauaacuuguaa

SEQ ID NO: 781557 - RNA, 19 nt, Artificial Sequence
  Description of Artificial Sequence: Synthetic oligonucleotide
  Antisense strand to SEQ ID NO: 781556
uuacaaguuauguuuacac

SEQ ID NO: 781558 - RNA, 19 nt, Artificial Sequence
  Description of Artificial Sequence: Synthetic oligonucleotide
  Sense strand starting at position 2119 of SEQ ID NO: 587295
uucuacaagggcuauguua

SEQ ID NO: 781559 - RNA, 19 nt, Artificial Sequence
  Description of Artificial Sequence: Synthetic oligonucleotide
  Antisense strand to SEQ ID NO: 781558
uaacauagcccuuguagaa

SEQ ID NO: 781560 - RNA, 19 nt, Artificial Sequence
  Description of Artificial Sequence: Synthetic oligonucleotide
  Sense strand starting at position 2710 of SEQ ID NO: 587295
auuuguaauugagagaugu

SEQ ID NO: 781561 - RNA, 19 nt, Artificial Sequence
  Description of Artificial Sequence: Synthetic oligonucleotide
  Antisense strand to SEQ ID NO: 781560
acaucucucaauuacaaau

SEQ ID NO: 781562 - RNA, 19 nt, Artificial Sequence
  Description of Artificial Sequence: Synthetic oligonucleotide
  Sense strand starting at position 2712 of SEQ ID NO: 587295
uuguaauugagagauguug

SEQ ID NO: 781563 - RNA, 19 nt, Artificial Sequence
  Description of Artificial Sequence: Synthetic oligonucleotide
  Antisense strand to SEQ ID NO: 781562
caacaucucucaauuacaa

SEQ ID NO: 781564 - RNA, 19 nt, Artificial Sequence
  Description of Artificial Sequence: Synthetic oligonucleotide
  Sense strand starting at position 2714 of SEQ ID NO: 587295
guaauugagagauguugag

SEQ ID NO: 781565 - RNA, 19 nt, Artificial Sequence
  Description of Artificial Sequence: Synthetic oligonucleotide
  Antisense strand to SEQ ID NO: 781564
cucaacaucucucaauuac

SEQ ID NO: 781566 - RNA, 19 nt, Artificial Sequence
  Description of Artificial Sequence: Synthetic oligonucleotide
  Sense strand starting at position 2946 of SEQ ID NO: 587295
cugauuaggaugugccaga

SEQ ID NO: 781567 - RNA, 19 nt, Artificial Sequence
  Description of Artificial Sequence: Synthetic oligonucleotide
  Antisense strand to SEQ ID NO: 781566
ucuggcacauccuaaucag

SEQ ID NO: 781568 - RNA, 19 nt, Artificial Sequence
  Description of Artificial Sequence: Synthetic oligonucleotide
  Sense strand starting at position 3080 of SEQ ID NO: 587295
caugguaaggauugucuga

SEQ ID NO: 781569 - RNA, 19 nt, Artificial Sequence
  Description of Artificial Sequence: Synthetic oligonucleotide
  Antisense strand to SEQ ID NO: 781568
ucagacaauccuuaccaug

SEQ ID NO: 781570 - RNA, 19 nt, Artificial Sequence
  Description of Artificial Sequence: Synthetic oligonucleotide
  Sense strand starting at position 3164 of SEQ ID NO: 587295
cguuguuugcuccuuugca

SEQ ID NO: 781571 - RNA, 19 nt, Artificial Sequence
  Description of Artificial Sequence: Synthetic oligonucleotide
  Antisense strand to SEQ ID NO: 781570
ugcaaaggagcaaacaacg

SEQ ID NO: 781572 - RNA, 19 nt, Artificial Sequence
  Description of Artificial Sequence: Synthetic oligonucleotide
  Sense strand starting at position 3183 of SEQ ID NO: 587295
guuagugaugguucguugu

SEQ ID NO: 781573 - RNA, 19 nt, Artificial Sequence
  Description of Artificial Sequence: Synthetic oligonucleotide
  Antisense strand to SEQ ID NO: 781572
acaacgaaccaucacuaac

SEQ ID NO: 781574 - RNA, 19 nt, Artificial Sequence
  Description of Artificial Sequence: Synthetic oligonucleotide
  Sense strand starting at position 3217 of SEQ ID NO: 587295
ggcuguggucaugaacauu

SEQ ID NO: 781575 - RNA, 19 nt, Artificial Sequence
  Description of Artificial Sequence: Synthetic oligonucleotide
  Antisense strand to SEQ ID NO: 781574
aauguucaugaccacagcc

SEQ ID NO: 781576 - RNA, 19 nt, Artificial Sequence
  Description of Artificial Sequence: Synthetic oligonucleotide
  Sense strand starting at position 3264 of SEQ ID NO: 587295
auucuauggcuuuaguaag

SEQ ID NO: 781577 - RNA, 19 nt, Artificial Sequence
  Description of Artificial Sequence: Synthetic oligonucleotide
  Antisense strand to SEQ ID NO: 781576
cuuacuaaagccauagaau

SEQ ID NO: 781578 - RNA, 19 nt, Artificial Sequence
  Description of Artificial Sequence: Synthetic oligonucleotide
  Sense strand starting at position 3270 of SEQ ID NO: 587295
uggcuuuaguaagcauaag

SEQ ID NO: 781579 - RNA, 19 nt, Artificial Sequence
  Description of Artificial Sequence: Synthetic oligonucleotide
  Antisense strand to SEQ ID NO: 781578
cuuaugcuuacuaaagcca

SEQ ID NO: 781580 - RNA, 19 nt, Artificial Sequence
  Description of Artificial Sequence: Synthetic oligonucleotide
  Sense strand starting at position 3271 of SEQ ID NO: 587295
ggcuuuaguaagcauaaga

SEQ ID NO: 781581 - RNA, 19 nt, Artificial Sequence
  Description of Artificial Sequence: Synthetic oligonucleotide
  Antisense strand to SEQ ID NO: 781580
ucuuaugcuuacuaaagcc

SEQ ID NO: 781582 - RNA, 19 nt, Artificial Sequence
  Description of Artificial Sequence: Synthetic oligonucleotide
  Sense strand starting at position 3496 of SEQ ID NO: 587295
uagugauacucuguuucug

SEQ ID NO: 781583 - RNA, 19 nt, Artificial Sequence
  Description of Artificial Sequence: Synthetic oligonucleotide
  Antisense strand to SEQ ID NO: 781582
cagaaacagaguaucacua

SEQ ID NO: 781584 - RNA, 19 nt, Artificial Sequence
  Description of Artificial Sequence: Synthetic oligonucleotide
  Sense strand starting at position 3498 of SEQ ID NO: 587295
gugauacucuguuucugga

SEQ ID NO: 781585 - RNA, 19 nt, Artificial Sequence
  Description of Artificial Sequence: Synthetic oligonucleotide
  Antisense strand to SEQ ID NO: 781584
uccagaaacagaguaucac

SEQ ID NO: 781586 - RNA, 19 nt, Artificial Sequence
  Description of Artificial Sequence: Synthetic oligonucleotide
  Sense strand starting at position 3500 of SEQ ID NO: 587295
gauacucuguuucuggaaa

SEQ ID NO: 781587 - RNA, 19 nt, Artificial Sequence
  Description of Artificial Sequence: Synthetic oligonucleotide
  Antisense strand to SEQ ID NO: 781586
uuuccagaaacagaguauc

SEQ ID NO: 781588 - RNA, 19 nt, Artificial Sequence
  Description of Artificial Sequence: Synthetic oligonucleotide
  Sense strand starting at position 3569 of SEQ ID NO: 587295
gaagacaccuccucagagu

SEQ ID NO: 781589 - RNA, 19 nt, Artificial Sequence
  Description of Artificial Sequence: Synthetic oligonucleotide
  Antisense strand to SEQ ID NO: 781588
acucugaggaggugucuuc

SEQ ID NO: 781590 - RNA, 19 nt, Artificial Sequence
  Description of Artificial Sequence: Synthetic oligonucleotide
  Sense strand starting at position 3616 of SEQ ID NO: 587295
cccauaagccuaggguuua

SEQ ID NO: 781591 - RNA, 19 nt, Artificial Sequence
  Description of Artificial Sequence: Synthetic oligonucleotide
  Antisense strand to SEQ ID NO: 781590
uaaacccuaggcuuauggg

SEQ ID NO: 781592 - RNA, 19 nt, Artificial Sequence
  Description of Artificial Sequence: Synthetic oligonucleotide
  Sense strand starting at position 3629 of SEQ ID NO: 587295
gguuuaaaccuagaucugu

SEQ ID NO: 781593 - RNA, 19 nt, Artificial Sequence
  Description of Artificial Sequence: Synthetic oligonucleotide
  Antisense strand to SEQ ID NO: 781592
acagaucuagguuuaaacc

SEQ ID NO: 781594 - RNA, 19 nt, Artificial Sequence
  Description of Artificial Sequence: Synthetic oligonucleotide
  Sense strand starting at position 3640 of SEQ ID NO: 587295
agaucuguguaauuccaaa

SEQ ID NO: 781595 - RNA, 19 nt, Artificial Sequence
  Description of Artificial Sequence: Synthetic oligonucleotide
  Antisense strand to SEQ ID NO: 781594
uuuggaauuacacagaucu

SEQ ID NO: 781596 - RNA, 19 nt, Artificial Sequence
  Description of Artificial Sequence: Synthetic oligonucleotide
  Sense strand starting at position 3751 of SEQ ID NO: 587295
cuugguuuggcucaagaug

SEQ ID NO: 781597 - RNA, 19 nt, Artificial Sequence
  Description of Artificial Sequence: Synthetic oligonucleotide
  Antisense strand to SEQ ID NO: 781596
caucuugagccaaaccaag

SEQ ID NO: 781598 - RNA, 19 nt, Artificial Sequence
  Description of Artificial Sequence: Synthetic oligonucleotide
  Sense strand starting at position 3846 of SEQ ID NO: 587295
ccagguaauuugccuccua

SEQ ID NO: 781599 - RNA, 19 nt, Artificial Sequence
  Description of Artificial Sequence: Synthetic oligonucleotide
  Antisense strand to SEQ ID NO: 781598
uaggaggcaaauuaccugg

SEQ ID NO: 781600 - RNA, 19 nt, Artificial Sequence
  Description of Artificial Sequence: Synthetic oligonucleotide
  Sense strand starting at position 3886 of SEQ ID NO: 587295
gcaacuuuagcuugaacua

SEQ ID NO: 781601 - RNA, 19 nt, Artificial Sequence
  Description of Artificial Sequence: Synthetic oligonucleotide
  Antisense strand to SEQ ID NO: 781600
uaguucaagcuaaaguugc

SEQ ID NO: 781602 - RNA, 19 nt, Artificial Sequence
  Description of Artificial Sequence: Synthetic oligonucleotide
  Sense strand starting at position 3944 of SEQ ID NO: 587295
ucauuacacgacuauguga

SEQ ID NO: 781603 - RNA, 19 nt, Artificial Sequence
  Description of Artificial Sequence: Synthetic oligonucleotide
  Antisense strand to SEQ ID NO: 781602
ucacauagucguguaauga

SEQ ID NO: 781604 - RNA, 19 nt, Artificial Sequence
  Description of Artificial Sequence: Synthetic oligonucleotide
  Sense strand starting at position 3961 of SEQ ID NO: 587295
gaugauuugucacaugaau

SEQ ID NO: 781605 - RNA, 19 nt, Artificial Sequence
  Description of Artificial Sequence: Synthetic oligonucleotide
  Antisense strand to SEQ ID NO: 781604
auucaugugacaaaucauc

SEQ ID NO: 781606 - RNA, 19 nt, Artificial Sequence
  Description of Artificial Sequence: Synthetic oligonucleotide
  Sense strand starting at position 3967 of SEQ ID NO: 587295
uugucacaugaaugcuuua

SEQ ID NO: 781607 - RNA, 19 nt, Artificial Sequence
  Description of Artificial Sequence: Synthetic oligonucleotide
  Antisense strand to SEQ ID NO: 781606
uaaagcauucaugugacaa

SEQ ID NO: 781608 - RNA, 19 nt, Artificial Sequence
  Description of Artificial Sequence: Synthetic oligonucleotide
  Sense strand starting at position 39 of SEQ ID NO: 587296
aggaauggcuaauuccuaa

SEQ ID NO: 781609 - RNA, 19 nt, Artificial Sequence
  Description of Artificial Sequence: Synthetic oligonucleotide
  Antisense strand to SEQ ID NO: 781608
uuaggaauuagccauuccu

SEQ ID NO: 781610 - RNA, 19 nt, Artificial Sequence
  Description of Artificial Sequence: Synthetic oligonucleotide
  Sense strand starting at position 95 of SEQ ID NO: 587296
auuaauggcuuugcuaaga

SEQ ID NO: 781611 - RNA, 19 nt, Artificial Sequence
  Description of Artificial Sequence: Synthetic oligonucleotide
  Antisense strand to SEQ ID NO: 781610
ucuuagcaaagccauuaau

SEQ ID NO: 781612 - RNA, 19 nt, Artificial Sequence
  Description of Artificial Sequence: Synthetic oligonucleotide
  Sense strand starting at position 702 of SEQ ID NO: 587296
cacauugaggaauggcuaa

SEQ ID NO: 781613 - RNA, 19 nt, Artificial Sequence
  Description of Artificial Sequence: Synthetic oligonucleotide
  Antisense strand to SEQ ID NO: 781612
uuagccauuccucaaugug

SEQ ID NO: 781614 - RNA, 19 nt, Artificial Sequence
  Description of Artificial Sequence: Synthetic oligonucleotide
  Sense strand starting at position 810 of SEQ ID NO: 587296
caguuuaacguaggaacaa

SEQ ID NO: 781615 - RNA, 19 nt, Artificial Sequence
  Description of Artificial Sequence: Synthetic oligonucleotide
  Antisense strand to SEQ ID NO: 781614
uuguuccuacguuaaacug

SEQ ID NO: 781616 - RNA, 19 nt, Artificial Sequence
  Description of Artificial Sequence: Synthetic oligonucleotide
  Sense strand starting at position 953 of SEQ ID NO: 587296
caaggaugagcguggagaa

SEQ ID NO: 781617 - RNA, 19 nt, Artificial Sequence
  Description of Artificial Sequence: Synthetic oligonucleotide
  Antisense strand to SEQ ID NO: 781616
uucuccacgcucauccuug

SEQ ID NO: 781618 - RNA, 19 nt, Artificial Sequence
  Description of Artificial Sequence: Synthetic oligonucleotide
  Sense strand starting at position 1040 of SEQ ID NO: 587296
cccaguaguagucagccaa

SEQ ID NO: 781619 - RNA, 19 nt, Artificial Sequence
  Description of Artificial Sequence: Synthetic oligonucleotide
  Antisense strand to SEQ ID NO: 781618
uuggcugacuacuacuggg

SEQ ID NO: 781620 - RNA, 19 nt, Artificial Sequence
  Description of Artificial Sequence: Synthetic oligonucleotide
  Sense strand starting at position 1060 of SEQ ID NO: 587296
ugcaaauugcugugggaau

SEQ ID NO: 781621 - RNA, 19 nt, Artificial Sequence
  Description of Artificial Sequence: Synthetic oligonucleotide
  Antisense strand to SEQ ID NO: 781620
auucccacagcaauuugca

SEQ ID NO: 781622 - RNA, 19 nt, Artificial Sequence
  Description of Artificial Sequence: Synthetic oligonucleotide
  Sense strand starting at position 1062 of SEQ ID NO: 587296
caaauugcugugggaauau

SEQ ID NO: 781623 - RNA, 19 nt, Artificial Sequence
  Description of Artificial Sequence: Synthetic oligonucleotide
  Antisense strand to SEQ ID NO: 781622
auauucccacagcaauuug

SEQ ID NO: 781624 - RNA, 19 nt, Artificial Sequence
  Description of Artificial Sequence: Synthetic oligonucleotide
  Sense strand starting at position 1072 of SEQ ID NO: 587296
ugggaauauuuacaguaac

SEQ ID NO: 781625 - RNA, 19 nt, Artificial Sequence
  Description of Artificial Sequence: Synthetic oligonucleotide
  Antisense strand to SEQ ID NO: 781624
guuacuguaaauauuccca

SEQ ID NO: 781626 - RNA, 19 nt, Artificial Sequence
  Description of Artificial Sequence: Synthetic oligonucleotide
  Sense strand starting at position 1085 of SEQ ID NO: 587296
aguaacaacuauuaggaaa

SEQ ID NO: 781627 - RNA, 19 nt, Artificial Sequence
  Description of Artificial Sequence: Synthetic oligonucleotide
  Antisense strand to SEQ ID NO: 781626
uuuccuaauaguuguuacu

SEQ ID NO: 781628 - RNA, 19 nt, Artificial Sequence
  Description of Artificial Sequence: Synthetic oligonucleotide
  Sense strand starting at position 1196 of SEQ ID NO: 587296
ugauuuguuucuccuaagu

SEQ ID NO: 781629 - RNA, 19 nt, Artificial Sequence
  Description of Artificial Sequence: Synthetic oligonucleotide
  Antisense strand to SEQ ID NO: 781628
acuuaggagaaacaaauca

SEQ ID NO: 781630 - RNA, 19 nt, Artificial Sequence
  Description of Artificial Sequence: Synthetic oligonucleotide
  Sense strand starting at position 1201 of SEQ ID NO: 587296
uguuucuccuaagugaaua

SEQ ID NO: 781631 - RNA, 19 nt, Artificial Sequence
  Description of Artificial Sequence: Synthetic oligonucleotide
  Antisense strand to SEQ ID NO: 781630
uauucacuuaggagaaaca

SEQ ID NO: 781632 - RNA, 19 nt, Artificial Sequence
  Description of Artificial Sequence: Synthetic oligonucleotide
  Sense strand starting at position 1212 of SEQ ID NO: 587296
agugaauagugagcuuaaa

SEQ ID NO: 781633 - RNA, 19 nt, Artificial Sequence
  Description of Artificial Sequence: Synthetic oligonucleotide
  Antisense strand to SEQ ID NO: 781632
uuuaagcucacuauucacu

SEQ ID NO: 781634 - RNA, 19 nt, Artificial Sequence
  Description of Artificial Sequence: Synthetic oligonucleotide
  Sense strand starting at position 1240 of SEQ ID NO: 587296
gcgaacuuguccuuauuuc

SEQ ID NO: 781635 - RNA, 19 nt, Artificial Sequence
  Description of Artificial Sequence: Synthetic oligonucleotide
  Antisense strand to SEQ ID NO: 781634
gaaauaaggacaaguucgc

SEQ ID NO: 781636 - RNA, 19 nt, Artificial Sequence
  Description of Artificial Sequence: Synthetic oligonucleotide
  Sense strand starting at position 1285 of SEQ ID NO: 587296
ucuccaagccuguaauuga

SEQ ID NO: 781637 - RNA, 19 nt, Artificial Sequence
  Description of Artificial Sequence: Synthetic oligonucleotide
  Antisense strand to SEQ ID NO: 781636
ucaauuacaggcuuggaga

SEQ ID NO: 781638 - RNA, 19 nt, Artificial Sequence
  Description of Artificial Sequence: Synthetic oligonucleotide
  Sense strand starting at position 1347 of SEQ ID NO: 587296
ggugaacucacacguauga

SEQ ID NO: 781639 - RNA, 19 nt, Artificial Sequence
  Description of Artificial Sequence: Synthetic oligonucleotide
  Antisense strand to SEQ ID NO: 781638
ucauacgugugaguucacc

SEQ ID NO: 781640 - RNA, 19 nt, Artificial Sequence
  Description of Artificial Sequence: Synthetic oligonucleotide
  Sense strand starting at position 1360 of SEQ ID NO: 587296
guaugaacacuugggaguu

SEQ ID NO: 781641 - RNA, 19 nt, Artificial Sequence
  Description of Artificial Sequence: Synthetic oligonucleotide
  Antisense strand to SEQ ID NO: 781640
aacucccaaguguucauac

SEQ ID NO: 781642 - RNA, 19 nt, Artificial Sequence
  Description of Artificial Sequence: Synthetic oligonucleotide
  Sense strand starting at position 1481 of SEQ ID NO: 587296
aggagugcugcuuaguuua

SEQ ID NO: 781643 - RNA, 19 nt, Artificial Sequence
  Description of Artificial Sequence: Synthetic oligonucleotide
  Antisense strand to SEQ ID NO: 781642
uaaacuaagcagcacuccu

SEQ ID NO: 781644 - RNA, 19 nt, Artificial Sequence
  Description of Artificial Sequence: Synthetic oligonucleotide
  Sense strand starting at position 1994 of SEQ ID NO: 587296
aggaaaguguugccuagag

SEQ ID NO: 781645 - RNA, 19 nt, Artificial Sequence
  Description of Artificial Sequence: Synthetic oligonucleotide
  Antisense strand to SEQ ID NO: 781644
cucuaggcaacacuuuccu

SEQ ID NO: 781646 - RNA, 19 nt, Artificial Sequence
  Description of Artificial Sequence: Synthetic oligonucleotide
  Sense strand starting at position 1996 of SEQ ID NO: 587296
gaaaguguugccuagagga

SEQ ID NO: 781647 - RNA, 19 nt, Artificial Sequence
  Description of Artificial Sequence: Synthetic oligonucleotide
  Antisense strand to SEQ ID NO: 781646
uccucuaggcaacacuuuc

SEQ ID NO: 781648 - RNA, 19 nt, Artificial Sequence
  Description of Artificial Sequence: Synthetic oligonucleotide
  Sense strand starting at position 1998 of SEQ ID NO: 587296
aaguguugccuagaggacu

SEQ ID NO: 781649 - RNA, 19 nt, Artificial Sequence
  Description of Artificial Sequence: Synthetic oligonucleotide
  Antisense strand to SEQ ID NO: 781648
aguccucuaggcaacacuu

SEQ ID NO: 781650 - RNA, 19 nt, Artificial Sequence
  Description of Artificial Sequence: Synthetic oligonucleotide
  Sense strand starting at position 2018 of SEQ ID NO: 587296
ccaggaagugaaugaguca

SEQ ID NO: 781651 - RNA, 19 nt, Artificial Sequence
  Description of Artificial Sequence: Synthetic oligonucleotide
  Antisense strand to SEQ ID NO: 781650
ugacucauucacuuccugg

SEQ ID NO: 781652 - RNA, 19 nt, Artificial Sequence
  Description of Artificial Sequence: Synthetic oligonucleotide
  Sense strand starting at position 2134 of SEQ ID NO: 587296
caauaaugacgaugguaau

SEQ ID NO: 781653 - RNA, 19 nt, Artificial Sequence
  Description of Artificial Sequence: Synthetic oligonucleotide
  Antisense strand to SEQ ID NO: 781652
auuaccaucgucauuauug

SEQ ID NO: 781654 - RNA, 19 nt, Artificial Sequence
  Description of Artificial Sequence: Synthetic oligonucleotide
  Sense strand starting at position 2257 of SEQ ID NO: 587296
cgagaaacacguggcuuaa

SEQ ID NO: 781655 - RNA, 19 nt, Artificial Sequence
  Description of Artificial Sequence: Synthetic oligonucleotide
  Antisense strand to SEQ ID NO: 781654
uuaagccacguguuucucg

SEQ ID NO: 781656 - RNA, 19 nt, Artificial Sequence
  Description of Artificial Sequence: Synthetic oligonucleotide
  Sense strand starting at position 2261 of SEQ ID NO: 587296
aaacacguggcuuaaguua

SEQ ID NO: 781657 - RNA, 19 nt, Artificial Sequence
  Description of Artificial Sequence: Synthetic oligonucleotide
  Antisense strand to SEQ ID NO: 781656
uaacuuaagccacguguuu

SEQ ID NO: 781658 - RNA, 19 nt, Artificial Sequence
  Description of Artificial Sequence: Synthetic oligonucleotide
  Sense strand starting at position 2416 of SEQ ID NO: 587296
uggcuuggugagugaggaa

SEQ ID NO: 781659 - RNA, 19 nt, Artificial Sequence
  Description of Artificial Sequence: Synthetic oligonucleotide
  Antisense strand to SEQ ID NO: 781658
uuccucacucaccaagcca

SEQ ID NO: 781660 - RNA, 19 nt, Artificial Sequence
  Description of Artificial Sequence: Synthetic oligonucleotide
  Sense strand starting at position 2505 of SEQ ID NO: 587296
ggacaucugcccuggauuc

SEQ ID NO: 781661 - RNA, 19 nt, Artificial Sequence
  Description of Artificial Sequence: Synthetic oligonucleotide
  Antisense strand to SEQ ID NO: 781660
gaauccagggcagaugucc

SEQ ID NO: 781662 - RNA, 19 nt, Artificial Sequence
  Description of Artificial Sequence: Synthetic oligonucleotide
  Sense strand starting at position 2594 of SEQ ID NO: 587296
gugaauguucuggguucaa

SEQ ID NO: 781663 - RNA, 19 nt, Artificial Sequence
  Description of Artificial Sequence: Synthetic oligonucleotide
  Antisense strand to SEQ ID NO: 781662
uugaacccagaacauucac

SEQ ID NO: 781664 - RNA, 19 nt, Artificial Sequence
  Description of Artificial Sequence: Synthetic oligonucleotide
  Sense strand starting at position 2777 of SEQ ID NO: 587296
guucuaaguaaguaucagu

SEQ ID NO: 781665 - RNA, 19 nt, Artificial Sequence
  Description of Artificial Sequence: Synthetic oligonucleotide
  Antisense strand to SEQ ID NO: 781664
acugauacuuacuuagaac

SEQ ID NO: 781666 - RNA, 19 nt, Artificial Sequence
  Description of Artificial Sequence: Synthetic oligonucleotide
  Sense strand starting at position 2806 of SEQ ID NO: 587296
caauaauagugguuacaug

SEQ ID NO: 781667 - RNA, 19 nt, Artificial Sequence
  Description of Artificial Sequence: Synthetic oligonucleotide
  Antisense strand to SEQ ID NO: 781666
cauguaaccacuauuauug

SEQ ID NO: 781668 - RNA, 19 nt, Artificial Sequence
  Description of Artificial Sequence: Synthetic oligonucleotide
  Sense strand starting at position 3143 of SEQ ID NO: 587296
gguuguuugggucagaggu

SEQ ID NO: 781669 - RNA, 19 nt, Artificial Sequence
  Description of Artificial Sequence: Synthetic oligonucleotide
  Antisense strand to SEQ ID NO: 781668
accucugacccaaacaacc

SEQ ID NO: 781670 - RNA, 19 nt, Artificial Sequence
  Description of Artificial Sequence: Synthetic oligonucleotide
  Sense strand starting at position 3276 of SEQ ID NO: 587296
gggucugcaacauaucuga

SEQ ID NO: 781671 - RNA, 19 nt, Artificial Sequence
  Description of Artificial Sequence: Synthetic oligonucleotide
  Antisense strand to SEQ ID NO: 781670
ucagauauguugcagaccc

SEQ ID NO: 781672 - RNA, 19 nt, Artificial Sequence
  Description of Artificial Sequence: Synthetic oligonucleotide
  Sense strand starting at position 3504 of SEQ ID NO: 587296
cuauguuccuccucaaagu

SEQ ID NO: 781673 - RNA, 19 nt, Artificial Sequence
  Description of Artificial Sequence: Synthetic oligonucleotide
  Antisense strand to SEQ ID NO: 781672
acuuugaggaggaacauag

SEQ ID NO: 781674 - RNA, 19 nt, Artificial Sequence
  Description of Artificial Sequence: Synthetic oligonucleotide
  Sense strand starting at position 3527 of SEQ ID NO: 587296
ucagccuaugccuaagaau

SEQ ID NO: 781675 - RNA, 19 nt, Artificial Sequence
  Description of Artificial Sequence: Synthetic oligonucleotide
  Antisense strand to SEQ ID NO: 781674
auucuuaggcauaggcuga

SEQ ID NO: 781676 - RNA, 19 nt, Artificial Sequence
  Description of Artificial Sequence: Synthetic oligonucleotide
  Sense strand starting at position 3579 of SEQ ID NO: 587296
agaguugguuagguccaau

SEQ ID NO: 781677 - RNA, 19 nt, Artificial Sequence
  Description of Artificial Sequence: Synthetic oligonucleotide
  Antisense strand to SEQ ID NO: 781676
auuggaccuaaccaacucu

SEQ ID NO: 781678 - RNA, 19 nt, Artificial Sequence
  Description of Artificial Sequence: Synthetic oligonucleotide
  Sense strand starting at position 3640 of SEQ ID NO: 587296
aguuccuucuuguuuaaau

SEQ ID NO: 781679 - RNA, 19 nt, Artificial Sequence
  Description of Artificial Sequence: Synthetic oligonucleotide
  Antisense strand to SEQ ID NO: 781678
auuuaaacaagaaggaacu

SEQ ID NO: 781680 - RNA, 19 nt, Artificial Sequence
  Description of Artificial Sequence: Synthetic oligonucleotide
  Sense strand starting at position 3660 of SEQ ID NO: 587296
cauagcgcagucuauauaa

SEQ ID NO: 781681 - RNA, 19 nt, Artificial Sequence
  Description of Artificial Sequence: Synthetic oligonucleotide
  Antisense strand to SEQ ID NO: 781680
uuauauagacugcgcuaug

SEQ ID NO: 781682 - RNA, 19 nt, Artificial Sequence
  Description of Artificial Sequence: Synthetic oligonucleotide
  Sense strand starting at position 3694 of SEQ ID NO: 587296
accuaaguauuggcaacaa

SEQ ID NO: 781683 - RNA, 19 nt, Artificial Sequence
  Description of Artificial Sequence: Synthetic oligonucleotide
  Antisense strand to SEQ ID NO: 781682
uuguugccaauacuuaggu

SEQ ID NO: 781684 - RNA, 19 nt, Artificial Sequence
  Description of Artificial Sequence: Synthetic oligonucleotide
  Sense strand starting at position 3735 of SEQ ID NO: 587296
cuaguuaggucaucuguag

SEQ ID NO: 781685 - RNA, 19 nt, Artificial Sequence
  Description of Artificial Sequence: Synthetic oligonucleotide
  Antisense strand to SEQ ID NO: 781684
cuacagaugaccuaacuag

SEQ ID NO: 781686 - RNA, 19 nt, Artificial Sequence
  Description of Artificial Sequence: Synthetic oligonucleotide
  Sense strand starting at position 3739 of SEQ ID NO: 587296
uuaggucaucuguagagca

SEQ ID NO: 781687 - RNA, 19 nt, Artificial Sequence
  Description of Artificial Sequence: Synthetic oligonucleotide
  Antisense strand to SEQ ID NO: 781686
ugcucuacagaugaccuaa

SEQ ID NO: 781688 - RNA, 19 nt, Artificial Sequence
  Description of Artificial Sequence: Synthetic oligonucleotide
  Sense strand starting at position 64 of SEQ ID NO: 587297
augcaucagcucugcaaga

SEQ ID NO: 781689 - RNA, 19 nt, Artificial Sequence
  Description of Artificial Sequence: Synthetic oligonucleotide
  Antisense strand to SEQ ID NO: 781688
ucuugcagagcugaugcau

SEQ ID NO: 781690 - RNA, 19 nt, Artificial Sequence
  Description of Artificial Sequence: Synthetic oligonucleotide
  Sense strand starting at position 66 of SEQ ID NO: 587297
gcaucagcucugcaagaca

SEQ ID NO: 781691 - RNA, 19 nt, Artificial Sequence
  Description of Artificial Sequence: Synthetic oligonucleotide
  Antisense strand to SEQ ID NO: 781690
ugucuugcagagcugaugc

SEQ ID NO: 781692 - RNA, 19 nt, Artificial Sequence
  Description of Artificial Sequence: Synthetic oligonucleotide
  Sense strand starting at position 116 of SEQ ID NO: 587297
ugcaaaucucaucgugacu

SEQ ID NO: 781693 - RNA, 19 nt, Artificial Sequence
  Description of Artificial Sequence: Synthetic oligonucleotide
  Antisense strand to SEQ ID NO: 781692
agucacgaugagauuugca

SEQ ID NO: 781694 - RNA, 19 nt, Artificial Sequence
  Description of Artificial Sequence: Synthetic oligonucleotide
  Sense strand starting at position 119 of SEQ ID NO: 587297
aaaucucaucgugacugau

SEQ ID NO: 781695 - RNA, 19 nt, Artificial Sequence
  Description of Artificial Sequence: Synthetic oligonucleotide
  Antisense strand to SEQ ID NO: 781694
aucagucacgaugagauuu

SEQ ID NO: 781696 - RNA, 19 nt, Artificial Sequence
  Description of Artificial Sequence: Synthetic oligonucleotide
  Sense strand starting at position 122 of SEQ ID NO: 587297
ucucaucgugacugaucuu

SEQ ID NO: 781697 - RNA, 19 nt, Artificial Sequence
  Description of Artificial Sequence: Synthetic oligonucleotide
  Antisense strand to SEQ ID NO: 781696
aagaucagucacgaugaga

SEQ ID NO: 781698 - RNA, 19 nt, Artificial Sequence
  Description of Artificial Sequence: Synthetic oligonucleotide
  Sense strand starting at position 125 of SEQ ID NO: 587297
caucgugacugaucuuuau

SEQ ID NO: 781699 - RNA, 19 nt, Artificial Sequence
  Description of Artificial Sequence: Synthetic oligonucleotide
  Antisense strand to SEQ ID NO: 781698
auaaagaucagucacgaug

SEQ ID NO: 781700 - RNA, 19 nt, Artificial Sequence
  Description of Artificial Sequence: Synthetic oligonucleotide
  Sense strand starting at position 131 of SEQ ID NO: 587297
gacugaucuuuauugcgag

SEQ ID NO: 781701 - RNA, 19 nt, Artificial Sequence
  Description of Artificial Sequence: Synthetic oligonucleotide
  Antisense strand to SEQ ID NO: 781700
cucgcaauaaagaucaguc

SEQ ID NO: 781702 - RNA, 19 nt, Artificial Sequence
  Description of Artificial Sequence: Synthetic oligonucleotide
  Sense strand starting at position 698 of SEQ ID NO: 587297
gcaaucauuccggagccaa

SEQ ID NO: 781703 - RNA, 19 nt, Artificial Sequence
  Description of Artificial Sequence: Synthetic oligonucleotide
  Antisense strand to SEQ ID NO: 781702
uuggcuccggaaugauugc

SEQ ID NO: 781704 - RNA, 19 nt, Artificial Sequence
  Description of Artificial Sequence: Synthetic oligonucleotide
  Sense strand starting at position 745 of SEQ ID NO: 587297
acuuaacaaugggcuaaau

SEQ ID NO: 781705 - RNA, 19 nt, Artificial Sequence
  Description of Artificial Sequence: Synthetic oligonucleotide
  Antisense strand to SEQ ID NO: 781704
auuuagcccauuguuaagu

SEQ ID NO: 781706 - RNA, 19 nt, Artificial Sequence
  Description of Artificial Sequence: Synthetic oligonucleotide
  Sense strand starting at position 775 of SEQ ID NO: 587297
acguaaucugugccucagu

SEQ ID NO: 781707 - RNA, 19 nt, Artificial Sequence
  Description of Artificial Sequence: Synthetic oligonucleotide
  Antisense strand to SEQ ID NO: 781706
acugaggcacagauuacgu

SEQ ID NO: 781708 - RNA, 19 nt, Artificial Sequence
  Description of Artificial Sequence: Synthetic oligonucleotide
  Sense strand starting at position 796 of SEQ ID NO: 587297
ccacauuuguaauauggga

SEQ ID NO: 781709 - RNA, 19 nt, Artificial Sequence
  Description of Artificial Sequence: Synthetic oligonucleotide
  Antisense strand to SEQ ID NO: 781708
ucccauauuacaaaugugg

SEQ ID NO: 781710 - RNA, 19 nt, Artificial Sequence
  Description of Artificial Sequence: Synthetic oligonucleotide
  Sense strand starting at position 809 of SEQ ID NO: 587297
augggauaauuagaaaucu

SEQ ID NO: 781711 - RNA, 19 nt, Artificial Sequence
  Description of Artificial Sequence: Synthetic oligonucleotide
  Antisense strand to SEQ ID NO: 781710
agauuucuaauuaucccau

SEQ ID NO: 781712 - RNA, 19 nt, Artificial Sequence
  Description of Artificial Sequence: Synthetic oligonucleotide
  Sense strand starting at position 832 of SEQ ID NO: 587297
cauagaugucgcuguaaga

SEQ ID NO: 781713 - RNA, 19 nt, Artificial Sequence
  Description of Artificial Sequence: Synthetic oligonucleotide
  Antisense strand to SEQ ID NO: 781712
ucuuacagcgacaucuaug

SEQ ID NO: 781714 - RNA, 19 nt, Artificial Sequence
  Description of Artificial Sequence: Synthetic oligonucleotide
  Sense strand starting at position 841 of SEQ ID NO: 587297
cgcuguaagaauuagaauc

SEQ ID NO: 781715 - RNA, 19 nt, Artificial Sequence
  Description of Artificial Sequence: Synthetic oligonucleotide
  Antisense strand to SEQ ID NO: 781714
gauucuaauucuuacagcg

SEQ ID NO: 781716 - RNA, 19 nt, Artificial Sequence
  Description of Artificial Sequence: Synthetic oligonucleotide
  Sense strand starting at position 854 of SEQ ID NO: 587297
agaaucgauauauguaaag

SEQ ID NO: 781717 - RNA, 19 nt, Artificial Sequence
  Description of Artificial Sequence: Synthetic oligonucleotide
  Antisense strand to SEQ ID NO: 781716
cuuuacauauaucgauucu

SEQ ID NO: 781718 - RNA, 19 nt, Artificial Sequence
  Description of Artificial Sequence: Synthetic oligonucleotide
  Sense strand starting at position 876 of SEQ ID NO: 587297
uuagaucacugagugcuau

SEQ ID NO: 781719 - RNA, 19 nt, Artificial Sequence
  Description of Artificial Sequence: Synthetic oligonucleotide
  Antisense strand to SEQ ID NO: 781718
auagcacucagugaucuaa

SEQ ID NO: 781720 - RNA, 19 nt, Artificial Sequence
  Description of Artificial Sequence: Synthetic oligonucleotide
  Sense strand starting at position 877 of SEQ ID NO: 587297
uagaucacugagugcuaua

SEQ ID NO: 781721 - RNA, 19 nt, Artificial Sequence
  Description of Artificial Sequence: Synthetic oligonucleotide
  Antisense strand to SEQ ID NO: 781720
uauagcacucagugaucua

SEQ ID NO: 781722 - RNA, 19 nt, Artificial Sequence
  Description of Artificial Sequence: Synthetic oligonucleotide
  Sense strand starting at position 1060 of SEQ ID NO: 587297
accuuuaaccgucaggguu

SEQ ID NO: 781723 - RNA, 19 nt, Artificial Sequence
  Description of Artificial Sequence: Synthetic oligonucleotide
  Antisense strand to SEQ ID NO: 781722
aacccugacgguuaaaggu

SEQ ID NO: 781724 - RNA, 19 nt, Artificial Sequence
  Description of Artificial Sequence: Synthetic oligonucleotide
  Sense strand starting at position 1381 of SEQ ID NO: 587297
ucucuuaauuucucugcga

SEQ ID NO: 781725 - RNA, 19 nt, Artificial Sequence
  Description of Artificial Sequence: Synthetic oligonucleotide
  Antisense strand to SEQ ID NO: 781724
ucgcagagaaauuaagaga

SEQ ID NO: 781726 - RNA, 19 nt, Artificial Sequence
  Description of Artificial Sequence: Synthetic oligonucleotide
  Sense strand starting at position 1382 of SEQ ID NO: 587297
cucuuaauuucucugcgau

SEQ ID NO: 781727 - RNA, 19 nt, Artificial Sequence
  Description of Artificial Sequence: Synthetic oligonucleotide
  Antisense strand to SEQ ID NO: 781726
aucgcagagaaauuaagag

SEQ ID NO: 781728 - RNA, 19 nt, Artificial Sequence
  Description of Artificial Sequence: Synthetic oligonucleotide
  Sense strand starting at position 1383 of SEQ ID NO: 587297
ucuuaauuucucugcgauc

SEQ ID NO: 781729 - RNA, 19 nt, Artificial Sequence
  Description of Artificial Sequence: Synthetic oligonucleotide
  Antisense strand to SEQ ID NO: 781728
gaucgcagagaaauuaaga

SEQ ID NO: 781730 - RNA, 19 nt, Artificial Sequence
  Description of Artificial Sequence: Synthetic oligonucleotide
  Sense strand starting at position 1384 of SEQ ID NO: 587297
cuuaauuucucugcgauca

SEQ ID NO: 781731 - RNA, 19 nt, Artificial Sequence
  Description of Artificial Sequence: Synthetic oligonucleotide
  Antisense strand to SEQ ID NO: 781730
ugaucgcagagaaauuaag

SEQ ID NO: 781732 - RNA, 19 nt, Artificial Sequence
  Description of Artificial Sequence: Synthetic oligonucleotide
  Sense strand starting at position 2660 of SEQ ID NO: 587297
cuggcagagccuuacauga

SEQ ID NO: 781733 - RNA, 19 nt, Artificial Sequence
  Description of Artificial Sequence: Synthetic oligonucleotide
  Antisense strand to SEQ ID NO: 781732
ucauguaaggcucugccag

SEQ ID NO: 781734 - RNA, 19 nt, Artificial Sequence
  Description of Artificial Sequence: Synthetic oligonucleotide
  Sense strand starting at position 2736 of SEQ ID NO: 587297
guccuaguugaguacauau

SEQ ID NO: 781735 - RNA, 19 nt, Artificial Sequence
  Description of Artificial Sequence: Synthetic oligonucleotide
  Antisense strand to SEQ ID NO: 781734
auauguacucaacuaggac

SEQ ID NO: 781736 - RNA, 19 nt, Artificial Sequence
  Description of Artificial Sequence: Synthetic oligonucleotide
  Sense strand starting at position 2873 of SEQ ID NO: 587297
cuggcauaccuaggaauca

SEQ ID NO: 781737 - RNA, 19 nt, Artificial Sequence
  Description of Artificial Sequence: Synthetic oligonucleotide
  Antisense strand to SEQ ID NO: 781736
ugauuccuagguaugccag

SEQ ID NO: 781738 - RNA, 19 nt, Artificial Sequence
  Description of Artificial Sequence: Synthetic oligonucleotide
  Sense strand starting at position 3248 of SEQ ID NO: 587297
ggaaggaguucgguucugu

SEQ ID NO: 781739 - RNA, 19 nt, Artificial Sequence
  Description of Artificial Sequence: Synthetic oligonucleotide
  Antisense strand to SEQ ID NO: 781738
acagaaccgaacuccuucc

SEQ ID NO: 781740 - RNA, 19 nt, Artificial Sequence
  Description of Artificial Sequence: Synthetic oligonucleotide
  Sense strand starting at position 3274 of SEQ ID NO: 587297
gcaaucucugagggcaaua

SEQ ID NO: 781741 - RNA, 19 nt, Artificial Sequence
  Description of Artificial Sequence: Synthetic oligonucleotide
  Antisense strand to SEQ ID NO: 781740
uauugcccucagagauugc

SEQ ID NO: 781742 - RNA, 19 nt, Artificial Sequence
  Description of Artificial Sequence: Synthetic oligonucleotide
  Sense strand starting at position 3279 of SEQ ID NO: 587297
cucugagggcaauaguauu

SEQ ID NO: 781743 - RNA, 19 nt, Artificial Sequence
  Description of Artificial Sequence: Synthetic oligonucleotide
  Antisense strand to SEQ ID NO: 781742
aauacuauugcccucagag

SEQ ID NO: 781744 - RNA, 19 nt, Artificial Sequence
  Description of Artificial Sequence: Synthetic oligonucleotide
  Sense strand starting at position 3343 of SEQ ID NO: 587297
cggccuugacaucacauua

SEQ ID NO: 781745 - RNA, 19 nt, Artificial Sequence
  Description of Artificial Sequence: Synthetic oligonucleotide
  Antisense strand to SEQ ID NO: 781744
uaaugugaugucaaggccg

SEQ ID NO: 781746 - RNA, 19 nt, Artificial Sequence
  Description of Artificial Sequence: Synthetic oligonucleotide
  Sense strand starting at position 3522 of SEQ ID NO: 587297
uguguacuucugcuuaugu

SEQ ID NO: 781747 - RNA, 19 nt, Artificial Sequence
  Description of Artificial Sequence: Synthetic oligonucleotide
  Antisense strand to SEQ ID NO: 781746
acauaagcagaaguacaca

SEQ ID NO: 781748 - RNA, 19 nt, Artificial Sequence
  Description of Artificial Sequence: Synthetic oligonucleotide
  Sense strand starting at position 3550 of SEQ ID NO: 587297
guugaugucacagggaauu

SEQ ID NO: 781749 - RNA, 19 nt, Artificial Sequence
  Description of Artificial Sequence: Synthetic oligonucleotide
  Antisense strand to SEQ ID NO: 781748
aauucccugugacaucaac

SEQ ID NO: 781750 - RNA, 19 nt, Artificial Sequence
  Description of Artificial Sequence: Synthetic oligonucleotide
  Sense strand starting at position 3751 of SEQ ID NO: 587297
ucacuuggcccuggagaua

SEQ ID NO: 781751 - RNA, 19 nt, Artificial Sequence
  Description of Artificial Sequence: Synthetic oligonucleotide
  Antisense strand to SEQ ID NO: 781750
uaucuccagggccaaguga

SEQ ID NO: 781752 - RNA, 19 nt, Artificial Sequence
  Description of Artificial Sequence: Synthetic oligonucleotide
  Sense strand starting at position 3764 of SEQ ID NO: 587297
gagauauggcguugauagg

SEQ ID NO: 781753 - RNA, 19 nt, Artificial Sequence
  Description of Artificial Sequence: Synthetic oligonucleotide
  Antisense strand to SEQ ID NO: 781752
ccuaucaacgccauaucuc

SEQ ID NO: 781754 - RNA, 19 nt, Artificial Sequence
  Description of Artificial Sequence: Synthetic oligonucleotide
  Sense strand starting at position 3765 of SEQ ID NO: 587297
agauauggcguugauaggu

SEQ ID NO: 781755 - RNA, 19 nt, Artificial Sequence
  Description of Artificial Sequence: Synthetic oligonucleotide
  Antisense strand to SEQ ID NO: 781754
accuaucaacgccauaucu

SEQ ID NO: 781756 - RNA, 19 nt, Artificial Sequence
  Description of Artificial Sequence: Synthetic oligonucleotide
  Sense strand starting at position 3785 of SEQ ID NO: 587297
ccaagaauugagugcaaag

SEQ ID NO: 781757 - RNA, 19 nt, Artificial Sequence
  Description of Artificial Sequence: Synthetic oligonucleotide
  Antisense strand to SEQ ID NO: 781756
cuuugcacucaauucuugg

SEQ ID NO: 781758 - RNA, 19 nt, Artificial Sequence
  Description of Artificial Sequence: Synthetic oligonucleotide
  Sense strand starting at position 3800 of SEQ ID NO: 587297
aaaguuugugaauguagag

SEQ ID NO: 781759 - RNA, 19 nt, Artificial Sequence
  Description of Artificial Sequence: Synthetic oligonucleotide
  Antisense strand to SEQ ID NO: 781758
cucuacauucacaaacuuu

SEQ ID NO: 781760 - RNA, 19 nt, Artificial Sequence
  Description of Artificial Sequence: Synthetic oligonucleotide
  Sense strand starting at position 3897 of SEQ ID NO: 587297
gauuguggcuuuccuaaca

SEQ ID NO: 781761 - RNA, 19 nt, Artificial Sequence
  Description of Artificial Sequence: Synthetic oligonucleotide
  Antisense strand to SEQ ID NO: 781760
uguuaggaaagccacaauc

SEQ ID NO: 781762 - RNA, 19 nt, Artificial Sequence
  Description of Artificial Sequence: Synthetic oligonucleotide
  Sense strand starting at position 3921 of SEQ ID NO: 587297
gaaguaagagcauguuuga

SEQ ID NO: 781763 - RNA, 19 nt, Artificial Sequence
  Description of Artificial Sequence: Synthetic oligonucleotide
  Antisense strand to SEQ ID NO: 781762
ucaaacaugcucuuacuuc

SEQ ID NO: 781764 - RNA, 19 nt, Artificial Sequence
  Description of Artificial Sequence: Synthetic oligonucleotide
  Sense strand starting at position 3924 of SEQ ID NO: 587297
guaagagcauguuugauuc

SEQ ID NO: 781765 - RNA, 19 nt, Artificial Sequence
  Description of Artificial Sequence: Synthetic oligonucleotide
  Antisense strand to SEQ ID NO: 781764
gaaucaaacaugcucuuac

SEQ ID NO: 781766 - RNA, 19 nt, Artificial Sequence
  Description of Artificial Sequence: Synthetic oligonucleotide
  Sense strand starting at position 3928 of SEQ ID NO: 587297
gagcauguuugauucuuaa

SEQ ID NO: 781767 - RNA, 19 nt, Artificial Sequence
  Description of Artificial Sequence: Synthetic oligonucleotide
  Antisense strand to SEQ ID NO: 781766
uuaagaaucaaacaugcuc

SEQ ID NO: 781768 - RNA, 19 nt, Artificial Sequence
  Description of Artificial Sequence: Synthetic oligonucleotide
  Sense strand starting at position 176 of SEQ ID NO: 587298
ggaagauucuuucuuaccu

SEQ ID NO: 781769 - RNA, 19 nt, Artificial Sequence
  Description of Artificial Sequence: Synthetic oligonucleotide
  Antisense strand to SEQ ID NO: 781768
agguaagaaagaaucuucc

SEQ ID NO: 781770 - RNA, 19 nt, Artificial Sequence
  Description of Artificial Sequence: Synthetic oligonucleotide
  Sense strand starting at position 242 of SEQ ID NO: 587298
cugauuugcuuacuagugu

SEQ ID NO: 781771 - RNA, 19 nt, Artificial Sequence
  Description of Artificial Sequence: Synthetic oligonucleotide
  Antisense strand to SEQ ID NO: 781770
acacuaguaagcaaaucag

SEQ ID NO: 781772 - RNA, 19 nt, Artificial Sequence
  Description of Artificial Sequence: Synthetic oligonucleotide
  Sense strand starting at position 250 of SEQ ID NO: 587298
cuuacuaguguaggugaaa

SEQ ID NO: 781773 - RNA, 19 nt, Artificial Sequence
  Description of Artificial Sequence: Synthetic oligonucleotide
  Antisense strand to SEQ ID NO: 781772
uuucaccuacacuaguaag

SEQ ID NO: 781774 - RNA, 19 nt, Artificial Sequence
  Description of Artificial Sequence: Synthetic oligonucleotide
  Sense strand starting at position 251 of SEQ ID NO: 587298
uuacuaguguaggugaaau

SEQ ID NO: 781775 - RNA, 19 nt, Artificial Sequence
  Description of Artificial Sequence: Synthetic oligonucleotide
  Antisense strand to SEQ ID NO: 781774
auuucaccuacacuaguaa

SEQ ID NO: 781776 - RNA, 19 nt, Artificial Sequence
  Description of Artificial Sequence: Synthetic oligonucleotide
  Sense strand starting at position 409 of SEQ ID NO: 587298
gcaagucaucuugacaccu

SEQ ID NO: 781777 - RNA, 19 nt, Artificial Sequence
  Description of Artificial Sequence: Synthetic oligonucleotide
  Antisense strand to SEQ ID NO: 781776
aggugucaagaugacuugc

SEQ ID NO: 781778 - RNA, 19 nt, Artificial Sequence
  Description of Artificial Sequence: Synthetic oligonucleotide
  Sense strand starting at position 508 of SEQ ID NO: 587298
uauaucuggcuuuguagaa

SEQ ID NO: 781779 - RNA, 19 nt, Artificial Sequence
  Description of Artificial Sequence: Synthetic oligonucleotide
  Antisense strand to SEQ ID NO: 781778
uucuacaaagccagauaua

SEQ ID NO: 781780 - RNA, 19 nt, Artificial Sequence
  Description of Artificial Sequence: Synthetic oligonucleotide
  Sense strand starting at position 509 of SEQ ID NO: 587298
auaucuggcuuuguagaau

SEQ ID NO: 781781 - RNA, 19 nt, Artificial Sequence
  Description of Artificial Sequence: Synthetic oligonucleotide
  Antisense strand to SEQ ID NO: 781780
auucuacaaagccagauau

SEQ ID NO: 781782 - RNA, 19 nt, Artificial Sequence
  Description of Artificial Sequence: Synthetic oligonucleotide
  Sense strand starting at position 515 of SEQ ID NO: 587298
ggcuuuguagaauggaauc

SEQ ID NO: 781783 - RNA, 19 nt, Artificial Sequence
  Description of Artificial Sequence: Synthetic oligonucleotide
  Antisense strand to SEQ ID NO: 781782
gauuccauucuacaaagcc

SEQ ID NO: 781784 - RNA, 19 nt, Artificial Sequence
  Description of Artificial Sequence: Synthetic oligonucleotide
  Sense strand starting at position 603 of SEQ ID NO: 587298
gccaucggagucugaagaa

SEQ ID NO: 781785 - RNA, 19 nt, Artificial Sequence
  Description of Artificial Sequence: Synthetic oligonucleotide
  Antisense strand to SEQ ID NO: 781784
uucuucagacuccgauggc

SEQ ID NO: 781786 - RNA, 19 nt, Artificial Sequence
  Description of Artificial Sequence: Synthetic oligonucleotide
  Sense strand starting at position 647 of SEQ ID NO: 587298
cuguccuaucguguuccau

SEQ ID NO: 781787 - RNA, 19 nt, Artificial Sequence
  Description of Artificial Sequence: Synthetic oligonucleotide
  Antisense strand to SEQ ID NO: 781786
auggaacacgauaggacag

SEQ ID NO: 781788 - RNA, 19 nt, Artificial Sequence
  Description of Artificial Sequence: Synthetic oligonucleotide
  Sense strand starting at position 648 of SEQ ID NO: 587298
uguccuaucguguuccauu

SEQ ID NO: 781789 - RNA, 19 nt, Artificial Sequence
  Description of Artificial Sequence: Synthetic oligonucleotide
  Antisense strand to SEQ ID NO: 781788
aauggaacacgauaggaca

SEQ ID NO: 781790 - RNA, 19 nt, Artificial Sequence
  Description of Artificial Sequence: Synthetic oligonucleotide
  Sense strand starting at position 649 of SEQ ID NO: 587298
guccuaucguguuccauuu

SEQ ID NO: 781791 - RNA, 19 nt, Artificial Sequence
  Description of Artificial Sequence: Synthetic oligonucleotide
  Antisense strand to SEQ ID NO: 781790
aaauggaacacgauaggac

SEQ ID NO: 781792 - RNA, 19 nt, Artificial Sequence
  Description of Artificial Sequence: Synthetic oligonucleotide
  Sense strand starting at position 890 of SEQ ID NO: 587298
augugauucuaccucauug

SEQ ID NO: 781793 - RNA, 19 nt, Artificial Sequence
  Description of Artificial Sequence: Synthetic oligonucleotide
  Antisense strand to SEQ ID NO: 781792
caaugagguagaaucacau

SEQ ID NO: 781794 - RNA, 19 nt, Artificial Sequence
  Description of Artificial Sequence: Synthetic oligonucleotide
  Sense strand starting at position 1125 of SEQ ID NO: 587298
uaaagucgaggagauguau

SEQ ID NO: 781795 - RNA, 19 nt, Artificial Sequence
  Description of Artificial Sequence: Synthetic oligonucleotide
  Antisense strand to SEQ ID NO: 781794
auacaucuccucgacuuua

SEQ ID NO: 781796 - RNA, 19 nt, Artificial Sequence
  Description of Artificial Sequence: Synthetic oligonucleotide
  Sense strand starting at position 1233 of SEQ ID NO: 587298
gguuucagacugggcaaua

SEQ ID NO: 781797 - RNA, 19 nt, Artificial Sequence
  Description of Artificial Sequence: Synthetic oligonucleotide
  Antisense strand to SEQ ID NO: 781796
uauugcccagucugaaacc

SEQ ID NO: 781798 - RNA, 19 nt, Artificial Sequence
  Description of Artificial Sequence: Synthetic oligonucleotide
  Sense strand starting at position 1310 of SEQ ID NO: 587298
cuauuuaacucaguguguu

SEQ ID NO: 781799 - RNA, 19 nt, Artificial Sequence
  Description of Artificial Sequence: Synthetic oligonucleotide
  Antisense strand to SEQ ID NO: 781798
aacacacugaguuaaauag

SEQ ID NO: 781800 - RNA, 19 nt, Artificial Sequence
  Description of Artificial Sequence: Synthetic oligonucleotide
  Sense strand starting at position 1603 of SEQ ID NO: 587298
ugacuucucagaggcaaug

SEQ ID NO: 781801 - RNA, 19 nt, Artificial Sequence
  Description of Artificial Sequence: Synthetic oligonucleotide
  Antisense strand to SEQ ID NO: 781800
cauugccucugagaaguca

SEQ ID NO: 781802 - RNA, 19 nt, Artificial Sequence
  Description of Artificial Sequence: Synthetic oligonucleotide
  Sense strand starting at position 1620 of SEQ ID NO: 587298
ugggaucuuaggcaaguga

SEQ ID NO: 781803 - RNA, 19 nt, Artificial Sequence
  Description of Artificial Sequence: Synthetic oligonucleotide
  Antisense strand to SEQ ID NO: 781802
ucacuugccuaagauccca

SEQ ID NO: 781804 - RNA, 19 nt, Artificial Sequence
  Description of Artificial Sequence: Synthetic oligonucleotide
  Sense strand starting at position 1754 of SEQ ID NO: 587298
aguaaauguuaggucuuau

SEQ ID NO: 781805 - RNA, 19 nt, Artificial Sequence
  Description of Artificial Sequence: Synthetic oligonucleotide
  Antisense strand to SEQ ID NO: 781804
auaagaccuaacauuuacu

SEQ ID NO: 781806 - RNA, 19 nt, Artificial Sequence
  Description of Artificial Sequence: Synthetic oligonucleotide
  Sense strand starting at position 1808 of SEQ ID NO: 587298
ugcccauuucugugcaaug

SEQ ID NO: 781807 - RNA, 19 nt, Artificial Sequence
  Description of Artificial Sequence: Synthetic oligonucleotide
  Antisense strand to SEQ ID NO: 781806
cauugcacagaaaugggca

SEQ ID NO: 781808 - RNA, 19 nt, Artificial Sequence
  Description of Artificial Sequence: Synthetic oligonucleotide
  Sense strand starting at position 2442 of SEQ ID NO: 587298
cuacgaucucuggacacuu

SEQ ID NO: 781809 - RNA, 19 nt, Artificial Sequence
  Description of Artificial Sequence: Synthetic oligonucleotide
  Antisense strand to SEQ ID NO: 781808
aaguguccagagaucguag

SEQ ID NO: 781810 - RNA, 19 nt, Artificial Sequence
  Description of Artificial Sequence: Synthetic oligonucleotide
  Sense strand starting at position 2468 of SEQ ID NO: 587298
uuuauuucgcucuagcgau

SEQ ID NO: 781811 - RNA, 19 nt, Artificial Sequence
  Description of Artificial Sequence: Synthetic oligonucleotide
  Antisense strand to SEQ ID NO: 781810
aucgcuagagcgaaauaaa

SEQ ID NO: 781812 - RNA, 19 nt, Artificial Sequence
  Description of Artificial Sequence: Synthetic oligonucleotide
  Sense strand starting at position 2475 of SEQ ID NO: 587298
cgcucuagcgauccgguua

SEQ ID NO: 781813 - RNA, 19 nt, Artificial Sequence
  Description of Artificial Sequence: Synthetic oligonucleotide
  Antisense strand to SEQ ID NO: 781812
uaaccggaucgcuagagcg

SEQ ID NO: 781814 - RNA, 19 nt, Artificial Sequence
  Description of Artificial Sequence: Synthetic oligonucleotide
  Sense strand starting at position 2500 of SEQ ID NO: 587298
cuggaaagaacucguuugu

SEQ ID NO: 781815 - RNA, 19 nt, Artificial Sequence
  Description of Artificial Sequence: Synthetic oligonucleotide
  Antisense strand to SEQ ID NO: 781814
acaaacgaguucuuuccag

SEQ ID NO: 781816 - RNA, 19 nt, Artificial Sequence
  Description of Artificial Sequence: Synthetic oligonucleotide
  Sense strand starting at position 2630 of SEQ ID NO: 587298
guccguuauccuuaaagag

SEQ ID NO: 781817 - RNA, 19 nt, Artificial Sequence
  Description of Artificial Sequence: Synthetic oligonucleotide
  Antisense strand to SEQ ID NO: 781816
cucuuuaaggauaacggac

SEQ ID NO: 781818 - RNA, 19 nt, Artificial Sequence
  Description of Artificial Sequence: Synthetic oligonucleotide
  Sense strand starting at position 2730 of SEQ ID NO: 587298
cucagagagcgccagauau

SEQ ID NO: 781819 - RNA, 19 nt, Artificial Sequence
  Description of Artificial Sequence: Synthetic oligonucleotide
  Antisense strand to SEQ ID NO: 781818
auaucuggcgcucucugag

SEQ ID NO: 781820 - RNA, 19 nt, Artificial Sequence
  Description of Artificial Sequence: Synthetic oligonucleotide
  Sense strand starting at position 2738 of SEQ ID NO: 587298
gcgccagauauccaggaga

SEQ ID NO: 781821 - RNA, 19 nt, Artificial Sequence
  Description of Artificial Sequence: Synthetic oligonucleotide
  Antisense strand to SEQ ID NO: 781820
ucuccuggauaucuggcgc

SEQ ID NO: 781822 - RNA, 19 nt, Artificial Sequence
  Description of Artificial Sequence: Synthetic oligonucleotide
  Sense strand starting at position 2740 of SEQ ID NO: 587298
gccagauauccaggagaug

SEQ ID NO: 781823 - RNA, 19 nt, Artificial Sequence
  Description of Artificial Sequence: Synthetic oligonucleotide
  Antisense strand to SEQ ID NO: 781822
caucuccuggauaucuggc

SEQ ID NO: 781824 - RNA, 19 nt, Artificial Sequence
  Description of Artificial Sequence: Synthetic oligonucleotide
  Sense strand starting at position 2906 of SEQ ID NO: 587298
ggucuugcucuccaagaua

SEQ ID NO: 781825 - RNA, 19 nt, Artificial Sequence
  Description of Artificial Sequence: Synthetic oligonucleotide
  Antisense strand to SEQ ID NO: 781824
uaucuuggagagcaagacc

SEQ ID NO: 781826 - RNA, 19 nt, Artificial Sequence
  Description of Artificial Sequence: Synthetic oligonucleotide
  Sense strand starting at position 3338 of SEQ ID NO: 587298
aucccuaaggcauguggaa

SEQ ID NO: 781827 - RNA, 19 nt, Artificial Sequence
  Description of Artificial Sequence: Synthetic oligonucleotide
  Antisense strand to SEQ ID NO: 781826
uuccacaugccuuagggau

SEQ ID NO: 781828 - RNA, 19 nt, Artificial Sequence
  Description of Artificial Sequence: Synthetic oligonucleotide
  Sense strand starting at position 3435 of SEQ ID NO: 587298
acacaauagcaguguggaa

SEQ ID NO: 781829 - RNA, 19 nt, Artificial Sequence
  Description of Artificial Sequence: Synthetic oligonucleotide
  Antisense strand to SEQ ID NO: 781828
uuccacacugcuauugugu

SEQ ID NO: 781830 - RNA, 19 nt, Artificial Sequence
  Description of Artificial Sequence: Synthetic oligonucleotide
  Sense strand starting at position 3524 of SEQ ID NO: 587298
aucugucacuguuugauca

SEQ ID NO: 781831 - RNA, 19 nt, Artificial Sequence
  Description of Artificial Sequence: Synthetic oligonucleotide
  Antisense strand to SEQ ID NO: 781830
ugaucaaacagugacagau

SEQ ID NO: 781832 - RNA, 19 nt, Artificial Sequence
  Description of Artificial Sequence: Synthetic oligonucleotide
  Sense strand starting at position 3528 of SEQ ID NO: 587298
gucacuguuugaucagaaa

SEQ ID NO: 781833 - RNA, 19 nt, Artificial Sequence
  Description of Artificial Sequence: Synthetic oligonucleotide
  Antisense strand to SEQ ID NO: 781832
uuucugaucaaacagugac

SEQ ID NO: 781834 - RNA, 19 nt, Artificial Sequence
  Description of Artificial Sequence: Synthetic oligonucleotide
  Sense strand starting at position 3543 of SEQ ID NO: 587298
gaaagacugcagugguuaa

SEQ ID NO: 781835 - RNA, 19 nt, Artificial Sequence
  Description of Artificial Sequence: Synthetic oligonucleotide
  Antisense strand to SEQ ID NO: 781834
uuaaccacugcagucuuuc

SEQ ID NO: 781836 - RNA, 19 nt, Artificial Sequence
  Description of Artificial Sequence: Synthetic oligonucleotide
  Sense strand starting at position 3644 of SEQ ID NO: 587298
ucugguaugagugguuaga

SEQ ID NO: 781837 - RNA, 19 nt, Artificial Sequence
  Description of Artificial Sequence: Synthetic oligonucleotide
  Antisense strand to SEQ ID NO: 781836
ucuaaccacucauaccaga

SEQ ID NO: 781838 - RNA, 19 nt, Artificial Sequence
  Description of Artificial Sequence: Synthetic oligonucleotide
  Sense strand starting at position 3646 of SEQ ID NO: 587298
ugguaugagugguuagaag

SEQ ID NO: 781839 - RNA, 19 nt, Artificial Sequence
  Description of Artificial Sequence: Synthetic oligonucleotide
  Antisense strand to SEQ ID NO: 781838
cuucuaaccacucauacca

SEQ ID NO: 781840 - RNA, 19 nt, Artificial Sequence
  Description of Artificial Sequence: Synthetic oligonucleotide
  Sense strand starting at position 3655 of SEQ ID NO: 587298
ugguuagaagauuggcaaa

SEQ ID NO: 781841 - RNA, 19 nt, Artificial Sequence
  Description of Artificial Sequence: Synthetic oligonucleotide
  Antisense strand to SEQ ID NO: 781840
uuugccaaucuucuaacca

SEQ ID NO: 781842 - RNA, 19 nt, Artificial Sequence
  Description of Artificial Sequence: Synthetic oligonucleotide
  Sense strand starting at position 3657 of SEQ ID NO: 587298
guuagaagauuggcaaaua

SEQ ID NO: 781843 - RNA, 19 nt, Artificial Sequence
  Description of Artificial Sequence: Synthetic oligonucleotide
  Antisense strand to SEQ ID NO: 781842
uauuugccaaucuucuaac

SEQ ID NO: 781844 - RNA, 19 nt, Artificial Sequence
  Description of Artificial Sequence: Synthetic oligonucleotide
  Sense strand starting at position 3824 of SEQ ID NO: 587298
cgcacaauagcacauaauu

SEQ ID NO: 781845 - RNA, 19 nt, Artificial Sequence
  Description of Artificial Sequence: Synthetic oligonucleotide
  Antisense strand to SEQ ID NO: 781844
aauuaugugcuauugugcg

SEQ ID NO: 781846 - RNA, 19 nt, Artificial Sequence
  Description of Artificial Sequence: Synthetic oligonucleotide
  Sense strand starting at position 3855 of SEQ ID NO: 587298
uagguaaacuuugcaaagu

SEQ ID NO: 781847 - RNA, 19 nt, Artificial Sequence
  Description of Artificial Sequence: Synthetic oligonucleotide
  Antisense strand to SEQ ID NO: 781846
acuuugcaaaguuuaccua

SEQ ID NO: 781848 - RNA, 19 nt, Artificial Sequence
  Description of Artificial Sequence: Synthetic oligonucleotide
  Sense strand starting at position 26 of SEQ ID NO: 587299
gguauaaggugaucaaacu

SEQ ID NO: 781849 - RNA, 19 nt, Artificial Sequence
  Description of Artificial Sequence: Synthetic oligonucleotide
  Antisense strand to SEQ ID NO: 781848
aguuugaucaccuuauacc

SEQ ID NO: 781850 - RNA, 19 nt, Artificial Sequence
  Description of Artificial Sequence: Synthetic oligonucleotide
  Sense strand starting at position 186 of SEQ ID NO: 587299
agagauacgucaguuguac

SEQ ID NO: 781851 - RNA, 19 nt, Artificial Sequence
  Description of Artificial Sequence: Synthetic oligonucleotide
  Antisense strand to SEQ ID NO: 781850
guacaacugacguaucucu

SEQ ID NO: 781852 - RNA, 19 nt, Artificial Sequence
  Description of Artificial Sequence: Synthetic oligonucleotide
  Sense strand starting at position 314 of SEQ ID NO: 587299
accugaaugguauguccau

SEQ ID NO: 781853 - RNA, 19 nt, Artificial Sequence
  Description of Artificial Sequence: Synthetic oligonucleotide
  Antisense strand to SEQ ID NO: 781852
auggacauaccauucaggu

SEQ ID NO: 781854 - RNA, 19 nt, Artificial Sequence
  Description of Artificial Sequence: Synthetic oligonucleotide
  Sense strand starting at position 321 of SEQ ID NO: 587299
ugguauguccaucauuggu

SEQ ID NO: 781855 - RNA, 19 nt, Artificial Sequence
  Description of Artificial Sequence: Synthetic oligonucleotide
  Antisense strand to SEQ ID NO: 781854
accaaugauggacauacca

SEQ ID NO: 781856 - RNA, 19 nt, Artificial Sequence
  Description of Artificial Sequence: Synthetic oligonucleotide
  Sense strand starting at position 323 of SEQ ID NO: 587299
guauguccaucauugguga

SEQ ID NO: 781857 - RNA, 19 nt, Artificial Sequence
  Description of Artificial Sequence: Synthetic oligonucleotide
  Antisense strand to SEQ ID NO: 781856
ucaccaaugauggacauac

SEQ ID NO: 781858 - RNA, 19 nt, Artificial Sequence
  Description of Artificial Sequence: Synthetic oligonucleotide
  Sense strand starting at position 407 of SEQ ID NO: 587299
cuagccucucuugaguuua

SEQ ID NO: 781859 - RNA, 19 nt, Artificial Sequence
  Description of Artificial Sequence: Synthetic oligonucleotide
  Antisense strand to SEQ ID NO: 781858
uaaacucaagagaggcuag

SEQ ID NO: 781860 - RNA, 19 nt, Artificial Sequence
  Description of Artificial Sequence: Synthetic oligonucleotide
  Sense strand starting at position 412 of SEQ ID NO: 587299
cucucuugaguuuagguua

SEQ ID NO: 781861 - RNA, 19 nt, Artificial Sequence
  Description of Artificial Sequence: Synthetic oligonucleotide
  Antisense strand to SEQ ID NO: 781860
uaaccuaaacucaagagag

SEQ ID NO: 781862 - RNA, 19 nt, Artificial Sequence
  Description of Artificial Sequence: Synthetic oligonucleotide
  Sense strand starting at position 415 of SEQ ID NO: 587299
ucuugaguuuagguuaaua

SEQ ID NO: 781863 - RNA, 19 nt, Artificial Sequence
  Description of Artificial Sequence: Synthetic oligonucleotide
  Antisense strand to SEQ ID NO: 781862
uauuaaccuaaacucaaga

SEQ ID NO: 781864 - RNA, 19 nt, Artificial Sequence
  Description of Artificial Sequence: Synthetic oligonucleotide
  Sense strand starting at position 428 of SEQ ID NO: 587299
uuaauaggagacugguauu

SEQ ID NO: 781865 - RNA, 19 nt, Artificial Sequence
  Description of Artificial Sequence: Synthetic oligonucleotide
  Antisense strand to SEQ ID NO: 781864
aauaccagucuccuauuaa

SEQ ID NO: 781866 - RNA, 19 nt, Artificial Sequence
  Description of Artificial Sequence: Synthetic oligonucleotide
  Sense strand starting at position 837 of SEQ ID NO: 587299
cugggaaacagcuguaacu

SEQ ID NO: 781867 - RNA, 19 nt, Artificial Sequence
  Description of Artificial Sequence: Synthetic oligonucleotide
  Antisense strand to SEQ ID NO: 781866
aguuacagcuguuucccag

SEQ ID NO: 781868 - RNA, 19 nt, Artificial Sequence
  Description of Artificial Sequence: Synthetic oligonucleotide
  Sense strand starting at position 952 of SEQ ID NO: 587299
auguauauaucuguguaca

SEQ ID NO: 781869 - RNA, 19 nt, Artificial Sequence
  Description of Artificial Sequence: Synthetic oligonucleotide
  Antisense strand to SEQ ID NO: 781868
uguacacagauauauacau

SEQ ID NO: 781870 - RNA, 19 nt, Artificial Sequence
  Description of Artificial Sequence: Synthetic oligonucleotide
  Sense strand starting at position 954 of SEQ ID NO: 587299
guauauaucuguguacaua

SEQ ID NO: 781871 - RNA, 19 nt, Artificial Sequence
  Description of Artificial Sequence: Synthetic oligonucleotide
  Antisense strand to SEQ ID NO: 781870
uauguacacagauauauac

SEQ ID NO: 781872 - RNA, 19 nt, Artificial Sequence
  Description of Artificial Sequence: Synthetic oligonucleotide
  Sense strand starting at position 1079 of SEQ ID NO: 587299
gcccuaggucuuuaggaau

SEQ ID NO: 781873 - RNA, 19 nt, Artificial Sequence
  Description of Artificial Sequence: Synthetic oligonucleotide
  Antisense strand to SEQ ID NO: 781872
auuccuaaagaccuagggc

SEQ ID NO: 781874 - RNA, 19 nt, Artificial Sequence
  Description of Artificial Sequence: Synthetic oligonucleotide
  Sense strand starting at position 1159 of SEQ ID NO: 587299
gucugaaauuuaggacaug

SEQ ID NO: 781875 - RNA, 19 nt, Artificial Sequence
  Description of Artificial Sequence: Synthetic oligonucleotide
  Antisense strand to SEQ ID NO: 781874
cauguccuaaauuucagac

SEQ ID NO: 781876 - RNA, 19 nt, Artificial Sequence
  Description of Artificial Sequence: Synthetic oligonucleotide
  Sense strand starting at position 1160 of SEQ ID NO: 587299
ucugaaauuuaggacaugu

SEQ ID NO: 781877 - RNA, 19 nt, Artificial Sequence
  Description of Artificial Sequence: Synthetic oligonucleotide
  Antisense strand to SEQ ID NO: 781876
acauguccuaaauuucaga

SEQ ID NO: 781878 - RNA, 19 nt, Artificial Sequence
  Description of Artificial Sequence: Synthetic oligonucleotide
  Sense strand starting at position 1290 of SEQ ID NO: 587299
uccucagguguuuaguaaa

SEQ ID NO: 781879 - RNA, 19 nt, Artificial Sequence
  Description of Artificial Sequence: Synthetic oligonucleotide
  Antisense strand to SEQ ID NO: 781878
uuuacuaaacaccugagga

SEQ ID NO: 781880 - RNA, 19 nt, Artificial Sequence
  Description of Artificial Sequence: Synthetic oligonucleotide
  Sense strand starting at position 2333 of SEQ ID NO: 587299
ucauccguacuccaggaaa

SEQ ID NO: 781881 - RNA, 19 nt, Artificial Sequence
  Description of Artificial Sequence: Synthetic oligonucleotide
  Antisense strand to SEQ ID NO: 781880
uuuccuggaguacggauga

SEQ ID NO: 781882 - RNA, 19 nt, Artificial Sequence
  Description of Artificial Sequence: Synthetic oligonucleotide
  Sense strand starting at position 2335 of SEQ ID NO: 587299
auccguacuccaggaaaua

SEQ ID NO: 781883 - RNA, 19 nt, Artificial Sequence
  Description of Artificial Sequence: Synthetic oligonucleotide
  Antisense strand to SEQ ID NO: 781882
uauuuccuggaguacggau

SEQ ID NO: 781884 - RNA, 19 nt, Artificial Sequence
  Description of Artificial Sequence: Synthetic oligonucleotide
  Sense strand starting at position 2336 of SEQ ID NO: 587299
uccguacuccaggaaauac

SEQ ID NO: 781885 - RNA, 19 nt, Artificial Sequence
  Description of Artificial Sequence: Synthetic oligonucleotide
  Antisense strand to SEQ ID NO: 781884
guauuuccuggaguacgga

SEQ ID NO: 781886 - RNA, 19 nt, Artificial Sequence
  Description of Artificial Sequence: Synthetic oligonucleotide
  Sense strand starting at position 2455 of SEQ ID NO: 587299
ggaaucuucuuaguaucuu

SEQ ID NO: 781887 - RNA, 19 nt, Artificial Sequence
  Description of Artificial Sequence: Synthetic oligonucleotide
  Antisense strand to SEQ ID NO: 781886
aagauacuaagaagauucc

SEQ ID NO: 781888 - RNA, 19 nt, Artificial Sequence
  Description of Artificial Sequence: Synthetic oligonucleotide
  Sense strand starting at position 2511 of SEQ ID NO: 587299
uggaaacgaguuuggaaau

SEQ ID NO: 781889 - RNA, 19 nt, Artificial Sequence
  Description of Artificial Sequence: Synthetic oligonucleotide
  Antisense strand to SEQ ID NO: 781888
auuuccaaacucguuucca

SEQ ID NO: 781890 - RNA, 19 nt, Artificial Sequence
  Description of Artificial Sequence: Synthetic oligonucleotide
  Sense strand starting at position 2577 of SEQ ID NO: 587299
aaugguuguuaucuagaga

SEQ ID NO: 781891 - RNA, 19 nt, Artificial Sequence
  Description of Artificial Sequence: Synthetic oligonucleotide
  Antisense strand to SEQ ID NO: 781890
ucucuagauaacaaccauu

SEQ ID NO: 781892 - RNA, 19 nt, Artificial Sequence
  Description of Artificial Sequence: Synthetic oligonucleotide
  Sense strand starting at position 2580 of SEQ ID NO: 587299
gguuguuaucuagagaagu

SEQ ID NO: 781893 - RNA, 19 nt, Artificial Sequence
  Description of Artificial Sequence: Synthetic oligonucleotide
  Antisense strand to SEQ ID NO: 781892
acuucucuagauaacaacc

SEQ ID NO: 781894 - RNA, 19 nt, Artificial Sequence
  Description of Artificial Sequence: Synthetic oligonucleotide
  Sense strand starting at position 2593 of SEQ ID NO: 587299
agaaguagcuaugauuuag

SEQ ID NO: 781895 - RNA, 19 nt, Artificial Sequence
  Description of Artificial Sequence: Synthetic oligonucleotide
  Antisense strand to SEQ ID NO: 781894
cuaaaucauagcuacuucu

SEQ ID NO: 781896 - RNA, 19 nt, Artificial Sequence
  Description of Artificial Sequence: Synthetic oligonucleotide
  Sense strand starting at position 2688 of SEQ ID NO: 587299
ggguguucgcugucagagu

SEQ ID NO: 781897 - RNA, 19 nt, Artificial Sequence
  Description of Artificial Sequence: Synthetic oligonucleotide
  Antisense strand to SEQ ID NO: 781896
acucugacagcgaacaccc

SEQ ID NO: 781898 - RNA, 19 nt, Artificial Sequence
  Description of Artificial Sequence: Synthetic oligonucleotide
  Sense strand starting at position 2759 of SEQ ID NO: 587299
agugaaaucguguaaauaa

SEQ ID NO: 781899 - RNA, 19 nt, Artificial Sequence
  Description of Artificial Sequence: Synthetic oligonucleotide
  Antisense strand to SEQ ID NO: 781898
uuauuuacacgauuucacu

SEQ ID NO: 781900 - RNA, 19 nt, Artificial Sequence
  Description of Artificial Sequence: Synthetic oligonucleotide
  Sense strand starting at position 2828 of SEQ ID NO: 587299
uggcauuguuacccuuaaa

SEQ ID NO: 781901 - RNA, 19 nt, Artificial Sequence
  Description of Artificial Sequence: Synthetic oligonucleotide
  Antisense strand to SEQ ID NO: 781900
uuuaaggguaacaaugcca

SEQ ID NO: 781902 - RNA, 19 nt, Artificial Sequence
  Description of Artificial Sequence: Synthetic oligonucleotide
  Sense strand starting at position 2947 of SEQ ID NO: 587299
gaagauauaugugcacaau

SEQ ID NO: 781903 - RNA, 19 nt, Artificial Sequence
  Description of Artificial Sequence: Synthetic oligonucleotide
  Antisense strand to SEQ ID NO: 781902
auugugcacauauaucuuc

SEQ ID NO: 781904 - RNA, 19 nt, Artificial Sequence
  Description of Artificial Sequence: Synthetic oligonucleotide
  Sense strand starting at position 3104 of SEQ ID NO: 587299
aaaugauccguuugggaau

SEQ ID NO: 781905 - RNA, 19 nt, Artificial Sequence
  Description of Artificial Sequence: Synthetic oligonucleotide
  Antisense strand to SEQ ID NO: 781904
auucccaaacggaucauuu

SEQ ID NO: 781906 - RNA, 19 nt, Artificial Sequence
  Description of Artificial Sequence: Synthetic oligonucleotide
  Sense strand starting at position 3278 of SEQ ID NO: 587299
ugccacuuucuggaagguu

SEQ ID NO: 781907 - RNA, 19 nt, Artificial Sequence
  Description of Artificial Sequence: Synthetic oligonucleotide
  Antisense strand to SEQ ID NO: 781906
aaccuuccagaaaguggca

SEQ ID NO: 781908 - RNA, 19 nt, Artificial Sequence
  Description of Artificial Sequence: Synthetic oligonucleotide
  Sense strand starting at position 3281 of SEQ ID NO: 587299
cacuuucuggaagguuuaa

SEQ ID NO: 781909 - RNA, 19 nt, Artificial Sequence
  Description of Artificial Sequence: Synthetic oligonucleotide
  Antisense strand to SEQ ID NO: 781908
uuaaaccuuccagaaagug

SEQ ID NO: 781910 - RNA, 19 nt, Artificial Sequence
  Description of Artificial Sequence: Synthetic oligonucleotide
  Sense strand starting at position 3323 of SEQ ID NO: 587299
ccaacauuagcuuggagga

SEQ ID NO: 781911 - RNA, 19 nt, Artificial Sequence
  Description of Artificial Sequence: Synthetic oligonucleotide
  Antisense strand to SEQ ID NO: 781910
uccuccaagcuaauguugg

SEQ ID NO: 781912 - RNA, 19 nt, Artificial Sequence
  Description of Artificial Sequence: Synthetic oligonucleotide
  Sense strand starting at position 3324 of SEQ ID NO: 587299
caacauuagcuuggaggau

SEQ ID NO: 781913 - RNA, 19 nt, Artificial Sequence
  Description of Artificial Sequence: Synthetic oligonucleotide
  Antisense strand to SEQ ID NO: 781912
auccuccaagcuaauguug

SEQ ID NO: 781914 - RNA, 19 nt, Artificial Sequence
  Description of Artificial Sequence: Synthetic oligonucleotide
  Sense strand starting at position 3444 of SEQ ID NO: 587299
cuggguguucuuuagugga

SEQ ID NO: 781915 - RNA, 19 nt, Artificial Sequence
  Description of Artificial Sequence: Synthetic oligonucleotide
  Antisense strand to SEQ ID NO: 781914
uccacuaaagaacacccag

SEQ ID NO: 781916 - RNA, 19 nt, Artificial Sequence
  Description of Artificial Sequence: Synthetic oligonucleotide
  Sense strand starting at position 3464 of SEQ ID NO: 587299
ggucguuugcaucuuugca

SEQ ID NO: 781917 - RNA, 19 nt, Artificial Sequence
  Description of Artificial Sequence: Synthetic oligonucleotide
  Antisense strand to SEQ ID NO: 781916
ugcaaagaugcaaacgacc

SEQ ID NO: 781918 - RNA, 19 nt, Artificial Sequence
  Description of Artificial Sequence: Synthetic oligonucleotide
  Sense strand starting at position 3465 of SEQ ID NO: 587299
gucguuugcaucuuugcaa

SEQ ID NO: 781919 - RNA, 19 nt, Artificial Sequence
  Description of Artificial Sequence: Synthetic oligonucleotide
  Antisense strand to SEQ ID NO: 781918
uugcaaagaugcaaacgac

SEQ ID NO: 781920 - RNA, 19 nt, Artificial Sequence
  Description of Artificial Sequence: Synthetic oligonucleotide
  Sense strand starting at position 3742 of SEQ ID NO: 587299
cucugagcucaucagcaau

SEQ ID NO: 781921 - RNA, 19 nt, Artificial Sequence
  Description of Artificial Sequence: Synthetic oligonucleotide
  Antisense strand to SEQ ID NO: 781920
auugcugaugagcucagag

SEQ ID NO: 781922 - RNA, 19 nt, Artificial Sequence
  Description of Artificial Sequence: Synthetic oligonucleotide
  Sense strand starting at position 3779 of SEQ ID NO: 587299
cccaaaugugccuaaguau

SEQ ID NO: 781923 - RNA, 19 nt, Artificial Sequence
  Description of Artificial Sequence: Synthetic oligonucleotide
  Antisense strand to SEQ ID NO: 781922
auacuuaggcacauuuggg

SEQ ID NO: 781924 - RNA, 19 nt, Artificial Sequence
  Description of Artificial Sequence: Synthetic oligonucleotide
  Sense strand starting at position 3818 of SEQ ID NO: 587299
accaccaacuguguuuaaa

SEQ ID NO: 781925 - RNA, 19 nt, Artificial Sequence
  Description of Artificial Sequence: Synthetic oligonucleotide
  Antisense strand to SEQ ID NO: 781924
uuuaaacacaguugguggu

SEQ ID NO: 781926 - RNA, 19 nt, Artificial Sequence
  Description of Artificial Sequence: Synthetic oligonucleotide
  Sense strand starting at position 3877 of SEQ ID NO: 587299
ugguacaaucaccauggua

SEQ ID NO: 781927 - RNA, 19 nt, Artificial Sequence
  Description of Artificial Sequence: Synthetic oligonucleotide
  Antisense strand to SEQ ID NO: 781926
uaccauggugauuguacca

SEQ ID NO: 781928 - RNA, 19 nt, Artificial Sequence
  Description of Artificial Sequence: Synthetic oligonucleotide
  Sense strand starting at position 3 of SEQ ID NO: 587300
caauauuagagguggugau

SEQ ID NO: 781929 - RNA, 19 nt, Artificial Sequence
  Description of Artificial Sequence: Synthetic oligonucleotide
  Antisense strand to SEQ ID NO: 781928
aucaccaccucuaauauug

SEQ ID NO: 781930 - RNA, 19 nt, Artificial Sequence
  Description of Artificial Sequence: Synthetic oligonucleotide
  Sense strand starting at position 16 of SEQ ID NO: 587300
ggugaucugcuauauaaua

SEQ ID NO: 781931 - RNA, 19 nt, Artificial Sequence
  Description of Artificial Sequence: Synthetic oligonucleotide
  Antisense strand to SEQ ID NO: 781930
uauuauauagcagaucacc

SEQ ID NO: 781932 - RNA, 19 nt, Artificial Sequence
  Description of Artificial Sequence: Synthetic oligonucleotide
  Sense strand starting at position 90 of SEQ ID NO: 587300
accauuaacguguaacuca

SEQ ID NO: 781933 - RNA, 19 nt, Artificial Sequence
  Description of Artificial Sequence: Synthetic oligonucleotide
  Antisense strand to SEQ ID NO: 781932
ugaguuacacguuaauggu

SEQ ID NO: 781934 - RNA, 19 nt, Artificial Sequence
  Description of Artificial Sequence: Synthetic oligonucleotide
  Sense strand starting at position 280 of SEQ ID NO: 587300
gggagucauuuauaauuaa

SEQ ID NO: 781935 - RNA, 19 nt, Artificial Sequence
  Description of Artificial Sequence: Synthetic oligonucleotide
  Antisense strand to SEQ ID NO: 781934
uuaauuauaaaugacuccc

SEQ ID NO: 781936 - RNA, 19 nt, Artificial Sequence
  Description of Artificial Sequence: Synthetic oligonucleotide
  Sense strand starting at position 366 of SEQ ID NO: 587300
ucaauugcugcccaucaga

SEQ ID NO: 781937 - RNA, 19 nt, Artificial Sequence
  Description of Artificial Sequence: Synthetic oligonucleotide
  Antisense strand to SEQ ID NO: 781936
ucugaugggcagcaauuga

SEQ ID NO: 781938 - RNA, 19 nt, Artificial Sequence
  Description of Artificial Sequence: Synthetic oligonucleotide
  Sense strand starting at position 374 of SEQ ID NO: 587300
ugcccaucagaguaucacu

SEQ ID NO: 781939 - RNA, 19 nt, Artificial Sequence
  Description of Artificial Sequence: Synthetic oligonucleotide
  Antisense strand to SEQ ID NO: 781938
agugauacucugaugggca

SEQ ID NO: 781940 - RNA, 19 nt, Artificial Sequence
  Description of Artificial Sequence: Synthetic oligonucleotide
  Sense strand starting at position 619 of SEQ ID NO: 587300
ccauaaucugcagaucugu

SEQ ID NO: 781941 - RNA, 19 nt, Artificial Sequence
  Description of Artificial Sequence: Synthetic oligonucleotide
  Antisense strand to SEQ ID NO: 781940
acagaucugcagauuaugg

SEQ ID NO: 781942 - RNA, 19 nt, Artificial Sequence
  Description of Artificial Sequence: Synthetic oligonucleotide
  Sense strand starting at position 979 of SEQ ID NO: 587300
auuucucuguauucgaguu

SEQ ID NO: 781943 - RNA, 19 nt, Artificial Sequence
  Description of Artificial Sequence: Synthetic oligonucleotide
  Antisense strand to SEQ ID NO: 781942
aacucgaauacagagaaau

SEQ ID NO: 781944 - RNA, 19 nt, Artificial Sequence
  Description of Artificial Sequence: Synthetic oligonucleotide
  Sense strand starting at position 1034 of SEQ ID NO: 587300
acguuuacauuacccagaa

SEQ ID NO: 781945 - RNA, 19 nt, Artificial Sequence
  Description of Artificial Sequence: Synthetic oligonucleotide
  Antisense strand to SEQ ID NO: 781944
uucuggguaauguaaacgu

SEQ ID NO: 781946 - RNA, 19 nt, Artificial Sequence
  Description of Artificial Sequence: Synthetic oligonucleotide
  Sense strand starting at position 1035 of SEQ ID NO: 587300
cguuuacauuacccagaaa

SEQ ID NO: 781947 - RNA, 19 nt, Artificial Sequence
  Description of Artificial Sequence: Synthetic oligonucleotide
  Antisense strand to SEQ ID NO: 781946
uuucuggguaauguaaacg

SEQ ID NO: 781948 - RNA, 19 nt, Artificial Sequence
  Description of Artificial Sequence: Synthetic oligonucleotide
  Sense strand starting at position 1500 of SEQ ID NO: 587300
auuaccguuccuggaaaga

SEQ ID NO: 781949 - RNA, 19 nt, Artificial Sequence
  Description of Artificial Sequence: Synthetic oligonucleotide
  Antisense strand to SEQ ID NO: 781948
ucuuuccaggaacgguaau

SEQ ID NO: 781950 - RNA, 19 nt, Artificial Sequence
  Description of Artificial Sequence: Synthetic oligonucleotide
  Sense strand starting at position 1534 of SEQ ID NO: 587300
uugggauuacgguggaaac

SEQ ID NO: 781951 - RNA, 19 nt, Artificial Sequence
  Description of Artificial Sequence: Synthetic oligonucleotide
  Antisense strand to SEQ ID NO: 781950
guuuccaccguaaucccaa

SEQ ID NO: 781952 - RNA, 19 nt, Artificial Sequence
  Description of Artificial Sequence: Synthetic oligonucleotide
  Sense strand starting at position 1535 of SEQ ID NO: 587300
ugggauuacgguggaaaca

SEQ ID NO: 781953 - RNA, 19 nt, Artificial Sequence
  Description of Artificial Sequence: Synthetic oligonucleotide
  Antisense strand to SEQ ID NO: 781952
uguuuccaccguaauccca

SEQ ID NO: 781954 - RNA, 19 nt, Artificial Sequence
  Description of Artificial Sequence: Synthetic oligonucleotide
  Sense strand starting at position 1704 of SEQ ID NO: 587300
cgggucuugaaacaguuaa

SEQ ID NO: 781955 - RNA, 19 nt, Artificial Sequence
  Description of Artificial Sequence: Synthetic oligonucleotide
  Antisense strand to SEQ ID NO: 781954
uuaacuguuucaagacccg

SEQ ID NO: 781956 - RNA, 19 nt, Artificial Sequence
  Description of Artificial Sequence: Synthetic oligonucleotide
  Sense strand starting at position 2192 of SEQ ID NO: 587300
gggagauccuuugcucaga

SEQ ID NO: 781957 - RNA, 19 nt, Artificial Sequence
  Description of Artificial Sequence: Synthetic oligonucleotide
  Antisense strand to SEQ ID NO: 781956
ucugagcaaaggaucuccc

SEQ ID NO: 781958 - RNA, 19 nt, Artificial Sequence
  Description of Artificial Sequence: Synthetic oligonucleotide
  Sense strand starting at position 2194 of SEQ ID NO: 587300
gagauccuuugcucagaga

SEQ ID NO: 781959 - RNA, 19 nt, Artificial Sequence
  Description of Artificial Sequence: Synthetic oligonucleotide
  Antisense strand to SEQ ID NO: 781958
ucucugagcaaaggaucuc

SEQ ID NO: 781960 - RNA, 19 nt, Artificial Sequence
  Description of Artificial Sequence: Synthetic oligonucleotide
  Sense strand starting at position 2195 of SEQ ID NO: 587300
agauccuuugcucagagau

SEQ ID NO: 781961 - RNA, 19 nt, Artificial Sequence
  Description of Artificial Sequence: Synthetic oligonucleotide
  Antisense strand to SEQ ID NO: 781960
aucucugagcaaaggaucu

SEQ ID NO: 781962 - RNA, 19 nt, Artificial Sequence
  Description of Artificial Sequence: Synthetic oligonucleotide
  Sense strand starting at position 2250 of SEQ ID NO: 587300
ccuccuaguccaggaagaa

SEQ ID NO: 781963 - RNA, 19 nt, Artificial Sequence
  Description of Artificial Sequence: Synthetic oligonucleotide
  Antisense strand to SEQ ID NO: 781962
uucuuccuggacuaggagg

SEQ ID NO: 781964 - RNA, 19 nt, Artificial Sequence
  Description of Artificial Sequence: Synthetic oligonucleotide
  Sense strand starting at position 2296 of SEQ ID NO: 587300
ucuuguuaucuagagaggu

SEQ ID NO: 781965 - RNA, 19 nt, Artificial Sequence
  Description of Artificial Sequence: Synthetic oligonucleotide
  Antisense strand to SEQ ID NO: 781964
accucucuagauaacaaga

SEQ ID NO: 781966 - RNA, 19 nt, Artificial Sequence
  Description of Artificial Sequence: Synthetic oligonucleotide
  Sense strand starting at position 2298 of SEQ ID NO: 587300
uuguuaucuagagagguuu

SEQ ID NO: 781967 - RNA, 19 nt, Artificial Sequence
  Description of Artificial Sequence: Synthetic oligonucleotide
  Antisense strand to SEQ ID NO: 781966
aaaccucucuagauaacaa

SEQ ID NO: 781968 - RNA, 19 nt, Artificial Sequence
  Description of Artificial Sequence: Synthetic oligonucleotide
  Sense strand starting at position 2300 of SEQ ID NO: 587300
guuaucuagagagguuuaa

SEQ ID NO: 781969 - RNA, 19 nt, Artificial Sequence
  Description of Artificial Sequence: Synthetic oligonucleotide
  Antisense strand to SEQ ID NO: 781968
uuaaaccucucuagauaac

SEQ ID NO: 781970 - RNA, 19 nt, Artificial Sequence
  Description of Artificial Sequence: Synthetic oligonucleotide
  Sense strand starting at position 2337 of SEQ ID NO: 587300
aaagcugaugacggguaaa

SEQ ID NO: 781971 - RNA, 19 nt, Artificial Sequence
  Description of Artificial Sequence: Synthetic oligonucleotide
  Antisense strand to SEQ ID NO: 781970
uuuacccgucaucagcuuu

SEQ ID NO: 781972 - RNA, 19 nt, Artificial Sequence
  Description of Artificial Sequence: Synthetic oligonucleotide
  Sense strand starting at position 2439 of SEQ ID NO: 587300
cuuggcacgcauuagaaua

SEQ ID NO: 781973 - RNA, 19 nt, Artificial Sequence
  Description of Artificial Sequence: Synthetic oligonucleotide
  Antisense strand to SEQ ID NO: 781972
uauucuaaugcgugccaag

SEQ ID NO: 781974 - RNA, 19 nt, Artificial Sequence
  Description of Artificial Sequence: Synthetic oligonucleotide
  Sense strand starting at position 2465 of SEQ ID NO: 587300
uaauguauacaaugaguug

SEQ ID NO: 781975 - RNA, 19 nt, Artificial Sequence
  Description of Artificial Sequence: Synthetic oligonucleotide
  Antisense strand to SEQ ID NO: 781974
caacucauuguauacauua

SEQ ID NO: 781976 - RNA, 19 nt, Artificial Sequence
  Description of Artificial Sequence: Synthetic oligonucleotide
  Sense strand starting at position 2468 of SEQ ID NO: 587300
uguauacaaugaguugauu

SEQ ID NO: 781977 - RNA, 19 nt, Artificial Sequence
  Description of Artificial Sequence: Synthetic oligonucleotide
  Antisense strand to SEQ ID NO: 781976
aaucaacucauuguauaca

SEQ ID NO: 781978 - RNA, 19 nt, Artificial Sequence
  Description of Artificial Sequence: Synthetic oligonucleotide
  Sense strand starting at position 2476 of SEQ ID NO: 587300
augaguugauugcuaucaa

SEQ ID NO: 781979 - RNA, 19 nt, Artificial Sequence
  Description of Artificial Sequence: Synthetic oligonucleotide
  Antisense strand to SEQ ID NO: 781978
uugauagcaaucaacucau

SEQ ID NO: 781980 - RNA, 19 nt, Artificial Sequence
  Description of Artificial Sequence: Synthetic oligonucleotide
  Sense strand starting at position 2518 of SEQ ID NO: 587300
augucaauguuucuuaaga

SEQ ID NO: 781981 - RNA, 19 nt, Artificial Sequence
  Description of Artificial Sequence: Synthetic oligonucleotide
  Antisense strand to SEQ ID NO: 781980
ucuuaagaaacauugacau

SEQ ID NO: 781982 - RNA, 19 nt, Artificial Sequence
  Description of Artificial Sequence: Synthetic oligonucleotide
  Sense strand starting at position 2528 of SEQ ID NO: 587300
uucuuaagaugguuucuau

SEQ ID NO: 781983 - RNA, 19 nt, Artificial Sequence
  Description of Artificial Sequence: Synthetic oligonucleotide
  Antisense strand to SEQ ID NO: 781982
auagaaaccaucuuaagaa

SEQ ID NO: 781984 - RNA, 19 nt, Artificial Sequence
  Description of Artificial Sequence: Synthetic oligonucleotide
  Sense strand starting at position 2697 of SEQ ID NO: 587300
uucaguuuagaaggaguga

SEQ ID NO: 781985 - RNA, 19 nt, Artificial Sequence
  Description of Artificial Sequence: Synthetic oligonucleotide
  Antisense strand to SEQ ID NO: 781984
ucacuccuucuaaacugaa

SEQ ID NO: 781986 - RNA, 19 nt, Artificial Sequence
  Description of Artificial Sequence: Synthetic oligonucleotide
  Sense strand starting at position 3067 of SEQ ID NO: 587300
uaaguacuucuggaguauu

SEQ ID NO: 781987 - RNA, 19 nt, Artificial Sequence
  Description of Artificial Sequence: Synthetic oligonucleotide
  Antisense strand to SEQ ID NO: 781986
aauacuccagaaguacuua

SEQ ID NO: 781988 - RNA, 19 nt, Artificial Sequence
  Description of Artificial Sequence: Synthetic oligonucleotide
  Sense strand starting at position 3080 of SEQ ID NO: 587300
aguauuuggcuuugagucu

SEQ ID NO: 781989 - RNA, 19 nt, Artificial Sequence
  Description of Artificial Sequence: Synthetic oligonucleotide
  Antisense strand to SEQ ID NO: 781988
agacucaaagccaaauacu

SEQ ID NO: 781990 - RNA, 19 nt, Artificial Sequence
  Description of Artificial Sequence: Synthetic oligonucleotide
  Sense strand starting at position 3193 of SEQ ID NO: 587300
ccaauauaagcuuaaagug

SEQ ID NO: 781991 - RNA, 19 nt, Artificial Sequence
  Description of Artificial Sequence: Synthetic oligonucleotide
  Antisense strand to SEQ ID NO: 781990
cacuuuaagcuuauauugg

SEQ ID NO: 781992 - RNA, 19 nt, Artificial Sequence
  Description of Artificial Sequence: Synthetic oligonucleotide
  Sense strand starting at position 3552 of SEQ ID NO: 587300
cuuaaccuuguguaauuga

SEQ ID NO: 781993 - RNA, 19 nt, Artificial Sequence
  Description of Artificial Sequence: Synthetic oligonucleotide
  Antisense strand to SEQ ID NO: 781992
ucaauuacacaagguuaag

SEQ ID NO: 781994 - RNA, 19 nt, Artificial Sequence
  Description of Artificial Sequence: Synthetic oligonucleotide
  Sense strand starting at position 3600 of SEQ ID NO: 587300
agauuagggcucuauccau

SEQ ID NO: 781995 - RNA, 19 nt, Artificial Sequence
  Description of Artificial Sequence: Synthetic oligonucleotide
  Antisense strand to SEQ ID NO: 781994
auggauagagcccuaaucu

SEQ ID NO: 781996 - RNA, 19 nt, Artificial Sequence
  Description of Artificial Sequence: Synthetic oligonucleotide
  Sense strand starting at position 3764 of SEQ ID NO: 587300
ucugauucucacugauggu

SEQ ID NO: 781997 - RNA, 19 nt, Artificial Sequence
  Description of Artificial Sequence: Synthetic oligonucleotide
  Antisense strand to SEQ ID NO: 781996
accaucagugagaaucaga

SEQ ID NO: 781998 - RNA, 19 nt, Artificial Sequence
  Description of Artificial Sequence: Synthetic oligonucleotide
  Sense strand starting at position 3823 of SEQ ID NO: 587300
aaauauagugugugaacuu

SEQ ID NO: 781999 - RNA, 19 nt, Artificial Sequence
  Description of Artificial Sequence: Synthetic oligonucleotide
  Antisense strand to SEQ ID NO: 781998
aaguucacacacuauauuu

SEQ ID NO: 782000 - RNA, 19 nt, Artificial Sequence
  Description of Artificial Sequence: Synthetic oligonucleotide
  Sense strand starting at position 3844 of SEQ ID NO: 587300
agaccagcgcuagagaaua

SEQ ID NO: 782001 - RNA, 19 nt, Artificial Sequence
  Description of Artificial Sequence: Synthetic oligonucleotide
  Antisense strand to SEQ ID NO: 782000
uauucucuagcgcuggucu

SEQ ID NO: 782002 - RNA, 19 nt, Artificial Sequence
  Description of Artificial Sequence: Synthetic oligonucleotide
  Sense strand starting at position 3857 of SEQ ID NO: 587300
agaauaaacuuugaagaga

SEQ ID NO: 782003 - RNA, 19 nt, Artificial Sequence
  Description of Artificial Sequence: Synthetic oligonucleotide
  Antisense strand to SEQ ID NO: 782002
ucucuucaaaguuuauucu

SEQ ID NO: 782004 - RNA, 19 nt, Artificial Sequence
  Description of Artificial Sequence: Synthetic oligonucleotide
  Sense strand starting at position 3878 of SEQ ID NO: 587300
gugagaaugcagugacuaa

SEQ ID NO: 782005 - RNA, 19 nt, Artificial Sequence
  Description of Artificial Sequence: Synthetic oligonucleotide
  Antisense strand to SEQ ID NO: 782004
uuagucacugcauucucac

SEQ ID NO: 782006 - RNA, 19 nt, Artificial Sequence
  Description of Artificial Sequence: Synthetic oligonucleotide
  Sense strand starting at position 3942 of SEQ ID NO: 587300
gcuaacaaugucuagacuu

SEQ ID NO: 782007 - RNA, 19 nt, Artificial Sequence
  Description of Artificial Sequence: Synthetic oligonucleotide
  Antisense strand to SEQ ID NO: 782006
aagucuagacauuguuagc

SEQ ID NO: 782008 - RNA, 19 nt, Artificial Sequence
  Description of Artificial Sequence: Synthetic oligonucleotide
  Sense strand starting at position 190 of SEQ ID NO: 587301
ggccuuucccaucaagauu

SEQ ID NO: 782009 - RNA, 19 nt, Artificial Sequence
  Description of Artificial Sequence: Synthetic oligonucleotide
  Antisense strand to SEQ ID NO: 782008
aaucuugaugggaaaggcc

SEQ ID NO: 782010 - RNA, 19 nt, Artificial Sequence
  Description of Artificial Sequence: Synthetic oligonucleotide
  Sense strand starting at position 482 of SEQ ID NO: 587301
ccaugaaggucucaucuca

SEQ ID NO: 782011 - RNA, 19 nt, Artificial Sequence
  Description of Artificial Sequence: Synthetic oligonucleotide
  Antisense strand to SEQ ID NO: 782010
ugagaugagaccuucaugg

SEQ ID NO: 782012 - RNA, 19 nt, Artificial Sequence
  Description of Artificial Sequence: Synthetic oligonucleotide
  Sense strand starting at position 517 of SEQ ID NO: 587301
agcguacugcaucaagagu

SEQ ID NO: 782013 - RNA, 19 nt, Artificial Sequence
  Description of Artificial Sequence: Synthetic oligonucleotide
  Antisense strand to SEQ ID NO: 782012
acucuugaugcaguacgcu

SEQ ID NO: 782014 - RNA, 19 nt, Artificial Sequence
  Description of Artificial Sequence: Synthetic oligonucleotide
  Sense strand starting at position 526 of SEQ ID NO: 587301
caucaagaguucgcacaga

SEQ ID NO: 782015 - RNA, 19 nt, Artificial Sequence
  Description of Artificial Sequence: Synthetic oligonucleotide
  Antisense strand to SEQ ID NO: 782014
ucugugcgaacucuugaug

SEQ ID NO: 782016 - RNA, 19 nt, Artificial Sequence
  Description of Artificial Sequence: Synthetic oligonucleotide
  Sense strand starting at position 531 of SEQ ID NO: 587301
agaguucgcacagagugaa

SEQ ID NO: 782017 - RNA, 19 nt, Artificial Sequence
  Description of Artificial Sequence: Synthetic oligonucleotide
  Antisense strand to SEQ ID NO: 782016
uucacucugugcgaacucu

SEQ ID NO: 782018 - RNA, 19 nt, Artificial Sequence
  Description of Artificial Sequence: Synthetic oligonucleotide
  Sense strand starting at position 561 of SEQ ID NO: 587301
gugggcauacuccaucauu

SEQ ID NO: 782019 - RNA, 19 nt, Artificial Sequence
  Description of Artificial Sequence: Synthetic oligonucleotide
  Antisense strand to SEQ ID NO: 782018
aaugauggaguaugcccac

SEQ ID NO: 782020 - RNA, 19 nt, Artificial Sequence
  Description of Artificial Sequence: Synthetic oligonucleotide
  Sense strand starting at position 588 of SEQ ID NO: 587301
gggcauguuugagcugguu

SEQ ID NO: 782021 - RNA, 19 nt, Artificial Sequence
  Description of Artificial Sequence: Synthetic oligonucleotide
  Antisense strand to SEQ ID NO: 782020
aaccagcucaaacaugccc

SEQ ID NO: 782022 - RNA, 19 nt, Artificial Sequence
  Description of Artificial Sequence: Synthetic oligonucleotide
  Sense strand starting at position 590 of SEQ ID NO: 587301
gcauguuugagcugguucu

SEQ ID NO: 782023 - RNA, 19 nt, Artificial Sequence
  Description of Artificial Sequence: Synthetic oligonucleotide
  Antisense strand to SEQ ID NO: 782022
agaaccagcucaaacaugc

SEQ ID NO: 782024 - RNA, 19 nt, Artificial Sequence
  Description of Artificial Sequence: Synthetic oligonucleotide
  Sense strand starting at position 600 of SEQ ID NO: 587301
gcugguucuugacccacaa

SEQ ID NO: 782025 - RNA, 19 nt, Artificial Sequence
  Description of Artificial Sequence: Synthetic oligonucleotide
  Antisense strand to SEQ ID NO: 782024
uugugggucaagaaccagc

SEQ ID NO: 782026 - RNA, 19 nt, Artificial Sequence
  Description of Artificial Sequence: Synthetic oligonucleotide
  Sense strand starting at position 604 of SEQ ID NO: 587301
guucuugacccacaagcuu

SEQ ID NO: 782027 - RNA, 19 nt, Artificial Sequence
  Description of Artificial Sequence: Synthetic oligonucleotide
  Antisense strand to SEQ ID NO: 782026
aagcuugugggucaagaac

SEQ ID NO: 782028 - RNA, 19 nt, Artificial Sequence
  Description of Artificial Sequence: Synthetic oligonucleotide
  Sense strand starting at position 668 of SEQ ID NO: 587301
uuucccuggagcgagaaau

SEQ ID NO: 782029 - RNA, 19 nt, Artificial Sequence
  Description of Artificial Sequence: Synthetic oligonucleotide
  Antisense strand to SEQ ID NO: 782028
auuucucgcuccagggaaa

SEQ ID NO: 782030 - RNA, 19 nt, Artificial Sequence
  Description of Artificial Sequence: Synthetic oligonucleotide
  Sense strand starting at position 817 of SEQ ID NO: 587301
ggcugaaacuuacuacaag

SEQ ID NO: 782031 - RNA, 19 nt, Artificial Sequence
  Description of Artificial Sequence: Synthetic oligonucleotide
  Antisense strand to SEQ ID NO: 782030
cuuguaguaaguuucagcc

SEQ ID NO: 782032 - RNA, 19 nt, Artificial Sequence
  Description of Artificial Sequence: Synthetic oligonucleotide
  Sense strand starting at position 991 of SEQ ID NO: 587301
gcacgagucaaccaaagga

SEQ ID NO: 782033 - RNA, 19 nt, Artificial Sequence
  Description of Artificial Sequence: Synthetic oligonucleotide
  Antisense strand to SEQ ID NO: 782032
uccuuugguugacucgugc

SEQ ID NO: 782034 - RNA, 19 nt, Artificial Sequence
  Description of Artificial Sequence: Synthetic oligonucleotide
  Sense strand starting at position 1001 of SEQ ID NO: 587301
accaaaggaugugguaaau

SEQ ID NO: 782035 - RNA, 19 nt, Artificial Sequence
  Description of Artificial Sequence: Synthetic oligonucleotide
  Antisense strand to SEQ ID NO: 782034
auuuaccacauccuuuggu

SEQ ID NO: 782036 - RNA, 19 nt, Artificial Sequence
  Description of Artificial Sequence: Synthetic oligonucleotide
  Sense strand starting at position 1149 of SEQ ID NO: 587301
agcacauacuucccaggau

SEQ ID NO: 782037 - RNA, 19 nt, Artificial Sequence
  Description of Artificial Sequence: Synthetic oligonucleotide
  Antisense strand to SEQ ID NO: 782036
auccugggaaguaugugcu

SEQ ID NO: 782038 - RNA, 19 nt, Artificial Sequence
  Description of Artificial Sequence: Synthetic oligonucleotide
  Sense strand starting at position 1188 of SEQ ID NO: 587301
gugaucaccugagaaguug

SEQ ID NO: 782039 - RNA, 19 nt, Artificial Sequence
  Description of Artificial Sequence: Synthetic oligonucleotide
  Antisense strand to SEQ ID NO: 782038
caacuucucaggugaucac

SEQ ID NO: 782040 - RNA, 19 nt, Artificial Sequence
  Description of Artificial Sequence: Synthetic oligonucleotide
  Sense strand starting at position 1335 of SEQ ID NO: 587301
uuccaucuauacccggaaa

SEQ ID NO: 782041 - RNA, 19 nt, Artificial Sequence
  Description of Artificial Sequence: Synthetic oligonucleotide
  Antisense strand to SEQ ID NO: 782040
uuuccggguauagauggaa

SEQ ID NO: 782042 - RNA, 19 nt, Artificial Sequence
  Description of Artificial Sequence: Synthetic oligonucleotide
  Sense strand starting at position 1354 of SEQ ID NO: 587301
aguggagaaucuuaaguaa

SEQ ID NO: 782043 - RNA, 19 nt, Artificial Sequence
  Description of Artificial Sequence: Synthetic oligonucleotide
  Antisense strand to SEQ ID NO: 782042
uuacuuaagauucuccacu

SEQ ID NO: 782044 - RNA, 19 nt, Artificial Sequence
  Description of Artificial Sequence: Synthetic oligonucleotide
  Sense strand starting at position 1391 of SEQ ID NO: 587301
ggagguggguaauaagaau

SEQ ID NO: 782045 - RNA, 19 nt, Artificial Sequence
  Description of Artificial Sequence: Synthetic oligonucleotide
  Antisense strand to SEQ ID NO: 782044
auucuuauuacccaccucc

SEQ ID NO: 782046 - RNA, 19 nt, Artificial Sequence
  Description of Artificial Sequence: Synthetic oligonucleotide
  Sense strand starting at position 1473 of SEQ ID NO: 587301
uccaguuugcccugacaau

SEQ ID NO: 782047 - RNA, 19 nt, Artificial Sequence
  Description of Artificial Sequence: Synthetic oligonucleotide
  Antisense strand to SEQ ID NO: 782046
auugucagggcaaacugga

SEQ ID NO: 782048 - RNA, 19 nt, Artificial Sequence
  Description of Artificial Sequence: Synthetic oligonucleotide
  Sense strand starting at position 1474 of SEQ ID NO: 587301
ccaguuugcccugacaaua

SEQ ID NO: 782049 - RNA, 19 nt, Artificial Sequence
  Description of Artificial Sequence: Synthetic oligonucleotide
  Antisense strand to SEQ ID NO: 782048
uauugucagggcaaacugg

SEQ ID NO: 782050 - RNA, 19 nt, Artificial Sequence
  Description of Artificial Sequence: Synthetic oligonucleotide
  Sense strand starting at position 1492 of SEQ ID NO: 587301
aaccuaguggugcaugaua

SEQ ID NO: 782051 - RNA, 19 nt, Artificial Sequence
  Description of Artificial Sequence: Synthetic oligonucleotide
  Antisense strand to SEQ ID NO: 782050
uaucaugcaccacuagguu

SEQ ID NO: 782052 - RNA, 19 nt, Artificial Sequence
  Description of Artificial Sequence: Synthetic oligonucleotide
  Sense strand starting at position 1494 of SEQ ID NO: 587301
ccuaguggugcaugauacu

SEQ ID NO: 782053 - RNA, 19 nt, Artificial Sequence
  Description of Artificial Sequence: Synthetic oligonucleotide
  Antisense strand to SEQ ID NO: 782052
aguaucaugcaccacuagg

SEQ ID NO: 782054 - RNA, 19 nt, Artificial Sequence
  Description of Artificial Sequence: Synthetic oligonucleotide
  Sense strand starting at position 2433 of SEQ ID NO: 587301
ucgguaguguccucgcuaa

SEQ ID NO: 782055 - RNA, 19 nt, Artificial Sequence
  Description of Artificial Sequence: Synthetic oligonucleotide
  Antisense strand to SEQ ID NO: 782054
uuagcgaggacacuaccga

SEQ ID NO: 782056 - RNA, 19 nt, Artificial Sequence
  Description of Artificial Sequence: Synthetic oligonucleotide
  Sense strand starting at position 2437 of SEQ ID NO: 587301
uaguguccucgcuaaagaa

SEQ ID NO: 782057 - RNA, 19 nt, Artificial Sequence
  Description of Artificial Sequence: Synthetic oligonucleotide
  Antisense strand to SEQ ID NO: 782056
uucuuuagcgaggacacua

SEQ ID NO: 782058 - RNA, 19 nt, Artificial Sequence
  Description of Artificial Sequence: Synthetic oligonucleotide
  Sense strand starting at position 2465 of SEQ ID NO: 587301
gaaagaaggcuucggauca

SEQ ID NO: 782059 - RNA, 19 nt, Artificial Sequence
  Description of Artificial Sequence: Synthetic oligonucleotide
  Antisense strand to SEQ ID NO: 782058
ugauccgaagccuucuuuc

SEQ ID NO: 782060 - RNA, 19 nt, Artificial Sequence
  Description of Artificial Sequence: Synthetic oligonucleotide
  Sense strand starting at position 2466 of SEQ ID NO: 587301
aaagaaggcuucggaucau

SEQ ID NO: 782061 - RNA, 19 nt, Artificial Sequence
  Description of Artificial Sequence: Synthetic oligonucleotide
  Antisense strand to SEQ ID NO: 782060
augauccgaagccuucuuu

SEQ ID NO: 782062 - RNA, 19 nt, Artificial Sequence
  Description of Artificial Sequence: Synthetic oligonucleotide
  Sense strand starting at position 2622 of SEQ ID NO: 587301
gaugccuaucagugaccau

SEQ ID NO: 782063 - RNA, 19 nt, Artificial Sequence
  Description of Artificial Sequence: Synthetic oligonucleotide
  Antisense strand to SEQ ID NO: 782062
auggucacugauaggcauc

SEQ ID NO: 782064 - RNA, 19 nt, Artificial Sequence
  Description of Artificial Sequence: Synthetic oligonucleotide
  Sense strand starting at position 2632 of SEQ ID NO: 587301
agugaccauuucuaagaga

SEQ ID NO: 782065 - RNA, 19 nt, Artificial Sequence
  Description of Artificial Sequence: Synthetic oligonucleotide
  Antisense strand to SEQ ID NO: 782064
ucucuuagaaauggucacu

SEQ ID NO: 782066 - RNA, 19 nt, Artificial Sequence
  Description of Artificial Sequence: Synthetic oligonucleotide
  Sense strand starting at position 2646 of SEQ ID NO: 587301
agagacauuccuggucuga

SEQ ID NO: 782067 - RNA, 19 nt, Artificial Sequence
  Description of Artificial Sequence: Synthetic oligonucleotide
  Antisense strand to SEQ ID NO: 782066
ucagaccaggaaugucucu

SEQ ID NO: 782068 - RNA, 19 nt, Artificial Sequence
  Description of Artificial Sequence: Synthetic oligonucleotide
  Sense strand starting at position 2648 of SEQ ID NO: 587301
agacauuccuggucugacu

SEQ ID NO: 782069 - RNA, 19 nt, Artificial Sequence
  Description of Artificial Sequence: Synthetic oligonucleotide
  Antisense strand to SEQ ID NO: 782068
agucagaccaggaaugucu

SEQ ID NO: 782070 - RNA, 19 nt, Artificial Sequence
  Description of Artificial Sequence: Synthetic oligonucleotide
  Sense strand starting at position 2684 of SEQ ID NO: 587301
ugccuagccagucaggaau

SEQ ID NO: 782071 - RNA, 19 nt, Artificial Sequence
  Description of Artificial Sequence: Synthetic oligonucleotide
  Antisense strand to SEQ ID NO: 782070
auuccugacuggcuaggca

SEQ ID NO: 782072 - RNA, 19 nt, Artificial Sequence
  Description of Artificial Sequence: Synthetic oligonucleotide
  Sense strand starting at position 2697 of SEQ ID NO: 587301
aggaaucagugcccuaauu

SEQ ID NO: 782073 - RNA, 19 nt, Artificial Sequence
  Description of Artificial Sequence: Synthetic oligonucleotide
  Antisense strand to SEQ ID NO: 782072
aauuagggcacugauuccu

SEQ ID NO: 782074 - RNA, 19 nt, Artificial Sequence
  Description of Artificial Sequence: Synthetic oligonucleotide
  Sense strand starting at position 3825 of SEQ ID NO: 587301
acucgauccuguggaauga

SEQ ID NO: 782075 - RNA, 19 nt, Artificial Sequence
  Description of Artificial Sequence: Synthetic oligonucleotide
  Antisense strand to SEQ ID NO: 782074
ucauuccacaggaucgagu

SEQ ID NO: 782076 - RNA, 19 nt, Artificial Sequence
  Description of Artificial Sequence: Synthetic oligonucleotide
  Sense strand starting at position 3826 of SEQ ID NO: 587301
cucgauccuguggaaugaa

SEQ ID NO: 782077 - RNA, 19 nt, Artificial Sequence
  Description of Artificial Sequence: Synthetic oligonucleotide
  Antisense strand to SEQ ID NO: 782076
uucauuccacaggaucgag

SEQ ID NO: 782078 - RNA, 19 nt, Artificial Sequence
  Description of Artificial Sequence: Synthetic oligonucleotide
  Sense strand starting at position 3879 of SEQ ID NO: 587301
uaacaauggcccuagaguu

SEQ ID NO: 782079 - RNA, 19 nt, Artificial Sequence
  Description of Artificial Sequence: Synthetic oligonucleotide
  Antisense strand to SEQ ID NO: 782078
aacucuagggccauuguua

SEQ ID NO: 782080 - RNA, 19 nt, Artificial Sequence
  Description of Artificial Sequence: Synthetic oligonucleotide
  Sense strand starting at position 3885 of SEQ ID NO: 587301
uggcccuagaguugagaga

SEQ ID NO: 782081 - RNA, 19 nt, Artificial Sequence
  Description of Artificial Sequence: Synthetic oligonucleotide
  Antisense strand to SEQ ID NO: 782080
ucucucaacucuagggcca

SEQ ID NO: 782082 - RNA, 19 nt, Artificial Sequence
  Description of Artificial Sequence: Synthetic oligonucleotide
  Sense strand starting at position 3896 of SEQ ID NO: 587301
uugagagaacgugguuuau

SEQ ID NO: 782083 - RNA, 19 nt, Artificial Sequence
  Description of Artificial Sequence: Synthetic oligonucleotide
  Antisense strand to SEQ ID NO: 782082
auaaaccacguucucucaa

SEQ ID NO: 782084 - RNA, 19 nt, Artificial Sequence
  Description of Artificial Sequence: Synthetic oligonucleotide
  Sense strand starting at position 3898 of SEQ ID NO: 587301
gagagaacgugguuuaucu

SEQ ID NO: 782085 - RNA, 19 nt, Artificial Sequence
  Description of Artificial Sequence: Synthetic oligonucleotide
  Antisense strand to SEQ ID NO: 782084
agauaaaccacguucucuc

SEQ ID NO: 782086 - RNA, 19 nt, Artificial Sequence
  Description of Artificial Sequence: Synthetic oligonucleotide
  Sense strand starting at position 3951 of SEQ ID NO: 587301
gcuguuaaaugacuuggua

SEQ ID NO: 782087 - RNA, 19 nt, Artificial Sequence
  Description of Artificial Sequence: Synthetic oligonucleotide
  Antisense strand to SEQ ID NO: 782086
uaccaagucauuuaacagc

SEQ ID NO: 782088 - RNA, 19 nt, Artificial Sequence
  Description of Artificial Sequence: Synthetic oligonucleotide
  Sense strand starting at position 143 of SEQ ID NO: 587302
uggaaaguauaucaaaguu

SEQ ID NO: 782089 - RNA, 19 nt, Artificial Sequence
  Description of Artificial Sequence: Synthetic oligonucleotide
  Antisense strand to SEQ ID NO: 782088
aacuuugauauacuuucca

SEQ ID NO: 782090 - RNA, 19 nt, Artificial Sequence
  Description of Artificial Sequence: Synthetic oligonucleotide
  Sense strand starting at position 403 of SEQ ID NO: 587302
ucucuugcagcuuggaaau

SEQ ID NO: 782091 - RNA, 19 nt, Artificial Sequence
  Description of Artificial Sequence: Synthetic oligonucleotide
  Antisense strand to SEQ ID NO: 782090
auuuccaagcugcaagaga

SEQ ID NO: 782092 - RNA, 19 nt, Artificial Sequence
  Description of Artificial Sequence: Synthetic oligonucleotide
  Sense strand starting at position 416 of SEQ ID NO: 587302
ggaaauuggacgcacgaau

SEQ ID NO: 782093 - RNA, 19 nt, Artificial Sequence
  Description of Artificial Sequence: Synthetic oligonucleotide
  Antisense strand to SEQ ID NO: 782092
auucgugcguccaauuucc

SEQ ID NO: 782094 - RNA, 19 nt, Artificial Sequence
  Description of Artificial Sequence: Synthetic oligonucleotide
  Sense strand starting at position 488 of SEQ ID NO: 587302
gggccacgccuuuauuaac

SEQ ID NO: 782095 - RNA, 19 nt, Artificial Sequence
  Description of Artificial Sequence: Synthetic oligonucleotide
  Antisense strand to SEQ ID NO: 782094
guuaauaaaggcguggccc

SEQ ID NO: 782096 - RNA, 19 nt, Artificial Sequence
  Description of Artificial Sequence: Synthetic oligonucleotide
  Sense strand starting at position 717 of SEQ ID NO: 587302
gagaguguccugugaggac

SEQ ID NO: 782097 - RNA, 19 nt, Artificial Sequence
  Description of Artificial Sequence: Synthetic oligonucleotide
  Antisense strand to SEQ ID NO: 782096
guccucacaggacacucuc

SEQ ID NO: 782098 - RNA, 19 nt, Artificial Sequence
  Description of Artificial Sequence: Synthetic oligonucleotide
  Sense strand starting at position 1229 of SEQ ID NO: 587302
guccguuguccgcuuugau

SEQ ID NO: 782099 - RNA, 19 nt, Artificial Sequence
  Description of Artificial Sequence: Synthetic oligonucleotide
  Antisense strand to SEQ ID NO: 782098
aucaaagcggacaacggac

SEQ ID NO: 782100 - RNA, 19 nt, Artificial Sequence
  Description of Artificial Sequence: Synthetic oligonucleotide
  Sense strand starting at position 2234 of SEQ ID NO: 587302
ugcgccuaacauuaguaau

SEQ ID NO: 782101 - RNA, 19 nt, Artificial Sequence
  Description of Artificial Sequence: Synthetic oligonucleotide
  Antisense strand to SEQ ID NO: 782100
auuacuaauguuaggcgca

SEQ ID NO: 782102 - RNA, 19 nt, Artificial Sequence
  Description of Artificial Sequence: Synthetic oligonucleotide
  Sense strand starting at position 2236 of SEQ ID NO: 587302
cgccuaacauuaguaaugu

SEQ ID NO: 782103 - RNA, 19 nt, Artificial Sequence
  Description of Artificial Sequence: Synthetic oligonucleotide
  Antisense strand to SEQ ID NO: 782102
acauuacuaauguuaggcg

SEQ ID NO: 782104 - RNA, 19 nt, Artificial Sequence
  Description of Artificial Sequence: Synthetic oligonucleotide
  Sense strand starting at position 2559 of SEQ ID NO: 587302
ccguuucccgagugaaauc

SEQ ID NO: 782105 - RNA, 19 nt, Artificial Sequence
  Description of Artificial Sequence: Synthetic oligonucleotide
  Antisense strand to SEQ ID NO: 782104
gauuucacucgggaaacgg

SEQ ID NO: 782106 - RNA, 19 nt, Artificial Sequence
  Description of Artificial Sequence: Synthetic oligonucleotide
  Sense strand starting at position 2568 of SEQ ID NO: 587302
gagugaaaucucuguguug

SEQ ID NO: 782107 - RNA, 19 nt, Artificial Sequence
  Description of Artificial Sequence: Synthetic oligonucleotide
  Antisense strand to SEQ ID NO: 782106
caacacagagauuucacuc

SEQ ID NO: 782108 - RNA, 19 nt, Artificial Sequence
  Description of Artificial Sequence: Synthetic oligonucleotide
  Sense strand starting at position 2569 of SEQ ID NO: 587302
agugaaaucucuguguugu

SEQ ID NO: 782109 - RNA, 19 nt, Artificial Sequence
  Description of Artificial Sequence: Synthetic oligonucleotide
  Antisense strand to SEQ ID NO: 782108
acaacacagagauuucacu

SEQ ID NO: 782110 - RNA, 19 nt, Artificial Sequence
  Description of Artificial Sequence: Synthetic oligonucleotide
  Sense strand starting at position 2570 of SEQ ID NO: 587302
gugaaaucucuguguuguc

SEQ ID NO: 782111 - RNA, 19 nt, Artificial Sequence
  Description of Artificial Sequence: Synthetic oligonucleotide
  Antisense strand to SEQ ID NO: 782110
gacaacacagagauuucac

SEQ ID NO: 782112 - RNA, 19 nt, Artificial Sequence
  Description of Artificial Sequence: Synthetic oligonucleotide
  Sense strand starting at position 2571 of SEQ ID NO: 587302
ugaaaucucuguguuguca

SEQ ID NO: 782113 - RNA, 19 nt, Artificial Sequence
  Description of Artificial Sequence: Synthetic oligonucleotide
  Antisense strand to SEQ ID NO: 782112
ugacaacacagagauuuca

SEQ ID NO: 782114 - RNA, 19 nt, Artificial Sequence
  Description of Artificial Sequence: Synthetic oligonucleotide
  Sense strand starting at position 2595 of SEQ ID NO: 587302
gagcgcuucccuggagcau

SEQ ID NO: 782115 - RNA, 19 nt, Artificial Sequence
  Description of Artificial Sequence: Synthetic oligonucleotide
  Antisense strand to SEQ ID NO: 782114
augcuccagggaagcgcuc

SEQ ID NO: 782116 - RNA, 19 nt, Artificial Sequence
  Description of Artificial Sequence: Synthetic oligonucleotide
  Sense strand starting at position 2596 of SEQ ID NO: 587302
agcgcuucccuggagcauu

SEQ ID NO: 782117 - RNA, 19 nt, Artificial Sequence
  Description of Artificial Sequence: Synthetic oligonucleotide
  Antisense strand to SEQ ID NO: 782116
aaugcuccagggaagcgcu

SEQ ID NO: 782118 - RNA, 19 nt, Artificial Sequence
  Description of Artificial Sequence: Synthetic oligonucleotide
  Sense strand starting at position 2630 of SEQ ID NO: 587302
ccuugcuuucccugagcau

SEQ ID NO: 782119 - RNA, 19 nt, Artificial Sequence
  Description of Artificial Sequence: Synthetic oligonucleotide
  Antisense strand to SEQ ID NO: 782118
augcucagggaaagcaagg

SEQ ID NO: 782120 - RNA, 19 nt, Artificial Sequence
  Description of Artificial Sequence: Synthetic oligonucleotide
  Sense strand starting at position 2631 of SEQ ID NO: 587302
cuugcuuucccugagcauu

SEQ ID NO: 782121 - RNA, 19 nt, Artificial Sequence
  Description of Artificial Sequence: Synthetic oligonucleotide
  Antisense strand to SEQ ID NO: 782120
aaugcucagggaaagcaag

SEQ ID NO: 782122 - RNA, 19 nt, Artificial Sequence
  Description of Artificial Sequence: Synthetic oligonucleotide
  Sense strand starting at position 2650 of SEQ ID NO: 587302
ucgugauuccuucggugag

SEQ ID NO: 782123 - RNA, 19 nt, Artificial Sequence
  Description of Artificial Sequence: Synthetic oligonucleotide
  Antisense strand to SEQ ID NO: 782122
cucaccgaaggaaucacga

SEQ ID NO: 782124 - RNA, 19 nt, Artificial Sequence
  Description of Artificial Sequence: Synthetic oligonucleotide
  Sense strand starting at position 2719 of SEQ ID NO: 587302
gagagcguuucucucugaa

SEQ ID NO: 782125 - RNA, 19 nt, Artificial Sequence
  Description of Artificial Sequence: Synthetic oligonucleotide
  Antisense strand to SEQ ID NO: 782124
uucagagagaaacgcucuc

SEQ ID NO: 782126 - RNA, 19 nt, Artificial Sequence
  Description of Artificial Sequence: Synthetic oligonucleotide
  Sense strand starting at position 2721 of SEQ ID NO: 587302
gagcguuucucucugaagg

SEQ ID NO: 782127 - RNA, 19 nt, Artificial Sequence
  Description of Artificial Sequence: Synthetic oligonucleotide
  Antisense strand to SEQ ID NO: 782126
ccuucagagagaaacgcuc

SEQ ID NO: 782128 - RNA, 19 nt, Artificial Sequence
  Description of Artificial Sequence: Synthetic oligonucleotide
  Sense strand starting at position 2722 of SEQ ID NO: 587302
agcguuucucucugaaggu

SEQ ID NO: 782129 - RNA, 19 nt, Artificial Sequence
  Description of Artificial Sequence: Synthetic oligonucleotide
  Antisense strand to SEQ ID NO: 782128
accuucagagagaaacgcu

SEQ ID NO: 782130 - RNA, 19 nt, Artificial Sequence
  Description of Artificial Sequence: Synthetic oligonucleotide
  Sense strand starting at position 2871 of SEQ ID NO: 587302
guugacuuuguggacacaa

SEQ ID NO: 782131 - RNA, 19 nt, Artificial Sequence
  Description of Artificial Sequence: Synthetic oligonucleotide
  Antisense strand to SEQ ID NO: 782130
uuguguccacaaagucaac

SEQ ID NO: 782132 - RNA, 19 nt, Artificial Sequence
  Description of Artificial Sequence: Synthetic oligonucleotide
  Sense strand starting at position 2917 of SEQ ID NO: 587302
cuuuauuaaucagggaaga

SEQ ID NO: 782133 - RNA, 19 nt, Artificial Sequence
  Description of Artificial Sequence: Synthetic oligonucleotide
  Antisense strand to SEQ ID NO: 782132
ucuucccugauuaauaaag

SEQ ID NO: 782134 - RNA, 19 nt, Artificial Sequence
  Description of Artificial Sequence: Synthetic oligonucleotide
  Sense strand starting at position 3082 of SEQ ID NO: 587302
ccauaacugcucuauaggu

SEQ ID NO: 782135 - RNA, 19 nt, Artificial Sequence
  Description of Artificial Sequence: Synthetic oligonucleotide
  Antisense strand to SEQ ID NO: 782134
accuauagagcaguuaugg

SEQ ID NO: 782136 - RNA, 19 nt, Artificial Sequence
  Description of Artificial Sequence: Synthetic oligonucleotide
  Sense strand starting at position 3084 of SEQ ID NO: 587302
auaacugcucuauagguaa

SEQ ID NO: 782137 - RNA, 19 nt, Artificial Sequence
  Description of Artificial Sequence: Synthetic oligonucleotide
  Antisense strand to SEQ ID NO: 782136
uuaccuauagagcaguuau

SEQ ID NO: 782138 - RNA, 19 nt, Artificial Sequence
  Description of Artificial Sequence: Synthetic oligonucleotide
  Sense strand starting at position 3197 of SEQ ID NO: 587302
gagguaaugugccaaagaa

SEQ ID NO: 782139 - RNA, 19 nt, Artificial Sequence
  Description of Artificial Sequence: Synthetic oligonucleotide
  Antisense strand to SEQ ID NO: 782138
uucuuuggcacauuaccuc

SEQ ID NO: 782140 - RNA, 19 nt, Artificial Sequence
  Description of Artificial Sequence: Synthetic oligonucleotide
  Sense strand starting at position 3401 of SEQ ID NO: 587302
cucugcugucuugauguau

SEQ ID NO: 782141 - RNA, 19 nt, Artificial Sequence
  Description of Artificial Sequence: Synthetic oligonucleotide
  Antisense strand to SEQ ID NO: 782140
auacaucaagacagcagag

SEQ ID NO: 782142 - RNA, 19 nt, Artificial Sequence
  Description of Artificial Sequence: Synthetic oligonucleotide
  Sense strand starting at position 3410 of SEQ ID NO: 587302
cuugauguauuggucauua

SEQ ID NO: 782143 - RNA, 19 nt, Artificial Sequence
  Description of Artificial Sequence: Synthetic oligonucleotide
  Antisense strand to SEQ ID NO: 782142
uaaugaccaauacaucaag

SEQ ID NO: 782144 - RNA, 19 nt, Artificial Sequence
  Description of Artificial Sequence: Synthetic oligonucleotide
  Sense strand starting at position 3412 of SEQ ID NO: 587302
ugauguauuggucauuacu

SEQ ID NO: 782145 - RNA, 19 nt, Artificial Sequence
  Description of Artificial Sequence: Synthetic oligonucleotide
  Antisense strand to SEQ ID NO: 782144
aguaaugaccaauacauca

SEQ ID NO: 782146 - RNA, 19 nt, Artificial Sequence
  Description of Artificial Sequence: Synthetic oligonucleotide
  Sense strand starting at position 3415 of SEQ ID NO: 587302
uguauuggucauuacugca

SEQ ID NO: 782147 - RNA, 19 nt, Artificial Sequence
  Description of Artificial Sequence: Synthetic oligonucleotide
  Antisense strand to SEQ ID NO: 782146
ugcaguaaugaccaauaca

SEQ ID NO: 782148 - RNA, 19 nt, Artificial Sequence
  Description of Artificial Sequence: Synthetic oligonucleotide
  Sense strand starting at position 3464 of SEQ ID NO: 587302
agauuugccuccgucuaga

SEQ ID NO: 782149 - RNA, 19 nt, Artificial Sequence
  Description of Artificial Sequence: Synthetic oligonucleotide
  Antisense strand to SEQ ID NO: 782148
ucuagacggaggcaaaucu

SEQ ID NO: 782150 - RNA, 19 nt, Artificial Sequence
  Description of Artificial Sequence: Synthetic oligonucleotide
  Sense strand starting at position 3492 of SEQ ID NO: 587302
cccagcucccguucuguua

SEQ ID NO: 782151 - RNA, 19 nt, Artificial Sequence
  Description of Artificial Sequence: Synthetic oligonucleotide
  Antisense strand to SEQ ID NO: 782150
uaacagaacgggagcuggg

SEQ ID NO: 782152 - RNA, 19 nt, Artificial Sequence
  Description of Artificial Sequence: Synthetic oligonucleotide
  Sense strand starting at position 3501 of SEQ ID NO: 587302
cguucuguuagaugccuca

SEQ ID NO: 782153 - RNA, 19 nt, Artificial Sequence
  Description of Artificial Sequence: Synthetic oligonucleotide
  Antisense strand to SEQ ID NO: 782152
ugaggcaucuaacagaacg

SEQ ID NO: 782154 - RNA, 19 nt, Artificial Sequence
  Description of Artificial Sequence: Synthetic oligonucleotide
  Sense strand starting at position 3504 of SEQ ID NO: 587302
ucuguuagaugccucagga

SEQ ID NO: 782155 - RNA, 19 nt, Artificial Sequence
  Description of Artificial Sequence: Synthetic oligonucleotide
  Antisense strand to SEQ ID NO: 782154
uccugaggcaucuaacaga

SEQ ID NO: 782156 - RNA, 19 nt, Artificial Sequence
  Description of Artificial Sequence: Synthetic oligonucleotide
  Sense strand starting at position 3572 of SEQ ID NO: 587302
uguguucugucaucauaga

SEQ ID NO: 782157 - RNA, 19 nt, Artificial Sequence
  Description of Artificial Sequence: Synthetic oligonucleotide
  Antisense strand to SEQ ID NO: 782156
ucuaugaugacagaacaca

SEQ ID NO: 782158 - RNA, 19 nt, Artificial Sequence
  Description of Artificial Sequence: Synthetic oligonucleotide
  Sense strand starting at position 3573 of SEQ ID NO: 587302
guguucugucaucauagag

SEQ ID NO: 782159 - RNA, 19 nt, Artificial Sequence
  Description of Artificial Sequence: Synthetic oligonucleotide
  Antisense strand to SEQ ID NO: 782158
cucuaugaugacagaacac

SEQ ID NO: 782160 - RNA, 19 nt, Artificial Sequence
  Description of Artificial Sequence: Synthetic oligonucleotide
  Sense strand starting at position 3590 of SEQ ID NO: 587302
aguugaguuucugcccagu

SEQ ID NO: 782161 - RNA, 19 nt, Artificial Sequence
  Description of Artificial Sequence: Synthetic oligonucleotide
  Antisense strand to SEQ ID NO: 782160
acugggcagaaacucaacu

SEQ ID NO: 782162 - RNA, 19 nt, Artificial Sequence
  Description of Artificial Sequence: Synthetic oligonucleotide
  Sense strand starting at position 3592 of SEQ ID NO: 587302
uugaguuucugcccaguuu

SEQ ID NO: 782163 - RNA, 19 nt, Artificial Sequence
  Description of Artificial Sequence: Synthetic oligonucleotide
  Antisense strand to SEQ ID NO: 782162
aaacugggcagaaacucaa

SEQ ID NO: 782164 - RNA, 19 nt, Artificial Sequence
  Description of Artificial Sequence: Synthetic oligonucleotide
  Sense strand starting at position 3601 of SEQ ID NO: 587302
ugcccaguuuguccacauu

SEQ ID NO: 782165 - RNA, 19 nt, Artificial Sequence
  Description of Artificial Sequence: Synthetic oligonucleotide
  Antisense strand to SEQ ID NO: 782164
aauguggacaaacugggca

SEQ ID NO: 782166 - RNA, 19 nt, Artificial Sequence
  Description of Artificial Sequence: Synthetic oligonucleotide
  Sense strand starting at position 3644 of SEQ ID NO: 587302
gaucuuugugagggacaca

SEQ ID NO: 782167 - RNA, 19 nt, Artificial Sequence
  Description of Artificial Sequence: Synthetic oligonucleotide
  Antisense strand to SEQ ID NO: 782166
ugugucccucacaaagauc

SEQ ID NO: 782168 - RNA, 19 nt, Artificial Sequence
  Description of Artificial Sequence: Synthetic oligonucleotide
  Sense strand starting at position 133 of SEQ ID NO: 587303
aagcauauagaguagcaau

SEQ ID NO: 782169 - RNA, 19 nt, Artificial Sequence
  Description of Artificial Sequence: Synthetic oligonucleotide
  Antisense strand to SEQ ID NO: 782168
auugcuacucuauaugcuu

SEQ ID NO: 782170 - RNA, 19 nt, Artificial Sequence
  Description of Artificial Sequence: Synthetic oligonucleotide
  Sense strand starting at position 156 of SEQ ID NO: 587303
uagaaagugcuauaaguaa

SEQ ID NO: 782171 - RNA, 19 nt, Artificial Sequence
  Description of Artificial Sequence: Synthetic oligonucleotide
  Antisense strand to SEQ ID NO: 782170
uuacuuauagcacuuucua

SEQ ID NO: 782172 - RNA, 19 nt, Artificial Sequence
  Description of Artificial Sequence: Synthetic oligonucleotide
  Sense strand starting at position 204 of SEQ ID NO: 587303
agcauuuauugagaacuac

SEQ ID NO: 782173 - RNA, 19 nt, Artificial Sequence
  Description of Artificial Sequence: Synthetic oligonucleotide
  Antisense strand to SEQ ID NO: 782172
guaguucucaauaaaugcu

SEQ ID NO: 782174 - RNA, 19 nt, Artificial Sequence
  Description of Artificial Sequence: Synthetic oligonucleotide
  Sense strand starting at position 284 of SEQ ID NO: 587303
uuccaagaucuccagcaga

SEQ ID NO: 782175 - RNA, 19 nt, Artificial Sequence
  Description of Artificial Sequence: Synthetic oligonucleotide
  Antisense strand to SEQ ID NO: 782174
ucugcuggagaucuuggaa

SEQ ID NO: 782176 - RNA, 19 nt, Artificial Sequence
  Description of Artificial Sequence: Synthetic oligonucleotide
  Sense strand starting at position 361 of SEQ ID NO: 587303
ugcuuuggucagcaacaaa

SEQ ID NO: 782177 - RNA, 19 nt, Artificial Sequence
  Description of Artificial Sequence: Synthetic oligonucleotide
  Antisense strand to SEQ ID NO: 782176
uuuguugcugaccaaagca

SEQ ID NO: 782178 - RNA, 19 nt, Artificial Sequence
  Description of Artificial Sequence: Synthetic oligonucleotide
  Sense strand starting at position 431 of SEQ ID NO: 587303
gaucacuauugccugauga

SEQ ID NO: 782179 - RNA, 19 nt, Artificial Sequence
  Description of Artificial Sequence: Synthetic oligonucleotide
  Antisense strand to SEQ ID NO: 782178
ucaucaggcaauagugauc

SEQ ID NO: 782180 - RNA, 19 nt, Artificial Sequence
  Description of Artificial Sequence: Synthetic oligonucleotide
  Sense strand starting at position 432 of SEQ ID NO: 587303
aucacuauugccugaugac

SEQ ID NO: 782181 - RNA, 19 nt, Artificial Sequence
  Description of Artificial Sequence: Synthetic oligonucleotide
  Antisense strand to SEQ ID NO: 782180
gucaucaggcaauagugau

SEQ ID NO: 782182 - RNA, 19 nt, Artificial Sequence
  Description of Artificial Sequence: Synthetic oligonucleotide
  Sense strand starting at position 450 of SEQ ID NO: 587303
ccugguagccaucauaaca

SEQ ID NO: 782183 - RNA, 19 nt, Artificial Sequence
  Description of Artificial Sequence: Synthetic oligonucleotide
  Antisense strand to SEQ ID NO: 782182
uguuaugauggcuaccagg

SEQ ID NO: 782184 - RNA, 19 nt, Artificial Sequence
  Description of Artificial Sequence: Synthetic oligonucleotide
  Sense strand starting at position 495 of SEQ ID NO: 587303
uugagacccguuuaaauac

SEQ ID NO: 782185 - RNA, 19 nt, Artificial Sequence
  Description of Artificial Sequence: Synthetic oligonucleotide
  Antisense strand to SEQ ID NO: 782184
guauuuaaacgggucucaa

SEQ ID NO: 782186 - RNA, 19 nt, Artificial Sequence
  Description of Artificial Sequence: Synthetic oligonucleotide
  Sense strand starting at position 626 of SEQ ID NO: 587303
auaccacagguuuaaguau

SEQ ID NO: 782187 - RNA, 19 nt, Artificial Sequence
  Description of Artificial Sequence: Synthetic oligonucleotide
  Antisense strand to SEQ ID NO: 782186
auacuuaaaccugugguau

SEQ ID NO: 782188 - RNA, 19 nt, Artificial Sequence
  Description of Artificial Sequence: Synthetic oligonucleotide
  Sense strand starting at position 681 of SEQ ID NO: 587303
uggagcauuucucagaaug

SEQ ID NO: 782189 - RNA, 19 nt, Artificial Sequence
  Description of Artificial Sequence: Synthetic oligonucleotide
  Antisense strand to SEQ ID NO: 782188
cauucugagaaaugcucca

SEQ ID NO: 782190 - RNA, 19 nt, Artificial Sequence
  Description of Artificial Sequence: Synthetic oligonucleotide
  Sense strand starting at position 705 of SEQ ID NO: 587303
uugucauuaagggacgcau

SEQ ID NO: 782191 - RNA, 19 nt, Artificial Sequence
  Description of Artificial Sequence: Synthetic oligonucleotide
  Antisense strand to SEQ ID NO: 782190
augcgucccuuaaugacaa

SEQ ID NO: 782192 - RNA, 19 nt, Artificial Sequence
  Description of Artificial Sequence: Synthetic oligonucleotide
  Sense strand starting at position 728 of SEQ ID NO: 587303
acugguauucccuauauau

SEQ ID NO: 782193 - RNA, 19 nt, Artificial Sequence
  Description of Artificial Sequence: Synthetic oligonucleotide
  Antisense strand to SEQ ID NO: 782192
auauauagggaauaccagu

SEQ ID NO: 782194 - RNA, 19 nt, Artificial Sequence
  Description of Artificial Sequence: Synthetic oligonucleotide
  Sense strand starting at position 730 of SEQ ID NO: 587303
ugguauucccuauauaugu

SEQ ID NO: 782195 - RNA, 19 nt, Artificial Sequence
  Description of Artificial Sequence: Synthetic oligonucleotide
  Antisense strand to SEQ ID NO: 782194
acauauauagggaauacca

SEQ ID NO: 782196 - RNA, 19 nt, Artificial Sequence
  Description of Artificial Sequence: Synthetic oligonucleotide
  Sense strand starting at position 993 of SEQ ID NO: 587303
ggacuuacacucuagcuca

SEQ ID NO: 782197 - RNA, 19 nt, Artificial Sequence
  Description of Artificial Sequence: Synthetic oligonucleotide
  Antisense strand to SEQ ID NO: 782196
ugagcuagaguguaagucc

SEQ ID NO: 782198 - RNA, 19 nt, Artificial Sequence
  Description of Artificial Sequence: Synthetic oligonucleotide
  Sense strand starting at position 1024 of SEQ ID NO: 587303
uuaauaccacgugauaagu

SEQ ID NO: 782199 - RNA, 19 nt, Artificial Sequence
  Description of Artificial Sequence: Synthetic oligonucleotide
  Antisense strand to SEQ ID NO: 782198
acuuaucacgugguauuaa

SEQ ID NO: 782200 - RNA, 19 nt, Artificial Sequence
  Description of Artificial Sequence: Synthetic oligonucleotide
  Sense strand starting at position 1035 of SEQ ID NO: 587303
ugauaagugcaaugccaaa

SEQ ID NO: 782201 - RNA, 19 nt, Artificial Sequence
  Description of Artificial Sequence: Synthetic oligonucleotide
  Antisense strand to SEQ ID NO: 782200
uuuggcauugcacuuauca

SEQ ID NO: 782202 - RNA, 19 nt, Artificial Sequence
  Description of Artificial Sequence: Synthetic oligonucleotide
  Sense strand starting at position 1288 of SEQ ID NO: 587303
gaagcauuaccauagguca

SEQ ID NO: 782203 - RNA, 19 nt, Artificial Sequence
  Description of Artificial Sequence: Synthetic oligonucleotide
  Antisense strand to SEQ ID NO: 782202
ugaccuaugguaaugcuuc

SEQ ID NO: 782204 - RNA, 19 nt, Artificial Sequence
  Description of Artificial Sequence: Synthetic oligonucleotide
  Sense strand starting at position 1308 of SEQ ID NO: 587303
uucugagaucugggacauc

SEQ ID NO: 782205 - RNA, 19 nt, Artificial Sequence
  Description of Artificial Sequence: Synthetic oligonucleotide
  Antisense strand to SEQ ID NO: 782204
gaugucccagaucucagaa

SEQ ID NO: 782206 - RNA, 19 nt, Artificial Sequence
  Description of Artificial Sequence: Synthetic oligonucleotide
  Sense strand starting at position 2066 of SEQ ID NO: 587303
aguguaguggcaaggaguu

SEQ ID NO: 782207 - RNA, 19 nt, Artificial Sequence
  Description of Artificial Sequence: Synthetic oligonucleotide
  Antisense strand to SEQ ID NO: 782206
aacuccuugccacuacacu

SEQ ID NO: 782208 - RNA, 19 nt, Artificial Sequence
  Description of Artificial Sequence: Synthetic oligonucleotide
  Sense strand starting at position 2076 of SEQ ID NO: 587303
caaggaguuugguucagug

SEQ ID NO: 782209 - RNA, 19 nt, Artificial Sequence
  Description of Artificial Sequence: Synthetic oligonucleotide
  Antisense strand to SEQ ID NO: 782208
cacugaaccaaacuccuug

SEQ ID NO: 782210 - RNA, 19 nt, Artificial Sequence
  Description of Artificial Sequence: Synthetic oligonucleotide
  Sense strand starting at position 2078 of SEQ ID NO: 587303
aggaguuugguucagugau

SEQ ID NO: 782211 - RNA, 19 nt, Artificial Sequence
  Description of Artificial Sequence: Synthetic oligonucleotide
  Antisense strand to SEQ ID NO: 782210
aucacugaaccaaacuccu

SEQ ID NO: 782212 - RNA, 19 nt, Artificial Sequence
  Description of Artificial Sequence: Synthetic oligonucleotide
  Sense strand starting at position 2086 of SEQ ID NO: 587303
gguucagugauuugugggu

SEQ ID NO: 782213 - RNA, 19 nt, Artificial Sequence
  Description of Artificial Sequence: Synthetic oligonucleotide
  Antisense strand to SEQ ID NO: 782212
acccacaaaucacugaacc

SEQ ID NO: 782214 - RNA, 19 nt, Artificial Sequence
  Description of Artificial Sequence: Synthetic oligonucleotide
  Sense strand starting at position 2171 of SEQ ID NO: 587303
gcgaaaugaagaugauacu

SEQ ID NO: 782215 - RNA, 19 nt, Artificial Sequence
  Description of Artificial Sequence: Synthetic oligonucleotide
  Antisense strand to SEQ ID NO: 782214
aguaucaucuucauuucgc

SEQ ID NO: 782216 - RNA, 19 nt, Artificial Sequence
  Description of Artificial Sequence: Synthetic oligonucleotide
  Sense strand starting at position 2238 of SEQ ID NO: 587303
gcgccaaggguuuagaaca

SEQ ID NO: 782217 - RNA, 19 nt, Artificial Sequence
  Description of Artificial Sequence: Synthetic oligonucleotide
  Antisense strand to SEQ ID NO: 782216
uguucuaaacccuuggcgc

SEQ ID NO: 782218 - RNA, 19 nt, Artificial Sequence
  Description of Artificial Sequence: Synthetic oligonucleotide
  Sense strand starting at position 2263 of SEQ ID NO: 587303
acaaacgaguuguuucuga

SEQ ID NO: 782219 - RNA, 19 nt, Artificial Sequence
  Description of Artificial Sequence: Synthetic oligonucleotide
  Antisense strand to SEQ ID NO: 782218
ucagaaacaacucguuugu

SEQ ID NO: 782220 - RNA, 19 nt, Artificial Sequence
  Description of Artificial Sequence: Synthetic oligonucleotide
  Sense strand starting at position 2378 of SEQ ID NO: 587303
ugcuauaaaguaggaauaa

SEQ ID NO: 782221 - RNA, 19 nt, Artificial Sequence
  Description of Artificial Sequence: Synthetic oligonucleotide
  Antisense strand to SEQ ID NO: 782220
uuauuccuacuuuauagca

SEQ ID NO: 782222 - RNA, 19 nt, Artificial Sequence
  Description of Artificial Sequence: Synthetic oligonucleotide
  Sense strand starting at position 2468 of SEQ ID NO: 587303
ugaggaaugugagucccuu

SEQ ID NO: 782223 - RNA, 19 nt, Artificial Sequence
  Description of Artificial Sequence: Synthetic oligonucleotide
  Antisense strand to SEQ ID NO: 782222
aagggacucacauuccuca

SEQ ID NO: 782224 - RNA, 19 nt, Artificial Sequence
  Description of Artificial Sequence: Synthetic oligonucleotide
  Sense strand starting at position 2486 of SEQ ID NO: 587303
uuaaauuacuaggucugga

SEQ ID NO: 782225 - RNA, 19 nt, Artificial Sequence
  Description of Artificial Sequence: Synthetic oligonucleotide
  Antisense strand to SEQ ID NO: 782224
uccagaccuaguaauuuaa

SEQ ID NO: 782226 - RNA, 19 nt, Artificial Sequence
  Description of Artificial Sequence: Synthetic oligonucleotide
  Sense strand starting at position 2698 of SEQ ID NO: 587303
caaugagaaugcuugacag

SEQ ID NO: 782227 - RNA, 19 nt, Artificial Sequence
  Description of Artificial Sequence: Synthetic oligonucleotide
  Antisense strand to SEQ ID NO: 782226
cugucaagcauucucauug

SEQ ID NO: 782228 - RNA, 19 nt, Artificial Sequence
  Description of Artificial Sequence: Synthetic oligonucleotide
  Sense strand starting at position 2700 of SEQ ID NO: 587303
augagaaugcuugacaguu

SEQ ID NO: 782229 - RNA, 19 nt, Artificial Sequence
  Description of Artificial Sequence: Synthetic oligonucleotide
  Antisense strand to SEQ ID NO: 782228
aacugucaagcauucucau

SEQ ID NO: 782230 - RNA, 19 nt, Artificial Sequence
  Description of Artificial Sequence: Synthetic oligonucleotide
  Sense strand starting at position 2959 of SEQ ID NO: 587303
aauugagggcgucacuuaa

SEQ ID NO: 782231 - RNA, 19 nt, Artificial Sequence
  Description of Artificial Sequence: Synthetic oligonucleotide
  Antisense strand to SEQ ID NO: 782230
uuaagugacgcccucaauu

SEQ ID NO: 782232 - RNA, 19 nt, Artificial Sequence
  Description of Artificial Sequence: Synthetic oligonucleotide
  Sense strand starting at position 2963 of SEQ ID NO: 587303
gagggcgucacuuaacgaa

SEQ ID NO: 782233 - RNA, 19 nt, Artificial Sequence
  Description of Artificial Sequence: Synthetic oligonucleotide
  Antisense strand to SEQ ID NO: 782232
uucguuaagugacgcccuc

SEQ ID NO: 782234 - RNA, 19 nt, Artificial Sequence
  Description of Artificial Sequence: Synthetic oligonucleotide
  Sense strand starting at position 3053 of SEQ ID NO: 587303
ccugcucaaggaugacaua

SEQ ID NO: 782235 - RNA, 19 nt, Artificial Sequence
  Description of Artificial Sequence: Synthetic oligonucleotide
  Antisense strand to SEQ ID NO: 782234
uaugucauccuugagcagg

SEQ ID NO: 782236 - RNA, 19 nt, Artificial Sequence
  Description of Artificial Sequence: Synthetic oligonucleotide
  Sense strand starting at position 3228 of SEQ ID NO: 587303
guaagaauuuagcucuguu

SEQ ID NO: 782237 - RNA, 19 nt, Artificial Sequence
  Description of Artificial Sequence: Synthetic oligonucleotide
  Antisense strand to SEQ ID NO: 782236
aacagagcuaaauucuuac

SEQ ID NO: 782238 - RNA, 19 nt, Artificial Sequence
  Description of Artificial Sequence: Synthetic oligonucleotide
  Sense strand starting at position 3232 of SEQ ID NO: 587303
gaauuuagcucuguucugu

SEQ ID NO: 782239 - RNA, 19 nt, Artificial Sequence
  Description of Artificial Sequence: Synthetic oligonucleotide
  Antisense strand to SEQ ID NO: 782238
acagaacagagcuaaauuc

SEQ ID NO: 782240 - RNA, 19 nt, Artificial Sequence
  Description of Artificial Sequence: Synthetic oligonucleotide
  Sense strand starting at position 3238 of SEQ ID NO: 587303
agcucuguucuguaaauag

SEQ ID NO: 782241 - RNA, 19 nt, Artificial Sequence
  Description of Artificial Sequence: Synthetic oligonucleotide
  Antisense strand to SEQ ID NO: 782240
cuauuuacagaacagagcu

SEQ ID NO: 782242 - RNA, 19 nt, Artificial Sequence
  Description of Artificial Sequence: Synthetic oligonucleotide
  Sense strand starting at position 3273 of SEQ ID NO: 587303
uccguuguauuauuuguaa

SEQ ID NO: 782243 - RNA, 19 nt, Artificial Sequence
  Description of Artificial Sequence: Synthetic oligonucleotide
  Antisense strand to SEQ ID NO: 782242
uuacaaauaauacaacgga

SEQ ID NO: 782244 - RNA, 19 nt, Artificial Sequence
  Description of Artificial Sequence: Synthetic oligonucleotide
  Sense strand starting at position 3483 of SEQ ID NO: 587303
aaauaagugcaucgagaau

SEQ ID NO: 782245 - RNA, 19 nt, Artificial Sequence
  Description of Artificial Sequence: Synthetic oligonucleotide
  Antisense strand to SEQ ID NO: 782244
auucucgaugcacuuauuu

SEQ ID NO: 782246 - RNA, 19 nt, Artificial Sequence
  Description of Artificial Sequence: Synthetic oligonucleotide
  Sense strand starting at position 3718 of SEQ ID NO: 587303
cgugguuucccucagagau

SEQ ID NO: 782247 - RNA, 19 nt, Artificial Sequence
  Description of Artificial Sequence: Synthetic oligonucleotide
  Antisense strand to SEQ ID NO: 782246
aucucugagggaaaccacg

SEQ ID NO: 782248 - RNA, 19 nt, Artificial Sequence
  Description of Artificial Sequence: Synthetic oligonucleotide
  Sense strand starting at position 24 of SEQ ID NO: 587304
acagaaucguucucuguau

SEQ ID NO: 782249 - RNA, 19 nt, Artificial Sequence
  Description of Artificial Sequence: Synthetic oligonucleotide
  Antisense strand to SEQ ID NO: 782248
auacagagaacgauucugu

SEQ ID NO: 782250 - RNA, 19 nt, Artificial Sequence
  Description of Artificial Sequence: Synthetic oligonucleotide
  Sense strand starting at position 25 of SEQ ID NO: 587304
cagaaucguucucuguauc

SEQ ID NO: 782251 - RNA, 19 nt, Artificial Sequence
  Description of Artificial Sequence: Synthetic oligonucleotide
  Antisense strand to SEQ ID NO: 782250
gauacagagaacgauucug

SEQ ID NO: 782252 - RNA, 19 nt, Artificial Sequence
  Description of Artificial Sequence: Synthetic oligonucleotide
  Sense strand starting at position 26 of SEQ ID NO: 587304
agaaucguucucuguaucu

SEQ ID NO: 782253 - RNA, 19 nt, Artificial Sequence
  Description of Artificial Sequence: Synthetic oligonucleotide
  Antisense strand to SEQ ID NO: 782252
agauacagagaacgauucu

SEQ ID NO: 782254 - RNA, 19 nt, Artificial Sequence
  Description of Artificial Sequence: Synthetic oligonucleotide
  Sense strand starting at position 213 of SEQ ID NO: 587304
aagugcugcuuucuguaaa

SEQ ID NO: 782255 - RNA, 19 nt, Artificial Sequence
  Description of Artificial Sequence: Synthetic oligonucleotide
  Antisense strand to SEQ ID NO: 782254
uuuacagaaagcagcacuu

SEQ ID NO: 782256 - RNA, 19 nt, Artificial Sequence
  Description of Artificial Sequence: Synthetic oligonucleotide
  Sense strand starting at position 270 of SEQ ID NO: 587304
ggcugucagugaucucaca

SEQ ID NO: 782257 - RNA, 19 nt, Artificial Sequence
  Description of Artificial Sequence: Synthetic oligonucleotide
  Antisense strand to SEQ ID NO: 782256
ugugagaucacugacagcc

SEQ ID NO: 782258 - RNA, 19 nt, Artificial Sequence
  Description of Artificial Sequence: Synthetic oligonucleotide
  Sense strand starting at position 460 of SEQ ID NO: 587304
guaggauucgggcacauag

SEQ ID NO: 782259 - RNA, 19 nt, Artificial Sequence
  Description of Artificial Sequence: Synthetic oligonucleotide
  Antisense strand to SEQ ID NO: 782258
cuaugugcccgaauccuac

SEQ ID NO: 782260 - RNA, 19 nt, Artificial Sequence
  Description of Artificial Sequence: Synthetic oligonucleotide
  Sense strand starting at position 537 of SEQ ID NO: 587304
gucagaggaaucuaucgca

SEQ ID NO: 782261 - RNA, 19 nt, Artificial Sequence
  Description of Artificial Sequence: Synthetic oligonucleotide
  Antisense strand to SEQ ID NO: 782260
ugcgauagauuccucugac

SEQ ID NO: 782262 - RNA, 19 nt, Artificial Sequence
  Description of Artificial Sequence: Synthetic oligonucleotide
  Sense strand starting at position 622 of SEQ ID NO: 587304
ccaguucugcauuacccua

SEQ ID NO: 782263 - RNA, 19 nt, Artificial Sequence
  Description of Artificial Sequence: Synthetic oligonucleotide
  Antisense strand to SEQ ID NO: 782262
uaggguaaugcagaacugg

SEQ ID NO: 782264 - RNA, 19 nt, Artificial Sequence
  Description of Artificial Sequence: Synthetic oligonucleotide
  Sense strand starting at position 647 of SEQ ID NO: 587304
uacugauguuucuugguga

SEQ ID NO: 782265 - RNA, 19 nt, Artificial Sequence
  Description of Artificial Sequence: Synthetic oligonucleotide
  Antisense strand to SEQ ID NO: 782264
ucaccaagaaacaucagua

SEQ ID NO: 782266 - RNA, 19 nt, Artificial Sequence
  Description of Artificial Sequence: Synthetic oligonucleotide
  Sense strand starting at position 650 of SEQ ID NO: 587304
ugauguuucuuggugaccu

SEQ ID NO: 782267 - RNA, 19 nt, Artificial Sequence
  Description of Artificial Sequence: Synthetic oligonucleotide
  Antisense strand to SEQ ID NO: 782266
aggucaccaagaaacauca

SEQ ID NO: 782268 - RNA, 19 nt, Artificial Sequence
  Description of Artificial Sequence: Synthetic oligonucleotide
  Sense strand starting at position 759 of SEQ ID NO: 587304
cuuaaaucaccuggguagu

SEQ ID NO: 782269 - RNA, 19 nt, Artificial Sequence
  Description of Artificial Sequence: Synthetic oligonucleotide
  Antisense strand to SEQ ID NO: 782268
acuacccaggugauuuaag

SEQ ID NO: 782270 - RNA, 19 nt, Artificial Sequence
  Description of Artificial Sequence: Synthetic oligonucleotide
  Sense strand starting at position 760 of SEQ ID NO: 587304
uuaaaucaccuggguaguu

SEQ ID NO: 782271 - RNA, 19 nt, Artificial Sequence
  Description of Artificial Sequence: Synthetic oligonucleotide
  Antisense strand to SEQ ID NO: 782270
aacuacccaggugauuuaa

SEQ ID NO: 782272 - RNA, 19 nt, Artificial Sequence
  Description of Artificial Sequence: Synthetic oligonucleotide
  Sense strand starting at position 761 of SEQ ID NO: 587304
uaaaucaccuggguaguuu

SEQ ID NO: 782273 - RNA, 19 nt, Artificial Sequence
  Description of Artificial Sequence: Synthetic oligonucleotide
  Antisense strand to SEQ ID NO: 782272
aaacuacccaggugauuua

SEQ ID NO: 782274 - RNA, 19 nt, Artificial Sequence
  Description of Artificial Sequence: Synthetic oligonucleotide
  Sense strand starting at position 782 of SEQ ID NO: 587304
cucuucuuggccuggauua

SEQ ID NO: 782275 - RNA, 19 nt, Artificial Sequence
  Description of Artificial Sequence: Synthetic oligonucleotide
  Antisense strand to SEQ ID NO: 782274
uaauccaggccaagaagag

SEQ ID NO: 782276 - RNA, 19 nt, Artificial Sequence
  Description of Artificial Sequence: Synthetic oligonucleotide
  Sense strand starting at position 783 of SEQ ID NO: 587304
ucuucuuggccuggauuau

SEQ ID NO: 782277 - RNA, 19 nt, Artificial Sequence
  Description of Artificial Sequence: Synthetic oligonucleotide
  Antisense strand to SEQ ID NO: 782276
auaauccaggccaagaaga

SEQ ID NO: 782278 - RNA, 19 nt, Artificial Sequence
  Description of Artificial Sequence: Synthetic oligonucleotide
  Sense strand starting at position 794 of SEQ ID NO: 587304
uggauuaucugggcuucuu

SEQ ID NO: 782279 - RNA, 19 nt, Artificial Sequence
  Description of Artificial Sequence: Synthetic oligonucleotide
  Antisense strand to SEQ ID NO: 782278
aagaagcccagauaaucca

SEQ ID NO: 782280 - RNA, 19 nt, Artificial Sequence
  Description of Artificial Sequence: Synthetic oligonucleotide
  Sense strand starting at position 884 of SEQ ID NO: 587304
aaggaaguguaauuaguaa

SEQ ID NO: 782281 - RNA, 19 nt, Artificial Sequence
  Description of Artificial Sequence: Synthetic oligonucleotide
  Antisense strand to SEQ ID NO: 782280
uuacuaauuacacuuccuu

SEQ ID NO: 782282 - RNA, 19 nt, Artificial Sequence
  Description of Artificial Sequence: Synthetic oligonucleotide
  Sense strand starting at position 921 of SEQ ID NO: 587304
uuugaaacaugucucuaag

SEQ ID NO: 782283 - RNA, 19 nt, Artificial Sequence
  Description of Artificial Sequence: Synthetic oligonucleotide
  Antisense strand to SEQ ID NO: 782282
cuuagagacauguuucaaa

SEQ ID NO: 782284 - RNA, 19 nt, Artificial Sequence
  Description of Artificial Sequence: Synthetic oligonucleotide
  Sense strand starting at position 923 of SEQ ID NO: 587304
ugaaacaugucucuaagac

SEQ ID NO: 782285 - RNA, 19 nt, Artificial Sequence
  Description of Artificial Sequence: Synthetic oligonucleotide
  Antisense strand to SEQ ID NO: 782284
gucuuagagacauguuuca

SEQ ID NO: 782286 - RNA, 19 nt, Artificial Sequence
  Description of Artificial Sequence: Synthetic oligonucleotide
  Sense strand starting at position 927 of SEQ ID NO: 587304
acaugucucuaagacagau

SEQ ID NO: 782287 - RNA, 19 nt, Artificial Sequence
  Description of Artificial Sequence: Synthetic oligonucleotide
  Antisense strand to SEQ ID NO: 782286
aucugucuuagagacaugu

SEQ ID NO: 782288 - RNA, 19 nt, Artificial Sequence
  Description of Artificial Sequence: Synthetic oligonucleotide
  Sense strand starting at position 1019 of SEQ ID NO: 587304
agucaaguacauugucauu

SEQ ID NO: 782289 - RNA, 19 nt, Artificial Sequence
  Description of Artificial Sequence: Synthetic oligonucleotide
  Antisense strand to SEQ ID NO: 782288
aaugacaauguacuugacu

SEQ ID NO: 782290 - RNA, 19 nt, Artificial Sequence
  Description of Artificial Sequence: Synthetic oligonucleotide
  Sense strand starting at position 1139 of SEQ ID NO: 587304
uagcuagcucaugguaauu

SEQ ID NO: 782291 - RNA, 19 nt, Artificial Sequence
  Description of Artificial Sequence: Synthetic oligonucleotide
  Antisense strand to SEQ ID NO: 782290
aauuaccaugagcuagcua

SEQ ID NO: 782292 - RNA, 19 nt, Artificial Sequence
  Description of Artificial Sequence: Synthetic oligonucleotide
  Sense strand starting at position 1386 of SEQ ID NO: 587304
ggcgaaaugcuguggagaa

SEQ ID NO: 782293 - RNA, 19 nt, Artificial Sequence
  Description of Artificial Sequence: Synthetic oligonucleotide
  Antisense strand to SEQ ID NO: 782292
uucuccacagcauuucgcc

SEQ ID NO: 782294 - RNA, 19 nt, Artificial Sequence
  Description of Artificial Sequence: Synthetic oligonucleotide
  Sense strand starting at position 1661 of SEQ ID NO: 587304
uccucucucccacgggaua

SEQ ID NO: 782295 - RNA, 19 nt, Artificial Sequence
  Description of Artificial Sequence: Synthetic oligonucleotide
  Antisense strand to SEQ ID NO: 782294
uaucccgugggagagagga

SEQ ID NO: 782296 - RNA, 19 nt, Artificial Sequence
  Description of Artificial Sequence: Synthetic oligonucleotide
  Sense strand starting at position 1855 of SEQ ID NO: 587304
ugguaagugaucggcccaa

SEQ ID NO: 782297 - RNA, 19 nt, Artificial Sequence
  Description of Artificial Sequence: Synthetic oligonucleotide
  Antisense strand to SEQ ID NO: 782296
uugggccgaucacuuacca

SEQ ID NO: 782298 - RNA, 19 nt, Artificial Sequence
  Description of Artificial Sequence: Synthetic oligonucleotide
  Sense strand starting at position 2478 of SEQ ID NO: 587304
ggcugaagagcuggccaau

SEQ ID NO: 782299 - RNA, 19 nt, Artificial Sequence
  Description of Artificial Sequence: Synthetic oligonucleotide
  Antisense strand to SEQ ID NO: 782298
auuggccagcucuucagcc

SEQ ID NO: 782300 - RNA, 19 nt, Artificial Sequence
  Description of Artificial Sequence: Synthetic oligonucleotide
  Sense strand starting at position 2865 of SEQ ID NO: 587304
cgggaucccagaggguaaa

SEQ ID NO: 782301 - RNA, 19 nt, Artificial Sequence
  Description of Artificial Sequence: Synthetic oligonucleotide
  Antisense strand to SEQ ID NO: 782300
uuuacccucugggaucccg

SEQ ID NO: 782302 - RNA, 19 nt, Artificial Sequence
  Description of Artificial Sequence: Synthetic oligonucleotide
  Sense strand starting at position 3160 of SEQ ID NO: 587304
cuucgcugccucuaugaau

SEQ ID NO: 782303 - RNA, 19 nt, Artificial Sequence
  Description of Artificial Sequence: Synthetic oligonucleotide
  Antisense strand to SEQ ID NO: 782302
auucauagaggcagcgaag

SEQ ID NO: 782304 - RNA, 19 nt, Artificial Sequence
  Description of Artificial Sequence: Synthetic oligonucleotide
  Sense strand starting at position 3231 of SEQ ID NO: 587304
gcggguauuccgcaaacag

SEQ ID NO: 782305 - RNA, 19 nt, Artificial Sequence
  Description of Artificial Sequence: Synthetic oligonucleotide
  Antisense strand to SEQ ID NO: 782304
cuguuugcggaauacccgc

SEQ ID NO: 782306 - RNA, 19 nt, Artificial Sequence
  Description of Artificial Sequence: Synthetic oligonucleotide
  Sense strand starting at position 3512 of SEQ ID NO: 587304
gcuugaggcccgggaaaua

SEQ ID NO: 782307 - RNA, 19 nt, Artificial Sequence
  Description of Artificial Sequence: Synthetic oligonucleotide
  Antisense strand to SEQ ID NO: 782306
uauuucccgggccucaagc

SEQ ID NO: 782308 - RNA, 19 nt, Artificial Sequence
  Description of Artificial Sequence: Synthetic oligonucleotide
  Sense strand starting at position 3583 of SEQ ID NO: 587304
ucgauucuucgucucguga

SEQ ID NO: 782309 - RNA, 19 nt, Artificial Sequence
  Description of Artificial Sequence: Synthetic oligonucleotide
  Antisense strand to SEQ ID NO: 782308
ucacgagacgaagaaucga

SEQ ID NO: 782310 - RNA, 19 nt, Artificial Sequence
  Description of Artificial Sequence: Synthetic oligonucleotide
  Sense strand starting at position 3780 of SEQ ID NO: 587304
cgguauagcuagcuuaaag

SEQ ID NO: 782311 - RNA, 19 nt, Artificial Sequence
  Description of Artificial Sequence: Synthetic oligonucleotide
  Antisense strand to SEQ ID NO: 782310
cuuuaagcuagcuauaccg

SEQ ID NO: 782312 - RNA, 19 nt, Artificial Sequence
  Description of Artificial Sequence: Synthetic oligonucleotide
  Sense strand starting at position 3874 of SEQ ID NO: 587304
ggcccucgugguugaauuu

SEQ ID NO: 782313 - RNA, 19 nt, Artificial Sequence
  Description of Artificial Sequence: Synthetic oligonucleotide
  Antisense strand to SEQ ID NO: 782312
aaauucaaccacgagggcc

SEQ ID NO: 782314 - RNA, 19 nt, Artificial Sequence
  Description of Artificial Sequence: Synthetic oligonucleotide
  Sense strand starting at position 3912 of SEQ ID NO: 587304
caguaugucgaguaacguu

SEQ ID NO: 782315 - RNA, 19 nt, Artificial Sequence
  Description of Artificial Sequence: Synthetic oligonucleotide
  Antisense strand to SEQ ID NO: 782314
aacguuacucgacauacug

SEQ ID NO: 782316 - RNA, 19 nt, Artificial Sequence
  Description of Artificial Sequence: Synthetic oligonucleotide
  Sense strand starting at position 3919 of SEQ ID NO: 587304
ucgaguaacguuuguggga

SEQ ID NO: 782317 - RNA, 19 nt, Artificial Sequence
  Description of Artificial Sequence: Synthetic oligonucleotide
  Antisense strand to SEQ ID NO: 782316
ucccacaaacguuacucga

SEQ ID NO: 782318 - RNA, 19 nt, Artificial Sequence
  Description of Artificial Sequence: Synthetic oligonucleotide
  Sense strand starting at position 3920 of SEQ ID NO: 587304
cgaguaacguuugugggaa

SEQ ID NO: 782319 - RNA, 19 nt, Artificial Sequence
  Description of Artificial Sequence: Synthetic oligonucleotide
  Antisense strand to SEQ ID NO: 782318
uucccacaaacguuacucg

SEQ ID NO: 782320 - RNA, 19 nt, Artificial Sequence
  Description of Artificial Sequence: Synthetic oligonucleotide
  Sense strand starting at position 3928 of SEQ ID NO: 587304
guuugugggaaucaucuuu

SEQ ID NO: 782321 - RNA, 19 nt, Artificial Sequence
  Description of Artificial Sequence: Synthetic oligonucleotide
  Antisense strand to SEQ ID NO: 782320
aaagaugauucccacaaac

SEQ ID NO: 782322 - RNA, 19 nt, Artificial Sequence
  Description of Artificial Sequence: Synthetic oligonucleotide
  Sense strand starting at position 3935 of SEQ ID NO: 587304
ggaaucaucuuugaaugau

SEQ ID NO: 782323 - RNA, 19 nt, Artificial Sequence
  Description of Artificial Sequence: Synthetic oligonucleotide
  Antisense strand to SEQ ID NO: 782322
aucauucaaagaugauucc

SEQ ID NO: 782324 - RNA, 19 nt, Artificial Sequence
  Description of Artificial Sequence: Synthetic oligonucleotide
  Sense strand starting at position 3950 of SEQ ID NO: 587304
ugaugaauguaugcucagu

SEQ ID NO: 782325 - RNA, 19 nt, Artificial Sequence
  Description of Artificial Sequence: Synthetic oligonucleotide
  Antisense strand to SEQ ID NO: 782324
acugagcauacauucauca

SEQ ID NO: 782326 - RNA, 19 nt, Artificial Sequence
  Description of Artificial Sequence: Synthetic oligonucleotide
  Sense strand starting at position 3955 of SEQ ID NO: 587304
aauguaugcucaguacuga

SEQ ID NO: 782327 - RNA, 19 nt, Artificial Sequence
  Description of Artificial Sequence: Synthetic oligonucleotide
  Antisense strand to SEQ ID NO: 782326
ucaguacugagcauacauu

SEQ ID NO: 782328 - RNA, 19 nt, Artificial Sequence
  Description of Artificial Sequence: Synthetic oligonucleotide
  Sense strand starting at position 19 of SEQ ID NO: 587305
gugauuguuaaaggaggua

SEQ ID NO: 782329 - RNA, 19 nt, Artificial Sequence
  Description of Artificial Sequence: Synthetic oligonucleotide
  Antisense strand to SEQ ID NO: 782328
uaccuccuuuaacaaucac

SEQ ID NO: 782330 - RNA, 19 nt, Artificial Sequence
  Description of Artificial Sequence: Synthetic oligonucleotide
  Sense strand starting at position 144 of SEQ ID NO: 587305
uccuguauccuaggugaca

SEQ ID NO: 782331 - RNA, 19 nt, Artificial Sequence
  Description of Artificial Sequence: Synthetic oligonucleotide
  Antisense strand to SEQ ID NO: 782330
ugucaccuaggauacagga

SEQ ID NO: 782332 - RNA, 19 nt, Artificial Sequence
  Description of Artificial Sequence: Synthetic oligonucleotide
  Sense strand starting at position 192 of SEQ ID NO: 587305
uuucuaguauuggcaucaa

SEQ ID NO: 782333 - RNA, 19 nt, Artificial Sequence
  Description of Artificial Sequence: Synthetic oligonucleotide
  Antisense strand to SEQ ID NO: 782332
uugaugccaauacuagaaa

SEQ ID NO: 782334 - RNA, 19 nt, Artificial Sequence
  Description of Artificial Sequence: Synthetic oligonucleotide
  Sense strand starting at position 258 of SEQ ID NO: 587305
ccgugaucccugcuaugcu

SEQ ID NO: 782335 - RNA, 19 nt, Artificial Sequence
  Description of Artificial Sequence: Synthetic oligonucleotide
  Antisense strand to SEQ ID NO: 782334
agcauagcagggaucacgg

SEQ ID NO: 782336 - RNA, 19 nt, Artificial Sequence
  Description of Artificial Sequence: Synthetic oligonucleotide
  Sense strand starting at position 351 of SEQ ID NO: 587305
auaugacaguacguauaaa

SEQ ID NO: 782337 - RNA, 19 nt, Artificial Sequence
  Description of Artificial Sequence: Synthetic oligonucleotide
  Antisense strand to SEQ ID NO: 782336
uuuauacguacugucauau

SEQ ID NO: 782338 - RNA, 19 nt, Artificial Sequence
  Description of Artificial Sequence: Synthetic oligonucleotide
  Sense strand starting at position 613 of SEQ ID NO: 587305
uccugaaacggacgacaua

SEQ ID NO: 782339 - RNA, 19 nt, Artificial Sequence
  Description of Artificial Sequence: Synthetic oligonucleotide
  Antisense strand to SEQ ID NO: 782338
uaugucguccguuucagga

SEQ ID NO: 782340 - RNA, 19 nt, Artificial Sequence
  Description of Artificial Sequence: Synthetic oligonucleotide
  Sense strand starting at position 642 of SEQ ID NO: 587305
gaggacaacucucugucua

SEQ ID NO: 782341 - RNA, 19 nt, Artificial Sequence
  Description of Artificial Sequence: Synthetic oligonucleotide
  Antisense strand to SEQ ID NO: 782340
uagacagagaguuguccuc

SEQ ID NO: 782342 - RNA, 19 nt, Artificial Sequence
  Description of Artificial Sequence: Synthetic oligonucleotide
  Sense strand starting at position 643 of SEQ ID NO: 587305
aggacaacucucugucuaa

SEQ ID NO: 782343 - RNA, 19 nt, Artificial Sequence
  Description of Artificial Sequence: Synthetic oligonucleotide
  Antisense strand to SEQ ID NO: 782342
uuagacagagaguuguccu

SEQ ID NO: 782344 - RNA, 19 nt, Artificial Sequence
  Description of Artificial Sequence: Synthetic oligonucleotide
  Sense strand starting at position 644 of SEQ ID NO: 587305
ggacaacucucugucuaaa

SEQ ID NO: 782345 - RNA, 19 nt, Artificial Sequence
  Description of Artificial Sequence: Synthetic oligonucleotide
  Antisense strand to SEQ ID NO: 782344
uuuagacagagaguugucc

SEQ ID NO: 782346 - RNA, 19 nt, Artificial Sequence
  Description of Artificial Sequence: Synthetic oligonucleotide
  Sense strand starting at position 678 of SEQ ID NO: 587305
ggaggcagaucaucacaua

SEQ ID NO: 782347 - RNA, 19 nt, Artificial Sequence
  Description of Artificial Sequence: Synthetic oligonucleotide
  Antisense strand to SEQ ID NO: 782346
uaugugaugaucugccucc

SEQ ID NO: 782348 - RNA, 19 nt, Artificial Sequence
  Description of Artificial Sequence: Synthetic oligonucleotide
  Sense strand starting at position 796 of SEQ ID NO: 587305
cagcaagaugaacgugauu

SEQ ID NO: 782349 - RNA, 19 nt, Artificial Sequence
  Description of Artificial Sequence: Synthetic oligonucleotide
  Antisense strand to SEQ ID NO: 782348
aaucacguucaucuugcug

SEQ ID NO: 782350 - RNA, 19 nt, Artificial Sequence
  Description of Artificial Sequence: Synthetic oligonucleotide
  Sense strand starting at position 801 of SEQ ID NO: 587305
agaugaacgugauucgauc

SEQ ID NO: 782351 - RNA, 19 nt, Artificial Sequence
  Description of Artificial Sequence: Synthetic oligonucleotide
  Antisense strand to SEQ ID NO: 782350
gaucgaaucacguucaucu

SEQ ID NO: 782352 - RNA, 19 nt, Artificial Sequence
  Description of Artificial Sequence: Synthetic oligonucleotide
  Sense strand starting at position 911 of SEQ ID NO: 587305
guauacaguagauguauaa

SEQ ID NO: 782353 - RNA, 19 nt, Artificial Sequence
  Description of Artificial Sequence: Synthetic oligonucleotide
  Antisense strand to SEQ ID NO: 782352
uuauacaucuacuguauac

SEQ ID NO: 782354 - RNA, 19 nt, Artificial Sequence
  Description of Artificial Sequence: Synthetic oligonucleotide
  Sense strand starting at position 994 of SEQ ID NO: 587305
ugagguagccauuaucuca

SEQ ID NO: 782355 - RNA, 19 nt, Artificial Sequence
  Description of Artificial Sequence: Synthetic oligonucleotide
  Antisense strand to SEQ ID NO: 782354
ugagauaauggcuaccuca

SEQ ID NO: 782356 - RNA, 19 nt, Artificial Sequence
  Description of Artificial Sequence: Synthetic oligonucleotide
  Sense strand starting at position 997 of SEQ ID NO: 587305
gguagccauuaucucaaau

SEQ ID NO: 782357 - RNA, 19 nt, Artificial Sequence
  Description of Artificial Sequence: Synthetic oligonucleotide
  Antisense strand to SEQ ID NO: 782356
auuugagauaauggcuacc

SEQ ID NO: 782358 - RNA, 19 nt, Artificial Sequence
  Description of Artificial Sequence: Synthetic oligonucleotide
  Sense strand starting at position 1041 of SEQ ID NO: 587305
ccaauuauacuucguuaug

SEQ ID NO: 782359 - RNA, 19 nt, Artificial Sequence
  Description of Artificial Sequence: Synthetic oligonucleotide
  Antisense strand to SEQ ID NO: 782358
cauaacgaaguauaauugg

SEQ ID NO: 782360 - RNA, 19 nt, Artificial Sequence
  Description of Artificial Sequence: Synthetic oligonucleotide
  Sense strand starting at position 1292 of SEQ ID NO: 587305
aaggauaagccauggcuuu

SEQ ID NO: 782361 - RNA, 19 nt, Artificial Sequence
  Description of Artificial Sequence: Synthetic oligonucleotide
  Antisense strand to SEQ ID NO: 782360
aaagccauggcuuauccuu

SEQ ID NO: 782362 - RNA, 19 nt, Artificial Sequence
  Description of Artificial Sequence: Synthetic oligonucleotide
  Sense strand starting at position 1462 of SEQ ID NO: 587305
cgaacaaagugccuagaaa

SEQ ID NO: 782363 - RNA, 19 nt, Artificial Sequence
  Description of Artificial Sequence: Synthetic oligonucleotide
  Antisense strand to SEQ ID NO: 782362
uuucuaggcacuuuguucg

SEQ ID NO: 782364 - RNA, 19 nt, Artificial Sequence
  Description of Artificial Sequence: Synthetic oligonucleotide
  Sense strand starting at position 2273 of SEQ ID NO: 587305
gcagauaagcgcuaccuaa

SEQ ID NO: 782365 - RNA, 19 nt, Artificial Sequence
  Description of Artificial Sequence: Synthetic oligonucleotide
  Antisense strand to SEQ ID NO: 782364
uuagguagcgcuuaucugc

SEQ ID NO: 782366 - RNA, 19 nt, Artificial Sequence
  Description of Artificial Sequence: Synthetic oligonucleotide
  Sense strand starting at position 3189 of SEQ ID NO: 587305
uccggugcugaguaaugau

SEQ ID NO: 782367 - RNA, 19 nt, Artificial Sequence
  Description of Artificial Sequence: Synthetic oligonucleotide
  Antisense strand to SEQ ID NO: 782366
aucauuacucagcaccgga

SEQ ID NO: 782368 - RNA, 19 nt, Artificial Sequence
  Description of Artificial Sequence: Synthetic oligonucleotide
  Sense strand starting at position 3198 of SEQ ID NO: 587305
gaguaaugaucugcucgga

SEQ ID NO: 782369 - RNA, 19 nt, Artificial Sequence
  Description of Artificial Sequence: Synthetic oligonucleotide
  Antisense strand to SEQ ID NO: 782368
uccgagcagaucauuacuc

SEQ ID NO: 782370 - RNA, 19 nt, Artificial Sequence
  Description of Artificial Sequence: Synthetic oligonucleotide
  Sense strand starting at position 3201 of SEQ ID NO: 587305
uaaugaucugcucggaaag

SEQ ID NO: 782371 - RNA, 19 nt, Artificial Sequence
  Description of Artificial Sequence: Synthetic oligonucleotide
  Antisense strand to SEQ ID NO: 782370
cuuuccgagcagaucauua

SEQ ID NO: 782372 - RNA, 19 nt, Artificial Sequence
  Description of Artificial Sequence: Synthetic oligonucleotide
  Sense strand starting at position 3202 of SEQ ID NO: 587305
aaugaucugcucggaaagu

SEQ ID NO: 782373 - RNA, 19 nt, Artificial Sequence
  Description of Artificial Sequence: Synthetic oligonucleotide
  Antisense strand to SEQ ID NO: 782372
acuuuccgagcagaucauu

SEQ ID NO: 782374 - RNA, 19 nt, Artificial Sequence
  Description of Artificial Sequence: Synthetic oligonucleotide
  Sense strand starting at position 3267 of SEQ ID NO: 587305
uaaacugcccguggauaaa

SEQ ID NO: 782375 - RNA, 19 nt, Artificial Sequence
  Description of Artificial Sequence: Synthetic oligonucleotide
  Antisense strand to SEQ ID NO: 782374
uuuauccacgggcaguuua

SEQ ID NO: 782376 - RNA, 19 nt, Artificial Sequence
  Description of Artificial Sequence: Synthetic oligonucleotide
  Sense strand starting at position 3475 of SEQ ID NO: 587305
cgauuugacagucgccuuu

SEQ ID NO: 782377 - RNA, 19 nt, Artificial Sequence
  Description of Artificial Sequence: Synthetic oligonucleotide
  Antisense strand to SEQ ID NO: 782376
aaaggcgacugucaaaucg

SEQ ID NO: 782378 - RNA, 19 nt, Artificial Sequence
  Description of Artificial Sequence: Synthetic oligonucleotide
  Sense strand starting at position 3496 of SEQ ID NO: 587305
uguguuaggccuuugcgga

SEQ ID NO: 782379 - RNA, 19 nt, Artificial Sequence
  Description of Artificial Sequence: Synthetic oligonucleotide
  Antisense strand to SEQ ID NO: 782378
uccgcaaaggccuaacaca

SEQ ID NO: 782380 - RNA, 19 nt, Artificial Sequence
  Description of Artificial Sequence: Synthetic oligonucleotide
  Sense strand starting at position 3636 of SEQ ID NO: 587305
ggcagacauuuauugcguu

SEQ ID NO: 782381 - RNA, 19 nt, Artificial Sequence
  Description of Artificial Sequence: Synthetic oligonucleotide
  Antisense strand to SEQ ID NO: 782380
aacgcaauaaaugucugcc

SEQ ID NO: 782382 - RNA, 19 nt, Artificial Sequence
  Description of Artificial Sequence: Synthetic oligonucleotide
  Sense strand starting at position 3640 of SEQ ID NO: 587305
gacauuuauugcguugcua

SEQ ID NO: 782383 - RNA, 19 nt, Artificial Sequence
  Description of Artificial Sequence: Synthetic oligonucleotide
  Antisense strand to SEQ ID NO: 782382
uagcaacgcaauaaauguc

SEQ ID NO: 782384 - RNA, 19 nt, Artificial Sequence
  Description of Artificial Sequence: Synthetic oligonucleotide
  Sense strand starting at position 3642 of SEQ ID NO: 587305
cauuuauugcguugcuaaa

SEQ ID NO: 782385 - RNA, 19 nt, Artificial Sequence
  Description of Artificial Sequence: Synthetic oligonucleotide
  Antisense strand to SEQ ID NO: 782384
uuuagcaacgcaauaaaug

SEQ ID NO: 782386 - RNA, 19 nt, Artificial Sequence
  Description of Artificial Sequence: Synthetic oligonucleotide
  Sense strand starting at position 3669 of SEQ ID NO: 587305
agaaguaacucagccuuua

SEQ ID NO: 782387 - RNA, 19 nt, Artificial Sequence
  Description of Artificial Sequence: Synthetic oligonucleotide
  Antisense strand to SEQ ID NO: 782386
uaaaggcugaguuacuucu

SEQ ID NO: 782388 - RNA, 19 nt, Artificial Sequence
  Description of Artificial Sequence: Synthetic oligonucleotide
  Sense strand starting at position 3682 of SEQ ID NO: 587305
ccuuuacgagucuaaggua

SEQ ID NO: 782389 - RNA, 19 nt, Artificial Sequence
  Description of Artificial Sequence: Synthetic oligonucleotide
  Antisense strand to SEQ ID NO: 782388
uaccuuagacucguaaagg

SEQ ID NO: 782390 - RNA, 19 nt, Artificial Sequence
  Description of Artificial Sequence: Synthetic oligonucleotide
  Sense strand starting at position 3691 of SEQ ID NO: 587305
gucuaagguaaagguaaau

SEQ ID NO: 782391 - RNA, 19 nt, Artificial Sequence
  Description of Artificial Sequence: Synthetic oligonucleotide
  Antisense strand to SEQ ID NO: 782390
auuuaccuuuaccuuagac

SEQ ID NO: 782392 - RNA, 19 nt, Artificial Sequence
  Description of Artificial Sequence: Synthetic oligonucleotide
  Sense strand starting at position 3815 of SEQ ID NO: 587305
ccgauuauucaguguagag

SEQ ID NO: 782393 - RNA, 19 nt, Artificial Sequence
  Description of Artificial Sequence: Synthetic oligonucleotide
  Antisense strand to SEQ ID NO: 782392
cucuacacugaauaaucgg

SEQ ID NO: 782394 - RNA, 19 nt, Artificial Sequence
  Description of Artificial Sequence: Synthetic oligonucleotide
  Sense strand starting at position 3831 of SEQ ID NO: 587305
gaguaaacaugcuccgaaa

SEQ ID NO: 782395 - RNA, 19 nt, Artificial Sequence
  Description of Artificial Sequence: Synthetic oligonucleotide
  Antisense strand to SEQ ID NO: 782394
uuucggagcauguuuacuc

SEQ ID NO: 782396 - RNA, 19 nt, Artificial Sequence
  Description of Artificial Sequence: Synthetic oligonucleotide
  Sense strand starting at position 3865 of SEQ ID NO: 587305
ugguuuguuggcuauaauu

SEQ ID NO: 782397 - RNA, 19 nt, Artificial Sequence
  Description of Artificial Sequence: Synthetic oligonucleotide
  Antisense strand to SEQ ID NO: 782396
aauuauagccaacaaacca

SEQ ID NO: 782398 - RNA, 19 nt, Artificial Sequence
  Description of Artificial Sequence: Synthetic oligonucleotide
  Sense strand starting at position 3925 of SEQ ID NO: 587305
ucagaauucguauaaauuc

SEQ ID NO: 782399 - RNA, 19 nt, Artificial Sequence
  Description of Artificial Sequence: Synthetic oligonucleotide
  Antisense strand to SEQ ID NO: 782398
gaauuuauacgaauucuga

SEQ ID NO: 782400 - RNA, 19 nt, Artificial Sequence
  Description of Artificial Sequence: Synthetic oligonucleotide
  Sense strand starting at position 3938 of SEQ ID NO: 587305
aaauucgaguucuugaguu

SEQ ID NO: 782401 - RNA, 19 nt, Artificial Sequence
  Description of Artificial Sequence: Synthetic oligonucleotide
  Antisense strand to SEQ ID NO: 782400
aacucaagaacucgaauuu

SEQ ID NO: 782402 - RNA, 19 nt, Artificial Sequence
  Description of Artificial Sequence: Synthetic oligonucleotide
  Sense strand starting at position 3940 of SEQ ID NO: 587305
auucgaguucuugaguuau

SEQ ID NO: 782403 - RNA, 19 nt, Artificial Sequence
  Description of Artificial Sequence: Synthetic oligonucleotide
  Antisense strand to SEQ ID NO: 782402
auaacucaagaacucgaau

SEQ ID NO: 782404 - RNA, 19 nt, Artificial Sequence
  Description of Artificial Sequence: Synthetic oligonucleotide
  Sense strand starting at position 3946 of SEQ ID NO: 587305
guucuugaguuaucaugaa

SEQ ID NO: 782405 - RNA, 19 nt, Artificial Sequence
  Description of Artificial Sequence: Synthetic oligonucleotide
  Antisense strand to SEQ ID NO: 782404
uucaugauaacucaagaac

SEQ ID NO: 782406 - RNA, 19 nt, Artificial Sequence
  Description of Artificial Sequence: Synthetic oligonucleotide
  Sense strand starting at position 3950 of SEQ ID NO: 587305
uugaguuaucaugaaugcu

SEQ ID NO: 782407 - RNA, 19 nt, Artificial Sequence
  Description of Artificial Sequence: Synthetic oligonucleotide
  Antisense strand to SEQ ID NO: 782406
agcauucaugauaacucaa

SEQ ID NO: 782408 - RNA, 19 nt, Artificial Sequence
  Description of Artificial Sequence: Synthetic oligonucleotide
  Sense strand starting at position 324 of SEQ ID NO: 587306
guugguaagcuguaugaua

SEQ ID NO: 782409 - RNA, 19 nt, Artificial Sequence
  Description of Artificial Sequence: Synthetic oligonucleotide
  Antisense strand to SEQ ID NO: 782408
uaucauacagcuuaccaac

SEQ ID NO: 782410 - RNA, 19 nt, Artificial Sequence
  Description of Artificial Sequence: Synthetic oligonucleotide
  Sense strand starting at position 326 of SEQ ID NO: 587306
ugguaagcuguaugauaug

SEQ ID NO: 782411 - RNA, 19 nt, Artificial Sequence
  Description of Artificial Sequence: Synthetic oligonucleotide
  Antisense strand to SEQ ID NO: 782410
cauaucauacagcuuacca

SEQ ID NO: 782412 - RNA, 19 nt, Artificial Sequence
  Description of Artificial Sequence: Synthetic oligonucleotide
  Sense strand starting at position 495 of SEQ ID NO: 587306
uuuguucuauuaucggaaa

SEQ ID NO: 782413 - RNA, 19 nt, Artificial Sequence
  Description of Artificial Sequence: Synthetic oligonucleotide
  Antisense strand to SEQ ID NO: 782412
uuuccgauaauagaacaaa

SEQ ID NO: 782414 - RNA, 19 nt, Artificial Sequence
  Description of Artificial Sequence: Synthetic oligonucleotide
  Sense strand starting at position 497 of SEQ ID NO: 587306
uguucuauuaucggaaaug

SEQ ID NO: 782415 - RNA, 19 nt, Artificial Sequence
  Description of Artificial Sequence: Synthetic oligonucleotide
  Antisense strand to SEQ ID NO: 782414
cauuuccgauaauagaaca

SEQ ID NO: 782416 - RNA, 19 nt, Artificial Sequence
  Description of Artificial Sequence: Synthetic oligonucleotide
  Sense strand starting at position 655 of SEQ ID NO: 587306
gauuaucuuugcccuggau

SEQ ID NO: 782417 - RNA, 19 nt, Artificial Sequence
  Description of Artificial Sequence: Synthetic oligonucleotide
  Antisense strand to SEQ ID NO: 782416
auccagggcaaagauaauc

SEQ ID NO: 782418 - RNA, 19 nt, Artificial Sequence
  Description of Artificial Sequence: Synthetic oligonucleotide
  Sense strand starting at position 657 of SEQ ID NO: 587306
uuaucuuugcccuggauaa

SEQ ID NO: 782419 - RNA, 19 nt, Artificial Sequence
  Description of Artificial Sequence: Synthetic oligonucleotide
  Antisense strand to SEQ ID NO: 782418
uuauccagggcaaagauaa

SEQ ID NO: 782420 - RNA, 19 nt, Artificial Sequence
  Description of Artificial Sequence: Synthetic oligonucleotide
  Sense strand starting at position 661 of SEQ ID NO: 587306
cuuugcccuggauaaagua

SEQ ID NO: 782421 - RNA, 19 nt, Artificial Sequence
  Description of Artificial Sequence: Synthetic oligonucleotide
  Antisense strand to SEQ ID NO: 782420
uacuuuauccagggcaaag

SEQ ID NO: 782422 - RNA, 19 nt, Artificial Sequence
  Description of Artificial Sequence: Synthetic oligonucleotide
  Sense strand starting at position 684 of SEQ ID NO: 587306
augacaaugugggcauaau

SEQ ID NO: 782423 - RNA, 19 nt, Artificial Sequence
  Description of Artificial Sequence: Synthetic oligonucleotide
  Antisense strand to SEQ ID NO: 782422
auuaugcccacauugucau

SEQ ID NO: 782424 - RNA, 19 nt, Artificial Sequence
  Description of Artificial Sequence: Synthetic oligonucleotide
  Sense strand starting at position 1301 of SEQ ID NO: 587306
cucuccuaaguaugagaaa

SEQ ID NO: 782425 - RNA, 19 nt, Artificial Sequence
  Description of Artificial Sequence: Synthetic oligonucleotide
  Antisense strand to SEQ ID NO: 782424
uuucucauacuuaggagag

SEQ ID NO: 782426 - RNA, 19 nt, Artificial Sequence
  Description of Artificial Sequence: Synthetic oligonucleotide
  Sense strand starting at position 1367 of SEQ ID NO: 587306
gacagagguagcuguacuu

SEQ ID NO: 782427 - RNA, 19 nt, Artificial Sequence
  Description of Artificial Sequence: Synthetic oligonucleotide
  Antisense strand to SEQ ID NO: 782426
aaguacagcuaccucuguc

SEQ ID NO: 782428 - RNA, 19 nt, Artificial Sequence
  Description of Artificial Sequence: Synthetic oligonucleotide
  Sense strand starting at position 1561 of SEQ ID NO: 587306
uugugauuugacuggucuu

SEQ ID NO: 782429 - RNA, 19 nt, Artificial Sequence
  Description of Artificial Sequence: Synthetic oligonucleotide
  Antisense strand to SEQ ID NO: 782428
aagaccagucaaaucacaa

SEQ ID NO: 782430 - RNA, 19 nt, Artificial Sequence
  Description of Artificial Sequence: Synthetic oligonucleotide
  Sense strand starting at position 1562 of SEQ ID NO: 587306
ugugauuugacuggucuuu

SEQ ID NO: 782431 - RNA, 19 nt, Artificial Sequence
  Description of Artificial Sequence: Synthetic oligonucleotide
  Antisense strand to SEQ ID NO: 782430
aaagaccagucaaaucaca

SEQ ID NO: 782432 - RNA, 19 nt, Artificial Sequence
  Description of Artificial Sequence: Synthetic oligonucleotide
  Sense strand starting at position 1568 of SEQ ID NO: 587306
uugacuggucuuuggugaa

SEQ ID NO: 782433 - RNA, 19 nt, Artificial Sequence
  Description of Artificial Sequence: Synthetic oligonucleotide
  Antisense strand to SEQ ID NO: 782432
uucaccaaagaccagucaa

SEQ ID NO: 782434 - RNA, 19 nt, Artificial Sequence
  Description of Artificial Sequence: Synthetic oligonucleotide
  Sense strand starting at position 1766 of SEQ ID NO: 587306
acaaaucgauucucucaga

SEQ ID NO: 782435 - RNA, 19 nt, Artificial Sequence
  Description of Artificial Sequence: Synthetic oligonucleotide
  Antisense strand to SEQ ID NO: 782434
ucugagagaaucgauuugu

SEQ ID NO: 782436 - RNA, 19 nt, Artificial Sequence
  Description of Artificial Sequence: Synthetic oligonucleotide
  Sense strand starting at position 1939 of SEQ ID NO: 587306
guccacuaagcagauugau

SEQ ID NO: 782437 - RNA, 19 nt, Artificial Sequence
  Description of Artificial Sequence: Synthetic oligonucleotide
  Antisense strand to SEQ ID NO: 782436
aucaaucugcuuaguggac

SEQ ID NO: 782438 - RNA, 19 nt, Artificial Sequence
  Description of Artificial Sequence: Synthetic oligonucleotide
  Sense strand starting at position 1984 of SEQ ID NO: 587306
auacuuccaccgugauuac

SEQ ID NO: 782439 - RNA, 19 nt, Artificial Sequence
  Description of Artificial Sequence: Synthetic oligonucleotide
  Antisense strand to SEQ ID NO: 782438
guaaucacgguggaaguau

SEQ ID NO: 782440 - RNA, 19 nt, Artificial Sequence
  Description of Artificial Sequence: Synthetic oligonucleotide
  Sense strand starting at position 1996 of SEQ ID NO: 587306
ugauuacaugcucaccagu

SEQ ID NO: 782441 - RNA, 19 nt, Artificial Sequence
  Description of Artificial Sequence: Synthetic oligonucleotide
  Antisense strand to SEQ ID NO: 782440
acuggugagcauguaauca

SEQ ID NO: 782442 - RNA, 19 nt, Artificial Sequence
  Description of Artificial Sequence: Synthetic oligonucleotide
  Sense strand starting at position 2039 of SEQ ID NO: 587306
agcuuuauaugguugggaa

SEQ ID NO: 782443 - RNA, 19 nt, Artificial Sequence
  Description of Artificial Sequence: Synthetic oligonucleotide
  Antisense strand to SEQ ID NO: 782442
uucccaaccauauaaagcu

SEQ ID NO: 782444 - RNA, 19 nt, Artificial Sequence
  Description of Artificial Sequence: Synthetic oligonucleotide
  Sense strand starting at position 2040 of SEQ ID NO: 587306
gcuuuauaugguugggaau

SEQ ID NO: 782445 - RNA, 19 nt, Artificial Sequence
  Description of Artificial Sequence: Synthetic oligonucleotide
  Antisense strand to SEQ ID NO: 782444
auucccaaccauauaaagc

SEQ ID NO: 782446 - RNA, 19 nt, Artificial Sequence
  Description of Artificial Sequence: Synthetic oligonucleotide
  Sense strand starting at position 2041 of SEQ ID NO: 587306
cuuuauaugguugggaauc

SEQ ID NO: 782447 - RNA, 19 nt, Artificial Sequence
  Description of Artificial Sequence: Synthetic oligonucleotide
  Antisense strand to SEQ ID NO: 782446
gauucccaaccauauaaag

SEQ ID NO: 782448 - RNA, 19 nt, Artificial Sequence
  Description of Artificial Sequence: Synthetic oligonucleotide
  Sense strand starting at position 2316 of SEQ ID NO: 587306
ggaagugguuaacuucagu

SEQ ID NO: 782449 - RNA, 19 nt, Artificial Sequence
  Description of Artificial Sequence: Synthetic oligonucleotide
  Antisense strand to SEQ ID NO: 782448
acugaaguuaaccacuucc

SEQ ID NO: 782450 - RNA, 19 nt, Artificial Sequence
  Description of Artificial Sequence: Synthetic oligonucleotide
  Sense strand starting at position 2319 of SEQ ID NO: 587306
agugguuaacuucagugua

SEQ ID NO: 782451 - RNA, 19 nt, Artificial Sequence
  Description of Artificial Sequence: Synthetic oligonucleotide
  Antisense strand to SEQ ID NO: 782450
uacacugaaguuaaccacu

SEQ ID NO: 782452 - RNA, 19 nt, Artificial Sequence
  Description of Artificial Sequence: Synthetic oligonucleotide
  Sense strand starting at position 2424 of SEQ ID NO: 587306
auaacugaauuaucucgau

SEQ ID NO: 782453 - RNA, 19 nt, Artificial Sequence
  Description of Artificial Sequence: Synthetic oligonucleotide
  Antisense strand to SEQ ID NO: 782452
aucgagauaauucaguuau

SEQ ID NO: 782454 - RNA, 19 nt, Artificial Sequence
  Description of Artificial Sequence: Synthetic oligonucleotide
  Sense strand starting at position 2557 of SEQ ID NO: 587306
uuaacauggucuguaagga

SEQ ID NO: 782455 - RNA, 19 nt, Artificial Sequence
  Description of Artificial Sequence: Synthetic oligonucleotide
  Antisense strand to SEQ ID NO: 782454
uccuuacagaccauguuaa

SEQ ID NO: 782456 - RNA, 19 nt, Artificial Sequence
  Description of Artificial Sequence: Synthetic oligonucleotide
  Sense strand starting at position 2601 of SEQ ID NO: 587306
uuuauaucgcuggaauaca

SEQ ID NO: 782457 - RNA, 19 nt, Artificial Sequence
  Description of Artificial Sequence: Synthetic oligonucleotide
  Antisense strand to SEQ ID NO: 782456
uguauuccagcgauauaaa

SEQ ID NO: 782458 - RNA, 19 nt, Artificial Sequence
  Description of Artificial Sequence: Synthetic oligonucleotide
  Sense strand starting at position 2757 of SEQ ID NO: 587306
ugagcuugacaugggcaau

SEQ ID NO: 782459 - RNA, 19 nt, Artificial Sequence
  Description of Artificial Sequence: Synthetic oligonucleotide
  Antisense strand to SEQ ID NO: 782458
auugcccaugucaagcuca

SEQ ID NO: 782460 - RNA, 19 nt, Artificial Sequence
  Description of Artificial Sequence: Synthetic oligonucleotide
  Sense strand starting at position 2809 of SEQ ID NO: 587306
ccuaauaauuaggcuggua

SEQ ID NO: 782461 - RNA, 19 nt, Artificial Sequence
  Description of Artificial Sequence: Synthetic oligonucleotide
  Antisense strand to SEQ ID NO: 782460
uaccagccuaauuauuagg

SEQ ID NO: 782462 - RNA, 19 nt, Artificial Sequence
  Description of Artificial Sequence: Synthetic oligonucleotide
  Sense strand starting at position 2811 of SEQ ID NO: 587306
uaauaauuaggcugguauu

SEQ ID NO: 782463 - RNA, 19 nt, Artificial Sequence
  Description of Artificial Sequence: Synthetic oligonucleotide
  Antisense strand to SEQ ID NO: 782462
aauaccagccuaauuauua

SEQ ID NO: 782464 - RNA, 19 nt, Artificial Sequence
  Description of Artificial Sequence: Synthetic oligonucleotide
  Sense strand starting at position 2821 of SEQ ID NO: 587306
gcugguauucuuuaaggca

SEQ ID NO: 782465 - RNA, 19 nt, Artificial Sequence
  Description of Artificial Sequence: Synthetic oligonucleotide
  Antisense strand to SEQ ID NO: 782464
ugccuuaaagaauaccagc

SEQ ID NO: 782466 - RNA, 19 nt, Artificial Sequence
  Description of Artificial Sequence: Synthetic oligonucleotide
  Sense strand starting at position 2961 of SEQ ID NO: 587306
ggagauugguuccuugucu

SEQ ID NO: 782467 - RNA, 19 nt, Artificial Sequence
  Description of Artificial Sequence: Synthetic oligonucleotide
  Antisense strand to SEQ ID NO: 782466
agacaaggaaccaaucucc

SEQ ID NO: 782468 - RNA, 19 nt, Artificial Sequence
  Description of Artificial Sequence: Synthetic oligonucleotide
  Sense strand starting at position 2962 of SEQ ID NO: 587306
gagauugguuccuugucua

SEQ ID NO: 782469 - RNA, 19 nt, Artificial Sequence
  Description of Artificial Sequence: Synthetic oligonucleotide
  Antisense strand to SEQ ID NO: 782468
uagacaaggaaccaaucuc

SEQ ID NO: 782470 - RNA, 19 nt, Artificial Sequence
  Description of Artificial Sequence: Synthetic oligonucleotide
  Sense strand starting at position 3271 of SEQ ID NO: 587306
aaucuugugccagagguuu

SEQ ID NO: 782471 - RNA, 19 nt, Artificial Sequence
  Description of Artificial Sequence: Synthetic oligonucleotide
  Antisense strand to SEQ ID NO: 782470
aaaccucuggcacaagauu

SEQ ID NO: 782472 - RNA, 19 nt, Artificial Sequence
  Description of Artificial Sequence: Synthetic oligonucleotide
  Sense strand starting at position 3419 of SEQ ID NO: 587306
ccaauauggguuugggaau

SEQ ID NO: 782473 - RNA, 19 nt, Artificial Sequence
  Description of Artificial Sequence: Synthetic oligonucleotide
  Antisense strand to SEQ ID NO: 782472
auucccaaacccauauugg

SEQ ID NO: 782474 - RNA, 19 nt, Artificial Sequence
  Description of Artificial Sequence: Synthetic oligonucleotide
  Sense strand starting at position 3444 of SEQ ID NO: 587306
guggacccucgauaucaca

SEQ ID NO: 782475 - RNA, 19 nt, Artificial Sequence
  Description of Artificial Sequence: Synthetic oligonucleotide
  Antisense strand to SEQ ID NO: 782474
ugugauaucgaggguccac

SEQ ID NO: 782476 - RNA, 19 nt, Artificial Sequence
  Description of Artificial Sequence: Synthetic oligonucleotide
  Sense strand starting at position 3474 of SEQ ID NO: 587306
ucuguuugggcucauaaau

SEQ ID NO: 782477 - RNA, 19 nt, Artificial Sequence
  Description of Artificial Sequence: Synthetic oligonucleotide
  Antisense strand to SEQ ID NO: 782476
auuuaugagcccaaacaga

SEQ ID NO: 782478 - RNA, 19 nt, Artificial Sequence
  Description of Artificial Sequence: Synthetic oligonucleotide
  Sense strand starting at position 3536 of SEQ ID NO: 587306
gucuuuguuagggagaucu

SEQ ID NO: 782479 - RNA, 19 nt, Artificial Sequence
  Description of Artificial Sequence: Synthetic oligonucleotide
  Antisense strand to SEQ ID NO: 782478
agaucucccuaacaaagac

SEQ ID NO: 782480 - RNA, 19 nt, Artificial Sequence
  Description of Artificial Sequence: Synthetic oligonucleotide
  Sense strand starting at position 3554 of SEQ ID NO: 587306
ugaacccuguuugucuaaa

SEQ ID NO: 782481 - RNA, 19 nt, Artificial Sequence
  Description of Artificial Sequence: Synthetic oligonucleotide
  Antisense strand to SEQ ID NO: 782480
uuuagacaaacaggguuca

SEQ ID NO: 782482 - RNA, 19 nt, Artificial Sequence
  Description of Artificial Sequence: Synthetic oligonucleotide
  Sense strand starting at position 3590 of SEQ ID NO: 587306
ucaguacauguugaaggua

SEQ ID NO: 782483 - RNA, 19 nt, Artificial Sequence
  Description of Artificial Sequence: Synthetic oligonucleotide
  Antisense strand to SEQ ID NO: 782482
uaccuucaacauguacuga

SEQ ID NO: 782484 - RNA, 19 nt, Artificial Sequence
  Description of Artificial Sequence: Synthetic oligonucleotide
  Sense strand starting at position 3593 of SEQ ID NO: 587306
guacauguugaagguauaa

SEQ ID NO: 782485 - RNA, 19 nt, Artificial Sequence
  Description of Artificial Sequence: Synthetic oligonucleotide
  Antisense strand to SEQ ID NO: 782484
uuauaccuucaacauguac

SEQ ID NO: 782486 - RNA, 19 nt, Artificial Sequence
  Description of Artificial Sequence: Synthetic oligonucleotide
  Sense strand starting at position 3939 of SEQ ID NO: 587306
accuuaagaugggucacua

SEQ ID NO: 782487 - RNA, 19 nt, Artificial Sequence
  Description of Artificial Sequence: Synthetic oligonucleotide
  Antisense strand to SEQ ID NO: 782486
uagugacccaucuuaaggu

SEQ ID NO: 782488 - RNA, 19 nt, Artificial Sequence
  Description of Artificial Sequence: Synthetic oligonucleotide
  Sense strand starting at position 16 of SEQ ID NO: 587307
gaguuucugccaggauaua

SEQ ID NO: 782489 - RNA, 19 nt, Artificial Sequence
  Description of Artificial Sequence: Synthetic oligonucleotide
  Antisense strand to SEQ ID NO: 782488
uauauccuggcagaaacuc

SEQ ID NO: 782490 - RNA, 19 nt, Artificial Sequence
  Description of Artificial Sequence: Synthetic oligonucleotide
  Sense strand starting at position 183 of SEQ ID NO: 587307
ucgcuaggacuauagguaa

SEQ ID NO: 782491 - RNA, 19 nt, Artificial Sequence
  Description of Artificial Sequence: Synthetic oligonucleotide
  Antisense strand to SEQ ID NO: 782490
uuaccuauaguccuagcga

SEQ ID NO: 782492 - RNA, 19 nt, Artificial Sequence
  Description of Artificial Sequence: Synthetic oligonucleotide
  Sense strand starting at position 605 of SEQ ID NO: 587307
ugcauaaugguagaugcua

SEQ ID NO: 782493 - RNA, 19 nt, Artificial Sequence
  Description of Artificial Sequence: Synthetic oligonucleotide
  Antisense strand to SEQ ID NO: 782492
uagcaucuaccauuaugca

SEQ ID NO: 782494 - RNA, 19 nt, Artificial Sequence
  Description of Artificial Sequence: Synthetic oligonucleotide
  Sense strand starting at position 692 of SEQ ID NO: 587307
ugagucaccuacuugaacu

SEQ ID NO: 782495 - RNA, 19 nt, Artificial Sequence
  Description of Artificial Sequence: Synthetic oligonucleotide
  Antisense strand to SEQ ID NO: 782494
aguucaaguaggugacuca

SEQ ID NO: 782496 - RNA, 19 nt, Artificial Sequence
  Description of Artificial Sequence: Synthetic oligonucleotide
  Sense strand starting at position 702 of SEQ ID NO: 587307
acuugaacuuucucaugga

SEQ ID NO: 782497 - RNA, 19 nt, Artificial Sequence
  Description of Artificial Sequence: Synthetic oligonucleotide
  Antisense strand to SEQ ID NO: 782496
uccaugagaaaguucaagu

SEQ ID NO: 782498 - RNA, 19 nt, Artificial Sequence
  Description of Artificial Sequence: Synthetic oligonucleotide
  Sense strand starting at position 718 of SEQ ID NO: 587307
ggaacagagcgcuaacauu

SEQ ID NO: 782499 - RNA, 19 nt, Artificial Sequence
  Description of Artificial Sequence: Synthetic oligonucleotide
  Antisense strand to SEQ ID NO: 782498
aauguuagcgcucuguucc

SEQ ID NO: 782500 - RNA, 19 nt, Artificial Sequence
  Description of Artificial Sequence: Synthetic oligonucleotide
  Sense strand starting at position 917 of SEQ ID NO: 587307
cccguaacucacuagaaac

SEQ ID NO: 782501 - RNA, 19 nt, Artificial Sequence
  Description of Artificial Sequence: Synthetic oligonucleotide
  Antisense strand to SEQ ID NO: 782500
guuucuagugaguuacggg

SEQ ID NO: 782502 - RNA, 19 nt, Artificial Sequence
  Description of Artificial Sequence: Synthetic oligonucleotide
  Sense strand starting at position 1136 of SEQ ID NO: 587307
gagggcaucugucccuaua

SEQ ID NO: 782503 - RNA, 19 nt, Artificial Sequence
  Description of Artificial Sequence: Synthetic oligonucleotide
  Antisense strand to SEQ ID NO: 782502
uauagggacagaugcccuc

SEQ ID NO: 782504 - RNA, 19 nt, Artificial Sequence
  Description of Artificial Sequence: Synthetic oligonucleotide
  Sense strand starting at position 1138 of SEQ ID NO: 587307
gggcaucugucccuauaaa

SEQ ID NO: 782505 - RNA, 19 nt, Artificial Sequence
  Description of Artificial Sequence: Synthetic oligonucleotide
  Antisense strand to SEQ ID NO: 782504
uuuauagggacagaugccc

SEQ ID NO: 782506 - RNA, 19 nt, Artificial Sequence
  Description of Artificial Sequence: Synthetic oligonucleotide
  Sense strand starting at position 1139 of SEQ ID NO: 587307
ggcaucugucccuauaaag

SEQ ID NO: 782507 - RNA, 19 nt, Artificial Sequence
  Description of Artificial Sequence: Synthetic oligonucleotide
  Antisense strand to SEQ ID NO: 782506
cuuuauagggacagaugcc

SEQ ID NO: 782508 - RNA, 19 nt, Artificial Sequence
  Description of Artificial Sequence: Synthetic oligonucleotide
  Sense strand starting at position 1149 of SEQ ID NO: 587307
ccuauaaagucaccuguca

SEQ ID NO: 782509 - RNA, 19 nt, Artificial Sequence
  Description of Artificial Sequence: Synthetic oligonucleotide
  Antisense strand to SEQ ID NO: 782508
ugacaggugacuuuauagg

SEQ ID NO: 782510 - RNA, 19 nt, Artificial Sequence
  Description of Artificial Sequence: Synthetic oligonucleotide
  Sense strand starting at position 1417 of SEQ ID NO: 587307
ugcuguguccuagacaauu

SEQ ID NO: 782511 - RNA, 19 nt, Artificial Sequence
  Description of Artificial Sequence: Synthetic oligonucleotide
  Antisense strand to SEQ ID NO: 782510
aauugucuaggacacagca

SEQ ID NO: 782512 - RNA, 19 nt, Artificial Sequence
  Description of Artificial Sequence: Synthetic oligonucleotide
  Sense strand starting at position 1451 of SEQ ID NO: 587307
ugaaucucauucucugaga

SEQ ID NO: 782513 - RNA, 19 nt, Artificial Sequence
  Description of Artificial Sequence: Synthetic oligonucleotide
  Antisense strand to SEQ ID NO: 782512
ucucagagaaugagauuca

SEQ ID NO: 782514 - RNA, 19 nt, Artificial Sequence
  Description of Artificial Sequence: Synthetic oligonucleotide
  Sense strand starting at position 1492 of SEQ ID NO: 587307
uugagaaugugauuccaac

SEQ ID NO: 782515 - RNA, 19 nt, Artificial Sequence
  Description of Artificial Sequence: Synthetic oligonucleotide
  Antisense strand to SEQ ID NO: 782514
guuggaaucacauucucaa

SEQ ID NO: 782516 - RNA, 19 nt, Artificial Sequence
  Description of Artificial Sequence: Synthetic oligonucleotide
  Sense strand starting at position 1583 of SEQ ID NO: 587307
ggaugugauacuuguuuaa

SEQ ID NO: 782517 - RNA, 19 nt, Artificial Sequence
  Description of Artificial Sequence: Synthetic oligonucleotide
  Antisense strand to SEQ ID NO: 782516
uuaaacaaguaucacaucc

SEQ ID NO: 782518 - RNA, 19 nt, Artificial Sequence
  Description of Artificial Sequence: Synthetic oligonucleotide
  Sense strand starting at position 1585 of SEQ ID NO: 587307
augugauacuuguuuaaac

SEQ ID NO: 782519 - RNA, 19 nt, Artificial Sequence
  Description of Artificial Sequence: Synthetic oligonucleotide
  Antisense strand to SEQ ID NO: 782518
guuuaaacaaguaucacau

SEQ ID NO: 782520 - RNA, 19 nt, Artificial Sequence
  Description of Artificial Sequence: Synthetic oligonucleotide
  Sense strand starting at position 1738 of SEQ ID NO: 587307
uugucaugccagcaacaaa

SEQ ID NO: 782521 - RNA, 19 nt, Artificial Sequence
  Description of Artificial Sequence: Synthetic oligonucleotide
  Antisense strand to SEQ ID NO: 782520
uuuguugcuggcaugacaa

SEQ ID NO: 782522 - RNA, 19 nt, Artificial Sequence
  Description of Artificial Sequence: Synthetic oligonucleotide
  Sense strand starting at position 1840 of SEQ ID NO: 587307
uuuguccuucuggaauaaa

SEQ ID NO: 782523 - RNA, 19 nt, Artificial Sequence
  Description of Artificial Sequence: Synthetic oligonucleotide
  Antisense strand to SEQ ID NO: 782522
uuuauuccagaaggacaaa

SEQ ID NO: 782524 - RNA, 19 nt, Artificial Sequence
  Description of Artificial Sequence: Synthetic oligonucleotide
  Sense strand starting at position 1891 of SEQ ID NO: 587307
cuuaccuuucuguaaguca

SEQ ID NO: 782525 - RNA, 19 nt, Artificial Sequence
  Description of Artificial Sequence: Synthetic oligonucleotide
  Antisense strand to SEQ ID NO: 782524
ugacuuacagaaagguaag

SEQ ID NO: 782526 - RNA, 19 nt, Artificial Sequence
  Description of Artificial Sequence: Synthetic oligonucleotide
  Sense strand starting at position 1894 of SEQ ID NO: 587307
accuuucuguaagucacaa

SEQ ID NO: 782527 - RNA, 19 nt, Artificial Sequence
  Description of Artificial Sequence: Synthetic oligonucleotide
  Antisense strand to SEQ ID NO: 782526
uugugacuuacagaaaggu

SEQ ID NO: 782528 - RNA, 19 nt, Artificial Sequence
  Description of Artificial Sequence: Synthetic oligonucleotide
  Sense strand starting at position 1941 of SEQ ID NO: 587307
uucaguggucgagacucuu

SEQ ID NO: 782529 - RNA, 19 nt, Artificial Sequence
  Description of Artificial Sequence: Synthetic oligonucleotide
  Antisense strand to SEQ ID NO: 782528
aagagucucgaccacugaa

SEQ ID NO: 782530 - RNA, 19 nt, Artificial Sequence
  Description of Artificial Sequence: Synthetic oligonucleotide
  Sense strand starting at position 2073 of SEQ ID NO: 587307
agagccacuggguaucaua

SEQ ID NO: 782531 - RNA, 19 nt, Artificial Sequence
  Description of Artificial Sequence: Synthetic oligonucleotide
  Antisense strand to SEQ ID NO: 782530
uaugauacccaguggcucu

SEQ ID NO: 782532 - RNA, 19 nt, Artificial Sequence
  Description of Artificial Sequence: Synthetic oligonucleotide
  Sense strand starting at position 2260 of SEQ ID NO: 587307
gagugugagguucaugaca

SEQ ID NO: 782533 - RNA, 19 nt, Artificial Sequence
  Description of Artificial Sequence: Synthetic oligonucleotide
  Antisense strand to SEQ ID NO: 782532
ugucaugaaccucacacuc

SEQ ID NO: 782534 - RNA, 19 nt, Artificial Sequence
  Description of Artificial Sequence: Synthetic oligonucleotide
  Sense strand starting at position 2386 of SEQ ID NO: 587307
augucugagcaaugacaca

SEQ ID NO: 782535 - RNA, 19 nt, Artificial Sequence
  Description of Artificial Sequence: Synthetic oligonucleotide
  Antisense strand to SEQ ID NO: 782534
ugugucauugcucagacau

SEQ ID NO: 782536 - RNA, 19 nt, Artificial Sequence
  Description of Artificial Sequence: Synthetic oligonucleotide
  Sense strand starting at position 2435 of SEQ ID NO: 587307
auaaaugacucagaagaca

SEQ ID NO: 782537 - RNA, 19 nt, Artificial Sequence
  Description of Artificial Sequence: Synthetic oligonucleotide
  Antisense strand to SEQ ID NO: 782536
ugucuucugagucauuuau

SEQ ID NO: 782538 - RNA, 19 nt, Artificial Sequence
  Description of Artificial Sequence: Synthetic oligonucleotide
  Sense strand starting at position 2503 of SEQ ID NO: 587307
cuuccaaagucugcaagaa

SEQ ID NO: 782539 - RNA, 19 nt, Artificial Sequence
  Description of Artificial Sequence: Synthetic oligonucleotide
  Antisense strand to SEQ ID NO: 782538
uucuugcagacuuuggaag

SEQ ID NO: 782540 - RNA, 19 nt, Artificial Sequence
  Description of Artificial Sequence: Synthetic oligonucleotide
  Sense strand starting at position 2504 of SEQ ID NO: 587307
uuccaaagucugcaagaaa

SEQ ID NO: 782541 - RNA, 19 nt, Artificial Sequence
  Description of Artificial Sequence: Synthetic oligonucleotide
  Antisense strand to SEQ ID NO: 782540
uuucuugcagacuuuggaa

SEQ ID NO: 782542 - RNA, 19 nt, Artificial Sequence
  Description of Artificial Sequence: Synthetic oligonucleotide
  Sense strand starting at position 2589 of SEQ ID NO: 587307
ggauuuaccuaggaacaac

SEQ ID NO: 782543 - RNA, 19 nt, Artificial Sequence
  Description of Artificial Sequence: Synthetic oligonucleotide
  Antisense strand to SEQ ID NO: 782542
guuguuccuagguaaaucc

SEQ ID NO: 782544 - RNA, 19 nt, Artificial Sequence
  Description of Artificial Sequence: Synthetic oligonucleotide
  Sense strand starting at position 2947 of SEQ ID NO: 587307
ucaugagugcucuaagcca

SEQ ID NO: 782545 - RNA, 19 nt, Artificial Sequence
  Description of Artificial Sequence: Synthetic oligonucleotide
  Antisense strand to SEQ ID NO: 782544
uggcuuagagcacucauga

SEQ ID NO: 782546 - RNA, 19 nt, Artificial Sequence
  Description of Artificial Sequence: Synthetic oligonucleotide
  Sense strand starting at position 3017 of SEQ ID NO: 587307
aguugcaugccagcuguua

SEQ ID NO: 782547 - RNA, 19 nt, Artificial Sequence
  Description of Artificial Sequence: Synthetic oligonucleotide
  Antisense strand to SEQ ID NO: 782546
uaacagcuggcaugcaacu

SEQ ID NO: 782548 - RNA, 19 nt, Artificial Sequence
  Description of Artificial Sequence: Synthetic oligonucleotide
  Sense strand starting at position 3018 of SEQ ID NO: 587307
guugcaugccagcuguuaa

SEQ ID NO: 782549 - RNA, 19 nt, Artificial Sequence
  Description of Artificial Sequence: Synthetic oligonucleotide
  Antisense strand to SEQ ID NO: 782548
uuaacagcuggcaugcaac

SEQ ID NO: 782550 - RNA, 19 nt, Artificial Sequence
  Description of Artificial Sequence: Synthetic oligonucleotide
  Sense strand starting at position 3031 of SEQ ID NO: 587307
uguuaacauccuuggugga

SEQ ID NO: 782551 - RNA, 19 nt, Artificial Sequence
  Description of Artificial Sequence: Synthetic oligonucleotide
  Antisense strand to SEQ ID NO: 782550
uccaccaaggauguuaaca

SEQ ID NO: 782552 - RNA, 19 nt, Artificial Sequence
  Description of Artificial Sequence: Synthetic oligonucleotide
  Sense strand starting at position 3279 of SEQ ID NO: 587307
aaguuugggucuucuuuga

SEQ ID NO: 782553 - RNA, 19 nt, Artificial Sequence
  Description of Artificial Sequence: Synthetic oligonucleotide
  Antisense strand to SEQ ID NO: 782552
ucaaagaagacccaaacuu

SEQ ID NO: 782554 - RNA, 19 nt, Artificial Sequence
  Description of Artificial Sequence: Synthetic oligonucleotide
  Sense strand starting at position 3398 of SEQ ID NO: 587307
aacaaugaucgugacaugu

SEQ ID NO: 782555 - RNA, 19 nt, Artificial Sequence
  Description of Artificial Sequence: Synthetic oligonucleotide
  Antisense strand to SEQ ID NO: 782554
acaugucacgaucauuguu

SEQ ID NO: 782556 - RNA, 19 nt, Artificial Sequence
  Description of Artificial Sequence: Synthetic oligonucleotide
  Sense strand starting at position 3530 of SEQ ID NO: 587307
agccuuugacuacagaauc

SEQ ID NO: 782557 - RNA, 19 nt, Artificial Sequence
  Description of Artificial Sequence: Synthetic oligonucleotide
  Antisense strand to SEQ ID NO: 782556
gauucuguagucaaaggcu

SEQ ID NO: 782558 - RNA, 19 nt, Artificial Sequence
  Description of Artificial Sequence: Synthetic oligonucleotide
  Sense strand starting at position 3594 of SEQ ID NO: 587307
agcuauagacucugccaga

SEQ ID NO: 782559 - RNA, 19 nt, Artificial Sequence
  Description of Artificial Sequence: Synthetic oligonucleotide
  Antisense strand to SEQ ID NO: 782558
ucuggcagagucuauagcu

SEQ ID NO: 782560 - RNA, 19 nt, Artificial Sequence
  Description of Artificial Sequence: Synthetic oligonucleotide
  Sense strand starting at position 3675 of SEQ ID NO: 587307
ggcagaaaucccugcauga

SEQ ID NO: 782561 - RNA, 19 nt, Artificial Sequence
  Description of Artificial Sequence: Synthetic oligonucleotide
  Antisense strand to SEQ ID NO: 782560
ucaugcagggauuucugcc

SEQ ID NO: 782562 - RNA, 19 nt, Artificial Sequence
  Description of Artificial Sequence: Synthetic oligonucleotide
  Sense strand starting at position 3695 of SEQ ID NO: 587307
cccauuccuguuggaagau

SEQ ID NO: 782563 - RNA, 19 nt, Artificial Sequence
  Description of Artificial Sequence: Synthetic oligonucleotide
  Antisense strand to SEQ ID NO: 782562
aucuuccaacaggaauggg

SEQ ID NO: 782564 - RNA, 19 nt, Artificial Sequence
  Description of Artificial Sequence: Synthetic oligonucleotide
  Sense strand starting at position 3865 of SEQ ID NO: 587307
gaagcuauuucuguacugu

SEQ ID NO: 782565 - RNA, 19 nt, Artificial Sequence
  Description of Artificial Sequence: Synthetic oligonucleotide
  Antisense strand to SEQ ID NO: 782564
acaguacagaaauagcuuc

SEQ ID NO: 782566 - RNA, 19 nt, Artificial Sequence
  Description of Artificial Sequence: Synthetic oligonucleotide
  Sense strand starting at position 3926 of SEQ ID NO: 587307
ccuuacaugguuuagacau

SEQ ID NO: 782567 - RNA, 19 nt, Artificial Sequence
  Description of Artificial Sequence: Synthetic oligonucleotide
  Antisense strand to SEQ ID NO: 782566
augucuaaaccauguaagg

SEQ ID NO: 782568 - RNA, 19 nt, Artificial Sequence
  Description of Artificial Sequence: Synthetic oligonucleotide
  Sense strand starting at position 54 of SEQ ID NO: 587308
caugacaggccaugguuaa

SEQ ID NO: 782569 - RNA, 19 nt, Artificial Sequence
  Description of Artificial Sequence: Synthetic oligonucleotide
  Antisense strand to SEQ ID NO: 782568
uuaaccauggccugucaug

SEQ ID NO: 782570 - RNA, 19 nt, Artificial Sequence
  Description of Artificial Sequence: Synthetic oligonucleotide
  Sense strand starting at position 103 of SEQ ID NO: 587308
aagacauggugcccuaaua

SEQ ID NO: 782571 - RNA, 19 nt, Artificial Sequence
  Description of Artificial Sequence: Synthetic oligonucleotide
  Antisense strand to SEQ ID NO: 782570
uauuagggcaccaugucuu

SEQ ID NO: 782572 - RNA, 19 nt, Artificial Sequence
  Description of Artificial Sequence: Synthetic oligonucleotide
  Sense strand starting at position 120 of SEQ ID NO: 587308
uaccaaguguucuuggguu

SEQ ID NO: 782573 - RNA, 19 nt, Artificial Sequence
  Description of Artificial Sequence: Synthetic oligonucleotide
  Antisense strand to SEQ ID NO: 782572
aacccaagaacacuuggua

SEQ ID NO: 782574 - RNA, 19 nt, Artificial Sequence
  Description of Artificial Sequence: Synthetic oligonucleotide
  Sense strand starting at position 122 of SEQ ID NO: 587308
ccaaguguucuuggguuaa

SEQ ID NO: 782575 - RNA, 19 nt, Artificial Sequence
  Description of Artificial Sequence: Synthetic oligonucleotide
  Antisense strand to SEQ ID NO: 782574
uuaacccaagaacacuugg

SEQ ID NO: 782576 - RNA, 19 nt, Artificial Sequence
  Description of Artificial Sequence: Synthetic oligonucleotide
  Sense strand starting at position 124 of SEQ ID NO: 587308
aaguguucuuggguuaaag

SEQ ID NO: 782577 - RNA, 19 nt, Artificial Sequence
  Description of Artificial Sequence: Synthetic oligonucleotide
  Antisense strand to SEQ ID NO: 782576
cuuuaacccaagaacacuu

SEQ ID NO: 782578 - RNA, 19 nt, Artificial Sequence
  Description of Artificial Sequence: Synthetic oligonucleotide
  Sense strand starting at position 277 of SEQ ID NO: 587308
cuugacucuguccacaaga

SEQ ID NO: 782579 - RNA, 19 nt, Artificial Sequence
  Description of Artificial Sequence: Synthetic oligonucleotide
  Antisense strand to SEQ ID NO: 782578
ucuuguggacagagucaag

SEQ ID NO: 782580 - RNA, 19 nt, Artificial Sequence
  Description of Artificial Sequence: Synthetic oligonucleotide
  Sense strand starting at position 279 of SEQ ID NO: 587308
ugacucuguccacaagacu

SEQ ID NO: 782581 - RNA, 19 nt, Artificial Sequence
  Description of Artificial Sequence: Synthetic oligonucleotide
  Antisense strand to SEQ ID NO: 782580
agucuuguggacagaguca

SEQ ID NO: 782582 - RNA, 19 nt, Artificial Sequence
  Description of Artificial Sequence: Synthetic oligonucleotide
  Sense strand starting at position 288 of SEQ ID NO: 587308
ccacaagacugaggaaagu

SEQ ID NO: 782583 - RNA, 19 nt, Artificial Sequence
  Description of Artificial Sequence: Synthetic oligonucleotide
  Antisense strand to SEQ ID NO: 782582
acuuuccucagucuugugg

SEQ ID NO: 782584 - RNA, 19 nt, Artificial Sequence
  Description of Artificial Sequence: Synthetic oligonucleotide
  Sense strand starting at position 444 of SEQ ID NO: 587308
ugcguucuucgggagaaca

SEQ ID NO: 782585 - RNA, 19 nt, Artificial Sequence
  Description of Artificial Sequence: Synthetic oligonucleotide
  Antisense strand to SEQ ID NO: 782584
uguucucccgaagaacgca

SEQ ID NO: 782586 - RNA, 19 nt, Artificial Sequence
  Description of Artificial Sequence: Synthetic oligonucleotide
  Sense strand starting at position 445 of SEQ ID NO: 587308
gcguucuucgggagaacac

SEQ ID NO: 782587 - RNA, 19 nt, Artificial Sequence
  Description of Artificial Sequence: Synthetic oligonucleotide
  Antisense strand to SEQ ID NO: 782586
guguucucccgaagaacgc

SEQ ID NO: 782588 - RNA, 19 nt, Artificial Sequence
  Description of Artificial Sequence: Synthetic oligonucleotide
  Sense strand starting at position 717 of SEQ ID NO: 587308
ggcgggagucacugcgaau

SEQ ID NO: 782589 - RNA, 19 nt, Artificial Sequence
  Description of Artificial Sequence: Synthetic oligonucleotide
  Antisense strand to SEQ ID NO: 782588
auucgcagugacucccgcc

SEQ ID NO: 782590 - RNA, 19 nt, Artificial Sequence
  Description of Artificial Sequence: Synthetic oligonucleotide
  Sense strand starting at position 837 of SEQ ID NO: 587308
auacaaaggguuugucuga

SEQ ID NO: 782591 - RNA, 19 nt, Artificial Sequence
  Description of Artificial Sequence: Synthetic oligonucleotide
  Antisense strand to SEQ ID NO: 782590
ucagacaaacccuuuguau

SEQ ID NO: 782592 - RNA, 19 nt, Artificial Sequence
  Description of Artificial Sequence: Synthetic oligonucleotide
  Sense strand starting at position 838 of SEQ ID NO: 587308
uacaaaggguuugucugaa

SEQ ID NO: 782593 - RNA, 19 nt, Artificial Sequence
  Description of Artificial Sequence: Synthetic oligonucleotide
  Antisense strand to SEQ ID NO: 782592
uucagacaaacccuuugua

SEQ ID NO: 782594 - RNA, 19 nt, Artificial Sequence
  Description of Artificial Sequence: Synthetic oligonucleotide
  Sense strand starting at position 893 of SEQ ID NO: 587308
gcugcaucaacaggaguaa

SEQ ID NO: 782595 - RNA, 19 nt, Artificial Sequence
  Description of Artificial Sequence: Synthetic oligonucleotide
  Antisense strand to SEQ ID NO: 782594
uuacuccuguugaugcagc

SEQ ID NO: 782596 - RNA, 19 nt, Artificial Sequence
  Description of Artificial Sequence: Synthetic oligonucleotide
  Sense strand starting at position 975 of SEQ ID NO: 587308
cgcaguuuaguggugguaa

SEQ ID NO: 782597 - RNA, 19 nt, Artificial Sequence
  Description of Artificial Sequence: Synthetic oligonucleotide
  Antisense strand to SEQ ID NO: 782596
uuaccaccacuaaacugcg

SEQ ID NO: 782598 - RNA, 19 nt, Artificial Sequence
  Description of Artificial Sequence: Synthetic oligonucleotide
  Sense strand starting at position 977 of SEQ ID NO: 587308
caguuuaguggugguaagu

SEQ ID NO: 782599 - RNA, 19 nt, Artificial Sequence
  Description of Artificial Sequence: Synthetic oligonucleotide
  Antisense strand to SEQ ID NO: 782598
acuuaccaccacuaaacug

SEQ ID NO: 782600 - RNA, 19 nt, Artificial Sequence
  Description of Artificial Sequence: Synthetic oligonucleotide
  Sense strand starting at position 987 of SEQ ID NO: 587308
gugguaaguccaggcugua

SEQ ID NO: 782601 - RNA, 19 nt, Artificial Sequence
  Description of Artificial Sequence: Synthetic oligonucleotide
  Antisense strand to SEQ ID NO: 782600
uacagccuggacuuaccac

SEQ ID NO: 782602 - RNA, 19 nt, Artificial Sequence
  Description of Artificial Sequence: Synthetic oligonucleotide
  Sense strand starting at position 1105 of SEQ ID NO: 587308
agguaugggucguugcuga

SEQ ID NO: 782603 - RNA, 19 nt, Artificial Sequence
  Description of Artificial Sequence: Synthetic oligonucleotide
  Antisense strand to SEQ ID NO: 782602
ucagcaacgacccauaccu

SEQ ID NO: 782604 - RNA, 19 nt, Artificial Sequence
  Description of Artificial Sequence: Synthetic oligonucleotide
  Sense strand starting at position 1191 of SEQ ID NO: 587308
ugggcagcugcuugaagaa

SEQ ID NO: 782605 - RNA, 19 nt, Artificial Sequence
  Description of Artificial Sequence: Synthetic oligonucleotide
  Antisense strand to SEQ ID NO: 782604
uucuucaagcagcugccca

SEQ ID NO: 782606 - RNA, 19 nt, Artificial Sequence
  Description of Artificial Sequence: Synthetic oligonucleotide
  Sense strand starting at position 1749 of SEQ ID NO: 587308
cggccauggagucgaugua

SEQ ID NO: 782607 - RNA, 19 nt, Artificial Sequence
  Description of Artificial Sequence: Synthetic oligonucleotide
  Antisense strand to SEQ ID NO: 782606
uacaucgacuccauggccg

SEQ ID NO: 782608 - RNA, 19 nt, Artificial Sequence
  Description of Artificial Sequence: Synthetic oligonucleotide
  Sense strand starting at position 2917 of SEQ ID NO: 587308
ggcaucuugcguuagaccu

SEQ ID NO: 782609 - RNA, 19 nt, Artificial Sequence
  Description of Artificial Sequence: Synthetic oligonucleotide
  Antisense strand to SEQ ID NO: 782608
aggucuaacgcaagaugcc

SEQ ID NO: 782610 - RNA, 19 nt, Artificial Sequence
  Description of Artificial Sequence: Synthetic oligonucleotide
  Sense strand starting at position 2948 of SEQ ID NO: 587308
aggcucuuucccuguuaaa

SEQ ID NO: 782611 - RNA, 19 nt, Artificial Sequence
  Description of Artificial Sequence: Synthetic oligonucleotide
  Antisense strand to SEQ ID NO: 782610
uuuaacagggaaagagccu

SEQ ID NO: 782612 - RNA, 19 nt, Artificial Sequence
  Description of Artificial Sequence: Synthetic oligonucleotide
  Sense strand starting at position 3074 of SEQ ID NO: 587308
ggguuacaucccgguagac

SEQ ID NO: 782613 - RNA, 19 nt, Artificial Sequence
  Description of Artificial Sequence: Synthetic oligonucleotide
  Antisense strand to SEQ ID NO: 782612
gucuaccgggauguaaccc

SEQ ID NO: 782614 - RNA, 19 nt, Artificial Sequence
  Description of Artificial Sequence: Synthetic oligonucleotide
  Sense strand starting at position 3114 of SEQ ID NO: 587308
uuaaguaagaaugggcuuu

SEQ ID NO: 782615 - RNA, 19 nt, Artificial Sequence
  Description of Artificial Sequence: Synthetic oligonucleotide
  Antisense strand to SEQ ID NO: 782614
aaagcccauucuuacuuaa

SEQ ID NO: 782616 - RNA, 19 nt, Artificial Sequence
  Description of Artificial Sequence: Synthetic oligonucleotide
  Sense strand starting at position 3120 of SEQ ID NO: 587308
aagaaugggcuuugucaug

SEQ ID NO: 782617 - RNA, 19 nt, Artificial Sequence
  Description of Artificial Sequence: Synthetic oligonucleotide
  Antisense strand to SEQ ID NO: 782616
caugacaaagcccauucuu

SEQ ID NO: 782618 - RNA, 19 nt, Artificial Sequence
  Description of Artificial Sequence: Synthetic oligonucleotide
  Sense strand starting at position 3556 of SEQ ID NO: 587308
aagagauucgccggccuca

SEQ ID NO: 782619 - RNA, 19 nt, Artificial Sequence
  Description of Artificial Sequence: Synthetic oligonucleotide
  Antisense strand to SEQ ID NO: 782618
ugaggccggcgaaucucuu

SEQ ID NO: 782620 - RNA, 19 nt, Artificial Sequence
  Description of Artificial Sequence: Synthetic oligonucleotide
  Sense strand starting at position 3692 of SEQ ID NO: 587308
ccagaucugcgucggaaca

SEQ ID NO: 782621 - RNA, 19 nt, Artificial Sequence
  Description of Artificial Sequence: Synthetic oligonucleotide
  Antisense strand to SEQ ID NO: 782620
uguuccgacgcagaucugg

SEQ ID NO: 782622 - RNA, 19 nt, Artificial Sequence
  Description of Artificial Sequence: Synthetic oligonucleotide
  Sense strand starting at position 3732 of SEQ ID NO: 587308
gcaguuucugcagucaguu

SEQ ID NO: 782623 - RNA, 19 nt, Artificial Sequence
  Description of Artificial Sequence: Synthetic oligonucleotide
  Antisense strand to SEQ ID NO: 782622
aacugacugcagaaacugc

SEQ ID NO: 782624 - RNA, 19 nt, Artificial Sequence
  Description of Artificial Sequence: Synthetic oligonucleotide
  Sense strand starting at position 3742 of SEQ ID NO: 587308
cagucaguuccagagguca

SEQ ID NO: 782625 - RNA, 19 nt, Artificial Sequence
  Description of Artificial Sequence: Synthetic oligonucleotide
  Antisense strand to SEQ ID NO: 782624
ugaccucuggaacugacug

SEQ ID NO: 782626 - RNA, 19 nt, Artificial Sequence
  Description of Artificial Sequence: Synthetic oligonucleotide
  Sense strand starting at position 3744 of SEQ ID NO: 587308
gucaguuccagaggucauu

SEQ ID NO: 782627 - RNA, 19 nt, Artificial Sequence
  Description of Artificial Sequence: Synthetic oligonucleotide
  Antisense strand to SEQ ID NO: 782626
aaugaccucuggaacugac

SEQ ID NO: 782628 - RNA, 19 nt, Artificial Sequence
  Description of Artificial Sequence: Synthetic oligonucleotide
  Sense strand starting at position 3753 of SEQ ID NO: 587308
agaggucauuucuaacguu

SEQ ID NO: 782629 - RNA, 19 nt, Artificial Sequence
  Description of Artificial Sequence: Synthetic oligonucleotide
  Antisense strand to SEQ ID NO: 782628
aacguuagaaaugaccucu

SEQ ID NO: 782630 - RNA, 19 nt, Artificial Sequence
  Description of Artificial Sequence: Synthetic oligonucleotide
  Sense strand starting at position 3766 of SEQ ID NO: 587308
aacguugcacuaugggaua

SEQ ID NO: 782631 - RNA, 19 nt, Artificial Sequence
  Description of Artificial Sequence: Synthetic oligonucleotide
  Antisense strand to SEQ ID NO: 782630
uaucccauagugcaacguu

SEQ ID NO: 782632 - RNA, 19 nt, Artificial Sequence
  Description of Artificial Sequence: Synthetic oligonucleotide
  Sense strand starting at position 3768 of SEQ ID NO: 587308
cguugcacuaugggauauu

SEQ ID NO: 782633 - RNA, 19 nt, Artificial Sequence
  Description of Artificial Sequence: Synthetic oligonucleotide
  Antisense strand to SEQ ID NO: 782632
aauaucccauagugcaacg

SEQ ID NO: 782634 - RNA, 19 nt, Artificial Sequence
  Description of Artificial Sequence: Synthetic oligonucleotide
  Sense strand starting at position 3769 of SEQ ID NO: 587308
guugcacuaugggauauuu

SEQ ID NO: 782635 - RNA, 19 nt, Artificial Sequence
  Description of Artificial Sequence: Synthetic oligonucleotide
  Antisense strand to SEQ ID NO: 782634
aaauaucccauagugcaac

SEQ ID NO: 782636 - RNA, 19 nt, Artificial Sequence
  Description of Artificial Sequence: Synthetic oligonucleotide
  Sense strand starting at position 3778 of SEQ ID NO: 587308
ugggauauuuaauagguuu

SEQ ID NO: 782637 - RNA, 19 nt, Artificial Sequence
  Description of Artificial Sequence: Synthetic oligonucleotide
  Antisense strand to SEQ ID NO: 782636
aaaccuauuaaauauccca

SEQ ID NO: 782638 - RNA, 19 nt, Artificial Sequence
  Description of Artificial Sequence: Synthetic oligonucleotide
  Sense strand starting at position 3785 of SEQ ID NO: 587308
uuuaauagguuuccuaaag

SEQ ID NO: 782639 - RNA, 19 nt, Artificial Sequence
  Description of Artificial Sequence: Synthetic oligonucleotide
  Antisense strand to SEQ ID NO: 782638
cuuuaggaaaccuauuaaa

SEQ ID NO: 782640 - RNA, 19 nt, Artificial Sequence
  Description of Artificial Sequence: Synthetic oligonucleotide
  Sense strand starting at position 3786 of SEQ ID NO: 587308
uuaauagguuuccuaaaga

SEQ ID NO: 782641 - RNA, 19 nt, Artificial Sequence
  Description of Artificial Sequence: Synthetic oligonucleotide
  Antisense strand to SEQ ID NO: 782640
ucuuuaggaaaccuauuaa

SEQ ID NO: 782642 - RNA, 19 nt, Artificial Sequence
  Description of Artificial Sequence: Synthetic oligonucleotide
  Sense strand starting at position 3820 of SEQ ID NO: 587308
uagaguuacucagagggua

SEQ ID NO: 782643 - RNA, 19 nt, Artificial Sequence
  Description of Artificial Sequence: Synthetic oligonucleotide
  Antisense strand to SEQ ID NO: 782642
uacccucugaguaacucua

SEQ ID NO: 782644 - RNA, 19 nt, Artificial Sequence
  Description of Artificial Sequence: Synthetic oligonucleotide
  Sense strand starting at position 3822 of SEQ ID NO: 587308
gaguuacucagaggguaca

SEQ ID NO: 782645 - RNA, 19 nt, Artificial Sequence
  Description of Artificial Sequence: Synthetic oligonucleotide
  Antisense strand to SEQ ID NO: 782644
uguacccucugaguaacuc

SEQ ID NO: 782646 - RNA, 19 nt, Artificial Sequence
  Description of Artificial Sequence: Synthetic oligonucleotide
  Sense strand starting at position 3876 of SEQ ID NO: 587308
acugaaauccagcaaugca

SEQ ID NO: 782647 - RNA, 19 nt, Artificial Sequence
  Description of Artificial Sequence: Synthetic oligonucleotide
  Antisense strand to SEQ ID NO: 782646
ugcauugcuggauuucagu

SEQ ID NO: 782648 - RNA, 19 nt, Artificial Sequence
  Description of Artificial Sequence: Synthetic oligonucleotide
  Sense strand starting at position 12 of SEQ ID NO: 587309
uuaacuauuucccugcguu

SEQ ID NO: 782649 - RNA, 19 nt, Artificial Sequence
  Description of Artificial Sequence: Synthetic oligonucleotide
  Antisense strand to SEQ ID NO: 782648
aacgcagggaaauaguuaa

SEQ ID NO: 782650 - RNA, 19 nt, Artificial Sequence
  Description of Artificial Sequence: Synthetic oligonucleotide
  Sense strand starting at position 13 of SEQ ID NO: 587309
uaacuauuucccugcguug

SEQ ID NO: 782651 - RNA, 19 nt, Artificial Sequence
  Description of Artificial Sequence: Synthetic oligonucleotide
  Antisense strand to SEQ ID NO: 782650
caacgcagggaaauaguua

SEQ ID NO: 782652 - RNA, 19 nt, Artificial Sequence
  Description of Artificial Sequence: Synthetic oligonucleotide
  Sense strand starting at position 377 of SEQ ID NO: 587309
ccaguucuacuaugggaaa

SEQ ID NO: 782653 - RNA, 19 nt, Artificial Sequence
  Description of Artificial Sequence: Synthetic oligonucleotide
  Antisense strand to SEQ ID NO: 782652
uuucccauaguagaacugg

SEQ ID NO: 782654 - RNA, 19 nt, Artificial Sequence
  Description of Artificial Sequence: Synthetic oligonucleotide
  Sense strand starting at position 459 of SEQ ID NO: 587309
uuauucugguguccauuaa

SEQ ID NO: 782655 - RNA, 19 nt, Artificial Sequence
  Description of Artificial Sequence: Synthetic oligonucleotide
  Antisense strand to SEQ ID NO: 782654
uuaauggacaccagaauaa

SEQ ID NO: 782656 - RNA, 19 nt, Artificial Sequence
  Description of Artificial Sequence: Synthetic oligonucleotide
  Sense strand starting at position 463 of SEQ ID NO: 587309
ucugguguccauuaaguaa

SEQ ID NO: 782657 - RNA, 19 nt, Artificial Sequence
  Description of Artificial Sequence: Synthetic oligonucleotide
  Antisense strand to SEQ ID NO: 782656
uuacuuaauggacaccaga

SEQ ID NO: 782658 - RNA, 19 nt, Artificial Sequence
  Description of Artificial Sequence: Synthetic oligonucleotide
  Sense strand starting at position 466 of SEQ ID NO: 587309
gguguccauuaaguaauca

SEQ ID NO: 782659 - RNA, 19 nt, Artificial Sequence
  Description of Artificial Sequence: Synthetic oligonucleotide
  Antisense strand to SEQ ID NO: 782658
ugauuacuuaauggacacc

SEQ ID NO: 782660 - RNA, 19 nt, Artificial Sequence
  Description of Artificial Sequence: Synthetic oligonucleotide
  Sense strand starting at position 643 of SEQ ID NO: 587309
gagagaugaugauaguaaa

SEQ ID NO: 782661 - RNA, 19 nt, Artificial Sequence
  Description of Artificial Sequence: Synthetic oligonucleotide
  Antisense strand to SEQ ID NO: 782660
uuuacuaucaucaucucuc

SEQ ID NO: 782662 - RNA, 19 nt, Artificial Sequence
  Description of Artificial Sequence: Synthetic oligonucleotide
  Sense strand starting at position 690 of SEQ ID NO: 587309
auccuaugaugugagaaca

SEQ ID NO: 782663 - RNA, 19 nt, Artificial Sequence
  Description of Artificial Sequence: Synthetic oligonucleotide
  Antisense strand to SEQ ID NO: 782662
uguucucacaucauaggau

SEQ ID NO: 782664 - RNA, 19 nt, Artificial Sequence
  Description of Artificial Sequence: Synthetic oligonucleotide
  Sense strand starting at position 776 of SEQ ID NO: 587309
aguuucgugccuuacauga

SEQ ID NO: 782665 - RNA, 19 nt, Artificial Sequence
  Description of Artificial Sequence: Synthetic oligonucleotide
  Antisense strand to SEQ ID NO: 782664
ucauguaaggcacgaaacu

SEQ ID NO: 782666 - RNA, 19 nt, Artificial Sequence
  Description of Artificial Sequence: Synthetic oligonucleotide
  Sense strand starting at position 780 of SEQ ID NO: 587309
ucgugccuuacaugaaagu

SEQ ID NO: 782667 - RNA, 19 nt, Artificial Sequence
  Description of Artificial Sequence: Synthetic oligonucleotide
  Antisense strand to SEQ ID NO: 782666
acuuucauguaaggcacga

SEQ ID NO: 782668 - RNA, 19 nt, Artificial Sequence
  Description of Artificial Sequence: Synthetic oligonucleotide
  Sense strand starting at position 781 of SEQ ID NO: 587309
cgugccuuacaugaaagua

SEQ ID NO: 782669 - RNA, 19 nt, Artificial Sequence
  Description of Artificial Sequence: Synthetic oligonucleotide
  Antisense strand to SEQ ID NO: 782668
uacuuucauguaaggcacg

SEQ ID NO: 782670 - RNA, 19 nt, Artificial Sequence
  Description of Artificial Sequence: Synthetic oligonucleotide
  Sense strand starting at position 985 of SEQ ID NO: 587309
ucguguauuaacuggaauu

SEQ ID NO: 782671 - RNA, 19 nt, Artificial Sequence
  Description of Artificial Sequence: Synthetic oligonucleotide
  Antisense strand to SEQ ID NO: 782670
aauuccaguuaauacacga

SEQ ID NO: 782672 - RNA, 19 nt, Artificial Sequence
  Description of Artificial Sequence: Synthetic oligonucleotide
  Sense strand starting at position 986 of SEQ ID NO: 587309
cguguauuaacuggaauug

SEQ ID NO: 782673 - RNA, 19 nt, Artificial Sequence
  Description of Artificial Sequence: Synthetic oligonucleotide
  Antisense strand to SEQ ID NO: 782672
caauuccaguuaauacacg

SEQ ID NO: 782674 - RNA, 19 nt, Artificial Sequence
  Description of Artificial Sequence: Synthetic oligonucleotide
  Sense strand starting at position 1108 of SEQ ID NO: 587309
guuacaaggcucuacuacu

SEQ ID NO: 782675 - RNA, 19 nt, Artificial Sequence
  Description of Artificial Sequence: Synthetic oligonucleotide
  Antisense strand to SEQ ID NO: 782674
aguaguagagccuuguaac

SEQ ID NO: 782676 - RNA, 19 nt, Artificial Sequence
  Description of Artificial Sequence: Synthetic oligonucleotide
  Sense strand starting at position 1119 of SEQ ID NO: 587309
cuacuacuugcagagcaua

SEQ ID NO: 782677 - RNA, 19 nt, Artificial Sequence
  Description of Artificial Sequence: Synthetic oligonucleotide
  Antisense strand to SEQ ID NO: 782676
uaugcucugcaaguaguag

SEQ ID NO: 782678 - RNA, 19 nt, Artificial Sequence
  Description of Artificial Sequence: Synthetic oligonucleotide
  Sense strand starting at position 1224 of SEQ ID NO: 587309
agggcaaacugcuuaauaa

SEQ ID NO: 782679 - RNA, 19 nt, Artificial Sequence
  Description of Artificial Sequence: Synthetic oligonucleotide
  Antisense strand to SEQ ID NO: 782678
uuauuaagcaguuugcccu

SEQ ID NO: 782680 - RNA, 19 nt, Artificial Sequence
  Description of Artificial Sequence: Synthetic oligonucleotide
  Sense strand starting at position 1225 of SEQ ID NO: 587309
gggcaaacugcuuaauaaa

SEQ ID NO: 782681 - RNA, 19 nt, Artificial Sequence
  Description of Artificial Sequence: Synthetic oligonucleotide
  Antisense strand to SEQ ID NO: 782680
uuuauuaagcaguuugccc

SEQ ID NO: 782682 - RNA, 19 nt, Artificial Sequence
  Description of Artificial Sequence: Synthetic oligonucleotide
  Sense strand starting at position 1243 of SEQ ID NO: 587309
agcaguuccugauuuccca

SEQ ID NO: 782683 - RNA, 19 nt, Artificial Sequence
  Description of Artificial Sequence: Synthetic oligonucleotide
  Antisense strand to SEQ ID NO: 782682
ugggaaaucaggaacugcu

SEQ ID NO: 782684 - RNA, 19 nt, Artificial Sequence
  Description of Artificial Sequence: Synthetic oligonucleotide
  Sense strand starting at position 1282 of SEQ ID NO: 587309
cucucuaaguagcuuugaa

SEQ ID NO: 782685 - RNA, 19 nt, Artificial Sequence
  Description of Artificial Sequence: Synthetic oligonucleotide
  Antisense strand to SEQ ID NO: 782684
uucaaagcuacuuagagag

SEQ ID NO: 782686 - RNA, 19 nt, Artificial Sequence
  Description of Artificial Sequence: Synthetic oligonucleotide
  Sense strand starting at position 1312 of SEQ ID NO: 587309
aaggaaacguuucugaaca

SEQ ID NO: 782687 - RNA, 19 nt, Artificial Sequence
  Description of Artificial Sequence: Synthetic oligonucleotide
  Antisense strand to SEQ ID NO: 782686
uguucagaaacguuuccuu

SEQ ID NO: 782688 - RNA, 19 nt, Artificial Sequence
  Description of Artificial Sequence: Synthetic oligonucleotide
  Sense strand starting at position 1531 of SEQ ID NO: 587309
cgguguagcccgucagcau

SEQ ID NO: 782689 - RNA, 19 nt, Artificial Sequence
  Description of Artificial Sequence: Synthetic oligonucleotide
  Antisense strand to SEQ ID NO: 782688
augcugacgggcuacaccg

SEQ ID NO: 782690 - RNA, 19 nt, Artificial Sequence
  Description of Artificial Sequence: Synthetic oligonucleotide
  Sense strand starting at position 1650 of SEQ ID NO: 587309
ccgguaacugcgcuucaga

SEQ ID NO: 782691 - RNA, 19 nt, Artificial Sequence
  Description of Artificial Sequence: Synthetic oligonucleotide
  Antisense strand to SEQ ID NO: 782690
ucugaagcgcaguuaccgg

SEQ ID NO: 782692 - RNA, 19 nt, Artificial Sequence
  Description of Artificial Sequence: Synthetic oligonucleotide
  Sense strand starting at position 2668 of SEQ ID NO: 587309
aggcguuuagcgggagaaa

SEQ ID NO: 782693 - RNA, 19 nt, Artificial Sequence
  Description of Artificial Sequence: Synthetic oligonucleotide
  Antisense strand to SEQ ID NO: 782692
uuucucccgcuaaacgccu

SEQ ID NO: 782694 - RNA, 19 nt, Artificial Sequence
  Description of Artificial Sequence: Synthetic oligonucleotide
  Sense strand starting at position 2669 of SEQ ID NO: 587309
ggcguuuagcgggagaaau

SEQ ID NO: 782695 - RNA, 19 nt, Artificial Sequence
  Description of Artificial Sequence: Synthetic oligonucleotide
  Antisense strand to SEQ ID NO: 782694
auuucucccgcuaaacgcc

SEQ ID NO: 782696 - RNA, 19 nt, Artificial Sequence
  Description of Artificial Sequence: Synthetic oligonucleotide
  Sense strand starting at position 2670 of SEQ ID NO: 587309
gcguuuagcgggagaaaua

SEQ ID NO: 782697 - RNA, 19 nt, Artificial Sequence
  Description of Artificial Sequence: Synthetic oligonucleotide
  Antisense strand to SEQ ID NO: 782696
uauuucucccgcuaaacgc

SEQ ID NO: 782698 - RNA, 19 nt, Artificial Sequence
  Description of Artificial Sequence: Synthetic oligonucleotide
  Sense strand starting at position 2671 of SEQ ID NO: 587309
cguuuagcgggagaaauau

SEQ ID NO: 782699 - RNA, 19 nt, Artificial Sequence
  Description of Artificial Sequence: Synthetic oligonucleotide
  Antisense strand to SEQ ID NO: 782698
auauuucucccgcuaaacg

SEQ ID NO: 782700 - RNA, 19 nt, Artificial Sequence
  Description of Artificial Sequence: Synthetic oligonucleotide
  Sense strand starting at position 2900 of SEQ ID NO: 587309
aggugaggucggugggaaa

SEQ ID NO: 782701 - RNA, 19 nt, Artificial Sequence
  Description of Artificial Sequence: Synthetic oligonucleotide
  Antisense strand to SEQ ID NO: 782700
uuucccaccgaccucaccu

SEQ ID NO: 782702 - RNA, 19 nt, Artificial Sequence
  Description of Artificial Sequence: Synthetic oligonucleotide
  Sense strand starting at position 3091 of SEQ ID NO: 587309
agaguaaacucuccgcauu

SEQ ID NO: 782703 - RNA, 19 nt, Artificial Sequence
  Description of Artificial Sequence: Synthetic oligonucleotide
  Antisense strand to SEQ ID NO: 782702
aaugcggagaguuuacucu

SEQ ID NO: 782704 - RNA, 19 nt, Artificial Sequence
  Description of Artificial Sequence: Synthetic oligonucleotide
  Sense strand starting at position 3092 of SEQ ID NO: 587309
gaguaaacucuccgcauuu

SEQ ID NO: 782705 - RNA, 19 nt, Artificial Sequence
  Description of Artificial Sequence: Synthetic oligonucleotide
  Antisense strand to SEQ ID NO: 782704
aaaugcggagaguuuacuc

SEQ ID NO: 782706 - RNA, 19 nt, Artificial Sequence
  Description of Artificial Sequence: Synthetic oligonucleotide
  Sense strand starting at position 3161 of SEQ ID NO: 587309
acccgcagucggcaauauu

SEQ ID NO: 782707 - RNA, 19 nt, Artificial Sequence
  Description of Artificial Sequence: Synthetic oligonucleotide
  Antisense strand to SEQ ID NO: 782706
aauauugccgacugcgggu

SEQ ID NO: 782708 - RNA, 19 nt, Artificial Sequence
  Description of Artificial Sequence: Synthetic oligonucleotide
  Sense strand starting at position 3398 of SEQ ID NO: 587309
gacagcuuguugucaguau

SEQ ID NO: 782709 - RNA, 19 nt, Artificial Sequence
  Description of Artificial Sequence: Synthetic oligonucleotide
  Antisense strand to SEQ ID NO: 782708
auacugacaacaagcuguc

SEQ ID NO: 782710 - RNA, 19 nt, Artificial Sequence
  Description of Artificial Sequence: Synthetic oligonucleotide
  Sense strand starting at position 3402 of SEQ ID NO: 587309
gcuuguugucaguaucaua

SEQ ID NO: 782711 - RNA, 19 nt, Artificial Sequence
  Description of Artificial Sequence: Synthetic oligonucleotide
  Antisense strand to SEQ ID NO: 782710
uaugauacugacaacaagc

SEQ ID NO: 782712 - RNA, 19 nt, Artificial Sequence
  Description of Artificial Sequence: Synthetic oligonucleotide
  Sense strand starting at position 3717 of SEQ ID NO: 587309
cugcuaaacuuauugguaa

SEQ ID NO: 782713 - RNA, 19 nt, Artificial Sequence
  Description of Artificial Sequence: Synthetic oligonucleotide
  Antisense strand to SEQ ID NO: 782712
uuaccaauaaguuuagcag

SEQ ID NO: 782714 - RNA, 19 nt, Artificial Sequence
  Description of Artificial Sequence: Synthetic oligonucleotide
  Sense strand starting at position 3737 of SEQ ID NO: 587309
guggacugaucucagauaa

SEQ ID NO: 782715 - RNA, 19 nt, Artificial Sequence
  Description of Artificial Sequence: Synthetic oligonucleotide
  Antisense strand to SEQ ID NO: 782714
uuaucugagaucaguccac

SEQ ID NO: 782716 - RNA, 19 nt, Artificial Sequence
  Description of Artificial Sequence: Synthetic oligonucleotide
  Sense strand starting at position 3848 of SEQ ID NO: 587309
uagaguuaauaugugugau

SEQ ID NO: 782717 - RNA, 19 nt, Artificial Sequence
  Description of Artificial Sequence: Synthetic oligonucleotide
  Antisense strand to SEQ ID NO: 782716
aucacacauauuaacucua

SEQ ID NO: 782718 - RNA, 19 nt, Artificial Sequence
  Description of Artificial Sequence: Synthetic oligonucleotide
  Sense strand starting at position 3849 of SEQ ID NO: 587309
agaguuaauaugugugauu

SEQ ID NO: 782719 - RNA, 19 nt, Artificial Sequence
  Description of Artificial Sequence: Synthetic oligonucleotide
  Antisense strand to SEQ ID NO: 782718
aaucacacauauuaacucu

SEQ ID NO: 782720 - RNA, 19 nt, Artificial Sequence
  Description of Artificial Sequence: Synthetic oligonucleotide
  Sense strand starting at position 3850 of SEQ ID NO: 587309
gaguuaauaugugugauug

SEQ ID NO: 782721 - RNA, 19 nt, Artificial Sequence
  Description of Artificial Sequence: Synthetic oligonucleotide
  Antisense strand to SEQ ID NO: 782720
caaucacacauauuaacuc

SEQ ID NO: 782722 - RNA, 19 nt, Artificial Sequence
  Description of Artificial Sequence: Synthetic oligonucleotide
  Sense strand starting at position 3854 of SEQ ID NO: 587309
uaauaugugugauuggaag

SEQ ID NO: 782723 - RNA, 19 nt, Artificial Sequence
  Description of Artificial Sequence: Synthetic oligonucleotide
  Antisense strand to SEQ ID NO: 782722
cuuccaaucacacauauua

SEQ ID NO: 782724 - RNA, 19 nt, Artificial Sequence
  Description of Artificial Sequence: Synthetic oligonucleotide
  Sense strand starting at position 3856 of SEQ ID NO: 587309
auaugugugauuggaagaa

SEQ ID NO: 782725 - RNA, 19 nt, Artificial Sequence
  Description of Artificial Sequence: Synthetic oligonucleotide
  Antisense strand to SEQ ID NO: 782724
uucuuccaaucacacauau

SEQ ID NO: 782726 - RNA, 19 nt, Artificial Sequence
  Description of Artificial Sequence: Synthetic oligonucleotide
  Sense strand starting at position 3872 of SEQ ID NO: 587309
gaaugaaccuuuccggcuu

SEQ ID NO: 782727 - RNA, 19 nt, Artificial Sequence
  Description of Artificial Sequence: Synthetic oligonucleotide
  Antisense strand to SEQ ID NO: 782726
aagccggaaagguucauuc

SEQ ID NO: 782728 - RNA, 19 nt, Artificial Sequence
  Description of Artificial Sequence: Synthetic oligonucleotide
  Sense strand starting at position 231 of SEQ ID NO: 587310
ggcagagccauccggagaa

SEQ ID NO: 782729 - RNA, 19 nt, Artificial Sequence
  Description of Artificial Sequence: Synthetic oligonucleotide
  Antisense strand to SEQ ID NO: 782728
uucuccggauggcucugcc

SEQ ID NO: 782730 - RNA, 19 nt, Artificial Sequence
  Description of Artificial Sequence: Synthetic oligonucleotide
  Sense strand starting at position 674 of SEQ ID NO: 587310
aguugcguuggaagguuaa

SEQ ID NO: 782731 - RNA, 19 nt, Artificial Sequence
  Description of Artificial Sequence: Synthetic oligonucleotide
  Antisense strand to SEQ ID NO: 782730
uuaaccuuccaacgcaacu

SEQ ID NO: 782732 - RNA, 19 nt, Artificial Sequence
  Description of Artificial Sequence: Synthetic oligonucleotide
  Sense strand starting at position 686 of SEQ ID NO: 587310
agguuaaagucgcuauuau

SEQ ID NO: 782733 - RNA, 19 nt, Artificial Sequence
  Description of Artificial Sequence: Synthetic oligonucleotide
  Antisense strand to SEQ ID NO: 782732
auaauagcgacuuuaaccu

SEQ ID NO: 782734 - RNA, 19 nt, Artificial Sequence
  Description of Artificial Sequence: Synthetic oligonucleotide
  Sense strand starting at position 687 of SEQ ID NO: 587310
gguuaaagucgcuauuaug

SEQ ID NO: 782735 - RNA, 19 nt, Artificial Sequence
  Description of Artificial Sequence: Synthetic oligonucleotide
  Antisense strand to SEQ ID NO: 782734
cauaauagcgacuuuaacc

SEQ ID NO: 782736 - RNA, 19 nt, Artificial Sequence
  Description of Artificial Sequence: Synthetic oligonucleotide
  Sense strand starting at position 2141 of SEQ ID NO: 587310
gcgcgccuggcauaauuua

SEQ ID NO: 782737 - RNA, 19 nt, Artificial Sequence
  Description of Artificial Sequence: Synthetic oligonucleotide
  Antisense strand to SEQ ID NO: 782736
uaaauuaugccaggcgcgc

SEQ ID NO: 782738 - RNA, 19 nt, Artificial Sequence
  Description of Artificial Sequence: Synthetic oligonucleotide
  Sense strand starting at position 2148 of SEQ ID NO: 587310
uggcauaauuuaugcaaga

SEQ ID NO: 782739 - RNA, 19 nt, Artificial Sequence
  Description of Artificial Sequence: Synthetic oligonucleotide
  Antisense strand to SEQ ID NO: 782738
ucuugcauaaauuaugcca

SEQ ID NO: 782740 - RNA, 19 nt, Artificial Sequence
  Description of Artificial Sequence: Synthetic oligonucleotide
  Sense strand starting at position 2546 of SEQ ID NO: 587310
cuggcagucucugcaguaa

SEQ ID NO: 782741 - RNA, 19 nt, Artificial Sequence
  Description of Artificial Sequence: Synthetic oligonucleotide
  Antisense strand to SEQ ID NO: 782740
uuacugcagagacugccag

SEQ ID NO: 782742 - RNA, 19 nt, Artificial Sequence
  Description of Artificial Sequence: Synthetic oligonucleotide
  Sense strand starting at position 2596 of SEQ ID NO: 587310
ugaaauuauucggaaggga

SEQ ID NO: 782743 - RNA, 19 nt, Artificial Sequence
  Description of Artificial Sequence: Synthetic oligonucleotide
  Antisense strand to SEQ ID NO: 782742
ucccuuccgaauaauuuca

SEQ ID NO: 782744 - RNA, 19 nt, Artificial Sequence
  Description of Artificial Sequence: Synthetic oligonucleotide
  Sense strand starting at position 2712 of SEQ ID NO: 587310
uuaacuagauggcauugau

SEQ ID NO: 782745 - RNA, 19 nt, Artificial Sequence
  Description of Artificial Sequence: Synthetic oligonucleotide
  Antisense strand to SEQ ID NO: 782744
aucaaugccaucuaguuaa

SEQ ID NO: 782746 - RNA, 19 nt, Artificial Sequence
  Description of Artificial Sequence: Synthetic oligonucleotide
  Sense strand starting at position 2733 of SEQ ID NO: 587310
ugucgaauuuguuaccaua

SEQ ID NO: 782747 - RNA, 19 nt, Artificial Sequence
  Description of Artificial Sequence: Synthetic oligonucleotide
  Antisense strand to SEQ ID NO: 782746
uaugguaacaaauucgaca

SEQ ID NO: 782748 - RNA, 19 nt, Artificial Sequence
  Description of Artificial Sequence: Synthetic oligonucleotide
  Sense strand starting at position 2736 of SEQ ID NO: 587310
cgaauuuguuaccauacca

SEQ ID NO: 782749 - RNA, 19 nt, Artificial Sequence
  Description of Artificial Sequence: Synthetic oligonucleotide
  Antisense strand to SEQ ID NO: 782748
ugguaugguaacaaauucg

SEQ ID NO: 782750 - RNA, 19 nt, Artificial Sequence
  Description of Artificial Sequence: Synthetic oligonucleotide
  Sense strand starting at position 2777 of SEQ ID NO: 587310
gcucaaugauuaugaaaca

SEQ ID NO: 782751 - RNA, 19 nt, Artificial Sequence
  Description of Artificial Sequence: Synthetic oligonucleotide
  Antisense strand to SEQ ID NO: 782750
uguuucauaaucauugagc

SEQ ID NO: 782752 - RNA, 19 nt, Artificial Sequence
  Description of Artificial Sequence: Synthetic oligonucleotide
  Sense strand starting at position 2802 of SEQ ID NO: 587310
uaggauguaugcccauuau

SEQ ID NO: 782753 - RNA, 19 nt, Artificial Sequence
  Description of Artificial Sequence: Synthetic oligonucleotide
  Antisense strand to SEQ ID NO: 782752
auaaugggcauacauccua

SEQ ID NO: 782754 - RNA, 19 nt, Artificial Sequence
  Description of Artificial Sequence: Synthetic oligonucleotide
  Sense strand starting at position 2878 of SEQ ID NO: 587310
cugauugcauagucuuaaa

SEQ ID NO: 782755 - RNA, 19 nt, Artificial Sequence
  Description of Artificial Sequence: Synthetic oligonucleotide
  Antisense strand to SEQ ID NO: 782754
uuuaagacuaugcaaucag

SEQ ID NO: 782756 - RNA, 19 nt, Artificial Sequence
  Description of Artificial Sequence: Synthetic oligonucleotide
  Sense strand starting at position 2916 of SEQ ID NO: 587310
auuucucuucccgguacaa

SEQ ID NO: 782757 - RNA, 19 nt, Artificial Sequence
  Description of Artificial Sequence: Synthetic oligonucleotide
  Antisense strand to SEQ ID NO: 782756
uuguaccgggaagagaaau

SEQ ID NO: 782758 - RNA, 19 nt, Artificial Sequence
  Description of Artificial Sequence: Synthetic oligonucleotide
  Sense strand starting at position 3052 of SEQ ID NO: 587310
uguuuaaaccaucaauugu

SEQ ID NO: 782759 - RNA, 19 nt, Artificial Sequence
  Description of Artificial Sequence: Synthetic oligonucleotide
  Antisense strand to SEQ ID NO: 782758
acaauugaugguuuaaaca

SEQ ID NO: 782760 - RNA, 19 nt, Artificial Sequence
  Description of Artificial Sequence: Synthetic oligonucleotide
  Sense strand starting at position 3161 of SEQ ID NO: 587310
gguacagacugacugguua

SEQ ID NO: 782761 - RNA, 19 nt, Artificial Sequence
  Description of Artificial Sequence: Synthetic oligonucleotide
  Antisense strand to SEQ ID NO: 782760
uaaccagucagucuguacc

SEQ ID NO: 782762 - RNA, 19 nt, Artificial Sequence
  Description of Artificial Sequence: Synthetic oligonucleotide
  Sense strand starting at position 3174 of SEQ ID NO: 587310
ugguuauuacuggacucca

SEQ ID NO: 782763 - RNA, 19 nt, Artificial Sequence
  Description of Artificial Sequence: Synthetic oligonucleotide
  Antisense strand to SEQ ID NO: 782762
uggaguccaguaauaacca

SEQ ID NO: 782764 - RNA, 19 nt, Artificial Sequence
  Description of Artificial Sequence: Synthetic oligonucleotide
  Sense strand starting at position 3240 of SEQ ID NO: 587310
cucacugaugguuacacua

SEQ ID NO: 782765 - RNA, 19 nt, Artificial Sequence
  Description of Artificial Sequence: Synthetic oligonucleotide
  Antisense strand to SEQ ID NO: 782764
uaguguaaccaucagugag

SEQ ID NO: 782766 - RNA, 19 nt, Artificial Sequence
  Description of Artificial Sequence: Synthetic oligonucleotide
  Sense strand starting at position 3263 of SEQ ID NO: 587310
uagugcuaagccuguaauc

SEQ ID NO: 782767 - RNA, 19 nt, Artificial Sequence
  Description of Artificial Sequence: Synthetic oligonucleotide
  Antisense strand to SEQ ID NO: 782766
gauuacaggcuuagcacua

SEQ ID NO: 782768 - RNA, 19 nt, Artificial Sequence
  Description of Artificial Sequence: Synthetic oligonucleotide
  Sense strand starting at position 3265 of SEQ ID NO: 587310
gugcuaagccuguaaucac

SEQ ID NO: 782769 - RNA, 19 nt, Artificial Sequence
  Description of Artificial Sequence: Synthetic oligonucleotide
  Antisense strand to SEQ ID NO: 782768
gugauuacaggcuuagcac

SEQ ID NO: 782770 - RNA, 19 nt, Artificial Sequence
  Description of Artificial Sequence: Synthetic oligonucleotide
  Sense strand starting at position 3274 of SEQ ID NO: 587310
cuguaaucacaauauuguu

SEQ ID NO: 782771 - RNA, 19 nt, Artificial Sequence
  Description of Artificial Sequence: Synthetic oligonucleotide
  Antisense strand to SEQ ID NO: 782770
aacaauauugugauuacag

SEQ ID NO: 782772 - RNA, 19 nt, Artificial Sequence
  Description of Artificial Sequence: Synthetic oligonucleotide
  Sense strand starting at position 3353 of SEQ ID NO: 587310
guuugauuauccuagacuu

SEQ ID NO: 782773 - RNA, 19 nt, Artificial Sequence
  Description of Artificial Sequence: Synthetic oligonucleotide
  Antisense strand to SEQ ID NO: 782772
aagucuaggauaaucaaac

SEQ ID NO: 782774 - RNA, 19 nt, Artificial Sequence
  Description of Artificial Sequence: Synthetic oligonucleotide
  Sense strand starting at position 3430 of SEQ ID NO: 587310
uauugugguuuguuaaaug

SEQ ID NO: 782775 - RNA, 19 nt, Artificial Sequence
  Description of Artificial Sequence: Synthetic oligonucleotide
  Antisense strand to SEQ ID NO: 782774
cauuuaacaaaccacaaua

SEQ ID NO: 782776 - RNA, 19 nt, Artificial Sequence
  Description of Artificial Sequence: Synthetic oligonucleotide
  Sense strand starting at position 3514 of SEQ ID NO: 587310
guuuaaggagcuuacagau

SEQ ID NO: 782777 - RNA, 19 nt, Artificial Sequence
  Description of Artificial Sequence: Synthetic oligonucleotide
  Antisense strand to SEQ ID NO: 782776
aucuguaagcuccuuaaac

SEQ ID NO: 782778 - RNA, 19 nt, Artificial Sequence
  Description of Artificial Sequence: Synthetic oligonucleotide
  Sense strand starting at position 3639 of SEQ ID NO: 587310
gaaucacaacucugagguu

SEQ ID NO: 782779 - RNA, 19 nt, Artificial Sequence
  Description of Artificial Sequence: Synthetic oligonucleotide
  Antisense strand to SEQ ID NO: 782778
aaccucagaguugugauuc

SEQ ID NO: 782780 - RNA, 19 nt, Artificial Sequence
  Description of Artificial Sequence: Synthetic oligonucleotide
  Sense strand starting at position 3658 of SEQ ID NO: 587310
aggcuacuguuuccauuaa

SEQ ID NO: 782781 - RNA, 19 nt, Artificial Sequence
  Description of Artificial Sequence: Synthetic oligonucleotide
  Antisense strand to SEQ ID NO: 782780
uuaauggaaacaguagccu

SEQ ID NO: 782782 - RNA, 19 nt, Artificial Sequence
  Description of Artificial Sequence: Synthetic oligonucleotide
  Sense strand starting at position 3697 of SEQ ID NO: 587310
guauaugaaaggugcuuua

SEQ ID NO: 782783 - RNA, 19 nt, Artificial Sequence
  Description of Artificial Sequence: Synthetic oligonucleotide
  Antisense strand to SEQ ID NO: 782782
uaaagcaccuuucauauac

SEQ ID NO: 782784 - RNA, 19 nt, Artificial Sequence
  Description of Artificial Sequence: Synthetic oligonucleotide
  Sense strand starting at position 3769 of SEQ ID NO: 587310
ucgcuaguaccugacuaua

SEQ ID NO: 782785 - RNA, 19 nt, Artificial Sequence
  Description of Artificial Sequence: Synthetic oligonucleotide
  Antisense strand to SEQ ID NO: 782784
uauagucagguacuagcga

SEQ ID NO: 782786 - RNA, 19 nt, Artificial Sequence
  Description of Artificial Sequence: Synthetic oligonucleotide
  Sense strand starting at position 3771 of SEQ ID NO: 587310
gcuaguaccugacuauauu

SEQ ID NO: 782787 - RNA, 19 nt, Artificial Sequence
  Description of Artificial Sequence: Synthetic oligonucleotide
  Antisense strand to SEQ ID NO: 782786
aauauagucagguacuagc

SEQ ID NO: 782788 - RNA, 19 nt, Artificial Sequence
  Description of Artificial Sequence: Synthetic oligonucleotide
  Sense strand starting at position 3845 of SEQ ID NO: 587310
gugccacagcucgauauca

SEQ ID NO: 782789 - RNA, 19 nt, Artificial Sequence
  Description of Artificial Sequence: Synthetic oligonucleotide
  Antisense strand to SEQ ID NO: 782788
ugauaucgagcuguggcac

SEQ ID NO: 782790 - RNA, 19 nt, Artificial Sequence
  Description of Artificial Sequence: Synthetic oligonucleotide
  Sense strand starting at position 3847 of SEQ ID NO: 587310
gccacagcucgauaucaga

SEQ ID NO: 782791 - RNA, 19 nt, Artificial Sequence
  Description of Artificial Sequence: Synthetic oligonucleotide
  Antisense strand to SEQ ID NO: 782790
ucugauaucgagcuguggc

SEQ ID NO: 782792 - RNA, 19 nt, Artificial Sequence
  Description of Artificial Sequence: Synthetic oligonucleotide
  Sense strand starting at position 3854 of SEQ ID NO: 587310
cucgauaucagaugugcau

SEQ ID NO: 782793 - RNA, 19 nt, Artificial Sequence
  Description of Artificial Sequence: Synthetic oligonucleotide
  Antisense strand to SEQ ID NO: 782792
augcacaucugauaucgag

SEQ ID NO: 782794 - RNA, 19 nt, Artificial Sequence
  Description of Artificial Sequence: Synthetic oligonucleotide
  Sense strand starting at position 3857 of SEQ ID NO: 587310
gauaucagaugugcaucua

SEQ ID NO: 782795 - RNA, 19 nt, Artificial Sequence
  Description of Artificial Sequence: Synthetic oligonucleotide
  Antisense strand to SEQ ID NO: 782794
uagaugcacaucugauauc

SEQ ID NO: 782796 - RNA, 19 nt, Artificial Sequence
  Description of Artificial Sequence: Synthetic oligonucleotide
  Sense strand starting at position 3858 of SEQ ID NO: 587310
auaucagaugugcaucuau

SEQ ID NO: 782797 - RNA, 19 nt, Artificial Sequence
  Description of Artificial Sequence: Synthetic oligonucleotide
  Antisense strand to SEQ ID NO: 782796
auagaugcacaucugauau

SEQ ID NO: 782798 - RNA, 19 nt, Artificial Sequence
  Description of Artificial Sequence: Synthetic oligonucleotide
  Sense strand starting at position 3920 of SEQ ID NO: 587310
gugaaauuacaauauugca

SEQ ID NO: 782799 - RNA, 19 nt, Artificial Sequence
  Description of Artificial Sequence: Synthetic oligonucleotide
  Antisense strand to SEQ ID NO: 782798
ugcaauauuguaauuucac

SEQ ID NO: 782800 - RNA, 19 nt, Artificial Sequence
  Description of Artificial Sequence: Synthetic oligonucleotide
  Sense strand starting at position 3956 of SEQ ID NO: 587310
aaauaugacuaugaggaga

SEQ ID NO: 782801 - RNA, 19 nt, Artificial Sequence
  Description of Artificial Sequence: Synthetic oligonucleotide
  Antisense strand to SEQ ID NO: 782800
ucuccucauagucauauuu

SEQ ID NO: 782802 - RNA, 19 nt, Artificial Sequence
  Description of Artificial Sequence: Synthetic oligonucleotide
  Sense strand starting at position 3958 of SEQ ID NO: 587310
auaugacuaugaggagauu

SEQ ID NO: 782803 - RNA, 19 nt, Artificial Sequence
  Description of Artificial Sequence: Synthetic oligonucleotide
  Antisense strand to SEQ ID NO: 782802
aaucuccucauagucauau

SEQ ID NO: 782804 - RNA, 19 nt, Artificial Sequence
  Description of Artificial Sequence: Synthetic oligonucleotide
  Sense strand starting at position 3967 of SEQ ID NO: 587310
ugaggagauucccugugcu

SEQ ID NO: 782805 - RNA, 19 nt, Artificial Sequence
  Description of Artificial Sequence: Synthetic oligonucleotide
  Antisense strand to SEQ ID NO: 782804
agcacagggaaucuccuca

SEQ ID NO: 782806 - RNA, 19 nt, Artificial Sequence
  Description of Artificial Sequence: Synthetic oligonucleotide
  Sense strand starting at position 3970 of SEQ ID NO: 587310
ggagauucccugugcucuu

SEQ ID NO: 782807 - RNA, 19 nt, Artificial Sequence
  Description of Artificial Sequence: Synthetic oligonucleotide
  Antisense strand to SEQ ID NO: 782806
aagagcacagggaaucucc

SEQ ID NO: 782808 - RNA, 19 nt, Artificial Sequence
  Description of Artificial Sequence: Synthetic oligonucleotide
  Sense strand starting at position 227 of SEQ ID NO: 587311
uguguaucaaacugaagag

SEQ ID NO: 782809 - RNA, 19 nt, Artificial Sequence
  Description of Artificial Sequence: Synthetic oligonucleotide
  Antisense strand to SEQ ID NO: 782808
cucuucaguuugauacaca

SEQ ID NO: 782810 - RNA, 19 nt, Artificial Sequence
  Description of Artificial Sequence: Synthetic oligonucleotide
  Sense strand starting at position 288 of SEQ ID NO: 587311
ccauaaugacauggucuuu

SEQ ID NO: 782811 - RNA, 19 nt, Artificial Sequence
  Description of Artificial Sequence: Synthetic oligonucleotide
  Antisense strand to SEQ ID NO: 782810
aaagaccaugucauuaugg

SEQ ID NO: 782812 - RNA, 19 nt, Artificial Sequence
  Description of Artificial Sequence: Synthetic oligonucleotide
  Sense strand starting at position 293 of SEQ ID NO: 587311
augacauggucuuucuuua

SEQ ID NO: 782813 - RNA, 19 nt, Artificial Sequence
  Description of Artificial Sequence: Synthetic oligonucleotide
  Antisense strand to SEQ ID NO: 782812
uaaagaaagaccaugucau

SEQ ID NO: 782814 - RNA, 19 nt, Artificial Sequence
  Description of Artificial Sequence: Synthetic oligonucleotide
  Sense strand starting at position 298 of SEQ ID NO: 587311
auggucuuucuuuagaaau

SEQ ID NO: 782815 - RNA, 19 nt, Artificial Sequence
  Description of Artificial Sequence: Synthetic oligonucleotide
  Antisense strand to SEQ ID NO: 782814
auuucuaaagaaagaccau

SEQ ID NO: 782816 - RNA, 19 nt, Artificial Sequence
  Description of Artificial Sequence: Synthetic oligonucleotide
  Sense strand starting at position 311 of SEQ ID NO: 587311
agaaauugccauugcauaa

SEQ ID NO: 782817 - RNA, 19 nt, Artificial Sequence
  Description of Artificial Sequence: Synthetic oligonucleotide
  Antisense strand to SEQ ID NO: 782816
uuaugcaauggcaauuucu

SEQ ID NO: 782818 - RNA, 19 nt, Artificial Sequence
  Description of Artificial Sequence: Synthetic oligonucleotide
  Sense strand starting at position 389 of SEQ ID NO: 587311
aggcuauaauaugcacaaa

SEQ ID NO: 782819 - RNA, 19 nt, Artificial Sequence
  Description of Artificial Sequence: Synthetic oligonucleotide
  Antisense strand to SEQ ID NO: 782818
uuugugcauauuauagccu

SEQ ID NO: 782820 - RNA, 19 nt, Artificial Sequence
  Description of Artificial Sequence: Synthetic oligonucleotide
  Sense strand starting at position 442 of SEQ ID NO: 587311
gugguaagugggcauaaau

SEQ ID NO: 782821 - RNA, 19 nt, Artificial Sequence
  Description of Artificial Sequence: Synthetic oligonucleotide
  Antisense strand to SEQ ID NO: 782820
auuuaugcccacuuaccac

SEQ ID NO: 782822 - RNA, 19 nt, Artificial Sequence
  Description of Artificial Sequence: Synthetic oligonucleotide
  Sense strand starting at position 554 of SEQ ID NO: 587311
uguagagugagccaaaucu

SEQ ID NO: 782823 - RNA, 19 nt, Artificial Sequence
  Description of Artificial Sequence: Synthetic oligonucleotide
  Antisense strand to SEQ ID NO: 782822
agauuuggcucacucuaca

SEQ ID NO: 782824 - RNA, 19 nt, Artificial Sequence
  Description of Artificial Sequence: Synthetic oligonucleotide
  Sense strand starting at position 788 of SEQ ID NO: 587311
aucaguuaacucuggcaaa

SEQ ID NO: 782825 - RNA, 19 nt, Artificial Sequence
  Description of Artificial Sequence: Synthetic oligonucleotide
  Antisense strand to SEQ ID NO: 782824
uuugccagaguuaacugau

SEQ ID NO: 782826 - RNA, 19 nt, Artificial Sequence
  Description of Artificial Sequence: Synthetic oligonucleotide
  Sense strand starting at position 1012 of SEQ ID NO: 587311
ugaagauuuacgugcaagu

SEQ ID NO: 782827 - RNA, 19 nt, Artificial Sequence
  Description of Artificial Sequence: Synthetic oligonucleotide
  Antisense strand to SEQ ID NO: 782826
acuugcacguaaaucuuca

SEQ ID NO: 782828 - RNA, 19 nt, Artificial Sequence
  Description of Artificial Sequence: Synthetic oligonucleotide
  Sense strand starting at position 1261 of SEQ ID NO: 587311
aaagaugugcugcacauaa

SEQ ID NO: 782829 - RNA, 19 nt, Artificial Sequence
  Description of Artificial Sequence: Synthetic oligonucleotide
  Antisense strand to SEQ ID NO: 782828
uuaugugcagcacaucuuu

SEQ ID NO: 782830 - RNA, 19 nt, Artificial Sequence
  Description of Artificial Sequence: Synthetic oligonucleotide
  Sense strand starting at position 1263 of SEQ ID NO: 587311
agaugugcugcacauaaca

SEQ ID NO: 782831 - RNA, 19 nt, Artificial Sequence
  Description of Artificial Sequence: Synthetic oligonucleotide
  Antisense strand to SEQ ID NO: 782830
uguuaugugcagcacaucu

SEQ ID NO: 782832 - RNA, 19 nt, Artificial Sequence
  Description of Artificial Sequence: Synthetic oligonucleotide
  Sense strand starting at position 1377 of SEQ ID NO: 587311
uucugaguccuuuagguau

SEQ ID NO: 782833 - RNA, 19 nt, Artificial Sequence
  Description of Artificial Sequence: Synthetic oligonucleotide
  Antisense strand to SEQ ID NO: 782832
auaccuaaaggacucagaa

SEQ ID NO: 782834 - RNA, 19 nt, Artificial Sequence
  Description of Artificial Sequence: Synthetic oligonucleotide
  Sense strand starting at position 1389 of SEQ ID NO: 587311
uagguauugcauuaaagua

SEQ ID NO: 782835 - RNA, 19 nt, Artificial Sequence
  Description of Artificial Sequence: Synthetic oligonucleotide
  Antisense strand to SEQ ID NO: 782834
uacuuuaaugcaauaccua

SEQ ID NO: 782836 - RNA, 19 nt, Artificial Sequence
  Description of Artificial Sequence: Synthetic oligonucleotide
  Sense strand starting at position 2094 of SEQ ID NO: 587311
ggaguugagcgagagcaga

SEQ ID NO: 782837 - RNA, 19 nt, Artificial Sequence
  Description of Artificial Sequence: Synthetic oligonucleotide
  Antisense strand to SEQ ID NO: 782836
ucugcucucgcucaacucc

SEQ ID NO: 782838 - RNA, 19 nt, Artificial Sequence
  Description of Artificial Sequence: Synthetic oligonucleotide
  Sense strand starting at position 2184 of SEQ ID NO: 587311
gaggaacuaguuugugaau

SEQ ID NO: 782839 - RNA, 19 nt, Artificial Sequence
  Description of Artificial Sequence: Synthetic oligonucleotide
  Antisense strand to SEQ ID NO: 782838
auucacaaacuaguuccuc

SEQ ID NO: 782840 - RNA, 19 nt, Artificial Sequence
  Description of Artificial Sequence: Synthetic oligonucleotide
  Sense strand starting at position 2346 of SEQ ID NO: 587311
uguucuugugaauaagaau

SEQ ID NO: 782841 - RNA, 19 nt, Artificial Sequence
  Description of Artificial Sequence: Synthetic oligonucleotide
  Antisense strand to SEQ ID NO: 782840
auucuuauucacaagaaca

SEQ ID NO: 782842 - RNA, 19 nt, Artificial Sequence
  Description of Artificial Sequence: Synthetic oligonucleotide
  Sense strand starting at position 2389 of SEQ ID NO: 587311
augucauguagguaugagu

SEQ ID NO: 782843 - RNA, 19 nt, Artificial Sequence
  Description of Artificial Sequence: Synthetic oligonucleotide
  Antisense strand to SEQ ID NO: 782842
acucauaccuacaugacau

SEQ ID NO: 782844 - RNA, 19 nt, Artificial Sequence
  Description of Artificial Sequence: Synthetic oligonucleotide
  Sense strand starting at position 2578 of SEQ ID NO: 587311
ggacuugaagugggugaaa

SEQ ID NO: 782845 - RNA, 19 nt, Artificial Sequence
  Description of Artificial Sequence: Synthetic oligonucleotide
  Antisense strand to SEQ ID NO: 782844
uuucacccacuucaagucc

SEQ ID NO: 782846 - RNA, 19 nt, Artificial Sequence
  Description of Artificial Sequence: Synthetic oligonucleotide
  Sense strand starting at position 2580 of SEQ ID NO: 587311
acuugaagugggugaaaga

SEQ ID NO: 782847 - RNA, 19 nt, Artificial Sequence
  Description of Artificial Sequence: Synthetic oligonucleotide
  Antisense strand to SEQ ID NO: 782846
ucuuucacccacuucaagu

SEQ ID NO: 782848 - RNA, 19 nt, Artificial Sequence
  Description of Artificial Sequence: Synthetic oligonucleotide
  Sense strand starting at position 2615 of SEQ ID NO: 587311
uccuaaugucaggacuucu

SEQ ID NO: 782849 - RNA, 19 nt, Artificial Sequence
  Description of Artificial Sequence: Synthetic oligonucleotide
  Antisense strand to SEQ ID NO: 782848
agaaguccugacauuagga

SEQ ID NO: 782850 - RNA, 19 nt, Artificial Sequence
  Description of Artificial Sequence: Synthetic oligonucleotide
  Sense strand starting at position 2685 of SEQ ID NO: 587311
cugaaugauccucagugua

SEQ ID NO: 782851 - RNA, 19 nt, Artificial Sequence
  Description of Artificial Sequence: Synthetic oligonucleotide
  Antisense strand to SEQ ID NO: 782850
uacacugaggaucauucag

SEQ ID NO: 782852 - RNA, 19 nt, Artificial Sequence
  Description of Artificial Sequence: Synthetic oligonucleotide
  Sense strand starting at position 2687 of SEQ ID NO: 587311
gaaugauccucaguguauc

SEQ ID NO: 782853 - RNA, 19 nt, Artificial Sequence
  Description of Artificial Sequence: Synthetic oligonucleotide
  Antisense strand to SEQ ID NO: 782852
gauacacugaggaucauuc

SEQ ID NO: 782854 - RNA, 19 nt, Artificial Sequence
  Description of Artificial Sequence: Synthetic oligonucleotide
  Sense strand starting at position 2690 of SEQ ID NO: 587311
ugauccucaguguaucaaa

SEQ ID NO: 782855 - RNA, 19 nt, Artificial Sequence
  Description of Artificial Sequence: Synthetic oligonucleotide
  Antisense strand to SEQ ID NO: 782854
uuugauacacugaggauca

SEQ ID NO: 782856 - RNA, 19 nt, Artificial Sequence
  Description of Artificial Sequence: Synthetic oligonucleotide
  Sense strand starting at position 2879 of SEQ ID NO: 587311
aggacagccauauguaaug

SEQ ID NO: 782857 - RNA, 19 nt, Artificial Sequence
  Description of Artificial Sequence: Synthetic oligonucleotide
  Antisense strand to SEQ ID NO: 782856
cauuacauauggcuguccu

SEQ ID NO: 782858 - RNA, 19 nt, Artificial Sequence
  Description of Artificial Sequence: Synthetic oligonucleotide
  Sense strand starting at position 2895 of SEQ ID NO: 587311
augcuuauagaugaugcaa

SEQ ID NO: 782859 - RNA, 19 nt, Artificial Sequence
  Description of Artificial Sequence: Synthetic oligonucleotide
  Antisense strand to SEQ ID NO: 782858
uugcaucaucuauaagcau

SEQ ID NO: 782860 - RNA, 19 nt, Artificial Sequence
  Description of Artificial Sequence: Synthetic oligonucleotide
  Sense strand starting at position 2982 of SEQ ID NO: 587311
uugccaugugcucugcaua

SEQ ID NO: 782861 - RNA, 19 nt, Artificial Sequence
  Description of Artificial Sequence: Synthetic oligonucleotide
  Antisense strand to SEQ ID NO: 782860
uaugcagagcacauggcaa

SEQ ID NO: 782862 - RNA, 19 nt, Artificial Sequence
  Description of Artificial Sequence: Synthetic oligonucleotide
  Sense strand starting at position 3060 of SEQ ID NO: 587311
ccagccacuguuuaagaga

SEQ ID NO: 782863 - RNA, 19 nt, Artificial Sequence
  Description of Artificial Sequence: Synthetic oligonucleotide
  Antisense strand to SEQ ID NO: 782862
ucucuuaaacaguggcugg

SEQ ID NO: 782864 - RNA, 19 nt, Artificial Sequence
  Description of Artificial Sequence: Synthetic oligonucleotide
  Sense strand starting at position 3173 of SEQ ID NO: 587311
gcagcaaguuaaucuauuu

SEQ ID NO: 782865 - RNA, 19 nt, Artificial Sequence
  Description of Artificial Sequence: Synthetic oligonucleotide
  Antisense strand to SEQ ID NO: 782864
aaauagauuaacuugcugc

SEQ ID NO: 782866 - RNA, 19 nt, Artificial Sequence
  Description of Artificial Sequence: Synthetic oligonucleotide
  Sense strand starting at position 3249 of SEQ ID NO: 587311
ggaggcuuacaguaagcau

SEQ ID NO: 782867 - RNA, 19 nt, Artificial Sequence
  Description of Artificial Sequence: Synthetic oligonucleotide
  Antisense strand to SEQ ID NO: 782866
augcuuacuguaagccucc

SEQ ID NO: 782868 - RNA, 19 nt, Artificial Sequence
  Description of Artificial Sequence: Synthetic oligonucleotide
  Sense strand starting at position 3353 of SEQ ID NO: 587311
gcauguauggucuauaaca

SEQ ID NO: 782869 - RNA, 19 nt, Artificial Sequence
  Description of Artificial Sequence: Synthetic oligonucleotide
  Antisense strand to SEQ ID NO: 782868
uguuauagaccauacaugc

SEQ ID NO: 782870 - RNA, 19 nt, Artificial Sequence
  Description of Artificial Sequence: Synthetic oligonucleotide
  Sense strand starting at position 3355 of SEQ ID NO: 587311
auguauggucuauaacaca

SEQ ID NO: 782871 - RNA, 19 nt, Artificial Sequence
  Description of Artificial Sequence: Synthetic oligonucleotide
  Antisense strand to SEQ ID NO: 782870
uguguuauagaccauacau

SEQ ID NO: 782872 - RNA, 19 nt, Artificial Sequence
  Description of Artificial Sequence: Synthetic oligonucleotide
  Sense strand starting at position 3483 of SEQ ID NO: 587311
gcccuugagaguugagaag

SEQ ID NO: 782873 - RNA, 19 nt, Artificial Sequence
  Description of Artificial Sequence: Synthetic oligonucleotide
  Antisense strand to SEQ ID NO: 782872
cuucucaacucucaagggc

SEQ ID NO: 782874 - RNA, 19 nt, Artificial Sequence
  Description of Artificial Sequence: Synthetic oligonucleotide
  Sense strand starting at position 3515 of SEQ ID NO: 587311
gcuauuguucccguugcuu

SEQ ID NO: 782875 - RNA, 19 nt, Artificial Sequence
  Description of Artificial Sequence: Synthetic oligonucleotide
  Antisense strand to SEQ ID NO: 782874
aagcaacgggaacaauagc

SEQ ID NO: 782876 - RNA, 19 nt, Artificial Sequence
  Description of Artificial Sequence: Synthetic oligonucleotide
  Sense strand starting at position 3549 of SEQ ID NO: 587311
cuuuauugaguguaaggua

SEQ ID NO: 782877 - RNA, 19 nt, Artificial Sequence
  Description of Artificial Sequence: Synthetic oligonucleotide
  Antisense strand to SEQ ID NO: 782876
uaccuuacacucaauaaag

SEQ ID NO: 782878 - RNA, 19 nt, Artificial Sequence
  Description of Artificial Sequence: Synthetic oligonucleotide
  Sense strand starting at position 3651 of SEQ ID NO: 587311
augugucaggcuuaucaau

SEQ ID NO: 782879 - RNA, 19 nt, Artificial Sequence
  Description of Artificial Sequence: Synthetic oligonucleotide
  Antisense strand to SEQ ID NO: 782878
auugauaagccugacacau

SEQ ID NO: 782880 - RNA, 19 nt, Artificial Sequence
  Description of Artificial Sequence: Synthetic oligonucleotide
  Sense strand starting at position 3745 of SEQ ID NO: 587311
acccaaggcucaguugaua

SEQ ID NO: 782881 - RNA, 19 nt, Artificial Sequence
  Description of Artificial Sequence: Synthetic oligonucleotide
  Antisense strand to SEQ ID NO: 782880
uaucaacugagccuugggu

SEQ ID NO: 782882 - RNA, 19 nt, Artificial Sequence
  Description of Artificial Sequence: Synthetic oligonucleotide
  Sense strand starting at position 3797 of SEQ ID NO: 587311
agagaucuuucuguuugaa

SEQ ID NO: 782883 - RNA, 19 nt, Artificial Sequence
  Description of Artificial Sequence: Synthetic oligonucleotide
  Antisense strand to SEQ ID NO: 782882
uucaaacagaaagaucucu

SEQ ID NO: 782884 - RNA, 19 nt, Artificial Sequence
  Description of Artificial Sequence: Synthetic oligonucleotide
  Sense strand starting at position 3846 of SEQ ID NO: 587311
gguauuucccucugugcaa

SEQ ID NO: 782885 - RNA, 19 nt, Artificial Sequence
  Description of Artificial Sequence: Synthetic oligonucleotide
  Antisense strand to SEQ ID NO: 782884
uugcacagagggaaauacc

SEQ ID NO: 782886 - RNA, 19 nt, Artificial Sequence
  Description of Artificial Sequence: Synthetic oligonucleotide
  Sense strand starting at position 3924 of SEQ ID NO: 587311
gguaauuauuaggcauuau

SEQ ID NO: 782887 - RNA, 19 nt, Artificial Sequence
  Description of Artificial Sequence: Synthetic oligonucleotide
  Antisense strand to SEQ ID NO: 782886
auaaugccuaauaauuacc

SEQ ID NO: 782888 - RNA, 19 nt, Artificial Sequence
  Description of Artificial Sequence: Synthetic oligonucleotide
  Sense strand starting at position 439 of SEQ ID NO: 587312
acaagaaugucugcucaca

SEQ ID NO: 782889 - RNA, 19 nt, Artificial Sequence
  Description of Artificial Sequence: Synthetic oligonucleotide
  Antisense strand to SEQ ID NO: 782888
ugugagcagacauucuugu

SEQ ID NO: 782890 - RNA, 19 nt, Artificial Sequence
  Description of Artificial Sequence: Synthetic oligonucleotide
  Sense strand starting at position 480 of SEQ ID NO: 587312
gggaaauccuagcuaacac

SEQ ID NO: 782891 - RNA, 19 nt, Artificial Sequence
  Description of Artificial Sequence: Synthetic oligonucleotide
  Antisense strand to SEQ ID NO: 782890
guguuagcuaggauuuccc

SEQ ID NO: 782892 - RNA, 19 nt, Artificial Sequence
  Description of Artificial Sequence: Synthetic oligonucleotide
  Sense strand starting at position 552 of SEQ ID NO: 587312
aauggucugucuuuauaga

SEQ ID NO: 782893 - RNA, 19 nt, Artificial Sequence
  Description of Artificial Sequence: Synthetic oligonucleotide
  Antisense strand to SEQ ID NO: 782892
ucuauaaagacagaccauu

SEQ ID NO: 782894 - RNA, 19 nt, Artificial Sequence
  Description of Artificial Sequence: Synthetic oligonucleotide
  Sense strand starting at position 553 of SEQ ID NO: 587312
auggucugucuuuauagaa

SEQ ID NO: 782895 - RNA, 19 nt, Artificial Sequence
  Description of Artificial Sequence: Synthetic oligonucleotide
  Antisense strand to SEQ ID NO: 782894
uucuauaaagacagaccau

SEQ ID NO: 782896 - RNA, 19 nt, Artificial Sequence
  Description of Artificial Sequence: Synthetic oligonucleotide
  Sense strand starting at position 612 of SEQ ID NO: 587312
aaucgauguccuggaacua

SEQ ID NO: 782897 - RNA, 19 nt, Artificial Sequence
  Description of Artificial Sequence: Synthetic oligonucleotide
  Antisense strand to SEQ ID NO: 782896
uaguuccaggacaucgauu

SEQ ID NO: 782898 - RNA, 19 nt, Artificial Sequence
  Description of Artificial Sequence: Synthetic oligonucleotide
  Sense strand starting at position 613 of SEQ ID NO: 587312
aucgauguccuggaacuaa

SEQ ID NO: 782899 - RNA, 19 nt, Artificial Sequence
  Description of Artificial Sequence: Synthetic oligonucleotide
  Antisense strand to SEQ ID NO: 782898
uuaguuccaggacaucgau

SEQ ID NO: 782900 - RNA, 19 nt, Artificial Sequence
  Description of Artificial Sequence: Synthetic oligonucleotide
  Sense strand starting at position 1111 of SEQ ID NO: 587312
ugugguauuaguuaaagaa

SEQ ID NO: 782901 - RNA, 19 nt, Artificial Sequence
  Description of Artificial Sequence: Synthetic oligonucleotide
  Antisense strand to SEQ ID NO: 782900
uucuuuaacuaauaccaca

SEQ ID NO: 782902 - RNA, 19 nt, Artificial Sequence
  Description of Artificial Sequence: Synthetic oligonucleotide
  Sense strand starting at position 1395 of SEQ ID NO: 587312
ucuagaugaccuugggcau

SEQ ID NO: 782903 - RNA, 19 nt, Artificial Sequence
  Description of Artificial Sequence: Synthetic oligonucleotide
  Antisense strand to SEQ ID NO: 782902
augcccaaggucaucuaga

SEQ ID NO: 782904 - RNA, 19 nt, Artificial Sequence
  Description of Artificial Sequence: Synthetic oligonucleotide
  Sense strand starting at position 1402 of SEQ ID NO: 587312
gaccuugggcaucaugauu

SEQ ID NO: 782905 - RNA, 19 nt, Artificial Sequence
  Description of Artificial Sequence: Synthetic oligonucleotide
  Antisense strand to SEQ ID NO: 782904
aaucaugaugcccaagguc

SEQ ID NO: 782906 - RNA, 19 nt, Artificial Sequence
  Description of Artificial Sequence: Synthetic oligonucleotide
  Sense strand starting at position 1407 of SEQ ID NO: 587312
ugggcaucaugauuacuuu

SEQ ID NO: 782907 - RNA, 19 nt, Artificial Sequence
  Description of Artificial Sequence: Synthetic oligonucleotide
  Antisense strand to SEQ ID NO: 782906
aaaguaaucaugaugccca

SEQ ID NO: 782908 - RNA, 19 nt, Artificial Sequence
  Description of Artificial Sequence: Synthetic oligonucleotide
  Sense strand starting at position 1523 of SEQ ID NO: 587312
ugaagagaaugugaagaua

SEQ ID NO: 782909 - RNA, 19 nt, Artificial Sequence
  Description of Artificial Sequence: Synthetic oligonucleotide
  Antisense strand to SEQ ID NO: 782908
uaucuucacauucucuuca

SEQ ID NO: 782910 - RNA, 19 nt, Artificial Sequence
  Description of Artificial Sequence: Synthetic oligonucleotide
  Sense strand starting at position 1678 of SEQ ID NO: 587312
gcagaccucucaccaaaga

SEQ ID NO: 782911 - RNA, 19 nt, Artificial Sequence
  Description of Artificial Sequence: Synthetic oligonucleotide
  Antisense strand to SEQ ID NO: 782910
ucuuuggugagaggucugc

SEQ ID NO: 782912 - RNA, 19 nt, Artificial Sequence
  Description of Artificial Sequence: Synthetic oligonucleotide
  Sense strand starting at position 1707 of SEQ ID NO: 587312
acggcaaauaaguauauga

SEQ ID NO: 782913 - RNA, 19 nt, Artificial Sequence
  Description of Artificial Sequence: Synthetic oligonucleotide
  Antisense strand to SEQ ID NO: 782912
ucauauacuuauuugccgu

SEQ ID NO: 782914 - RNA, 19 nt, Artificial Sequence
  Description of Artificial Sequence: Synthetic oligonucleotide
  Sense strand starting at position 2005 of SEQ ID NO: 587312
ggguguuuaaggugaggga

SEQ ID NO: 782915 - RNA, 19 nt, Artificial Sequence
  Description of Artificial Sequence: Synthetic oligonucleotide
  Antisense strand to SEQ ID NO: 782914
ucccucaccuuaaacaccc

SEQ ID NO: 782916 - RNA, 19 nt, Artificial Sequence
  Description of Artificial Sequence: Synthetic oligonucleotide
  Sense strand starting at position 2020 of SEQ ID NO: 587312
gggacuuauauagggcuuu

SEQ ID NO: 782917 - RNA, 19 nt, Artificial Sequence
  Description of Artificial Sequence: Synthetic oligonucleotide
  Antisense strand to SEQ ID NO: 782916
aaagcccuauauaaguccc

SEQ ID NO: 782918 - RNA, 19 nt, Artificial Sequence
  Description of Artificial Sequence: Synthetic oligonucleotide
  Sense strand starting at position 2051 of SEQ ID NO: 587312
gcuuucugagguuagucua

SEQ ID NO: 782919 - RNA, 19 nt, Artificial Sequence
  Description of Artificial Sequence: Synthetic oligonucleotide
  Antisense strand to SEQ ID NO: 782918
uagacuaaccucagaaagc

SEQ ID NO: 782920 - RNA, 19 nt, Artificial Sequence
  Description of Artificial Sequence: Synthetic oligonucleotide
  Sense strand starting at position 2054 of SEQ ID NO: 587312
uucugagguuagucuacau

SEQ ID NO: 782921 - RNA, 19 nt, Artificial Sequence
  Description of Artificial Sequence: Synthetic oligonucleotide
  Antisense strand to SEQ ID NO: 782920
auguagacuaaccucagaa

SEQ ID NO: 782922 - RNA, 19 nt, Artificial Sequence
  Description of Artificial Sequence: Synthetic oligonucleotide
  Sense strand starting at position 2140 of SEQ ID NO: 587312
uggauacagcuguaccuaa

SEQ ID NO: 782923 - RNA, 19 nt, Artificial Sequence
  Description of Artificial Sequence: Synthetic oligonucleotide
  Antisense strand to SEQ ID NO: 782922
uuagguacagcuguaucca

SEQ ID NO: 782924 - RNA, 19 nt, Artificial Sequence
  Description of Artificial Sequence: Synthetic oligonucleotide
  Sense strand starting at position 2243 of SEQ ID NO: 587312
guggacagguugucucuaa

SEQ ID NO: 782925 - RNA, 19 nt, Artificial Sequence
  Description of Artificial Sequence: Synthetic oligonucleotide
  Antisense strand to SEQ ID NO: 782924
uuagagacaaccuguccac

SEQ ID NO: 782926 - RNA, 19 nt, Artificial Sequence
  Description of Artificial Sequence: Synthetic oligonucleotide
  Sense strand starting at position 2247 of SEQ ID NO: 587312
acagguugucucuaagagc

SEQ ID NO: 782927 - RNA, 19 nt, Artificial Sequence
  Description of Artificial Sequence: Synthetic oligonucleotide
  Antisense strand to SEQ ID NO: 782926
gcucuuagagacaaccugu

SEQ ID NO: 782928 - RNA, 19 nt, Artificial Sequence
  Description of Artificial Sequence: Synthetic oligonucleotide
  Sense strand starting at position 2318 of SEQ ID NO: 587312
augcaaguuuacuuauagu

SEQ ID NO: 782929 - RNA, 19 nt, Artificial Sequence
  Description of Artificial Sequence: Synthetic oligonucleotide
  Antisense strand to SEQ ID NO: 782928
acuauaaguaaacuugcau

SEQ ID NO: 782930 - RNA, 19 nt, Artificial Sequence
  Description of Artificial Sequence: Synthetic oligonucleotide
  Sense strand starting at position 2353 of SEQ ID NO: 587312
guauaacaguccuuuccca

SEQ ID NO: 782931 - RNA, 19 nt, Artificial Sequence
  Description of Artificial Sequence: Synthetic oligonucleotide
  Antisense strand to SEQ ID NO: 782930
ugggaaaggacuguuauac

SEQ ID NO: 782932 - RNA, 19 nt, Artificial Sequence
  Description of Artificial Sequence: Synthetic oligonucleotide
  Sense strand starting at position 2406 of SEQ ID NO: 587312
ccuagacugccacaagauu

SEQ ID NO: 782933 - RNA, 19 nt, Artificial Sequence
  Description of Artificial Sequence: Synthetic oligonucleotide
  Antisense strand to SEQ ID NO: 782932
aaucuuguggcagucuagg

SEQ ID NO: 782934 - RNA, 19 nt, Artificial Sequence
  Description of Artificial Sequence: Synthetic oligonucleotide
  Sense strand starting at position 2491 of SEQ ID NO: 587312
uuuauuaaugguuacacga

SEQ ID NO: 782935 - RNA, 19 nt, Artificial Sequence
  Description of Artificial Sequence: Synthetic oligonucleotide
  Antisense strand to SEQ ID NO: 782934
ucguguaaccauuaauaaa

SEQ ID NO: 782936 - RNA, 19 nt, Artificial Sequence
  Description of Artificial Sequence: Synthetic oligonucleotide
  Sense strand starting at position 2499 of SEQ ID NO: 587312
ugguuacacgagcagagau

SEQ ID NO: 782937 - RNA, 19 nt, Artificial Sequence
  Description of Artificial Sequence: Synthetic oligonucleotide
  Antisense strand to SEQ ID NO: 782936
aucucugcucguguaacca

SEQ ID NO: 782938 - RNA, 19 nt, Artificial Sequence
  Description of Artificial Sequence: Synthetic oligonucleotide
  Sense strand starting at position 2578 of SEQ ID NO: 587312
caggguuaaguaugaaauu

SEQ ID NO: 782939 - RNA, 19 nt, Artificial Sequence
  Description of Artificial Sequence: Synthetic oligonucleotide
  Antisense strand to SEQ ID NO: 782938
aauuucauacuuaacccug

SEQ ID NO: 782940 - RNA, 19 nt, Artificial Sequence
  Description of Artificial Sequence: Synthetic oligonucleotide
  Sense strand starting at position 2796 of SEQ ID NO: 587312
auuagagcucuuugauaua

SEQ ID NO: 782941 - RNA, 19 nt, Artificial Sequence
  Description of Artificial Sequence: Synthetic oligonucleotide
  Antisense strand to SEQ ID NO: 782940
uauaucaaagagcucuaau

SEQ ID NO: 782942 - RNA, 19 nt, Artificial Sequence
  Description of Artificial Sequence: Synthetic oligonucleotide
  Sense strand starting at position 2799 of SEQ ID NO: 587312
agagcucuuugauauauuu

SEQ ID NO: 782943 - RNA, 19 nt, Artificial Sequence
  Description of Artificial Sequence: Synthetic oligonucleotide
  Antisense strand to SEQ ID NO: 782942
aaauauaucaaagagcucu

SEQ ID NO: 782944 - RNA, 19 nt, Artificial Sequence
  Description of Artificial Sequence: Synthetic oligonucleotide
  Sense strand starting at position 2818 of SEQ ID NO: 587312
ucaggagugcaacauugua

SEQ ID NO: 782945 - RNA, 19 nt, Artificial Sequence
  Description of Artificial Sequence: Synthetic oligonucleotide
  Antisense strand to SEQ ID NO: 782944
uacaauguugcacuccuga

SEQ ID NO: 782946 - RNA, 19 nt, Artificial Sequence
  Description of Artificial Sequence: Synthetic oligonucleotide
  Sense strand starting at position 3042 of SEQ ID NO: 587312
auuauaaggucugaagaga

SEQ ID NO: 782947 - RNA, 19 nt, Artificial Sequence
  Description of Artificial Sequence: Synthetic oligonucleotide
  Antisense strand to SEQ ID NO: 782946
ucucuucagaccuuauaau

SEQ ID NO: 782948 - RNA, 19 nt, Artificial Sequence
  Description of Artificial Sequence: Synthetic oligonucleotide
  Sense strand starting at position 3055 of SEQ ID NO: 587312
aagagaaauucugugagcu

SEQ ID NO: 782949 - RNA, 19 nt, Artificial Sequence
  Description of Artificial Sequence: Synthetic oligonucleotide
  Antisense strand to SEQ ID NO: 782948
agcucacagaauuucucuu

SEQ ID NO: 782950 - RNA, 19 nt, Artificial Sequence
  Description of Artificial Sequence: Synthetic oligonucleotide
  Sense strand starting at position 3056 of SEQ ID NO: 587312
agagaaauucugugagcua

SEQ ID NO: 782951 - RNA, 19 nt, Artificial Sequence
  Description of Artificial Sequence: Synthetic oligonucleotide
  Antisense strand to SEQ ID NO: 782950
uagcucacagaauuucucu

SEQ ID NO: 782952 - RNA, 19 nt, Artificial Sequence
  Description of Artificial Sequence: Synthetic oligonucleotide
  Sense strand starting at position 3059 of SEQ ID NO: 587312
gaaauucugugagcuagag

SEQ ID NO: 782953 - RNA, 19 nt, Artificial Sequence
  Description of Artificial Sequence: Synthetic oligonucleotide
  Antisense strand to SEQ ID NO: 782952
cucuagcucacagaauuuc

SEQ ID NO: 782954 - RNA, 19 nt, Artificial Sequence
  Description of Artificial Sequence: Synthetic oligonucleotide
  Sense strand starting at position 3065 of SEQ ID NO: 587312
cugugagcuagagggaaau

SEQ ID NO: 782955 - RNA, 19 nt, Artificial Sequence
  Description of Artificial Sequence: Synthetic oligonucleotide
  Antisense strand to SEQ ID NO: 782954
auuucccucuagcucacag

SEQ ID NO: 782956 - RNA, 19 nt, Artificial Sequence
  Description of Artificial Sequence: Synthetic oligonucleotide
  Sense strand starting at position 3119 of SEQ ID NO: 587312
auagaaauuuaucacugga

SEQ ID NO: 782957 - RNA, 19 nt, Artificial Sequence
  Description of Artificial Sequence: Synthetic oligonucleotide
  Antisense strand to SEQ ID NO: 782956
uccagugauaaauuucuau

SEQ ID NO: 782958 - RNA, 19 nt, Artificial Sequence
  Description of Artificial Sequence: Synthetic oligonucleotide
  Sense strand starting at position 3127 of SEQ ID NO: 587312
uuaucacuggauuguauaa

SEQ ID NO: 782959 - RNA, 19 nt, Artificial Sequence
  Description of Artificial Sequence: Synthetic oligonucleotide
  Antisense strand to SEQ ID NO: 782958
uuauacaauccagugauaa

SEQ ID NO: 782960 - RNA, 19 nt, Artificial Sequence
  Description of Artificial Sequence: Synthetic oligonucleotide
  Sense strand starting at position 3143 of SEQ ID NO: 587312
uaaggagaccacuguuauu

SEQ ID NO: 782961 - RNA, 19 nt, Artificial Sequence
  Description of Artificial Sequence: Synthetic oligonucleotide
  Antisense strand to SEQ ID NO: 782960
aauaacaguggucuccuua

SEQ ID NO: 782962 - RNA, 19 nt, Artificial Sequence
  Description of Artificial Sequence: Synthetic oligonucleotide
  Sense strand starting at position 3420 of SEQ ID NO: 587312
ugagucaauugagaacaaa

SEQ ID NO: 782963 - RNA, 19 nt, Artificial Sequence
  Description of Artificial Sequence: Synthetic oligonucleotide
  Antisense strand to SEQ ID NO: 782962
uuuguucucaauugacuca

SEQ ID NO: 782964 - RNA, 19 nt, Artificial Sequence
  Description of Artificial Sequence: Synthetic oligonucleotide
  Sense strand starting at position 3584 of SEQ ID NO: 587312
uuaacuauugagugucuuu

SEQ ID NO: 782965 - RNA, 19 nt, Artificial Sequence
  Description of Artificial Sequence: Synthetic oligonucleotide
  Antisense strand to SEQ ID NO: 782964
aaagacacucaauaguuaa

SEQ ID NO: 782966 - RNA, 19 nt, Artificial Sequence
  Description of Artificial Sequence: Synthetic oligonucleotide
  Sense strand starting at position 3587 of SEQ ID NO: 587312
acuauugagugucuuuaaa

SEQ ID NO: 782967 - RNA, 19 nt, Artificial Sequence
  Description of Artificial Sequence: Synthetic oligonucleotide
  Antisense strand to SEQ ID NO: 782966
uuuaaagacacucaauagu

SEQ ID NO: 782968 - RNA, 19 nt, Artificial Sequence
  Description of Artificial Sequence: Synthetic oligonucleotide
  Sense strand starting at position 471 of SEQ ID NO: 587313
gucagaagugccugcauaa

SEQ ID NO: 782969 - RNA, 19 nt, Artificial Sequence
  Description of Artificial Sequence: Synthetic oligonucleotide
  Antisense strand to SEQ ID NO: 782968
uuaugcaggcacuucugac

SEQ ID NO: 782970 - RNA, 19 nt, Artificial Sequence
  Description of Artificial Sequence: Synthetic oligonucleotide
  Sense strand starting at position 550 of SEQ ID NO: 587313
ugaaaugcugaauaugcaa

SEQ ID NO: 782971 - RNA, 19 nt, Artificial Sequence
  Description of Artificial Sequence: Synthetic oligonucleotide
  Antisense strand to SEQ ID NO: 782970
uugcauauucagcauuuca

SEQ ID NO: 782972 - RNA, 19 nt, Artificial Sequence
  Description of Artificial Sequence: Synthetic oligonucleotide
  Sense strand starting at position 565 of SEQ ID NO: 587313
gcaauuauuucccugggcu

SEQ ID NO: 782973 - RNA, 19 nt, Artificial Sequence
  Description of Artificial Sequence: Synthetic oligonucleotide
  Antisense strand to SEQ ID NO: 782972
agcccagggaaauaauugc

SEQ ID NO: 782974 - RNA, 19 nt, Artificial Sequence
  Description of Artificial Sequence: Synthetic oligonucleotide
  Sense strand starting at position 573 of SEQ ID NO: 587313
uucccugggcucuaggaaa

SEQ ID NO: 782975 - RNA, 19 nt, Artificial Sequence
  Description of Artificial Sequence: Synthetic oligonucleotide
  Antisense strand to SEQ ID NO: 782974
uuuccuagagcccagggaa

SEQ ID NO: 782976 - RNA, 19 nt, Artificial Sequence
  Description of Artificial Sequence: Synthetic oligonucleotide
  Sense strand starting at position 612 of SEQ ID NO: 587313
gggcaagaaaccuguaauu

SEQ ID NO: 782977 - RNA, 19 nt, Artificial Sequence
  Description of Artificial Sequence: Synthetic oligonucleotide
  Antisense strand to SEQ ID NO: 782976
aauuacagguuucuugccc

SEQ ID NO: 782978 - RNA, 19 nt, Artificial Sequence
  Description of Artificial Sequence: Synthetic oligonucleotide
  Sense strand starting at position 642 of SEQ ID NO: 587313
uuaguucuaguccaacacu

SEQ ID NO: 782979 - RNA, 19 nt, Artificial Sequence
  Description of Artificial Sequence: Synthetic oligonucleotide
  Antisense strand to SEQ ID NO: 782978
aguguuggacuagaacuaa

SEQ ID NO: 782980 - RNA, 19 nt, Artificial Sequence
  Description of Artificial Sequence: Synthetic oligonucleotide
  Sense strand starting at position 723 of SEQ ID NO: 587313
agcauuuaacuguguagcu

SEQ ID NO: 782981 - RNA, 19 nt, Artificial Sequence
  Description of Artificial Sequence: Synthetic oligonucleotide
  Antisense strand to SEQ ID NO: 782980
agcuacacaguuaaaugcu

SEQ ID NO: 782982 - RNA, 19 nt, Artificial Sequence
  Description of Artificial Sequence: Synthetic oligonucleotide
  Sense strand starting at position 730 of SEQ ID NO: 587313
aacuguguagcugaaacau

SEQ ID NO: 782983 - RNA, 19 nt, Artificial Sequence
  Description of Artificial Sequence: Synthetic oligonucleotide
  Antisense strand to SEQ ID NO: 782982
auguuucagcuacacaguu

SEQ ID NO: 782984 - RNA, 19 nt, Artificial Sequence
  Description of Artificial Sequence: Synthetic oligonucleotide
  Sense strand starting at position 783 of SEQ ID NO: 587313
acacuaucgagacgcaauu

SEQ ID NO: 782985 - RNA, 19 nt, Artificial Sequence
  Description of Artificial Sequence: Synthetic oligonucleotide
  Antisense strand to SEQ ID NO: 782984
aauugcgucucgauagugu

SEQ ID NO: 782986 - RNA, 19 nt, Artificial Sequence
  Description of Artificial Sequence: Synthetic oligonucleotide
  Sense strand starting at position 873 of SEQ ID NO: 587313
cccggacuuccuuaaauuc

SEQ ID NO: 782987 - RNA, 19 nt, Artificial Sequence
  Description of Artificial Sequence: Synthetic oligonucleotide
  Antisense strand to SEQ ID NO: 782986
gaauuuaaggaaguccggg

SEQ ID NO: 782988 - RNA, 19 nt, Artificial Sequence
  Description of Artificial Sequence: Synthetic oligonucleotide
  Sense strand starting at position 1072 of SEQ ID NO: 587313
gaagcaguccagugacaag

SEQ ID NO: 782989 - RNA, 19 nt, Artificial Sequence
  Description of Artificial Sequence: Synthetic oligonucleotide
  Antisense strand to SEQ ID NO: 782988
cuugucacuggacugcuuc

SEQ ID NO: 782990 - RNA, 19 nt, Artificial Sequence
  Description of Artificial Sequence: Synthetic oligonucleotide
  Sense strand starting at position 1075 of SEQ ID NO: 587313
gcaguccagugacaagaaa

SEQ ID NO: 782991 - RNA, 19 nt, Artificial Sequence
  Description of Artificial Sequence: Synthetic oligonucleotide
  Antisense strand to SEQ ID NO: 782990
uuucuugucacuggacugc

SEQ ID NO: 782992 - RNA, 19 nt, Artificial Sequence
  Description of Artificial Sequence: Synthetic oligonucleotide
  Sense strand starting at position 1109 of SEQ ID NO: 587313
uagggagucgcgggugaaa

SEQ ID NO: 782993 - RNA, 19 nt, Artificial Sequence
  Description of Artificial Sequence: Synthetic oligonucleotide
  Antisense strand to SEQ ID NO: 782992
uuucacccgcgacucccua

SEQ ID NO: 782994 - RNA, 19 nt, Artificial Sequence
  Description of Artificial Sequence: Synthetic oligonucleotide
  Sense strand starting at position 1111 of SEQ ID NO: 587313
gggagucgcgggugaaaga

SEQ ID NO: 782995 - RNA, 19 nt, Artificial Sequence
  Description of Artificial Sequence: Synthetic oligonucleotide
  Antisense strand to SEQ ID NO: 782994
ucuuucacccgcgacuccc

SEQ ID NO: 782996 - RNA, 19 nt, Artificial Sequence
  Description of Artificial Sequence: Synthetic oligonucleotide
  Sense strand starting at position 2126 of SEQ ID NO: 587313
gacuuugauccgcggguga

SEQ ID NO: 782997 - RNA, 19 nt, Artificial Sequence
  Description of Artificial Sequence: Synthetic oligonucleotide
  Antisense strand to SEQ ID NO: 782996
ucacccgcggaucaaaguc

SEQ ID NO: 782998 - RNA, 19 nt, Artificial Sequence
  Description of Artificial Sequence: Synthetic oligonucleotide
  Sense strand starting at position 2139 of SEQ ID NO: 587313
gggugagggcucugugaau

SEQ ID NO: 782999 - RNA, 19 nt, Artificial Sequence
  Description of Artificial Sequence: Synthetic oligonucleotide
  Antisense strand to SEQ ID NO: 782998
auucacagagcccucaccc

SEQ ID NO: 783000 - RNA, 19 nt, Artificial Sequence
  Description of Artificial Sequence: Synthetic oligonucleotide
  Sense strand starting at position 2140 of SEQ ID NO: 587313
ggugagggcucugugaaug

SEQ ID NO: 783001 - RNA, 19 nt, Artificial Sequence
  Description of Artificial Sequence: Synthetic oligonucleotide
  Antisense strand to SEQ ID NO: 783000
cauucacagagcccucacc

SEQ ID NO: 783002 - RNA, 19 nt, Artificial Sequence
  Description of Artificial Sequence: Synthetic oligonucleotide
  Sense strand starting at position 2254 of SEQ ID NO: 587313
aagugacgcuuucuugaag

SEQ ID NO: 783003 - RNA, 19 nt, Artificial Sequence
  Description of Artificial Sequence: Synthetic oligonucleotide
  Antisense strand to SEQ ID NO: 783002
cuucaagaaagcgucacuu

SEQ ID NO: 783004 - RNA, 19 nt, Artificial Sequence
  Description of Artificial Sequence: Synthetic oligonucleotide
  Sense strand starting at position 2482 of SEQ ID NO: 587313
ucgggacugcuccgagaga

SEQ ID NO: 783005 - RNA, 19 nt, Artificial Sequence
  Description of Artificial Sequence: Synthetic oligonucleotide
  Antisense strand to SEQ ID NO: 783004
ucucucggagcagucccga

SEQ ID NO: 783006 - RNA, 19 nt, Artificial Sequence
  Description of Artificial Sequence: Synthetic oligonucleotide
  Sense strand starting at position 2701 of SEQ ID NO: 587313
agaagaugauuacgagaac

SEQ ID NO: 783007 - RNA, 19 nt, Artificial Sequence
  Description of Artificial Sequence: Synthetic oligonucleotide
  Antisense strand to SEQ ID NO: 783006
guucucguaaucaucuucu

SEQ ID NO: 783008 - RNA, 19 nt, Artificial Sequence
  Description of Artificial Sequence: Synthetic oligonucleotide
  Sense strand starting at position 2826 of SEQ ID NO: 587313
cagaauucgcucugaauga

SEQ ID NO: 783009 - RNA, 19 nt, Artificial Sequence
  Description of Artificial Sequence: Synthetic oligonucleotide
  Antisense strand to SEQ ID NO: 783008
ucauucagagcgaauucug

SEQ ID NO: 783010 - RNA, 19 nt, Artificial Sequence
  Description of Artificial Sequence: Synthetic oligonucleotide
  Sense strand starting at position 2827 of SEQ ID NO: 587313
agaauucgcucugaaugag

SEQ ID NO: 783011 - RNA, 19 nt, Artificial Sequence
  Description of Artificial Sequence: Synthetic oligonucleotide
  Antisense strand to SEQ ID NO: 783010
cucauucagagcgaauucu

SEQ ID NO: 783012 - RNA, 19 nt, Artificial Sequence
  Description of Artificial Sequence: Synthetic oligonucleotide
  Sense strand starting at position 3135 of SEQ ID NO: 587313
accagagugcugcgauuac

SEQ ID NO: 783013 - RNA, 19 nt, Artificial Sequence
  Description of Artificial Sequence: Synthetic oligonucleotide
  Antisense strand to SEQ ID NO: 783012
guaaucgcagcacucuggu

SEQ ID NO: 783014 - RNA, 19 nt, Artificial Sequence
  Description of Artificial Sequence: Synthetic oligonucleotide
  Sense strand starting at position 3250 of SEQ ID NO: 587313
ggaguaucagcacagcuua

SEQ ID NO: 783015 - RNA, 19 nt, Artificial Sequence
  Description of Artificial Sequence: Synthetic oligonucleotide
  Antisense strand to SEQ ID NO: 783014
uaagcugugcugauacucc

SEQ ID NO: 783016 - RNA, 19 nt, Artificial Sequence
  Description of Artificial Sequence: Synthetic oligonucleotide
  Sense strand starting at position 3261 of SEQ ID NO: 587313
acagcuuacugagauauca

SEQ ID NO: 783017 - RNA, 19 nt, Artificial Sequence
  Description of Artificial Sequence: Synthetic oligonucleotide
  Antisense strand to SEQ ID NO: 783016
ugauaucucaguaagcugu

SEQ ID NO: 783018 - RNA, 19 nt, Artificial Sequence
  Description of Artificial Sequence: Synthetic oligonucleotide
  Sense strand starting at position 3277 of SEQ ID NO: 587313
ucagaaaggccuugguaaa

SEQ ID NO: 783019 - RNA, 19 nt, Artificial Sequence
  Description of Artificial Sequence: Synthetic oligonucleotide
  Antisense strand to SEQ ID NO: 783018
uuuaccaaggccuuucuga

SEQ ID NO: 783020 - RNA, 19 nt, Artificial Sequence
  Description of Artificial Sequence: Synthetic oligonucleotide
  Sense strand starting at position 3278 of SEQ ID NO: 587313
cagaaaggccuugguaaag

SEQ ID NO: 783021 - RNA, 19 nt, Artificial Sequence
  Description of Artificial Sequence: Synthetic oligonucleotide
  Antisense strand to SEQ ID NO: 783020
cuuuaccaaggccuuucug

SEQ ID NO: 783022 - RNA, 19 nt, Artificial Sequence
  Description of Artificial Sequence: Synthetic oligonucleotide
  Sense strand starting at position 3327 of SEQ ID NO: 587313
ggcagagguuugaauugga

SEQ ID NO: 783023 - RNA, 19 nt, Artificial Sequence
  Description of Artificial Sequence: Synthetic oligonucleotide
  Antisense strand to SEQ ID NO: 783022
uccaauucaaaccucugcc

SEQ ID NO: 783024 - RNA, 19 nt, Artificial Sequence
  Description of Artificial Sequence: Synthetic oligonucleotide
  Sense strand starting at position 3335 of SEQ ID NO: 587313
uuugaauuggagcguguua

SEQ ID NO: 783025 - RNA, 19 nt, Artificial Sequence
  Description of Artificial Sequence: Synthetic oligonucleotide
  Antisense strand to SEQ ID NO: 783024
uaacacgcuccaauucaaa

SEQ ID NO: 783026 - RNA, 19 nt, Artificial Sequence
  Description of Artificial Sequence: Synthetic oligonucleotide
  Sense strand starting at position 3337 of SEQ ID NO: 587313
ugaauuggagcguguuaag

SEQ ID NO: 783027 - RNA, 19 nt, Artificial Sequence
  Description of Artificial Sequence: Synthetic oligonucleotide
  Antisense strand to SEQ ID NO: 783026
cuuaacacgcuccaauuca

SEQ ID NO: 783028 - RNA, 19 nt, Artificial Sequence
  Description of Artificial Sequence: Synthetic oligonucleotide
  Sense strand starting at position 3348 of SEQ ID NO: 587313
guguuaaguguagugucuu

SEQ ID NO: 783029 - RNA, 19 nt, Artificial Sequence
  Description of Artificial Sequence: Synthetic oligonucleotide
  Antisense strand to SEQ ID NO: 783028
aagacacuacacuuaacac

SEQ ID NO: 783030 - RNA, 19 nt, Artificial Sequence
  Description of Artificial Sequence: Synthetic oligonucleotide
  Sense strand starting at position 3381 of SEQ ID NO: 587313
cgugagguccuggcgcaaa

SEQ ID NO: 783031 - RNA, 19 nt, Artificial Sequence
  Description of Artificial Sequence: Synthetic oligonucleotide
  Antisense strand to SEQ ID NO: 783030
uuugcgccaggaccucacg

SEQ ID NO: 783032 - RNA, 19 nt, Artificial Sequence
  Description of Artificial Sequence: Synthetic oligonucleotide
  Sense strand starting at position 3384 of SEQ ID NO: 587313
gagguccuggcgcaaauaa

SEQ ID NO: 783033 - RNA, 19 nt, Artificial Sequence
  Description of Artificial Sequence: Synthetic oligonucleotide
  Antisense strand to SEQ ID NO: 783032
uuauuugcgccaggaccuc

SEQ ID NO: 783034 - RNA, 19 nt, Artificial Sequence
  Description of Artificial Sequence: Synthetic oligonucleotide
  Sense strand starting at position 3395 of SEQ ID NO: 587313
gcaaauaauugagcacaga

SEQ ID NO: 783035 - RNA, 19 nt, Artificial Sequence
  Description of Artificial Sequence: Synthetic oligonucleotide
  Antisense strand to SEQ ID NO: 783034
ucugugcucaauuauuugc

SEQ ID NO: 783036 - RNA, 19 nt, Artificial Sequence
  Description of Artificial Sequence: Synthetic oligonucleotide
  Sense strand starting at position 3411 of SEQ ID NO: 587313
agaaauacaugucaggcau

SEQ ID NO: 783037 - RNA, 19 nt, Artificial Sequence
  Description of Artificial Sequence: Synthetic oligonucleotide
  Antisense strand to SEQ ID NO: 783036
augccugacauguauuucu

SEQ ID NO: 783038 - RNA, 19 nt, Artificial Sequence
  Description of Artificial Sequence: Synthetic oligonucleotide
  Sense strand starting at position 3423 of SEQ ID NO: 587313
caggcauugcuaggcacaa

SEQ ID NO: 783039 - RNA, 19 nt, Artificial Sequence
  Description of Artificial Sequence: Synthetic oligonucleotide
  Antisense strand to SEQ ID NO: 783038
uugugccuagcaaugccug

SEQ ID NO: 783040 - RNA, 19 nt, Artificial Sequence
  Description of Artificial Sequence: Synthetic oligonucleotide
  Sense strand starting at position 3755 of SEQ ID NO: 587313
guuacagugauccgggauc

SEQ ID NO: 783041 - RNA, 19 nt, Artificial Sequence
  Description of Artificial Sequence: Synthetic oligonucleotide
  Antisense strand to SEQ ID NO: 783040
gaucccggaucacuguaac

SEQ ID NO: 783042 - RNA, 19 nt, Artificial Sequence
  Description of Artificial Sequence: Synthetic oligonucleotide
  Sense strand starting at position 3924 of SEQ ID NO: 587313
gugcccagaucugaagaaa

SEQ ID NO: 783043 - RNA, 19 nt, Artificial Sequence
  Description of Artificial Sequence: Synthetic oligonucleotide
  Antisense strand to SEQ ID NO: 783042
uuucuucagaucugggcac

SEQ ID NO: 783044 - RNA, 19 nt, Artificial Sequence
  Description of Artificial Sequence: Synthetic oligonucleotide
  Sense strand starting at position 3979 of SEQ ID NO: 587313
augagcuuucgggacaagu

SEQ ID NO: 783045 - RNA, 19 nt, Artificial Sequence
  Description of Artificial Sequence: Synthetic oligonucleotide
  Antisense strand to SEQ ID NO: 783044
acuugucccgaaagcucau

SEQ ID NO: 783046 - RNA, 19 nt, Artificial Sequence
  Description of Artificial Sequence: Synthetic oligonucleotide
  Sense strand starting at position 3981 of SEQ ID NO: 587313
gagcuuucgggacaaguca

SEQ ID NO: 783047 - RNA, 19 nt, Artificial Sequence
  Description of Artificial Sequence: Synthetic oligonucleotide
  Antisense strand to SEQ ID NO: 783046
ugacuugucccgaaagcuc

SEQ ID NO: 783048 - RNA, 19 nt, Artificial Sequence
  Description of Artificial Sequence: Synthetic oligonucleotide
  Sense strand starting at position 209 of SEQ ID NO: 587314
ccagaagaaugugcaaaua

SEQ ID NO: 783049 - RNA, 19 nt, Artificial Sequence
  Description of Artificial Sequence: Synthetic oligonucleotide
  Antisense strand to SEQ ID NO: 783048
uauuugcacauucuucugg

SEQ ID NO: 783050 - RNA, 19 nt, Artificial Sequence
  Description of Artificial Sequence: Synthetic oligonucleotide
  Sense strand starting at position 235 of SEQ ID NO: 587314
gugacucuagaggauguau

SEQ ID NO: 783051 - RNA, 19 nt, Artificial Sequence
  Description of Artificial Sequence: Synthetic oligonucleotide
  Antisense strand to SEQ ID NO: 783050
auacauccucuagagucac

SEQ ID NO: 783052 - RNA, 19 nt, Artificial Sequence
  Description of Artificial Sequence: Synthetic oligonucleotide
  Sense strand starting at position 244 of SEQ ID NO: 587314
gaggauguauucccagcaa

SEQ ID NO: 783053 - RNA, 19 nt, Artificial Sequence
  Description of Artificial Sequence: Synthetic oligonucleotide
  Antisense strand to SEQ ID NO: 783052
uugcugggaauacauccuc

SEQ ID NO: 783054 - RNA, 19 nt, Artificial Sequence
  Description of Artificial Sequence: Synthetic oligonucleotide
  Sense strand starting at position 248 of SEQ ID NO: 587314
auguauucccagcaagaug

SEQ ID NO: 783055 - RNA, 19 nt, Artificial Sequence
  Description of Artificial Sequence: Synthetic oligonucleotide
  Antisense strand to SEQ ID NO: 783054
caucuugcugggaauacau

SEQ ID NO: 783056 - RNA, 19 nt, Artificial Sequence
  Description of Artificial Sequence: Synthetic oligonucleotide
  Sense strand starting at position 284 of SEQ ID NO: 587314
cugugauaagcccacuaua

SEQ ID NO: 783057 - RNA, 19 nt, Artificial Sequence
  Description of Artificial Sequence: Synthetic oligonucleotide
  Antisense strand to SEQ ID NO: 783056
uauagugggcuuaucacag

SEQ ID NO: 783058 - RNA, 19 nt, Artificial Sequence
  Description of Artificial Sequence: Synthetic oligonucleotide
  Sense strand starting at position 338 of SEQ ID NO: 587314
ggaauuguuccaggugauu

SEQ ID NO: 783059 - RNA, 19 nt, Artificial Sequence
  Description of Artificial Sequence: Synthetic oligonucleotide
  Antisense strand to SEQ ID NO: 783058
aaucaccuggaacaauucc

SEQ ID NO: 783060 - RNA, 19 nt, Artificial Sequence
  Description of Artificial Sequence: Synthetic oligonucleotide
  Sense strand starting at position 344 of SEQ ID NO: 587314
guuccaggugauugacagu

SEQ ID NO: 783061 - RNA, 19 nt, Artificial Sequence
  Description of Artificial Sequence: Synthetic oligonucleotide
  Antisense strand to SEQ ID NO: 783060
acugucaaucaccuggaac

SEQ ID NO: 783062 - RNA, 19 nt, Artificial Sequence
  Description of Artificial Sequence: Synthetic oligonucleotide
  Sense strand starting at position 383 of SEQ ID NO: 587314
ucugguuaggaagauguca

SEQ ID NO: 783063 - RNA, 19 nt, Artificial Sequence
  Description of Artificial Sequence: Synthetic oligonucleotide
  Antisense strand to SEQ ID NO: 783062
ugacaucuuccuaaccaga

SEQ ID NO: 783064 - RNA, 19 nt, Artificial Sequence
  Description of Artificial Sequence: Synthetic oligonucleotide
  Sense strand starting at position 385 of SEQ ID NO: 587314
ugguuaggaagaugucaaa

SEQ ID NO: 783065 - RNA, 19 nt, Artificial Sequence
  Description of Artificial Sequence: Synthetic oligonucleotide
  Antisense strand to SEQ ID NO: 783064
uuugacaucuuccuaacca

SEQ ID NO: 783066 - RNA, 19 nt, Artificial Sequence
  Description of Artificial Sequence: Synthetic oligonucleotide
  Sense strand starting at position 473 of SEQ ID NO: 587314
ggaugaggucccuaauugu

SEQ ID NO: 783067 - RNA, 19 nt, Artificial Sequence
  Description of Artificial Sequence: Synthetic oligonucleotide
  Antisense strand to SEQ ID NO: 783066
acaauuagggaccucaucc

SEQ ID NO: 783068 - RNA, 19 nt, Artificial Sequence
  Description of Artificial Sequence: Synthetic oligonucleotide
  Sense strand starting at position 476 of SEQ ID NO: 587314
ugaggucccuaauuguaaa

SEQ ID NO: 783069 - RNA, 19 nt, Artificial Sequence
  Description of Artificial Sequence: Synthetic oligonucleotide
  Antisense strand to SEQ ID NO: 783068
uuuacaauuagggaccuca

SEQ ID NO: 783070 - RNA, 19 nt, Artificial Sequence
  Description of Artificial Sequence: Synthetic oligonucleotide
  Sense strand starting at position 537 of SEQ ID NO: 587314
agagauugcauacguaaag

SEQ ID NO: 783071 - RNA, 19 nt, Artificial Sequence
  Description of Artificial Sequence: Synthetic oligonucleotide
  Antisense strand to SEQ ID NO: 783070
cuuuacguaugcaaucucu

SEQ ID NO: 783072 - RNA, 19 nt, Artificial Sequence
  Description of Artificial Sequence: Synthetic oligonucleotide
  Sense strand starting at position 538 of SEQ ID NO: 587314
gagauugcauacguaaagu

SEQ ID NO: 783073 - RNA, 19 nt, Artificial Sequence
  Description of Artificial Sequence: Synthetic oligonucleotide
  Antisense strand to SEQ ID NO: 783072
acuuuacguaugcaaucuc

SEQ ID NO: 783074 - RNA, 19 nt, Artificial Sequence
  Description of Artificial Sequence: Synthetic oligonucleotide
  Sense strand starting at position 676 of SEQ ID NO: 587314
cguggaggucaaggugauu

SEQ ID NO: 783075 - RNA, 19 nt, Artificial Sequence
  Description of Artificial Sequence: Synthetic oligonucleotide
  Antisense strand to SEQ ID NO: 783074
aaucaccuugaccuccacg

SEQ ID NO: 783076 - RNA, 19 nt, Artificial Sequence
  Description of Artificial Sequence: Synthetic oligonucleotide
  Sense strand starting at position 1037 of SEQ ID NO: 587314
ucuugaaggucaucugaac

SEQ ID NO: 783077 - RNA, 19 nt, Artificial Sequence
  Description of Artificial Sequence: Synthetic oligonucleotide
  Antisense strand to SEQ ID NO: 783076
guucagaugaccuucaaga

SEQ ID NO: 783078 - RNA, 19 nt, Artificial Sequence
  Description of Artificial Sequence: Synthetic oligonucleotide
  Sense strand starting at position 1127 of SEQ ID NO: 587314
ugaagaaccuuggaaggua

SEQ ID NO: 783079 - RNA, 19 nt, Artificial Sequence
  Description of Artificial Sequence: Synthetic oligonucleotide
  Antisense strand to SEQ ID NO: 783078
uaccuuccaagguucuuca

SEQ ID NO: 783080 - RNA, 19 nt, Artificial Sequence
  Description of Artificial Sequence: Synthetic oligonucleotide
  Sense strand starting at position 1267 of SEQ ID NO: 587314
gcagauacaguguaacaaa

SEQ ID NO: 783081 - RNA, 19 nt, Artificial Sequence
  Description of Artificial Sequence: Synthetic oligonucleotide
  Antisense strand to SEQ ID NO: 783080
uuuguuacacuguaucugc

SEQ ID NO: 783082 - RNA, 19 nt, Artificial Sequence
  Description of Artificial Sequence: Synthetic oligonucleotide
  Sense strand starting at position 1286 of SEQ ID NO: 587314
gccacuauuccugagacug

SEQ ID NO: 783083 - RNA, 19 nt, Artificial Sequence
  Description of Artificial Sequence: Synthetic oligonucleotide
  Antisense strand to SEQ ID NO: 783082
cagucucaggaauaguggc

SEQ ID NO: 783084 - RNA, 19 nt, Artificial Sequence
  Description of Artificial Sequence: Synthetic oligonucleotide
  Sense strand starting at position 1395 of SEQ ID NO: 587314
gcaggugacauccagcauu

SEQ ID NO: 783085 - RNA, 19 nt, Artificial Sequence
  Description of Artificial Sequence: Synthetic oligonucleotide
  Antisense strand to SEQ ID NO: 783084
aaugcuggaugucaccugc

SEQ ID NO: 783086 - RNA, 19 nt, Artificial Sequence
  Description of Artificial Sequence: Synthetic oligonucleotide
  Sense strand starting at position 1426 of SEQ ID NO: 587314
ccuccugaguacccagaaa

SEQ ID NO: 783087 - RNA, 19 nt, Artificial Sequence
  Description of Artificial Sequence: Synthetic oligonucleotide
  Antisense strand to SEQ ID NO: 783086
uuucuggguacucaggagg

SEQ ID NO: 783088 - RNA, 19 nt, Artificial Sequence
  Description of Artificial Sequence: Synthetic oligonucleotide
  Sense strand starting at position 1522 of SEQ ID NO: 587314
ucuuaccugugguuacaga

SEQ ID NO: 783089 - RNA, 19 nt, Artificial Sequence
  Description of Artificial Sequence: Synthetic oligonucleotide
  Antisense strand to SEQ ID NO: 783088
ucuguaaccacagguaaga

SEQ ID NO: 783090 - RNA, 19 nt, Artificial Sequence
  Description of Artificial Sequence: Synthetic oligonucleotide
  Sense strand starting at position 1523 of SEQ ID NO: 587314
cuuaccugugguuacagaa

SEQ ID NO: 783091 - RNA, 19 nt, Artificial Sequence
  Description of Artificial Sequence: Synthetic oligonucleotide
  Antisense strand to SEQ ID NO: 783090
uucuguaaccacagguaag

SEQ ID NO: 783092 - RNA, 19 nt, Artificial Sequence
  Description of Artificial Sequence: Synthetic oligonucleotide
  Sense strand starting at position 1548 of SEQ ID NO: 587314
aggucauugaaaggaugca

SEQ ID NO: 783093 - RNA, 19 nt, Artificial Sequence
  Description of Artificial Sequence: Synthetic oligonucleotide
  Antisense strand to SEQ ID NO: 783092
ugcauccuuucaaugaccu

SEQ ID NO: 783094 - RNA, 19 nt, Artificial Sequence
  Description of Artificial Sequence: Synthetic oligonucleotide
  Sense strand starting at position 1584 of SEQ ID NO: 587314
ggagauucugggcagcuga

SEQ ID NO: 783095 - RNA, 19 nt, Artificial Sequence
  Description of Artificial Sequence: Synthetic oligonucleotide
  Antisense strand to SEQ ID NO: 783094
ucagcugcccagaaucucc

SEQ ID NO: 783096 - RNA, 19 nt, Artificial Sequence
  Description of Artificial Sequence: Synthetic oligonucleotide
  Sense strand starting at position 1860 of SEQ ID NO: 587314
agcgauucugcaggugaaa

SEQ ID NO: 783097 - RNA, 19 nt, Artificial Sequence
  Description of Artificial Sequence: Synthetic oligonucleotide
  Antisense strand to SEQ ID NO: 783096
uuucaccugcagaaucgcu

SEQ ID NO: 783098 - RNA, 19 nt, Artificial Sequence
  Description of Artificial Sequence: Synthetic oligonucleotide
  Sense strand starting at position 2168 of SEQ ID NO: 587314
cugggucugucugucaaua

SEQ ID NO: 783099 - RNA, 19 nt, Artificial Sequence
  Description of Artificial Sequence: Synthetic oligonucleotide
  Antisense strand to SEQ ID NO: 783098
uauugacagacagacccag

SEQ ID NO: 783100 - RNA, 19 nt, Artificial Sequence
  Description of Artificial Sequence: Synthetic oligonucleotide
  Sense strand starting at position 2277 of SEQ ID NO: 587314
ccuucuaagucaguaaaua

SEQ ID NO: 783101 - RNA, 19 nt, Artificial Sequence
  Description of Artificial Sequence: Synthetic oligonucleotide
  Antisense strand to SEQ ID NO: 783100
uauuuacugacuuagaagg

SEQ ID NO: 783102 - RNA, 19 nt, Artificial Sequence
  Description of Artificial Sequence: Synthetic oligonucleotide
  Sense strand starting at position 2278 of SEQ ID NO: 587314
cuucuaagucaguaaauag

SEQ ID NO: 783103 - RNA, 19 nt, Artificial Sequence
  Description of Artificial Sequence: Synthetic oligonucleotide
  Antisense strand to SEQ ID NO: 783102
cuauuuacugacuuagaag

SEQ ID NO: 783104 - RNA, 19 nt, Artificial Sequence
  Description of Artificial Sequence: Synthetic oligonucleotide
  Sense strand starting at position 2461 of SEQ ID NO: 587314
aggugaccuugccuuugau

SEQ ID NO: 783105 - RNA, 19 nt, Artificial Sequence
  Description of Artificial Sequence: Synthetic oligonucleotide
  Antisense strand to SEQ ID NO: 783104
aucaaaggcaaggucaccu

SEQ ID NO: 783106 - RNA, 19 nt, Artificial Sequence
  Description of Artificial Sequence: Synthetic oligonucleotide
  Sense strand starting at position 2503 of SEQ ID NO: 587314
cuaguaucagaugaguacu

SEQ ID NO: 783107 - RNA, 19 nt, Artificial Sequence
  Description of Artificial Sequence: Synthetic oligonucleotide
  Antisense strand to SEQ ID NO: 783106
aguacucaucugauacuag

SEQ ID NO: 783108 - RNA, 19 nt, Artificial Sequence
  Description of Artificial Sequence: Synthetic oligonucleotide
  Sense strand starting at position 2685 of SEQ ID NO: 587314
cggccuuucccucaagcua

SEQ ID NO: 783109 - RNA, 19 nt, Artificial Sequence
  Description of Artificial Sequence: Synthetic oligonucleotide
  Antisense strand to SEQ ID NO: 783108
uagcuugagggaaaggccg

SEQ ID NO: 783110 - RNA, 19 nt, Artificial Sequence
  Description of Artificial Sequence: Synthetic oligonucleotide
  Sense strand starting at position 2906 of SEQ ID NO: 587314
aggagucaauuagcacaaa

SEQ ID NO: 783111 - RNA, 19 nt, Artificial Sequence
  Description of Artificial Sequence: Synthetic oligonucleotide
  Antisense strand to SEQ ID NO: 783110
uuugugcuaauugacuccu

SEQ ID NO: 783112 - RNA, 19 nt, Artificial Sequence
  Description of Artificial Sequence: Synthetic oligonucleotide
  Sense strand starting at position 2965 of SEQ ID NO: 587314
augcgauugcuagaaucau

SEQ ID NO: 783113 - RNA, 19 nt, Artificial Sequence
  Description of Artificial Sequence: Synthetic oligonucleotide
  Antisense strand to SEQ ID NO: 783112
augauucuagcaaucgcau

SEQ ID NO: 783114 - RNA, 19 nt, Artificial Sequence
  Description of Artificial Sequence: Synthetic oligonucleotide
  Sense strand starting at position 3211 of SEQ ID NO: 587314
gcuuguauccaucaggauu

SEQ ID NO: 783115 - RNA, 19 nt, Artificial Sequence
  Description of Artificial Sequence: Synthetic oligonucleotide
  Antisense strand to SEQ ID NO: 783114
aauccugauggauacaagc

SEQ ID NO: 783116 - RNA, 19 nt, Artificial Sequence
  Description of Artificial Sequence: Synthetic oligonucleotide
  Sense strand starting at position 3256 of SEQ ID NO: 587314
caauuacuuuaaguggaga

SEQ ID NO: 783117 - RNA, 19 nt, Artificial Sequence
  Description of Artificial Sequence: Synthetic oligonucleotide
  Antisense strand to SEQ ID NO: 783116
ucuccacuuaaaguaauug

SEQ ID NO: 783118 - RNA, 19 nt, Artificial Sequence
  Description of Artificial Sequence: Synthetic oligonucleotide
  Sense strand starting at position 3542 of SEQ ID NO: 587314
ggucgaaacagaugcaucu

SEQ ID NO: 783119 - RNA, 19 nt, Artificial Sequence
  Description of Artificial Sequence: Synthetic oligonucleotide
  Antisense strand to SEQ ID NO: 783118
agaugcaucuguuucgacc

SEQ ID NO: 783120 - RNA, 19 nt, Artificial Sequence
  Description of Artificial Sequence: Synthetic oligonucleotide
  Sense strand starting at position 3675 of SEQ ID NO: 587314
ccugaaauauuugaaaguu

SEQ ID NO: 783121 - RNA, 19 nt, Artificial Sequence
  Description of Artificial Sequence: Synthetic oligonucleotide
  Antisense strand to SEQ ID NO: 783120
aacuuucaaauauuucagg

SEQ ID NO: 783122 - RNA, 19 nt, Artificial Sequence
  Description of Artificial Sequence: Synthetic oligonucleotide
  Sense strand starting at position 3870 of SEQ ID NO: 587314
cacagaagugacugucaua

SEQ ID NO: 783123 - RNA, 19 nt, Artificial Sequence
  Description of Artificial Sequence: Synthetic oligonucleotide
  Antisense strand to SEQ ID NO: 783122
uaugacagucacuucugug

SEQ ID NO: 783124 - RNA, 19 nt, Artificial Sequence
  Description of Artificial Sequence: Synthetic oligonucleotide
  Sense strand starting at position 3883 of SEQ ID NO: 587314
gucauaaaggaaggaguuu

SEQ ID NO: 783125 - RNA, 19 nt, Artificial Sequence
  Description of Artificial Sequence: Synthetic oligonucleotide
  Antisense strand to SEQ ID NO: 783124
aaacuccuuccuuuaugac

SEQ ID NO: 783126 - RNA, 19 nt, Artificial Sequence
  Description of Artificial Sequence: Synthetic oligonucleotide
  Sense strand starting at position 3894 of SEQ ID NO: 587314
aggaguuuauacucacaga

SEQ ID NO: 783127 - RNA, 19 nt, Artificial Sequence
  Description of Artificial Sequence: Synthetic oligonucleotide
  Antisense strand to SEQ ID NO: 783126
ucugugaguauaaacuccu

SEQ ID NO: 783128 - RNA, 19 nt, Artificial Sequence
  Description of Artificial Sequence: Synthetic oligonucleotide
  Sense strand starting at position 21 of SEQ ID NO: 587315
gguugaucugugcacacca

SEQ ID NO: 783129 - RNA, 19 nt, Artificial Sequence
  Description of Artificial Sequence: Synthetic oligonucleotide
  Antisense strand to SEQ ID NO: 783128
uggugugcacagaucaacc

SEQ ID NO: 783130 - RNA, 19 nt, Artificial Sequence
  Description of Artificial Sequence: Synthetic oligonucleotide
  Sense strand starting at position 133 of SEQ ID NO: 587315
uguggagauuucugagaau

SEQ ID NO: 783131 - RNA, 19 nt, Artificial Sequence
  Description of Artificial Sequence: Synthetic oligonucleotide
  Antisense strand to SEQ ID NO: 783130
auucucagaaaucuccaca

SEQ ID NO: 783132 - RNA, 19 nt, Artificial Sequence
  Description of Artificial Sequence: Synthetic oligonucleotide
  Sense strand starting at position 136 of SEQ ID NO: 587315
ggagauuucugagaaugca

SEQ ID NO: 783133 - RNA, 19 nt, Artificial Sequence
  Description of Artificial Sequence: Synthetic oligonucleotide
  Antisense strand to SEQ ID NO: 783132
ugcauucucagaaaucucc

SEQ ID NO: 783134 - RNA, 19 nt, Artificial Sequence
  Description of Artificial Sequence: Synthetic oligonucleotide
  Sense strand starting at position 499 of SEQ ID NO: 587315
aguugaaauugguucuuaa

SEQ ID NO: 783135 - RNA, 19 nt, Artificial Sequence
  Description of Artificial Sequence: Synthetic oligonucleotide
  Antisense strand to SEQ ID NO: 783134
uuaagaaccaauuucaacu

SEQ ID NO: 783136 - RNA, 19 nt, Artificial Sequence
  Description of Artificial Sequence: Synthetic oligonucleotide
  Sense strand starting at position 560 of SEQ ID NO: 587315
ugcauaucucuuuguauuu

SEQ ID NO: 783137 - RNA, 19 nt, Artificial Sequence
  Description of Artificial Sequence: Synthetic oligonucleotide
  Antisense strand to SEQ ID NO: 783136
aaauacaaagagauaugca

SEQ ID NO: 783138 - RNA, 19 nt, Artificial Sequence
  Description of Artificial Sequence: Synthetic oligonucleotide
  Sense strand starting at position 772 of SEQ ID NO: 587315
auggaaagaucucuguuaa

SEQ ID NO: 783139 - RNA, 19 nt, Artificial Sequence
  Description of Artificial Sequence: Synthetic oligonucleotide
  Antisense strand to SEQ ID NO: 783138
uuaacagagaucuuuccau

SEQ ID NO: 783140 - RNA, 19 nt, Artificial Sequence
  Description of Artificial Sequence: Synthetic oligonucleotide
  Sense strand starting at position 773 of SEQ ID NO: 587315
uggaaagaucucuguuaaa

SEQ ID NO: 783141 - RNA, 19 nt, Artificial Sequence
  Description of Artificial Sequence: Synthetic oligonucleotide
  Antisense strand to SEQ ID NO: 783140
uuuaacagagaucuuucca

SEQ ID NO: 783142 - RNA, 19 nt, Artificial Sequence
  Description of Artificial Sequence: Synthetic oligonucleotide
  Sense strand starting at position 802 of SEQ ID NO: 587315
gaaagaguugccugacgaa

SEQ ID NO: 783143 - RNA, 19 nt, Artificial Sequence
  Description of Artificial Sequence: Synthetic oligonucleotide
  Antisense strand to SEQ ID NO: 783142
uucgucaggcaacucuuuc

SEQ ID NO: 783144 - RNA, 19 nt, Artificial Sequence
  Description of Artificial Sequence: Synthetic oligonucleotide
  Sense strand starting at position 1132 of SEQ ID NO: 587315
gcauaaucacgugauguuu

SEQ ID NO: 783145 - RNA, 19 nt, Artificial Sequence
  Description of Artificial Sequence: Synthetic oligonucleotide
  Antisense strand to SEQ ID NO: 783144
aaacaucacgugauuaugc

SEQ ID NO: 783146 - RNA, 19 nt, Artificial Sequence
  Description of Artificial Sequence: Synthetic oligonucleotide
  Sense strand starting at position 1183 of SEQ ID NO: 587315
aggguucauugacugagua

SEQ ID NO: 783147 - RNA, 19 nt, Artificial Sequence
  Description of Artificial Sequence: Synthetic oligonucleotide
  Antisense strand to SEQ ID NO: 783146
uacucagucaaugaacccu

SEQ ID NO: 783148 - RNA, 19 nt, Artificial Sequence
  Description of Artificial Sequence: Synthetic oligonucleotide
  Sense strand starting at position 1184 of SEQ ID NO: 587315
ggguucauugacugaguaa

SEQ ID NO: 783149 - RNA, 19 nt, Artificial Sequence
  Description of Artificial Sequence: Synthetic oligonucleotide
  Antisense strand to SEQ ID NO: 783148
uuacucagucaaugaaccc

SEQ ID NO: 783150 - RNA, 19 nt, Artificial Sequence
  Description of Artificial Sequence: Synthetic oligonucleotide
  Sense strand starting at position 1199 of SEQ ID NO: 587315
guaauaguaucagcuaaca

SEQ ID NO: 783151 - RNA, 19 nt, Artificial Sequence
  Description of Artificial Sequence: Synthetic oligonucleotide
  Antisense strand to SEQ ID NO: 783150
uguuagcugauacuauuac

SEQ ID NO: 783152 - RNA, 19 nt, Artificial Sequence
  Description of Artificial Sequence: Synthetic oligonucleotide
  Sense strand starting at position 1329 of SEQ ID NO: 587315
uuggguuugcacuauguuu

SEQ ID NO: 783153 - RNA, 19 nt, Artificial Sequence
  Description of Artificial Sequence: Synthetic oligonucleotide
  Antisense strand to SEQ ID NO: 783152
aaacauagugcaaacccaa

SEQ ID NO: 783154 - RNA, 19 nt, Artificial Sequence
  Description of Artificial Sequence: Synthetic oligonucleotide
  Sense strand starting at position 1565 of SEQ ID NO: 587315
ccuuuaaagaaagguguga

SEQ ID NO: 783155 - RNA, 19 nt, Artificial Sequence
  Description of Artificial Sequence: Synthetic oligonucleotide
  Antisense strand to SEQ ID NO: 783154
ucacaccuuucuuuaaagg

SEQ ID NO: 783156 - RNA, 19 nt, Artificial Sequence
  Description of Artificial Sequence: Synthetic oligonucleotide
  Sense strand starting at position 1674 of SEQ ID NO: 587315
uaggcaaaggauuguggaa

SEQ ID NO: 783157 - RNA, 19 nt, Artificial Sequence
  Description of Artificial Sequence: Synthetic oligonucleotide
  Antisense strand to SEQ ID NO: 783156
uuccacaauccuuugccua

SEQ ID NO: 783158 - RNA, 19 nt, Artificial Sequence
  Description of Artificial Sequence: Synthetic oligonucleotide
  Sense strand starting at position 1790 of SEQ ID NO: 587315
gggacuucacacgguuauu

SEQ ID NO: 783159 - RNA, 19 nt, Artificial Sequence
  Description of Artificial Sequence: Synthetic oligonucleotide
  Antisense strand to SEQ ID NO: 783158
aauaaccgugugaaguccc

SEQ ID NO: 783160 - RNA, 19 nt, Artificial Sequence
  Description of Artificial Sequence: Synthetic oligonucleotide
  Sense strand starting at position 1801 of SEQ ID NO: 587315
cgguuauuaccaggaucag

SEQ ID NO: 783161 - RNA, 19 nt, Artificial Sequence
  Description of Artificial Sequence: Synthetic oligonucleotide
  Antisense strand to SEQ ID NO: 783160
cugauccugguaauaaccg

SEQ ID NO: 783162 - RNA, 19 nt, Artificial Sequence
  Description of Artificial Sequence: Synthetic oligonucleotide
  Sense strand starting at position 1867 of SEQ ID NO: 587315
ucagaugagucaucacauu

SEQ ID NO: 783163 - RNA, 19 nt, Artificial Sequence
  Description of Artificial Sequence: Synthetic oligonucleotide
  Antisense strand to SEQ ID NO: 783162
aaugugaugacucaucuga

SEQ ID NO: 783164 - RNA, 19 nt, Artificial Sequence
  Description of Artificial Sequence: Synthetic oligonucleotide
  Sense strand starting at position 2050 of SEQ ID NO: 587315
acagguaaagcucaugcua

SEQ ID NO: 783165 - RNA, 19 nt, Artificial Sequence
  Description of Artificial Sequence: Synthetic oligonucleotide
  Antisense strand to SEQ ID NO: 783164
uagcaugagcuuuaccugu

SEQ ID NO: 783166 - RNA, 19 nt, Artificial Sequence
  Description of Artificial Sequence: Synthetic oligonucleotide
  Sense strand starting at position 2093 of SEQ ID NO: 587315
cauggaguucuccaguuaa

SEQ ID NO: 783167 - RNA, 19 nt, Artificial Sequence
  Description of Artificial Sequence: Synthetic oligonucleotide
  Antisense strand to SEQ ID NO: 783166
uuaacuggagaacuccaug

SEQ ID NO: 783168 - RNA, 19 nt, Artificial Sequence
  Description of Artificial Sequence: Synthetic oligonucleotide
  Sense strand starting at position 2104 of SEQ ID NO: 587315
ccaguuaaucaaggcucaa

SEQ ID NO: 783169 - RNA, 19 nt, Artificial Sequence
  Description of Artificial Sequence: Synthetic oligonucleotide
  Antisense strand to SEQ ID NO: 783168
uugagccuugauuaacugg

SEQ ID NO: 783170 - RNA, 19 nt, Artificial Sequence
  Description of Artificial Sequence: Synthetic oligonucleotide
  Sense strand starting at position 2114 of SEQ ID NO: 587315
aaggcucaaccuuguuaga

SEQ ID NO: 783171 - RNA, 19 nt, Artificial Sequence
  Description of Artificial Sequence: Synthetic oligonucleotide
  Antisense strand to SEQ ID NO: 783170
ucuaacaagguugagccuu

SEQ ID NO: 783172 - RNA, 19 nt, Artificial Sequence
  Description of Artificial Sequence: Synthetic oligonucleotide
  Sense strand starting at position 2116 of SEQ ID NO: 587315
ggcucaaccuuguuagaaa

SEQ ID NO: 783173 - RNA, 19 nt, Artificial Sequence
  Description of Artificial Sequence: Synthetic oligonucleotide
  Antisense strand to SEQ ID NO: 783172
uuucuaacaagguugagcc

SEQ ID NO: 783174 - RNA, 19 nt, Artificial Sequence
  Description of Artificial Sequence: Synthetic oligonucleotide
  Sense strand starting at position 2155 of SEQ ID NO: 587315
ucauuucugucuuaaugag

SEQ ID NO: 783175 - RNA, 19 nt, Artificial Sequence
  Description of Artificial Sequence: Synthetic oligonucleotide
  Antisense strand to SEQ ID NO: 783174
cucauuaagacagaaauga

SEQ ID NO: 783176 - RNA, 19 nt, Artificial Sequence
  Description of Artificial Sequence: Synthetic oligonucleotide
  Sense strand starting at position 2258 of SEQ ID NO: 587315
agugaugauccaugacuag

SEQ ID NO: 783177 - RNA, 19 nt, Artificial Sequence
  Description of Artificial Sequence: Synthetic oligonucleotide
  Antisense strand to SEQ ID NO: 783176
cuagucauggaucaucacu

SEQ ID NO: 783178 - RNA, 19 nt, Artificial Sequence
  Description of Artificial Sequence: Synthetic oligonucleotide
  Sense strand starting at position 2276 of SEQ ID NO: 587315
gagacuagaugucagagaa

SEQ ID NO: 783179 - RNA, 19 nt, Artificial Sequence
  Description of Artificial Sequence: Synthetic oligonucleotide
  Antisense strand to SEQ ID NO: 783178
uucucugacaucuagucuc

SEQ ID NO: 783180 - RNA, 19 nt, Artificial Sequence
  Description of Artificial Sequence: Synthetic oligonucleotide
  Sense strand starting at position 2286 of SEQ ID NO: 587315
gucagagaaugagaggaau

SEQ ID NO: 783181 - RNA, 19 nt, Artificial Sequence
  Description of Artificial Sequence: Synthetic oligonucleotide
  Antisense strand to SEQ ID NO: 783180
auuccucucauucucugac

SEQ ID NO: 783182 - RNA, 19 nt, Artificial Sequence
  Description of Artificial Sequence: Synthetic oligonucleotide
  Sense strand starting at position 2304 of SEQ ID NO: 587315
uggauaccaccuggauauu

SEQ ID NO: 783183 - RNA, 19 nt, Artificial Sequence
  Description of Artificial Sequence: Synthetic oligonucleotide
  Antisense strand to SEQ ID NO: 783182
aauauccaggugguaucca

SEQ ID NO: 783184 - RNA, 19 nt, Artificial Sequence
  Description of Artificial Sequence: Synthetic oligonucleotide
  Sense strand starting at position 2833 of SEQ ID NO: 587315
aucacuugaacgcgagaga

SEQ ID NO: 783185 - RNA, 19 nt, Artificial Sequence
  Description of Artificial Sequence: Synthetic oligonucleotide
  Antisense strand to SEQ ID NO: 783184
ucucucgcguucaagugau

SEQ ID NO: 783186 - RNA, 19 nt, Artificial Sequence
  Description of Artificial Sequence: Synthetic oligonucleotide
  Sense strand starting at position 2868 of SEQ ID NO: 587315
cucagaugucaucacugca

SEQ ID NO: 783187 - RNA, 19 nt, Artificial Sequence
  Description of Artificial Sequence: Synthetic oligonucleotide
  Antisense strand to SEQ ID NO: 783186
ugcagugaugacaucugag

SEQ ID NO: 783188 - RNA, 19 nt, Artificial Sequence
  Description of Artificial Sequence: Synthetic oligonucleotide
  Sense strand starting at position 3337 of SEQ ID NO: 587315
ugggccucugaccagauau

SEQ ID NO: 783189 - RNA, 19 nt, Artificial Sequence
  Description of Artificial Sequence: Synthetic oligonucleotide
  Antisense strand to SEQ ID NO: 783188
auaucuggucagaggccca

SEQ ID NO: 783190 - RNA, 19 nt, Artificial Sequence
  Description of Artificial Sequence: Synthetic oligonucleotide
  Sense strand starting at position 3339 of SEQ ID NO: 587315
ggccucugaccagauauca

SEQ ID NO: 783191 - RNA, 19 nt, Artificial Sequence
  Description of Artificial Sequence: Synthetic oligonucleotide
  Antisense strand to SEQ ID NO: 783190
ugauaucuggucagaggcc

SEQ ID NO: 783192 - RNA, 19 nt, Artificial Sequence
  Description of Artificial Sequence: Synthetic oligonucleotide
  Sense strand starting at position 3347 of SEQ ID NO: 587315
accagauaucaguguuggu

SEQ ID NO: 783193 - RNA, 19 nt, Artificial Sequence
  Description of Artificial Sequence: Synthetic oligonucleotide
  Antisense strand to SEQ ID NO: 783192
accaacacugauaucuggu

SEQ ID NO: 783194 - RNA, 19 nt, Artificial Sequence
  Description of Artificial Sequence: Synthetic oligonucleotide
  Sense strand starting at position 3351 of SEQ ID NO: 587315
gauaucaguguugguuaaa

SEQ ID NO: 783195 - RNA, 19 nt, Artificial Sequence
  Description of Artificial Sequence: Synthetic oligonucleotide
  Antisense strand to SEQ ID NO: 783194
uuuaaccaacacugauauc

SEQ ID NO: 783196 - RNA, 19 nt, Artificial Sequence
  Description of Artificial Sequence: Synthetic oligonucleotide
  Sense strand starting at position 3352 of SEQ ID NO: 587315
auaucaguguugguuaaac

SEQ ID NO: 783197 - RNA, 19 nt, Artificial Sequence
  Description of Artificial Sequence: Synthetic oligonucleotide
  Antisense strand to SEQ ID NO: 783196
guuuaaccaacacugauau

SEQ ID NO: 783198 - RNA, 19 nt, Artificial Sequence
  Description of Artificial Sequence: Synthetic oligonucleotide
  Sense strand starting at position 3354 of SEQ ID NO: 587315
aucaguguugguuaaacag

SEQ ID NO: 783199 - RNA, 19 nt, Artificial Sequence
  Description of Artificial Sequence: Synthetic oligonucleotide
  Antisense strand to SEQ ID NO: 783198
cuguuuaaccaacacugau

SEQ ID NO: 783200 - RNA, 19 nt, Artificial Sequence
  Description of Artificial Sequence: Synthetic oligonucleotide
  Sense strand starting at position 3360 of SEQ ID NO: 587315
guugguuaaacaggaguua

SEQ ID NO: 783201 - RNA, 19 nt, Artificial Sequence
  Description of Artificial Sequence: Synthetic oligonucleotide
  Antisense strand to SEQ ID NO: 783200
uaacuccuguuuaaccaac

SEQ ID NO: 783202 - RNA, 19 nt, Artificial Sequence
  Description of Artificial Sequence: Synthetic oligonucleotide
  Sense strand starting at position 3702 of SEQ ID NO: 587315
ggaggaguccuuuggaaua

SEQ ID NO: 783203 - RNA, 19 nt, Artificial Sequence
  Description of Artificial Sequence: Synthetic oligonucleotide
  Antisense strand to SEQ ID NO: 783202
uauuccaaaggacuccucc

SEQ ID NO: 783204 - RNA, 19 nt, Artificial Sequence
  Description of Artificial Sequence: Synthetic oligonucleotide
  Sense strand starting at position 3742 of SEQ ID NO: 587315
ccauucuaggaguagguga

SEQ ID NO: 783205 - RNA, 19 nt, Artificial Sequence
  Description of Artificial Sequence: Synthetic oligonucleotide
  Antisense strand to SEQ ID NO: 783204
ucaccuacuccuagaaugg

SEQ ID NO: 783206 - RNA, 19 nt, Artificial Sequence
  Description of Artificial Sequence: Synthetic oligonucleotide
  Sense strand starting at position 3951 of SEQ ID NO: 587315
ucagccuguccucaucaga

SEQ ID NO: 783207 - RNA, 19 nt, Artificial Sequence
  Description of Artificial Sequence: Synthetic oligonucleotide
  Antisense strand to SEQ ID NO: 783206
ucugaugaggacaggcuga

SEQ ID NO: 783208 - RNA, 19 nt, Artificial Sequence
  Description of Artificial Sequence: Synthetic oligonucleotide
  Sense strand starting at position 318 of SEQ ID NO: 587316
aaggaaauaugggacagau

SEQ ID NO: 783209 - RNA, 19 nt, Artificial Sequence
  Description of Artificial Sequence: Synthetic oligonucleotide
  Antisense strand to SEQ ID NO: 783208
aucugucccauauuuccuu

SEQ ID NO: 783210 - RNA, 19 nt, Artificial Sequence
  Description of Artificial Sequence: Synthetic oligonucleotide
  Sense strand starting at position 349 of SEQ ID NO: 587316
gcagaugcugauggaucua

SEQ ID NO: 783211 - RNA, 19 nt, Artificial Sequence
  Description of Artificial Sequence: Synthetic oligonucleotide
  Antisense strand to SEQ ID NO: 783210
uagauccaucagcaucugc

SEQ ID NO: 783212 - RNA, 19 nt, Artificial Sequence
  Description of Artificial Sequence: Synthetic oligonucleotide
  Sense strand starting at position 388 of SEQ ID NO: 587316
aucacagguuauuagauuu

SEQ ID NO: 783213 - RNA, 19 nt, Artificial Sequence
  Description of Artificial Sequence: Synthetic oligonucleotide
  Antisense strand to SEQ ID NO: 783212
aaaucuaauaaccugugau

SEQ ID NO: 783214 - RNA, 19 nt, Artificial Sequence
  Description of Artificial Sequence: Synthetic oligonucleotide
  Sense strand starting at position 406 of SEQ ID NO: 587316
uauuauagaucugugaaag

SEQ ID NO: 783215 - RNA, 19 nt, Artificial Sequence
  Description of Artificial Sequence: Synthetic oligonucleotide
  Antisense strand to SEQ ID NO: 783214
cuuucacagaucuauaaua

SEQ ID NO: 783216 - RNA, 19 nt, Artificial Sequence
  Description of Artificial Sequence: Synthetic oligonucleotide
  Sense strand starting at position 502 of SEQ ID NO: 587316
auguaaucaugauuguaca

SEQ ID NO: 783217 - RNA, 19 nt, Artificial Sequence
  Description of Artificial Sequence: Synthetic oligonucleotide
  Antisense strand to SEQ ID NO: 783216
uguacaaucaugauuacau

SEQ ID NO: 783218 - RNA, 19 nt, Artificial Sequence
  Description of Artificial Sequence: Synthetic oligonucleotide
  Sense strand starting at position 503 of SEQ ID NO: 587316
uguaaucaugauuguacac

SEQ ID NO: 783219 - RNA, 19 nt, Artificial Sequence
  Description of Artificial Sequence: Synthetic oligonucleotide
  Antisense strand to SEQ ID NO: 783218
guguacaaucaugauuaca

SEQ ID NO: 783220 - RNA, 19 nt, Artificial Sequence
  Description of Artificial Sequence: Synthetic oligonucleotide
  Sense strand starting at position 525 of SEQ ID NO: 587316
ggacgagacuuagcugaac

SEQ ID NO: 783221 - RNA, 19 nt, Artificial Sequence
  Description of Artificial Sequence: Synthetic oligonucleotide
  Antisense strand to SEQ ID NO: 783220
guucagcuaagucucgucc

SEQ ID NO: 783222 - RNA, 19 nt, Artificial Sequence
  Description of Artificial Sequence: Synthetic oligonucleotide
  Sense strand starting at position 527 of SEQ ID NO: 587316
acgagacuuagcugaacca

SEQ ID NO: 783223 - RNA, 19 nt, Artificial Sequence
  Description of Artificial Sequence: Synthetic oligonucleotide
  Antisense strand to SEQ ID NO: 783222
ugguucagcuaagucucgu

SEQ ID NO: 783224 - RNA, 19 nt, Artificial Sequence
  Description of Artificial Sequence: Synthetic oligonucleotide
  Sense strand starting at position 528 of SEQ ID NO: 587316
cgagacuuagcugaaccaa

SEQ ID NO: 783225 - RNA, 19 nt, Artificial Sequence
  Description of Artificial Sequence: Synthetic oligonucleotide
  Antisense strand to SEQ ID NO: 783224
uugguucagcuaagucucg

SEQ ID NO: 783226 - RNA, 19 nt, Artificial Sequence
  Description of Artificial Sequence: Synthetic oligonucleotide
  Sense strand starting at position 545 of SEQ ID NO: 587316
aagagaguuuaugcuaaac

SEQ ID NO: 783227 - RNA, 19 nt, Artificial Sequence
  Description of Artificial Sequence: Synthetic oligonucleotide
  Antisense strand to SEQ ID NO: 783226
guuuagcauaaacucucuu

SEQ ID NO: 783228 - RNA, 19 nt, Artificial Sequence
  Description of Artificial Sequence: Synthetic oligonucleotide
  Sense strand starting at position 567 of SEQ ID NO: 587316
cucgcuaaccauugagaga

SEQ ID NO: 783229 - RNA, 19 nt, Artificial Sequence
  Description of Artificial Sequence: Synthetic oligonucleotide
  Antisense strand to SEQ ID NO: 783228
ucucucaaugguuagcgag

SEQ ID NO: 783230 - RNA, 19 nt, Artificial Sequence
  Description of Artificial Sequence: Synthetic oligonucleotide
  Sense strand starting at position 605 of SEQ ID NO: 587316
agugguaagaaucaauugu

SEQ ID NO: 783231 - RNA, 19 nt, Artificial Sequence
  Description of Artificial Sequence: Synthetic oligonucleotide
  Antisense strand to SEQ ID NO: 783230
acaauugauucuuaccacu

SEQ ID NO: 783232 - RNA, 19 nt, Artificial Sequence
  Description of Artificial Sequence: Synthetic oligonucleotide
  Sense strand starting at position 797 of SEQ ID NO: 587316
agaaauuccuguuugacuu

SEQ ID NO: 783233 - RNA, 19 nt, Artificial Sequence
  Description of Artificial Sequence: Synthetic oligonucleotide
  Antisense strand to SEQ ID NO: 783232
aagucaaacaggaauuucu

SEQ ID NO: 783234 - RNA, 19 nt, Artificial Sequence
  Description of Artificial Sequence: Synthetic oligonucleotide
  Sense strand starting at position 815 of SEQ ID NO: 587316
uugaguccuuggucugaga

SEQ ID NO: 783235 - RNA, 19 nt, Artificial Sequence
  Description of Artificial Sequence: Synthetic oligonucleotide
  Antisense strand to SEQ ID NO: 783234
ucucagaccaaggacucaa

SEQ ID NO: 783236 - RNA, 19 nt, Artificial Sequence
  Description of Artificial Sequence: Synthetic oligonucleotide
  Sense strand starting at position 817 of SEQ ID NO: 587316
gaguccuuggucugagaaa

SEQ ID NO: 783237 - RNA, 19 nt, Artificial Sequence
  Description of Artificial Sequence: Synthetic oligonucleotide
  Antisense strand to SEQ ID NO: 783236
uuucucagaccaaggacuc

SEQ ID NO: 783238 - RNA, 19 nt, Artificial Sequence
  Description of Artificial Sequence: Synthetic oligonucleotide
  Sense strand starting at position 1042 of SEQ ID NO: 587316
gguuucagaugguuucuga

SEQ ID NO: 783239 - RNA, 19 nt, Artificial Sequence
  Description of Artificial Sequence: Synthetic oligonucleotide
  Antisense strand to SEQ ID NO: 783238
ucagaaaccaucugaaacc

SEQ ID NO: 783240 - RNA, 19 nt, Artificial Sequence
  Description of Artificial Sequence: Synthetic oligonucleotide
  Sense strand starting at position 1122 of SEQ ID NO: 587316
aggaaauuggcaggugcaa

SEQ ID NO: 783241 - RNA, 19 nt, Artificial Sequence
  Description of Artificial Sequence: Synthetic oligonucleotide
  Antisense strand to SEQ ID NO: 783240
uugcaccugccaauuuccu

SEQ ID NO: 783242 - RNA, 19 nt, Artificial Sequence
  Description of Artificial Sequence: Synthetic oligonucleotide
  Sense strand starting at position 1279 of SEQ ID NO: 587316
aguugauaauagucacaua

SEQ ID NO: 783243 - RNA, 19 nt, Artificial Sequence
  Description of Artificial Sequence: Synthetic oligonucleotide
  Antisense strand to SEQ ID NO: 783242
uaugugacuauuaucaacu

SEQ ID NO: 783244 - RNA, 19 nt, Artificial Sequence
  Description of Artificial Sequence: Synthetic oligonucleotide
  Sense strand starting at position 1315 of SEQ ID NO: 587316
auacauugguguuuaauug

SEQ ID NO: 783245 - RNA, 19 nt, Artificial Sequence
  Description of Artificial Sequence: Synthetic oligonucleotide
  Antisense strand to SEQ ID NO: 783244
caauuaaacaccaauguau

SEQ ID NO: 783246 - RNA, 19 nt, Artificial Sequence
  Description of Artificial Sequence: Synthetic oligonucleotide
  Sense strand starting at position 1494 of SEQ ID NO: 587316
uuugaacaauucucugagu

SEQ ID NO: 783247 - RNA, 19 nt, Artificial Sequence
  Description of Artificial Sequence: Synthetic oligonucleotide
  Antisense strand to SEQ ID NO: 783246
acucagagaauuguucaaa

SEQ ID NO: 783248 - RNA, 19 nt, Artificial Sequence
  Description of Artificial Sequence: Synthetic oligonucleotide
  Sense strand starting at position 1495 of SEQ ID NO: 587316
uugaacaauucucugagua

SEQ ID NO: 783249 - RNA, 19 nt, Artificial Sequence
  Description of Artificial Sequence: Synthetic oligonucleotide
  Antisense strand to SEQ ID NO: 783248
uacucagagaauuguucaa

SEQ ID NO: 783250 - RNA, 19 nt, Artificial Sequence
  Description of Artificial Sequence: Synthetic oligonucleotide
  Sense strand starting at position 1496 of SEQ ID NO: 587316
ugaacaauucucugaguaa

SEQ ID NO: 783251 - RNA, 19 nt, Artificial Sequence
  Description of Artificial Sequence: Synthetic oligonucleotide
  Antisense strand to SEQ ID NO: 783250
uuacucagagaauuguuca

SEQ ID NO: 783252 - RNA, 19 nt, Artificial Sequence
  Description of Artificial Sequence: Synthetic oligonucleotide
  Sense strand starting at position 1499 of SEQ ID NO: 587316
acaauucucugaguaaugc

SEQ ID NO: 783253 - RNA, 19 nt, Artificial Sequence
  Description of Artificial Sequence: Synthetic oligonucleotide
  Antisense strand to SEQ ID NO: 783252
gcauuacucagagaauugu

SEQ ID NO: 783254 - RNA, 19 nt, Artificial Sequence
  Description of Artificial Sequence: Synthetic oligonucleotide
  Sense strand starting at position 1708 of SEQ ID NO: 587316
auguaucuugugcauuaca

SEQ ID NO: 783255 - RNA, 19 nt, Artificial Sequence
  Description of Artificial Sequence: Synthetic oligonucleotide
  Antisense strand to SEQ ID NO: 783254
uguaaugcacaagauacau

SEQ ID NO: 783256 - RNA, 19 nt, Artificial Sequence
  Description of Artificial Sequence: Synthetic oligonucleotide
  Sense strand starting at position 2039 of SEQ ID NO: 587316
gagugugccgcuucucaaa

SEQ ID NO: 783257 - RNA, 19 nt, Artificial Sequence
  Description of Artificial Sequence: Synthetic oligonucleotide
  Antisense strand to SEQ ID NO: 783256
uuugagaagcggcacacuc

SEQ ID NO: 783258 - RNA, 19 nt, Artificial Sequence
  Description of Artificial Sequence: Synthetic oligonucleotide
  Sense strand starting at position 2106 of SEQ ID NO: 587316
acauaucucuggguccuaa

SEQ ID NO: 783259 - RNA, 19 nt, Artificial Sequence
  Description of Artificial Sequence: Synthetic oligonucleotide
  Antisense strand to SEQ ID NO: 783258
uuaggacccagagauaugu

SEQ ID NO: 783260 - RNA, 19 nt, Artificial Sequence
  Description of Artificial Sequence: Synthetic oligonucleotide
  Sense strand starting at position 2226 of SEQ ID NO: 587316
uggagaucugcguacagaa

SEQ ID NO: 783261 - RNA, 19 nt, Artificial Sequence
  Description of Artificial Sequence: Synthetic oligonucleotide
  Antisense strand to SEQ ID NO: 783260
uucuguacgcagaucucca

SEQ ID NO: 783262 - RNA, 19 nt, Artificial Sequence
  Description of Artificial Sequence: Synthetic oligonucleotide
  Sense strand starting at position 2228 of SEQ ID NO: 587316
gagaucugcguacagaaga

SEQ ID NO: 783263 - RNA, 19 nt, Artificial Sequence
  Description of Artificial Sequence: Synthetic oligonucleotide
  Antisense strand to SEQ ID NO: 783262
ucuucuguacgcagaucuc

SEQ ID NO: 783264 - RNA, 19 nt, Artificial Sequence
  Description of Artificial Sequence: Synthetic oligonucleotide
  Sense strand starting at position 2286 of SEQ ID NO: 587316
cccguuauuucucuauucu

SEQ ID NO: 783265 - RNA, 19 nt, Artificial Sequence
  Description of Artificial Sequence: Synthetic oligonucleotide
  Antisense strand to SEQ ID NO: 783264
agaauagagaaauaacggg

SEQ ID NO: 783266 - RNA, 19 nt, Artificial Sequence
  Description of Artificial Sequence: Synthetic oligonucleotide
  Sense strand starting at position 2287 of SEQ ID NO: 587316
ccguuauuucucuauucuc

SEQ ID NO: 783267 - RNA, 19 nt, Artificial Sequence
  Description of Artificial Sequence: Synthetic oligonucleotide
  Antisense strand to SEQ ID NO: 783266
gagaauagagaaauaacgg

SEQ ID NO: 783268 - RNA, 19 nt, Artificial Sequence
  Description of Artificial Sequence: Synthetic oligonucleotide
  Sense strand starting at position 2892 of SEQ ID NO: 587316
uugauaaaugcaugauaca

SEQ ID NO: 783269 - RNA, 19 nt, Artificial Sequence
  Description of Artificial Sequence: Synthetic oligonucleotide
  Antisense strand to SEQ ID NO: 783268
uguaucaugcauuuaucaa

SEQ ID NO: 783270 - RNA, 19 nt, Artificial Sequence
  Description of Artificial Sequence: Synthetic oligonucleotide
  Sense strand starting at position 2971 of SEQ ID NO: 587316
agaccuaucugguugggaa

SEQ ID NO: 783271 - RNA, 19 nt, Artificial Sequence
  Description of Artificial Sequence: Synthetic oligonucleotide
  Antisense strand to SEQ ID NO: 783270
uucccaaccagauaggucu

SEQ ID NO: 783272 - RNA, 19 nt, Artificial Sequence
  Description of Artificial Sequence: Synthetic oligonucleotide
  Sense strand starting at position 2972 of SEQ ID NO: 587316
gaccuaucugguugggaac

SEQ ID NO: 783273 - RNA, 19 nt, Artificial Sequence
  Description of Artificial Sequence: Synthetic oligonucleotide
  Antisense strand to SEQ ID NO: 783272
guucccaaccagauagguc

SEQ ID NO: 783274 - RNA, 19 nt, Artificial Sequence
  Description of Artificial Sequence: Synthetic oligonucleotide
  Sense strand starting at position 3132 of SEQ ID NO: 587316
ggaggcaucauguguggaa

SEQ ID NO: 783275 - RNA, 19 nt, Artificial Sequence
  Description of Artificial Sequence: Synthetic oligonucleotide
  Antisense strand to SEQ ID NO: 783274
uuccacacaugaugccucc

SEQ ID NO: 783276 - RNA, 19 nt, Artificial Sequence
  Description of Artificial Sequence: Synthetic oligonucleotide
  Sense strand starting at position 3133 of SEQ ID NO: 587316
gaggcaucauguguggaaa

SEQ ID NO: 783277 - RNA, 19 nt, Artificial Sequence
  Description of Artificial Sequence: Synthetic oligonucleotide
  Antisense strand to SEQ ID NO: 783276
uuuccacacaugaugccuc

SEQ ID NO: 783278 - RNA, 19 nt, Artificial Sequence
  Description of Artificial Sequence: Synthetic oligonucleotide
  Sense strand starting at position 3349 of SEQ ID NO: 587316
accugcaaaugcuugagaa

SEQ ID NO: 783279 - RNA, 19 nt, Artificial Sequence
  Description of Artificial Sequence: Synthetic oligonucleotide
  Antisense strand to SEQ ID NO: 783278
uucucaagcauuugcaggu

SEQ ID NO: 783280 - RNA, 19 nt, Artificial Sequence
  Description of Artificial Sequence: Synthetic oligonucleotide
  Sense strand starting at position 3350 of SEQ ID NO: 587316
ccugcaaaugcuugagaac

SEQ ID NO: 783281 - RNA, 19 nt, Artificial Sequence
  Description of Artificial Sequence: Synthetic oligonucleotide
  Antisense strand to SEQ ID NO: 783280
guucucaagcauuugcagg

SEQ ID NO: 783282 - RNA, 19 nt, Artificial Sequence
  Description of Artificial Sequence: Synthetic oligonucleotide
  Sense strand starting at position 3491 of SEQ ID NO: 587316
ccaagugugcaggaaguuu

SEQ ID NO: 783283 - RNA, 19 nt, Artificial Sequence
  Description of Artificial Sequence: Synthetic oligonucleotide
  Antisense strand to SEQ ID NO: 783282
aaacuuccugcacacuugg

SEQ ID NO: 783284 - RNA, 19 nt, Artificial Sequence
  Description of Artificial Sequence: Synthetic oligonucleotide
  Sense strand starting at position 3553 of SEQ ID NO: 587316
cauggaacuggcuggaaau

SEQ ID NO: 783285 - RNA, 19 nt, Artificial Sequence
  Description of Artificial Sequence: Synthetic oligonucleotide
  Antisense strand to SEQ ID NO: 783284
auuuccagccaguuccaug

SEQ ID NO: 783286 - RNA, 19 nt, Artificial Sequence
  Description of Artificial Sequence: Synthetic oligonucleotide
  Sense strand starting at position 3926 of SEQ ID NO: 587316
cuuccuaugccuugggaag

SEQ ID NO: 783287 - RNA, 19 nt, Artificial Sequence
  Description of Artificial Sequence: Synthetic oligonucleotide
  Antisense strand to SEQ ID NO: 783286
cuucccaaggcauaggaag

SEQ ID NO: 783288 - RNA, 19 nt, Artificial Sequence
  Description of Artificial Sequence: Synthetic oligonucleotide
  Sense strand starting at position 2367 of SEQ ID NO: 587317
ggaucucgguuccuagaau

SEQ ID NO: 783289 - RNA, 19 nt, Artificial Sequence
  Description of Artificial Sequence: Synthetic oligonucleotide
  Antisense strand to SEQ ID NO: 783288
auucuaggaaccgagaucc

SEQ ID NO: 783290 - RNA, 19 nt, Artificial Sequence
  Description of Artificial Sequence: Synthetic oligonucleotide
  Sense strand starting at position 2378 of SEQ ID NO: 587317
ccuagaauuuguuuccggu

SEQ ID NO: 783291 - RNA, 19 nt, Artificial Sequence
  Description of Artificial Sequence: Synthetic oligonucleotide
  Antisense strand to SEQ ID NO: 783290
accggaaacaaauucuagg

SEQ ID NO: 783292 - RNA, 19 nt, Artificial Sequence
  Description of Artificial Sequence: Synthetic oligonucleotide
  Sense strand starting at position 2430 of SEQ ID NO: 587317
ccuuuacucccagaggguu

SEQ ID NO: 783293 - RNA, 19 nt, Artificial Sequence
  Description of Artificial Sequence: Synthetic oligonucleotide
  Antisense strand to SEQ ID NO: 783292
aacccucugggaguaaagg

SEQ ID NO: 783294 - RNA, 19 nt, Artificial Sequence
  Description of Artificial Sequence: Synthetic oligonucleotide
  Sense strand starting at position 2460 of SEQ ID NO: 587317
ccugguuugcucugcaacu

SEQ ID NO: 783295 - RNA, 19 nt, Artificial Sequence
  Description of Artificial Sequence: Synthetic oligonucleotide
  Antisense strand to SEQ ID NO: 783294
aguugcagagcaaaccagg

SEQ ID NO: 783296 - RNA, 19 nt, Artificial Sequence
  Description of Artificial Sequence: Synthetic oligonucleotide
  Sense strand starting at position 2461 of SEQ ID NO: 587317
cugguuugcucugcaacuu

SEQ ID NO: 783297 - RNA, 19 nt, Artificial Sequence
  Description of Artificial Sequence: Synthetic oligonucleotide
  Antisense strand to SEQ ID NO: 783296
aaguugcagagcaaaccag

SEQ ID NO: 783298 - RNA, 19 nt, Artificial Sequence
  Description of Artificial Sequence: Synthetic oligonucleotide
  Sense strand starting at position 2569 of SEQ ID NO: 587317
gagcgugucccagaacguu

SEQ ID NO: 783299 - RNA, 19 nt, Artificial Sequence
  Description of Artificial Sequence: Synthetic oligonucleotide
  Antisense strand to SEQ ID NO: 783298
aacguucugggacacgcuc

SEQ ID NO: 783300 - RNA, 19 nt, Artificial Sequence
  Description of Artificial Sequence: Synthetic oligonucleotide
  Sense strand starting at position 2581 of SEQ ID NO: 587317
gaacguugcaccggauuau

SEQ ID NO: 783301 - RNA, 19 nt, Artificial Sequence
  Description of Artificial Sequence: Synthetic oligonucleotide
  Antisense strand to SEQ ID NO: 783300
auaauccggugcaacguuc

SEQ ID NO: 783302 - RNA, 19 nt, Artificial Sequence
  Description of Artificial Sequence: Synthetic oligonucleotide
  Sense strand starting at position 2582 of SEQ ID NO: 587317
aacguugcaccggauuauu

SEQ ID NO: 783303 - RNA, 19 nt, Artificial Sequence
  Description of Artificial Sequence: Synthetic oligonucleotide
  Antisense strand to SEQ ID NO: 783302
aauaauccggugcaacguu

SEQ ID NO: 783304 - RNA, 19 nt, Artificial Sequence
  Description of Artificial Sequence: Synthetic oligonucleotide
  Sense strand starting at position 2612 of SEQ ID NO: 587317
ggcuccacacucuggauua

SEQ ID NO: 783305 - RNA, 19 nt, Artificial Sequence
  Description of Artificial Sequence: Synthetic oligonucleotide
  Antisense strand to SEQ ID NO: 783304
uaauccagaguguggagcc

SEQ ID NO: 783306 - RNA, 19 nt, Artificial Sequence
  Description of Artificial Sequence: Synthetic oligonucleotide
  Sense strand starting at position 2624 of SEQ ID NO: 587317
uggauuaaauucgucucua

SEQ ID NO: 783307 - RNA, 19 nt, Artificial Sequence
  Description of Artificial Sequence: Synthetic oligonucleotide
  Antisense strand to SEQ ID NO: 783306
uagagacgaauuuaaucca

SEQ ID NO: 783308 - RNA, 19 nt, Artificial Sequence
  Description of Artificial Sequence: Synthetic oligonucleotide
  Sense strand starting at position 2625 of SEQ ID NO: 587317
ggauuaaauucgucucuaa

SEQ ID NO: 783309 - RNA, 19 nt, Artificial Sequence
  Description of Artificial Sequence: Synthetic oligonucleotide
  Antisense strand to SEQ ID NO: 783308
uuagagacgaauuuaaucc

SEQ ID NO: 783310 - RNA, 19 nt, Artificial Sequence
  Description of Artificial Sequence: Synthetic oligonucleotide
  Sense strand starting at position 2628 of SEQ ID NO: 587317
uuaaauucgucucuaaaga

SEQ ID NO: 783311 - RNA, 19 nt, Artificial Sequence
  Description of Artificial Sequence: Synthetic oligonucleotide
  Antisense strand to SEQ ID NO: 783310
ucuuuagagacgaauuuaa

SEQ ID NO: 783312 - RNA, 19 nt, Artificial Sequence
  Description of Artificial Sequence: Synthetic oligonucleotide
  Sense strand starting at position 2656 of SEQ ID NO: 587317
aguguacuucugggcagaa

SEQ ID NO: 783313 - RNA, 19 nt, Artificial Sequence
  Description of Artificial Sequence: Synthetic oligonucleotide
  Antisense strand to SEQ ID NO: 783312
uucugcccagaaguacacu

SEQ ID NO: 783314 - RNA, 19 nt, Artificial Sequence
  Description of Artificial Sequence: Synthetic oligonucleotide
  Sense strand starting at position 2657 of SEQ ID NO: 587317
guguacuucugggcagaag

SEQ ID NO: 783315 - RNA, 19 nt, Artificial Sequence
  Description of Artificial Sequence: Synthetic oligonucleotide
  Antisense strand to SEQ ID NO: 783314
cuucugcccagaaguacac

SEQ ID NO: 783316 - RNA, 19 nt, Artificial Sequence
  Description of Artificial Sequence: Synthetic oligonucleotide
  Sense strand starting at position 2810 of SEQ ID NO: 587317
cuuucucgucuguagguua

SEQ ID NO: 783317 - RNA, 19 nt, Artificial Sequence
  Description of Artificial Sequence: Synthetic oligonucleotide
  Antisense strand to SEQ ID NO: 783316
uaaccuacagacgagaaag

SEQ ID NO: 783318 - RNA, 19 nt, Artificial Sequence
  Description of Artificial Sequence: Synthetic oligonucleotide
  Sense strand starting at position 2848 of SEQ ID NO: 587317
auagaaagccuguaguauu

SEQ ID NO: 783319 - RNA, 19 nt, Artificial Sequence
  Description of Artificial Sequence: Synthetic oligonucleotide
  Antisense strand to SEQ ID NO: 783318
aauacuacaggcuuucuau

SEQ ID NO: 783320 - RNA, 19 nt, Artificial Sequence
  Description of Artificial Sequence: Synthetic oligonucleotide
  Sense strand starting at position 2891 of SEQ ID NO: 587317
ggcuaaugaguucguccca

SEQ ID NO: 783321 - RNA, 19 nt, Artificial Sequence
  Description of Artificial Sequence: Synthetic oligonucleotide
  Antisense strand to SEQ ID NO: 783320
ugggacgaacucauuagcc

SEQ ID NO: 783322 - RNA, 19 nt, Artificial Sequence
  Description of Artificial Sequence: Synthetic oligonucleotide
  Sense strand starting at position 2900 of SEQ ID NO: 587317
guucgucccaguggaauga

SEQ ID NO: 783323 - RNA, 19 nt, Artificial Sequence
  Description of Artificial Sequence: Synthetic oligonucleotide
  Antisense strand to SEQ ID NO: 783322
ucauuccacugggacgaac

SEQ ID NO: 783324 - RNA, 19 nt, Artificial Sequence
  Description of Artificial Sequence: Synthetic oligonucleotide
  Sense strand starting at position 2904 of SEQ ID NO: 587317
gucccaguggaaugauuau

SEQ ID NO: 783325 - RNA, 19 nt, Artificial Sequence
  Description of Artificial Sequence: Synthetic oligonucleotide
  Antisense strand to SEQ ID NO: 783324
auaaucauuccacugggac

SEQ ID NO: 783326 - RNA, 19 nt, Artificial Sequence
  Description of Artificial Sequence: Synthetic oligonucleotide
  Sense strand starting at position 2910 of SEQ ID NO: 587317
guggaaugauuauugucca

SEQ ID NO: 783327 - RNA, 19 nt, Artificial Sequence
  Description of Artificial Sequence: Synthetic oligonucleotide
  Antisense strand to SEQ ID NO: 783326
uggacaauaaucauuccac

SEQ ID NO: 783328 - RNA, 19 nt, Artificial Sequence
  Description of Artificial Sequence: Synthetic oligonucleotide
  Sense strand starting at position 2913 of SEQ ID NO: 587317
gaaugauuauuguccaaug

SEQ ID NO: 783329 - RNA, 19 nt, Artificial Sequence
  Description of Artificial Sequence: Synthetic oligonucleotide
  Antisense strand to SEQ ID NO: 783328
cauuggacaauaaucauuc

SEQ ID NO: 783330 - RNA, 19 nt, Artificial Sequence
  Description of Artificial Sequence: Synthetic oligonucleotide
  Sense strand starting at position 2918 of SEQ ID NO: 587317
auuauuguccaauggauac

SEQ ID NO: 783331 - RNA, 19 nt, Artificial Sequence
  Description of Artificial Sequence: Synthetic oligonucleotide
  Antisense strand to SEQ ID NO: 783330
guauccauuggacaauaau

SEQ ID NO: 783332 - RNA, 19 nt, Artificial Sequence
  Description of Artificial Sequence: Synthetic oligonucleotide
  Sense strand starting at position 2928 of SEQ ID NO: 587317
aauggauacugaccaguau

SEQ ID NO: 783333 - RNA, 19 nt, Artificial Sequence
  Description of Artificial Sequence: Synthetic oligonucleotide
  Antisense strand to SEQ ID NO: 783332
auacuggucaguauccauu

SEQ ID NO: 783334 - RNA, 19 nt, Artificial Sequence
  Description of Artificial Sequence: Synthetic oligonucleotide
  Sense strand starting at position 2932 of SEQ ID NO: 587317
gauacugaccaguauggca

SEQ ID NO: 783335 - RNA, 19 nt, Artificial Sequence
  Description of Artificial Sequence: Synthetic oligonucleotide
  Antisense strand to SEQ ID NO: 783334
ugccauacuggucaguauc

SEQ ID NO: 783336 - RNA, 19 nt, Artificial Sequence
  Description of Artificial Sequence: Synthetic oligonucleotide
  Sense strand starting at position 2974 of SEQ ID NO: 587317
auuccuguuugucuguaua

SEQ ID NO: 783337 - RNA, 19 nt, Artificial Sequence
  Description of Artificial Sequence: Synthetic oligonucleotide
  Antisense strand to SEQ ID NO: 783336
uauacagacaaacaggaau

SEQ ID NO: 783338 - RNA, 19 nt, Artificial Sequence
  Description of Artificial Sequence: Synthetic oligonucleotide
  Sense strand starting at position 2976 of SEQ ID NO: 587317
uccuguuugucuguauaug

SEQ ID NO: 783339 - RNA, 19 nt, Artificial Sequence
  Description of Artificial Sequence: Synthetic oligonucleotide
  Antisense strand to SEQ ID NO: 783338
cauauacagacaaacagga

SEQ ID NO: 783340 - RNA, 19 nt, Artificial Sequence
  Description of Artificial Sequence: Synthetic oligonucleotide
  Sense strand starting at position 2977 of SEQ ID NO: 587317
ccuguuugucuguauaugu

SEQ ID NO: 783341 - RNA, 19 nt, Artificial Sequence
  Description of Artificial Sequence: Synthetic oligonucleotide
  Antisense strand to SEQ ID NO: 783340
acauauacagacaaacagg

SEQ ID NO: 783342 - RNA, 19 nt, Artificial Sequence
  Description of Artificial Sequence: Synthetic oligonucleotide
  Sense strand starting at position 2985 of SEQ ID NO: 587317
ucuguauauguguguccuu

SEQ ID NO: 783343 - RNA, 19 nt, Artificial Sequence
  Description of Artificial Sequence: Synthetic oligonucleotide
  Antisense strand to SEQ ID NO: 783342
aaggacacacauauacaga

SEQ ID NO: 783344 - RNA, 19 nt, Artificial Sequence
  Description of Artificial Sequence: Synthetic oligonucleotide
  Sense strand starting at position 3205 of SEQ ID NO: 587317
ucauacugguuuccuuauu

SEQ ID NO: 783345 - RNA, 19 nt, Artificial Sequence
  Description of Artificial Sequence: Synthetic oligonucleotide
  Antisense strand to SEQ ID NO: 783344
aauaaggaaaccaguauga

SEQ ID NO: 783346 - RNA, 19 nt, Artificial Sequence
  Description of Artificial Sequence: Synthetic oligonucleotide
  Sense strand starting at position 3272 of SEQ ID NO: 587317
ugugaaagucacgauguuu

SEQ ID NO: 783347 - RNA, 19 nt, Artificial Sequence
  Description of Artificial Sequence: Synthetic oligonucleotide
  Antisense strand to SEQ ID NO: 783346
aaacaucgugacuuucaca

SEQ ID NO: 783348 - RNA, 19 nt, Artificial Sequence
  Description of Artificial Sequence: Synthetic oligonucleotide
  Sense strand starting at position 3277 of SEQ ID NO: 587317
aagucacgauguuuacauu

SEQ ID NO: 783349 - RNA, 19 nt, Artificial Sequence
  Description of Artificial Sequence: Synthetic oligonucleotide
  Antisense strand to SEQ ID NO: 783348
aauguaaacaucgugacuu

SEQ ID NO: 783350 - RNA, 19 nt, Artificial Sequence
  Description of Artificial Sequence: Synthetic oligonucleotide
  Sense strand starting at position 3356 of SEQ ID NO: 587317
acguauugccuuuauaauu

SEQ ID NO: 783351 - RNA, 19 nt, Artificial Sequence
  Description of Artificial Sequence: Synthetic oligonucleotide
  Antisense strand to SEQ ID NO: 783350
aauuauaaaggcaauacgu

SEQ ID NO: 783352 - RNA, 19 nt, Artificial Sequence
  Description of Artificial Sequence: Synthetic oligonucleotide
  Sense strand starting at position 3412 of SEQ ID NO: 587317
uuagcauugguuugaaaua

SEQ ID NO: 783353 - RNA, 19 nt, Artificial Sequence
  Description of Artificial Sequence: Synthetic oligonucleotide
  Antisense strand to SEQ ID NO: 783352
uauuucaaaccaaugcuaa

SEQ ID NO: 783354 - RNA, 19 nt, Artificial Sequence
  Description of Artificial Sequence: Synthetic oligonucleotide
  Sense strand starting at position 3413 of SEQ ID NO: 587317
uagcauugguuugaaauaa

SEQ ID NO: 783355 - RNA, 19 nt, Artificial Sequence
  Description of Artificial Sequence: Synthetic oligonucleotide
  Antisense strand to SEQ ID NO: 783354
uuauuucaaaccaaugcua

SEQ ID NO: 783356 - RNA, 19 nt, Artificial Sequence
  Description of Artificial Sequence: Synthetic oligonucleotide
  Sense strand starting at position 3462 of SEQ ID NO: 587317
gaaugacagugacugcuuu

SEQ ID NO: 783357 - RNA, 19 nt, Artificial Sequence
  Description of Artificial Sequence: Synthetic oligonucleotide
  Antisense strand to SEQ ID NO: 783356
aaagcagucacugucauuc

SEQ ID NO: 783358 - RNA, 19 nt, Artificial Sequence
  Description of Artificial Sequence: Synthetic oligonucleotide
  Sense strand starting at position 3565 of SEQ ID NO: 587317
guguacagcucauugguau

SEQ ID NO: 783359 - RNA, 19 nt, Artificial Sequence
  Description of Artificial Sequence: Synthetic oligonucleotide
  Antisense strand to SEQ ID NO: 783358
auaccaaugagcuguacac

SEQ ID NO: 783360 - RNA, 19 nt, Artificial Sequence
  Description of Artificial Sequence: Synthetic oligonucleotide
  Sense strand starting at position 3571 of SEQ ID NO: 587317
agcucauugguaugacaua

SEQ ID NO: 783361 - RNA, 19 nt, Artificial Sequence
  Description of Artificial Sequence: Synthetic oligonucleotide
  Antisense strand to SEQ ID NO: 783360
uaugucauaccaaugagcu

SEQ ID NO: 783362 - RNA, 19 nt, Artificial Sequence
  Description of Artificial Sequence: Synthetic oligonucleotide
  Sense strand starting at position 3752 of SEQ ID NO: 587317
uuagguaccucauagaacu

SEQ ID NO: 783363 - RNA, 19 nt, Artificial Sequence
  Description of Artificial Sequence: Synthetic oligonucleotide
  Antisense strand to SEQ ID NO: 783362
aguucuaugagguaccuaa

SEQ ID NO: 783364 - RNA, 19 nt, Artificial Sequence
  Description of Artificial Sequence: Synthetic oligonucleotide
  Sense strand starting at position 3769 of SEQ ID NO: 587317
cuggaaucggaccguauuu

SEQ ID NO: 783365 - RNA, 19 nt, Artificial Sequence
  Description of Artificial Sequence: Synthetic oligonucleotide
  Antisense strand to SEQ ID NO: 783364
aaauacgguccgauuccag

SEQ ID NO: 783366 - RNA, 19 nt, Artificial Sequence
  Description of Artificial Sequence: Synthetic oligonucleotide
  Sense strand starting at position 3981 of SEQ ID NO: 587317
gcuguugcaucauuuaugu

SEQ ID NO: 783367 - RNA, 19 nt, Artificial Sequence
  Description of Artificial Sequence: Synthetic oligonucleotide
  Antisense strand to SEQ ID NO: 783366
acauaaaugaugcaacagc

SEQ ID NO: 783368 - RNA, 19 nt, Artificial Sequence
  Description of Artificial Sequence: Synthetic oligonucleotide
  Sense strand starting at position 5 of SEQ ID NO: 587318
uggcaaucuucucucagca

SEQ ID NO: 783369 - RNA, 19 nt, Artificial Sequence
  Description of Artificial Sequence: Synthetic oligonucleotide
  Antisense strand to SEQ ID NO: 783368
ugcugagagaagauugcca

SEQ ID NO: 783370 - RNA, 19 nt, Artificial Sequence
  Description of Artificial Sequence: Synthetic oligonucleotide
  Sense strand starting at position 95 of SEQ ID NO: 587318
uguauacugcauuaaugac

SEQ ID NO: 783371 - RNA, 19 nt, Artificial Sequence
  Description of Artificial Sequence: Synthetic oligonucleotide
  Antisense strand to SEQ ID NO: 783370
gucauuaaugcaguauaca

SEQ ID NO: 783372 - RNA, 19 nt, Artificial Sequence
  Description of Artificial Sequence: Synthetic oligonucleotide
  Sense strand starting at position 101 of SEQ ID NO: 587318
cugcauuaaugacugaaau

SEQ ID NO: 783373 - RNA, 19 nt, Artificial Sequence
  Description of Artificial Sequence: Synthetic oligonucleotide
  Antisense strand to SEQ ID NO: 783372
auuucagucauuaaugcag

SEQ ID NO: 783374 - RNA, 19 nt, Artificial Sequence
  Description of Artificial Sequence: Synthetic oligonucleotide
  Sense strand starting at position 102 of SEQ ID NO: 587318
ugcauuaaugacugaaaua

SEQ ID NO: 783375 - RNA, 19 nt, Artificial Sequence
  Description of Artificial Sequence: Synthetic oligonucleotide
  Antisense strand to SEQ ID NO: 783374
uauuucagucauuaaugca

SEQ ID NO: 783376 - RNA, 19 nt, Artificial Sequence
  Description of Artificial Sequence: Synthetic oligonucleotide
  Sense strand starting at position 175 of SEQ ID NO: 587318
auacauugauggguuguaa

SEQ ID NO: 783377 - RNA, 19 nt, Artificial Sequence
  Description of Artificial Sequence: Synthetic oligonucleotide
  Antisense strand to SEQ ID NO: 783376
uuacaacccaucaauguau

SEQ ID NO: 783378 - RNA, 19 nt, Artificial Sequence
  Description of Artificial Sequence: Synthetic oligonucleotide
  Sense strand starting at position 505 of SEQ ID NO: 587318
ccaguuccucguuaucaga

SEQ ID NO: 783379 - RNA, 19 nt, Artificial Sequence
  Description of Artificial Sequence: Synthetic oligonucleotide
  Antisense strand to SEQ ID NO: 783378
ucugauaacgaggaacugg

SEQ ID NO: 783380 - RNA, 19 nt, Artificial Sequence
  Description of Artificial Sequence: Synthetic oligonucleotide
  Sense strand starting at position 513 of SEQ ID NO: 587318
ucguuaucagaagacauug

SEQ ID NO: 783381 - RNA, 19 nt, Artificial Sequence
  Description of Artificial Sequence: Synthetic oligonucleotide
  Antisense strand to SEQ ID NO: 783380
caaugucuucugauaacga

SEQ ID NO: 783382 - RNA, 19 nt, Artificial Sequence
  Description of Artificial Sequence: Synthetic oligonucleotide
  Sense strand starting at position 518 of SEQ ID NO: 587318
aucagaagacauuguguau

SEQ ID NO: 783383 - RNA, 19 nt, Artificial Sequence
  Description of Artificial Sequence: Synthetic oligonucleotide
  Antisense strand to SEQ ID NO: 783382
auacacaaugucuucugau

SEQ ID NO: 783384 - RNA, 19 nt, Artificial Sequence
  Description of Artificial Sequence: Synthetic oligonucleotide
  Sense strand starting at position 521 of SEQ ID NO: 587318
agaagacauuguguauuga

SEQ ID NO: 783385 - RNA, 19 nt, Artificial Sequence
  Description of Artificial Sequence: Synthetic oligonucleotide
  Antisense strand to SEQ ID NO: 783384
ucaauacacaaugucuucu

SEQ ID NO: 783386 - RNA, 19 nt, Artificial Sequence
  Description of Artificial Sequence: Synthetic oligonucleotide
  Sense strand starting at position 557 of SEQ ID NO: 587318
uagagaaccugugcucuuu

SEQ ID NO: 783387 - RNA, 19 nt, Artificial Sequence
  Description of Artificial Sequence: Synthetic oligonucleotide
  Antisense strand to SEQ ID NO: 783386
aaagagcacagguucucua

SEQ ID NO: 783388 - RNA, 19 nt, Artificial Sequence
  Description of Artificial Sequence: Synthetic oligonucleotide
  Sense strand starting at position 798 of SEQ ID NO: 587318
gaagcuggauaguuacaga

SEQ ID NO: 783389 - RNA, 19 nt, Artificial Sequence
  Description of Artificial Sequence: Synthetic oligonucleotide
  Antisense strand to SEQ ID NO: 783388
ucuguaacuauccagcuuc

SEQ ID NO: 783390 - RNA, 19 nt, Artificial Sequence
  Description of Artificial Sequence: Synthetic oligonucleotide
  Sense strand starting at position 801 of SEQ ID NO: 587318
gcuggauaguuacagauuu

SEQ ID NO: 783391 - RNA, 19 nt, Artificial Sequence
  Description of Artificial Sequence: Synthetic oligonucleotide
  Antisense strand to SEQ ID NO: 783390
aaaucuguaacuauccagc

SEQ ID NO: 783392 - RNA, 19 nt, Artificial Sequence
  Description of Artificial Sequence: Synthetic oligonucleotide
  Sense strand starting at position 863 of SEQ ID NO: 587318
cgcgccagucuuucagaga

SEQ ID NO: 783393 - RNA, 19 nt, Artificial Sequence
  Description of Artificial Sequence: Synthetic oligonucleotide
  Antisense strand to SEQ ID NO: 783392
ucucugaaagacuggcgcg

SEQ ID NO: 783394 - RNA, 19 nt, Artificial Sequence
  Description of Artificial Sequence: Synthetic oligonucleotide
  Sense strand starting at position 2662 of SEQ ID NO: 587318
gaguuuccgcaguuugcua

SEQ ID NO: 783395 - RNA, 19 nt, Artificial Sequence
  Description of Artificial Sequence: Synthetic oligonucleotide
  Antisense strand to SEQ ID NO: 783394
uagcaaacugcggaaacuc

SEQ ID NO: 783396 - RNA, 19 nt, Artificial Sequence
  Description of Artificial Sequence: Synthetic oligonucleotide
  Sense strand starting at position 2679 of SEQ ID NO: 587318
uaagguuguuauucgaguu

SEQ ID NO: 783397 - RNA, 19 nt, Artificial Sequence
  Description of Artificial Sequence: Synthetic oligonucleotide
  Antisense strand to SEQ ID NO: 783396
aacucgaauaacaaccuua

SEQ ID NO: 783398 - RNA, 19 nt, Artificial Sequence
  Description of Artificial Sequence: Synthetic oligonucleotide
  Sense strand starting at position 2680 of SEQ ID NO: 587318
aagguuguuauucgaguua

SEQ ID NO: 783399 - RNA, 19 nt, Artificial Sequence
  Description of Artificial Sequence: Synthetic oligonucleotide
  Antisense strand to SEQ ID NO: 783398
uaacucgaauaacaaccuu

SEQ ID NO: 783400 - RNA, 19 nt, Artificial Sequence
  Description of Artificial Sequence: Synthetic oligonucleotide
  Sense strand starting at position 2703 of SEQ ID NO: 587318
uguuucuucucucuaaggu

SEQ ID NO: 783401 - RNA, 19 nt, Artificial Sequence
  Description of Artificial Sequence: Synthetic oligonucleotide
  Antisense strand to SEQ ID NO: 783400
accuuagagagaagaaaca

SEQ ID NO: 783402 - RNA, 19 nt, Artificial Sequence
  Description of Artificial Sequence: Synthetic oligonucleotide
  Sense strand starting at position 2704 of SEQ ID NO: 587318
guuucuucucucuaagguu

SEQ ID NO: 783403 - RNA, 19 nt, Artificial Sequence
  Description of Artificial Sequence: Synthetic oligonucleotide
  Antisense strand to SEQ ID NO: 783402
aaccuuagagagaagaaac

SEQ ID NO: 783404 - RNA, 19 nt, Artificial Sequence
  Description of Artificial Sequence: Synthetic oligonucleotide
  Sense strand starting at position 2710 of SEQ ID NO: 587318
ucucucuaagguuguuauu

SEQ ID NO: 783405 - RNA, 19 nt, Artificial Sequence
  Description of Artificial Sequence: Synthetic oligonucleotide
  Antisense strand to SEQ ID NO: 783404
aauaacaaccuuagagaga

SEQ ID NO: 783406 - RNA, 19 nt, Artificial Sequence
  Description of Artificial Sequence: Synthetic oligonucleotide
  Sense strand starting at position 2741 of SEQ ID NO: 587318
guuucuucugucuaaugug

SEQ ID NO: 783407 - RNA, 19 nt, Artificial Sequence
  Description of Artificial Sequence: Synthetic oligonucleotide
  Antisense strand to SEQ ID NO: 783406
cacauuagacagaagaaac

SEQ ID NO: 783408 - RNA, 19 nt, Artificial Sequence
  Description of Artificial Sequence: Synthetic oligonucleotide
  Sense strand starting at position 2818 of SEQ ID NO: 587318
aauacacguuccuugaaag

SEQ ID NO: 783409 - RNA, 19 nt, Artificial Sequence
  Description of Artificial Sequence: Synthetic oligonucleotide
  Antisense strand to SEQ ID NO: 783408
cuuucaaggaacguguauu

SEQ ID NO: 783410 - RNA, 19 nt, Artificial Sequence
  Description of Artificial Sequence: Synthetic oligonucleotide
  Sense strand starting at position 2819 of SEQ ID NO: 587318
auacacguuccuugaaaga

SEQ ID NO: 783411 - RNA, 19 nt, Artificial Sequence
  Description of Artificial Sequence: Synthetic oligonucleotide
  Antisense strand to SEQ ID NO: 783410
ucuuucaaggaacguguau

SEQ ID NO: 783412 - RNA, 19 nt, Artificial Sequence
  Description of Artificial Sequence: Synthetic oligonucleotide
  Sense strand starting at position 2842 of SEQ ID NO: 587318
auagcaugcgaucgauaca

SEQ ID NO: 783413 - RNA, 19 nt, Artificial Sequence
  Description of Artificial Sequence: Synthetic oligonucleotide
  Antisense strand to SEQ ID NO: 783412
uguaucgaucgcaugcuau

SEQ ID NO: 783414 - RNA, 19 nt, Artificial Sequence
  Description of Artificial Sequence: Synthetic oligonucleotide
  Sense strand starting at position 2861 of SEQ ID NO: 587318
gagcaucugcacugggauu

SEQ ID NO: 783415 - RNA, 19 nt, Artificial Sequence
  Description of Artificial Sequence: Synthetic oligonucleotide
  Antisense strand to SEQ ID NO: 783414
aaucccagugcagaugcuc

SEQ ID NO: 783416 - RNA, 19 nt, Artificial Sequence
  Description of Artificial Sequence: Synthetic oligonucleotide
  Sense strand starting at position 2959 of SEQ ID NO: 587318
uuuccuguacuaugaagau

SEQ ID NO: 783417 - RNA, 19 nt, Artificial Sequence
  Description of Artificial Sequence: Synthetic oligonucleotide
  Antisense strand to SEQ ID NO: 783416
aucuucauaguacaggaaa

SEQ ID NO: 783418 - RNA, 19 nt, Artificial Sequence
  Description of Artificial Sequence: Synthetic oligonucleotide
  Sense strand starting at position 3012 of SEQ ID NO: 587318
gauuaaauaggacguuuaa

SEQ ID NO: 783419 - RNA, 19 nt, Artificial Sequence
  Description of Artificial Sequence: Synthetic oligonucleotide
  Antisense strand to SEQ ID NO: 783418
uuaaacguccuauuuaauc

SEQ ID NO: 783420 - RNA, 19 nt, Artificial Sequence
  Description of Artificial Sequence: Synthetic oligonucleotide
  Sense strand starting at position 3034 of SEQ ID NO: 587318
accaacgcucuuugaaaua

SEQ ID NO: 783421 - RNA, 19 nt, Artificial Sequence
  Description of Artificial Sequence: Synthetic oligonucleotide
  Antisense strand to SEQ ID NO: 783420
uauuucaaagagcguuggu

SEQ ID NO: 783422 - RNA, 19 nt, Artificial Sequence
  Description of Artificial Sequence: Synthetic oligonucleotide
  Sense strand starting at position 3074 of SEQ ID NO: 587318
cccuuuaguacauguggga

SEQ ID NO: 783423 - RNA, 19 nt, Artificial Sequence
  Description of Artificial Sequence: Synthetic oligonucleotide
  Antisense strand to SEQ ID NO: 783422
ucccacauguacuaaaggg

SEQ ID NO: 783424 - RNA, 19 nt, Artificial Sequence
  Description of Artificial Sequence: Synthetic oligonucleotide
  Sense strand starting at position 3150 of SEQ ID NO: 587318
agccuugagucccuaggau

SEQ ID NO: 783425 - RNA, 19 nt, Artificial Sequence
  Description of Artificial Sequence: Synthetic oligonucleotide
  Antisense strand to SEQ ID NO: 783424
auccuagggacucaaggcu

SEQ ID NO: 783426 - RNA, 19 nt, Artificial Sequence
  Description of Artificial Sequence: Synthetic oligonucleotide
  Sense strand starting at position 3157 of SEQ ID NO: 587318
agucccuaggauugucuaa

SEQ ID NO: 783427 - RNA, 19 nt, Artificial Sequence
  Description of Artificial Sequence: Synthetic oligonucleotide
  Antisense strand to SEQ ID NO: 783426
uuagacaauccuagggacu

SEQ ID NO: 783428 - RNA, 19 nt, Artificial Sequence
  Description of Artificial Sequence: Synthetic oligonucleotide
  Sense strand starting at position 3159 of SEQ ID NO: 587318
ucccuaggauugucuaaga

SEQ ID NO: 783429 - RNA, 19 nt, Artificial Sequence
  Description of Artificial Sequence: Synthetic oligonucleotide
  Antisense strand to SEQ ID NO: 783428
ucuuagacaauccuaggga

SEQ ID NO: 783430 - RNA, 19 nt, Artificial Sequence
  Description of Artificial Sequence: Synthetic oligonucleotide
  Sense strand starting at position 3169 of SEQ ID NO: 587318
ugucuaagaacauggguaa

SEQ ID NO: 783431 - RNA, 19 nt, Artificial Sequence
  Description of Artificial Sequence: Synthetic oligonucleotide
  Antisense strand to SEQ ID NO: 783430
uuacccauguucuuagaca

SEQ ID NO: 783432 - RNA, 19 nt, Artificial Sequence
  Description of Artificial Sequence: Synthetic oligonucleotide
  Sense strand starting at position 3170 of SEQ ID NO: 587318
gucuaagaacauggguaaa

SEQ ID NO: 783433 - RNA, 19 nt, Artificial Sequence
  Description of Artificial Sequence: Synthetic oligonucleotide
  Antisense strand to SEQ ID NO: 783432
uuuacccauguucuuagac

SEQ ID NO: 783434 - RNA, 19 nt, Artificial Sequence
  Description of Artificial Sequence: Synthetic oligonucleotide
  Sense strand starting at position 3677 of SEQ ID NO: 587318
aguuuaugguuucccgaaa

SEQ ID NO: 783435 - RNA, 19 nt, Artificial Sequence
  Description of Artificial Sequence: Synthetic oligonucleotide
  Antisense strand to SEQ ID NO: 783434
uuucgggaaaccauaaacu

SEQ ID NO: 783436 - RNA, 19 nt, Artificial Sequence
  Description of Artificial Sequence: Synthetic oligonucleotide
  Sense strand starting at position 3678 of SEQ ID NO: 587318
guuuaugguuucccgaaac

SEQ ID NO: 783437 - RNA, 19 nt, Artificial Sequence
  Description of Artificial Sequence: Synthetic oligonucleotide
  Antisense strand to SEQ ID NO: 783436
guuucgggaaaccauaaac

SEQ ID NO: 783438 - RNA, 19 nt, Artificial Sequence
  Description of Artificial Sequence: Synthetic oligonucleotide
  Sense strand starting at position 3853 of SEQ ID NO: 587318
uaacaacagugcuugagau

SEQ ID NO: 783439 - RNA, 19 nt, Artificial Sequence
  Description of Artificial Sequence: Synthetic oligonucleotide
  Antisense strand to SEQ ID NO: 783438
aucucaagcacuguuguua

SEQ ID NO: 783440 - RNA, 19 nt, Artificial Sequence
  Description of Artificial Sequence: Synthetic oligonucleotide
  Sense strand starting at position 3854 of SEQ ID NO: 587318
aacaacagugcuugagaua

SEQ ID NO: 783441 - RNA, 19 nt, Artificial Sequence
  Description of Artificial Sequence: Synthetic oligonucleotide
  Antisense strand to SEQ ID NO: 783440
uaucucaagcacuguuguu

SEQ ID NO: 783442 - RNA, 19 nt, Artificial Sequence
  Description of Artificial Sequence: Synthetic oligonucleotide
  Sense strand starting at position 3857 of SEQ ID NO: 587318
aacagugcuugagauauuu

SEQ ID NO: 783443 - RNA, 19 nt, Artificial Sequence
  Description of Artificial Sequence: Synthetic oligonucleotide
  Antisense strand to SEQ ID NO: 783442
aaauaucucaagcacuguu

SEQ ID NO: 783444 - RNA, 19 nt, Artificial Sequence
  Description of Artificial Sequence: Synthetic oligonucleotide
  Sense strand starting at position 3893 of SEQ ID NO: 587318
cugaauuagcugggaccau

SEQ ID NO: 783445 - RNA, 19 nt, Artificial Sequence
  Description of Artificial Sequence: Synthetic oligonucleotide
  Antisense strand to SEQ ID NO: 783444
auggucccagcuaauucag

SEQ ID NO: 783446 - RNA, 19 nt, Artificial Sequence
  Description of Artificial Sequence: Synthetic oligonucleotide
  Sense strand starting at position 3980 of SEQ ID NO: 587318
agcuuugauccauacgauu

SEQ ID NO: 783447 - RNA, 19 nt, Artificial Sequence
  Description of Artificial Sequence: Synthetic oligonucleotide
  Antisense strand to SEQ ID NO: 783446
aaucguauggaucaaagcu

SEQ ID NO: 783448 - RNA, 19 nt, Artificial Sequence
  Description of Artificial Sequence: Synthetic oligonucleotide
  Sense strand starting at position 791 of SEQ ID NO: 587319
aaagguuagcacuguggua

SEQ ID NO: 783449 - RNA, 19 nt, Artificial Sequence
  Description of Artificial Sequence: Synthetic oligonucleotide
  Antisense strand to SEQ ID NO: 783448
uaccacagugcuaaccuuu

SEQ ID NO: 783450 - RNA, 19 nt, Artificial Sequence
  Description of Artificial Sequence: Synthetic oligonucleotide
  Sense strand starting at position 804 of SEQ ID NO: 587319
gugguauauuuccuucugu

SEQ ID NO: 783451 - RNA, 19 nt, Artificial Sequence
  Description of Artificial Sequence: Synthetic oligonucleotide
  Antisense strand to SEQ ID NO: 783450
acagaaggaaauauaccac

SEQ ID NO: 783452 - RNA, 19 nt, Artificial Sequence
  Description of Artificial Sequence: Synthetic oligonucleotide
  Sense strand starting at position 1191 of SEQ ID NO: 587319
cucuccaggccucagauua

SEQ ID NO: 783453 - RNA, 19 nt, Artificial Sequence
  Description of Artificial Sequence: Synthetic oligonucleotide
  Antisense strand to SEQ ID NO: 783452
uaaucugaggccuggagag

SEQ ID NO: 783454 - RNA, 19 nt, Artificial Sequence
  Description of Artificial Sequence: Synthetic oligonucleotide
  Sense strand starting at position 1228 of SEQ ID NO: 587319
uguggaaucagaggucuga

SEQ ID NO: 783455 - RNA, 19 nt, Artificial Sequence
  Description of Artificial Sequence: Synthetic oligonucleotide
  Antisense strand to SEQ ID NO: 783454
ucagaccucugauuccaca

SEQ ID NO: 783456 - RNA, 19 nt, Artificial Sequence
  Description of Artificial Sequence: Synthetic oligonucleotide
  Sense strand starting at position 1240 of SEQ ID NO: 587319
ggucugaggccugguggau

SEQ ID NO: 783457 - RNA, 19 nt, Artificial Sequence
  Description of Artificial Sequence: Synthetic oligonucleotide
  Antisense strand to SEQ ID NO: 783456
auccaccaggccucagacc

SEQ ID NO: 783458 - RNA, 19 nt, Artificial Sequence
  Description of Artificial Sequence: Synthetic oligonucleotide
  Sense strand starting at position 1252 of SEQ ID NO: 587319
gguggaucuugugugacuu

SEQ ID NO: 783459 - RNA, 19 nt, Artificial Sequence
  Description of Artificial Sequence: Synthetic oligonucleotide
  Antisense strand to SEQ ID NO: 783458
aagucacacaagauccacc

SEQ ID NO: 783460 - RNA, 19 nt, Artificial Sequence
  Description of Artificial Sequence: Synthetic oligonucleotide
  Sense strand starting at position 1437 of SEQ ID NO: 587319
cugagagauccgcaucuuc

SEQ ID NO: 783461 - RNA, 19 nt, Artificial Sequence
  Description of Artificial Sequence: Synthetic oligonucleotide
  Antisense strand to SEQ ID NO: 783460
gaagaugcggaucucucag

SEQ ID NO: 783462 - RNA, 19 nt, Artificial Sequence
  Description of Artificial Sequence: Synthetic oligonucleotide
  Sense strand starting at position 1447 of SEQ ID NO: 587319
cgcaucuucgcagaggaua

SEQ ID NO: 783463 - RNA, 19 nt, Artificial Sequence
  Description of Artificial Sequence: Synthetic oligonucleotide
  Antisense strand to SEQ ID NO: 783462
uauccucugcgaagaugcg

SEQ ID NO: 783464 - RNA, 19 nt, Artificial Sequence
  Description of Artificial Sequence: Synthetic oligonucleotide
  Sense strand starting at position 1558 of SEQ ID NO: 587319
aucuuugcgaaaggaugau

SEQ ID NO: 783465 - RNA, 19 nt, Artificial Sequence
  Description of Artificial Sequence: Synthetic oligonucleotide
  Antisense strand to SEQ ID NO: 783464
aucauccuuucgcaaagau

SEQ ID NO: 783466 - RNA, 19 nt, Artificial Sequence
  Description of Artificial Sequence: Synthetic oligonucleotide
  Sense strand starting at position 1562 of SEQ ID NO: 587319
uugcgaaaggaugaucauu

SEQ ID NO: 783467 - RNA, 19 nt, Artificial Sequence
  Description of Artificial Sequence: Synthetic oligonucleotide
  Antisense strand to SEQ ID NO: 783466
aaugaucauccuuucgcaa

SEQ ID NO: 783468 - RNA, 19 nt, Artificial Sequence
  Description of Artificial Sequence: Synthetic oligonucleotide
  Sense strand starting at position 1564 of SEQ ID NO: 587319
gcgaaaggaugaucauuau

SEQ ID NO: 783469 - RNA, 19 nt, Artificial Sequence
  Description of Artificial Sequence: Synthetic oligonucleotide
  Antisense strand to SEQ ID NO: 783468
auaaugaucauccuuucgc

SEQ ID NO: 783470 - RNA, 19 nt, Artificial Sequence
  Description of Artificial Sequence: Synthetic oligonucleotide
  Sense strand starting at position 1608 of SEQ ID NO: 587319
cagaauugugguuggagcu

SEQ ID NO: 783471 - RNA, 19 nt, Artificial Sequence
  Description of Artificial Sequence: Synthetic oligonucleotide
  Antisense strand to SEQ ID NO: 783470
agcuccaaccacaauucug

SEQ ID NO: 783472 - RNA, 19 nt, Artificial Sequence
  Description of Artificial Sequence: Synthetic oligonucleotide
  Sense strand starting at position 1969 of SEQ ID NO: 587319
augacucacgcccaaagaa

SEQ ID NO: 783473 - RNA, 19 nt, Artificial Sequence
  Description of Artificial Sequence: Synthetic oligonucleotide
  Antisense strand to SEQ ID NO: 783472
uucuuugggcgugagucau

SEQ ID NO: 783474 - RNA, 19 nt, Artificial Sequence
  Description of Artificial Sequence: Synthetic oligonucleotide
  Sense strand starting at position 2066 of SEQ ID NO: 587319
gcgcaucaucaccacgaau

SEQ ID NO: 783475 - RNA, 19 nt, Artificial Sequence
  Description of Artificial Sequence: Synthetic oligonucleotide
  Antisense strand to SEQ ID NO: 783474
auucguggugaugaugcgc

SEQ ID NO: 783476 - RNA, 19 nt, Artificial Sequence
  Description of Artificial Sequence: Synthetic oligonucleotide
  Sense strand starting at position 2068 of SEQ ID NO: 587319
gcaucaucaccacgaauag

SEQ ID NO: 783477 - RNA, 19 nt, Artificial Sequence
  Description of Artificial Sequence: Synthetic oligonucleotide
  Antisense strand to SEQ ID NO: 783476
cuauucguggugaugaugc

SEQ ID NO: 783478 - RNA, 19 nt, Artificial Sequence
  Description of Artificial Sequence: Synthetic oligonucleotide
  Sense strand starting at position 2286 of SEQ ID NO: 587319
ccauuuaaauaguaaagag

SEQ ID NO: 783479 - RNA, 19 nt, Artificial Sequence
  Description of Artificial Sequence: Synthetic oligonucleotide
  Antisense strand to SEQ ID NO: 783478
cucuuuacuauuuaaaugg

SEQ ID NO: 783480 - RNA, 19 nt, Artificial Sequence
  Description of Artificial Sequence: Synthetic oligonucleotide
  Sense strand starting at position 2333 of SEQ ID NO: 587319
gggccuugugcuggagaag

SEQ ID NO: 783481 - RNA, 19 nt, Artificial Sequence
  Description of Artificial Sequence: Synthetic oligonucleotide
  Antisense strand to SEQ ID NO: 783480
cuucuccagcacaaggccc

SEQ ID NO: 783482 - RNA, 19 nt, Artificial Sequence
  Description of Artificial Sequence: Synthetic oligonucleotide
  Sense strand starting at position 2334 of SEQ ID NO: 587319
ggccuugugcuggagaaga

SEQ ID NO: 783483 - RNA, 19 nt, Artificial Sequence
  Description of Artificial Sequence: Synthetic oligonucleotide
  Antisense strand to SEQ ID NO: 783482
ucuucuccagcacaaggcc

SEQ ID NO: 783484 - RNA, 19 nt, Artificial Sequence
  Description of Artificial Sequence: Synthetic oligonucleotide
  Sense strand starting at position 2336 of SEQ ID NO: 587319
ccuugugcuggagaagaga

SEQ ID NO: 783485 - RNA, 19 nt, Artificial Sequence
  Description of Artificial Sequence: Synthetic oligonucleotide
  Antisense strand to SEQ ID NO: 783484
ucucuucuccagcacaagg

SEQ ID NO: 783486 - RNA, 19 nt, Artificial Sequence
  Description of Artificial Sequence: Synthetic oligonucleotide
  Sense strand starting at position 2372 of SEQ ID NO: 587319
acgccuacuccuggaaaca

SEQ ID NO: 783487 - RNA, 19 nt, Artificial Sequence
  Description of Artificial Sequence: Synthetic oligonucleotide
  Antisense strand to SEQ ID NO: 783486
uguuuccaggaguaggcgu

SEQ ID NO: 783488 - RNA, 19 nt, Artificial Sequence
  Description of Artificial Sequence: Synthetic oligonucleotide
  Sense strand starting at position 2373 of SEQ ID NO: 587319
cgccuacuccuggaaacau

SEQ ID NO: 783489 - RNA, 19 nt, Artificial Sequence
  Description of Artificial Sequence: Synthetic oligonucleotide
  Antisense strand to SEQ ID NO: 783488
auguuuccaggaguaggcg

SEQ ID NO: 783490 - RNA, 19 nt, Artificial Sequence
  Description of Artificial Sequence: Synthetic oligonucleotide
  Sense strand starting at position 2432 of SEQ ID NO: 587319
aggaaacagaauuguguuu

SEQ ID NO: 783491 - RNA, 19 nt, Artificial Sequence
  Description of Artificial Sequence: Synthetic oligonucleotide
  Antisense strand to SEQ ID NO: 783490
aaacacaauucuguuuccu

SEQ ID NO: 783492 - RNA, 19 nt, Artificial Sequence
  Description of Artificial Sequence: Synthetic oligonucleotide
  Sense strand starting at position 2437 of SEQ ID NO: 587319
acagaauuguguuuaggag

SEQ ID NO: 783493 - RNA, 19 nt, Artificial Sequence
  Description of Artificial Sequence: Synthetic oligonucleotide
  Antisense strand to SEQ ID NO: 783492
cuccuaaacacaauucugu

SEQ ID NO: 783494 - RNA, 19 nt, Artificial Sequence
  Description of Artificial Sequence: Synthetic oligonucleotide
  Sense strand starting at position 2438 of SEQ ID NO: 587319
cagaauuguguuuaggagu

SEQ ID NO: 783495 - RNA, 19 nt, Artificial Sequence
  Description of Artificial Sequence: Synthetic oligonucleotide
  Antisense strand to SEQ ID NO: 783494
acuccuaaacacaauucug

SEQ ID NO: 783496 - RNA, 19 nt, Artificial Sequence
  Description of Artificial Sequence: Synthetic oligonucleotide
  Sense strand starting at position 2445 of SEQ ID NO: 587319
guguuuaggagugaucaga

SEQ ID NO: 783497 - RNA, 19 nt, Artificial Sequence
  Description of Artificial Sequence: Synthetic oligonucleotide
  Antisense strand to SEQ ID NO: 783496
ucugaucacuccuaaacac

SEQ ID NO: 783498 - RNA, 19 nt, Artificial Sequence
  Description of Artificial Sequence: Synthetic oligonucleotide
  Sense strand starting at position 2498 of SEQ ID NO: 587319
guccuugauccacagagcu

SEQ ID NO: 783499 - RNA, 19 nt, Artificial Sequence
  Description of Artificial Sequence: Synthetic oligonucleotide
  Antisense strand to SEQ ID NO: 783498
agcucuguggaucaaggac

SEQ ID NO: 783500 - RNA, 19 nt, Artificial Sequence
  Description of Artificial Sequence: Synthetic oligonucleotide
  Sense strand starting at position 2695 of SEQ ID NO: 587319
gaaaucagaucugugucca

SEQ ID NO: 783501 - RNA, 19 nt, Artificial Sequence
  Description of Artificial Sequence: Synthetic oligonucleotide
  Antisense strand to SEQ ID NO: 783500
uggacacagaucugauuuc

SEQ ID NO: 783502 - RNA, 19 nt, Artificial Sequence
  Description of Artificial Sequence: Synthetic oligonucleotide
  Sense strand starting at position 2696 of SEQ ID NO: 587319
aaaucagaucuguguccag

SEQ ID NO: 783503 - RNA, 19 nt, Artificial Sequence
  Description of Artificial Sequence: Synthetic oligonucleotide
  Antisense strand to SEQ ID NO: 783502
cuggacacagaucugauuu

SEQ ID NO: 783504 - RNA, 19 nt, Artificial Sequence
  Description of Artificial Sequence: Synthetic oligonucleotide
  Sense strand starting at position 2740 of SEQ ID NO: 587319
ggaguuccuucugcugaga

SEQ ID NO: 783505 - RNA, 19 nt, Artificial Sequence
  Description of Artificial Sequence: Synthetic oligonucleotide
  Antisense strand to SEQ ID NO: 783504
ucucagcagaaggaacucc

SEQ ID NO: 783506 - RNA, 19 nt, Artificial Sequence
  Description of Artificial Sequence: Synthetic oligonucleotide
  Sense strand starting at position 2743 of SEQ ID NO: 587319
guuccuucugcugagagca

SEQ ID NO: 783507 - RNA, 19 nt, Artificial Sequence
  Description of Artificial Sequence: Synthetic oligonucleotide
  Antisense strand to SEQ ID NO: 783506
ugcucucagcagaaggaac

SEQ ID NO: 783508 - RNA, 19 nt, Artificial Sequence
  Description of Artificial Sequence: Synthetic oligonucleotide
  Sense strand starting at position 3178 of SEQ ID NO: 587319
agaccagguccaugaaagu

SEQ ID NO: 783509 - RNA, 19 nt, Artificial Sequence
  Description of Artificial Sequence: Synthetic oligonucleotide
  Antisense strand to SEQ ID NO: 783508
acuuucauggaccuggucu

SEQ ID NO: 783510 - RNA, 19 nt, Artificial Sequence
  Description of Artificial Sequence: Synthetic oligonucleotide
  Sense strand starting at position 3228 of SEQ ID NO: 587319
cugggugaccucggacuaa

SEQ ID NO: 783511 - RNA, 19 nt, Artificial Sequence
  Description of Artificial Sequence: Synthetic oligonucleotide
  Antisense strand to SEQ ID NO: 783510
uuaguccgaggucacccag

SEQ ID NO: 783512 - RNA, 19 nt, Artificial Sequence
  Description of Artificial Sequence: Synthetic oligonucleotide
  Sense strand starting at position 3345 of SEQ ID NO: 587319
caaguauuagaaggccauu

SEQ ID NO: 783513 - RNA, 19 nt, Artificial Sequence
  Description of Artificial Sequence: Synthetic oligonucleotide
  Antisense strand to SEQ ID NO: 783512
aauggccuucuaauacuug

SEQ ID NO: 783514 - RNA, 19 nt, Artificial Sequence
  Description of Artificial Sequence: Synthetic oligonucleotide
  Sense strand starting at position 3348 of SEQ ID NO: 587319
guauuagaaggccauuaac

SEQ ID NO: 783515 - RNA, 19 nt, Artificial Sequence
  Description of Artificial Sequence: Synthetic oligonucleotide
  Antisense strand to SEQ ID NO: 783514
guuaauggccuucuaauac

SEQ ID NO: 783516 - RNA, 19 nt, Artificial Sequence
  Description of Artificial Sequence: Synthetic oligonucleotide
  Sense strand starting at position 3427 of SEQ ID NO: 587319
gucuaauuaucaguaacag

SEQ ID NO: 783517 - RNA, 19 nt, Artificial Sequence
  Description of Artificial Sequence: Synthetic oligonucleotide
  Antisense strand to SEQ ID NO: 783516
cuguuacugauaauuagac

SEQ ID NO: 783518 - RNA, 19 nt, Artificial Sequence
  Description of Artificial Sequence: Synthetic oligonucleotide
  Sense strand starting at position 3523 of SEQ ID NO: 587319
uugagcucgcuccuuguaa

SEQ ID NO: 783519 - RNA, 19 nt, Artificial Sequence
  Description of Artificial Sequence: Synthetic oligonucleotide
  Antisense strand to SEQ ID NO: 783518
uuacaaggagcgagcucaa

SEQ ID NO: 783520 - RNA, 19 nt, Artificial Sequence
  Description of Artificial Sequence: Synthetic oligonucleotide
  Sense strand starting at position 3618 of SEQ ID NO: 587319
ggaggucagucagugagau

SEQ ID NO: 783521 - RNA, 19 nt, Artificial Sequence
  Description of Artificial Sequence: Synthetic oligonucleotide
  Antisense strand to SEQ ID NO: 783520
aucucacugacugaccucc

SEQ ID NO: 783522 - RNA, 19 nt, Artificial Sequence
  Description of Artificial Sequence: Synthetic oligonucleotide
  Sense strand starting at position 3619 of SEQ ID NO: 587319
gaggucagucagugagauc

SEQ ID NO: 783523 - RNA, 19 nt, Artificial Sequence
  Description of Artificial Sequence: Synthetic oligonucleotide
  Antisense strand to SEQ ID NO: 783522
gaucucacugacugaccuc

SEQ ID NO: 783524 - RNA, 19 nt, Artificial Sequence
  Description of Artificial Sequence: Synthetic oligonucleotide
  Sense strand starting at position 3714 of SEQ ID NO: 587319
cacagucaugacugugauc

SEQ ID NO: 783525 - RNA, 19 nt, Artificial Sequence
  Description of Artificial Sequence: Synthetic oligonucleotide
  Antisense strand to SEQ ID NO: 783524
gaucacagucaugacugug

SEQ ID NO: 783526 - RNA, 19 nt, Artificial Sequence
  Description of Artificial Sequence: Synthetic oligonucleotide
  Sense strand starting at position 3725 of SEQ ID NO: 587319
cugugaucccuugggaaua

SEQ ID NO: 783527 - RNA, 19 nt, Artificial Sequence
  Description of Artificial Sequence: Synthetic oligonucleotide
  Antisense strand to SEQ ID NO: 783526
uauucccaagggaucacag

SEQ ID NO: 783528 - RNA, 19 nt, Artificial Sequence
  Description of Artificial Sequence: Synthetic oligonucleotide
  Sense strand starting at position 88 of SEQ ID NO: 587320
guggaauuaugucuauaua

SEQ ID NO: 783529 - RNA, 19 nt, Artificial Sequence
  Description of Artificial Sequence: Synthetic oligonucleotide
  Antisense strand to SEQ ID NO: 783528
uauauagacauaauuccac

SEQ ID NO: 783530 - RNA, 19 nt, Artificial Sequence
  Description of Artificial Sequence: Synthetic oligonucleotide
  Sense strand starting at position 188 of SEQ ID NO: 587320
cuucuuccgcaagauacau

SEQ ID NO: 783531 - RNA, 19 nt, Artificial Sequence
  Description of Artificial Sequence: Synthetic oligonucleotide
  Antisense strand to SEQ ID NO: 783530
auguaucuugcggaagaag

SEQ ID NO: 783532 - RNA, 19 nt, Artificial Sequence
  Description of Artificial Sequence: Synthetic oligonucleotide
  Sense strand starting at position 207 of SEQ ID NO: 587320
auuugugacugucuuuauu

SEQ ID NO: 783533 - RNA, 19 nt, Artificial Sequence
  Description of Artificial Sequence: Synthetic oligonucleotide
  Antisense strand to SEQ ID NO: 783532
aauaaagacagucacaaau

SEQ ID NO: 783534 - RNA, 19 nt, Artificial Sequence
  Description of Artificial Sequence: Synthetic oligonucleotide
  Sense strand starting at position 269 of SEQ ID NO: 587320
cgugcugcaaugucuuuaa

SEQ ID NO: 783535 - RNA, 19 nt, Artificial Sequence
  Description of Artificial Sequence: Synthetic oligonucleotide
  Antisense strand to SEQ ID NO: 783534
uuaaagacauugcagcacg

SEQ ID NO: 783536 - RNA, 19 nt, Artificial Sequence
  Description of Artificial Sequence: Synthetic oligonucleotide
  Sense strand starting at position 273 of SEQ ID NO: 587320
cugcaaugucuuuaagagg

SEQ ID NO: 783537 - RNA, 19 nt, Artificial Sequence
  Description of Artificial Sequence: Synthetic oligonucleotide
  Antisense strand to SEQ ID NO: 783536
ccucuuaaagacauugcag

SEQ ID NO: 783538 - RNA, 19 nt, Artificial Sequence
  Description of Artificial Sequence: Synthetic oligonucleotide
  Sense strand starting at position 278 of SEQ ID NO: 587320
augucuuuaagaggcagaa

SEQ ID NO: 783539 - RNA, 19 nt, Artificial Sequence
  Description of Artificial Sequence: Synthetic oligonucleotide
  Antisense strand to SEQ ID NO: 783538
uucugccucuuaaagacau

SEQ ID NO: 783540 - RNA, 19 nt, Artificial Sequence
  Description of Artificial Sequence: Synthetic oligonucleotide
  Sense strand starting at position 552 of SEQ ID NO: 587320
acagauaauccuggcuaaa

SEQ ID NO: 783541 - RNA, 19 nt, Artificial Sequence
  Description of Artificial Sequence: Synthetic oligonucleotide
  Antisense strand to SEQ ID NO: 783540
uuuagccaggauuaucugu

SEQ ID NO: 783542 - RNA, 19 nt, Artificial Sequence
  Description of Artificial Sequence: Synthetic oligonucleotide
  Sense strand starting at position 554 of SEQ ID NO: 587320
agauaauccuggcuaaauc

SEQ ID NO: 783543 - RNA, 19 nt, Artificial Sequence
  Description of Artificial Sequence: Synthetic oligonucleotide
  Antisense strand to SEQ ID NO: 783542
gauuuagccaggauuaucu

SEQ ID NO: 783544 - RNA, 19 nt, Artificial Sequence
  Description of Artificial Sequence: Synthetic oligonucleotide
  Sense strand starting at position 578 of SEQ ID NO: 587320
gggacuaugacuugggcuu

SEQ ID NO: 783545 - RNA, 19 nt, Artificial Sequence
  Description of Artificial Sequence: Synthetic oligonucleotide
  Antisense strand to SEQ ID NO: 783544
aagcccaagucauaguccc

SEQ ID NO: 783546 - RNA, 19 nt, Artificial Sequence
  Description of Artificial Sequence: Synthetic oligonucleotide
  Sense strand starting at position 579 of SEQ ID NO: 587320
ggacuaugacuugggcuua

SEQ ID NO: 783547 - RNA, 19 nt, Artificial Sequence
  Description of Artificial Sequence: Synthetic oligonucleotide
  Antisense strand to SEQ ID NO: 783546
uaagcccaagucauagucc

SEQ ID NO: 783548 - RNA, 19 nt, Artificial Sequence
  Description of Artificial Sequence: Synthetic oligonucleotide
  Sense strand starting at position 625 of SEQ ID NO: 587320
uuugaaagguguuccaacu

SEQ ID NO: 783549 - RNA, 19 nt, Artificial Sequence
  Description of Artificial Sequence: Synthetic oligonucleotide
  Antisense strand to SEQ ID NO: 783548
aguuggaacaccuuucaaa

SEQ ID NO: 783550 - RNA, 19 nt, Artificial Sequence
  Description of Artificial Sequence: Synthetic oligonucleotide
  Sense strand starting at position 763 of SEQ ID NO: 587320
guguuaucaccugauuacu

SEQ ID NO: 783551 - RNA, 19 nt, Artificial Sequence
  Description of Artificial Sequence: Synthetic oligonucleotide
  Antisense strand to SEQ ID NO: 783550
aguaaucaggugauaacac

SEQ ID NO: 783552 - RNA, 19 nt, Artificial Sequence
  Description of Artificial Sequence: Synthetic oligonucleotide
  Sense strand starting at position 765 of SEQ ID NO: 587320
guuaucaccugauuacuga

SEQ ID NO: 783553 - RNA, 19 nt, Artificial Sequence
  Description of Artificial Sequence: Synthetic oligonucleotide
  Antisense strand to SEQ ID NO: 783552
ucaguaaucaggugauaac

SEQ ID NO: 783554 - RNA, 19 nt, Artificial Sequence
  Description of Artificial Sequence: Synthetic oligonucleotide
  Sense strand starting at position 888 of SEQ ID NO: 587320
gggcaagggaucuaucuuc

SEQ ID NO: 783555 - RNA, 19 nt, Artificial Sequence
  Description of Artificial Sequence: Synthetic oligonucleotide
  Antisense strand to SEQ ID NO: 783554
gaagauagaucccuugccc

SEQ ID NO: 783556 - RNA, 19 nt, Artificial Sequence
  Description of Artificial Sequence: Synthetic oligonucleotide
  Sense strand starting at position 1040 of SEQ ID NO: 587320
uuauucuugccagaguuaa

SEQ ID NO: 783557 - RNA, 19 nt, Artificial Sequence
  Description of Artificial Sequence: Synthetic oligonucleotide
  Antisense strand to SEQ ID NO: 783556
uuaacucuggcaagaauaa

SEQ ID NO: 783558 - RNA, 19 nt, Artificial Sequence
  Description of Artificial Sequence: Synthetic oligonucleotide
  Sense strand starting at position 1153 of SEQ ID NO: 587320
ggacgugugggugaauaug

SEQ ID NO: 783559 - RNA, 19 nt, Artificial Sequence
  Description of Artificial Sequence: Synthetic oligonucleotide
  Antisense strand to SEQ ID NO: 783558
cauauucacccacacgucc

SEQ ID NO: 783560 - RNA, 19 nt, Artificial Sequence
  Description of Artificial Sequence: Synthetic oligonucleotide
  Sense strand starting at position 1163 of SEQ ID NO: 587320
gugaauaugagucaucggu

SEQ ID NO: 783561 - RNA, 19 nt, Artificial Sequence
  Description of Artificial Sequence: Synthetic oligonucleotide
  Antisense strand to SEQ ID NO: 783560
accgaugacucauauucac

SEQ ID NO: 783562 - RNA, 19 nt, Artificial Sequence
  Description of Artificial Sequence: Synthetic oligonucleotide
  Sense strand starting at position 1303 of SEQ ID NO: 587320
agacccuaaucugcugaaa

SEQ ID NO: 783563 - RNA, 19 nt, Artificial Sequence
  Description of Artificial Sequence: Synthetic oligonucleotide
  Antisense strand to SEQ ID NO: 783562
uuucagcagauuagggucu

SEQ ID NO: 783564 - RNA, 19 nt, Artificial Sequence
  Description of Artificial Sequence: Synthetic oligonucleotide
  Sense strand starting at position 2117 of SEQ ID NO: 587320
uguuaacaucugggacaaa

SEQ ID NO: 783565 - RNA, 19 nt, Artificial Sequence
  Description of Artificial Sequence: Synthetic oligonucleotide
  Antisense strand to SEQ ID NO: 783564
uuugucccagauguuaaca

SEQ ID NO: 783566 - RNA, 19 nt, Artificial Sequence
  Description of Artificial Sequence: Synthetic oligonucleotide
  Sense strand starting at position 2709 of SEQ ID NO: 587320
caaccucgccaguaaauga

SEQ ID NO: 783567 - RNA, 19 nt, Artificial Sequence
  Description of Artificial Sequence: Synthetic oligonucleotide
  Antisense strand to SEQ ID NO: 783566
ucauuuacuggcgagguug

SEQ ID NO: 783568 - RNA, 19 nt, Artificial Sequence
  Description of Artificial Sequence: Synthetic oligonucleotide
  Sense strand starting at position 2894 of SEQ ID NO: 587320
uaccuuaugcuagggauau

SEQ ID NO: 783569 - RNA, 19 nt, Artificial Sequence
  Description of Artificial Sequence: Synthetic oligonucleotide
  Antisense strand to SEQ ID NO: 783568
auaucccuagcauaaggua

SEQ ID NO: 783570 - RNA, 19 nt, Artificial Sequence
  Description of Artificial Sequence: Synthetic oligonucleotide
  Sense strand starting at position 3068 of SEQ ID NO: 587320
caaaguguuaagugaagga

SEQ ID NO: 783571 - RNA, 19 nt, Artificial Sequence
  Description of Artificial Sequence: Synthetic oligonucleotide
  Antisense strand to SEQ ID NO: 783570
uccuucacuuaacacuuug

SEQ ID NO: 783572 - RNA, 19 nt, Artificial Sequence
  Description of Artificial Sequence: Synthetic oligonucleotide
  Sense strand starting at position 3116 of SEQ ID NO: 587320
uaguuagaucacuaugggu

SEQ ID NO: 783573 - RNA, 19 nt, Artificial Sequence
  Description of Artificial Sequence: Synthetic oligonucleotide
  Antisense strand to SEQ ID NO: 783572
acccauagugaucuaacua

SEQ ID NO: 783574 - RNA, 19 nt, Artificial Sequence
  Description of Artificial Sequence: Synthetic oligonucleotide
  Sense strand starting at position 3118 of SEQ ID NO: 587320
guuagaucacuauggguaa

SEQ ID NO: 783575 - RNA, 19 nt, Artificial Sequence
  Description of Artificial Sequence: Synthetic oligonucleotide
  Antisense strand to SEQ ID NO: 783574
uuacccauagugaucuaac

SEQ ID NO: 783576 - RNA, 19 nt, Artificial Sequence
  Description of Artificial Sequence: Synthetic oligonucleotide
  Sense strand starting at position 3121 of SEQ ID NO: 587320
agaucacuauggguaaauu

SEQ ID NO: 783577 - RNA, 19 nt, Artificial Sequence
  Description of Artificial Sequence: Synthetic oligonucleotide
  Antisense strand to SEQ ID NO: 783576
aauuuacccauagugaucu

SEQ ID NO: 783578 - RNA, 19 nt, Artificial Sequence
  Description of Artificial Sequence: Synthetic oligonucleotide
  Sense strand starting at position 3146 of SEQ ID NO: 587320
uugccaagauaacuugauu

SEQ ID NO: 783579 - RNA, 19 nt, Artificial Sequence
  Description of Artificial Sequence: Synthetic oligonucleotide
  Antisense strand to SEQ ID NO: 783578
aaucaaguuaucuuggcaa

SEQ ID NO: 783580 - RNA, 19 nt, Artificial Sequence
  Description of Artificial Sequence: Synthetic oligonucleotide
  Sense strand starting at position 3170 of SEQ ID NO: 587320
acuuguauuugcuuaaagu

SEQ ID NO: 783581 - RNA, 19 nt, Artificial Sequence
  Description of Artificial Sequence: Synthetic oligonucleotide
  Antisense strand to SEQ ID NO: 783580
acuuuaagcaaauacaagu

SEQ ID NO: 783582 - RNA, 19 nt, Artificial Sequence
  Description of Artificial Sequence: Synthetic oligonucleotide
  Sense strand starting at position 3323 of SEQ ID NO: 587320
agucauucucucugaugga

SEQ ID NO: 783583 - RNA, 19 nt, Artificial Sequence
  Description of Artificial Sequence: Synthetic oligonucleotide
  Antisense strand to SEQ ID NO: 783582
uccaucagagagaaugacu

SEQ ID NO: 783584 - RNA, 19 nt, Artificial Sequence
  Description of Artificial Sequence: Synthetic oligonucleotide
  Sense strand starting at position 3349 of SEQ ID NO: 587320
uaccauguggcagauaauu

SEQ ID NO: 783585 - RNA, 19 nt, Artificial Sequence
  Description of Artificial Sequence: Synthetic oligonucleotide
  Antisense strand to SEQ ID NO: 783584
aauuaucugccacauggua

SEQ ID NO: 783586 - RNA, 19 nt, Artificial Sequence
  Description of Artificial Sequence: Synthetic oligonucleotide
  Sense strand starting at position 3357 of SEQ ID NO: 587320
ggcagauaauuuguguguu

SEQ ID NO: 783587 - RNA, 19 nt, Artificial Sequence
  Description of Artificial Sequence: Synthetic oligonucleotide
  Antisense strand to SEQ ID NO: 783586
aacacacaaauuaucugcc

SEQ ID NO: 783588 - RNA, 19 nt, Artificial Sequence
  Description of Artificial Sequence: Synthetic oligonucleotide
  Sense strand starting at position 3360 of SEQ ID NO: 587320
agauaauuuguguguuugu

SEQ ID NO: 783589 - RNA, 19 nt, Artificial Sequence
  Description of Artificial Sequence: Synthetic oligonucleotide
  Antisense strand to SEQ ID NO: 783588
acaaacacacaaauuaucu

SEQ ID NO: 783590 - RNA, 19 nt, Artificial Sequence
  Description of Artificial Sequence: Synthetic oligonucleotide
  Sense strand starting at position 3361 of SEQ ID NO: 587320
gauaauuuguguguuuguu

SEQ ID NO: 783591 - RNA, 19 nt, Artificial Sequence
  Description of Artificial Sequence: Synthetic oligonucleotide
  Antisense strand to SEQ ID NO: 783590
aacaaacacacaaauuauc

SEQ ID NO: 783592 - RNA, 19 nt, Artificial Sequence
  Description of Artificial Sequence: Synthetic oligonucleotide
  Sense strand starting at position 3402 of SEQ ID NO: 587320
acaaguaugccuggaacaa

SEQ ID NO: 783593 - RNA, 19 nt, Artificial Sequence
  Description of Artificial Sequence: Synthetic oligonucleotide
  Antisense strand to SEQ ID NO: 783592
uuguuccaggcauacuugu

SEQ ID NO: 783594 - RNA, 19 nt, Artificial Sequence
  Description of Artificial Sequence: Synthetic oligonucleotide
  Sense strand starting at position 3545 of SEQ ID NO: 587320
agauggguugggugugaua

SEQ ID NO: 783595 - RNA, 19 nt, Artificial Sequence
  Description of Artificial Sequence: Synthetic oligonucleotide
  Antisense strand to SEQ ID NO: 783594
uaucacacccaacccaucu

SEQ ID NO: 783596 - RNA, 19 nt, Artificial Sequence
  Description of Artificial Sequence: Synthetic oligonucleotide
  Sense strand starting at position 3557 of SEQ ID NO: 587320
ugugauauaugggugguaa

SEQ ID NO: 783597 - RNA, 19 nt, Artificial Sequence
  Description of Artificial Sequence: Synthetic oligonucleotide
  Antisense strand to SEQ ID NO: 783596
uuaccacccauauaucaca

SEQ ID NO: 783598 - RNA, 19 nt, Artificial Sequence
  Description of Artificial Sequence: Synthetic oligonucleotide
  Sense strand starting at position 3558 of SEQ ID NO: 587320
gugauauaugggugguaag

SEQ ID NO: 783599 - RNA, 19 nt, Artificial Sequence
  Description of Artificial Sequence: Synthetic oligonucleotide
  Antisense strand to SEQ ID NO: 783598
cuuaccacccauauaucac

SEQ ID NO: 783600 - RNA, 19 nt, Artificial Sequence
  Description of Artificial Sequence: Synthetic oligonucleotide
  Sense strand starting at position 3639 of SEQ ID NO: 587320
gcagaaauauuggcugauc

SEQ ID NO: 783601 - RNA, 19 nt, Artificial Sequence
  Description of Artificial Sequence: Synthetic oligonucleotide
  Antisense strand to SEQ ID NO: 783600
gaucagccaauauuucugc

SEQ ID NO: 783602 - RNA, 19 nt, Artificial Sequence
  Description of Artificial Sequence: Synthetic oligonucleotide
  Sense strand starting at position 3641 of SEQ ID NO: 587320
agaaauauuggcugaucau

SEQ ID NO: 783603 - RNA, 19 nt, Artificial Sequence
  Description of Artificial Sequence: Synthetic oligonucleotide
  Antisense strand to SEQ ID NO: 783602
augaucagccaauauuucu

SEQ ID NO: 783604 - RNA, 19 nt, Artificial Sequence
  Description of Artificial Sequence: Synthetic oligonucleotide
  Sense strand starting at position 3647 of SEQ ID NO: 587320
auuggcugaucaucuaaua

SEQ ID NO: 783605 - RNA, 19 nt, Artificial Sequence
  Description of Artificial Sequence: Synthetic oligonucleotide
  Antisense strand to SEQ ID NO: 783604
uauuagaugaucagccaau

SEQ ID NO: 783606 - RNA, 19 nt, Artificial Sequence
  Description of Artificial Sequence: Synthetic oligonucleotide
  Sense strand starting at position 3658 of SEQ ID NO: 587320
aucuaauauccugaggcuu

SEQ ID NO: 783607 - RNA, 19 nt, Artificial Sequence
  Description of Artificial Sequence: Synthetic oligonucleotide
  Antisense strand to SEQ ID NO: 783606
aagccucaggauauuagau

SEQ ID NO: 783608 - RNA, 19 nt, Artificial Sequence
  Description of Artificial Sequence: Synthetic oligonucleotide
  Sense strand starting at position 136 of SEQ ID NO: 587321
aggugaauaugagucacua

SEQ ID NO: 783609 - RNA, 19 nt, Artificial Sequence
  Description of Artificial Sequence: Synthetic oligonucleotide
  Antisense strand to SEQ ID NO: 783608
uagugacucauauucaccu

SEQ ID NO: 783610 - RNA, 19 nt, Artificial Sequence
  Description of Artificial Sequence: Synthetic oligonucleotide
  Sense strand starting at position 328 of SEQ ID NO: 587321
auuggcuuccaugagauca

SEQ ID NO: 783611 - RNA, 19 nt, Artificial Sequence
  Description of Artificial Sequence: Synthetic oligonucleotide
  Antisense strand to SEQ ID NO: 783610
ugaucucauggaagccaau

SEQ ID NO: 783612 - RNA, 19 nt, Artificial Sequence
  Description of Artificial Sequence: Synthetic oligonucleotide
  Sense strand starting at position 333 of SEQ ID NO: 587321
cuuccaugagaucauuguu

SEQ ID NO: 783613 - RNA, 19 nt, Artificial Sequence
  Description of Artificial Sequence: Synthetic oligonucleotide
  Antisense strand to SEQ ID NO: 783612
aacaaugaucucauggaag

SEQ ID NO: 783614 - RNA, 19 nt, Artificial Sequence
  Description of Artificial Sequence: Synthetic oligonucleotide
  Sense strand starting at position 362 of SEQ ID NO: 587321
gacaaucagugcuugcuaa

SEQ ID NO: 783615 - RNA, 19 nt, Artificial Sequence
  Description of Artificial Sequence: Synthetic oligonucleotide
  Antisense strand to SEQ ID NO: 783614
uuagcaagcacugauuguc

SEQ ID NO: 783616 - RNA, 19 nt, Artificial Sequence
  Description of Artificial Sequence: Synthetic oligonucleotide
  Sense strand starting at position 587 of SEQ ID NO: 587321
aguuaaguguccuugggag

SEQ ID NO: 783617 - RNA, 19 nt, Artificial Sequence
  Description of Artificial Sequence: Synthetic oligonucleotide
  Antisense strand to SEQ ID NO: 783616
cucccaaggacacuuaacu

SEQ ID NO: 783618 - RNA, 19 nt, Artificial Sequence
  Description of Artificial Sequence: Synthetic oligonucleotide
  Sense strand starting at position 961 of SEQ ID NO: 587321
uggagacuaugagcauuaa

SEQ ID NO: 783619 - RNA, 19 nt, Artificial Sequence
  Description of Artificial Sequence: Synthetic oligonucleotide
  Antisense strand to SEQ ID NO: 783618
uuaaugcucauagucucca

SEQ ID NO: 783620 - RNA, 19 nt, Artificial Sequence
  Description of Artificial Sequence: Synthetic oligonucleotide
  Sense strand starting at position 1089 of SEQ ID NO: 587321
gaguuaaugcuuuauugaa

SEQ ID NO: 783621 - RNA, 19 nt, Artificial Sequence
  Description of Artificial Sequence: Synthetic oligonucleotide
  Antisense strand to SEQ ID NO: 783620
uucaauaaagcauuaacuc

SEQ ID NO: 783622 - RNA, 19 nt, Artificial Sequence
  Description of Artificial Sequence: Synthetic oligonucleotide
  Sense strand starting at position 1091 of SEQ ID NO: 587321
guuaaugcuuuauugaagu

SEQ ID NO: 783623 - RNA, 19 nt, Artificial Sequence
  Description of Artificial Sequence: Synthetic oligonucleotide
  Antisense strand to SEQ ID NO: 783622
acuucaauaaagcauuaac

SEQ ID NO: 783624 - RNA, 19 nt, Artificial Sequence
  Description of Artificial Sequence: Synthetic oligonucleotide
  Sense strand starting at position 1125 of SEQ ID NO: 587321
guauuaccuuuguuaucca

SEQ ID NO: 783625 - RNA, 19 nt, Artificial Sequence
  Description of Artificial Sequence: Synthetic oligonucleotide
  Antisense strand to SEQ ID NO: 783624
uggauaacaaagguaauac

SEQ ID NO: 783626 - RNA, 19 nt, Artificial Sequence
  Description of Artificial Sequence: Synthetic oligonucleotide
  Sense strand starting at position 1182 of SEQ ID NO: 587321
acauauugcuagucagaau

SEQ ID NO: 783627 - RNA, 19 nt, Artificial Sequence
  Description of Artificial Sequence: Synthetic oligonucleotide
  Antisense strand to SEQ ID NO: 783626
auucugacuagcaauaugu

SEQ ID NO: 783628 - RNA, 19 nt, Artificial Sequence
  Description of Artificial Sequence: Synthetic oligonucleotide
  Sense strand starting at position 1223 of SEQ ID NO: 587321
uuauaaauucgauggccau

SEQ ID NO: 783629 - RNA, 19 nt, Artificial Sequence
  Description of Artificial Sequence: Synthetic oligonucleotide
  Antisense strand to SEQ ID NO: 783628
auggccaucgaauuuauaa

SEQ ID NO: 783630 - RNA, 19 nt, Artificial Sequence
  Description of Artificial Sequence: Synthetic oligonucleotide
  Sense strand starting at position 1229 of SEQ ID NO: 587321
auucgauggccaugagaag

SEQ ID NO: 783631 - RNA, 19 nt, Artificial Sequence
  Description of Artificial Sequence: Synthetic oligonucleotide
  Antisense strand to SEQ ID NO: 783630
cuucucauggccaucgaau

SEQ ID NO: 783632 - RNA, 19 nt, Artificial Sequence
  Description of Artificial Sequence: Synthetic oligonucleotide
  Sense strand starting at position 1230 of SEQ ID NO: 587321
uucgauggccaugagaagu

SEQ ID NO: 783633 - RNA, 19 nt, Artificial Sequence
  Description of Artificial Sequence: Synthetic oligonucleotide
  Antisense strand to SEQ ID NO: 783632
acuucucauggccaucgaa

SEQ ID NO: 783634 - RNA, 19 nt, Artificial Sequence
  Description of Artificial Sequence: Synthetic oligonucleotide
  Sense strand starting at position 1236 of SEQ ID NO: 587321
ggccaugagaaguguuuac

SEQ ID NO: 783635 - RNA, 19 nt, Artificial Sequence
  Description of Artificial Sequence: Synthetic oligonucleotide
  Antisense strand to SEQ ID NO: 783634
guaaacacuucucauggcc

SEQ ID NO: 783636 - RNA, 19 nt, Artificial Sequence
  Description of Artificial Sequence: Synthetic oligonucleotide
  Sense strand starting at position 1267 of SEQ ID NO: 587321
acguuauagguuuagacua

SEQ ID NO: 783637 - RNA, 19 nt, Artificial Sequence
  Description of Artificial Sequence: Synthetic oligonucleotide
  Antisense strand to SEQ ID NO: 783636
uagucuaaaccuauaacgu

SEQ ID NO: 783638 - RNA, 19 nt, Artificial Sequence
  Description of Artificial Sequence: Synthetic oligonucleotide
  Sense strand starting at position 1275 of SEQ ID NO: 587321
gguuuagacuaauuacaua

SEQ ID NO: 783639 - RNA, 19 nt, Artificial Sequence
  Description of Artificial Sequence: Synthetic oligonucleotide
  Antisense strand to SEQ ID NO: 783638
uauguaauuagucuaaacc

SEQ ID NO: 783640 - RNA, 19 nt, Artificial Sequence
  Description of Artificial Sequence: Synthetic oligonucleotide
  Sense strand starting at position 1403 of SEQ ID NO: 587321
gucagaauaguaggaauua

SEQ ID NO: 783641 - RNA, 19 nt, Artificial Sequence
  Description of Artificial Sequence: Synthetic oligonucleotide
  Antisense strand to SEQ ID NO: 783640
uaauuccuacuauucugac

SEQ ID NO: 783642 - RNA, 19 nt, Artificial Sequence
  Description of Artificial Sequence: Synthetic oligonucleotide
  Sense strand starting at position 1518 of SEQ ID NO: 587321
aguagaagaucugcuagaa

SEQ ID NO: 783643 - RNA, 19 nt, Artificial Sequence
  Description of Artificial Sequence: Synthetic oligonucleotide
  Antisense strand to SEQ ID NO: 783642
uucuagcagaucuucuacu

SEQ ID NO: 783644 - RNA, 19 nt, Artificial Sequence
  Description of Artificial Sequence: Synthetic oligonucleotide
  Sense strand starting at position 1545 of SEQ ID NO: 587321
cugauagcugguggaacau

SEQ ID NO: 783645 - RNA, 19 nt, Artificial Sequence
  Description of Artificial Sequence: Synthetic oligonucleotide
  Antisense strand to SEQ ID NO: 783644
auguuccaccagcuaucag

SEQ ID NO: 783646 - RNA, 19 nt, Artificial Sequence
  Description of Artificial Sequence: Synthetic oligonucleotide
  Sense strand starting at position 1623 of SEQ ID NO: 587321
cucuaagaguucguaaaga

SEQ ID NO: 783647 - RNA, 19 nt, Artificial Sequence
  Description of Artificial Sequence: Synthetic oligonucleotide
  Antisense strand to SEQ ID NO: 783646
ucuuuacgaacucuuagag

SEQ ID NO: 783648 - RNA, 19 nt, Artificial Sequence
  Description of Artificial Sequence: Synthetic oligonucleotide
  Sense strand starting at position 1986 of SEQ ID NO: 587321
ggcugcuugagaggcaaau

SEQ ID NO: 783649 - RNA, 19 nt, Artificial Sequence
  Description of Artificial Sequence: Synthetic oligonucleotide
  Antisense strand to SEQ ID NO: 783648
auuugccucucaagcagcc

SEQ ID NO: 783650 - RNA, 19 nt, Artificial Sequence
  Description of Artificial Sequence: Synthetic oligonucleotide
  Sense strand starting at position 2048 of SEQ ID NO: 587321
ccucucugauagguugaau

SEQ ID NO: 783651 - RNA, 19 nt, Artificial Sequence
  Description of Artificial Sequence: Synthetic oligonucleotide
  Antisense strand to SEQ ID NO: 783650
auucaaccuaucagagagg

SEQ ID NO: 783652 - RNA, 19 nt, Artificial Sequence
  Description of Artificial Sequence: Synthetic oligonucleotide
  Sense strand starting at position 2059 of SEQ ID NO: 587321
gguugaauccuacggaauc

SEQ ID NO: 783653 - RNA, 19 nt, Artificial Sequence
  Description of Artificial Sequence: Synthetic oligonucleotide
  Antisense strand to SEQ ID NO: 783652
gauuccguaggauucaacc

SEQ ID NO: 783654 - RNA, 19 nt, Artificial Sequence
  Description of Artificial Sequence: Synthetic oligonucleotide
  Sense strand starting at position 2107 of SEQ ID NO: 587321
gugcauuuccaagaguguc

SEQ ID NO: 783655 - RNA, 19 nt, Artificial Sequence
  Description of Artificial Sequence: Synthetic oligonucleotide
  Antisense strand to SEQ ID NO: 783654
gacacucuuggaaaugcac

SEQ ID NO: 783656 - RNA, 19 nt, Artificial Sequence
  Description of Artificial Sequence: Synthetic oligonucleotide
  Sense strand starting at position 2115 of SEQ ID NO: 587321
ccaagagugucaucuagac

SEQ ID NO: 783657 - RNA, 19 nt, Artificial Sequence
  Description of Artificial Sequence: Synthetic oligonucleotide
  Antisense strand to SEQ ID NO: 783656
gucuagaugacacucuugg

SEQ ID NO: 783658 - RNA, 19 nt, Artificial Sequence
  Description of Artificial Sequence: Synthetic oligonucleotide
  Sense strand starting at position 2178 of SEQ ID NO: 587321
aggacuuuaugagcuauag

SEQ ID NO: 783659 - RNA, 19 nt, Artificial Sequence
  Description of Artificial Sequence: Synthetic oligonucleotide
  Antisense strand to SEQ ID NO: 783658
cuauagcucauaaaguccu

SEQ ID NO: 783660 - RNA, 19 nt, Artificial Sequence
  Description of Artificial Sequence: Synthetic oligonucleotide
  Sense strand starting at position 2189 of SEQ ID NO: 587321
agcuauagagaguagcaau

SEQ ID NO: 783661 - RNA, 19 nt, Artificial Sequence
  Description of Artificial Sequence: Synthetic oligonucleotide
  Antisense strand to SEQ ID NO: 783660
auugcuacucucuauagcu

SEQ ID NO: 783662 - RNA, 19 nt, Artificial Sequence
  Description of Artificial Sequence: Synthetic oligonucleotide
  Sense strand starting at position 2236 of SEQ ID NO: 587321
gcugauacagcagaaucaa

SEQ ID NO: 783663 - RNA, 19 nt, Artificial Sequence
  Description of Artificial Sequence: Synthetic oligonucleotide
  Antisense strand to SEQ ID NO: 783662
uugauucugcuguaucagc

SEQ ID NO: 783664 - RNA, 19 nt, Artificial Sequence
  Description of Artificial Sequence: Synthetic oligonucleotide
  Sense strand starting at position 2258 of SEQ ID NO: 587321
cacucaugagucuagguga

SEQ ID NO: 783665 - RNA, 19 nt, Artificial Sequence
  Description of Artificial Sequence: Synthetic oligonucleotide
  Antisense strand to SEQ ID NO: 783664
ucaccuagacucaugagug

SEQ ID NO: 783666 - RNA, 19 nt, Artificial Sequence
  Description of Artificial Sequence: Synthetic oligonucleotide
  Sense strand starting at position 2261 of SEQ ID NO: 587321
ucaugagucuaggugaaau

SEQ ID NO: 783667 - RNA, 19 nt, Artificial Sequence
  Description of Artificial Sequence: Synthetic oligonucleotide
  Antisense strand to SEQ ID NO: 783666
auuucaccuagacucauga

SEQ ID NO: 783668 - RNA, 19 nt, Artificial Sequence
  Description of Artificial Sequence: Synthetic oligonucleotide
  Sense strand starting at position 2334 of SEQ ID NO: 587321
aaauguuuacacuggguau

SEQ ID NO: 783669 - RNA, 19 nt, Artificial Sequence
  Description of Artificial Sequence: Synthetic oligonucleotide
  Antisense strand to SEQ ID NO: 783668
auacccaguguaaacauuu

SEQ ID NO: 783670 - RNA, 19 nt, Artificial Sequence
  Description of Artificial Sequence: Synthetic oligonucleotide
  Sense strand starting at position 2412 of SEQ ID NO: 587321
ccacauuuauaggguaaac

SEQ ID NO: 783671 - RNA, 19 nt, Artificial Sequence
  Description of Artificial Sequence: Synthetic oligonucleotide
  Antisense strand to SEQ ID NO: 783670
guuuacccuauaaaugugg

SEQ ID NO: 783672 - RNA, 19 nt, Artificial Sequence
  Description of Artificial Sequence: Synthetic oligonucleotide
  Sense strand starting at position 2551 of SEQ ID NO: 587321
uuacaauggcuaggguuua

SEQ ID NO: 783673 - RNA, 19 nt, Artificial Sequence
  Description of Artificial Sequence: Synthetic oligonucleotide
  Antisense strand to SEQ ID NO: 783672
uaaacccuagccauuguaa

SEQ ID NO: 783674 - RNA, 19 nt, Artificial Sequence
  Description of Artificial Sequence: Synthetic oligonucleotide
  Sense strand starting at position 2609 of SEQ ID NO: 587321
uuccaaggccuuuagaaau

SEQ ID NO: 783675 - RNA, 19 nt, Artificial Sequence
  Description of Artificial Sequence: Synthetic oligonucleotide
  Antisense strand to SEQ ID NO: 783674
auuucuaaaggccuuggaa

SEQ ID NO: 783676 - RNA, 19 nt, Artificial Sequence
  Description of Artificial Sequence: Synthetic oligonucleotide
  Sense strand starting at position 3066 of SEQ ID NO: 587321
ccaugugugacccaguacu

SEQ ID NO: 783677 - RNA, 19 nt, Artificial Sequence
  Description of Artificial Sequence: Synthetic oligonucleotide
  Antisense strand to SEQ ID NO: 783676
aguacugggucacacaugg

SEQ ID NO: 783678 - RNA, 19 nt, Artificial Sequence
  Description of Artificial Sequence: Synthetic oligonucleotide
  Sense strand starting at position 3077 of SEQ ID NO: 587321
ccaguacuucugggaugcu

SEQ ID NO: 783679 - RNA, 19 nt, Artificial Sequence
  Description of Artificial Sequence: Synthetic oligonucleotide
  Antisense strand to SEQ ID NO: 783678
agcaucccagaaguacugg

SEQ ID NO: 783680 - RNA, 19 nt, Artificial Sequence
  Description of Artificial Sequence: Synthetic oligonucleotide
  Sense strand starting at position 3087 of SEQ ID NO: 587321
ugggaugcugggcaagaau

SEQ ID NO: 783681 - RNA, 19 nt, Artificial Sequence
  Description of Artificial Sequence: Synthetic oligonucleotide
  Antisense strand to SEQ ID NO: 783680
auucuugcccagcauccca

SEQ ID NO: 783682 - RNA, 19 nt, Artificial Sequence
  Description of Artificial Sequence: Synthetic oligonucleotide
  Sense strand starting at position 3169 of SEQ ID NO: 587321
gcuuguuaacaucaagcca

SEQ ID NO: 783683 - RNA, 19 nt, Artificial Sequence
  Description of Artificial Sequence: Synthetic oligonucleotide
  Antisense strand to SEQ ID NO: 783682
uggcuugauguuaacaagc

SEQ ID NO: 783684 - RNA, 19 nt, Artificial Sequence
  Description of Artificial Sequence: Synthetic oligonucleotide
  Sense strand starting at position 3395 of SEQ ID NO: 587321
gcugucugauaccugaacu

SEQ ID NO: 783685 - RNA, 19 nt, Artificial Sequence
  Description of Artificial Sequence: Synthetic oligonucleotide
  Antisense strand to SEQ ID NO: 783684
aguucagguaucagacagc

SEQ ID NO: 783686 - RNA, 19 nt, Artificial Sequence
  Description of Artificial Sequence: Synthetic oligonucleotide
  Sense strand starting at position 3647 of SEQ ID NO: 587321
ugagucucaucacuauugu

SEQ ID NO: 783687 - RNA, 19 nt, Artificial Sequence
  Description of Artificial Sequence: Synthetic oligonucleotide
  Antisense strand to SEQ ID NO: 783686
acaauagugaugagacuca

SEQ ID NO: 783688 - RNA, 19 nt, Artificial Sequence
  Description of Artificial Sequence: Synthetic oligonucleotide
  Sense strand starting at position 62 of SEQ ID NO: 587322
guuggaauggcaugggaua

SEQ ID NO: 783689 - RNA, 19 nt, Artificial Sequence
  Description of Artificial Sequence: Synthetic oligonucleotide
  Antisense strand to SEQ ID NO: 783688
uaucccaugccauuccaac

SEQ ID NO: 783690 - RNA, 19 nt, Artificial Sequence
  Description of Artificial Sequence: Synthetic oligonucleotide
  Sense strand starting at position 63 of SEQ ID NO: 587322
uuggaauggcaugggauau

SEQ ID NO: 783691 - RNA, 19 nt, Artificial Sequence
  Description of Artificial Sequence: Synthetic oligonucleotide
  Antisense strand to SEQ ID NO: 783690
auaucccaugccauuccaa

SEQ ID NO: 783692 - RNA, 19 nt, Artificial Sequence
  Description of Artificial Sequence: Synthetic oligonucleotide
  Sense strand starting at position 64 of SEQ ID NO: 587322
uggaauggcaugggauaua

SEQ ID NO: 783693 - RNA, 19 nt, Artificial Sequence
  Description of Artificial Sequence: Synthetic oligonucleotide
  Antisense strand to SEQ ID NO: 783692
uauaucccaugccauucca

SEQ ID NO: 783694 - RNA, 19 nt, Artificial Sequence
  Description of Artificial Sequence: Synthetic oligonucleotide
  Sense strand starting at position 209 of SEQ ID NO: 587322
caggcaaaguaucuuaaag

SEQ ID NO: 783695 - RNA, 19 nt, Artificial Sequence
  Description of Artificial Sequence: Synthetic oligonucleotide
  Antisense strand to SEQ ID NO: 783694
cuuuaagauacuuugccug

SEQ ID NO: 783696 - RNA, 19 nt, Artificial Sequence
  Description of Artificial Sequence: Synthetic oligonucleotide
  Sense strand starting at position 219 of SEQ ID NO: 587322
aucuuaaaggguugacuca

SEQ ID NO: 783697 - RNA, 19 nt, Artificial Sequence
  Description of Artificial Sequence: Synthetic oligonucleotide
  Antisense strand to SEQ ID NO: 783696
ugagucaacccuuuaagau

SEQ ID NO: 783698 - RNA, 19 nt, Artificial Sequence
  Description of Artificial Sequence: Synthetic oligonucleotide
  Sense strand starting at position 269 of SEQ ID NO: 587322
ccuagugauuuagcucuca

SEQ ID NO: 783699 - RNA, 19 nt, Artificial Sequence
  Description of Artificial Sequence: Synthetic oligonucleotide
  Antisense strand to SEQ ID NO: 783698
ugagagcuaaaucacuagg

SEQ ID NO: 783700 - RNA, 19 nt, Artificial Sequence
  Description of Artificial Sequence: Synthetic oligonucleotide
  Sense strand starting at position 452 of SEQ ID NO: 587322
uuacaauguucuccaagag

SEQ ID NO: 783701 - RNA, 19 nt, Artificial Sequence
  Description of Artificial Sequence: Synthetic oligonucleotide
  Antisense strand to SEQ ID NO: 783700
cucuuggagaacauuguaa

SEQ ID NO: 783702 - RNA, 19 nt, Artificial Sequence
  Description of Artificial Sequence: Synthetic oligonucleotide
  Sense strand starting at position 522 of SEQ ID NO: 587322
acaguaggcaaggguuaaa

SEQ ID NO: 783703 - RNA, 19 nt, Artificial Sequence
  Description of Artificial Sequence: Synthetic oligonucleotide
  Antisense strand to SEQ ID NO: 783702
uuuaacccuugccuacugu

SEQ ID NO: 783704 - RNA, 19 nt, Artificial Sequence
  Description of Artificial Sequence: Synthetic oligonucleotide
  Sense strand starting at position 525 of SEQ ID NO: 587322
guaggcaaggguuaaagau

SEQ ID NO: 783705 - RNA, 19 nt, Artificial Sequence
  Description of Artificial Sequence: Synthetic oligonucleotide
  Antisense strand to SEQ ID NO: 783704
aucuuuaacccuugccuac

SEQ ID NO: 783706 - RNA, 19 nt, Artificial Sequence
  Description of Artificial Sequence: Synthetic oligonucleotide
  Sense strand starting at position 532 of SEQ ID NO: 587322
aggguuaaagauggaugua

SEQ ID NO: 783707 - RNA, 19 nt, Artificial Sequence
  Description of Artificial Sequence: Synthetic oligonucleotide
  Antisense strand to SEQ ID NO: 783706
uacauccaucuuuaacccu

SEQ ID NO: 783708 - RNA, 19 nt, Artificial Sequence
  Description of Artificial Sequence: Synthetic oligonucleotide
  Sense strand starting at position 551 of SEQ ID NO: 587322
gugacuuucccagagcaaa

SEQ ID NO: 783709 - RNA, 19 nt, Artificial Sequence
  Description of Artificial Sequence: Synthetic oligonucleotide
  Antisense strand to SEQ ID NO: 783708
uuugcucugggaaagucac

SEQ ID NO: 783710 - RNA, 19 nt, Artificial Sequence
  Description of Artificial Sequence: Synthetic oligonucleotide
  Sense strand starting at position 641 of SEQ ID NO: 587322
gauaacuuagugugggauu

SEQ ID NO: 783711 - RNA, 19 nt, Artificial Sequence
  Description of Artificial Sequence: Synthetic oligonucleotide
  Antisense strand to SEQ ID NO: 783710
aaucccacacuaaguuauc

SEQ ID NO: 783712 - RNA, 19 nt, Artificial Sequence
  Description of Artificial Sequence: Synthetic oligonucleotide
  Sense strand starting at position 993 of SEQ ID NO: 587322
aauuauucuguggauaguu

SEQ ID NO: 783713 - RNA, 19 nt, Artificial Sequence
  Description of Artificial Sequence: Synthetic oligonucleotide
  Antisense strand to SEQ ID NO: 783712
aacuauccacagaauaauu

SEQ ID NO: 783714 - RNA, 19 nt, Artificial Sequence
  Description of Artificial Sequence: Synthetic oligonucleotide
  Sense strand starting at position 1029 of SEQ ID NO: 587322
uuguaaugaucacuuagga

SEQ ID NO: 783715 - RNA, 19 nt, Artificial Sequence
  Description of Artificial Sequence: Synthetic oligonucleotide
  Antisense strand to SEQ ID NO: 783714
uccuaagugaucauuacaa

SEQ ID NO: 783716 - RNA, 19 nt, Artificial Sequence
  Description of Artificial Sequence: Synthetic oligonucleotide
  Sense strand starting at position 1226 of SEQ ID NO: 587322
ccaccuuggcaguauuaaa

SEQ ID NO: 783717 - RNA, 19 nt, Artificial Sequence
  Description of Artificial Sequence: Synthetic oligonucleotide
  Antisense strand to SEQ ID NO: 783716
uuuaauacugccaaggugg

SEQ ID NO: 783718 - RNA, 19 nt, Artificial Sequence
  Description of Artificial Sequence: Synthetic oligonucleotide
  Sense strand starting at position 1437 of SEQ ID NO: 587322
uuccuauugcucuagagau

SEQ ID NO: 783719 - RNA, 19 nt, Artificial Sequence
  Description of Artificial Sequence: Synthetic oligonucleotide
  Antisense strand to SEQ ID NO: 783718
aucucuagagcaauaggaa

SEQ ID NO: 783720 - RNA, 19 nt, Artificial Sequence
  Description of Artificial Sequence: Synthetic oligonucleotide
  Sense strand starting at position 1556 of SEQ ID NO: 587322
ggaugaugguagaagugaa

SEQ ID NO: 783721 - RNA, 19 nt, Artificial Sequence
  Description of Artificial Sequence: Synthetic oligonucleotide
  Antisense strand to SEQ ID NO: 783720
uucacuucuaccaucaucc

SEQ ID NO: 783722 - RNA, 19 nt, Artificial Sequence
  Description of Artificial Sequence: Synthetic oligonucleotide
  Sense strand starting at position 1680 of SEQ ID NO: 587322
ugaagauaagcccgacaca

SEQ ID NO: 783723 - RNA, 19 nt, Artificial Sequence
  Description of Artificial Sequence: Synthetic oligonucleotide
  Antisense strand to SEQ ID NO: 783722
ugugucgggcuuaucuuca

SEQ ID NO: 783724 - RNA, 19 nt, Artificial Sequence
  Description of Artificial Sequence: Synthetic oligonucleotide
  Sense strand starting at position 1843 of SEQ ID NO: 587322
gacugauuacuugggugag

SEQ ID NO: 783725 - RNA, 19 nt, Artificial Sequence
  Description of Artificial Sequence: Synthetic oligonucleotide
  Antisense strand to SEQ ID NO: 783724
cucacccaaguaaucaguc

SEQ ID NO: 783726 - RNA, 19 nt, Artificial Sequence
  Description of Artificial Sequence: Synthetic oligonucleotide
  Sense strand starting at position 1993 of SEQ ID NO: 587322
ugugccuuaagguagagaa

SEQ ID NO: 783727 - RNA, 19 nt, Artificial Sequence
  Description of Artificial Sequence: Synthetic oligonucleotide
  Antisense strand to SEQ ID NO: 783726
uucucuaccuuaaggcaca

SEQ ID NO: 783728 - RNA, 19 nt, Artificial Sequence
  Description of Artificial Sequence: Synthetic oligonucleotide
  Sense strand starting at position 2006 of SEQ ID NO: 587322
agagaaauguacuuuguuu

SEQ ID NO: 783729 - RNA, 19 nt, Artificial Sequence
  Description of Artificial Sequence: Synthetic oligonucleotide
  Antisense strand to SEQ ID NO: 783728
aaacaaaguacauuucucu

SEQ ID NO: 783730 - RNA, 19 nt, Artificial Sequence
  Description of Artificial Sequence: Synthetic oligonucleotide
  Sense strand starting at position 2077 of SEQ ID NO: 587322
gguuaauuccuacaggcaa

SEQ ID NO: 783731 - RNA, 19 nt, Artificial Sequence
  Description of Artificial Sequence: Synthetic oligonucleotide
  Antisense strand to SEQ ID NO: 783730
uugccuguaggaauuaacc

SEQ ID NO: 783732 - RNA, 19 nt, Artificial Sequence
  Description of Artificial Sequence: Synthetic oligonucleotide
  Sense strand starting at position 2150 of SEQ ID NO: 587322
ugauuugcacucuguuuau

SEQ ID NO: 783733 - RNA, 19 nt, Artificial Sequence
  Description of Artificial Sequence: Synthetic oligonucleotide
  Antisense strand to SEQ ID NO: 783732
auaaacagagugcaaauca

SEQ ID NO: 783734 - RNA, 19 nt, Artificial Sequence
  Description of Artificial Sequence: Synthetic oligonucleotide
  Sense strand starting at position 2195 of SEQ ID NO: 587322
gugaauaauuuagaaguag

SEQ ID NO: 783735 - RNA, 19 nt, Artificial Sequence
  Description of Artificial Sequence: Synthetic oligonucleotide
  Antisense strand to SEQ ID NO: 783734
cuacuucuaaauuauucac

SEQ ID NO: 783736 - RNA, 19 nt, Artificial Sequence
  Description of Artificial Sequence: Synthetic oligonucleotide
  Sense strand starting at position 2248 of SEQ ID NO: 587322
guuuaaaugugaucacaca

SEQ ID NO: 783737 - RNA, 19 nt, Artificial Sequence
  Description of Artificial Sequence: Synthetic oligonucleotide
  Antisense strand to SEQ ID NO: 783736
ugugugaucacauuuaaac

SEQ ID NO: 783738 - RNA, 19 nt, Artificial Sequence
  Description of Artificial Sequence: Synthetic oligonucleotide
  Sense strand starting at position 2561 of SEQ ID NO: 587322
accugugugaggcaaagau

SEQ ID NO: 783739 - RNA, 19 nt, Artificial Sequence
  Description of Artificial Sequence: Synthetic oligonucleotide
  Antisense strand to SEQ ID NO: 783738
aucuuugccucacacaggu

SEQ ID NO: 783740 - RNA, 19 nt, Artificial Sequence
  Description of Artificial Sequence: Synthetic oligonucleotide
  Sense strand starting at position 2870 of SEQ ID NO: 587322
uugagauacuaguuaugua

SEQ ID NO: 783741 - RNA, 19 nt, Artificial Sequence
  Description of Artificial Sequence: Synthetic oligonucleotide
  Antisense strand to SEQ ID NO: 783740
uacauaacuaguaucucaa

SEQ ID NO: 783742 - RNA, 19 nt, Artificial Sequence
  Description of Artificial Sequence: Synthetic oligonucleotide
  Sense strand starting at position 3090 of SEQ ID NO: 587322
ugacuuauauggccuggaa

SEQ ID NO: 783743 - RNA, 19 nt, Artificial Sequence
  Description of Artificial Sequence: Synthetic oligonucleotide
  Antisense strand to SEQ ID NO: 783742
uuccaggccauauaaguca

SEQ ID NO: 783744 - RNA, 19 nt, Artificial Sequence
  Description of Artificial Sequence: Synthetic oligonucleotide
  Sense strand starting at position 3092 of SEQ ID NO: 587322
acuuauauggccuggaaac

SEQ ID NO: 783745 - RNA, 19 nt, Artificial Sequence
  Description of Artificial Sequence: Synthetic oligonucleotide
  Antisense strand to SEQ ID NO: 783744
guuuccaggccauauaagu

SEQ ID NO: 783746 - RNA, 19 nt, Artificial Sequence
  Description of Artificial Sequence: Synthetic oligonucleotide
  Sense strand starting at position 3093 of SEQ ID NO: 587322
cuuauauggccuggaaaca

SEQ ID NO: 783747 - RNA, 19 nt, Artificial Sequence
  Description of Artificial Sequence: Synthetic oligonucleotide
  Antisense strand to SEQ ID NO: 783746
uguuuccaggccauauaag

SEQ ID NO: 783748 - RNA, 19 nt, Artificial Sequence
  Description of Artificial Sequence: Synthetic oligonucleotide
  Sense strand starting at position 3234 of SEQ ID NO: 587322
ccuguaauccuguaauuga

SEQ ID NO: 783749 - RNA, 19 nt, Artificial Sequence
  Description of Artificial Sequence: Synthetic oligonucleotide
  Antisense strand to SEQ ID NO: 783748
ucaauuacaggauuacagg

SEQ ID NO: 783750 - RNA, 19 nt, Artificial Sequence
  Description of Artificial Sequence: Synthetic oligonucleotide
  Sense strand starting at position 3262 of SEQ ID NO: 587322
gaacuuuggguauaagcau

SEQ ID NO: 783751 - RNA, 19 nt, Artificial Sequence
  Description of Artificial Sequence: Synthetic oligonucleotide
  Antisense strand to SEQ ID NO: 783750
augcuuauacccaaaguuc

SEQ ID NO: 783752 - RNA, 19 nt, Artificial Sequence
  Description of Artificial Sequence: Synthetic oligonucleotide
  Sense strand starting at position 3270 of SEQ ID NO: 587322
gguauaagcauagaagcua

SEQ ID NO: 783753 - RNA, 19 nt, Artificial Sequence
  Description of Artificial Sequence: Synthetic oligonucleotide
  Antisense strand to SEQ ID NO: 783752
uagcuucuaugcuuauacc

SEQ ID NO: 783754 - RNA, 19 nt, Artificial Sequence
  Description of Artificial Sequence: Synthetic oligonucleotide
  Sense strand starting at position 3315 of SEQ ID NO: 587322
gccagccugugacuaauuu

SEQ ID NO: 783755 - RNA, 19 nt, Artificial Sequence
  Description of Artificial Sequence: Synthetic oligonucleotide
  Antisense strand to SEQ ID NO: 783754
aaauuagucacaggcuggc

SEQ ID NO: 783756 - RNA, 19 nt, Artificial Sequence
  Description of Artificial Sequence: Synthetic oligonucleotide
  Sense strand starting at position 3531 of SEQ ID NO: 587322
gugcuauguaagcucugua

SEQ ID NO: 783757 - RNA, 19 nt, Artificial Sequence
  Description of Artificial Sequence: Synthetic oligonucleotide
  Antisense strand to SEQ ID NO: 783756
uacagagcuuacauagcac

SEQ ID NO: 783758 - RNA, 19 nt, Artificial Sequence
  Description of Artificial Sequence: Synthetic oligonucleotide
  Sense strand starting at position 3536 of SEQ ID NO: 587322
auguaagcucuguaagaga

SEQ ID NO: 783759 - RNA, 19 nt, Artificial Sequence
  Description of Artificial Sequence: Synthetic oligonucleotide
  Antisense strand to SEQ ID NO: 783758
ucucuuacagagcuuacau

SEQ ID NO: 783760 - RNA, 19 nt, Artificial Sequence
  Description of Artificial Sequence: Synthetic oligonucleotide
  Sense strand starting at position 3544 of SEQ ID NO: 587322
ucuguaagagaauguggaa

SEQ ID NO: 783761 - RNA, 19 nt, Artificial Sequence
  Description of Artificial Sequence: Synthetic oligonucleotide
  Antisense strand to SEQ ID NO: 783760
uuccacauucucuuacaga

SEQ ID NO: 783762 - RNA, 19 nt, Artificial Sequence
  Description of Artificial Sequence: Synthetic oligonucleotide
  Sense strand starting at position 3762 of SEQ ID NO: 587322
gccaacgaaucauuaauaa

SEQ ID NO: 783763 - RNA, 19 nt, Artificial Sequence
  Description of Artificial Sequence: Synthetic oligonucleotide
  Antisense strand to SEQ ID NO: 783762
uuauuaaugauucguuggc

SEQ ID NO: 783764 - RNA, 19 nt, Artificial Sequence
  Description of Artificial Sequence: Synthetic oligonucleotide
  Sense strand starting at position 3844 of SEQ ID NO: 587322
uuugucacaggucagaaua

SEQ ID NO: 783765 - RNA, 19 nt, Artificial Sequence
  Description of Artificial Sequence: Synthetic oligonucleotide
  Antisense strand to SEQ ID NO: 783764
uauucugaccugugacaaa

SEQ ID NO: 783766 - RNA, 19 nt, Artificial Sequence
  Description of Artificial Sequence: Synthetic oligonucleotide
  Sense strand starting at position 3937 of SEQ ID NO: 587322
ugacaauagaguggcauua

SEQ ID NO: 783767 - RNA, 19 nt, Artificial Sequence
  Description of Artificial Sequence: Synthetic oligonucleotide
  Antisense strand to SEQ ID NO: 783766
uaaugccacucuauuguca

SEQ ID NO: 783768 - RNA, 19 nt, Artificial Sequence
  Description of Artificial Sequence: Synthetic oligonucleotide
  Sense strand starting at position 48 of SEQ ID NO: 587323
uggugaaauuaaucccuaa

SEQ ID NO: 783769 - RNA, 19 nt, Artificial Sequence
  Description of Artificial Sequence: Synthetic oligonucleotide
  Antisense strand to SEQ ID NO: 783768
uuagggauuaauuucacca

SEQ ID NO: 783770 - RNA, 19 nt, Artificial Sequence
  Description of Artificial Sequence: Synthetic oligonucleotide
  Sense strand starting at position 154 of SEQ ID NO: 587323
auaccauagcaacguaauu

SEQ ID NO: 783771 - RNA, 19 nt, Artificial Sequence
  Description of Artificial Sequence: Synthetic oligonucleotide
  Antisense strand to SEQ ID NO: 783770
aauuacguugcuaugguau

SEQ ID NO: 783772 - RNA, 19 nt, Artificial Sequence
  Description of Artificial Sequence: Synthetic oligonucleotide
  Sense strand starting at position 178 of SEQ ID NO: 587323
uucggauaacuugacgaau

SEQ ID NO: 783773 - RNA, 19 nt, Artificial Sequence
  Description of Artificial Sequence: Synthetic oligonucleotide
  Antisense strand to SEQ ID NO: 783772
auucgucaaguuauccgaa

SEQ ID NO: 783774 - RNA, 19 nt, Artificial Sequence
  Description of Artificial Sequence: Synthetic oligonucleotide
  Sense strand starting at position 180 of SEQ ID NO: 587323
cggauaacuugacgaauuu

SEQ ID NO: 783775 - RNA, 19 nt, Artificial Sequence
  Description of Artificial Sequence: Synthetic oligonucleotide
  Antisense strand to SEQ ID NO: 783774
aaauucgucaaguuauccg

SEQ ID NO: 783776 - RNA, 19 nt, Artificial Sequence
  Description of Artificial Sequence: Synthetic oligonucleotide
  Sense strand starting at position 240 of SEQ ID NO: 587323
auucuuuggcuaugaucua

SEQ ID NO: 783777 - RNA, 19 nt, Artificial Sequence
  Description of Artificial Sequence: Synthetic oligonucleotide
  Antisense strand to SEQ ID NO: 783776
uagaucauagccaaagaau

SEQ ID NO: 783778 - RNA, 19 nt, Artificial Sequence
  Description of Artificial Sequence: Synthetic oligonucleotide
  Sense strand starting at position 714 of SEQ ID NO: 587323
uuauuuacaugugacaaga

SEQ ID NO: 783779 - RNA, 19 nt, Artificial Sequence
  Description of Artificial Sequence: Synthetic oligonucleotide
  Antisense strand to SEQ ID NO: 783778
ucuugucacauguaaauaa

SEQ ID NO: 783780 - RNA, 19 nt, Artificial Sequence
  Description of Artificial Sequence: Synthetic oligonucleotide
  Sense strand starting at position 735 of SEQ ID NO: 587323
agauguuaccauggcaaag

SEQ ID NO: 783781 - RNA, 19 nt, Artificial Sequence
  Description of Artificial Sequence: Synthetic oligonucleotide
  Antisense strand to SEQ ID NO: 783780
cuuugccaugguaacaucu

SEQ ID NO: 783782 - RNA, 19 nt, Artificial Sequence
  Description of Artificial Sequence: Synthetic oligonucleotide
  Sense strand starting at position 826 of SEQ ID NO: 587323
cguuuauucuaacuagacu

SEQ ID NO: 783783 - RNA, 19 nt, Artificial Sequence
  Description of Artificial Sequence: Synthetic oligonucleotide
  Antisense strand to SEQ ID NO: 783782
agucuaguuagaauaaacg

SEQ ID NO: 783784 - RNA, 19 nt, Artificial Sequence
  Description of Artificial Sequence: Synthetic oligonucleotide
  Sense strand starting at position 860 of SEQ ID NO: 587323
guuuguaaaugcucugaga

SEQ ID NO: 783785 - RNA, 19 nt, Artificial Sequence
  Description of Artificial Sequence: Synthetic oligonucleotide
  Antisense strand to SEQ ID NO: 783784
ucucagagcauuuacaaac

SEQ ID NO: 783786 - RNA, 19 nt, Artificial Sequence
  Description of Artificial Sequence: Synthetic oligonucleotide
  Sense strand starting at position 862 of SEQ ID NO: 587323
uuguaaaugcucugagaaa

SEQ ID NO: 783787 - RNA, 19 nt, Artificial Sequence
  Description of Artificial Sequence: Synthetic oligonucleotide
  Antisense strand to SEQ ID NO: 783786
uuucucagagcauuuacaa

SEQ ID NO: 783788 - RNA, 19 nt, Artificial Sequence
  Description of Artificial Sequence: Synthetic oligonucleotide
  Sense strand starting at position 960 of SEQ ID NO: 587323
gagcauauugcaugguuac

SEQ ID NO: 783789 - RNA, 19 nt, Artificial Sequence
  Description of Artificial Sequence: Synthetic oligonucleotide
  Antisense strand to SEQ ID NO: 783788
guaaccaugcaauaugcuc

SEQ ID NO: 783790 - RNA, 19 nt, Artificial Sequence
  Description of Artificial Sequence: Synthetic oligonucleotide
  Sense strand starting at position 966 of SEQ ID NO: 587323
auugcaugguuaccaaaga

SEQ ID NO: 783791 - RNA, 19 nt, Artificial Sequence
  Description of Artificial Sequence: Synthetic oligonucleotide
  Antisense strand to SEQ ID NO: 783790
ucuuugguaaccaugcaau

SEQ ID NO: 783792 - RNA, 19 nt, Artificial Sequence
  Description of Artificial Sequence: Synthetic oligonucleotide
  Sense strand starting at position 1007 of SEQ ID NO: 587323
uaaacagaguuccuguuga

SEQ ID NO: 783793 - RNA, 19 nt, Artificial Sequence
  Description of Artificial Sequence: Synthetic oligonucleotide
  Antisense strand to SEQ ID NO: 783792
ucaacaggaacucuguuua

SEQ ID NO: 783794 - RNA, 19 nt, Artificial Sequence
  Description of Artificial Sequence: Synthetic oligonucleotide
  Sense strand starting at position 1012 of SEQ ID NO: 587323
agaguuccuguugauucuu

SEQ ID NO: 783795 - RNA, 19 nt, Artificial Sequence
  Description of Artificial Sequence: Synthetic oligonucleotide
  Antisense strand to SEQ ID NO: 783794
aagaaucaacaggaacucu

SEQ ID NO: 783796 - RNA, 19 nt, Artificial Sequence
  Description of Artificial Sequence: Synthetic oligonucleotide
  Sense strand starting at position 1024 of SEQ ID NO: 587323
gauucuugggcagggaaau

SEQ ID NO: 783797 - RNA, 19 nt, Artificial Sequence
  Description of Artificial Sequence: Synthetic oligonucleotide
  Antisense strand to SEQ ID NO: 783796
auuucccugcccaagaauc

SEQ ID NO: 783798 - RNA, 19 nt, Artificial Sequence
  Description of Artificial Sequence: Synthetic oligonucleotide
  Sense strand starting at position 1025 of SEQ ID NO: 587323
auucuugggcagggaaauu

SEQ ID NO: 783799 - RNA, 19 nt, Artificial Sequence
  Description of Artificial Sequence: Synthetic oligonucleotide
  Antisense strand to SEQ ID NO: 783798
aauuucccugcccaagaau

SEQ ID NO: 783800 - RNA, 19 nt, Artificial Sequence
  Description of Artificial Sequence: Synthetic oligonucleotide
  Sense strand starting at position 1116 of SEQ ID NO: 587323
ucuucuaaacucugaagag

SEQ ID NO: 783801 - RNA, 19 nt, Artificial Sequence
  Description of Artificial Sequence: Synthetic oligonucleotide
  Antisense strand to SEQ ID NO: 783800
cucuucagaguuuagaaga

SEQ ID NO: 783802 - RNA, 19 nt, Artificial Sequence
  Description of Artificial Sequence: Synthetic oligonucleotide
  Sense strand starting at position 1338 of SEQ ID NO: 587323
aggccuucucauuacugga

SEQ ID NO: 783803 - RNA, 19 nt, Artificial Sequence
  Description of Artificial Sequence: Synthetic oligonucleotide
  Antisense strand to SEQ ID NO: 783802
uccaguaaugagaaggccu

SEQ ID NO: 783804 - RNA, 19 nt, Artificial Sequence
  Description of Artificial Sequence: Synthetic oligonucleotide
  Sense strand starting at position 1340 of SEQ ID NO: 587323
gccuucucauuacuggaga

SEQ ID NO: 783805 - RNA, 19 nt, Artificial Sequence
  Description of Artificial Sequence: Synthetic oligonucleotide
  Antisense strand to SEQ ID NO: 783804
ucuccaguaaugagaaggc

SEQ ID NO: 783806 - RNA, 19 nt, Artificial Sequence
  Description of Artificial Sequence: Synthetic oligonucleotide
  Sense strand starting at position 1355 of SEQ ID NO: 587323
gagaaagcaucuccguacu

SEQ ID NO: 783807 - RNA, 19 nt, Artificial Sequence
  Description of Artificial Sequence: Synthetic oligonucleotide
  Antisense strand to SEQ ID NO: 783806
aguacggagaugcuuucuc

SEQ ID NO: 783808 - RNA, 19 nt, Artificial Sequence
  Description of Artificial Sequence: Synthetic oligonucleotide
  Sense strand starting at position 1588 of SEQ ID NO: 587323
aagccuuugcgucaucacu

SEQ ID NO: 783809 - RNA, 19 nt, Artificial Sequence
  Description of Artificial Sequence: Synthetic oligonucleotide
  Antisense strand to SEQ ID NO: 783808
agugaugacgcaaaggcuu

SEQ ID NO: 783810 - RNA, 19 nt, Artificial Sequence
  Description of Artificial Sequence: Synthetic oligonucleotide
  Sense strand starting at position 1782 of SEQ ID NO: 587323
ggaugcaagaucuacuugu

SEQ ID NO: 783811 - RNA, 19 nt, Artificial Sequence
  Description of Artificial Sequence: Synthetic oligonucleotide
  Antisense strand to SEQ ID NO: 783810
acaaguagaucuugcaucc

SEQ ID NO: 783812 - RNA, 19 nt, Artificial Sequence
  Description of Artificial Sequence: Synthetic oligonucleotide
  Sense strand starting at position 2703 of SEQ ID NO: 587323
gcgcuucuaacucggauuu

SEQ ID NO: 783813 - RNA, 19 nt, Artificial Sequence
  Description of Artificial Sequence: Synthetic oligonucleotide
  Antisense strand to SEQ ID NO: 783812
aaauccgaguuagaagcgc

SEQ ID NO: 783814 - RNA, 19 nt, Artificial Sequence
  Description of Artificial Sequence: Synthetic oligonucleotide
  Sense strand starting at position 2739 of SEQ ID NO: 587323
cauagcugcugacuguaau

SEQ ID NO: 783815 - RNA, 19 nt, Artificial Sequence
  Description of Artificial Sequence: Synthetic oligonucleotide
  Antisense strand to SEQ ID NO: 783814
auuacagucagcagcuaug

SEQ ID NO: 783816 - RNA, 19 nt, Artificial Sequence
  Description of Artificial Sequence: Synthetic oligonucleotide
  Sense strand starting at position 2803 of SEQ ID NO: 587323
aggcuucgccacugaucuu

SEQ ID NO: 783817 - RNA, 19 nt, Artificial Sequence
  Description of Artificial Sequence: Synthetic oligonucleotide
  Antisense strand to SEQ ID NO: 783816
aagaucaguggcgaagccu

SEQ ID NO: 783818 - RNA, 19 nt, Artificial Sequence
  Description of Artificial Sequence: Synthetic oligonucleotide
  Sense strand starting at position 2875 of SEQ ID NO: 587323
aagaguaaucuccagguuu

SEQ ID NO: 783819 - RNA, 19 nt, Artificial Sequence
  Description of Artificial Sequence: Synthetic oligonucleotide
  Antisense strand to SEQ ID NO: 783818
aaaccuggagauuacucuu

SEQ ID NO: 783820 - RNA, 19 nt, Artificial Sequence
  Description of Artificial Sequence: Synthetic oligonucleotide
  Sense strand starting at position 2959 of SEQ ID NO: 587323
gaaugcuucucgucugaga

SEQ ID NO: 783821 - RNA, 19 nt, Artificial Sequence
  Description of Artificial Sequence: Synthetic oligonucleotide
  Antisense strand to SEQ ID NO: 783820
ucucagacgagaagcauuc

SEQ ID NO: 783822 - RNA, 19 nt, Artificial Sequence
  Description of Artificial Sequence: Synthetic oligonucleotide
  Sense strand starting at position 2968 of SEQ ID NO: 587323
ucgucugagagucacuuau

SEQ ID NO: 783823 - RNA, 19 nt, Artificial Sequence
  Description of Artificial Sequence: Synthetic oligonucleotide
  Antisense strand to SEQ ID NO: 783822
auaagugacucucagacga

SEQ ID NO: 783824 - RNA, 19 nt, Artificial Sequence
  Description of Artificial Sequence: Synthetic oligonucleotide
  Sense strand starting at position 2970 of SEQ ID NO: 587323
gucugagagucacuuauca

SEQ ID NO: 783825 - RNA, 19 nt, Artificial Sequence
  Description of Artificial Sequence: Synthetic oligonucleotide
  Antisense strand to SEQ ID NO: 783824
ugauaagugacucucagac

SEQ ID NO: 783826 - RNA, 19 nt, Artificial Sequence
  Description of Artificial Sequence: Synthetic oligonucleotide
  Sense strand starting at position 2974 of SEQ ID NO: 587323
gagagucacuuaucacgua

SEQ ID NO: 783827 - RNA, 19 nt, Artificial Sequence
  Description of Artificial Sequence: Synthetic oligonucleotide
  Antisense strand to SEQ ID NO: 783826
uacgugauaagugacucuc

SEQ ID NO: 783828 - RNA, 19 nt, Artificial Sequence
  Description of Artificial Sequence: Synthetic oligonucleotide
  Sense strand starting at position 2991 of SEQ ID NO: 587323
uagucagucuucuugaguc

SEQ ID NO: 783829 - RNA, 19 nt, Artificial Sequence
  Description of Artificial Sequence: Synthetic oligonucleotide
  Antisense strand to SEQ ID NO: 783828
gacucaagaagacugacua

SEQ ID NO: 783830 - RNA, 19 nt, Artificial Sequence
  Description of Artificial Sequence: Synthetic oligonucleotide
  Sense strand starting at position 2999 of SEQ ID NO: 587323
cuucuugagucucuaagau

SEQ ID NO: 783831 - RNA, 19 nt, Artificial Sequence
  Description of Artificial Sequence: Synthetic oligonucleotide
  Antisense strand to SEQ ID NO: 783830
aucuuagagacucaagaag

SEQ ID NO: 783832 - RNA, 19 nt, Artificial Sequence
  Description of Artificial Sequence: Synthetic oligonucleotide
  Sense strand starting at position 3003 of SEQ ID NO: 587323
uugagucucuaagauuuac

SEQ ID NO: 783833 - RNA, 19 nt, Artificial Sequence
  Description of Artificial Sequence: Synthetic oligonucleotide
  Antisense strand to SEQ ID NO: 783832
guaaaucuuagagacucaa

SEQ ID NO: 783834 - RNA, 19 nt, Artificial Sequence
  Description of Artificial Sequence: Synthetic oligonucleotide
  Sense strand starting at position 3061 of SEQ ID NO: 587323
gcauguacauuucucacuu

SEQ ID NO: 783835 - RNA, 19 nt, Artificial Sequence
  Description of Artificial Sequence: Synthetic oligonucleotide
  Antisense strand to SEQ ID NO: 783834
aagugagaaauguacaugc

SEQ ID NO: 783836 - RNA, 19 nt, Artificial Sequence
  Description of Artificial Sequence: Synthetic oligonucleotide
  Sense strand starting at position 3101 of SEQ ID NO: 587323
gcucaagaauuacuuuaug

SEQ ID NO: 783837 - RNA, 19 nt, Artificial Sequence
  Description of Artificial Sequence: Synthetic oligonucleotide
  Antisense strand to SEQ ID NO: 783836
cauaaaguaauucuugagc

SEQ ID NO: 783838 - RNA, 19 nt, Artificial Sequence
  Description of Artificial Sequence: Synthetic oligonucleotide
  Sense strand starting at position 3162 of SEQ ID NO: 587323
uuaucauggucaguuuaga

SEQ ID NO: 783839 - RNA, 19 nt, Artificial Sequence
  Description of Artificial Sequence: Synthetic oligonucleotide
  Antisense strand to SEQ ID NO: 783838
ucuaaacugaccaugauaa

SEQ ID NO: 783840 - RNA, 19 nt, Artificial Sequence
  Description of Artificial Sequence: Synthetic oligonucleotide
  Sense strand starting at position 3253 of SEQ ID NO: 587323
gucuauggucucuaauggu

SEQ ID NO: 783841 - RNA, 19 nt, Artificial Sequence
  Description of Artificial Sequence: Synthetic oligonucleotide
  Antisense strand to SEQ ID NO: 783840
accauuagagaccauagac

SEQ ID NO: 783842 - RNA, 19 nt, Artificial Sequence
  Description of Artificial Sequence: Synthetic oligonucleotide
  Sense strand starting at position 3850 of SEQ ID NO: 587323
gccugaugcugacugaacu

SEQ ID NO: 783843 - RNA, 19 nt, Artificial Sequence
  Description of Artificial Sequence: Synthetic oligonucleotide
  Antisense strand to SEQ ID NO: 783842
aguucagucagcaucaggc

SEQ ID NO: 783844 - RNA, 19 nt, Artificial Sequence
  Description of Artificial Sequence: Synthetic oligonucleotide
  Sense strand starting at position 3889 of SEQ ID NO: 587323
ugucucaauuguucuguuu

SEQ ID NO: 783845 - RNA, 19 nt, Artificial Sequence
  Description of Artificial Sequence: Synthetic oligonucleotide
  Antisense strand to SEQ ID NO: 783844
aaacagaacaauugagaca

SEQ ID NO: 783846 - RNA, 19 nt, Artificial Sequence
  Description of Artificial Sequence: Synthetic oligonucleotide
  Sense strand starting at position 3892 of SEQ ID NO: 587323
cucaauuguucuguuuguu

SEQ ID NO: 783847 - RNA, 19 nt, Artificial Sequence
  Description of Artificial Sequence: Synthetic oligonucleotide
  Antisense strand to SEQ ID NO: 783846
aacaaacagaacaauugag

SEQ ID NO: 783848 - RNA, 19 nt, Artificial Sequence
  Description of Artificial Sequence: Synthetic oligonucleotide
  Sense strand starting at position 84 of SEQ ID NO: 587324
gauuuacucugcucuguga

SEQ ID NO: 783849 - RNA, 19 nt, Artificial Sequence
  Description of Artificial Sequence: Synthetic oligonucleotide
  Antisense strand to SEQ ID NO: 783848
ucacagagcagaguaaauc

SEQ ID NO: 783850 - RNA, 19 nt, Artificial Sequence
  Description of Artificial Sequence: Synthetic oligonucleotide
  Sense strand starting at position 86 of SEQ ID NO: 587324
uuuacucugcucugugaaa

SEQ ID NO: 783851 - RNA, 19 nt, Artificial Sequence
  Description of Artificial Sequence: Synthetic oligonucleotide
  Antisense strand to SEQ ID NO: 783850
uuucacagagcagaguaaa

SEQ ID NO: 783852 - RNA, 19 nt, Artificial Sequence
  Description of Artificial Sequence: Synthetic oligonucleotide
  Sense strand starting at position 137 of SEQ ID NO: 587324
uugguuaauugagagguau

SEQ ID NO: 783853 - RNA, 19 nt, Artificial Sequence
  Description of Artificial Sequence: Synthetic oligonucleotide
  Antisense strand to SEQ ID NO: 783852
auaccucucaauuaaccaa

SEQ ID NO: 783854 - RNA, 19 nt, Artificial Sequence
  Description of Artificial Sequence: Synthetic oligonucleotide
  Sense strand starting at position 139 of SEQ ID NO: 587324
gguuaauugagagguauau

SEQ ID NO: 783855 - RNA, 19 nt, Artificial Sequence
  Description of Artificial Sequence: Synthetic oligonucleotide
  Antisense strand to SEQ ID NO: 783854
auauaccucucaauuaacc

SEQ ID NO: 783856 - RNA, 19 nt, Artificial Sequence
  Description of Artificial Sequence: Synthetic oligonucleotide
  Sense strand starting at position 329 of SEQ ID NO: 587324
accagugaguucucuaugu

SEQ ID NO: 783857 - RNA, 19 nt, Artificial Sequence
  Description of Artificial Sequence: Synthetic oligonucleotide
  Antisense strand to SEQ ID NO: 783856
acauagagaacucacuggu

SEQ ID NO: 783858 - RNA, 19 nt, Artificial Sequence
  Description of Artificial Sequence: Synthetic oligonucleotide
  Sense strand starting at position 331 of SEQ ID NO: 587324
cagugaguucucuaugugc

SEQ ID NO: 783859 - RNA, 19 nt, Artificial Sequence
  Description of Artificial Sequence: Synthetic oligonucleotide
  Antisense strand to SEQ ID NO: 783858
gcacauagagaacucacug

SEQ ID NO: 783860 - RNA, 19 nt, Artificial Sequence
  Description of Artificial Sequence: Synthetic oligonucleotide
  Sense strand starting at position 333 of SEQ ID NO: 587324
gugaguucucuaugugcag

SEQ ID NO: 783861 - RNA, 19 nt, Artificial Sequence
  Description of Artificial Sequence: Synthetic oligonucleotide
  Antisense strand to SEQ ID NO: 783860
cugcacauagagaacucac

SEQ ID NO: 783862 - RNA, 19 nt, Artificial Sequence
  Description of Artificial Sequence: Synthetic oligonucleotide
  Sense strand starting at position 334 of SEQ ID NO: 587324
ugaguucucuaugugcaga

SEQ ID NO: 783863 - RNA, 19 nt, Artificial Sequence
  Description of Artificial Sequence: Synthetic oligonucleotide
  Antisense strand to SEQ ID NO: 783862
ucugcacauagagaacuca

SEQ ID NO: 783864 - RNA, 19 nt, Artificial Sequence
  Description of Artificial Sequence: Synthetic oligonucleotide
  Sense strand starting at position 355 of SEQ ID NO: 587324
ggaccaugcugucagaaac

SEQ ID NO: 783865 - RNA, 19 nt, Artificial Sequence
  Description of Artificial Sequence: Synthetic oligonucleotide
  Antisense strand to SEQ ID NO: 783864
guuucugacagcauggucc

SEQ ID NO: 783866 - RNA, 19 nt, Artificial Sequence
  Description of Artificial Sequence: Synthetic oligonucleotide
  Sense strand starting at position 501 of SEQ ID NO: 587324
aggccuuuaacaggaguuu

SEQ ID NO: 783867 - RNA, 19 nt, Artificial Sequence
  Description of Artificial Sequence: Synthetic oligonucleotide
  Antisense strand to SEQ ID NO: 783866
aaacuccuguuaaaggccu

SEQ ID NO: 783868 - RNA, 19 nt, Artificial Sequence
  Description of Artificial Sequence: Synthetic oligonucleotide
  Sense strand starting at position 657 of SEQ ID NO: 587324
augggacucugagaagcaa

SEQ ID NO: 783869 - RNA, 19 nt, Artificial Sequence
  Description of Artificial Sequence: Synthetic oligonucleotide
  Antisense strand to SEQ ID NO: 783868
uugcuucucagagucccau

SEQ ID NO: 783870 - RNA, 19 nt, Artificial Sequence
  Description of Artificial Sequence: Synthetic oligonucleotide
  Sense strand starting at position 684 of SEQ ID NO: 587324
gggaaauccuggcccaugu

SEQ ID NO: 783871 - RNA, 19 nt, Artificial Sequence
  Description of Artificial Sequence: Synthetic oligonucleotide
  Antisense strand to SEQ ID NO: 783870
acaugggccaggauuuccc

SEQ ID NO: 783872 - RNA, 19 nt, Artificial Sequence
  Description of Artificial Sequence: Synthetic oligonucleotide
  Sense strand starting at position 688 of SEQ ID NO: 587324
aauccuggcccaugugaga

SEQ ID NO: 783873 - RNA, 19 nt, Artificial Sequence
  Description of Artificial Sequence: Synthetic oligonucleotide
  Antisense strand to SEQ ID NO: 783872
ucucacaugggccaggauu

SEQ ID NO: 783874 - RNA, 19 nt, Artificial Sequence
  Description of Artificial Sequence: Synthetic oligonucleotide
  Sense strand starting at position 731 of SEQ ID NO: 587324
acggaacuuuccguaagga

SEQ ID NO: 783875 - RNA, 19 nt, Artificial Sequence
  Description of Artificial Sequence: Synthetic oligonucleotide
  Antisense strand to SEQ ID NO: 783874
uccuuacggaaaguuccgu

SEQ ID NO: 783876 - RNA, 19 nt, Artificial Sequence
  Description of Artificial Sequence: Synthetic oligonucleotide
  Sense strand starting at position 732 of SEQ ID NO: 587324
cggaacuuuccguaaggac

SEQ ID NO: 783877 - RNA, 19 nt, Artificial Sequence
  Description of Artificial Sequence: Synthetic oligonucleotide
  Antisense strand to SEQ ID NO: 783876
guccuuacggaaaguuccg

SEQ ID NO: 783878 - RNA, 19 nt, Artificial Sequence
  Description of Artificial Sequence: Synthetic oligonucleotide
  Sense strand starting at position 933 of SEQ ID NO: 587324
cgcccaggcgcuguguaau

SEQ ID NO: 783879 - RNA, 19 nt, Artificial Sequence
  Description of Artificial Sequence: Synthetic oligonucleotide
  Antisense strand to SEQ ID NO: 783878
auuacacagcgccugggcg

SEQ ID NO: 783880 - RNA, 19 nt, Artificial Sequence
  Description of Artificial Sequence: Synthetic oligonucleotide
  Sense strand starting at position 1030 of SEQ ID NO: 587324
cggagaggauucuccaaua

SEQ ID NO: 783881 - RNA, 19 nt, Artificial Sequence
  Description of Artificial Sequence: Synthetic oligonucleotide
  Antisense strand to SEQ ID NO: 783880
uauuggagaauccucuccg

SEQ ID NO: 783882 - RNA, 19 nt, Artificial Sequence
  Description of Artificial Sequence: Synthetic oligonucleotide
  Sense strand starting at position 1337 of SEQ ID NO: 587324
cguguucuuuaugcacaca

SEQ ID NO: 783883 - RNA, 19 nt, Artificial Sequence
  Description of Artificial Sequence: Synthetic oligonucleotide
  Antisense strand to SEQ ID NO: 783882
ugugugcauaaagaacacg

SEQ ID NO: 783884 - RNA, 19 nt, Artificial Sequence
  Description of Artificial Sequence: Synthetic oligonucleotide
  Sense strand starting at position 2388 of SEQ ID NO: 587324
ugccuucccgcgucaaaga

SEQ ID NO: 783885 - RNA, 19 nt, Artificial Sequence
  Description of Artificial Sequence: Synthetic oligonucleotide
  Antisense strand to SEQ ID NO: 783884
ucuuugacgcgggaaggca

SEQ ID NO: 783886 - RNA, 19 nt, Artificial Sequence
  Description of Artificial Sequence: Synthetic oligonucleotide
  Sense strand starting at position 2409 of SEQ ID NO: 587324
cugagcuccgagugaaaca

SEQ ID NO: 783887 - RNA, 19 nt, Artificial Sequence
  Description of Artificial Sequence: Synthetic oligonucleotide
  Antisense strand to SEQ ID NO: 783886
uguuucacucggagcucag

SEQ ID NO: 783888 - RNA, 19 nt, Artificial Sequence
  Description of Artificial Sequence: Synthetic oligonucleotide
  Sense strand starting at position 2414 of SEQ ID NO: 587324
cuccgagugaaacagguau

SEQ ID NO: 783889 - RNA, 19 nt, Artificial Sequence
  Description of Artificial Sequence: Synthetic oligonucleotide
  Antisense strand to SEQ ID NO: 783888
auaccuguuucacucggag

SEQ ID NO: 783890 - RNA, 19 nt, Artificial Sequence
  Description of Artificial Sequence: Synthetic oligonucleotide
  Sense strand starting at position 2552 of SEQ ID NO: 587324
gagguaucgaaauggacau

SEQ ID NO: 783891 - RNA, 19 nt, Artificial Sequence
  Description of Artificial Sequence: Synthetic oligonucleotide
  Antisense strand to SEQ ID NO: 783890
auguccauuucgauaccuc

SEQ ID NO: 783892 - RNA, 19 nt, Artificial Sequence
  Description of Artificial Sequence: Synthetic oligonucleotide
  Sense strand starting at position 2553 of SEQ ID NO: 587324
agguaucgaaauggacauu

SEQ ID NO: 783893 - RNA, 19 nt, Artificial Sequence
  Description of Artificial Sequence: Synthetic oligonucleotide
  Antisense strand to SEQ ID NO: 783892
aauguccauuucgauaccu

SEQ ID NO: 783894 - RNA, 19 nt, Artificial Sequence
  Description of Artificial Sequence: Synthetic oligonucleotide
  Sense strand starting at position 2599 of SEQ ID NO: 587324
ggcaauuucgugugguugu

SEQ ID NO: 783895 - RNA, 19 nt, Artificial Sequence
  Description of Artificial Sequence: Synthetic oligonucleotide
  Antisense strand to SEQ ID NO: 783894
acaaccacacgaaauugcc

SEQ ID NO: 783896 - RNA, 19 nt, Artificial Sequence
  Description of Artificial Sequence: Synthetic oligonucleotide
  Sense strand starting at position 2657 of SEQ ID NO: 587324
guuuaaggagccugaggua

SEQ ID NO: 783897 - RNA, 19 nt, Artificial Sequence
  Description of Artificial Sequence: Synthetic oligonucleotide
  Antisense strand to SEQ ID NO: 783896
uaccucaggcuccuuaaac

SEQ ID NO: 783898 - RNA, 19 nt, Artificial Sequence
  Description of Artificial Sequence: Synthetic oligonucleotide
  Sense strand starting at position 2739 of SEQ ID NO: 587324
gaggcucugccuugagaug

SEQ ID NO: 783899 - RNA, 19 nt, Artificial Sequence
  Description of Artificial Sequence: Synthetic oligonucleotide
  Antisense strand to SEQ ID NO: 783898
caucucaaggcagagccuc

SEQ ID NO: 783900 - RNA, 19 nt, Artificial Sequence
  Description of Artificial Sequence: Synthetic oligonucleotide
  Sense strand starting at position 2746 of SEQ ID NO: 587324
ugccuugagaugugaagag

SEQ ID NO: 783901 - RNA, 19 nt, Artificial Sequence
  Description of Artificial Sequence: Synthetic oligonucleotide
  Antisense strand to SEQ ID NO: 783900
cucuucacaucucaaggca

SEQ ID NO: 783902 - RNA, 19 nt, Artificial Sequence
  Description of Artificial Sequence: Synthetic oligonucleotide
  Sense strand starting at position 2889 of SEQ ID NO: 587324
augcccgauucuuuacaaa

SEQ ID NO: 783903 - RNA, 19 nt, Artificial Sequence
  Description of Artificial Sequence: Synthetic oligonucleotide
  Antisense strand to SEQ ID NO: 783902
uuuguaaagaaucgggcau

SEQ ID NO: 783904 - RNA, 19 nt, Artificial Sequence
  Description of Artificial Sequence: Synthetic oligonucleotide
  Sense strand starting at position 2921 of SEQ ID NO: 587324
guggguggaaacugagaau

SEQ ID NO: 783905 - RNA, 19 nt, Artificial Sequence
  Description of Artificial Sequence: Synthetic oligonucleotide
  Antisense strand to SEQ ID NO: 783904
auucucaguuuccacccac

SEQ ID NO: 783906 - RNA, 19 nt, Artificial Sequence
  Description of Artificial Sequence: Synthetic oligonucleotide
  Sense strand starting at position 3109 of SEQ ID NO: 587324
ggcugugauuugcagggua

SEQ ID NO: 783907 - RNA, 19 nt, Artificial Sequence
  Description of Artificial Sequence: Synthetic oligonucleotide
  Antisense strand to SEQ ID NO: 783906
uacccugcaaaucacagcc

SEQ ID NO: 783908 - RNA, 19 nt, Artificial Sequence
  Description of Artificial Sequence: Synthetic oligonucleotide
  Sense strand starting at position 3111 of SEQ ID NO: 587324
cugugauuugcaggguagu

SEQ ID NO: 783909 - RNA, 19 nt, Artificial Sequence
  Description of Artificial Sequence: Synthetic oligonucleotide
  Antisense strand to SEQ ID NO: 783908
acuacccugcaaaucacag

SEQ ID NO: 783910 - RNA, 19 nt, Artificial Sequence
  Description of Artificial Sequence: Synthetic oligonucleotide
  Sense strand starting at position 3176 of SEQ ID NO: 587324
gcucuccucgaauguguua

SEQ ID NO: 783911 - RNA, 19 nt, Artificial Sequence
  Description of Artificial Sequence: Synthetic oligonucleotide
  Antisense strand to SEQ ID NO: 783910
uaacacauucgaggagagc

SEQ ID NO: 783912 - RNA, 19 nt, Artificial Sequence
  Description of Artificial Sequence: Synthetic oligonucleotide
  Sense strand starting at position 3183 of SEQ ID NO: 587324
ucgaauguguuauuugcau

SEQ ID NO: 783913 - RNA, 19 nt, Artificial Sequence
  Description of Artificial Sequence: Synthetic oligonucleotide
  Antisense strand to SEQ ID NO: 783912
augcaaauaacacauucga

SEQ ID NO: 783914 - RNA, 19 nt, Artificial Sequence
  Description of Artificial Sequence: Synthetic oligonucleotide
  Sense strand starting at position 3298 of SEQ ID NO: 587324
ucggaauuggccuaaguuc

SEQ ID NO: 783915 - RNA, 19 nt, Artificial Sequence
  Description of Artificial Sequence: Synthetic oligonucleotide
  Antisense strand to SEQ ID NO: 783914
gaacuuaggccaauuccga

SEQ ID NO: 783916 - RNA, 19 nt, Artificial Sequence
  Description of Artificial Sequence: Synthetic oligonucleotide
  Sense strand starting at position 3536 of SEQ ID NO: 587324
ccugaaaugcaguguuuau

SEQ ID NO: 783917 - RNA, 19 nt, Artificial Sequence
  Description of Artificial Sequence: Synthetic oligonucleotide
  Antisense strand to SEQ ID NO: 783916
auaaacacugcauuucagg

SEQ ID NO: 783918 - RNA, 19 nt, Artificial Sequence
  Description of Artificial Sequence: Synthetic oligonucleotide
  Sense strand starting at position 3543 of SEQ ID NO: 587324
ugcaguguuuauuccugaa

SEQ ID NO: 783919 - RNA, 19 nt, Artificial Sequence
  Description of Artificial Sequence: Synthetic oligonucleotide
  Antisense strand to SEQ ID NO: 783918
uucaggaauaaacacugca

SEQ ID NO: 783920 - RNA, 19 nt, Artificial Sequence
  Description of Artificial Sequence: Synthetic oligonucleotide
  Sense strand starting at position 3545 of SEQ ID NO: 587324
caguguuuauuccugaaga

SEQ ID NO: 783921 - RNA, 19 nt, Artificial Sequence
  Description of Artificial Sequence: Synthetic oligonucleotide
  Antisense strand to SEQ ID NO: 783920
ucuucaggaauaaacacug

SEQ ID NO: 783922 - RNA, 19 nt, Artificial Sequence
  Description of Artificial Sequence: Synthetic oligonucleotide
  Sense strand starting at position 3547 of SEQ ID NO: 587324
guguuuauuccugaagaca

SEQ ID NO: 783923 - RNA, 19 nt, Artificial Sequence
  Description of Artificial Sequence: Synthetic oligonucleotide
  Antisense strand to SEQ ID NO: 783922
ugucuucaggaauaaacac

SEQ ID NO: 783924 - RNA, 19 nt, Artificial Sequence
  Description of Artificial Sequence: Synthetic oligonucleotide
  Sense strand starting at position 3567 of SEQ ID NO: 587324
ucaccacuuuaguuagauc

SEQ ID NO: 783925 - RNA, 19 nt, Artificial Sequence
  Description of Artificial Sequence: Synthetic oligonucleotide
  Antisense strand to SEQ ID NO: 783924
gaucuaacuaaagugguga

SEQ ID NO: 783926 - RNA, 19 nt, Artificial Sequence
  Description of Artificial Sequence: Synthetic oligonucleotide
  Sense strand starting at position 3601 of SEQ ID NO: 587324
ccauacaagugucuaucau

SEQ ID NO: 783927 - RNA, 19 nt, Artificial Sequence
  Description of Artificial Sequence: Synthetic oligonucleotide
  Antisense strand to SEQ ID NO: 783926
augauagacacuuguaugg

SEQ ID NO: 783928 - RNA, 19 nt, Artificial Sequence
  Description of Artificial Sequence: Synthetic oligonucleotide
  Sense strand starting at position 201 of SEQ ID NO: 587325
cagaguuagcacuggaaga

SEQ ID NO: 783929 - RNA, 19 nt, Artificial Sequence
  Description of Artificial Sequence: Synthetic oligonucleotide
  Antisense strand to SEQ ID NO: 783928
ucuuccagugcuaacucug

SEQ ID NO: 783930 - RNA, 19 nt, Artificial Sequence
  Description of Artificial Sequence: Synthetic oligonucleotide
  Sense strand starting at position 202 of SEQ ID NO: 587325
agaguuagcacuggaagac

SEQ ID NO: 783931 - RNA, 19 nt, Artificial Sequence
  Description of Artificial Sequence: Synthetic oligonucleotide
  Antisense strand to SEQ ID NO: 783930
gucuuccagugcuaacucu

SEQ ID NO: 783932 - RNA, 19 nt, Artificial Sequence
  Description of Artificial Sequence: Synthetic oligonucleotide
  Sense strand starting at position 286 of SEQ ID NO: 587325
gcagcaggccucuaacaaa

SEQ ID NO: 783933 - RNA, 19 nt, Artificial Sequence
  Description of Artificial Sequence: Synthetic oligonucleotide
  Antisense strand to SEQ ID NO: 783932
uuuguuagaggccugcugc

SEQ ID NO: 783934 - RNA, 19 nt, Artificial Sequence
  Description of Artificial Sequence: Synthetic oligonucleotide
  Sense strand starting at position 380 of SEQ ID NO: 587325
uuccaugauuugccuggua

SEQ ID NO: 783935 - RNA, 19 nt, Artificial Sequence
  Description of Artificial Sequence: Synthetic oligonucleotide
  Antisense strand to SEQ ID NO: 783934
uaccaggcaaaucauggaa

SEQ ID NO: 783936 - RNA, 19 nt, Artificial Sequence
  Description of Artificial Sequence: Synthetic oligonucleotide
  Sense strand starting at position 385 of SEQ ID NO: 587325
ugauuugccugguagaaau

SEQ ID NO: 783937 - RNA, 19 nt, Artificial Sequence
  Description of Artificial Sequence: Synthetic oligonucleotide
  Antisense strand to SEQ ID NO: 783936
auuucuaccaggcaaauca

SEQ ID NO: 783938 - RNA, 19 nt, Artificial Sequence
  Description of Artificial Sequence: Synthetic oligonucleotide
  Sense strand starting at position 798 of SEQ ID NO: 587325
caagucauggaaugaaguu

SEQ ID NO: 783939 - RNA, 19 nt, Artificial Sequence
  Description of Artificial Sequence: Synthetic oligonucleotide
  Antisense strand to SEQ ID NO: 783938
aacuucauuccaugacuug

SEQ ID NO: 783940 - RNA, 19 nt, Artificial Sequence
  Description of Artificial Sequence: Synthetic oligonucleotide
  Sense strand starting at position 872 of SEQ ID NO: 587325
uucugcagaugguugauaa

SEQ ID NO: 783941 - RNA, 19 nt, Artificial Sequence
  Description of Artificial Sequence: Synthetic oligonucleotide
  Antisense strand to SEQ ID NO: 783940
uuaucaaccaucugcagaa

SEQ ID NO: 783942 - RNA, 19 nt, Artificial Sequence
  Description of Artificial Sequence: Synthetic oligonucleotide
  Sense strand starting at position 899 of SEQ ID NO: 587325
accugucaucccugagucu

SEQ ID NO: 783943 - RNA, 19 nt, Artificial Sequence
  Description of Artificial Sequence: Synthetic oligonucleotide
  Antisense strand to SEQ ID NO: 783942
agacucagggaugacaggu

SEQ ID NO: 783944 - RNA, 19 nt, Artificial Sequence
  Description of Artificial Sequence: Synthetic oligonucleotide
  Sense strand starting at position 900 of SEQ ID NO: 587325
ccugucaucccugagucuu

SEQ ID NO: 783945 - RNA, 19 nt, Artificial Sequence
  Description of Artificial Sequence: Synthetic oligonucleotide
  Antisense strand to SEQ ID NO: 783944
aagacucagggaugacagg

SEQ ID NO: 783946 - RNA, 19 nt, Artificial Sequence
  Description of Artificial Sequence: Synthetic oligonucleotide
  Sense strand starting at position 968 of SEQ ID NO: 587325
ucaaaucgugcucaauaaa

SEQ ID NO: 783947 - RNA, 19 nt, Artificial Sequence
  Description of Artificial Sequence: Synthetic oligonucleotide
  Antisense strand to SEQ ID NO: 783946
uuuauugagcacgauuuga

SEQ ID NO: 783948 - RNA, 19 nt, Artificial Sequence
  Description of Artificial Sequence: Synthetic oligonucleotide
  Sense strand starting at position 971 of SEQ ID NO: 587325
aaucgugcucaauaaagug

SEQ ID NO: 783949 - RNA, 19 nt, Artificial Sequence
  Description of Artificial Sequence: Synthetic oligonucleotide
  Antisense strand to SEQ ID NO: 783948
cacuuuauugagcacgauu

SEQ ID NO: 783950 - RNA, 19 nt, Artificial Sequence
  Description of Artificial Sequence: Synthetic oligonucleotide
  Sense strand starting at position 994 of SEQ ID NO: 587325
acgaaacucuggucugcua

SEQ ID NO: 783951 - RNA, 19 nt, Artificial Sequence
  Description of Artificial Sequence: Synthetic oligonucleotide
  Antisense strand to SEQ ID NO: 783950
uagcagaccagaguuucgu

SEQ ID NO: 783952 - RNA, 19 nt, Artificial Sequence
  Description of Artificial Sequence: Synthetic oligonucleotide
  Sense strand starting at position 996 of SEQ ID NO: 587325
gaaacucuggucugcuaca

SEQ ID NO: 783953 - RNA, 19 nt, Artificial Sequence
  Description of Artificial Sequence: Synthetic oligonucleotide
  Antisense strand to SEQ ID NO: 783952
uguagcagaccagaguuuc

SEQ ID NO: 783954 - RNA, 19 nt, Artificial Sequence
  Description of Artificial Sequence: Synthetic oligonucleotide
  Sense strand starting at position 1001 of SEQ ID NO: 587325
ucuggucugcuacagaaca

SEQ ID NO: 783955 - RNA, 19 nt, Artificial Sequence
  Description of Artificial Sequence: Synthetic oligonucleotide
  Antisense strand to SEQ ID NO: 783954
uguucuguagcagaccaga

SEQ ID NO: 783956 - RNA, 19 nt, Artificial Sequence
  Description of Artificial Sequence: Synthetic oligonucleotide
  Sense strand starting at position 1137 of SEQ ID NO: 587325
guucccugacaguaaaugu

SEQ ID NO: 783957 - RNA, 19 nt, Artificial Sequence
  Description of Artificial Sequence: Synthetic oligonucleotide
  Antisense strand to SEQ ID NO: 783956
acauuuacugucagggaac

SEQ ID NO: 783958 - RNA, 19 nt, Artificial Sequence
  Description of Artificial Sequence: Synthetic oligonucleotide
  Sense strand starting at position 1244 of SEQ ID NO: 587325
aguuuaaagagcugguaca

SEQ ID NO: 783959 - RNA, 19 nt, Artificial Sequence
  Description of Artificial Sequence: Synthetic oligonucleotide
  Antisense strand to SEQ ID NO: 783958
uguaccagcucuuuaaacu

SEQ ID NO: 783960 - RNA, 19 nt, Artificial Sequence
  Description of Artificial Sequence: Synthetic oligonucleotide
  Sense strand starting at position 1245 of SEQ ID NO: 587325
guuuaaagagcugguacau

SEQ ID NO: 783961 - RNA, 19 nt, Artificial Sequence
  Description of Artificial Sequence: Synthetic oligonucleotide
  Antisense strand to SEQ ID NO: 783960
auguaccagcucuuuaaac

SEQ ID NO: 783962 - RNA, 19 nt, Artificial Sequence
  Description of Artificial Sequence: Synthetic oligonucleotide
  Sense strand starting at position 1343 of SEQ ID NO: 587325
gcugcucagcuagaaucaa

SEQ ID NO: 783963 - RNA, 19 nt, Artificial Sequence
  Description of Artificial Sequence: Synthetic oligonucleotide
  Antisense strand to SEQ ID NO: 783962
uugauucuagcugagcagc

SEQ ID NO: 783964 - RNA, 19 nt, Artificial Sequence
  Description of Artificial Sequence: Synthetic oligonucleotide
  Sense strand starting at position 1351 of SEQ ID NO: 587325
gcuagaaucaaacaggugu

SEQ ID NO: 783965 - RNA, 19 nt, Artificial Sequence
  Description of Artificial Sequence: Synthetic oligonucleotide
  Antisense strand to SEQ ID NO: 783964
acaccuguuugauucuagc

SEQ ID NO: 783966 - RNA, 19 nt, Artificial Sequence
  Description of Artificial Sequence: Synthetic oligonucleotide
  Sense strand starting at position 1366 of SEQ ID NO: 587325
guguguucucacggauuug

SEQ ID NO: 783967 - RNA, 19 nt, Artificial Sequence
  Description of Artificial Sequence: Synthetic oligonucleotide
  Antisense strand to SEQ ID NO: 783966
caaauccgugagaacacac

SEQ ID NO: 783968 - RNA, 19 nt, Artificial Sequence
  Description of Artificial Sequence: Synthetic oligonucleotide
  Sense strand starting at position 1396 of SEQ ID NO: 587325
cucugaaguuaagucaaga

SEQ ID NO: 783969 - RNA, 19 nt, Artificial Sequence
  Description of Artificial Sequence: Synthetic oligonucleotide
  Antisense strand to SEQ ID NO: 783968
ucuugacuuaacuucagag

SEQ ID NO: 783970 - RNA, 19 nt, Artificial Sequence
  Description of Artificial Sequence: Synthetic oligonucleotide
  Sense strand starting at position 1479 of SEQ ID NO: 587325
aggaaacgcgucuguauuu

SEQ ID NO: 783971 - RNA, 19 nt, Artificial Sequence
  Description of Artificial Sequence: Synthetic oligonucleotide
  Antisense strand to SEQ ID NO: 783970
aaauacagacgcguuuccu

SEQ ID NO: 783972 - RNA, 19 nt, Artificial Sequence
  Description of Artificial Sequence: Synthetic oligonucleotide
  Sense strand starting at position 1484 of SEQ ID NO: 587325
acgcgucuguauuuggaga

SEQ ID NO: 783973 - RNA, 19 nt, Artificial Sequence
  Description of Artificial Sequence: Synthetic oligonucleotide
  Antisense strand to SEQ ID NO: 783972
ucuccaaauacagacgcgu

SEQ ID NO: 783974 - RNA, 19 nt, Artificial Sequence
  Description of Artificial Sequence: Synthetic oligonucleotide
  Sense strand starting at position 1544 of SEQ ID NO: 587325
cucacugucaucugggaag

SEQ ID NO: 783975 - RNA, 19 nt, Artificial Sequence
  Description of Artificial Sequence: Synthetic oligonucleotide
  Antisense strand to SEQ ID NO: 783974
cuucccagaugacagugag

SEQ ID NO: 783976 - RNA, 19 nt, Artificial Sequence
  Description of Artificial Sequence: Synthetic oligonucleotide
  Sense strand starting at position 1546 of SEQ ID NO: 587325
cacugucaucugggaagau

SEQ ID NO: 783977 - RNA, 19 nt, Artificial Sequence
  Description of Artificial Sequence: Synthetic oligonucleotide
  Antisense strand to SEQ ID NO: 783976
aucuucccagaugacagug

SEQ ID NO: 783978 - RNA, 19 nt, Artificial Sequence
  Description of Artificial Sequence: Synthetic oligonucleotide
  Sense strand starting at position 1903 of SEQ ID NO: 587325
guuacagaaugagauagaa

SEQ ID NO: 783979 - RNA, 19 nt, Artificial Sequence
  Description of Artificial Sequence: Synthetic oligonucleotide
  Antisense strand to SEQ ID NO: 783978
uucuaucucauucuguaac

SEQ ID NO: 783980 - RNA, 19 nt, Artificial Sequence
  Description of Artificial Sequence: Synthetic oligonucleotide
  Sense strand starting at position 1912 of SEQ ID NO: 587325
ugagauagaaaguguguga

SEQ ID NO: 783981 - RNA, 19 nt, Artificial Sequence
  Description of Artificial Sequence: Synthetic oligonucleotide
  Antisense strand to SEQ ID NO: 783980
ucacacacuuucuaucuca

SEQ ID NO: 783982 - RNA, 19 nt, Artificial Sequence
  Description of Artificial Sequence: Synthetic oligonucleotide
  Sense strand starting at position 1915 of SEQ ID NO: 587325
gauagaaagugugugagaa

SEQ ID NO: 783983 - RNA, 19 nt, Artificial Sequence
  Description of Artificial Sequence: Synthetic oligonucleotide
  Antisense strand to SEQ ID NO: 783982
uucucacacacuuucuauc

SEQ ID NO: 783984 - RNA, 19 nt, Artificial Sequence
  Description of Artificial Sequence: Synthetic oligonucleotide
  Sense strand starting at position 1916 of SEQ ID NO: 587325
auagaaagugugugagaaa

SEQ ID NO: 783985 - RNA, 19 nt, Artificial Sequence
  Description of Artificial Sequence: Synthetic oligonucleotide
  Antisense strand to SEQ ID NO: 783984
uuucucacacacuuucuau

SEQ ID NO: 783986 - RNA, 19 nt, Artificial Sequence
  Description of Artificial Sequence: Synthetic oligonucleotide
  Sense strand starting at position 2677 of SEQ ID NO: 587325
cagugaagccucggagaga

SEQ ID NO: 783987 - RNA, 19 nt, Artificial Sequence
  Description of Artificial Sequence: Synthetic oligonucleotide
  Antisense strand to SEQ ID NO: 783986
ucucuccgaggcuucacug

SEQ ID NO: 783988 - RNA, 19 nt, Artificial Sequence
  Description of Artificial Sequence: Synthetic oligonucleotide
  Sense strand starting at position 2894 of SEQ ID NO: 587325
augagaacaugguuuaauc

SEQ ID NO: 783989 - RNA, 19 nt, Artificial Sequence
  Description of Artificial Sequence: Synthetic oligonucleotide
  Antisense strand to SEQ ID NO: 783988
gauuaaaccauguucucau

SEQ ID NO: 783990 - RNA, 19 nt, Artificial Sequence
  Description of Artificial Sequence: Synthetic oligonucleotide
  Sense strand starting at position 2902 of SEQ ID NO: 587325
augguuuaaucugugugac

SEQ ID NO: 783991 - RNA, 19 nt, Artificial Sequence
  Description of Artificial Sequence: Synthetic oligonucleotide
  Antisense strand to SEQ ID NO: 783990
gucacacagauuaaaccau

SEQ ID NO: 783992 - RNA, 19 nt, Artificial Sequence
  Description of Artificial Sequence: Synthetic oligonucleotide
  Sense strand starting at position 3148 of SEQ ID NO: 587325
gugcccaucaaguagaaga

SEQ ID NO: 783993 - RNA, 19 nt, Artificial Sequence
  Description of Artificial Sequence: Synthetic oligonucleotide
  Antisense strand to SEQ ID NO: 783992
ucuucuacuugaugggcac

SEQ ID NO: 783994 - RNA, 19 nt, Artificial Sequence
  Description of Artificial Sequence: Synthetic oligonucleotide
  Sense strand starting at position 3175 of SEQ ID NO: 587325
gccguaucacgagaaaggu

SEQ ID NO: 783995 - RNA, 19 nt, Artificial Sequence
  Description of Artificial Sequence: Synthetic oligonucleotide
  Antisense strand to SEQ ID NO: 783994
accuuucucgugauacggc

SEQ ID NO: 783996 - RNA, 19 nt, Artificial Sequence
  Description of Artificial Sequence: Synthetic oligonucleotide
  Sense strand starting at position 3295 of SEQ ID NO: 587325
uagugucagaggcauugaa

SEQ ID NO: 783997 - RNA, 19 nt, Artificial Sequence
  Description of Artificial Sequence: Synthetic oligonucleotide
  Antisense strand to SEQ ID NO: 783996
uucaaugccucugacacua

SEQ ID NO: 783998 - RNA, 19 nt, Artificial Sequence
  Description of Artificial Sequence: Synthetic oligonucleotide
  Sense strand starting at position 3396 of SEQ ID NO: 587325
cuugucacagaaugacaua

SEQ ID NO: 783999 - RNA, 19 nt, Artificial Sequence
  Description of Artificial Sequence: Synthetic oligonucleotide
  Antisense strand to SEQ ID NO: 783998
uaugucauucugugacaag

SEQ ID NO: 784000 - RNA, 19 nt, Artificial Sequence
  Description of Artificial Sequence: Synthetic oligonucleotide
  Sense strand starting at position 3580 of SEQ ID NO: 587325
agugcaaugacagguuaca

SEQ ID NO: 784001 - RNA, 19 nt, Artificial Sequence
  Description of Artificial Sequence: Synthetic oligonucleotide
  Antisense strand to SEQ ID NO: 784000
uguaaccugucauugcacu

SEQ ID NO: 784002 - RNA, 19 nt, Artificial Sequence
  Description of Artificial Sequence: Synthetic oligonucleotide
  Sense strand starting at position 3825 of SEQ ID NO: 587325
uuaugaacuugccuugaau

SEQ ID NO: 784003 - RNA, 19 nt, Artificial Sequence
  Description of Artificial Sequence: Synthetic oligonucleotide
  Antisense strand to SEQ ID NO: 784002
auucaaggcaaguucauaa

SEQ ID NO: 784004 - RNA, 19 nt, Artificial Sequence
  Description of Artificial Sequence: Synthetic oligonucleotide
  Sense strand starting at position 3827 of SEQ ID NO: 587325
augaacuugccuugaauuc

SEQ ID NO: 784005 - RNA, 19 nt, Artificial Sequence
  Description of Artificial Sequence: Synthetic oligonucleotide
  Antisense strand to SEQ ID NO: 784004
gaauucaaggcaaguucau

SEQ ID NO: 784006 - RNA, 19 nt, Artificial Sequence
  Description of Artificial Sequence: Synthetic oligonucleotide
  Sense strand starting at position 3968 of SEQ ID NO: 587325
aaagaugagucagagaaca

SEQ ID NO: 784007 - RNA, 19 nt, Artificial Sequence
  Description of Artificial Sequence: Synthetic oligonucleotide
  Antisense strand to SEQ ID NO: 784006
uguucucugacucaucuuu

SEQ ID NO: 784008 - RNA, 19 nt, Artificial Sequence
  Description of Artificial Sequence: Synthetic oligonucleotide
  Sense strand starting at position 36 of SEQ ID NO: 587326
ccucaagaguuuguaauag

SEQ ID NO: 784009 - RNA, 19 nt, Artificial Sequence
  Description of Artificial Sequence: Synthetic oligonucleotide
  Antisense strand to SEQ ID NO: 784008
cuauuacaaacucuugagg

SEQ ID NO: 784010 - RNA, 19 nt, Artificial Sequence
  Description of Artificial Sequence: Synthetic oligonucleotide
  Sense strand starting at position 56 of SEQ ID NO: 587326
auacaaagcuugguaugua

SEQ ID NO: 784011 - RNA, 19 nt, Artificial Sequence
  Description of Artificial Sequence: Synthetic oligonucleotide
  Antisense strand to SEQ ID NO: 784010
uacauaccaagcuuuguau

SEQ ID NO: 784012 - RNA, 19 nt, Artificial Sequence
  Description of Artificial Sequence: Synthetic oligonucleotide
  Sense strand starting at position 87 of SEQ ID NO: 587326
aggacagguuacuuaucuu

SEQ ID NO: 784013 - RNA, 19 nt, Artificial Sequence
  Description of Artificial Sequence: Synthetic oligonucleotide
  Antisense strand to SEQ ID NO: 784012
aagauaaguaaccuguccu

SEQ ID NO: 784014 - RNA, 19 nt, Artificial Sequence
  Description of Artificial Sequence: Synthetic oligonucleotide
  Sense strand starting at position 128 of SEQ ID NO: 587326
acaugaugccuggaucuua

SEQ ID NO: 784015 - RNA, 19 nt, Artificial Sequence
  Description of Artificial Sequence: Synthetic oligonucleotide
  Antisense strand to SEQ ID NO: 784014
uaagauccaggcaucaugu

SEQ ID NO: 784016 - RNA, 19 nt, Artificial Sequence
  Description of Artificial Sequence: Synthetic oligonucleotide
  Sense strand starting at position 175 of SEQ ID NO: 587326
ggauuucuuuauuaagaac

SEQ ID NO: 784017 - RNA, 19 nt, Artificial Sequence
  Description of Artificial Sequence: Synthetic oligonucleotide
  Antisense strand to SEQ ID NO: 784016
guucuuaauaaagaaaucc

SEQ ID NO: 784018 - RNA, 19 nt, Artificial Sequence
  Description of Artificial Sequence: Synthetic oligonucleotide
  Sense strand starting at position 435 of SEQ ID NO: 587326
aucucauaaugucugcaga

SEQ ID NO: 784019 - RNA, 19 nt, Artificial Sequence
  Description of Artificial Sequence: Synthetic oligonucleotide
  Antisense strand to SEQ ID NO: 784018
ucugcagacauuaugagau

SEQ ID NO: 784020 - RNA, 19 nt, Artificial Sequence
  Description of Artificial Sequence: Synthetic oligonucleotide
  Sense strand starting at position 437 of SEQ ID NO: 587326
cucauaaugucugcagaug

SEQ ID NO: 784021 - RNA, 19 nt, Artificial Sequence
  Description of Artificial Sequence: Synthetic oligonucleotide
  Antisense strand to SEQ ID NO: 784020
caucugcagacauuaugag

SEQ ID NO: 784022 - RNA, 19 nt, Artificial Sequence
  Description of Artificial Sequence: Synthetic oligonucleotide
  Sense strand starting at position 659 of SEQ ID NO: 587326
aggaaacuucaguaacggu

SEQ ID NO: 784023 - RNA, 19 nt, Artificial Sequence
  Description of Artificial Sequence: Synthetic oligonucleotide
  Antisense strand to SEQ ID NO: 784022
accguuacugaaguuuccu

SEQ ID NO: 784024 - RNA, 19 nt, Artificial Sequence
  Description of Artificial Sequence: Synthetic oligonucleotide
  Sense strand starting at position 779 of SEQ ID NO: 587326
cucauuguuccucacagca

SEQ ID NO: 784025 - RNA, 19 nt, Artificial Sequence
  Description of Artificial Sequence: Synthetic oligonucleotide
  Antisense strand to SEQ ID NO: 784024
ugcugugaggaacaaugag

SEQ ID NO: 784026 - RNA, 19 nt, Artificial Sequence
  Description of Artificial Sequence: Synthetic oligonucleotide
  Sense strand starting at position 991 of SEQ ID NO: 587326
acccuauagccuggagaaa

SEQ ID NO: 784027 - RNA, 19 nt, Artificial Sequence
  Description of Artificial Sequence: Synthetic oligonucleotide
  Antisense strand to SEQ ID NO: 784026
uuucuccaggcuauagggu

SEQ ID NO: 784028 - RNA, 19 nt, Artificial Sequence
  Description of Artificial Sequence: Synthetic oligonucleotide
  Sense strand starting at position 1140 of SEQ ID NO: 587326
uuggcuguacuugagaaca

SEQ ID NO: 784029 - RNA, 19 nt, Artificial Sequence
  Description of Artificial Sequence: Synthetic oligonucleotide
  Antisense strand to SEQ ID NO: 784028
uguucucaaguacagccaa

SEQ ID NO: 784030 - RNA, 19 nt, Artificial Sequence
  Description of Artificial Sequence: Synthetic oligonucleotide
  Sense strand starting at position 1392 of SEQ ID NO: 587326
gaguacaaacagugcaaua

SEQ ID NO: 784031 - RNA, 19 nt, Artificial Sequence
  Description of Artificial Sequence: Synthetic oligonucleotide
  Antisense strand to SEQ ID NO: 784030
uauugcacuguuuguacuc

SEQ ID NO: 784032 - RNA, 19 nt, Artificial Sequence
  Description of Artificial Sequence: Synthetic oligonucleotide
  Sense strand starting at position 1394 of SEQ ID NO: 587326
guacaaacagugcaauaau

SEQ ID NO: 784033 - RNA, 19 nt, Artificial Sequence
  Description of Artificial Sequence: Synthetic oligonucleotide
  Antisense strand to SEQ ID NO: 784032
auuauugcacuguuuguac

SEQ ID NO: 784034 - RNA, 19 nt, Artificial Sequence
  Description of Artificial Sequence: Synthetic oligonucleotide
  Sense strand starting at position 1435 of SEQ ID NO: 587326
agggcuucuggagacucau

SEQ ID NO: 784035 - RNA, 19 nt, Artificial Sequence
  Description of Artificial Sequence: Synthetic oligonucleotide
  Antisense strand to SEQ ID NO: 784034
augagucuccagaagcccu

SEQ ID NO: 784036 - RNA, 19 nt, Artificial Sequence
  Description of Artificial Sequence: Synthetic oligonucleotide
  Sense strand starting at position 1444 of SEQ ID NO: 587326
ggagacucaugccuggauu

SEQ ID NO: 784037 - RNA, 19 nt, Artificial Sequence
  Description of Artificial Sequence: Synthetic oligonucleotide
  Antisense strand to SEQ ID NO: 784036
aauccaggcaugagucucc

SEQ ID NO: 784038 - RNA, 19 nt, Artificial Sequence
  Description of Artificial Sequence: Synthetic oligonucleotide
  Sense strand starting at position 1445 of SEQ ID NO: 587326
gagacucaugccuggauug

SEQ ID NO: 784039 - RNA, 19 nt, Artificial Sequence
  Description of Artificial Sequence: Synthetic oligonucleotide
  Antisense strand to SEQ ID NO: 784038
caauccaggcaugagucuc

SEQ ID NO: 784040 - RNA, 19 nt, Artificial Sequence
  Description of Artificial Sequence: Synthetic oligonucleotide
  Sense strand starting at position 1509 of SEQ ID NO: 587326
cuggguaaguucccucaga

SEQ ID NO: 784041 - RNA, 19 nt, Artificial Sequence
  Description of Artificial Sequence: Synthetic oligonucleotide
  Antisense strand to SEQ ID NO: 784040
ucugagggaacuuacccag

SEQ ID NO: 784042 - RNA, 19 nt, Artificial Sequence
  Description of Artificial Sequence: Synthetic oligonucleotide
  Sense strand starting at position 1510 of SEQ ID NO: 587326
uggguaaguucccucagau

SEQ ID NO: 784043 - RNA, 19 nt, Artificial Sequence
  Description of Artificial Sequence: Synthetic oligonucleotide
  Antisense strand to SEQ ID NO: 784042
aucugagggaacuuaccca

SEQ ID NO: 784044 - RNA, 19 nt, Artificial Sequence
  Description of Artificial Sequence: Synthetic oligonucleotide
  Sense strand starting at position 2086 of SEQ ID NO: 587326
auacauuguccagacuguu

SEQ ID NO: 784045 - RNA, 19 nt, Artificial Sequence
  Description of Artificial Sequence: Synthetic oligonucleotide
  Antisense strand to SEQ ID NO: 784044
aacagucuggacaauguau

SEQ ID NO: 784046 - RNA, 19 nt, Artificial Sequence
  Description of Artificial Sequence: Synthetic oligonucleotide
  Sense strand starting at position 2152 of SEQ ID NO: 587326
ugugcaugucaguagaaac

SEQ ID NO: 784047 - RNA, 19 nt, Artificial Sequence
  Description of Artificial Sequence: Synthetic oligonucleotide
  Antisense strand to SEQ ID NO: 784046
guuucuacugacaugcaca

SEQ ID NO: 784048 - RNA, 19 nt, Artificial Sequence
  Description of Artificial Sequence: Synthetic oligonucleotide
  Sense strand starting at position 2206 of SEQ ID NO: 587326
cugaguacuugagcugaca

SEQ ID NO: 784049 - RNA, 19 nt, Artificial Sequence
  Description of Artificial Sequence: Synthetic oligonucleotide
  Antisense strand to SEQ ID NO: 784048
ugucagcucaaguacucag

SEQ ID NO: 784050 - RNA, 19 nt, Artificial Sequence
  Description of Artificial Sequence: Synthetic oligonucleotide
  Sense strand starting at position 2209 of SEQ ID NO: 587326
aguacuugagcugacaauu

SEQ ID NO: 784051 - RNA, 19 nt, Artificial Sequence
  Description of Artificial Sequence: Synthetic oligonucleotide
  Antisense strand to SEQ ID NO: 784050
aauugucagcucaaguacu

SEQ ID NO: 784052 - RNA, 19 nt, Artificial Sequence
  Description of Artificial Sequence: Synthetic oligonucleotide
  Sense strand starting at position 2219 of SEQ ID NO: 587326
cugacaauuuaauaggcua

SEQ ID NO: 784053 - RNA, 19 nt, Artificial Sequence
  Description of Artificial Sequence: Synthetic oligonucleotide
  Antisense strand to SEQ ID NO: 784052
uagccuauuaaauugucag

SEQ ID NO: 784054 - RNA, 19 nt, Artificial Sequence
  Description of Artificial Sequence: Synthetic oligonucleotide
  Sense strand starting at position 2242 of SEQ ID NO: 587326
gcauuuaaacgcugaguuu

SEQ ID NO: 784055 - RNA, 19 nt, Artificial Sequence
  Description of Artificial Sequence: Synthetic oligonucleotide
  Antisense strand to SEQ ID NO: 784054
aaacucagcguuuaaaugc

SEQ ID NO: 784056 - RNA, 19 nt, Artificial Sequence
  Description of Artificial Sequence: Synthetic oligonucleotide
  Sense strand starting at position 2267 of SEQ ID NO: 587326
gguugugaaccagagaggu

SEQ ID NO: 784057 - RNA, 19 nt, Artificial Sequence
  Description of Artificial Sequence: Synthetic oligonucleotide
  Antisense strand to SEQ ID NO: 784056
accucucugguucacaacc

SEQ ID NO: 784058 - RNA, 19 nt, Artificial Sequence
  Description of Artificial Sequence: Synthetic oligonucleotide
  Sense strand starting at position 2362 of SEQ ID NO: 587326
gugccuguugaacacuaau

SEQ ID NO: 784059 - RNA, 19 nt, Artificial Sequence
  Description of Artificial Sequence: Synthetic oligonucleotide
  Antisense strand to SEQ ID NO: 784058
auuaguguucaacaggcac

SEQ ID NO: 784060 - RNA, 19 nt, Artificial Sequence
  Description of Artificial Sequence: Synthetic oligonucleotide
  Sense strand starting at position 2418 of SEQ ID NO: 587326
ccaagauuauucucuugug

SEQ ID NO: 784061 - RNA, 19 nt, Artificial Sequence
  Description of Artificial Sequence: Synthetic oligonucleotide
  Antisense strand to SEQ ID NO: 784060
cacaagagaauaaucuugg

SEQ ID NO: 784062 - RNA, 19 nt, Artificial Sequence
  Description of Artificial Sequence: Synthetic oligonucleotide
  Sense strand starting at position 2473 of SEQ ID NO: 587326
ugaagcaacuuggugauaa

SEQ ID NO: 784063 - RNA, 19 nt, Artificial Sequence
  Description of Artificial Sequence: Synthetic oligonucleotide
  Antisense strand to SEQ ID NO: 784062
uuaucaccaaguugcuuca

SEQ ID NO: 784064 - RNA, 19 nt, Artificial Sequence
  Description of Artificial Sequence: Synthetic oligonucleotide
  Sense strand starting at position 2475 of SEQ ID NO: 587326
aagcaacuuggugauaagu

SEQ ID NO: 784065 - RNA, 19 nt, Artificial Sequence
  Description of Artificial Sequence: Synthetic oligonucleotide
  Antisense strand to SEQ ID NO: 784064
acuuaucaccaaguugcuu

SEQ ID NO: 784066 - RNA, 19 nt, Artificial Sequence
  Description of Artificial Sequence: Synthetic oligonucleotide
  Sense strand starting at position 2648 of SEQ ID NO: 587326
uguuaacagugggcaaauu

SEQ ID NO: 784067 - RNA, 19 nt, Artificial Sequence
  Description of Artificial Sequence: Synthetic oligonucleotide
  Antisense strand to SEQ ID NO: 784066
aauuugcccacuguuaaca

SEQ ID NO: 784068 - RNA, 19 nt, Artificial Sequence
  Description of Artificial Sequence: Synthetic oligonucleotide
  Sense strand starting at position 2649 of SEQ ID NO: 587326
guuaacagugggcaaauua

SEQ ID NO: 784069 - RNA, 19 nt, Artificial Sequence
  Description of Artificial Sequence: Synthetic oligonucleotide
  Antisense strand to SEQ ID NO: 784068
uaauuugcccacuguuaac

SEQ ID NO: 784070 - RNA, 19 nt, Artificial Sequence
  Description of Artificial Sequence: Synthetic oligonucleotide
  Sense strand starting at position 2674 of SEQ ID NO: 587326
aauauaugagaguguauga

SEQ ID NO: 784071 - RNA, 19 nt, Artificial Sequence
  Description of Artificial Sequence: Synthetic oligonucleotide
  Antisense strand to SEQ ID NO: 784070
ucauacacucucauauauu

SEQ ID NO: 784072 - RNA, 19 nt, Artificial Sequence
  Description of Artificial Sequence: Synthetic oligonucleotide
  Sense strand starting at position 2791 of SEQ ID NO: 587326
agauguagaguauguagau

SEQ ID NO: 784073 - RNA, 19 nt, Artificial Sequence
  Description of Artificial Sequence: Synthetic oligonucleotide
  Antisense strand to SEQ ID NO: 784072
aucuacauacucuacaucu

SEQ ID NO: 784074 - RNA, 19 nt, Artificial Sequence
  Description of Artificial Sequence: Synthetic oligonucleotide
  Sense strand starting at position 2875 of SEQ ID NO: 587326
auaguaugggcauaguaag

SEQ ID NO: 784075 - RNA, 19 nt, Artificial Sequence
  Description of Artificial Sequence: Synthetic oligonucleotide
  Antisense strand to SEQ ID NO: 784074
cuuacuaugcccauacuau

SEQ ID NO: 784076 - RNA, 19 nt, Artificial Sequence
  Description of Artificial Sequence: Synthetic oligonucleotide
  Sense strand starting at position 2973 of SEQ ID NO: 587326
agaguuaggugaaagggau

SEQ ID NO: 784077 - RNA, 19 nt, Artificial Sequence
  Description of Artificial Sequence: Synthetic oligonucleotide
  Antisense strand to SEQ ID NO: 784076
aucccuuucaccuaacucu

SEQ ID NO: 784078 - RNA, 19 nt, Artificial Sequence
  Description of Artificial Sequence: Synthetic oligonucleotide
  Sense strand starting at position 2995 of SEQ ID NO: 587326
ggaccugcuuuccuugaaa

SEQ ID NO: 784079 - RNA, 19 nt, Artificial Sequence
  Description of Artificial Sequence: Synthetic oligonucleotide
  Antisense strand to SEQ ID NO: 784078
uuucaaggaaagcaggucc

SEQ ID NO: 784080 - RNA, 19 nt, Artificial Sequence
  Description of Artificial Sequence: Synthetic oligonucleotide
  Sense strand starting at position 2998 of SEQ ID NO: 587326
ccugcuuuccuugaaauug

SEQ ID NO: 784081 - RNA, 19 nt, Artificial Sequence
  Description of Artificial Sequence: Synthetic oligonucleotide
  Antisense strand to SEQ ID NO: 784080
caauuucaaggaaagcagg

SEQ ID NO: 784082 - RNA, 19 nt, Artificial Sequence
  Description of Artificial Sequence: Synthetic oligonucleotide
  Sense strand starting at position 3072 of SEQ ID NO: 587326
aagagaugucguuacaagu

SEQ ID NO: 784083 - RNA, 19 nt, Artificial Sequence
  Description of Artificial Sequence: Synthetic oligonucleotide
  Antisense strand to SEQ ID NO: 784082
acuuguaacgacaucucuu

SEQ ID NO: 784084 - RNA, 19 nt, Artificial Sequence
  Description of Artificial Sequence: Synthetic oligonucleotide
  Sense strand starting at position 3903 of SEQ ID NO: 587326
caguaaugugacugaugug

SEQ ID NO: 784085 - RNA, 19 nt, Artificial Sequence
  Description of Artificial Sequence: Synthetic oligonucleotide
  Antisense strand to SEQ ID NO: 784084
cacaucagucacauuacug

SEQ ID NO: 784086 - RNA, 19 nt, Artificial Sequence
  Description of Artificial Sequence: Synthetic oligonucleotide
  Sense strand starting at position 3924 of SEQ ID NO: 587326
ggcagcuguaaauagagau

SEQ ID NO: 784087 - RNA, 19 nt, Artificial Sequence
  Description of Artificial Sequence: Synthetic oligonucleotide
  Antisense strand to SEQ ID NO: 784086
aucucuauuuacagcugcc

SEQ ID NO: 784088 - RNA, 19 nt, Artificial Sequence
  Description of Artificial Sequence: Synthetic oligonucleotide
  Sense strand starting at position 89 of SEQ ID NO: 587327
gcacaaguucuccaaguaa

SEQ ID NO: 784089 - RNA, 19 nt, Artificial Sequence
  Description of Artificial Sequence: Synthetic oligonucleotide
  Antisense strand to SEQ ID NO: 784088
uuacuuggagaacuugugc

SEQ ID NO: 784090 - RNA, 19 nt, Artificial Sequence
  Description of Artificial Sequence: Synthetic oligonucleotide
  Sense strand starting at position 544 of SEQ ID NO: 587327
cagagaugcugugaggaag

SEQ ID NO: 784091 - RNA, 19 nt, Artificial Sequence
  Description of Artificial Sequence: Synthetic oligonucleotide
  Antisense strand to SEQ ID NO: 784090
cuuccucacagcaucucug

SEQ ID NO: 784092 - RNA, 19 nt, Artificial Sequence
  Description of Artificial Sequence: Synthetic oligonucleotide
  Sense strand starting at position 985 of SEQ ID NO: 587327
ccauucucccugggaguca

SEQ ID NO: 784093 - RNA, 19 nt, Artificial Sequence
  Description of Artificial Sequence: Synthetic oligonucleotide
  Antisense strand to SEQ ID NO: 784092
ugacucccagggagaaugg

SEQ ID NO: 784094 - RNA, 19 nt, Artificial Sequence
  Description of Artificial Sequence: Synthetic oligonucleotide
  Sense strand starting at position 1610 of SEQ ID NO: 587327
ggucccagaccucgucuua

SEQ ID NO: 784095 - RNA, 19 nt, Artificial Sequence
  Description of Artificial Sequence: Synthetic oligonucleotide
  Antisense strand to SEQ ID NO: 784094
uaagacgaggucugggacc

SEQ ID NO: 784096 - RNA, 19 nt, Artificial Sequence
  Description of Artificial Sequence: Synthetic oligonucleotide
  Sense strand starting at position 1617 of SEQ ID NO: 587327
gaccucgucuuagacaguu

SEQ ID NO: 784097 - RNA, 19 nt, Artificial Sequence
  Description of Artificial Sequence: Synthetic oligonucleotide
  Antisense strand to SEQ ID NO: 784096
aacugucuaagacgagguc

SEQ ID NO: 784098 - RNA, 19 nt, Artificial Sequence
  Description of Artificial Sequence: Synthetic oligonucleotide
  Sense strand starting at position 1681 of SEQ ID NO: 587327
ccguuucugagguagaaac

SEQ ID NO: 784099 - RNA, 19 nt, Artificial Sequence
  Description of Artificial Sequence: Synthetic oligonucleotide
  Antisense strand to SEQ ID NO: 784098
guuucuaccucagaaacgg

SEQ ID NO: 784100 - RNA, 19 nt, Artificial Sequence
  Description of Artificial Sequence: Synthetic oligonucleotide
  Sense strand starting at position 2021 of SEQ ID NO: 587327
ggagcucgguccgaaacaa

SEQ ID NO: 784101 - RNA, 19 nt, Artificial Sequence
  Description of Artificial Sequence: Synthetic oligonucleotide
  Antisense strand to SEQ ID NO: 784100
uuguuucggaccgagcucc

SEQ ID NO: 784102 - RNA, 19 nt, Artificial Sequence
  Description of Artificial Sequence: Synthetic oligonucleotide
  Sense strand starting at position 2033 of SEQ ID NO: 587327
gaaacaauggccgagccau

SEQ ID NO: 784103 - RNA, 19 nt, Artificial Sequence
  Description of Artificial Sequence: Synthetic oligonucleotide
  Antisense strand to SEQ ID NO: 784102
auggcucggccauuguuuc

SEQ ID NO: 784104 - RNA, 19 nt, Artificial Sequence
  Description of Artificial Sequence: Synthetic oligonucleotide
  Sense strand starting at position 2060 of SEQ ID NO: 587327
acauguacuuuaccauagu

SEQ ID NO: 784105 - RNA, 19 nt, Artificial Sequence
  Description of Artificial Sequence: Synthetic oligonucleotide
  Antisense strand to SEQ ID NO: 784104
acuaugguaaaguacaugu

SEQ ID NO: 784106 - RNA, 19 nt, Artificial Sequence
  Description of Artificial Sequence: Synthetic oligonucleotide
  Sense strand starting at position 2063 of SEQ ID NO: 587327
uguacuuuaccauaguuaa

SEQ ID NO: 784107 - RNA, 19 nt, Artificial Sequence
  Description of Artificial Sequence: Synthetic oligonucleotide
  Antisense strand to SEQ ID NO: 784106
uuaacuaugguaaaguaca

SEQ ID NO: 784108 - RNA, 19 nt, Artificial Sequence
  Description of Artificial Sequence: Synthetic oligonucleotide
  Sense strand starting at position 2132 of SEQ ID NO: 587327
guaugugaauuauagccca

SEQ ID NO: 784109 - RNA, 19 nt, Artificial Sequence
  Description of Artificial Sequence: Synthetic oligonucleotide
  Antisense strand to SEQ ID NO: 784108
ugggcuauaauucacauac

SEQ ID NO: 784110 - RNA, 19 nt, Artificial Sequence
  Description of Artificial Sequence: Synthetic oligonucleotide
  Sense strand starting at position 2135 of SEQ ID NO: 587327
ugugaauuauagcccaaua

SEQ ID NO: 784111 - RNA, 19 nt, Artificial Sequence
  Description of Artificial Sequence: Synthetic oligonucleotide
  Antisense strand to SEQ ID NO: 784110
uauugggcuauaauucaca

SEQ ID NO: 784112 - RNA, 19 nt, Artificial Sequence
  Description of Artificial Sequence: Synthetic oligonucleotide
  Sense strand starting at position 2206 of SEQ ID NO: 587327
ggcagaagaugugaguaga

SEQ ID NO: 784113 - RNA, 19 nt, Artificial Sequence
  Description of Artificial Sequence: Synthetic oligonucleotide
  Antisense strand to SEQ ID NO: 784112
ucuacucacaucuucugcc

SEQ ID NO: 784114 - RNA, 19 nt, Artificial Sequence
  Description of Artificial Sequence: Synthetic oligonucleotide
  Sense strand starting at position 2243 of SEQ ID NO: 587327
guggguaauggguacauga

SEQ ID NO: 784115 - RNA, 19 nt, Artificial Sequence
  Description of Artificial Sequence: Synthetic oligonucleotide
  Antisense strand to SEQ ID NO: 784114
ucauguacccauuacccac

SEQ ID NO: 784116 - RNA, 19 nt, Artificial Sequence
  Description of Artificial Sequence: Synthetic oligonucleotide
  Sense strand starting at position 2256 of SEQ ID NO: 587327
acaugaagccuucggcauu

SEQ ID NO: 784117 - RNA, 19 nt, Artificial Sequence
  Description of Artificial Sequence: Synthetic oligonucleotide
  Antisense strand to SEQ ID NO: 784116
aaugccgaaggcuucaugu

SEQ ID NO: 784118 - RNA, 19 nt, Artificial Sequence
  Description of Artificial Sequence: Synthetic oligonucleotide
  Sense strand starting at position 2267 of SEQ ID NO: 587327
ucggcauuguuggcuauua

SEQ ID NO: 784119 - RNA, 19 nt, Artificial Sequence
  Description of Artificial Sequence: Synthetic oligonucleotide
  Antisense strand to SEQ ID NO: 784118
uaauagccaacaaugccga

SEQ ID NO: 784120 - RNA, 19 nt, Artificial Sequence
  Description of Artificial Sequence: Synthetic oligonucleotide
  Sense strand starting at position 2269 of SEQ ID NO: 587327
ggcauuguuggcuauuaga

SEQ ID NO: 784121 - RNA, 19 nt, Artificial Sequence
  Description of Artificial Sequence: Synthetic oligonucleotide
  Antisense strand to SEQ ID NO: 784120
ucuaauagccaacaaugcc

SEQ ID NO: 784122 - RNA, 19 nt, Artificial Sequence
  Description of Artificial Sequence: Synthetic oligonucleotide
  Sense strand starting at position 2272 of SEQ ID NO: 587327
auuguuggcuauuagagaa

SEQ ID NO: 784123 - RNA, 19 nt, Artificial Sequence
  Description of Artificial Sequence: Synthetic oligonucleotide
  Antisense strand to SEQ ID NO: 784122
uucucuaauagccaacaau

SEQ ID NO: 784124 - RNA, 19 nt, Artificial Sequence
  Description of Artificial Sequence: Synthetic oligonucleotide
  Sense strand starting at position 2324 of SEQ ID NO: 587327
auaccauuagaaggguuau

SEQ ID NO: 784125 - RNA, 19 nt, Artificial Sequence
  Description of Artificial Sequence: Synthetic oligonucleotide
  Antisense strand to SEQ ID NO: 784124
auaacccuucuaaugguau

SEQ ID NO: 784126 - RNA, 19 nt, Artificial Sequence
  Description of Artificial Sequence: Synthetic oligonucleotide
  Sense strand starting at position 2584 of SEQ ID NO: 587327
ucagccauacaauggaaua

SEQ ID NO: 784127 - RNA, 19 nt, Artificial Sequence
  Description of Artificial Sequence: Synthetic oligonucleotide
  Antisense strand to SEQ ID NO: 784126
uauuccauuguauggcuga

SEQ ID NO: 784128 - RNA, 19 nt, Artificial Sequence
  Description of Artificial Sequence: Synthetic oligonucleotide
  Sense strand starting at position 2658 of SEQ ID NO: 587327
ccaguacuuuaugaggacu

SEQ ID NO: 784129 - RNA, 19 nt, Artificial Sequence
  Description of Artificial Sequence: Synthetic oligonucleotide
  Antisense strand to SEQ ID NO: 784128
aguccucauaaaguacugg

SEQ ID NO: 784130 - RNA, 19 nt, Artificial Sequence
  Description of Artificial Sequence: Synthetic oligonucleotide
  Sense strand starting at position 3017 of SEQ ID NO: 587327
gggaauggaucugggaagu

SEQ ID NO: 784131 - RNA, 19 nt, Artificial Sequence
  Description of Artificial Sequence: Synthetic oligonucleotide
  Antisense strand to SEQ ID NO: 784130
acuucccagauccauuccc

SEQ ID NO: 784132 - RNA, 19 nt, Artificial Sequence
  Description of Artificial Sequence: Synthetic oligonucleotide
  Sense strand starting at position 3049 of SEQ ID NO: 587327
gcaucuguaagguguuauu

SEQ ID NO: 784133 - RNA, 19 nt, Artificial Sequence
  Description of Artificial Sequence: Synthetic oligonucleotide
  Antisense strand to SEQ ID NO: 784132
aauaacaccuuacagaugc

SEQ ID NO: 784134 - RNA, 19 nt, Artificial Sequence
  Description of Artificial Sequence: Synthetic oligonucleotide
  Sense strand starting at position 3233 of SEQ ID NO: 587327
ggagaacucucaucuuauu

SEQ ID NO: 784135 - RNA, 19 nt, Artificial Sequence
  Description of Artificial Sequence: Synthetic oligonucleotide
  Antisense strand to SEQ ID NO: 784134
aauaagaugagaguucucc

SEQ ID NO: 784136 - RNA, 19 nt, Artificial Sequence
  Description of Artificial Sequence: Synthetic oligonucleotide
  Sense strand starting at position 3322 of SEQ ID NO: 587327
ggagcuuuggcagacuugu

SEQ ID NO: 784137 - RNA, 19 nt, Artificial Sequence
  Description of Artificial Sequence: Synthetic oligonucleotide
  Antisense strand to SEQ ID NO: 784136
acaagucugccaaagcucc

SEQ ID NO: 784138 - RNA, 19 nt, Artificial Sequence
  Description of Artificial Sequence: Synthetic oligonucleotide
  Sense strand starting at position 3411 of SEQ ID NO: 587327
acgugaaaggguuauuaug

SEQ ID NO: 784139 - RNA, 19 nt, Artificial Sequence
  Description of Artificial Sequence: Synthetic oligonucleotide
  Antisense strand to SEQ ID NO: 784138
cauaauaacccuuucacgu

SEQ ID NO: 784140 - RNA, 19 nt, Artificial Sequence
  Description of Artificial Sequence: Synthetic oligonucleotide
  Sense strand starting at position 3413 of SEQ ID NO: 587327
gugaaaggguuauuaugau

SEQ ID NO: 784141 - RNA, 19 nt, Artificial Sequence
  Description of Artificial Sequence: Synthetic oligonucleotide
  Antisense strand to SEQ ID NO: 784140
aucauaauaacccuuucac

SEQ ID NO: 784142 - RNA, 19 nt, Artificial Sequence
  Description of Artificial Sequence: Synthetic oligonucleotide
  Sense strand starting at position 3417 of SEQ ID NO: 587327
aaggguuauuaugauagac

SEQ ID NO: 784143 - RNA, 19 nt, Artificial Sequence
  Description of Artificial Sequence: Synthetic oligonucleotide
  Antisense strand to SEQ ID NO: 784142
gucuaucauaauaacccuu

SEQ ID NO: 784144 - RNA, 19 nt, Artificial Sequence
  Description of Artificial Sequence: Synthetic oligonucleotide
  Sense strand starting at position 3419 of SEQ ID NO: 587327
ggguuauuaugauagacug

SEQ ID NO: 784145 - RNA, 19 nt, Artificial Sequence
  Description of Artificial Sequence: Synthetic oligonucleotide
  Antisense strand to SEQ ID NO: 784144
cagucuaucauaauaaccc

SEQ ID NO: 784146 - RNA, 19 nt, Artificial Sequence
  Description of Artificial Sequence: Synthetic oligonucleotide
  Sense strand starting at position 3508 of SEQ ID NO: 587327
cuuauacaaugucuggaau

SEQ ID NO: 784147 - RNA, 19 nt, Artificial Sequence
  Description of Artificial Sequence: Synthetic oligonucleotide
  Antisense strand to SEQ ID NO: 784146
auuccagacauuguauaag

SEQ ID NO: 784148 - RNA, 19 nt, Artificial Sequence
  Description of Artificial Sequence: Synthetic oligonucleotide
  Sense strand starting at position 3536 of SEQ ID NO: 587327
acacaaguaguuuagguua

SEQ ID NO: 784149 - RNA, 19 nt, Artificial Sequence
  Description of Artificial Sequence: Synthetic oligonucleotide
  Antisense strand to SEQ ID NO: 784148
uaaccuaaacuacuugugu

SEQ ID NO: 784150 - RNA, 19 nt, Artificial Sequence
  Description of Artificial Sequence: Synthetic oligonucleotide
  Sense strand starting at position 3605 of SEQ ID NO: 587327
ggcuauuuaucuucuguuu

SEQ ID NO: 784151 - RNA, 19 nt, Artificial Sequence
  Description of Artificial Sequence: Synthetic oligonucleotide
  Antisense strand to SEQ ID NO: 784150
aaacagaagauaaauagcc

SEQ ID NO: 784152 - RNA, 19 nt, Artificial Sequence
  Description of Artificial Sequence: Synthetic oligonucleotide
  Sense strand starting at position 3658 of SEQ ID NO: 587327
ucuuauaaacuaggcaaga

SEQ ID NO: 784153 - RNA, 19 nt, Artificial Sequence
  Description of Artificial Sequence: Synthetic oligonucleotide
  Antisense strand to SEQ ID NO: 784152
ucuugccuaguuuauaaga

SEQ ID NO: 784154 - RNA, 19 nt, Artificial Sequence
  Description of Artificial Sequence: Synthetic oligonucleotide
  Sense strand starting at position 3837 of SEQ ID NO: 587327
cugcaaugucucugaagga

SEQ ID NO: 784155 - RNA, 19 nt, Artificial Sequence
  Description of Artificial Sequence: Synthetic oligonucleotide
  Antisense strand to SEQ ID NO: 784154
uccuucagagacauugcag

SEQ ID NO: 784156 - RNA, 19 nt, Artificial Sequence
  Description of Artificial Sequence: Synthetic oligonucleotide
  Sense strand starting at position 3838 of SEQ ID NO: 587327
ugcaaugucucugaaggaa

SEQ ID NO: 784157 - RNA, 19 nt, Artificial Sequence
  Description of Artificial Sequence: Synthetic oligonucleotide
  Antisense strand to SEQ ID NO: 784156
uuccuucagagacauugca

SEQ ID NO: 784158 - RNA, 19 nt, Artificial Sequence
  Description of Artificial Sequence: Synthetic oligonucleotide
  Sense strand starting at position 3880 of SEQ ID NO: 587327
uggugucaucucgaagcaa

SEQ ID NO: 784159 - RNA, 19 nt, Artificial Sequence
  Description of Artificial Sequence: Synthetic oligonucleotide
  Antisense strand to SEQ ID NO: 784158
uugcuucgagaugacacca

SEQ ID NO: 784160 - RNA, 19 nt, Artificial Sequence
  Description of Artificial Sequence: Synthetic oligonucleotide
  Sense strand starting at position 3905 of SEQ ID NO: 587327
ugugguggccgauguuaga

SEQ ID NO: 784161 - RNA, 19 nt, Artificial Sequence
  Description of Artificial Sequence: Synthetic oligonucleotide
  Antisense strand to SEQ ID NO: 784160
ucuaacaucggccaccaca

SEQ ID NO: 784162 - RNA, 19 nt, Artificial Sequence
  Description of Artificial Sequence: Synthetic oligonucleotide
  Sense strand starting at position 3916 of SEQ ID NO: 587327
auguuagacuccugcauac

SEQ ID NO: 784163 - RNA, 19 nt, Artificial Sequence
  Description of Artificial Sequence: Synthetic oligonucleotide
  Antisense strand to SEQ ID NO: 784162
guaugcaggagucuaacau

SEQ ID NO: 784164 - RNA, 19 nt, Artificial Sequence
  Description of Artificial Sequence: Synthetic oligonucleotide
  Sense strand starting at position 3945 of SEQ ID NO: 587327
acacaaggccuguagcauu

SEQ ID NO: 784165 - RNA, 19 nt, Artificial Sequence
  Description of Artificial Sequence: Synthetic oligonucleotide
  Antisense strand to SEQ ID NO: 784164
aaugcuacaggccuugugu

SEQ ID NO: 784166 - RNA, 19 nt, Artificial Sequence
  Description of Artificial Sequence: Synthetic oligonucleotide
  Sense strand starting at position 3973 of SEQ ID NO: 587327
ucagaaagaugcuaccuaa

SEQ ID NO: 784167 - RNA, 19 nt, Artificial Sequence
  Description of Artificial Sequence: Synthetic oligonucleotide
  Antisense strand to SEQ ID NO: 784166
uuagguagcaucuuucuga

SEQ ID NO: 784168 - RNA, 19 nt, Artificial Sequence
  Description of Artificial Sequence: Synthetic oligonucleotide
  Sense strand starting at position 115 of SEQ ID NO: 587328
ucagcaacuuucugaacgu

SEQ ID NO: 784169 - RNA, 19 nt, Artificial Sequence
  Description of Artificial Sequence: Synthetic oligonucleotide
  Antisense strand to SEQ ID NO: 784168
acguucagaaaguugcuga

SEQ ID NO: 784170 - RNA, 19 nt, Artificial Sequence
  Description of Artificial Sequence: Synthetic oligonucleotide
  Sense strand starting at position 216 of SEQ ID NO: 587328
cugugacuaucaccaggau

SEQ ID NO: 784171 - RNA, 19 nt, Artificial Sequence
  Description of Artificial Sequence: Synthetic oligonucleotide
  Antisense strand to SEQ ID NO: 784170
auccuggugauagucacag

SEQ ID NO: 784172 - RNA, 19 nt, Artificial Sequence
  Description of Artificial Sequence: Synthetic oligonucleotide
  Sense strand starting at position 276 of SEQ ID NO: 587328
gcugcuuccucuuugauca

SEQ ID NO: 784173 - RNA, 19 nt, Artificial Sequence
  Description of Artificial Sequence: Synthetic oligonucleotide
  Antisense strand to SEQ ID NO: 784172
ugaucaaagaggaagcagc

SEQ ID NO: 784174 - RNA, 19 nt, Artificial Sequence
  Description of Artificial Sequence: Synthetic oligonucleotide
  Sense strand starting at position 381 of SEQ ID NO: 587328
gcgagugaggguugauaug

SEQ ID NO: 784175 - RNA, 19 nt, Artificial Sequence
  Description of Artificial Sequence: Synthetic oligonucleotide
  Antisense strand to SEQ ID NO: 784174
cauaucaacccucacucgc

SEQ ID NO: 784176 - RNA, 19 nt, Artificial Sequence
  Description of Artificial Sequence: Synthetic oligonucleotide
  Sense strand starting at position 426 of SEQ ID NO: 587328
gugaacuaccaaugacagu

SEQ ID NO: 784177 - RNA, 19 nt, Artificial Sequence
  Description of Artificial Sequence: Synthetic oligonucleotide
  Antisense strand to SEQ ID NO: 784176
acugucauugguaguucac

SEQ ID NO: 784178 - RNA, 19 nt, Artificial Sequence
  Description of Artificial Sequence: Synthetic oligonucleotide
  Sense strand starting at position 441 of SEQ ID NO: 587328
cagucagugcugcggagau

SEQ ID NO: 784179 - RNA, 19 nt, Artificial Sequence
  Description of Artificial Sequence: Synthetic oligonucleotide
  Antisense strand to SEQ ID NO: 784178
aucuccgcagcacugacug

SEQ ID NO: 784180 - RNA, 19 nt, Artificial Sequence
  Description of Artificial Sequence: Synthetic oligonucleotide
  Sense strand starting at position 600 of SEQ ID NO: 587328
gcacaaguucuccaaguaa

SEQ ID NO: 784181 - RNA, 19 nt, Artificial Sequence
  Description of Artificial Sequence: Synthetic oligonucleotide
  Antisense strand to SEQ ID NO: 784180
uuacuuggagaacuugugc

SEQ ID NO: 784182 - RNA, 19 nt, Artificial Sequence
  Description of Artificial Sequence: Synthetic oligonucleotide
  Sense strand starting at position 1055 of SEQ ID NO: 587328
cagagaugcugugaggaag

SEQ ID NO: 784183 - RNA, 19 nt, Artificial Sequence
  Description of Artificial Sequence: Synthetic oligonucleotide
  Antisense strand to SEQ ID NO: 784182
cuuccucacagcaucucug

SEQ ID NO: 784184 - RNA, 19 nt, Artificial Sequence
  Description of Artificial Sequence: Synthetic oligonucleotide
  Sense strand starting at position 1496 of SEQ ID NO: 587328
ccauucucccugggaguca

SEQ ID NO: 784185 - RNA, 19 nt, Artificial Sequence
  Description of Artificial Sequence: Synthetic oligonucleotide
  Antisense strand to SEQ ID NO: 784184
ugacucccagggagaaugg

SEQ ID NO: 784186 - RNA, 19 nt, Artificial Sequence
  Description of Artificial Sequence: Synthetic oligonucleotide
  Sense strand starting at position 2121 of SEQ ID NO: 587328
ggucccagaccucgucuua

SEQ ID NO: 784187 - RNA, 19 nt, Artificial Sequence
  Description of Artificial Sequence: Synthetic oligonucleotide
  Antisense strand to SEQ ID NO: 784186
uaagacgaggucugggacc

SEQ ID NO: 784188 - RNA, 19 nt, Artificial Sequence
  Description of Artificial Sequence: Synthetic oligonucleotide
  Sense strand starting at position 2128 of SEQ ID NO: 587328
gaccucgucuuagacaguu

SEQ ID NO: 784189 - RNA, 19 nt, Artificial Sequence
  Description of Artificial Sequence: Synthetic oligonucleotide
  Antisense strand to SEQ ID NO: 784188
aacugucuaagacgagguc

SEQ ID NO: 784190 - RNA, 19 nt, Artificial Sequence
  Description of Artificial Sequence: Synthetic oligonucleotide
  Sense strand starting at position 2187 of SEQ ID NO: 587328
uguuuccguuucugaggua

SEQ ID NO: 784191 - RNA, 19 nt, Artificial Sequence
  Description of Artificial Sequence: Synthetic oligonucleotide
  Antisense strand to SEQ ID NO: 784190
uaccucagaaacggaaaca

SEQ ID NO: 784192 - RNA, 19 nt, Artificial Sequence
  Description of Artificial Sequence: Synthetic oligonucleotide
  Sense strand starting at position 2190 of SEQ ID NO: 587328
uuccguuucugagguagaa

SEQ ID NO: 784193 - RNA, 19 nt, Artificial Sequence
  Description of Artificial Sequence: Synthetic oligonucleotide
  Antisense strand to SEQ ID NO: 784192
uucuaccucagaaacggaa

SEQ ID NO: 784194 - RNA, 19 nt, Artificial Sequence
  Description of Artificial Sequence: Synthetic oligonucleotide
  Sense strand starting at position 2192 of SEQ ID NO: 587328
ccguuucugagguagaaac

SEQ ID NO: 784195 - RNA, 19 nt, Artificial Sequence
  Description of Artificial Sequence: Synthetic oligonucleotide
  Antisense strand to SEQ ID NO: 784194
guuucuaccucagaaacgg

SEQ ID NO: 784196 - RNA, 19 nt, Artificial Sequence
  Description of Artificial Sequence: Synthetic oligonucleotide
  Sense strand starting at position 2532 of SEQ ID NO: 587328
ggagcucgguccgaaacaa

SEQ ID NO: 784197 - RNA, 19 nt, Artificial Sequence
  Description of Artificial Sequence: Synthetic oligonucleotide
  Antisense strand to SEQ ID NO: 784196
uuguuucggaccgagcucc

SEQ ID NO: 784198 - RNA, 19 nt, Artificial Sequence
  Description of Artificial Sequence: Synthetic oligonucleotide
  Sense strand starting at position 2544 of SEQ ID NO: 587328
gaaacaauggccgagccau

SEQ ID NO: 784199 - RNA, 19 nt, Artificial Sequence
  Description of Artificial Sequence: Synthetic oligonucleotide
  Antisense strand to SEQ ID NO: 784198
auggcucggccauuguuuc

SEQ ID NO: 784200 - RNA, 19 nt, Artificial Sequence
  Description of Artificial Sequence: Synthetic oligonucleotide
  Sense strand starting at position 2571 of SEQ ID NO: 587328
acauguacuuuaccauagu

SEQ ID NO: 784201 - RNA, 19 nt, Artificial Sequence
  Description of Artificial Sequence: Synthetic oligonucleotide
  Antisense strand to SEQ ID NO: 784200
acuaugguaaaguacaugu

SEQ ID NO: 784202 - RNA, 19 nt, Artificial Sequence
  Description of Artificial Sequence: Synthetic oligonucleotide
  Sense strand starting at position 2574 of SEQ ID NO: 587328
uguacuuuaccauaguuaa

SEQ ID NO: 784203 - RNA, 19 nt, Artificial Sequence
  Description of Artificial Sequence: Synthetic oligonucleotide
  Antisense strand to SEQ ID NO: 784202
uuaacuaugguaaaguaca

SEQ ID NO: 784204 - RNA, 19 nt, Artificial Sequence
  Description of Artificial Sequence: Synthetic oligonucleotide
  Sense strand starting at position 2643 of SEQ ID NO: 587328
guaugugaauuauagccca

SEQ ID NO: 784205 - RNA, 19 nt, Artificial Sequence
  Description of Artificial Sequence: Synthetic oligonucleotide
  Antisense strand to SEQ ID NO: 784204
ugggcuauaauucacauac

SEQ ID NO: 784206 - RNA, 19 nt, Artificial Sequence
  Description of Artificial Sequence: Synthetic oligonucleotide
  Sense strand starting at position 2646 of SEQ ID NO: 587328
ugugaauuauagcccaaua

SEQ ID NO: 784207 - RNA, 19 nt, Artificial Sequence
  Description of Artificial Sequence: Synthetic oligonucleotide
  Antisense strand to SEQ ID NO: 784206
uauugggcuauaauucaca

SEQ ID NO: 784208 - RNA, 19 nt, Artificial Sequence
  Description of Artificial Sequence: Synthetic oligonucleotide
  Sense strand starting at position 2717 of SEQ ID NO: 587328
ggcagaagaugugaguaga

SEQ ID NO: 784209 - RNA, 19 nt, Artificial Sequence
  Description of Artificial Sequence: Synthetic oligonucleotide
  Antisense strand to SEQ ID NO: 784208
ucuacucacaucuucugcc

SEQ ID NO: 784210 - RNA, 19 nt, Artificial Sequence
  Description of Artificial Sequence: Synthetic oligonucleotide
  Sense strand starting at position 2754 of SEQ ID NO: 587328
guggguaauggguacauga

SEQ ID NO: 784211 - RNA, 19 nt, Artificial Sequence
  Description of Artificial Sequence: Synthetic oligonucleotide
  Antisense strand to SEQ ID NO: 784210
ucauguacccauuacccac

SEQ ID NO: 784212 - RNA, 19 nt, Artificial Sequence
  Description of Artificial Sequence: Synthetic oligonucleotide
  Sense strand starting at position 2767 of SEQ ID NO: 587328
acaugaagccuucggcauu

SEQ ID NO: 784213 - RNA, 19 nt, Artificial Sequence
  Description of Artificial Sequence: Synthetic oligonucleotide
  Antisense strand to SEQ ID NO: 784212
aaugccgaaggcuucaugu

SEQ ID NO: 784214 - RNA, 19 nt, Artificial Sequence
  Description of Artificial Sequence: Synthetic oligonucleotide
  Sense strand starting at position 2778 of SEQ ID NO: 587328
ucggcauuguuggcuauua

SEQ ID NO: 784215 - RNA, 19 nt, Artificial Sequence
  Description of Artificial Sequence: Synthetic oligonucleotide
  Antisense strand to SEQ ID NO: 784214
uaauagccaacaaugccga

SEQ ID NO: 784216 - RNA, 19 nt, Artificial Sequence
  Description of Artificial Sequence: Synthetic oligonucleotide
  Sense strand starting at position 2780 of SEQ ID NO: 587328
ggcauuguuggcuauuaga

SEQ ID NO: 784217 - RNA, 19 nt, Artificial Sequence
  Description of Artificial Sequence: Synthetic oligonucleotide
  Antisense strand to SEQ ID NO: 784216
ucuaauagccaacaaugcc

SEQ ID NO: 784218 - RNA, 19 nt, Artificial Sequence
  Description of Artificial Sequence: Synthetic oligonucleotide
  Sense strand starting at position 2783 of SEQ ID NO: 587328
auuguuggcuauuagagaa

SEQ ID NO: 784219 - RNA, 19 nt, Artificial Sequence
  Description of Artificial Sequence: Synthetic oligonucleotide
  Antisense strand to SEQ ID NO: 784218
uucucuaauagccaacaau

SEQ ID NO: 784220 - RNA, 19 nt, Artificial Sequence
  Description of Artificial Sequence: Synthetic oligonucleotide
  Sense strand starting at position 2835 of SEQ ID NO: 587328
auaccauuagaaggguuau

SEQ ID NO: 784221 - RNA, 19 nt, Artificial Sequence
  Description of Artificial Sequence: Synthetic oligonucleotide
  Antisense strand to SEQ ID NO: 784220
auaacccuucuaaugguau

SEQ ID NO: 784222 - RNA, 19 nt, Artificial Sequence
  Description of Artificial Sequence: Synthetic oligonucleotide
  Sense strand starting at position 3095 of SEQ ID NO: 587328
ucagccauacaauggaaua

SEQ ID NO: 784223 - RNA, 19 nt, Artificial Sequence
  Description of Artificial Sequence: Synthetic oligonucleotide
  Antisense strand to SEQ ID NO: 784222
uauuccauuguauggcuga

SEQ ID NO: 784224 - RNA, 19 nt, Artificial Sequence
  Description of Artificial Sequence: Synthetic oligonucleotide
  Sense strand starting at position 3169 of SEQ ID NO: 587328
ccaguacuuuaugaggacu

SEQ ID NO: 784225 - RNA, 19 nt, Artificial Sequence
  Description of Artificial Sequence: Synthetic oligonucleotide
  Antisense strand to SEQ ID NO: 784224
aguccucauaaaguacugg

SEQ ID NO: 784226 - RNA, 19 nt, Artificial Sequence
  Description of Artificial Sequence: Synthetic oligonucleotide
  Sense strand starting at position 3528 of SEQ ID NO: 587328
gggaauggaucugggaagu

SEQ ID NO: 784227 - RNA, 19 nt, Artificial Sequence
  Description of Artificial Sequence: Synthetic oligonucleotide
  Antisense strand to SEQ ID NO: 784226
acuucccagauccauuccc

SEQ ID NO: 784228 - RNA, 19 nt, Artificial Sequence
  Description of Artificial Sequence: Synthetic oligonucleotide
  Sense strand starting at position 3558 of SEQ ID NO: 587328
cugcaucuguaagguguua

SEQ ID NO: 784229 - RNA, 19 nt, Artificial Sequence
  Description of Artificial Sequence: Synthetic oligonucleotide
  Antisense strand to SEQ ID NO: 784228
uaacaccuuacagaugcag

SEQ ID NO: 784230 - RNA, 19 nt, Artificial Sequence
  Description of Artificial Sequence: Synthetic oligonucleotide
  Sense strand starting at position 3560 of SEQ ID NO: 587328
gcaucuguaagguguuauu

SEQ ID NO: 784231 - RNA, 19 nt, Artificial Sequence
  Description of Artificial Sequence: Synthetic oligonucleotide
  Antisense strand to SEQ ID NO: 784230
aauaacaccuuacagaugc

SEQ ID NO: 784232 - RNA, 19 nt, Artificial Sequence
  Description of Artificial Sequence: Synthetic oligonucleotide
  Sense strand starting at position 3612 of SEQ ID NO: 587328
ugcuaucacuugugagguc

SEQ ID NO: 784233 - RNA, 19 nt, Artificial Sequence
  Description of Artificial Sequence: Synthetic oligonucleotide
  Antisense strand to SEQ ID NO: 784232
gaccucacaagugauagca

SEQ ID NO: 784234 - RNA, 19 nt, Artificial Sequence
  Description of Artificial Sequence: Synthetic oligonucleotide
  Sense strand starting at position 3744 of SEQ ID NO: 587328
ggagaacucucaucuuauu

SEQ ID NO: 784235 - RNA, 19 nt, Artificial Sequence
  Description of Artificial Sequence: Synthetic oligonucleotide
  Antisense strand to SEQ ID NO: 784234
aauaagaugagaguucucc

SEQ ID NO: 784236 - RNA, 19 nt, Artificial Sequence
  Description of Artificial Sequence: Synthetic oligonucleotide
  Sense strand starting at position 3833 of SEQ ID NO: 587328
ggagcuuuggcagacuugu

SEQ ID NO: 784237 - RNA, 19 nt, Artificial Sequence
  Description of Artificial Sequence: Synthetic oligonucleotide
  Antisense strand to SEQ ID NO: 784236
acaagucugccaaagcucc

SEQ ID NO: 784238 - RNA, 19 nt, Artificial Sequence
  Description of Artificial Sequence: Synthetic oligonucleotide
  Sense strand starting at position 3839 of SEQ ID NO: 587328
uuggcagacuugugucuua

SEQ ID NO: 784239 - RNA, 19 nt, Artificial Sequence
  Description of Artificial Sequence: Synthetic oligonucleotide
  Antisense strand to SEQ ID NO: 784238
uaagacacaagucugccaa

SEQ ID NO: 784240 - RNA, 19 nt, Artificial Sequence
  Description of Artificial Sequence: Synthetic oligonucleotide
  Sense strand starting at position 3922 of SEQ ID NO: 587328
acgugaaaggguuauuaug

SEQ ID NO: 784241 - RNA, 19 nt, Artificial Sequence
  Description of Artificial Sequence: Synthetic oligonucleotide
  Antisense strand to SEQ ID NO: 784240
cauaauaacccuuucacgu

SEQ ID NO: 784242 - RNA, 19 nt, Artificial Sequence
  Description of Artificial Sequence: Synthetic oligonucleotide
  Sense strand starting at position 3924 of SEQ ID NO: 587328
gugaaaggguuauuaugau

SEQ ID NO: 784243 - RNA, 19 nt, Artificial Sequence
  Description of Artificial Sequence: Synthetic oligonucleotide
  Antisense strand to SEQ ID NO: 784242
aucauaauaacccuuucac

SEQ ID NO: 784244 - RNA, 19 nt, Artificial Sequence
  Description of Artificial Sequence: Synthetic oligonucleotide
  Sense strand starting at position 3928 of SEQ ID NO: 587328
aaggguuauuaugauagac

SEQ ID NO: 784245 - RNA, 19 nt, Artificial Sequence
  Description of Artificial Sequence: Synthetic oligonucleotide
  Antisense strand to SEQ ID NO: 784244
gucuaucauaauaacccuu

SEQ ID NO: 784246 - RNA, 19 nt, Artificial Sequence
  Description of Artificial Sequence: Synthetic oligonucleotide
  Sense strand starting at position 3930 of SEQ ID NO: 587328
ggguuauuaugauagacug

SEQ ID NO: 784247 - RNA, 19 nt, Artificial Sequence
  Description of Artificial Sequence: Synthetic oligonucleotide
  Antisense strand to SEQ ID NO: 784246
cagucuaucauaauaaccc

SEQ ID NO: 784248 - RNA, 19 nt, Artificial Sequence
  Description of Artificial Sequence: Synthetic oligonucleotide
  Sense strand starting at position 314 of SEQ ID NO: 587329
accaauaaguaggucuuau

SEQ ID NO: 784249 - RNA, 19 nt, Artificial Sequence
  Description of Artificial Sequence: Synthetic oligonucleotide
  Antisense strand to SEQ ID NO: 784248
auaagaccuacuuauuggu

SEQ ID NO: 784250 - RNA, 19 nt, Artificial Sequence
  Description of Artificial Sequence: Synthetic oligonucleotide
  Sense strand starting at position 378 of SEQ ID NO: 587329
ucaaucaacuaguuaguga

SEQ ID NO: 784251 - RNA, 19 nt, Artificial Sequence
  Description of Artificial Sequence: Synthetic oligonucleotide
  Antisense strand to SEQ ID NO: 784250
ucacuaacuaguugauuga

SEQ ID NO: 784252 - RNA, 19 nt, Artificial Sequence
  Description of Artificial Sequence: Synthetic oligonucleotide
  Sense strand starting at position 410 of SEQ ID NO: 587329
ugaucuuaggucugacuau

SEQ ID NO: 784253 - RNA, 19 nt, Artificial Sequence
  Description of Artificial Sequence: Synthetic oligonucleotide
  Antisense strand to SEQ ID NO: 784252
auagucagaccuaagauca

SEQ ID NO: 784254 - RNA, 19 nt, Artificial Sequence
  Description of Artificial Sequence: Synthetic oligonucleotide
  Sense strand starting at position 421 of SEQ ID NO: 587329
cugacuauugcucaguuga

SEQ ID NO: 784255 - RNA, 19 nt, Artificial Sequence
  Description of Artificial Sequence: Synthetic oligonucleotide
  Antisense strand to SEQ ID NO: 784254
ucaacugagcaauagucag

SEQ ID NO: 784256 - RNA, 19 nt, Artificial Sequence
  Description of Artificial Sequence: Synthetic oligonucleotide
  Sense strand starting at position 450 of SEQ ID NO: 587329
augucaguaugaucauaaa

SEQ ID NO: 784257 - RNA, 19 nt, Artificial Sequence
  Description of Artificial Sequence: Synthetic oligonucleotide
  Antisense strand to SEQ ID NO: 784256
uuuaugaucauacugacau

SEQ ID NO: 784258 - RNA, 19 nt, Artificial Sequence
  Description of Artificial Sequence: Synthetic oligonucleotide
  Sense strand starting at position 541 of SEQ ID NO: 587329
auuaaaugacguggaaauc

SEQ ID NO: 784259 - RNA, 19 nt, Artificial Sequence
  Description of Artificial Sequence: Synthetic oligonucleotide
  Antisense strand to SEQ ID NO: 784258
gauuuccacgucauuuaau

SEQ ID NO: 784260 - RNA, 19 nt, Artificial Sequence
  Description of Artificial Sequence: Synthetic oligonucleotide
  Sense strand starting at position 550 of SEQ ID NO: 587329
cguggaaaucucuagcuag

SEQ ID NO: 784261 - RNA, 19 nt, Artificial Sequence
  Description of Artificial Sequence: Synthetic oligonucleotide
  Antisense strand to SEQ ID NO: 784260
cuagcuagagauuuccacg

SEQ ID NO: 784262 - RNA, 19 nt, Artificial Sequence
  Description of Artificial Sequence: Synthetic oligonucleotide
  Sense strand starting at position 553 of SEQ ID NO: 587329
ggaaaucucuagcuaggug

SEQ ID NO: 784263 - RNA, 19 nt, Artificial Sequence
  Description of Artificial Sequence: Synthetic oligonucleotide
  Antisense strand to SEQ ID NO: 784262
caccuagcuagagauuucc

SEQ ID NO: 784264 - RNA, 19 nt, Artificial Sequence
  Description of Artificial Sequence: Synthetic oligonucleotide
  Sense strand starting at position 800 of SEQ ID NO: 587329
ggguaaagaucccucgacu

SEQ ID NO: 784265 - RNA, 19 nt, Artificial Sequence
  Description of Artificial Sequence: Synthetic oligonucleotide
  Antisense strand to SEQ ID NO: 784264
agucgagggaucuuuaccc

SEQ ID NO: 784266 - RNA, 19 nt, Artificial Sequence
  Description of Artificial Sequence: Synthetic oligonucleotide
  Sense strand starting at position 803 of SEQ ID NO: 587329
uaaagaucccucgacuugu

SEQ ID NO: 784267 - RNA, 19 nt, Artificial Sequence
  Description of Artificial Sequence: Synthetic oligonucleotide
  Antisense strand to SEQ ID NO: 784266
acaagucgagggaucuuua

SEQ ID NO: 784268 - RNA, 19 nt, Artificial Sequence
  Description of Artificial Sequence: Synthetic oligonucleotide
  Sense strand starting at position 843 of SEQ ID NO: 587329
gauauuguugaagggcaaa

SEQ ID NO: 784269 - RNA, 19 nt, Artificial Sequence
  Description of Artificial Sequence: Synthetic oligonucleotide
  Antisense strand to SEQ ID NO: 784268
uuugcccuucaacaauauc

SEQ ID NO: 784270 - RNA, 19 nt, Artificial Sequence
  Description of Artificial Sequence: Synthetic oligonucleotide
  Sense strand starting at position 896 of SEQ ID NO: 587329
augggaacugguggaguaa

SEQ ID NO: 784271 - RNA, 19 nt, Artificial Sequence
  Description of Artificial Sequence: Synthetic oligonucleotide
  Antisense strand to SEQ ID NO: 784270
uuacuccaccaguucccau

SEQ ID NO: 784272 - RNA, 19 nt, Artificial Sequence
  Description of Artificial Sequence: Synthetic oligonucleotide
  Sense strand starting at position 898 of SEQ ID NO: 587329
gggaacugguggaguaaca

SEQ ID NO: 784273 - RNA, 19 nt, Artificial Sequence
  Description of Artificial Sequence: Synthetic oligonucleotide
  Antisense strand to SEQ ID NO: 784272
uguuacuccaccaguuccc

SEQ ID NO: 784274 - RNA, 19 nt, Artificial Sequence
  Description of Artificial Sequence: Synthetic oligonucleotide
  Sense strand starting at position 940 of SEQ ID NO: 587329
cuccgugugccuccgaaau

SEQ ID NO: 784275 - RNA, 19 nt, Artificial Sequence
  Description of Artificial Sequence: Synthetic oligonucleotide
  Antisense strand to SEQ ID NO: 784274
auuucggaggcacacggag

SEQ ID NO: 784276 - RNA, 19 nt, Artificial Sequence
  Description of Artificial Sequence: Synthetic oligonucleotide
  Sense strand starting at position 952 of SEQ ID NO: 587329
ccgaaauaauuaccagcaa

SEQ ID NO: 784277 - RNA, 19 nt, Artificial Sequence
  Description of Artificial Sequence: Synthetic oligonucleotide
  Antisense strand to SEQ ID NO: 784276
uugcugguaauuauuucgg

SEQ ID NO: 784278 - RNA, 19 nt, Artificial Sequence
  Description of Artificial Sequence: Synthetic oligonucleotide
  Sense strand starting at position 1184 of SEQ ID NO: 587329
ccaguuugggauuaguuga

SEQ ID NO: 784279 - RNA, 19 nt, Artificial Sequence
  Description of Artificial Sequence: Synthetic oligonucleotide
  Antisense strand to SEQ ID NO: 784278
ucaacuaaucccaaacugg

SEQ ID NO: 784280 - RNA, 19 nt, Artificial Sequence
  Description of Artificial Sequence: Synthetic oligonucleotide
  Sense strand starting at position 1383 of SEQ ID NO: 587329
gcucuacuugcagauccaa

SEQ ID NO: 784281 - RNA, 19 nt, Artificial Sequence
  Description of Artificial Sequence: Synthetic oligonucleotide
  Antisense strand to SEQ ID NO: 784280
uuggaucugcaaguagagc

SEQ ID NO: 784282 - RNA, 19 nt, Artificial Sequence
  Description of Artificial Sequence: Synthetic oligonucleotide
  Sense strand starting at position 1570 of SEQ ID NO: 587329
ucuugucguauuuguagau

SEQ ID NO: 784283 - RNA, 19 nt, Artificial Sequence
  Description of Artificial Sequence: Synthetic oligonucleotide
  Antisense strand to SEQ ID NO: 784282
aucuacaaauacgacaaga

SEQ ID NO: 784284 - RNA, 19 nt, Artificial Sequence
  Description of Artificial Sequence: Synthetic oligonucleotide
  Sense strand starting at position 1571 of SEQ ID NO: 587329
cuugucguauuuguagauu

SEQ ID NO: 784285 - RNA, 19 nt, Artificial Sequence
  Description of Artificial Sequence: Synthetic oligonucleotide
  Antisense strand to SEQ ID NO: 784284
aaucuacaaauacgacaag

SEQ ID NO: 784286 - RNA, 19 nt, Artificial Sequence
  Description of Artificial Sequence: Synthetic oligonucleotide
  Sense strand starting at position 1887 of SEQ ID NO: 587329
caguaauagcgagagacga

SEQ ID NO: 784287 - RNA, 19 nt, Artificial Sequence
  Description of Artificial Sequence: Synthetic oligonucleotide
  Antisense strand to SEQ ID NO: 784286
ucgucucucgcuauuacug

SEQ ID NO: 784288 - RNA, 19 nt, Artificial Sequence
  Description of Artificial Sequence: Synthetic oligonucleotide
  Sense strand starting at position 1889 of SEQ ID NO: 587329
guaauagcgagagacgaau

SEQ ID NO: 784289 - RNA, 19 nt, Artificial Sequence
  Description of Artificial Sequence: Synthetic oligonucleotide
  Antisense strand to SEQ ID NO: 784288
auucgucucucgcuauuac

SEQ ID NO: 784290 - RNA, 19 nt, Artificial Sequence
  Description of Artificial Sequence: Synthetic oligonucleotide
  Sense strand starting at position 1898 of SEQ ID NO: 587329
agagacgaaucuucuuguu

SEQ ID NO: 784291 - RNA, 19 nt, Artificial Sequence
  Description of Artificial Sequence: Synthetic oligonucleotide
  Antisense strand to SEQ ID NO: 784290
aacaagaagauucgucucu

SEQ ID NO: 784292 - RNA, 19 nt, Artificial Sequence
  Description of Artificial Sequence: Synthetic oligonucleotide
  Sense strand starting at position 1908 of SEQ ID NO: 587329
cuucuuguugcuuaaauga

SEQ ID NO: 784293 - RNA, 19 nt, Artificial Sequence
  Description of Artificial Sequence: Synthetic oligonucleotide
  Antisense strand to SEQ ID NO: 784292
ucauuuaagcaacaagaag

SEQ ID NO: 784294 - RNA, 19 nt, Artificial Sequence
  Description of Artificial Sequence: Synthetic oligonucleotide
  Sense strand starting at position 1925 of SEQ ID NO: 587329
gagaacaucuugucucgga

SEQ ID NO: 784295 - RNA, 19 nt, Artificial Sequence
  Description of Artificial Sequence: Synthetic oligonucleotide
  Antisense strand to SEQ ID NO: 784294
uccgagacaagauguucuc

SEQ ID NO: 784296 - RNA, 19 nt, Artificial Sequence
  Description of Artificial Sequence: Synthetic oligonucleotide
  Sense strand starting at position 1926 of SEQ ID NO: 587329
agaacaucuugucucggaa

SEQ ID NO: 784297 - RNA, 19 nt, Artificial Sequence
  Description of Artificial Sequence: Synthetic oligonucleotide
  Antisense strand to SEQ ID NO: 784296
uuccgagacaagauguucu

SEQ ID NO: 784298 - RNA, 19 nt, Artificial Sequence
  Description of Artificial Sequence: Synthetic oligonucleotide
  Sense strand starting at position 1979 of SEQ ID NO: 587329
aggguaugggagugguaua

SEQ ID NO: 784299 - RNA, 19 nt, Artificial Sequence
  Description of Artificial Sequence: Synthetic oligonucleotide
  Antisense strand to SEQ ID NO: 784298
uauaccacucccauacccu

SEQ ID NO: 784300 - RNA, 19 nt, Artificial Sequence
  Description of Artificial Sequence: Synthetic oligonucleotide
  Sense strand starting at position 1984 of SEQ ID NO: 587329
augggagugguauagucuu

SEQ ID NO: 784301 - RNA, 19 nt, Artificial Sequence
  Description of Artificial Sequence: Synthetic oligonucleotide
  Antisense strand to SEQ ID NO: 784300
aagacuauaccacucccau

SEQ ID NO: 784302 - RNA, 19 nt, Artificial Sequence
  Description of Artificial Sequence: Synthetic oligonucleotide
  Sense strand starting at position 2025 of SEQ ID NO: 587329
aacguuauuccagaaacug

SEQ ID NO: 784303 - RNA, 19 nt, Artificial Sequence
  Description of Artificial Sequence: Synthetic oligonucleotide
  Antisense strand to SEQ ID NO: 784302
caguuucuggaauaacguu

SEQ ID NO: 784304 - RNA, 19 nt, Artificial Sequence
  Description of Artificial Sequence: Synthetic oligonucleotide
  Sense strand starting at position 2148 of SEQ ID NO: 587329
ggguauagguaccuuaaau

SEQ ID NO: 784305 - RNA, 19 nt, Artificial Sequence
  Description of Artificial Sequence: Synthetic oligonucleotide
  Antisense strand to SEQ ID NO: 784304
auuuaagguaccuauaccc

SEQ ID NO: 784306 - RNA, 19 nt, Artificial Sequence
  Description of Artificial Sequence: Synthetic oligonucleotide
  Sense strand starting at position 2165 of SEQ ID NO: 587329
augagauaaguuuguugaa

SEQ ID NO: 784307 - RNA, 19 nt, Artificial Sequence
  Description of Artificial Sequence: Synthetic oligonucleotide
  Antisense strand to SEQ ID NO: 784306
uucaacaaacuuaucucau

SEQ ID NO: 784308 - RNA, 19 nt, Artificial Sequence
  Description of Artificial Sequence: Synthetic oligonucleotide
  Sense strand starting at position 2166 of SEQ ID NO: 587329
ugagauaaguuuguugaaa

SEQ ID NO: 784309 - RNA, 19 nt, Artificial Sequence
  Description of Artificial Sequence: Synthetic oligonucleotide
  Antisense strand to SEQ ID NO: 784308
uuucaacaaacuuaucuca

SEQ ID NO: 784310 - RNA, 19 nt, Artificial Sequence
  Description of Artificial Sequence: Synthetic oligonucleotide
  Sense strand starting at position 2167 of SEQ ID NO: 587329
gagauaaguuuguugaaag

SEQ ID NO: 784311 - RNA, 19 nt, Artificial Sequence
  Description of Artificial Sequence: Synthetic oligonucleotide
  Antisense strand to SEQ ID NO: 784310
cuuucaacaaacuuaucuc

SEQ ID NO: 784312 - RNA, 19 nt, Artificial Sequence
  Description of Artificial Sequence: Synthetic oligonucleotide
  Sense strand starting at position 2438 of SEQ ID NO: 587329
ugccauuacugaucugaaa

SEQ ID NO: 784313 - RNA, 19 nt, Artificial Sequence
  Description of Artificial Sequence: Synthetic oligonucleotide
  Antisense strand to SEQ ID NO: 784312
uuucagaucaguaauggca

SEQ ID NO: 784314 - RNA, 19 nt, Artificial Sequence
  Description of Artificial Sequence: Synthetic oligonucleotide
  Sense strand starting at position 2534 of SEQ ID NO: 587329
guaauuaaucuggguaacu

SEQ ID NO: 784315 - RNA, 19 nt, Artificial Sequence
  Description of Artificial Sequence: Synthetic oligonucleotide
  Antisense strand to SEQ ID NO: 784314
aguuacccagauuaauuac

SEQ ID NO: 784316 - RNA, 19 nt, Artificial Sequence
  Description of Artificial Sequence: Synthetic oligonucleotide
  Sense strand starting at position 3197 of SEQ ID NO: 587329
ugcagauaucuuuacuuug

SEQ ID NO: 784317 - RNA, 19 nt, Artificial Sequence
  Description of Artificial Sequence: Synthetic oligonucleotide
  Antisense strand to SEQ ID NO: 784316
caaaguaaagauaucugca

SEQ ID NO: 784318 - RNA, 19 nt, Artificial Sequence
  Description of Artificial Sequence: Synthetic oligonucleotide
  Sense strand starting at position 3239 of SEQ ID NO: 587329
gcuugaaacgcucuuucgu

SEQ ID NO: 784319 - RNA, 19 nt, Artificial Sequence
  Description of Artificial Sequence: Synthetic oligonucleotide
  Antisense strand to SEQ ID NO: 784318
acgaaagagcguuucaagc

SEQ ID NO: 784320 - RNA, 19 nt, Artificial Sequence
  Description of Artificial Sequence: Synthetic oligonucleotide
  Sense strand starting at position 3472 of SEQ ID NO: 587329
ugacuuuccguugaagaaa

SEQ ID NO: 784321 - RNA, 19 nt, Artificial Sequence
  Description of Artificial Sequence: Synthetic oligonucleotide
  Antisense strand to SEQ ID NO: 784320
uuucuucaacggaaaguca

SEQ ID NO: 784322 - RNA, 19 nt, Artificial Sequence
  Description of Artificial Sequence: Synthetic oligonucleotide
  Sense strand starting at position 3557 of SEQ ID NO: 587329
uccacucuccugggaaacu

SEQ ID NO: 784323 - RNA, 19 nt, Artificial Sequence
  Description of Artificial Sequence: Synthetic oligonucleotide
  Antisense strand to SEQ ID NO: 784322
aguuucccaggagagugga

SEQ ID NO: 784324 - RNA, 19 nt, Artificial Sequence
  Description of Artificial Sequence: Synthetic oligonucleotide
  Sense strand starting at position 3696 of SEQ ID NO: 587329
ggaguaaugcccugagagg

SEQ ID NO: 784325 - RNA, 19 nt, Artificial Sequence
  Description of Artificial Sequence: Synthetic oligonucleotide
  Antisense strand to SEQ ID NO: 784324
ccucucagggcauuacucc

SEQ ID NO: 784326 - RNA, 19 nt, Artificial Sequence
  Description of Artificial Sequence: Synthetic oligonucleotide
  Sense strand starting at position 3697 of SEQ ID NO: 587329
gaguaaugcccugagaggu

SEQ ID NO: 784327 - RNA, 19 nt, Artificial Sequence
  Description of Artificial Sequence: Synthetic oligonucleotide
  Antisense strand to SEQ ID NO: 784326
accucucagggcauuacuc

SEQ ID NO: 784328 - RNA, 19 nt, Artificial Sequence
  Description of Artificial Sequence: Synthetic oligonucleotide
  Sense strand starting at position 29 of SEQ ID NO: 587330
guaugcuaaccuuaagaga

SEQ ID NO: 784329 - RNA, 19 nt, Artificial Sequence
  Description of Artificial Sequence: Synthetic oligonucleotide
  Antisense strand to SEQ ID NO: 784328
ucucuuaagguuagcauac

SEQ ID NO: 784330 - RNA, 19 nt, Artificial Sequence
  Description of Artificial Sequence: Synthetic oligonucleotide
  Sense strand starting at position 120 of SEQ ID NO: 587330
uggagcugcccugaauaua

SEQ ID NO: 784331 - RNA, 19 nt, Artificial Sequence
  Description of Artificial Sequence: Synthetic oligonucleotide
  Antisense strand to SEQ ID NO: 784330
uauauucagggcagcucca

SEQ ID NO: 784332 - RNA, 19 nt, Artificial Sequence
  Description of Artificial Sequence: Synthetic oligonucleotide
  Sense strand starting at position 270 of SEQ ID NO: 587330
gggauuccggccuacaagu

SEQ ID NO: 784333 - RNA, 19 nt, Artificial Sequence
  Description of Artificial Sequence: Synthetic oligonucleotide
  Antisense strand to SEQ ID NO: 784332
acuuguaggccggaauccc

SEQ ID NO: 784334 - RNA, 19 nt, Artificial Sequence
  Description of Artificial Sequence: Synthetic oligonucleotide
  Sense strand starting at position 277 of SEQ ID NO: 587330
cggccuacaagugaguuaa

SEQ ID NO: 784335 - RNA, 19 nt, Artificial Sequence
  Description of Artificial Sequence: Synthetic oligonucleotide
  Antisense strand to SEQ ID NO: 784334
uuaacucacuuguaggccg

SEQ ID NO: 784336 - RNA, 19 nt, Artificial Sequence
  Description of Artificial Sequence: Synthetic oligonucleotide
  Sense strand starting at position 279 of SEQ ID NO: 587330
gccuacaagugaguuaaga

SEQ ID NO: 784337 - RNA, 19 nt, Artificial Sequence
  Description of Artificial Sequence: Synthetic oligonucleotide
  Antisense strand to SEQ ID NO: 784336
ucuuaacucacuuguaggc

SEQ ID NO: 784338 - RNA, 19 nt, Artificial Sequence
  Description of Artificial Sequence: Synthetic oligonucleotide
  Sense strand starting at position 351 of SEQ ID NO: 587330
auaagcuauugacugacua

SEQ ID NO: 784339 - RNA, 19 nt, Artificial Sequence
  Description of Artificial Sequence: Synthetic oligonucleotide
  Antisense strand to SEQ ID NO: 784338
uagucagucaauagcuuau

SEQ ID NO: 784340 - RNA, 19 nt, Artificial Sequence
  Description of Artificial Sequence: Synthetic oligonucleotide
  Sense strand starting at position 397 of SEQ ID NO: 587330
ggaauaagauuuggguuga

SEQ ID NO: 784341 - RNA, 19 nt, Artificial Sequence
  Description of Artificial Sequence: Synthetic oligonucleotide
  Antisense strand to SEQ ID NO: 784340
ucaacccaaaucuuauucc

SEQ ID NO: 784342 - RNA, 19 nt, Artificial Sequence
  Description of Artificial Sequence: Synthetic oligonucleotide
  Sense strand starting at position 398 of SEQ ID NO: 587330
gaauaagauuuggguugag

SEQ ID NO: 784343 - RNA, 19 nt, Artificial Sequence
  Description of Artificial Sequence: Synthetic oligonucleotide
  Antisense strand to SEQ ID NO: 784342
cucaacccaaaucuuauuc

SEQ ID NO: 784344 - RNA, 19 nt, Artificial Sequence
  Description of Artificial Sequence: Synthetic oligonucleotide
  Sense strand starting at position 408 of SEQ ID NO: 587330
uggguugagacauggguga

SEQ ID NO: 784345 - RNA, 19 nt, Artificial Sequence
  Description of Artificial Sequence: Synthetic oligonucleotide
  Antisense strand to SEQ ID NO: 784344
ucacccaugucucaaccca

SEQ ID NO: 784346 - RNA, 19 nt, Artificial Sequence
  Description of Artificial Sequence: Synthetic oligonucleotide
  Sense strand starting at position 453 of SEQ ID NO: 587330
ggucucugcguccugcaua

SEQ ID NO: 784347 - RNA, 19 nt, Artificial Sequence
  Description of Artificial Sequence: Synthetic oligonucleotide
  Antisense strand to SEQ ID NO: 784346
uaugcaggacgcagagacc

SEQ ID NO: 784348 - RNA, 19 nt, Artificial Sequence
  Description of Artificial Sequence: Synthetic oligonucleotide
  Sense strand starting at position 723 of SEQ ID NO: 587330
acuaguaauggacgagcaa

SEQ ID NO: 784349 - RNA, 19 nt, Artificial Sequence
  Description of Artificial Sequence: Synthetic oligonucleotide
  Antisense strand to SEQ ID NO: 784348
uugcucguccauuacuagu

SEQ ID NO: 784350 - RNA, 19 nt, Artificial Sequence
  Description of Artificial Sequence: Synthetic oligonucleotide
  Sense strand starting at position 724 of SEQ ID NO: 587330
cuaguaauggacgagcaaa

SEQ ID NO: 784351 - RNA, 19 nt, Artificial Sequence
  Description of Artificial Sequence: Synthetic oligonucleotide
  Antisense strand to SEQ ID NO: 784350
uuugcucguccauuacuag

SEQ ID NO: 784352 - RNA, 19 nt, Artificial Sequence
  Description of Artificial Sequence: Synthetic oligonucleotide
  Sense strand starting at position 792 of SEQ ID NO: 587330
uugguaauuaacgauugca

SEQ ID NO: 784353 - RNA, 19 nt, Artificial Sequence
  Description of Artificial Sequence: Synthetic oligonucleotide
  Antisense strand to SEQ ID NO: 784352
ugcaaucguuaauuaccaa

SEQ ID NO: 784354 - RNA, 19 nt, Artificial Sequence
  Description of Artificial Sequence: Synthetic oligonucleotide
  Sense strand starting at position 1718 of SEQ ID NO: 587330
gacgguagccgaaggaguu

SEQ ID NO: 784355 - RNA, 19 nt, Artificial Sequence
  Description of Artificial Sequence: Synthetic oligonucleotide
  Antisense strand to SEQ ID NO: 784354
aacuccuucggcuaccguc

SEQ ID NO: 784356 - RNA, 19 nt, Artificial Sequence
  Description of Artificial Sequence: Synthetic oligonucleotide
  Sense strand starting at position 1944 of SEQ ID NO: 587330
cgcgaauaaccguuuggcu

SEQ ID NO: 784357 - RNA, 19 nt, Artificial Sequence
  Description of Artificial Sequence: Synthetic oligonucleotide
  Antisense strand to SEQ ID NO: 784356
agccaaacgguuauucgcg

SEQ ID NO: 784358 - RNA, 19 nt, Artificial Sequence
  Description of Artificial Sequence: Synthetic oligonucleotide
  Sense strand starting at position 1945 of SEQ ID NO: 587330
gcgaauaaccguuuggcuu

SEQ ID NO: 784359 - RNA, 19 nt, Artificial Sequence
  Description of Artificial Sequence: Synthetic oligonucleotide
  Antisense strand to SEQ ID NO: 784358
aagccaaacgguuauucgc

SEQ ID NO: 784360 - RNA, 19 nt, Artificial Sequence
  Description of Artificial Sequence: Synthetic oligonucleotide
  Sense strand starting at position 2320 of SEQ ID NO: 587330
acaacagaugcaugauauu

SEQ ID NO: 784361 - RNA, 19 nt, Artificial Sequence
  Description of Artificial Sequence: Synthetic oligonucleotide
  Antisense strand to SEQ ID NO: 784360
aauaucaugcaucuguugu

SEQ ID NO: 784362 - RNA, 19 nt, Artificial Sequence
  Description of Artificial Sequence: Synthetic oligonucleotide
  Sense strand starting at position 2331 of SEQ ID NO: 587330
augauauugagucgauaua

SEQ ID NO: 784363 - RNA, 19 nt, Artificial Sequence
  Description of Artificial Sequence: Synthetic oligonucleotide
  Antisense strand to SEQ ID NO: 784362
uauaucgacucaauaucau

SEQ ID NO: 784364 - RNA, 19 nt, Artificial Sequence
  Description of Artificial Sequence: Synthetic oligonucleotide
  Sense strand starting at position 2332 of SEQ ID NO: 587330
ugauauugagucgauauau

SEQ ID NO: 784365 - RNA, 19 nt, Artificial Sequence
  Description of Artificial Sequence: Synthetic oligonucleotide
  Antisense strand to SEQ ID NO: 784364
auauaucgacucaauauca

SEQ ID NO: 784366 - RNA, 19 nt, Artificial Sequence
  Description of Artificial Sequence: Synthetic oligonucleotide
  Sense strand starting at position 2343 of SEQ ID NO: 587330
cgauauauacacugaguac

SEQ ID NO: 784367 - RNA, 19 nt, Artificial Sequence
  Description of Artificial Sequence: Synthetic oligonucleotide
  Antisense strand to SEQ ID NO: 784366
guacucaguguauauaucg

SEQ ID NO: 784368 - RNA, 19 nt, Artificial Sequence
  Description of Artificial Sequence: Synthetic oligonucleotide
  Sense strand starting at position 2409 of SEQ ID NO: 587330
gucucauucugaucaggga

SEQ ID NO: 784369 - RNA, 19 nt, Artificial Sequence
  Description of Artificial Sequence: Synthetic oligonucleotide
  Antisense strand to SEQ ID NO: 784368
ucccugaucagaaugagac

SEQ ID NO: 784370 - RNA, 19 nt, Artificial Sequence
  Description of Artificial Sequence: Synthetic oligonucleotide
  Sense strand starting at position 2427 of SEQ ID NO: 587330
agucuuuguccucaaccua

SEQ ID NO: 784371 - RNA, 19 nt, Artificial Sequence
  Description of Artificial Sequence: Synthetic oligonucleotide
  Antisense strand to SEQ ID NO: 784370
uagguugaggacaaagacu

SEQ ID NO: 784372 - RNA, 19 nt, Artificial Sequence
  Description of Artificial Sequence: Synthetic oligonucleotide
  Sense strand starting at position 2464 of SEQ ID NO: 587330
ggugaaaccuggccacaaa

SEQ ID NO: 784373 - RNA, 19 nt, Artificial Sequence
  Description of Artificial Sequence: Synthetic oligonucleotide
  Antisense strand to SEQ ID NO: 784372
uuuguggccagguuucacc

SEQ ID NO: 784374 - RNA, 19 nt, Artificial Sequence
  Description of Artificial Sequence: Synthetic oligonucleotide
  Sense strand starting at position 2480 of SEQ ID NO: 587330
aaagaaaggugcucaauug

SEQ ID NO: 784375 - RNA, 19 nt, Artificial Sequence
  Description of Artificial Sequence: Synthetic oligonucleotide
  Antisense strand to SEQ ID NO: 784374
caauugagcaccuuucuuu

SEQ ID NO: 784376 - RNA, 19 nt, Artificial Sequence
  Description of Artificial Sequence: Synthetic oligonucleotide
  Sense strand starting at position 2655 of SEQ ID NO: 587330
guucacagggauuagugua

SEQ ID NO: 784377 - RNA, 19 nt, Artificial Sequence
  Description of Artificial Sequence: Synthetic oligonucleotide
  Antisense strand to SEQ ID NO: 784376
uacacuaaucccugugaac

SEQ ID NO: 784378 - RNA, 19 nt, Artificial Sequence
  Description of Artificial Sequence: Synthetic oligonucleotide
  Sense strand starting at position 2660 of SEQ ID NO: 587330
cagggauuaguguauguga

SEQ ID NO: 784379 - RNA, 19 nt, Artificial Sequence
  Description of Artificial Sequence: Synthetic oligonucleotide
  Antisense strand to SEQ ID NO: 784378
ucacauacacuaaucccug

SEQ ID NO: 784380 - RNA, 19 nt, Artificial Sequence
  Description of Artificial Sequence: Synthetic oligonucleotide
  Sense strand starting at position 2662 of SEQ ID NO: 587330
gggauuaguguaugugaaa

SEQ ID NO: 784381 - RNA, 19 nt, Artificial Sequence
  Description of Artificial Sequence: Synthetic oligonucleotide
  Antisense strand to SEQ ID NO: 784380
uuucacauacacuaauccc

SEQ ID NO: 784382 - RNA, 19 nt, Artificial Sequence
  Description of Artificial Sequence: Synthetic oligonucleotide
  Sense strand starting at position 2663 of SEQ ID NO: 587330
ggauuaguguaugugaaac

SEQ ID NO: 784383 - RNA, 19 nt, Artificial Sequence
  Description of Artificial Sequence: Synthetic oligonucleotide
  Antisense strand to SEQ ID NO: 784382
guuucacauacacuaaucc

SEQ ID NO: 784384 - RNA, 19 nt, Artificial Sequence
  Description of Artificial Sequence: Synthetic oligonucleotide
  Sense strand starting at position 2696 of SEQ ID NO: 587330
ucagacaauacguggaaga

SEQ ID NO: 784385 - RNA, 19 nt, Artificial Sequence
  Description of Artificial Sequence: Synthetic oligonucleotide
  Antisense strand to SEQ ID NO: 784384
ucuuccacguauugucuga

SEQ ID NO: 784386 - RNA, 19 nt, Artificial Sequence
  Description of Artificial Sequence: Synthetic oligonucleotide
  Sense strand starting at position 2828 of SEQ ID NO: 587330
gccugaccugagugaaaua

SEQ ID NO: 784387 - RNA, 19 nt, Artificial Sequence
  Description of Artificial Sequence: Synthetic oligonucleotide
  Antisense strand to SEQ ID NO: 784386
uauuucacucaggucaggc

SEQ ID NO: 784388 - RNA, 19 nt, Artificial Sequence
  Description of Artificial Sequence: Synthetic oligonucleotide
  Sense strand starting at position 2837 of SEQ ID NO: 587330
gagugaaauacugaguguu

SEQ ID NO: 784389 - RNA, 19 nt, Artificial Sequence
  Description of Artificial Sequence: Synthetic oligonucleotide
  Antisense strand to SEQ ID NO: 784388
aacacucaguauuucacuc

SEQ ID NO: 784390 - RNA, 19 nt, Artificial Sequence
  Description of Artificial Sequence: Synthetic oligonucleotide
  Sense strand starting at position 2901 of SEQ ID NO: 587330
gagggugacacgugaauaa

SEQ ID NO: 784391 - RNA, 19 nt, Artificial Sequence
  Description of Artificial Sequence: Synthetic oligonucleotide
  Antisense strand to SEQ ID NO: 784390
uuauucacgugucacccuc

SEQ ID NO: 784392 - RNA, 19 nt, Artificial Sequence
  Description of Artificial Sequence: Synthetic oligonucleotide
  Sense strand starting at position 3075 of SEQ ID NO: 587330
uggguugugauguaaauua

SEQ ID NO: 784393 - RNA, 19 nt, Artificial Sequence
  Description of Artificial Sequence: Synthetic oligonucleotide
  Antisense strand to SEQ ID NO: 784392
uaauuuacaucacaaccca

SEQ ID NO: 784394 - RNA, 19 nt, Artificial Sequence
  Description of Artificial Sequence: Synthetic oligonucleotide
  Sense strand starting at position 3130 of SEQ ID NO: 587330
ucugaaauauuugagacca

SEQ ID NO: 784395 - RNA, 19 nt, Artificial Sequence
  Description of Artificial Sequence: Synthetic oligonucleotide
  Antisense strand to SEQ ID NO: 784394
uggucucaaauauuucaga

SEQ ID NO: 784396 - RNA, 19 nt, Artificial Sequence
  Description of Artificial Sequence: Synthetic oligonucleotide
  Sense strand starting at position 3250 of SEQ ID NO: 587330
cugagcauuuccuugagca

SEQ ID NO: 784397 - RNA, 19 nt, Artificial Sequence
  Description of Artificial Sequence: Synthetic oligonucleotide
  Antisense strand to SEQ ID NO: 784396
ugcucaaggaaaugcucag

SEQ ID NO: 784398 - RNA, 19 nt, Artificial Sequence
  Description of Artificial Sequence: Synthetic oligonucleotide
  Sense strand starting at position 3342 of SEQ ID NO: 587330
ccuauacagugcuugacaa

SEQ ID NO: 784399 - RNA, 19 nt, Artificial Sequence
  Description of Artificial Sequence: Synthetic oligonucleotide
  Antisense strand to SEQ ID NO: 784398
uugucaagcacuguauagg

SEQ ID NO: 784400 - RNA, 19 nt, Artificial Sequence
  Description of Artificial Sequence: Synthetic oligonucleotide
  Sense strand starting at position 3343 of SEQ ID NO: 587330
cuauacagugcuugacaaa

SEQ ID NO: 784401 - RNA, 19 nt, Artificial Sequence
  Description of Artificial Sequence: Synthetic oligonucleotide
  Antisense strand to SEQ ID NO: 784400
uuugucaagcacuguauag

SEQ ID NO: 784402 - RNA, 19 nt, Artificial Sequence
  Description of Artificial Sequence: Synthetic oligonucleotide
  Sense strand starting at position 3471 of SEQ ID NO: 587330
gugauucuacaacagucaa

SEQ ID NO: 784403 - RNA, 19 nt, Artificial Sequence
  Description of Artificial Sequence: Synthetic oligonucleotide
  Antisense strand to SEQ ID NO: 784402
uugacuguuguagaaucac

SEQ ID NO: 784404 - RNA, 19 nt, Artificial Sequence
  Description of Artificial Sequence: Synthetic oligonucleotide
  Sense strand starting at position 3636 of SEQ ID NO: 587330
ccgggcauagugugauuua

SEQ ID NO: 784405 - RNA, 19 nt, Artificial Sequence
  Description of Artificial Sequence: Synthetic oligonucleotide
  Antisense strand to SEQ ID NO: 784404
uaaaucacacuaugcccgg

SEQ ID NO: 784406 - RNA, 19 nt, Artificial Sequence
  Description of Artificial Sequence: Synthetic oligonucleotide
  Sense strand starting at position 3825 of SEQ ID NO: 587330
agaguagccaagcaaugua

SEQ ID NO: 784407 - RNA, 19 nt, Artificial Sequence
  Description of Artificial Sequence: Synthetic oligonucleotide
  Antisense strand to SEQ ID NO: 784406
uacauugcuuggcuacucu

SEQ ID NO: 784408 - RNA, 19 nt, Artificial Sequence
  Description of Artificial Sequence: Synthetic oligonucleotide
  Sense strand starting at position 67 of SEQ ID NO: 587331
caaaguggugcuuagggaa

SEQ ID NO: 784409 - RNA, 19 nt, Artificial Sequence
  Description of Artificial Sequence: Synthetic oligonucleotide
  Antisense strand to SEQ ID NO: 784408
uucccuaagcaccacuuug

SEQ ID NO: 784410 - RNA, 19 nt, Artificial Sequence
  Description of Artificial Sequence: Synthetic oligonucleotide
  Sense strand starting at position 220 of SEQ ID NO: 587331
gugaucuauguuuaucauc

SEQ ID NO: 784411 - RNA, 19 nt, Artificial Sequence
  Description of Artificial Sequence: Synthetic oligonucleotide
  Antisense strand to SEQ ID NO: 784410
gaugauaaacauagaucac

SEQ ID NO: 784412 - RNA, 19 nt, Artificial Sequence
  Description of Artificial Sequence: Synthetic oligonucleotide
  Sense strand starting at position 343 of SEQ ID NO: 587331
ucacaaauuaucggaggua

SEQ ID NO: 784413 - RNA, 19 nt, Artificial Sequence
  Description of Artificial Sequence: Synthetic oligonucleotide
  Antisense strand to SEQ ID NO: 784412
uaccuccgauaauuuguga

SEQ ID NO: 784414 - RNA, 19 nt, Artificial Sequence
  Description of Artificial Sequence: Synthetic oligonucleotide
  Sense strand starting at position 346 of SEQ ID NO: 587331
caaauuaucggagguaaag

SEQ ID NO: 784415 - RNA, 19 nt, Artificial Sequence
  Description of Artificial Sequence: Synthetic oligonucleotide
  Antisense strand to SEQ ID NO: 784414
cuuuaccuccgauaauuug

SEQ ID NO: 784416 - RNA, 19 nt, Artificial Sequence
  Description of Artificial Sequence: Synthetic oligonucleotide
  Sense strand starting at position 418 of SEQ ID NO: 587331
ccguuccucccagaaauac

SEQ ID NO: 784417 - RNA, 19 nt, Artificial Sequence
  Description of Artificial Sequence: Synthetic oligonucleotide
  Antisense strand to SEQ ID NO: 784416
guauuucugggaggaacgg

SEQ ID NO: 784418 - RNA, 19 nt, Artificial Sequence
  Description of Artificial Sequence: Synthetic oligonucleotide
  Sense strand starting at position 583 of SEQ ID NO: 587331
ugccaagauucuuugggag

SEQ ID NO: 784419 - RNA, 19 nt, Artificial Sequence
  Description of Artificial Sequence: Synthetic oligonucleotide
  Antisense strand to SEQ ID NO: 784418
cucccaaagaaucuuggca

SEQ ID NO: 784420 - RNA, 19 nt, Artificial Sequence
  Description of Artificial Sequence: Synthetic oligonucleotide
  Sense strand starting at position 705 of SEQ ID NO: 587331
ugucaugauccagaucuac

SEQ ID NO: 784421 - RNA, 19 nt, Artificial Sequence
  Description of Artificial Sequence: Synthetic oligonucleotide
  Antisense strand to SEQ ID NO: 784420
guagaucuggaucaugaca

SEQ ID NO: 784422 - RNA, 19 nt, Artificial Sequence
  Description of Artificial Sequence: Synthetic oligonucleotide
  Sense strand starting at position 734 of SEQ ID NO: 587331
uucucagguggugauuauu

SEQ ID NO: 784423 - RNA, 19 nt, Artificial Sequence
  Description of Artificial Sequence: Synthetic oligonucleotide
  Antisense strand to SEQ ID NO: 784422
aauaaucaccaccugagaa

SEQ ID NO: 784424 - RNA, 19 nt, Artificial Sequence
  Description of Artificial Sequence: Synthetic oligonucleotide
  Sense strand starting at position 737 of SEQ ID NO: 587331
ucagguggugauuauugaa

SEQ ID NO: 784425 - RNA, 19 nt, Artificial Sequence
  Description of Artificial Sequence: Synthetic oligonucleotide
  Antisense strand to SEQ ID NO: 784424
uucaauaaucaccaccuga

SEQ ID NO: 784426 - RNA, 19 nt, Artificial Sequence
  Description of Artificial Sequence: Synthetic oligonucleotide
  Sense strand starting at position 744 of SEQ ID NO: 587331
gugauuauugaaugauagu

SEQ ID NO: 784427 - RNA, 19 nt, Artificial Sequence
  Description of Artificial Sequence: Synthetic oligonucleotide
  Antisense strand to SEQ ID NO: 784426
acuaucauucaauaaucac

SEQ ID NO: 784428 - RNA, 19 nt, Artificial Sequence
  Description of Artificial Sequence: Synthetic oligonucleotide
  Sense strand starting at position 777 of SEQ ID NO: 587331
uauguaagacacugaguuu

SEQ ID NO: 784429 - RNA, 19 nt, Artificial Sequence
  Description of Artificial Sequence: Synthetic oligonucleotide
  Antisense strand to SEQ ID NO: 784428
aaacucagugucuuacaua

SEQ ID NO: 784430 - RNA, 19 nt, Artificial Sequence
  Description of Artificial Sequence: Synthetic oligonucleotide
  Sense strand starting at position 780 of SEQ ID NO: 587331
guaagacacugaguuuacu

SEQ ID NO: 784431 - RNA, 19 nt, Artificial Sequence
  Description of Artificial Sequence: Synthetic oligonucleotide
  Antisense strand to SEQ ID NO: 784430
aguaaacucagugucuuac

SEQ ID NO: 784432 - RNA, 19 nt, Artificial Sequence
  Description of Artificial Sequence: Synthetic oligonucleotide
  Sense strand starting at position 897 of SEQ ID NO: 587331
ugcauaugugagcaaauca

SEQ ID NO: 784433 - RNA, 19 nt, Artificial Sequence
  Description of Artificial Sequence: Synthetic oligonucleotide
  Antisense strand to SEQ ID NO: 784432
ugauuugcucacauaugca

SEQ ID NO: 784434 - RNA, 19 nt, Artificial Sequence
  Description of Artificial Sequence: Synthetic oligonucleotide
  Sense strand starting at position 945 of SEQ ID NO: 587331
ggauaauaagaaugugcau

SEQ ID NO: 784435 - RNA, 19 nt, Artificial Sequence
  Description of Artificial Sequence: Synthetic oligonucleotide
  Antisense strand to SEQ ID NO: 784434
augcacauucuuauuaucc

SEQ ID NO: 784436 - RNA, 19 nt, Artificial Sequence
  Description of Artificial Sequence: Synthetic oligonucleotide
  Sense strand starting at position 948 of SEQ ID NO: 587331
uaauaagaaugugcauagu

SEQ ID NO: 784437 - RNA, 19 nt, Artificial Sequence
  Description of Artificial Sequence: Synthetic oligonucleotide
  Antisense strand to SEQ ID NO: 784436
acuaugcacauucuuauua

SEQ ID NO: 784438 - RNA, 19 nt, Artificial Sequence
  Description of Artificial Sequence: Synthetic oligonucleotide
  Sense strand starting at position 951 of SEQ ID NO: 587331
uaagaaugugcauaguaac

SEQ ID NO: 784439 - RNA, 19 nt, Artificial Sequence
  Description of Artificial Sequence: Synthetic oligonucleotide
  Antisense strand to SEQ ID NO: 784438
guuacuaugcacauucuua

SEQ ID NO: 784440 - RNA, 19 nt, Artificial Sequence
  Description of Artificial Sequence: Synthetic oligonucleotide
  Sense strand starting at position 1212 of SEQ ID NO: 587331
aguucuuaaucacugauga

SEQ ID NO: 784441 - RNA, 19 nt, Artificial Sequence
  Description of Artificial Sequence: Synthetic oligonucleotide
  Antisense strand to SEQ ID NO: 784440
ucaucagugauuaagaacu

SEQ ID NO: 784442 - RNA, 19 nt, Artificial Sequence
  Description of Artificial Sequence: Synthetic oligonucleotide
  Sense strand starting at position 1213 of SEQ ID NO: 587331
guucuuaaucacugaugaa

SEQ ID NO: 784443 - RNA, 19 nt, Artificial Sequence
  Description of Artificial Sequence: Synthetic oligonucleotide
  Antisense strand to SEQ ID NO: 784442
uucaucagugauuaagaac

SEQ ID NO: 784444 - RNA, 19 nt, Artificial Sequence
  Description of Artificial Sequence: Synthetic oligonucleotide
  Sense strand starting at position 1495 of SEQ ID NO: 587331
uauauagaggaccgugaaa

SEQ ID NO: 784445 - RNA, 19 nt, Artificial Sequence
  Description of Artificial Sequence: Synthetic oligonucleotide
  Antisense strand to SEQ ID NO: 784444
uuucacgguccucuauaua

SEQ ID NO: 784446 - RNA, 19 nt, Artificial Sequence
  Description of Artificial Sequence: Synthetic oligonucleotide
  Sense strand starting at position 1497 of SEQ ID NO: 587331
uauagaggaccgugaaagu

SEQ ID NO: 784447 - RNA, 19 nt, Artificial Sequence
  Description of Artificial Sequence: Synthetic oligonucleotide
  Antisense strand to SEQ ID NO: 784446
acuuucacgguccucuaua

SEQ ID NO: 784448 - RNA, 19 nt, Artificial Sequence
  Description of Artificial Sequence: Synthetic oligonucleotide
  Sense strand starting at position 1629 of SEQ ID NO: 587331
ccagcauagcgguuguuau

SEQ ID NO: 784449 - RNA, 19 nt, Artificial Sequence
  Description of Artificial Sequence: Synthetic oligonucleotide
  Antisense strand to SEQ ID NO: 784448
auaacaaccgcuaugcugg

SEQ ID NO: 784450 - RNA, 19 nt, Artificial Sequence
  Description of Artificial Sequence: Synthetic oligonucleotide
  Sense strand starting at position 1856 of SEQ ID NO: 587331
gaagguugagagugagcaa

SEQ ID NO: 784451 - RNA, 19 nt, Artificial Sequence
  Description of Artificial Sequence: Synthetic oligonucleotide
  Antisense strand to SEQ ID NO: 784450
uugcucacucucaaccuuc

SEQ ID NO: 784452 - RNA, 19 nt, Artificial Sequence
  Description of Artificial Sequence: Synthetic oligonucleotide
  Sense strand starting at position 1946 of SEQ ID NO: 587331
cgacuuggucuugggacaa

SEQ ID NO: 784453 - RNA, 19 nt, Artificial Sequence
  Description of Artificial Sequence: Synthetic oligonucleotide
  Antisense strand to SEQ ID NO: 784452
uugucccaagaccaagucg

SEQ ID NO: 784454 - RNA, 19 nt, Artificial Sequence
  Description of Artificial Sequence: Synthetic oligonucleotide
  Sense strand starting at position 1988 of SEQ ID NO: 587331
ugagccugaucuuuaauca

SEQ ID NO: 784455 - RNA, 19 nt, Artificial Sequence
  Description of Artificial Sequence: Synthetic oligonucleotide
  Antisense strand to SEQ ID NO: 784454
ugauuaaagaucaggcuca

SEQ ID NO: 784456 - RNA, 19 nt, Artificial Sequence
  Description of Artificial Sequence: Synthetic oligonucleotide
  Sense strand starting at position 2118 of SEQ ID NO: 587331
acuugaggccucuaacuuu

SEQ ID NO: 784457 - RNA, 19 nt, Artificial Sequence
  Description of Artificial Sequence: Synthetic oligonucleotide
  Antisense strand to SEQ ID NO: 784456
aaaguuagaggccucaagu

SEQ ID NO: 784458 - RNA, 19 nt, Artificial Sequence
  Description of Artificial Sequence: Synthetic oligonucleotide
  Sense strand starting at position 2172 of SEQ ID NO: 587331
ugaggauccuaccuaauug

SEQ ID NO: 784459 - RNA, 19 nt, Artificial Sequence
  Description of Artificial Sequence: Synthetic oligonucleotide
  Antisense strand to SEQ ID NO: 784458
caauuagguaggauccuca

SEQ ID NO: 784460 - RNA, 19 nt, Artificial Sequence
  Description of Artificial Sequence: Synthetic oligonucleotide
  Sense strand starting at position 2251 of SEQ ID NO: 587331
uuugaucucccaugacaga

SEQ ID NO: 784461 - RNA, 19 nt, Artificial Sequence
  Description of Artificial Sequence: Synthetic oligonucleotide
  Antisense strand to SEQ ID NO: 784460
ucugucaugggagaucaaa

SEQ ID NO: 784462 - RNA, 19 nt, Artificial Sequence
  Description of Artificial Sequence: Synthetic oligonucleotide
  Sense strand starting at position 2418 of SEQ ID NO: 587331
cagggagaucuugguacuc

SEQ ID NO: 784463 - RNA, 19 nt, Artificial Sequence
  Description of Artificial Sequence: Synthetic oligonucleotide
  Antisense strand to SEQ ID NO: 784462
gaguaccaagaucucccug

SEQ ID NO: 784464 - RNA, 19 nt, Artificial Sequence
  Description of Artificial Sequence: Synthetic oligonucleotide
  Sense strand starting at position 2599 of SEQ ID NO: 587331
cuccuuaggugauuccaau

SEQ ID NO: 784465 - RNA, 19 nt, Artificial Sequence
  Description of Artificial Sequence: Synthetic oligonucleotide
  Antisense strand to SEQ ID NO: 784464
auuggaaucaccuaaggag

SEQ ID NO: 784466 - RNA, 19 nt, Artificial Sequence
  Description of Artificial Sequence: Synthetic oligonucleotide
  Sense strand starting at position 2651 of SEQ ID NO: 587331
cucagagcuccacaugcau

SEQ ID NO: 784467 - RNA, 19 nt, Artificial Sequence
  Description of Artificial Sequence: Synthetic oligonucleotide
  Antisense strand to SEQ ID NO: 784466
augcauguggagcucugag

SEQ ID NO: 784468 - RNA, 19 nt, Artificial Sequence
  Description of Artificial Sequence: Synthetic oligonucleotide
  Sense strand starting at position 3400 of SEQ ID NO: 587331
aggcuuccuggagagucau

SEQ ID NO: 784469 - RNA, 19 nt, Artificial Sequence
  Description of Artificial Sequence: Synthetic oligonucleotide
  Antisense strand to SEQ ID NO: 784468
augacucuccaggaagccu

SEQ ID NO: 784470 - RNA, 19 nt, Artificial Sequence
  Description of Artificial Sequence: Synthetic oligonucleotide
  Sense strand starting at position 3440 of SEQ ID NO: 587331
cuaauacuauagccagagu

SEQ ID NO: 784471 - RNA, 19 nt, Artificial Sequence
  Description of Artificial Sequence: Synthetic oligonucleotide
  Antisense strand to SEQ ID NO: 784470
acucuggcuauaguauuag

SEQ ID NO: 784472 - RNA, 19 nt, Artificial Sequence
  Description of Artificial Sequence: Synthetic oligonucleotide
  Sense strand starting at position 3575 of SEQ ID NO: 587331
uugaaaugaugcucugaau

SEQ ID NO: 784473 - RNA, 19 nt, Artificial Sequence
  Description of Artificial Sequence: Synthetic oligonucleotide
  Antisense strand to SEQ ID NO: 784472
auucagagcaucauuucaa

SEQ ID NO: 784474 - RNA, 19 nt, Artificial Sequence
  Description of Artificial Sequence: Synthetic oligonucleotide
  Sense strand starting at position 3660 of SEQ ID NO: 587331
uguccucuacuguaggaau

SEQ ID NO: 784475 - RNA, 19 nt, Artificial Sequence
  Description of Artificial Sequence: Synthetic oligonucleotide
  Antisense strand to SEQ ID NO: 784474
auuccuacaguagaggaca

SEQ ID NO: 784476 - RNA, 19 nt, Artificial Sequence
  Description of Artificial Sequence: Synthetic oligonucleotide
  Sense strand starting at position 3662 of SEQ ID NO: 587331
uccucuacuguaggaauua

SEQ ID NO: 784477 - RNA, 19 nt, Artificial Sequence
  Description of Artificial Sequence: Synthetic oligonucleotide
  Antisense strand to SEQ ID NO: 784476
uaauuccuacaguagagga

SEQ ID NO: 784478 - RNA, 19 nt, Artificial Sequence
  Description of Artificial Sequence: Synthetic oligonucleotide
  Sense strand starting at position 3686 of SEQ ID NO: 587331
ucaaauuucuugucugguu

SEQ ID NO: 784479 - RNA, 19 nt, Artificial Sequence
  Description of Artificial Sequence: Synthetic oligonucleotide
  Antisense strand to SEQ ID NO: 784478
aaccagacaagaaauuuga

SEQ ID NO: 784480 - RNA, 19 nt, Artificial Sequence
  Description of Artificial Sequence: Synthetic oligonucleotide
  Sense strand starting at position 3769 of SEQ ID NO: 587331
cuuauaccuccucgaggga

SEQ ID NO: 784481 - RNA, 19 nt, Artificial Sequence
  Description of Artificial Sequence: Synthetic oligonucleotide
  Antisense strand to SEQ ID NO: 784480
ucccucgaggagguauaag

SEQ ID NO: 784482 - RNA, 19 nt, Artificial Sequence
  Description of Artificial Sequence: Synthetic oligonucleotide
  Sense strand starting at position 3772 of SEQ ID NO: 587331
auaccuccucgagggaaua

SEQ ID NO: 784483 - RNA, 19 nt, Artificial Sequence
  Description of Artificial Sequence: Synthetic oligonucleotide
  Antisense strand to SEQ ID NO: 784482
uauucccucgaggagguau

SEQ ID NO: 784484 - RNA, 19 nt, Artificial Sequence
  Description of Artificial Sequence: Synthetic oligonucleotide
  Sense strand starting at position 3785 of SEQ ID NO: 587331
ggaauacaauguuuccuga

SEQ ID NO: 784485 - RNA, 19 nt, Artificial Sequence
  Description of Artificial Sequence: Synthetic oligonucleotide
  Antisense strand to SEQ ID NO: 784484
ucaggaaacauuguauucc

SEQ ID NO: 784486 - RNA, 19 nt, Artificial Sequence
  Description of Artificial Sequence: Synthetic oligonucleotide
  Sense strand starting at position 3793 of SEQ ID NO: 587331
auguuuccugaaggaguga

SEQ ID NO: 784487 - RNA, 19 nt, Artificial Sequence
  Description of Artificial Sequence: Synthetic oligonucleotide
  Antisense strand to SEQ ID NO: 784486
ucacuccuucaggaaacau

SEQ ID NO: 784488 - RNA, 19 nt, Artificial Sequence
  Description of Artificial Sequence: Synthetic oligonucleotide
  Sense strand starting at position 4 of SEQ ID NO: 587332
uguauaauagguugccaua

SEQ ID NO: 784489 - RNA, 19 nt, Artificial Sequence
  Description of Artificial Sequence: Synthetic oligonucleotide
  Antisense strand to SEQ ID NO: 784488
uauggcaaccuauuauaca

SEQ ID NO: 784490 - RNA, 19 nt, Artificial Sequence
  Description of Artificial Sequence: Synthetic oligonucleotide
  Sense strand starting at position 37 of SEQ ID NO: 587332
ugaagaccauugucuauaa

SEQ ID NO: 784491 - RNA, 19 nt, Artificial Sequence
  Description of Artificial Sequence: Synthetic oligonucleotide
  Antisense strand to SEQ ID NO: 784490
uuauagacaauggucuuca

SEQ ID NO: 784492 - RNA, 19 nt, Artificial Sequence
  Description of Artificial Sequence: Synthetic oligonucleotide
  Sense strand starting at position 41 of SEQ ID NO: 587332
gaccauugucuauaaagug

SEQ ID NO: 784493 - RNA, 19 nt, Artificial Sequence
  Description of Artificial Sequence: Synthetic oligonucleotide
  Antisense strand to SEQ ID NO: 784492
cacuuuauagacaaugguc

SEQ ID NO: 784494 - RNA, 19 nt, Artificial Sequence
  Description of Artificial Sequence: Synthetic oligonucleotide
  Sense strand starting at position 88 of SEQ ID NO: 587332
guguccagucauuaugcaa

SEQ ID NO: 784495 - RNA, 19 nt, Artificial Sequence
  Description of Artificial Sequence: Synthetic oligonucleotide
  Antisense strand to SEQ ID NO: 784494
uugcauaaugacuggacac

SEQ ID NO: 784496 - RNA, 19 nt, Artificial Sequence
  Description of Artificial Sequence: Synthetic oligonucleotide
  Sense strand starting at position 305 of SEQ ID NO: 587332
agucccagaguuugaaauu

SEQ ID NO: 784497 - RNA, 19 nt, Artificial Sequence
  Description of Artificial Sequence: Synthetic oligonucleotide
  Antisense strand to SEQ ID NO: 784496
aauuucaaacucugggacu

SEQ ID NO: 784498 - RNA, 19 nt, Artificial Sequence
  Description of Artificial Sequence: Synthetic oligonucleotide
  Sense strand starting at position 306 of SEQ ID NO: 587332
gucccagaguuugaaauuu

SEQ ID NO: 784499 - RNA, 19 nt, Artificial Sequence
  Description of Artificial Sequence: Synthetic oligonucleotide
  Antisense strand to SEQ ID NO: 784498
aaauuucaaacucugggac

SEQ ID NO: 784500 - RNA, 19 nt, Artificial Sequence
  Description of Artificial Sequence: Synthetic oligonucleotide
  Sense strand starting at position 462 of SEQ ID NO: 587332
gccauuauauaugucaucu

SEQ ID NO: 784501 - RNA, 19 nt, Artificial Sequence
  Description of Artificial Sequence: Synthetic oligonucleotide
  Antisense strand to SEQ ID NO: 784500
agaugacauauauaauggc

SEQ ID NO: 784502 - RNA, 19 nt, Artificial Sequence
  Description of Artificial Sequence: Synthetic oligonucleotide
  Sense strand starting at position 592 of SEQ ID NO: 587332
ugcugacccuuauuaauga

SEQ ID NO: 784503 - RNA, 19 nt, Artificial Sequence
  Description of Artificial Sequence: Synthetic oligonucleotide
  Antisense strand to SEQ ID NO: 784502
ucauuaauaagggucagca

SEQ ID NO: 784504 - RNA, 19 nt, Artificial Sequence
  Description of Artificial Sequence: Synthetic oligonucleotide
  Sense strand starting at position 613 of SEQ ID NO: 587332
ucaggauauauguggcuau

SEQ ID NO: 784505 - RNA, 19 nt, Artificial Sequence
  Description of Artificial Sequence: Synthetic oligonucleotide
  Antisense strand to SEQ ID NO: 784504
auagccacauauauccuga

SEQ ID NO: 784506 - RNA, 19 nt, Artificial Sequence
  Description of Artificial Sequence: Synthetic oligonucleotide
  Sense strand starting at position 616 of SEQ ID NO: 587332
ggauauauguggcuauaua

SEQ ID NO: 784507 - RNA, 19 nt, Artificial Sequence
  Description of Artificial Sequence: Synthetic oligonucleotide
  Antisense strand to SEQ ID NO: 784506
uauauagccacauauaucc

SEQ ID NO: 784508 - RNA, 19 nt, Artificial Sequence
  Description of Artificial Sequence: Synthetic oligonucleotide
  Sense strand starting at position 617 of SEQ ID NO: 587332
gauauauguggcuauauau

SEQ ID NO: 784509 - RNA, 19 nt, Artificial Sequence
  Description of Artificial Sequence: Synthetic oligonucleotide
  Antisense strand to SEQ ID NO: 784508
auauauagccacauauauc

SEQ ID NO: 784510 - RNA, 19 nt, Artificial Sequence
  Description of Artificial Sequence: Synthetic oligonucleotide
  Sense strand starting at position 764 of SEQ ID NO: 587332
gaaguauccugcccaaggu

SEQ ID NO: 784511 - RNA, 19 nt, Artificial Sequence
  Description of Artificial Sequence: Synthetic oligonucleotide
  Antisense strand to SEQ ID NO: 784510
accuugggcaggauacuuc

SEQ ID NO: 784512 - RNA, 19 nt, Artificial Sequence
  Description of Artificial Sequence: Synthetic oligonucleotide
  Sense strand starting at position 824 of SEQ ID NO: 587332
guaucuggcuuaucccaaa

SEQ ID NO: 784513 - RNA, 19 nt, Artificial Sequence
  Description of Artificial Sequence: Synthetic oligonucleotide
  Antisense strand to SEQ ID NO: 784512
uuugggauaagccagauac

SEQ ID NO: 784514 - RNA, 19 nt, Artificial Sequence
  Description of Artificial Sequence: Synthetic oligonucleotide
  Sense strand starting at position 924 of SEQ ID NO: 587332
cuuaccaguuguguaauuu

SEQ ID NO: 784515 - RNA, 19 nt, Artificial Sequence
  Description of Artificial Sequence: Synthetic oligonucleotide
  Antisense strand to SEQ ID NO: 784514
aaauuacacaacugguaag

SEQ ID NO: 784516 - RNA, 19 nt, Artificial Sequence
  Description of Artificial Sequence: Synthetic oligonucleotide
  Sense strand starting at position 1008 of SEQ ID NO: 587332
gggagcguuaaauaaccua

SEQ ID NO: 784517 - RNA, 19 nt, Artificial Sequence
  Description of Artificial Sequence: Synthetic oligonucleotide
  Antisense strand to SEQ ID NO: 784516
uagguuauuuaacgcuccc

SEQ ID NO: 784518 - RNA, 19 nt, Artificial Sequence
  Description of Artificial Sequence: Synthetic oligonucleotide
  Sense strand starting at position 1011 of SEQ ID NO: 587332
agcguuaaauaaccuaaca

SEQ ID NO: 784519 - RNA, 19 nt, Artificial Sequence
  Description of Artificial Sequence: Synthetic oligonucleotide
  Antisense strand to SEQ ID NO: 784518
uguuagguuauuuaacgcu

SEQ ID NO: 784520 - RNA, 19 nt, Artificial Sequence
  Description of Artificial Sequence: Synthetic oligonucleotide
  Sense strand starting at position 1047 of SEQ ID NO: 587332
acaguuguugugggacauu

SEQ ID NO: 784521 - RNA, 19 nt, Artificial Sequence
  Description of Artificial Sequence: Synthetic oligonucleotide
  Antisense strand to SEQ ID NO: 784520
aaugucccacaacaacugu

SEQ ID NO: 784522 - RNA, 19 nt, Artificial Sequence
  Description of Artificial Sequence: Synthetic oligonucleotide
  Sense strand starting at position 1050 of SEQ ID NO: 587332
guuguugugggacauugaa

SEQ ID NO: 784523 - RNA, 19 nt, Artificial Sequence
  Description of Artificial Sequence: Synthetic oligonucleotide
  Antisense strand to SEQ ID NO: 784522
uucaaugucccacaacaac

SEQ ID NO: 784524 - RNA, 19 nt, Artificial Sequence
  Description of Artificial Sequence: Synthetic oligonucleotide
  Sense strand starting at position 1091 of SEQ ID NO: 587332
cgcccuucccucuauuuga

SEQ ID NO: 784525 - RNA, 19 nt, Artificial Sequence
  Description of Artificial Sequence: Synthetic oligonucleotide
  Antisense strand to SEQ ID NO: 784524
ucaaauagagggaagggcg

SEQ ID NO: 784526 - RNA, 19 nt, Artificial Sequence
  Description of Artificial Sequence: Synthetic oligonucleotide
  Sense strand starting at position 1160 of SEQ ID NO: 587332
aagugcagaugaucauuaa

SEQ ID NO: 784527 - RNA, 19 nt, Artificial Sequence
  Description of Artificial Sequence: Synthetic oligonucleotide
  Antisense strand to SEQ ID NO: 784526
uuaaugaucaucugcacuu

SEQ ID NO: 784528 - RNA, 19 nt, Artificial Sequence
  Description of Artificial Sequence: Synthetic oligonucleotide
  Sense strand starting at position 1163 of SEQ ID NO: 587332
ugcagaugaucauuaagug

SEQ ID NO: 784529 - RNA, 19 nt, Artificial Sequence
  Description of Artificial Sequence: Synthetic oligonucleotide
  Antisense strand to SEQ ID NO: 784528
cacuuaaugaucaucugca

SEQ ID NO: 784530 - RNA, 19 nt, Artificial Sequence
  Description of Artificial Sequence: Synthetic oligonucleotide
  Sense strand starting at position 1276 of SEQ ID NO: 587332
gaaucuugaagcuggagga

SEQ ID NO: 784531 - RNA, 19 nt, Artificial Sequence
  Description of Artificial Sequence: Synthetic oligonucleotide
  Antisense strand to SEQ ID NO: 784530
uccuccagcuucaagauuc

SEQ ID NO: 784532 - RNA, 19 nt, Artificial Sequence
  Description of Artificial Sequence: Synthetic oligonucleotide
  Sense strand starting at position 1479 of SEQ ID NO: 587332
cagcgauuucgggaccugu

SEQ ID NO: 784533 - RNA, 19 nt, Artificial Sequence
  Description of Artificial Sequence: Synthetic oligonucleotide
  Antisense strand to SEQ ID NO: 784532
acaggucccgaaaucgcug

SEQ ID NO: 784534 - RNA, 19 nt, Artificial Sequence
  Description of Artificial Sequence: Synthetic oligonucleotide
  Sense strand starting at position 2148 of SEQ ID NO: 587332
aggccagucgcuuacugaa

SEQ ID NO: 784535 - RNA, 19 nt, Artificial Sequence
  Description of Artificial Sequence: Synthetic oligonucleotide
  Antisense strand to SEQ ID NO: 784534
uucaguaagcgacuggccu

SEQ ID NO: 784536 - RNA, 19 nt, Artificial Sequence
  Description of Artificial Sequence: Synthetic oligonucleotide
  Sense strand starting at position 2190 of SEQ ID NO: 587332
agugguuuggugcaccaaa

SEQ ID NO: 784537 - RNA, 19 nt, Artificial Sequence
  Description of Artificial Sequence: Synthetic oligonucleotide
  Antisense strand to SEQ ID NO: 784536
uuuggugcaccaaaccacu

SEQ ID NO: 784538 - RNA, 19 nt, Artificial Sequence
  Description of Artificial Sequence: Synthetic oligonucleotide
  Sense strand starting at position 2706 of SEQ ID NO: 587332
ccucaugauucugugaugu

SEQ ID NO: 784539 - RNA, 19 nt, Artificial Sequence
  Description of Artificial Sequence: Synthetic oligonucleotide
  Antisense strand to SEQ ID NO: 784538
acaucacagaaucaugagg

SEQ ID NO: 784540 - RNA, 19 nt, Artificial Sequence
  Description of Artificial Sequence: Synthetic oligonucleotide
  Sense strand starting at position 2759 of SEQ ID NO: 587332
acugcaauugaguaacaug

SEQ ID NO: 784541 - RNA, 19 nt, Artificial Sequence
  Description of Artificial Sequence: Synthetic oligonucleotide
  Antisense strand to SEQ ID NO: 784540
cauguuacucaauugcagu

SEQ ID NO: 784542 - RNA, 19 nt, Artificial Sequence
  Description of Artificial Sequence: Synthetic oligonucleotide
  Sense strand starting at position 2788 of SEQ ID NO: 587332
gcuaaauaauuggccuacu

SEQ ID NO: 784543 - RNA, 19 nt, Artificial Sequence
  Description of Artificial Sequence: Synthetic oligonucleotide
  Antisense strand to SEQ ID NO: 784542
aguaggccaauuauuuagc

SEQ ID NO: 784544 - RNA, 19 nt, Artificial Sequence
  Description of Artificial Sequence: Synthetic oligonucleotide
  Sense strand starting at position 2913 of SEQ ID NO: 587332
auacaugacugcucgauaa

SEQ ID NO: 784545 - RNA, 19 nt, Artificial Sequence
  Description of Artificial Sequence: Synthetic oligonucleotide
  Antisense strand to SEQ ID NO: 784544
uuaucgagcagucauguau

SEQ ID NO: 784546 - RNA, 19 nt, Artificial Sequence
  Description of Artificial Sequence: Synthetic oligonucleotide
  Sense strand starting at position 2915 of SEQ ID NO: 587332
acaugacugcucgauaauu

SEQ ID NO: 784547 - RNA, 19 nt, Artificial Sequence
  Description of Artificial Sequence: Synthetic oligonucleotide
  Antisense strand to SEQ ID NO: 784546
aauuaucgagcagucaugu

SEQ ID NO: 784548 - RNA, 19 nt, Artificial Sequence
  Description of Artificial Sequence: Synthetic oligonucleotide
  Sense strand starting at position 3003 of SEQ ID NO: 587332
cugacagaguuaguaucuu

SEQ ID NO: 784549 - RNA, 19 nt, Artificial Sequence
  Description of Artificial Sequence: Synthetic oligonucleotide
  Antisense strand to SEQ ID NO: 784548
aagauacuaacucugucag

SEQ ID NO: 784550 - RNA, 19 nt, Artificial Sequence
  Description of Artificial Sequence: Synthetic oligonucleotide
  Sense strand starting at position 3007 of SEQ ID NO: 587332
cagaguuaguaucuuaagu

SEQ ID NO: 784551 - RNA, 19 nt, Artificial Sequence
  Description of Artificial Sequence: Synthetic oligonucleotide
  Antisense strand to SEQ ID NO: 784550
acuuaagauacuaacucug

SEQ ID NO: 784552 - RNA, 19 nt, Artificial Sequence
  Description of Artificial Sequence: Synthetic oligonucleotide
  Sense strand starting at position 3326 of SEQ ID NO: 587332
gugccuggccucuuaaguu

SEQ ID NO: 784553 - RNA, 19 nt, Artificial Sequence
  Description of Artificial Sequence: Synthetic oligonucleotide
  Antisense strand to SEQ ID NO: 784552
aacuuaagaggccaggcac

SEQ ID NO: 784554 - RNA, 19 nt, Artificial Sequence
  Description of Artificial Sequence: Synthetic oligonucleotide
  Sense strand starting at position 3663 of SEQ ID NO: 587332
aucagugccagugaggauu

SEQ ID NO: 784555 - RNA, 19 nt, Artificial Sequence
  Description of Artificial Sequence: Synthetic oligonucleotide
  Antisense strand to SEQ ID NO: 784554
aauccucacuggcacugau

SEQ ID NO: 784556 - RNA, 19 nt, Artificial Sequence
  Description of Artificial Sequence: Synthetic oligonucleotide
  Sense strand starting at position 3763 of SEQ ID NO: 587332
guugaaucuuaaguuaguu

SEQ ID NO: 784557 - RNA, 19 nt, Artificial Sequence
  Description of Artificial Sequence: Synthetic oligonucleotide
  Antisense strand to SEQ ID NO: 784556
aacuaacuuaagauucaac

SEQ ID NO: 784558 - RNA, 19 nt, Artificial Sequence
  Description of Artificial Sequence: Synthetic oligonucleotide
  Sense strand starting at position 3809 of SEQ ID NO: 587332
ccagaagugccaugagaaa

SEQ ID NO: 784559 - RNA, 19 nt, Artificial Sequence
  Description of Artificial Sequence: Synthetic oligonucleotide
  Antisense strand to SEQ ID NO: 784558
uuucucauggcacuucugg

SEQ ID NO: 784560 - RNA, 19 nt, Artificial Sequence
  Description of Artificial Sequence: Synthetic oligonucleotide
  Sense strand starting at position 3841 of SEQ ID NO: 587332
ugaugugauagagggacuu

SEQ ID NO: 784561 - RNA, 19 nt, Artificial Sequence
  Description of Artificial Sequence: Synthetic oligonucleotide
  Antisense strand to SEQ ID NO: 784560
aagucccucuaucacauca

SEQ ID NO: 784562 - RNA, 19 nt, Artificial Sequence
  Description of Artificial Sequence: Synthetic oligonucleotide
  Sense strand starting at position 3861 of SEQ ID NO: 587332
aggauagugugagcuuauu

SEQ ID NO: 784563 - RNA, 19 nt, Artificial Sequence
  Description of Artificial Sequence: Synthetic oligonucleotide
  Antisense strand to SEQ ID NO: 784562
aauaagcucacacuauccu

SEQ ID NO: 784564 - RNA, 19 nt, Artificial Sequence
  Description of Artificial Sequence: Synthetic oligonucleotide
  Sense strand starting at position 3867 of SEQ ID NO: 587332
gugugagcuuauuuagacu

SEQ ID NO: 784565 - RNA, 19 nt, Artificial Sequence
  Description of Artificial Sequence: Synthetic oligonucleotide
  Antisense strand to SEQ ID NO: 784564
agucuaaauaagcucacac

SEQ ID NO: 784566 - RNA, 19 nt, Artificial Sequence
  Description of Artificial Sequence: Synthetic oligonucleotide
  Sense strand starting at position 3903 of SEQ ID NO: 587332
ucucuaagaugguauuuga

SEQ ID NO: 784567 - RNA, 19 nt, Artificial Sequence
  Description of Artificial Sequence: Synthetic oligonucleotide
  Antisense strand to SEQ ID NO: 784566
ucaaauaccaucuuagaga

SEQ ID NO: 784568 - RNA, 19 nt, Artificial Sequence
  Description of Artificial Sequence: Synthetic oligonucleotide
  Sense strand starting at position 19 of SEQ ID NO: 587333
ggaacuuuguguuuguuaa

SEQ ID NO: 784569 - RNA, 19 nt, Artificial Sequence
  Description of Artificial Sequence: Synthetic oligonucleotide
  Antisense strand to SEQ ID NO: 784568
uuaacaaacacaaaguucc

SEQ ID NO: 784570 - RNA, 19 nt, Artificial Sequence
  Description of Artificial Sequence: Synthetic oligonucleotide
  Sense strand starting at position 20 of SEQ ID NO: 587333
gaacuuuguguuuguuaaa

SEQ ID NO: 784571 - RNA, 19 nt, Artificial Sequence
  Description of Artificial Sequence: Synthetic oligonucleotide
  Antisense strand to SEQ ID NO: 784570
uuuaacaaacacaaaguuc

SEQ ID NO: 784572 - RNA, 19 nt, Artificial Sequence
  Description of Artificial Sequence: Synthetic oligonucleotide
  Sense strand starting at position 29 of SEQ ID NO: 587333
guuuguuaaauguagcaug

SEQ ID NO: 784573 - RNA, 19 nt, Artificial Sequence
  Description of Artificial Sequence: Synthetic oligonucleotide
  Antisense strand to SEQ ID NO: 784572
caugcuacauuuaacaaac

SEQ ID NO: 784574 - RNA, 19 nt, Artificial Sequence
  Description of Artificial Sequence: Synthetic oligonucleotide
  Sense strand starting at position 195 of SEQ ID NO: 587333
aauauauggcauugucaga

SEQ ID NO: 784575 - RNA, 19 nt, Artificial Sequence
  Description of Artificial Sequence: Synthetic oligonucleotide
  Antisense strand to SEQ ID NO: 784574
ucugacaaugccauauauu

SEQ ID NO: 784576 - RNA, 19 nt, Artificial Sequence
  Description of Artificial Sequence: Synthetic oligonucleotide
  Sense strand starting at position 298 of SEQ ID NO: 587333
cagccuaggguuuauuaca

SEQ ID NO: 784577 - RNA, 19 nt, Artificial Sequence
  Description of Artificial Sequence: Synthetic oligonucleotide
  Antisense strand to SEQ ID NO: 784576
uguaauaaacccuaggcug

SEQ ID NO: 784578 - RNA, 19 nt, Artificial Sequence
  Description of Artificial Sequence: Synthetic oligonucleotide
  Sense strand starting at position 406 of SEQ ID NO: 587333
ugcuaugggaggugaagua

SEQ ID NO: 784579 - RNA, 19 nt, Artificial Sequence
  Description of Artificial Sequence: Synthetic oligonucleotide
  Antisense strand to SEQ ID NO: 784578
uacuucaccucccauagca

SEQ ID NO: 784580 - RNA, 19 nt, Artificial Sequence
  Description of Artificial Sequence: Synthetic oligonucleotide
  Sense strand starting at position 425 of SEQ ID NO: 587333
agcagaacuccaugaaauc

SEQ ID NO: 784581 - RNA, 19 nt, Artificial Sequence
  Description of Artificial Sequence: Synthetic oligonucleotide
  Antisense strand to SEQ ID NO: 784580
gauuucauggaguucugcu

SEQ ID NO: 784582 - RNA, 19 nt, Artificial Sequence
  Description of Artificial Sequence: Synthetic oligonucleotide
  Sense strand starting at position 501 of SEQ ID NO: 587333
caggguuccuagcuaaaca

SEQ ID NO: 784583 - RNA, 19 nt, Artificial Sequence
  Description of Artificial Sequence: Synthetic oligonucleotide
  Antisense strand to SEQ ID NO: 784582
uguuuagcuaggaacccug

SEQ ID NO: 784584 - RNA, 19 nt, Artificial Sequence
  Description of Artificial Sequence: Synthetic oligonucleotide
  Sense strand starting at position 650 of SEQ ID NO: 587333
ugcuaagccuauuuguuua

SEQ ID NO: 784585 - RNA, 19 nt, Artificial Sequence
  Description of Artificial Sequence: Synthetic oligonucleotide
  Antisense strand to SEQ ID NO: 784584
uaaacaaauaggcuuagca

SEQ ID NO: 784586 - RNA, 19 nt, Artificial Sequence
  Description of Artificial Sequence: Synthetic oligonucleotide
  Sense strand starting at position 884 of SEQ ID NO: 587333
ucuuuaaacguccaaagua

SEQ ID NO: 784587 - RNA, 19 nt, Artificial Sequence
  Description of Artificial Sequence: Synthetic oligonucleotide
  Antisense strand to SEQ ID NO: 784586
uacuuuggacguuuaaaga

SEQ ID NO: 784588 - RNA, 19 nt, Artificial Sequence
  Description of Artificial Sequence: Synthetic oligonucleotide
  Sense strand starting at position 997 of SEQ ID NO: 587333
ggcguuuccagagaccauu

SEQ ID NO: 784589 - RNA, 19 nt, Artificial Sequence
  Description of Artificial Sequence: Synthetic oligonucleotide
  Antisense strand to SEQ ID NO: 784588
aauggucucuggaaacgcc

SEQ ID NO: 784590 - RNA, 19 nt, Artificial Sequence
  Description of Artificial Sequence: Synthetic oligonucleotide
  Sense strand starting at position 1165 of SEQ ID NO: 587333
ucacucaugcacugauuga

SEQ ID NO: 784591 - RNA, 19 nt, Artificial Sequence
  Description of Artificial Sequence: Synthetic oligonucleotide
  Antisense strand to SEQ ID NO: 784590
ucaaucagugcaugaguga

SEQ ID NO: 784592 - RNA, 19 nt, Artificial Sequence
  Description of Artificial Sequence: Synthetic oligonucleotide
  Sense strand starting at position 1267 of SEQ ID NO: 587333
uuacuuauugaguagcucu

SEQ ID NO: 784593 - RNA, 19 nt, Artificial Sequence
  Description of Artificial Sequence: Synthetic oligonucleotide
  Antisense strand to SEQ ID NO: 784592
agagcuacucaauaaguaa

SEQ ID NO: 784594 - RNA, 19 nt, Artificial Sequence
  Description of Artificial Sequence: Synthetic oligonucleotide
  Sense strand starting at position 1289 of SEQ ID NO: 587333
uccuaagucagaugggacu

SEQ ID NO: 784595 - RNA, 19 nt, Artificial Sequence
  Description of Artificial Sequence: Synthetic oligonucleotide
  Antisense strand to SEQ ID NO: 784594
agucccaucugacuuagga

SEQ ID NO: 784596 - RNA, 19 nt, Artificial Sequence
  Description of Artificial Sequence: Synthetic oligonucleotide
  Sense strand starting at position 1291 of SEQ ID NO: 587333
cuaagucagaugggacuuu

SEQ ID NO: 784597 - RNA, 19 nt, Artificial Sequence
  Description of Artificial Sequence: Synthetic oligonucleotide
  Antisense strand to SEQ ID NO: 784596
aaagucccaucugacuuag

SEQ ID NO: 784598 - RNA, 19 nt, Artificial Sequence
  Description of Artificial Sequence: Synthetic oligonucleotide
  Sense strand starting at position 1303 of SEQ ID NO: 587333
ggacuuugcccucauggaa

SEQ ID NO: 784599 - RNA, 19 nt, Artificial Sequence
  Description of Artificial Sequence: Synthetic oligonucleotide
  Antisense strand to SEQ ID NO: 784598
uuccaugagggcaaagucc

SEQ ID NO: 784600 - RNA, 19 nt, Artificial Sequence
  Description of Artificial Sequence: Synthetic oligonucleotide
  Sense strand starting at position 1332 of SEQ ID NO: 587333
aggagaguccaguagcaga

SEQ ID NO: 784601 - RNA, 19 nt, Artificial Sequence
  Description of Artificial Sequence: Synthetic oligonucleotide
  Antisense strand to SEQ ID NO: 784600
ucugcuacuggacucuccu

SEQ ID NO: 784602 - RNA, 19 nt, Artificial Sequence
  Description of Artificial Sequence: Synthetic oligonucleotide
  Sense strand starting at position 1367 of SEQ ID NO: 587333
agcgaaaguacacgguaaa

SEQ ID NO: 784603 - RNA, 19 nt, Artificial Sequence
  Description of Artificial Sequence: Synthetic oligonucleotide
  Antisense strand to SEQ ID NO: 784602
uuuaccguguacuuucgcu

SEQ ID NO: 784604 - RNA, 19 nt, Artificial Sequence
  Description of Artificial Sequence: Synthetic oligonucleotide
  Sense strand starting at position 1409 of SEQ ID NO: 587333
cugcauaaggcauauugga

SEQ ID NO: 784605 - RNA, 19 nt, Artificial Sequence
  Description of Artificial Sequence: Synthetic oligonucleotide
  Antisense strand to SEQ ID NO: 784604
uccaauaugccuuaugcag

SEQ ID NO: 784606 - RNA, 19 nt, Artificial Sequence
  Description of Artificial Sequence: Synthetic oligonucleotide
  Sense strand starting at position 1440 of SEQ ID NO: 587333
ccaggauuguuugcagaug

SEQ ID NO: 784607 - RNA, 19 nt, Artificial Sequence
  Description of Artificial Sequence: Synthetic oligonucleotide
  Antisense strand to SEQ ID NO: 784606
caucugcaaacaauccugg

SEQ ID NO: 784608 - RNA, 19 nt, Artificial Sequence
  Description of Artificial Sequence: Synthetic oligonucleotide
  Sense strand starting at position 1802 of SEQ ID NO: 587333
cugccaguucggcugcaaa

SEQ ID NO: 784609 - RNA, 19 nt, Artificial Sequence
  Description of Artificial Sequence: Synthetic oligonucleotide
  Antisense strand to SEQ ID NO: 784608
uuugcagccgaacuggcag

SEQ ID NO: 784610 - RNA, 19 nt, Artificial Sequence
  Description of Artificial Sequence: Synthetic oligonucleotide
  Sense strand starting at position 1804 of SEQ ID NO: 587333
gccaguucggcugcaaaca

SEQ ID NO: 784611 - RNA, 19 nt, Artificial Sequence
  Description of Artificial Sequence: Synthetic oligonucleotide
  Antisense strand to SEQ ID NO: 784610
uguuugcagccgaacuggc

SEQ ID NO: 784612 - RNA, 19 nt, Artificial Sequence
  Description of Artificial Sequence: Synthetic oligonucleotide
  Sense strand starting at position 2401 of SEQ ID NO: 587333
gucucugagccugaguaaa

SEQ ID NO: 784613 - RNA, 19 nt, Artificial Sequence
  Description of Artificial Sequence: Synthetic oligonucleotide
  Antisense strand to SEQ ID NO: 784612
uuuacucaggcucagagac

SEQ ID NO: 784614 - RNA, 19 nt, Artificial Sequence
  Description of Artificial Sequence: Synthetic oligonucleotide
  Sense strand starting at position 2576 of SEQ ID NO: 587333
gccugaauuauaugagggu

SEQ ID NO: 784615 - RNA, 19 nt, Artificial Sequence
  Description of Artificial Sequence: Synthetic oligonucleotide
  Antisense strand to SEQ ID NO: 784614
acccucauauaauucaggc

SEQ ID NO: 784616 - RNA, 19 nt, Artificial Sequence
  Description of Artificial Sequence: Synthetic oligonucleotide
  Sense strand starting at position 2633 of SEQ ID NO: 587333
ggcuuaucucaacaaguca

SEQ ID NO: 784617 - RNA, 19 nt, Artificial Sequence
  Description of Artificial Sequence: Synthetic oligonucleotide
  Antisense strand to SEQ ID NO: 784616
ugacuuguugagauaagcc

SEQ ID NO: 784618 - RNA, 19 nt, Artificial Sequence
  Description of Artificial Sequence: Synthetic oligonucleotide
  Sense strand starting at position 2751 of SEQ ID NO: 587333
acaguuaucuuugugaaac

SEQ ID NO: 784619 - RNA, 19 nt, Artificial Sequence
  Description of Artificial Sequence: Synthetic oligonucleotide
  Antisense strand to SEQ ID NO: 784618
guuucacaaagauaacugu

SEQ ID NO: 784620 - RNA, 19 nt, Artificial Sequence
  Description of Artificial Sequence: Synthetic oligonucleotide
  Sense strand starting at position 2934 of SEQ ID NO: 587333
ccuguugcccacugaaaca

SEQ ID NO: 784621 - RNA, 19 nt, Artificial Sequence
  Description of Artificial Sequence: Synthetic oligonucleotide
  Antisense strand to SEQ ID NO: 784620
uguuucagugggcaacagg

SEQ ID NO: 784622 - RNA, 19 nt, Artificial Sequence
  Description of Artificial Sequence: Synthetic oligonucleotide
  Sense strand starting at position 2952 of SEQ ID NO: 587333
aagugugaacucugaggca

SEQ ID NO: 784623 - RNA, 19 nt, Artificial Sequence
  Description of Artificial Sequence: Synthetic oligonucleotide
  Antisense strand to SEQ ID NO: 784622
ugccucagaguucacacuu

SEQ ID NO: 784624 - RNA, 19 nt, Artificial Sequence
  Description of Artificial Sequence: Synthetic oligonucleotide
  Sense strand starting at position 3009 of SEQ ID NO: 587333
cccgaaucaucucucggau

SEQ ID NO: 784625 - RNA, 19 nt, Artificial Sequence
  Description of Artificial Sequence: Synthetic oligonucleotide
  Antisense strand to SEQ ID NO: 784624
auccgagagaugauucggg

SEQ ID NO: 784626 - RNA, 19 nt, Artificial Sequence
  Description of Artificial Sequence: Synthetic oligonucleotide
  Sense strand starting at position 3192 of SEQ ID NO: 587333
acaaguguacaaugaguau

SEQ ID NO: 784627 - RNA, 19 nt, Artificial Sequence
  Description of Artificial Sequence: Synthetic oligonucleotide
  Antisense strand to SEQ ID NO: 784626
auacucauuguacacuugu

SEQ ID NO: 784628 - RNA, 19 nt, Artificial Sequence
  Description of Artificial Sequence: Synthetic oligonucleotide
  Sense strand starting at position 3198 of SEQ ID NO: 587333
guacaaugaguaugccaaa

SEQ ID NO: 784629 - RNA, 19 nt, Artificial Sequence
  Description of Artificial Sequence: Synthetic oligonucleotide
  Antisense strand to SEQ ID NO: 784628
uuuggcauacucauuguac

SEQ ID NO: 784630 - RNA, 19 nt, Artificial Sequence
  Description of Artificial Sequence: Synthetic oligonucleotide
  Sense strand starting at position 3417 of SEQ ID NO: 587333
ucauguuuaaugugaacga

SEQ ID NO: 784631 - RNA, 19 nt, Artificial Sequence
  Description of Artificial Sequence: Synthetic oligonucleotide
  Antisense strand to SEQ ID NO: 784630
ucguucacauuaaacauga

SEQ ID NO: 784632 - RNA, 19 nt, Artificial Sequence
  Description of Artificial Sequence: Synthetic oligonucleotide
  Sense strand starting at position 3516 of SEQ ID NO: 587333
augcauuaacugugaauuc

SEQ ID NO: 784633 - RNA, 19 nt, Artificial Sequence
  Description of Artificial Sequence: Synthetic oligonucleotide
  Antisense strand to SEQ ID NO: 784632
gaauucacaguuaaugcau

SEQ ID NO: 784634 - RNA, 19 nt, Artificial Sequence
  Description of Artificial Sequence: Synthetic oligonucleotide
  Sense strand starting at position 3527 of SEQ ID NO: 587333
gugaauucuuauuuguccu

SEQ ID NO: 784635 - RNA, 19 nt, Artificial Sequence
  Description of Artificial Sequence: Synthetic oligonucleotide
  Antisense strand to SEQ ID NO: 784634
aggacaaauaagaauucac

SEQ ID NO: 784636 - RNA, 19 nt, Artificial Sequence
  Description of Artificial Sequence: Synthetic oligonucleotide
  Sense strand starting at position 3535 of SEQ ID NO: 587333
uuauuuguccuaugagcua

SEQ ID NO: 784637 - RNA, 19 nt, Artificial Sequence
  Description of Artificial Sequence: Synthetic oligonucleotide
  Antisense strand to SEQ ID NO: 784636
uagcucauaggacaaauaa

SEQ ID NO: 784638 - RNA, 19 nt, Artificial Sequence
  Description of Artificial Sequence: Synthetic oligonucleotide
  Sense strand starting at position 3636 of SEQ ID NO: 587333
gguacaaagucagcauuaa

SEQ ID NO: 784639 - RNA, 19 nt, Artificial Sequence
  Description of Artificial Sequence: Synthetic oligonucleotide
  Antisense strand to SEQ ID NO: 784638
uuaaugcugacuuuguacc

SEQ ID NO: 784640 - RNA, 19 nt, Artificial Sequence
  Description of Artificial Sequence: Synthetic oligonucleotide
  Sense strand starting at position 3637 of SEQ ID NO: 587333
guacaaagucagcauuaaa

SEQ ID NO: 784641 - RNA, 19 nt, Artificial Sequence
  Description of Artificial Sequence: Synthetic oligonucleotide
  Antisense strand to SEQ ID NO: 784640
uuuaaugcugacuuuguac

SEQ ID NO: 784642 - RNA, 19 nt, Artificial Sequence
  Description of Artificial Sequence: Synthetic oligonucleotide
  Sense strand starting at position 3840 of SEQ ID NO: 587333
cagugaauuugucugcuca

SEQ ID NO: 784643 - RNA, 19 nt, Artificial Sequence
  Description of Artificial Sequence: Synthetic oligonucleotide
  Antisense strand to SEQ ID NO: 784642
ugagcagacaaauucacug

SEQ ID NO: 784644 - RNA, 19 nt, Artificial Sequence
  Description of Artificial Sequence: Synthetic oligonucleotide
  Sense strand starting at position 3841 of SEQ ID NO: 587333
agugaauuugucugcucac

SEQ ID NO: 784645 - RNA, 19 nt, Artificial Sequence
  Description of Artificial Sequence: Synthetic oligonucleotide
  Antisense strand to SEQ ID NO: 784644
gugagcagacaaauucacu

SEQ ID NO: 784646 - RNA, 19 nt, Artificial Sequence
  Description of Artificial Sequence: Synthetic oligonucleotide
  Sense strand starting at position 3842 of SEQ ID NO: 587333
gugaauuugucugcucaca

SEQ ID NO: 784647 - RNA, 19 nt, Artificial Sequence
  Description of Artificial Sequence: Synthetic oligonucleotide
  Antisense strand to SEQ ID NO: 784646
ugugagcagacaaauucac

SEQ ID NO: 784648 - RNA, 19 nt, Artificial Sequence
  Description of Artificial Sequence: Synthetic oligonucleotide
  Sense strand starting at position 282 of SEQ ID NO: 587334
ggagguuaaaguuagcuga

SEQ ID NO: 784649 - RNA, 19 nt, Artificial Sequence
  Description of Artificial Sequence: Synthetic oligonucleotide
  Antisense strand to SEQ ID NO: 784648
ucagcuaacuuuaaccucc

SEQ ID NO: 784650 - RNA, 19 nt, Artificial Sequence
  Description of Artificial Sequence: Synthetic oligonucleotide
  Sense strand starting at position 284 of SEQ ID NO: 587334
agguuaaaguuagcugaga

SEQ ID NO: 784651 - RNA, 19 nt, Artificial Sequence
  Description of Artificial Sequence: Synthetic oligonucleotide
  Antisense strand to SEQ ID NO: 784650
ucucagcuaacuuuaaccu

SEQ ID NO: 784652 - RNA, 19 nt, Artificial Sequence
  Description of Artificial Sequence: Synthetic oligonucleotide
  Sense strand starting at position 285 of SEQ ID NO: 587334
gguuaaaguuagcugagau

SEQ ID NO: 784653 - RNA, 19 nt, Artificial Sequence
  Description of Artificial Sequence: Synthetic oligonucleotide
  Antisense strand to SEQ ID NO: 784652
aucucagcuaacuuuaacc

SEQ ID NO: 784654 - RNA, 19 nt, Artificial Sequence
  Description of Artificial Sequence: Synthetic oligonucleotide
  Sense strand starting at position 286 of SEQ ID NO: 587334
guuaaaguuagcugagauc

SEQ ID NO: 784655 - RNA, 19 nt, Artificial Sequence
  Description of Artificial Sequence: Synthetic oligonucleotide
  Antisense strand to SEQ ID NO: 784654
gaucucagcuaacuuuaac

SEQ ID NO: 784656 - RNA, 19 nt, Artificial Sequence
  Description of Artificial Sequence: Synthetic oligonucleotide
  Sense strand starting at position 289 of SEQ ID NO: 587334
aaaguuagcugagaucaca

SEQ ID NO: 784657 - RNA, 19 nt, Artificial Sequence
  Description of Artificial Sequence: Synthetic oligonucleotide
  Antisense strand to SEQ ID NO: 784656
ugugaucucagcuaacuuu

SEQ ID NO: 784658 - RNA, 19 nt, Artificial Sequence
  Description of Artificial Sequence: Synthetic oligonucleotide
  Sense strand starting at position 494 of SEQ ID NO: 587334
gccugagauucgguuacag

SEQ ID NO: 784659 - RNA, 19 nt, Artificial Sequence
  Description of Artificial Sequence: Synthetic oligonucleotide
  Antisense strand to SEQ ID NO: 784658
cuguaaccgaaucucaggc

SEQ ID NO: 784660 - RNA, 19 nt, Artificial Sequence
  Description of Artificial Sequence: Synthetic oligonucleotide
  Sense strand starting at position 496 of SEQ ID NO: 587334
cugagauucgguuacagga

SEQ ID NO: 784661 - RNA, 19 nt, Artificial Sequence
  Description of Artificial Sequence: Synthetic oligonucleotide
  Antisense strand to SEQ ID NO: 784660
uccuguaaccgaaucucag

SEQ ID NO: 784662 - RNA, 19 nt, Artificial Sequence
  Description of Artificial Sequence: Synthetic oligonucleotide
  Sense strand starting at position 536 of SEQ ID NO: 587334
gugggugucucauugugag

SEQ ID NO: 784663 - RNA, 19 nt, Artificial Sequence
  Description of Artificial Sequence: Synthetic oligonucleotide
  Antisense strand to SEQ ID NO: 784662
cucacaaugagacacccac

SEQ ID NO: 784664 - RNA, 19 nt, Artificial Sequence
  Description of Artificial Sequence: Synthetic oligonucleotide
  Sense strand starting at position 618 of SEQ ID NO: 587334
ugccaauaguguguuagga

SEQ ID NO: 784665 - RNA, 19 nt, Artificial Sequence
  Description of Artificial Sequence: Synthetic oligonucleotide
  Antisense strand to SEQ ID NO: 784664
uccuaacacacuauuggca

SEQ ID NO: 784666 - RNA, 19 nt, Artificial Sequence
  Description of Artificial Sequence: Synthetic oligonucleotide
  Sense strand starting at position 626 of SEQ ID NO: 587334
guguguuaggagcagaaac

SEQ ID NO: 784667 - RNA, 19 nt, Artificial Sequence
  Description of Artificial Sequence: Synthetic oligonucleotide
  Antisense strand to SEQ ID NO: 784666
guuucugcuccuaacacac

SEQ ID NO: 784668 - RNA, 19 nt, Artificial Sequence
  Description of Artificial Sequence: Synthetic oligonucleotide
  Sense strand starting at position 803 of SEQ ID NO: 587334
cccugcuuuguggagaaua

SEQ ID NO: 784669 - RNA, 19 nt, Artificial Sequence
  Description of Artificial Sequence: Synthetic oligonucleotide
  Antisense strand to SEQ ID NO: 784668
uauucuccacaaagcaggg

SEQ ID NO: 784670 - RNA, 19 nt, Artificial Sequence
  Description of Artificial Sequence: Synthetic oligonucleotide
  Sense strand starting at position 805 of SEQ ID NO: 587334
cugcuuuguggagaauagu

SEQ ID NO: 784671 - RNA, 19 nt, Artificial Sequence
  Description of Artificial Sequence: Synthetic oligonucleotide
  Antisense strand to SEQ ID NO: 784670
acuauucuccacaaagcag

SEQ ID NO: 784672 - RNA, 19 nt, Artificial Sequence
  Description of Artificial Sequence: Synthetic oligonucleotide
  Sense strand starting at position 814 of SEQ ID NO: 587334
ggagaauaguccugaccac

SEQ ID NO: 784673 - RNA, 19 nt, Artificial Sequence
  Description of Artificial Sequence: Synthetic oligonucleotide
  Antisense strand to SEQ ID NO: 784672
guggucaggacuauucucc

SEQ ID NO: 784674 - RNA, 19 nt, Artificial Sequence
  Description of Artificial Sequence: Synthetic oligonucleotide
  Sense strand starting at position 1154 of SEQ ID NO: 587334
ggccuuguuccuugugcua

SEQ ID NO: 784675 - RNA, 19 nt, Artificial Sequence
  Description of Artificial Sequence: Synthetic oligonucleotide
  Antisense strand to SEQ ID NO: 784674
uagcacaaggaacaaggcc

SEQ ID NO: 784676 - RNA, 19 nt, Artificial Sequence
  Description of Artificial Sequence: Synthetic oligonucleotide
  Sense strand starting at position 1215 of SEQ ID NO: 587334
ggcucuucugaucaugcga

SEQ ID NO: 784677 - RNA, 19 nt, Artificial Sequence
  Description of Artificial Sequence: Synthetic oligonucleotide
  Antisense strand to SEQ ID NO: 784676
ucgcaugaucagaagagcc

SEQ ID NO: 784678 - RNA, 19 nt, Artificial Sequence
  Description of Artificial Sequence: Synthetic oligonucleotide
  Sense strand starting at position 1223 of SEQ ID NO: 587334
ugaucaugcgacuggaaau

SEQ ID NO: 784679 - RNA, 19 nt, Artificial Sequence
  Description of Artificial Sequence: Synthetic oligonucleotide
  Antisense strand to SEQ ID NO: 784678
auuuccagucgcaugauca

SEQ ID NO: 784680 - RNA, 19 nt, Artificial Sequence
  Description of Artificial Sequence: Synthetic oligonucleotide
  Sense strand starting at position 1495 of SEQ ID NO: 587334
gagaaaggaucugagcaca

SEQ ID NO: 784681 - RNA, 19 nt, Artificial Sequence
  Description of Artificial Sequence: Synthetic oligonucleotide
  Antisense strand to SEQ ID NO: 784680
ugugcucagauccuuucuc

SEQ ID NO: 784682 - RNA, 19 nt, Artificial Sequence
  Description of Artificial Sequence: Synthetic oligonucleotide
  Sense strand starting at position 1779 of SEQ ID NO: 587334
gcggaugcgccuguuugua

SEQ ID NO: 784683 - RNA, 19 nt, Artificial Sequence
  Description of Artificial Sequence: Synthetic oligonucleotide
  Antisense strand to SEQ ID NO: 784682
uacaaacaggcgcauccgc

SEQ ID NO: 784684 - RNA, 19 nt, Artificial Sequence
  Description of Artificial Sequence: Synthetic oligonucleotide
  Sense strand starting at position 2368 of SEQ ID NO: 587334
cgagaaagcuuccuagaga

SEQ ID NO: 784685 - RNA, 19 nt, Artificial Sequence
  Description of Artificial Sequence: Synthetic oligonucleotide
  Antisense strand to SEQ ID NO: 784684
ucucuaggaagcuuucucg

SEQ ID NO: 784686 - RNA, 19 nt, Artificial Sequence
  Description of Artificial Sequence: Synthetic oligonucleotide
  Sense strand starting at position 2538 of SEQ ID NO: 587334
gagcuuggauccuggauca

SEQ ID NO: 784687 - RNA, 19 nt, Artificial Sequence
  Description of Artificial Sequence: Synthetic oligonucleotide
  Antisense strand to SEQ ID NO: 784686
ugauccaggauccaagcuc

SEQ ID NO: 784688 - RNA, 19 nt, Artificial Sequence
  Description of Artificial Sequence: Synthetic oligonucleotide
  Sense strand starting at position 2579 of SEQ ID NO: 587334
acggaaucaugagaaauaa

SEQ ID NO: 784689 - RNA, 19 nt, Artificial Sequence
  Description of Artificial Sequence: Synthetic oligonucleotide
  Antisense strand to SEQ ID NO: 784688
uuauuucucaugauuccgu

SEQ ID NO: 784690 - RNA, 19 nt, Artificial Sequence
  Description of Artificial Sequence: Synthetic oligonucleotide
  Sense strand starting at position 2608 of SEQ ID NO: 587334
uaucguuacgcccaagaaa

SEQ ID NO: 784691 - RNA, 19 nt, Artificial Sequence
  Description of Artificial Sequence: Synthetic oligonucleotide
  Antisense strand to SEQ ID NO: 784690
uuucuugggcguaacgaua

SEQ ID NO: 784692 - RNA, 19 nt, Artificial Sequence
  Description of Artificial Sequence: Synthetic oligonucleotide
  Sense strand starting at position 3081 of SEQ ID NO: 587334
ggaugugccuuguuaauau

SEQ ID NO: 784693 - RNA, 19 nt, Artificial Sequence
  Description of Artificial Sequence: Synthetic oligonucleotide
  Antisense strand to SEQ ID NO: 784692
auauuaacaaggcacaucc

SEQ ID NO: 784694 - RNA, 19 nt, Artificial Sequence
  Description of Artificial Sequence: Synthetic oligonucleotide
  Sense strand starting at position 3088 of SEQ ID NO: 587334
ccuuguuaauauguuugua

SEQ ID NO: 784695 - RNA, 19 nt, Artificial Sequence
  Description of Artificial Sequence: Synthetic oligonucleotide
  Antisense strand to SEQ ID NO: 784694
uacaaacauauuaacaagg

SEQ ID NO: 784696 - RNA, 19 nt, Artificial Sequence
  Description of Artificial Sequence: Synthetic oligonucleotide
  Sense strand starting at position 3092 of SEQ ID NO: 587334
guuaauauguuuguaggca

SEQ ID NO: 784697 - RNA, 19 nt, Artificial Sequence
  Description of Artificial Sequence: Synthetic oligonucleotide
  Antisense strand to SEQ ID NO: 784696
ugccuacaaacauauuaac

SEQ ID NO: 784698 - RNA, 19 nt, Artificial Sequence
  Description of Artificial Sequence: Synthetic oligonucleotide
  Sense strand starting at position 3312 of SEQ ID NO: 587334
gcugaggagucguaaagag

SEQ ID NO: 784699 - RNA, 19 nt, Artificial Sequence
  Description of Artificial Sequence: Synthetic oligonucleotide
  Antisense strand to SEQ ID NO: 784698
cucuuuacgacuccucagc

SEQ ID NO: 784700 - RNA, 19 nt, Artificial Sequence
  Description of Artificial Sequence: Synthetic oligonucleotide
  Sense strand starting at position 3372 of SEQ ID NO: 587334
uccugcucgucuuugggaa

SEQ ID NO: 784701 - RNA, 19 nt, Artificial Sequence
  Description of Artificial Sequence: Synthetic oligonucleotide
  Antisense strand to SEQ ID NO: 784700
uucccaaagacgagcagga

SEQ ID NO: 784702 - RNA, 19 nt, Artificial Sequence
  Description of Artificial Sequence: Synthetic oligonucleotide
  Sense strand starting at position 3373 of SEQ ID NO: 587334
ccugcucgucuuugggaau

SEQ ID NO: 784703 - RNA, 19 nt, Artificial Sequence
  Description of Artificial Sequence: Synthetic oligonucleotide
  Antisense strand to SEQ ID NO: 784702
auucccaaagacgagcagg

SEQ ID NO: 784704 - RNA, 19 nt, Artificial Sequence
  Description of Artificial Sequence: Synthetic oligonucleotide
  Sense strand starting at position 3376 of SEQ ID NO: 587334
gcucgucuuugggaaugga

SEQ ID NO: 784705 - RNA, 19 nt, Artificial Sequence
  Description of Artificial Sequence: Synthetic oligonucleotide
  Antisense strand to SEQ ID NO: 784704
uccauucccaaagacgagc

SEQ ID NO: 784706 - RNA, 19 nt, Artificial Sequence
  Description of Artificial Sequence: Synthetic oligonucleotide
  Sense strand starting at position 3379 of SEQ ID NO: 587334
cgucuuugggaauggaaug

SEQ ID NO: 784707 - RNA, 19 nt, Artificial Sequence
  Description of Artificial Sequence: Synthetic oligonucleotide
  Antisense strand to SEQ ID NO: 784706
cauuccauucccaaagacg

SEQ ID NO: 784708 - RNA, 19 nt, Artificial Sequence
  Description of Artificial Sequence: Synthetic oligonucleotide
  Sense strand starting at position 3462 of SEQ ID NO: 587334
caagaaugcuggcagcaau

SEQ ID NO: 784709 - RNA, 19 nt, Artificial Sequence
  Description of Artificial Sequence: Synthetic oligonucleotide
  Antisense strand to SEQ ID NO: 784708
auugcugccagcauucuug

SEQ ID NO: 784710 - RNA, 19 nt, Artificial Sequence
  Description of Artificial Sequence: Synthetic oligonucleotide
  Sense strand starting at position 3552 of SEQ ID NO: 587334
guuacucuuugcuacaaug

SEQ ID NO: 784711 - RNA, 19 nt, Artificial Sequence
  Description of Artificial Sequence: Synthetic oligonucleotide
  Antisense strand to SEQ ID NO: 784710
cauuguagcaaagaguaac

SEQ ID NO: 784712 - RNA, 19 nt, Artificial Sequence
  Description of Artificial Sequence: Synthetic oligonucleotide
  Sense strand starting at position 3566 of SEQ ID NO: 587334
caaugacauguuuggguaa

SEQ ID NO: 784713 - RNA, 19 nt, Artificial Sequence
  Description of Artificial Sequence: Synthetic oligonucleotide
  Antisense strand to SEQ ID NO: 784712
uuacccaaacaugucauug

SEQ ID NO: 784714 - RNA, 19 nt, Artificial Sequence
  Description of Artificial Sequence: Synthetic oligonucleotide
  Sense strand starting at position 3567 of SEQ ID NO: 587334
aaugacauguuuggguaaa

SEQ ID NO: 784715 - RNA, 19 nt, Artificial Sequence
  Description of Artificial Sequence: Synthetic oligonucleotide
  Antisense strand to SEQ ID NO: 784714
uuuacccaaacaugucauu

SEQ ID NO: 784716 - RNA, 19 nt, Artificial Sequence
  Description of Artificial Sequence: Synthetic oligonucleotide
  Sense strand starting at position 3568 of SEQ ID NO: 587334
augacauguuuggguaaag

SEQ ID NO: 784717 - RNA, 19 nt, Artificial Sequence
  Description of Artificial Sequence: Synthetic oligonucleotide
  Antisense strand to SEQ ID NO: 784716
cuuuacccaaacaugucau

SEQ ID NO: 784718 - RNA, 19 nt, Artificial Sequence
  Description of Artificial Sequence: Synthetic oligonucleotide
  Sense strand starting at position 3666 of SEQ ID NO: 587334
ucacauguuuccgcgcuga

SEQ ID NO: 784719 - RNA, 19 nt, Artificial Sequence
  Description of Artificial Sequence: Synthetic oligonucleotide
  Antisense strand to SEQ ID NO: 784718
ucagcgcggaaacauguga

SEQ ID NO: 784720 - RNA, 19 nt, Artificial Sequence
  Description of Artificial Sequence: Synthetic oligonucleotide
  Sense strand starting at position 3740 of SEQ ID NO: 587334
ugaucaauacugugggaac

SEQ ID NO: 784721 - RNA, 19 nt, Artificial Sequence
  Description of Artificial Sequence: Synthetic oligonucleotide
  Antisense strand to SEQ ID NO: 784720
guucccacaguauugauca

SEQ ID NO: 784722 - RNA, 19 nt, Artificial Sequence
  Description of Artificial Sequence: Synthetic oligonucleotide
  Sense strand starting at position 3741 of SEQ ID NO: 587334
gaucaauacugugggaacu

SEQ ID NO: 784723 - RNA, 19 nt, Artificial Sequence
  Description of Artificial Sequence: Synthetic oligonucleotide
  Antisense strand to SEQ ID NO: 784722
aguucccacaguauugauc

SEQ ID NO: 784724 - RNA, 19 nt, Artificial Sequence
  Description of Artificial Sequence: Synthetic oligonucleotide
  Sense strand starting at position 3820 of SEQ ID NO: 587334
cccuauacuucgucugugu

SEQ ID NO: 784725 - RNA, 19 nt, Artificial Sequence
  Description of Artificial Sequence: Synthetic oligonucleotide
  Antisense strand to SEQ ID NO: 784724
acacagacgaaguauaggg

SEQ ID NO: 784726 - RNA, 19 nt, Artificial Sequence
  Description of Artificial Sequence: Synthetic oligonucleotide
  Sense strand starting at position 3822 of SEQ ID NO: 587334
cuauacuucgucugugugu

SEQ ID NO: 784727 - RNA, 19 nt, Artificial Sequence
  Description of Artificial Sequence: Synthetic oligonucleotide
  Antisense strand to SEQ ID NO: 784726
acacacagacgaaguauag

SEQ ID NO: 784728 - RNA, 19 nt, Artificial Sequence
  Description of Artificial Sequence: Synthetic oligonucleotide
  Sense strand starting at position 196 of SEQ ID NO: 587335
agcgcuaugguacagaaua

SEQ ID NO: 784729 - RNA, 19 nt, Artificial Sequence
  Description of Artificial Sequence: Synthetic oligonucleotide
  Antisense strand to SEQ ID NO: 784728
uauucuguaccauagcgcu

SEQ ID NO: 784730 - RNA, 19 nt, Artificial Sequence
  Description of Artificial Sequence: Synthetic oligonucleotide
  Sense strand starting at position 198 of SEQ ID NO: 587335
cgcuaugguacagaauacu

SEQ ID NO: 784731 - RNA, 19 nt, Artificial Sequence
  Description of Artificial Sequence: Synthetic oligonucleotide
  Antisense strand to SEQ ID NO: 784730
aguauucuguaccauagcg

SEQ ID NO: 784732 - RNA, 19 nt, Artificial Sequence
  Description of Artificial Sequence: Synthetic oligonucleotide
  Sense strand starting at position 238 of SEQ ID NO: 587335
gugcuaaaugcagauucuu

SEQ ID NO: 784733 - RNA, 19 nt, Artificial Sequence
  Description of Artificial Sequence: Synthetic oligonucleotide
  Antisense strand to SEQ ID NO: 784732
aagaaucugcauuuagcac

SEQ ID NO: 784734 - RNA, 19 nt, Artificial Sequence
  Description of Artificial Sequence: Synthetic oligonucleotide
  Sense strand starting at position 932 of SEQ ID NO: 587335
gaaagaguugguuagaguu

SEQ ID NO: 784735 - RNA, 19 nt, Artificial Sequence
  Description of Artificial Sequence: Synthetic oligonucleotide
  Antisense strand to SEQ ID NO: 784734
aacucuaaccaacucuuuc

SEQ ID NO: 784736 - RNA, 19 nt, Artificial Sequence
  Description of Artificial Sequence: Synthetic oligonucleotide
  Sense strand starting at position 942 of SEQ ID NO: 587335
guuagaguucgcucagcug

SEQ ID NO: 784737 - RNA, 19 nt, Artificial Sequence
  Description of Artificial Sequence: Synthetic oligonucleotide
  Antisense strand to SEQ ID NO: 784736
cagcugagcgaacucuaac

SEQ ID NO: 784738 - RNA, 19 nt, Artificial Sequence
  Description of Artificial Sequence: Synthetic oligonucleotide
  Sense strand starting at position 1122 of SEQ ID NO: 587335
gagugacccuucuuucuag

SEQ ID NO: 784739 - RNA, 19 nt, Artificial Sequence
  Description of Artificial Sequence: Synthetic oligonucleotide
  Antisense strand to SEQ ID NO: 784738
cuagaaagaagggucacuc

SEQ ID NO: 784740 - RNA, 19 nt, Artificial Sequence
  Description of Artificial Sequence: Synthetic oligonucleotide
  Sense strand starting at position 1123 of SEQ ID NO: 587335
agugacccuucuuucuaga

SEQ ID NO: 784741 - RNA, 19 nt, Artificial Sequence
  Description of Artificial Sequence: Synthetic oligonucleotide
  Antisense strand to SEQ ID NO: 784740
ucuagaaagaagggucacu

SEQ ID NO: 784742 - RNA, 19 nt, Artificial Sequence
  Description of Artificial Sequence: Synthetic oligonucleotide
  Sense strand starting at position 1467 of SEQ ID NO: 587335
aaggaauaguccgcgaaca

SEQ ID NO: 784743 - RNA, 19 nt, Artificial Sequence
  Description of Artificial Sequence: Synthetic oligonucleotide
  Antisense strand to SEQ ID NO: 784742
uguucgcggacuauuccuu

SEQ ID NO: 784744 - RNA, 19 nt, Artificial Sequence
  Description of Artificial Sequence: Synthetic oligonucleotide
  Sense strand starting at position 1831 of SEQ ID NO: 587335
uggacuuggucucugaguu

SEQ ID NO: 784745 - RNA, 19 nt, Artificial Sequence
  Description of Artificial Sequence: Synthetic oligonucleotide
  Antisense strand to SEQ ID NO: 784744
aacucagagaccaagucca

SEQ ID NO: 784746 - RNA, 19 nt, Artificial Sequence
  Description of Artificial Sequence: Synthetic oligonucleotide
  Sense strand starting at position 1832 of SEQ ID NO: 587335
ggacuuggucucugaguuu

SEQ ID NO: 784747 - RNA, 19 nt, Artificial Sequence
  Description of Artificial Sequence: Synthetic oligonucleotide
  Antisense strand to SEQ ID NO: 784746
aaacucagagaccaagucc

SEQ ID NO: 784748 - RNA, 19 nt, Artificial Sequence
  Description of Artificial Sequence: Synthetic oligonucleotide
  Sense strand starting at position 1906 of SEQ ID NO: 587335
cgcagcauuugccuaauaa

SEQ ID NO: 784749 - RNA, 19 nt, Artificial Sequence
  Description of Artificial Sequence: Synthetic oligonucleotide
  Antisense strand to SEQ ID NO: 784748
uuauuaggcaaaugcugcg

SEQ ID NO: 784750 - RNA, 19 nt, Artificial Sequence
  Description of Artificial Sequence: Synthetic oligonucleotide
  Sense strand starting at position 2053 of SEQ ID NO: 587335
agauauuuaucgccucuug

SEQ ID NO: 784751 - RNA, 19 nt, Artificial Sequence
  Description of Artificial Sequence: Synthetic oligonucleotide
  Antisense strand to SEQ ID NO: 784750
caagaggcgauaaauaucu

SEQ ID NO: 784752 - RNA, 19 nt, Artificial Sequence
  Description of Artificial Sequence: Synthetic oligonucleotide
  Sense strand starting at position 2104 of SEQ ID NO: 587335
ucuuaugacuuguccauug

SEQ ID NO: 784753 - RNA, 19 nt, Artificial Sequence
  Description of Artificial Sequence: Synthetic oligonucleotide
  Antisense strand to SEQ ID NO: 784752
caauggacaagucauaaga

SEQ ID NO: 784754 - RNA, 19 nt, Artificial Sequence
  Description of Artificial Sequence: Synthetic oligonucleotide
  Sense strand starting at position 2106 of SEQ ID NO: 587335
uuaugacuuguccauugac

SEQ ID NO: 784755 - RNA, 19 nt, Artificial Sequence
  Description of Artificial Sequence: Synthetic oligonucleotide
  Antisense strand to SEQ ID NO: 784754
gucaauggacaagucauaa

SEQ ID NO: 784756 - RNA, 19 nt, Artificial Sequence
  Description of Artificial Sequence: Synthetic oligonucleotide
  Sense strand starting at position 2109 of SEQ ID NO: 587335
ugacuuguccauugacaaa

SEQ ID NO: 784757 - RNA, 19 nt, Artificial Sequence
  Description of Artificial Sequence: Synthetic oligonucleotide
  Antisense strand to SEQ ID NO: 784756
uuugucaauggacaaguca

SEQ ID NO: 784758 - RNA, 19 nt, Artificial Sequence
  Description of Artificial Sequence: Synthetic oligonucleotide
  Sense strand starting at position 2348 of SEQ ID NO: 587335
acaccucaguaucuggaaa

SEQ ID NO: 784759 - RNA, 19 nt, Artificial Sequence
  Description of Artificial Sequence: Synthetic oligonucleotide
  Antisense strand to SEQ ID NO: 784758
uuuccagauacugaggugu

SEQ ID NO: 784760 - RNA, 19 nt, Artificial Sequence
  Description of Artificial Sequence: Synthetic oligonucleotide
  Sense strand starting at position 2501 of SEQ ID NO: 587335
gaguuaugagccugcagaa

SEQ ID NO: 784761 - RNA, 19 nt, Artificial Sequence
  Description of Artificial Sequence: Synthetic oligonucleotide
  Antisense strand to SEQ ID NO: 784760
uucugcaggcucauaacuc

SEQ ID NO: 784762 - RNA, 19 nt, Artificial Sequence
  Description of Artificial Sequence: Synthetic oligonucleotide
  Sense strand starting at position 2573 of SEQ ID NO: 587335
gagcuacucccauagugaa

SEQ ID NO: 784763 - RNA, 19 nt, Artificial Sequence
  Description of Artificial Sequence: Synthetic oligonucleotide
  Antisense strand to SEQ ID NO: 784762
uucacuaugggaguagcuc

SEQ ID NO: 784764 - RNA, 19 nt, Artificial Sequence
  Description of Artificial Sequence: Synthetic oligonucleotide
  Sense strand starting at position 2736 of SEQ ID NO: 587335
gccagugagagaugcauga

SEQ ID NO: 784765 - RNA, 19 nt, Artificial Sequence
  Description of Artificial Sequence: Synthetic oligonucleotide
  Antisense strand to SEQ ID NO: 784764
ucaugcaucucucacuggc

SEQ ID NO: 784766 - RNA, 19 nt, Artificial Sequence
  Description of Artificial Sequence: Synthetic oligonucleotide
  Sense strand starting at position 2738 of SEQ ID NO: 587335
cagugagagaugcaugagu

SEQ ID NO: 784767 - RNA, 19 nt, Artificial Sequence
  Description of Artificial Sequence: Synthetic oligonucleotide
  Antisense strand to SEQ ID NO: 784766
acucaugcaucucucacug

SEQ ID NO: 784768 - RNA, 19 nt, Artificial Sequence
  Description of Artificial Sequence: Synthetic oligonucleotide
  Sense strand starting at position 2740 of SEQ ID NO: 587335
gugagagaugcaugaguua

SEQ ID NO: 784769 - RNA, 19 nt, Artificial Sequence
  Description of Artificial Sequence: Synthetic oligonucleotide
  Antisense strand to SEQ ID NO: 784768
uaacucaugcaucucucac

SEQ ID NO: 784770 - RNA, 19 nt, Artificial Sequence
  Description of Artificial Sequence: Synthetic oligonucleotide
  Sense strand starting at position 2743 of SEQ ID NO: 587335
agagaugcaugaguuaaac

SEQ ID NO: 784771 - RNA, 19 nt, Artificial Sequence
  Description of Artificial Sequence: Synthetic oligonucleotide
  Antisense strand to SEQ ID NO: 784770
guuuaacucaugcaucucu

SEQ ID NO: 784772 - RNA, 19 nt, Artificial Sequence
  Description of Artificial Sequence: Synthetic oligonucleotide
  Sense strand starting at position 2836 of SEQ ID NO: 587335
ggcuuaaacugcuugacua

SEQ ID NO: 784773 - RNA, 19 nt, Artificial Sequence
  Description of Artificial Sequence: Synthetic oligonucleotide
  Antisense strand to SEQ ID NO: 784772
uagucaagcaguuuaagcc

SEQ ID NO: 784774 - RNA, 19 nt, Artificial Sequence
  Description of Artificial Sequence: Synthetic oligonucleotide
  Sense strand starting at position 2888 of SEQ ID NO: 587335
ggucaauauugagucugua

SEQ ID NO: 784775 - RNA, 19 nt, Artificial Sequence
  Description of Artificial Sequence: Synthetic oligonucleotide
  Antisense strand to SEQ ID NO: 784774
uacagacucaauauugacc

SEQ ID NO: 784776 - RNA, 19 nt, Artificial Sequence
  Description of Artificial Sequence: Synthetic oligonucleotide
  Sense strand starting at position 3044 of SEQ ID NO: 587335
auaaaugcucucugacaug

SEQ ID NO: 784777 - RNA, 19 nt, Artificial Sequence
  Description of Artificial Sequence: Synthetic oligonucleotide
  Antisense strand to SEQ ID NO: 784776
caugucagagagcauuuau

SEQ ID NO: 784778 - RNA, 19 nt, Artificial Sequence
  Description of Artificial Sequence: Synthetic oligonucleotide
  Sense strand starting at position 3056 of SEQ ID NO: 587335
ugacaugucgcagaaugga

SEQ ID NO: 784779 - RNA, 19 nt, Artificial Sequence
  Description of Artificial Sequence: Synthetic oligonucleotide
  Antisense strand to SEQ ID NO: 784778
uccauucugcgacauguca

SEQ ID NO: 784780 - RNA, 19 nt, Artificial Sequence
  Description of Artificial Sequence: Synthetic oligonucleotide
  Sense strand starting at position 3138 of SEQ ID NO: 587335
ggaggcaguuaccucuaau

SEQ ID NO: 784781 - RNA, 19 nt, Artificial Sequence
  Description of Artificial Sequence: Synthetic oligonucleotide
  Antisense strand to SEQ ID NO: 784780
auuagagguaacugccucc

SEQ ID NO: 784782 - RNA, 19 nt, Artificial Sequence
  Description of Artificial Sequence: Synthetic oligonucleotide
  Sense strand starting at position 3141 of SEQ ID NO: 587335
ggcaguuaccucuaauucu

SEQ ID NO: 784783 - RNA, 19 nt, Artificial Sequence
  Description of Artificial Sequence: Synthetic oligonucleotide
  Antisense strand to SEQ ID NO: 784782
agaauuagagguaacugcc

SEQ ID NO: 784784 - RNA, 19 nt, Artificial Sequence
  Description of Artificial Sequence: Synthetic oligonucleotide
  Sense strand starting at position 3182 of SEQ ID NO: 587335
guucuugugccugugauuc

SEQ ID NO: 784785 - RNA, 19 nt, Artificial Sequence
  Description of Artificial Sequence: Synthetic oligonucleotide
  Antisense strand to SEQ ID NO: 784784
gaaucacaggcacaagaac

SEQ ID NO: 784786 - RNA, 19 nt, Artificial Sequence
  Description of Artificial Sequence: Synthetic oligonucleotide
  Sense strand starting at position 3221 of SEQ ID NO: 587335
aucagaguuguuuaucgga

SEQ ID NO: 784787 - RNA, 19 nt, Artificial Sequence
  Description of Artificial Sequence: Synthetic oligonucleotide
  Antisense strand to SEQ ID NO: 784786
uccgauaaacaacucugau

SEQ ID NO: 784788 - RNA, 19 nt, Artificial Sequence
  Description of Artificial Sequence: Synthetic oligonucleotide
  Sense strand starting at position 3223 of SEQ ID NO: 587335
cagaguuguuuaucggaaa

SEQ ID NO: 784789 - RNA, 19 nt, Artificial Sequence
  Description of Artificial Sequence: Synthetic oligonucleotide
  Antisense strand to SEQ ID NO: 784788
uuuccgauaaacaacucug

SEQ ID NO: 784790 - RNA, 19 nt, Artificial Sequence
  Description of Artificial Sequence: Synthetic oligonucleotide
  Sense strand starting at position 3420 of SEQ ID NO: 587335
ggaucacugcaccauguua

SEQ ID NO: 784791 - RNA, 19 nt, Artificial Sequence
  Description of Artificial Sequence: Synthetic oligonucleotide
  Antisense strand to SEQ ID NO: 784790
uaacauggugcagugaucc

SEQ ID NO: 784792 - RNA, 19 nt, Artificial Sequence
  Description of Artificial Sequence: Synthetic oligonucleotide
  Sense strand starting at position 3462 of SEQ ID NO: 587335
gagagaaugugccuacuug

SEQ ID NO: 784793 - RNA, 19 nt, Artificial Sequence
  Description of Artificial Sequence: Synthetic oligonucleotide
  Antisense strand to SEQ ID NO: 784792
caaguaggcacauucucuc

SEQ ID NO: 784794 - RNA, 19 nt, Artificial Sequence
  Description of Artificial Sequence: Synthetic oligonucleotide
  Sense strand starting at position 3466 of SEQ ID NO: 587335
gaaugugccuacuuggaaa

SEQ ID NO: 784795 - RNA, 19 nt, Artificial Sequence
  Description of Artificial Sequence: Synthetic oligonucleotide
  Antisense strand to SEQ ID NO: 784794
uuuccaaguaggcacauuc

SEQ ID NO: 784796 - RNA, 19 nt, Artificial Sequence
  Description of Artificial Sequence: Synthetic oligonucleotide
  Sense strand starting at position 3484 of SEQ ID NO: 587335
agaugugaguuguuaauag

SEQ ID NO: 784797 - RNA, 19 nt, Artificial Sequence
  Description of Artificial Sequence: Synthetic oligonucleotide
  Antisense strand to SEQ ID NO: 784796
cuauuaacaacucacaucu

SEQ ID NO: 784798 - RNA, 19 nt, Artificial Sequence
  Description of Artificial Sequence: Synthetic oligonucleotide
  Sense strand starting at position 3528 of SEQ ID NO: 587335
gaguuucugggagaaagcu

SEQ ID NO: 784799 - RNA, 19 nt, Artificial Sequence
  Description of Artificial Sequence: Synthetic oligonucleotide
  Antisense strand to SEQ ID NO: 784798
agcuuucucccagaaacuc

SEQ ID NO: 784800 - RNA, 19 nt, Artificial Sequence
  Description of Artificial Sequence: Synthetic oligonucleotide
  Sense strand starting at position 3534 of SEQ ID NO: 587335
cugggagaaagcuguguuu

SEQ ID NO: 784801 - RNA, 19 nt, Artificial Sequence
  Description of Artificial Sequence: Synthetic oligonucleotide
  Antisense strand to SEQ ID NO: 784800
aaacacagcuuucucccag

SEQ ID NO: 784802 - RNA, 19 nt, Artificial Sequence
  Description of Artificial Sequence: Synthetic oligonucleotide
  Sense strand starting at position 3697 of SEQ ID NO: 587335
ugucaaucuggaggugaaa

SEQ ID NO: 784803 - RNA, 19 nt, Artificial Sequence
  Description of Artificial Sequence: Synthetic oligonucleotide
  Antisense strand to SEQ ID NO: 784802
uuucaccuccagauugaca

SEQ ID NO: 784804 - RNA, 19 nt, Artificial Sequence
  Description of Artificial Sequence: Synthetic oligonucleotide
  Sense strand starting at position 3710 of SEQ ID NO: 587335
gugaaacguugacuuggaa

SEQ ID NO: 784805 - RNA, 19 nt, Artificial Sequence
  Description of Artificial Sequence: Synthetic oligonucleotide
  Antisense strand to SEQ ID NO: 784804
uuccaagucaacguuucac

SEQ ID NO: 784806 - RNA, 19 nt, Artificial Sequence
  Description of Artificial Sequence: Synthetic oligonucleotide
  Sense strand starting at position 3774 of SEQ ID NO: 587335
aagggaugugguuaugagu

SEQ ID NO: 784807 - RNA, 19 nt, Artificial Sequence
  Description of Artificial Sequence: Synthetic oligonucleotide
  Antisense strand to SEQ ID NO: 784806
acucauaaccacaucccuu

SEQ ID NO: 784808 - RNA, 19 nt, Artificial Sequence
  Description of Artificial Sequence: Synthetic oligonucleotide
  Sense strand starting at position 262 of SEQ ID NO: 587336
gacuaauacggucauauua

SEQ ID NO: 784809 - RNA, 19 nt, Artificial Sequence
  Description of Artificial Sequence: Synthetic oligonucleotide
  Antisense strand to SEQ ID NO: 784808
uaauaugaccguauuaguc

SEQ ID NO: 784810 - RNA, 19 nt, Artificial Sequence
  Description of Artificial Sequence: Synthetic oligonucleotide
  Sense strand starting at position 269 of SEQ ID NO: 587336
acggucauauuaccucaaa

SEQ ID NO: 784811 - RNA, 19 nt, Artificial Sequence
  Description of Artificial Sequence: Synthetic oligonucleotide
  Antisense strand to SEQ ID NO: 784810
uuugagguaauaugaccgu

SEQ ID NO: 784812 - RNA, 19 nt, Artificial Sequence
  Description of Artificial Sequence: Synthetic oligonucleotide
  Sense strand starting at position 674 of SEQ ID NO: 587336
cuuaccauacugugacuua

SEQ ID NO: 784813 - RNA, 19 nt, Artificial Sequence
  Description of Artificial Sequence: Synthetic oligonucleotide
  Antisense strand to SEQ ID NO: 784812
uaagucacaguaugguaag

SEQ ID NO: 784814 - RNA, 19 nt, Artificial Sequence
  Description of Artificial Sequence: Synthetic oligonucleotide
  Sense strand starting at position 677 of SEQ ID NO: 587336
accauacugugacuuacau

SEQ ID NO: 784815 - RNA, 19 nt, Artificial Sequence
  Description of Artificial Sequence: Synthetic oligonucleotide
  Antisense strand to SEQ ID NO: 784814
auguaagucacaguauggu

SEQ ID NO: 784816 - RNA, 19 nt, Artificial Sequence
  Description of Artificial Sequence: Synthetic oligonucleotide
  Sense strand starting at position 721 of SEQ ID NO: 587336
uggcauucugaucacugua

SEQ ID NO: 784817 - RNA, 19 nt, Artificial Sequence
  Description of Artificial Sequence: Synthetic oligonucleotide
  Antisense strand to SEQ ID NO: 784816
uacagugaucagaaugcca

SEQ ID NO: 784818 - RNA, 19 nt, Artificial Sequence
  Description of Artificial Sequence: Synthetic oligonucleotide
  Sense strand starting at position 734 of SEQ ID NO: 587336
acuguaucuccuggaagau

SEQ ID NO: 784819 - RNA, 19 nt, Artificial Sequence
  Description of Artificial Sequence: Synthetic oligonucleotide
  Antisense strand to SEQ ID NO: 784818
aucuuccaggagauacagu

SEQ ID NO: 784820 - RNA, 19 nt, Artificial Sequence
  Description of Artificial Sequence: Synthetic oligonucleotide
  Sense strand starting at position 735 of SEQ ID NO: 587336
cuguaucuccuggaagauc

SEQ ID NO: 784821 - RNA, 19 nt, Artificial Sequence
  Description of Artificial Sequence: Synthetic oligonucleotide
  Antisense strand to SEQ ID NO: 784820
gaucuuccaggagauacag

SEQ ID NO: 784822 - RNA, 19 nt, Artificial Sequence
  Description of Artificial Sequence: Synthetic oligonucleotide
  Sense strand starting at position 794 of SEQ ID NO: 587336
augagacagagaugucagu

SEQ ID NO: 784823 - RNA, 19 nt, Artificial Sequence
  Description of Artificial Sequence: Synthetic oligonucleotide
  Antisense strand to SEQ ID NO: 784822
acugacaucucugucucau

SEQ ID NO: 784824 - RNA, 19 nt, Artificial Sequence
  Description of Artificial Sequence: Synthetic oligonucleotide
  Sense strand starting at position 861 of SEQ ID NO: 587336
accugucauguuuauuaaa

SEQ ID NO: 784825 - RNA, 19 nt, Artificial Sequence
  Description of Artificial Sequence: Synthetic oligonucleotide
  Antisense strand to SEQ ID NO: 784824
uuuaauaaacaugacaggu

SEQ ID NO: 784826 - RNA, 19 nt, Artificial Sequence
  Description of Artificial Sequence: Synthetic oligonucleotide
  Sense strand starting at position 863 of SEQ ID NO: 587336
cugucauguuuauuaaaga

SEQ ID NO: 784827 - RNA, 19 nt, Artificial Sequence
  Description of Artificial Sequence: Synthetic oligonucleotide
  Antisense strand to SEQ ID NO: 784826
ucuuuaauaaacaugacag

SEQ ID NO: 784828 - RNA, 19 nt, Artificial Sequence
  Description of Artificial Sequence: Synthetic oligonucleotide
  Sense strand starting at position 877 of SEQ ID NO: 587336
aaagaaugaguuugcacua

SEQ ID NO: 784829 - RNA, 19 nt, Artificial Sequence
  Description of Artificial Sequence: Synthetic oligonucleotide
  Antisense strand to SEQ ID NO: 784828
uagugcaaacucauucuuu

SEQ ID NO: 784830 - RNA, 19 nt, Artificial Sequence
  Description of Artificial Sequence: Synthetic oligonucleotide
  Sense strand starting at position 882 of SEQ ID NO: 587336
augaguuugcacuaaccca

SEQ ID NO: 784831 - RNA, 19 nt, Artificial Sequence
  Description of Artificial Sequence: Synthetic oligonucleotide
  Antisense strand to SEQ ID NO: 784830
uggguuagugcaaacucau

SEQ ID NO: 784832 - RNA, 19 nt, Artificial Sequence
  Description of Artificial Sequence: Synthetic oligonucleotide
  Sense strand starting at position 1124 of SEQ ID NO: 587336
ucaaacuugcaaugauaug

SEQ ID NO: 784833 - RNA, 19 nt, Artificial Sequence
  Description of Artificial Sequence: Synthetic oligonucleotide
  Antisense strand to SEQ ID NO: 784832
cauaucauugcaaguuuga

SEQ ID NO: 784834 - RNA, 19 nt, Artificial Sequence
  Description of Artificial Sequence: Synthetic oligonucleotide
  Sense strand starting at position 1450 of SEQ ID NO: 587336
caagcagaggcauguaaau

SEQ ID NO: 784835 - RNA, 19 nt, Artificial Sequence
  Description of Artificial Sequence: Synthetic oligonucleotide
  Antisense strand to SEQ ID NO: 784834
auuuacaugccucugcuug

SEQ ID NO: 784836 - RNA, 19 nt, Artificial Sequence
  Description of Artificial Sequence: Synthetic oligonucleotide
  Sense strand starting at position 1452 of SEQ ID NO: 587336
agcagaggcauguaaauga

SEQ ID NO: 784837 - RNA, 19 nt, Artificial Sequence
  Description of Artificial Sequence: Synthetic oligonucleotide
  Antisense strand to SEQ ID NO: 784836
ucauuuacaugccucugcu

SEQ ID NO: 784838 - RNA, 19 nt, Artificial Sequence
  Description of Artificial Sequence: Synthetic oligonucleotide
  Sense strand starting at position 1536 of SEQ ID NO: 587336
cagguuaggcucuaaguga

SEQ ID NO: 784839 - RNA, 19 nt, Artificial Sequence
  Description of Artificial Sequence: Synthetic oligonucleotide
  Antisense strand to SEQ ID NO: 784838
ucacuuagagccuaaccug

SEQ ID NO: 784840 - RNA, 19 nt, Artificial Sequence
  Description of Artificial Sequence: Synthetic oligonucleotide
  Sense strand starting at position 1551 of SEQ ID NO: 587336
gugagucuuaaaggaagca

SEQ ID NO: 784841 - RNA, 19 nt, Artificial Sequence
  Description of Artificial Sequence: Synthetic oligonucleotide
  Antisense strand to SEQ ID NO: 784840
ugcuuccuuuaagacucac

SEQ ID NO: 784842 - RNA, 19 nt, Artificial Sequence
  Description of Artificial Sequence: Synthetic oligonucleotide
  Sense strand starting at position 1680 of SEQ ID NO: 587336
acggaauaacaugguagau

SEQ ID NO: 784843 - RNA, 19 nt, Artificial Sequence
  Description of Artificial Sequence: Synthetic oligonucleotide
  Antisense strand to SEQ ID NO: 784842
aucuaccauguuauuccgu

SEQ ID NO: 784844 - RNA, 19 nt, Artificial Sequence
  Description of Artificial Sequence: Synthetic oligonucleotide
  Sense strand starting at position 1690 of SEQ ID NO: 587336
augguagauguucauguga

SEQ ID NO: 784845 - RNA, 19 nt, Artificial Sequence
  Description of Artificial Sequence: Synthetic oligonucleotide
  Antisense strand to SEQ ID NO: 784844
ucacaugaacaucuaccau

SEQ ID NO: 784846 - RNA, 19 nt, Artificial Sequence
  Description of Artificial Sequence: Synthetic oligonucleotide
  Sense strand starting at position 1710 of SEQ ID NO: 587336
auagcacugcuuuguauuu

SEQ ID NO: 784847 - RNA, 19 nt, Artificial Sequence
  Description of Artificial Sequence: Synthetic oligonucleotide
  Antisense strand to SEQ ID NO: 784846
aaauacaaagcagugcuau

SEQ ID NO: 784848 - RNA, 19 nt, Artificial Sequence
  Description of Artificial Sequence: Synthetic oligonucleotide
  Sense strand starting at position 1991 of SEQ ID NO: 587336
uccagcguucuggugguua

SEQ ID NO: 784849 - RNA, 19 nt, Artificial Sequence
  Description of Artificial Sequence: Synthetic oligonucleotide
  Antisense strand to SEQ ID NO: 784848
uaaccaccagaacgcugga

SEQ ID NO: 784850 - RNA, 19 nt, Artificial Sequence
  Description of Artificial Sequence: Synthetic oligonucleotide
  Sense strand starting at position 2174 of SEQ ID NO: 587336
ucauauggccuuuaagguu

SEQ ID NO: 784851 - RNA, 19 nt, Artificial Sequence
  Description of Artificial Sequence: Synthetic oligonucleotide
  Antisense strand to SEQ ID NO: 784850
aaccuuaaaggccauauga

SEQ ID NO: 784852 - RNA, 19 nt, Artificial Sequence
  Description of Artificial Sequence: Synthetic oligonucleotide
  Sense strand starting at position 2338 of SEQ ID NO: 587336
uccaacauuguguauuaua

SEQ ID NO: 784853 - RNA, 19 nt, Artificial Sequence
  Description of Artificial Sequence: Synthetic oligonucleotide
  Antisense strand to SEQ ID NO: 784852
uauaauacacaauguugga

SEQ ID NO: 784854 - RNA, 19 nt, Artificial Sequence
  Description of Artificial Sequence: Synthetic oligonucleotide
  Sense strand starting at position 2438 of SEQ ID NO: 587336
aagggaggcgaaugugaua

SEQ ID NO: 784855 - RNA, 19 nt, Artificial Sequence
  Description of Artificial Sequence: Synthetic oligonucleotide
  Antisense strand to SEQ ID NO: 784854
uaucacauucgccucccuu

SEQ ID NO: 784856 - RNA, 19 nt, Artificial Sequence
  Description of Artificial Sequence: Synthetic oligonucleotide
  Sense strand starting at position 2447 of SEQ ID NO: 587336
gaaugugauaguugaggag

SEQ ID NO: 784857 - RNA, 19 nt, Artificial Sequence
  Description of Artificial Sequence: Synthetic oligonucleotide
  Antisense strand to SEQ ID NO: 784856
cuccucaacuaucacauuc

SEQ ID NO: 784858 - RNA, 19 nt, Artificial Sequence
  Description of Artificial Sequence: Synthetic oligonucleotide
  Sense strand starting at position 2695 of SEQ ID NO: 587336
guaguauuagacuaaagca

SEQ ID NO: 784859 - RNA, 19 nt, Artificial Sequence
  Description of Artificial Sequence: Synthetic oligonucleotide
  Antisense strand to SEQ ID NO: 784858
ugcuuuagucuaauacuac

SEQ ID NO: 784860 - RNA, 19 nt, Artificial Sequence
  Description of Artificial Sequence: Synthetic oligonucleotide
  Sense strand starting at position 2836 of SEQ ID NO: 587336
augcauggcuuacuaaaua

SEQ ID NO: 784861 - RNA, 19 nt, Artificial Sequence
  Description of Artificial Sequence: Synthetic oligonucleotide
  Antisense strand to SEQ ID NO: 784860
uauuuaguaagccaugcau

SEQ ID NO: 784862 - RNA, 19 nt, Artificial Sequence
  Description of Artificial Sequence: Synthetic oligonucleotide
  Sense strand starting at position 2891 of SEQ ID NO: 587336
augagcugccaauauagaa

SEQ ID NO: 784863 - RNA, 19 nt, Artificial Sequence
  Description of Artificial Sequence: Synthetic oligonucleotide
  Antisense strand to SEQ ID NO: 784862
uucuauauuggcagcucau

SEQ ID NO: 784864 - RNA, 19 nt, Artificial Sequence
  Description of Artificial Sequence: Synthetic oligonucleotide
  Sense strand starting at position 2935 of SEQ ID NO: 587336
guauaaguaguugacuuaa

SEQ ID NO: 784865 - RNA, 19 nt, Artificial Sequence
  Description of Artificial Sequence: Synthetic oligonucleotide
  Antisense strand to SEQ ID NO: 784864
uuaagucaacuacuuauac

SEQ ID NO: 784866 - RNA, 19 nt, Artificial Sequence
  Description of Artificial Sequence: Synthetic oligonucleotide
  Sense strand starting at position 2937 of SEQ ID NO: 587336
auaaguaguugacuuaauc

SEQ ID NO: 784867 - RNA, 19 nt, Artificial Sequence
  Description of Artificial Sequence: Synthetic oligonucleotide
  Antisense strand to SEQ ID NO: 784866
gauuaagucaacuacuuau

SEQ ID NO: 784868 - RNA, 19 nt, Artificial Sequence
  Description of Artificial Sequence: Synthetic oligonucleotide
  Sense strand starting at position 3036 of SEQ ID NO: 587336
ccaguuuaauaacccagua

SEQ ID NO: 784869 - RNA, 19 nt, Artificial Sequence
  Description of Artificial Sequence: Synthetic oligonucleotide
  Antisense strand to SEQ ID NO: 784868
uacuggguuauuaaacugg

SEQ ID NO: 784870 - RNA, 19 nt, Artificial Sequence
  Description of Artificial Sequence: Synthetic oligonucleotide
  Sense strand starting at position 3156 of SEQ ID NO: 587336
acaugcuauuugguaugua

SEQ ID NO: 784871 - RNA, 19 nt, Artificial Sequence
  Description of Artificial Sequence: Synthetic oligonucleotide
  Antisense strand to SEQ ID NO: 784870
uacauaccaaauagcaugu

SEQ ID NO: 784872 - RNA, 19 nt, Artificial Sequence
  Description of Artificial Sequence: Synthetic oligonucleotide
  Sense strand starting at position 3159 of SEQ ID NO: 587336
ugcuauuugguauguaucu

SEQ ID NO: 784873 - RNA, 19 nt, Artificial Sequence
  Description of Artificial Sequence: Synthetic oligonucleotide
  Antisense strand to SEQ ID NO: 784872
agauacauaccaaauagca

SEQ ID NO: 784874 - RNA, 19 nt, Artificial Sequence
  Description of Artificial Sequence: Synthetic oligonucleotide
  Sense strand starting at position 3172 of SEQ ID NO: 587336
guaucuguacuugauccau

SEQ ID NO: 784875 - RNA, 19 nt, Artificial Sequence
  Description of Artificial Sequence: Synthetic oligonucleotide
  Antisense strand to SEQ ID NO: 784874
auggaucaaguacagauac

SEQ ID NO: 784876 - RNA, 19 nt, Artificial Sequence
  Description of Artificial Sequence: Synthetic oligonucleotide
  Sense strand starting at position 3174 of SEQ ID NO: 587336
aucuguacuugauccauau

SEQ ID NO: 784877 - RNA, 19 nt, Artificial Sequence
  Description of Artificial Sequence: Synthetic oligonucleotide
  Antisense strand to SEQ ID NO: 784876
auauggaucaaguacagau

SEQ ID NO: 784878 - RNA, 19 nt, Artificial Sequence
  Description of Artificial Sequence: Synthetic oligonucleotide
  Sense strand starting at position 3178 of SEQ ID NO: 587336
guacuugauccauauuauc

SEQ ID NO: 784879 - RNA, 19 nt, Artificial Sequence
  Description of Artificial Sequence: Synthetic oligonucleotide
  Antisense strand to SEQ ID NO: 784878
gauaauauggaucaaguac

SEQ ID NO: 784880 - RNA, 19 nt, Artificial Sequence
  Description of Artificial Sequence: Synthetic oligonucleotide
  Sense strand starting at position 3273 of SEQ ID NO: 587336
cuagucaaaugucuccaaa

SEQ ID NO: 784881 - RNA, 19 nt, Artificial Sequence
  Description of Artificial Sequence: Synthetic oligonucleotide
  Antisense strand to SEQ ID NO: 784880
uuuggagacauuugacuag

SEQ ID NO: 784882 - RNA, 19 nt, Artificial Sequence
  Description of Artificial Sequence: Synthetic oligonucleotide
  Sense strand starting at position 3324 of SEQ ID NO: 587336
gacagaguggugugaccaa

SEQ ID NO: 784883 - RNA, 19 nt, Artificial Sequence
  Description of Artificial Sequence: Synthetic oligonucleotide
  Antisense strand to SEQ ID NO: 784882
uuggucacaccacucuguc

SEQ ID NO: 784884 - RNA, 19 nt, Artificial Sequence
  Description of Artificial Sequence: Synthetic oligonucleotide
  Sense strand starting at position 3385 of SEQ ID NO: 587336
cuggcaauaccuugaaaua

SEQ ID NO: 784885 - RNA, 19 nt, Artificial Sequence
  Description of Artificial Sequence: Synthetic oligonucleotide
  Antisense strand to SEQ ID NO: 784884
uauuucaagguauugccag

SEQ ID NO: 784886 - RNA, 19 nt, Artificial Sequence
  Description of Artificial Sequence: Synthetic oligonucleotide
  Sense strand starting at position 3702 of SEQ ID NO: 587336
gcaaccaagggcugauauu

SEQ ID NO: 784887 - RNA, 19 nt, Artificial Sequence
  Description of Artificial Sequence: Synthetic oligonucleotide
  Antisense strand to SEQ ID NO: 784886
aauaucagcccuugguugc

SEQ ID NO: 784888 - RNA, 19 nt, Artificial Sequence
  Description of Artificial Sequence: Synthetic oligonucleotide
  Sense strand starting at position 546 of SEQ ID NO: 587337
uggcuauaacgacauguca

SEQ ID NO: 784889 - RNA, 19 nt, Artificial Sequence
  Description of Artificial Sequence: Synthetic oligonucleotide
  Antisense strand to SEQ ID NO: 784888
ugacaugucguuauagcca

SEQ ID NO: 784890 - RNA, 19 nt, Artificial Sequence
  Description of Artificial Sequence: Synthetic oligonucleotide
  Sense strand starting at position 558 of SEQ ID NO: 587337
caugucaugugauuaagau

SEQ ID NO: 784891 - RNA, 19 nt, Artificial Sequence
  Description of Artificial Sequence: Synthetic oligonucleotide
  Antisense strand to SEQ ID NO: 784890
aucuuaaucacaugacaug

SEQ ID NO: 784892 - RNA, 19 nt, Artificial Sequence
  Description of Artificial Sequence: Synthetic oligonucleotide
  Sense strand starting at position 639 of SEQ ID NO: 587337
gugccaguuugauuugucu

SEQ ID NO: 784893 - RNA, 19 nt, Artificial Sequence
  Description of Artificial Sequence: Synthetic oligonucleotide
  Antisense strand to SEQ ID NO: 784892
agacaaaucaaacuggcac

SEQ ID NO: 784894 - RNA, 19 nt, Artificial Sequence
  Description of Artificial Sequence: Synthetic oligonucleotide
  Sense strand starting at position 642 of SEQ ID NO: 587337
ccaguuugauuugucuauu

SEQ ID NO: 784895 - RNA, 19 nt, Artificial Sequence
  Description of Artificial Sequence: Synthetic oligonucleotide
  Antisense strand to SEQ ID NO: 784894
aauagacaaaucaaacugg

SEQ ID NO: 784896 - RNA, 19 nt, Artificial Sequence
  Description of Artificial Sequence: Synthetic oligonucleotide
  Sense strand starting at position 845 of SEQ ID NO: 587337
ugugaauugcaagacuuua

SEQ ID NO: 784897 - RNA, 19 nt, Artificial Sequence
  Description of Artificial Sequence: Synthetic oligonucleotide
  Antisense strand to SEQ ID NO: 784896
uaaagucuugcaauucaca

SEQ ID NO: 784898 - RNA, 19 nt, Artificial Sequence
  Description of Artificial Sequence: Synthetic oligonucleotide
  Sense strand starting at position 857 of SEQ ID NO: 587337
gacuuuaaguggcuauaca

SEQ ID NO: 784899 - RNA, 19 nt, Artificial Sequence
  Description of Artificial Sequence: Synthetic oligonucleotide
  Antisense strand to SEQ ID NO: 784898
uguauagccacuuaaaguc

SEQ ID NO: 784900 - RNA, 19 nt, Artificial Sequence
  Description of Artificial Sequence: Synthetic oligonucleotide
  Sense strand starting at position 858 of SEQ ID NO: 587337
acuuuaaguggcuauacau

SEQ ID NO: 784901 - RNA, 19 nt, Artificial Sequence
  Description of Artificial Sequence: Synthetic oligonucleotide
  Antisense strand to SEQ ID NO: 784900
auguauagccacuuaaagu

SEQ ID NO: 784902 - RNA, 19 nt, Artificial Sequence
  Description of Artificial Sequence: Synthetic oligonucleotide
  Sense strand starting at position 865 of SEQ ID NO: 587337
guggcuauacauuacauau

SEQ ID NO: 784903 - RNA, 19 nt, Artificial Sequence
  Description of Artificial Sequence: Synthetic oligonucleotide
  Antisense strand to SEQ ID NO: 784902
auauguaauguauagccac

SEQ ID NO: 784904 - RNA, 19 nt, Artificial Sequence
  Description of Artificial Sequence: Synthetic oligonucleotide
  Sense strand starting at position 885 of SEQ ID NO: 587337
cccugcaaaggauguuaua

SEQ ID NO: 784905 - RNA, 19 nt, Artificial Sequence
  Description of Artificial Sequence: Synthetic oligonucleotide
  Antisense strand to SEQ ID NO: 784904
uauaacauccuuugcaggg

SEQ ID NO: 784906 - RNA, 19 nt, Artificial Sequence
  Description of Artificial Sequence: Synthetic oligonucleotide
  Sense strand starting at position 938 of SEQ ID NO: 587337
cauguuucucuaugaagag

SEQ ID NO: 784907 - RNA, 19 nt, Artificial Sequence
  Description of Artificial Sequence: Synthetic oligonucleotide
  Antisense strand to SEQ ID NO: 784906
cucuucauagagaaacaug

SEQ ID NO: 784908 - RNA, 19 nt, Artificial Sequence
  Description of Artificial Sequence: Synthetic oligonucleotide
  Sense strand starting at position 1020 of SEQ ID NO: 587337
ucagaauguccacagcauu

SEQ ID NO: 784909 - RNA, 19 nt, Artificial Sequence
  Description of Artificial Sequence: Synthetic oligonucleotide
  Antisense strand to SEQ ID NO: 784908
aaugcuguggacauucuga

SEQ ID NO: 784910 - RNA, 19 nt, Artificial Sequence
  Description of Artificial Sequence: Synthetic oligonucleotide
  Sense strand starting at position 1117 of SEQ ID NO: 587337
cgugaacuacugcaaauga

SEQ ID NO: 784911 - RNA, 19 nt, Artificial Sequence
  Description of Artificial Sequence: Synthetic oligonucleotide
  Antisense strand to SEQ ID NO: 784910
ucauuugcaguaguucacg

SEQ ID NO: 784912 - RNA, 19 nt, Artificial Sequence
  Description of Artificial Sequence: Synthetic oligonucleotide
  Sense strand starting at position 1202 of SEQ ID NO: 587337
ccuggaaagucugugacua

SEQ ID NO: 784913 - RNA, 19 nt, Artificial Sequence
  Description of Artificial Sequence: Synthetic oligonucleotide
  Antisense strand to SEQ ID NO: 784912
uagucacagacuuuccagg

SEQ ID NO: 784914 - RNA, 19 nt, Artificial Sequence
  Description of Artificial Sequence: Synthetic oligonucleotide
  Sense strand starting at position 1203 of SEQ ID NO: 587337
cuggaaagucugugacuaa

SEQ ID NO: 784915 - RNA, 19 nt, Artificial Sequence
  Description of Artificial Sequence: Synthetic oligonucleotide
  Antisense strand to SEQ ID NO: 784914
uuagucacagacuuuccag

SEQ ID NO: 784916 - RNA, 19 nt, Artificial Sequence
  Description of Artificial Sequence: Synthetic oligonucleotide
  Sense strand starting at position 1206 of SEQ ID NO: 587337
gaaagucugugacuaaucu

SEQ ID NO: 784917 - RNA, 19 nt, Artificial Sequence
  Description of Artificial Sequence: Synthetic oligonucleotide
  Antisense strand to SEQ ID NO: 784916
agauuagucacagacuuuc

SEQ ID NO: 784918 - RNA, 19 nt, Artificial Sequence
  Description of Artificial Sequence: Synthetic oligonucleotide
  Sense strand starting at position 1520 of SEQ ID NO: 587337
acgacucagcgaugcauuu

SEQ ID NO: 784919 - RNA, 19 nt, Artificial Sequence
  Description of Artificial Sequence: Synthetic oligonucleotide
  Antisense strand to SEQ ID NO: 784918
aaaugcaucgcugagucgu

SEQ ID NO: 784920 - RNA, 19 nt, Artificial Sequence
  Description of Artificial Sequence: Synthetic oligonucleotide
  Sense strand starting at position 2297 of SEQ ID NO: 587337
cugaaaugccuuuaagggu

SEQ ID NO: 784921 - RNA, 19 nt, Artificial Sequence
  Description of Artificial Sequence: Synthetic oligonucleotide
  Antisense strand to SEQ ID NO: 784920
acccuuaaaggcauuucag

SEQ ID NO: 784922 - RNA, 19 nt, Artificial Sequence
  Description of Artificial Sequence: Synthetic oligonucleotide
  Sense strand starting at position 2306 of SEQ ID NO: 587337
cuuuaaggguccuuacaga

SEQ ID NO: 784923 - RNA, 19 nt, Artificial Sequence
  Description of Artificial Sequence: Synthetic oligonucleotide
  Antisense strand to SEQ ID NO: 784922
ucuguaaggacccuuaaag

SEQ ID NO: 784924 - RNA, 19 nt, Artificial Sequence
  Description of Artificial Sequence: Synthetic oligonucleotide
  Sense strand starting at position 2502 of SEQ ID NO: 587337
gucaauaugugacucagaa

SEQ ID NO: 784925 - RNA, 19 nt, Artificial Sequence
  Description of Artificial Sequence: Synthetic oligonucleotide
  Antisense strand to SEQ ID NO: 784924
uucugagucacauauugac

SEQ ID NO: 784926 - RNA, 19 nt, Artificial Sequence
  Description of Artificial Sequence: Synthetic oligonucleotide
  Sense strand starting at position 2514 of SEQ ID NO: 587337
cucagaauggccugacagu

SEQ ID NO: 784927 - RNA, 19 nt, Artificial Sequence
  Description of Artificial Sequence: Synthetic oligonucleotide
  Antisense strand to SEQ ID NO: 784926
acugucaggccauucugag

SEQ ID NO: 784928 - RNA, 19 nt, Artificial Sequence
  Description of Artificial Sequence: Synthetic oligonucleotide
  Sense strand starting at position 2515 of SEQ ID NO: 587337
ucagaauggccugacaguu

SEQ ID NO: 784929 - RNA, 19 nt, Artificial Sequence
  Description of Artificial Sequence: Synthetic oligonucleotide
  Antisense strand to SEQ ID NO: 784928
aacugucaggccauucuga

SEQ ID NO: 784930 - RNA, 19 nt, Artificial Sequence
  Description of Artificial Sequence: Synthetic oligonucleotide
  Sense strand starting at position 2561 of SEQ ID NO: 587337
gaggcauugucuucucaag

SEQ ID NO: 784931 - RNA, 19 nt, Artificial Sequence
  Description of Artificial Sequence: Synthetic oligonucleotide
  Antisense strand to SEQ ID NO: 784930
cuugagaagacaaugccuc

SEQ ID NO: 784932 - RNA, 19 nt, Artificial Sequence
  Description of Artificial Sequence: Synthetic oligonucleotide
  Sense strand starting at position 2640 of SEQ ID NO: 587337
ccauuaauuuaucagggau

SEQ ID NO: 784933 - RNA, 19 nt, Artificial Sequence
  Description of Artificial Sequence: Synthetic oligonucleotide
  Antisense strand to SEQ ID NO: 784932
aucccugauaaauuaaugg

SEQ ID NO: 784934 - RNA, 19 nt, Artificial Sequence
  Description of Artificial Sequence: Synthetic oligonucleotide
  Sense strand starting at position 2841 of SEQ ID NO: 587337
cccuaauguggugaaucau

SEQ ID NO: 784935 - RNA, 19 nt, Artificial Sequence
  Description of Artificial Sequence: Synthetic oligonucleotide
  Antisense strand to SEQ ID NO: 784934
augauucaccacauuaggg

SEQ ID NO: 784936 - RNA, 19 nt, Artificial Sequence
  Description of Artificial Sequence: Synthetic oligonucleotide
  Sense strand starting at position 2850 of SEQ ID NO: 587337
ggugaaucauagucucaau

SEQ ID NO: 784937 - RNA, 19 nt, Artificial Sequence
  Description of Artificial Sequence: Synthetic oligonucleotide
  Antisense strand to SEQ ID NO: 784936
auugagacuaugauucacc

SEQ ID NO: 784938 - RNA, 19 nt, Artificial Sequence
  Description of Artificial Sequence: Synthetic oligonucleotide
  Sense strand starting at position 2878 of SEQ ID NO: 587337
uucuaaaugcuagaguauc

SEQ ID NO: 784939 - RNA, 19 nt, Artificial Sequence
  Description of Artificial Sequence: Synthetic oligonucleotide
  Antisense strand to SEQ ID NO: 784938
gauacucuagcauuuagaa

SEQ ID NO: 784940 - RNA, 19 nt, Artificial Sequence
  Description of Artificial Sequence: Synthetic oligonucleotide
  Sense strand starting at position 2890 of SEQ ID NO: 587337
gaguaucuagcauaugauc

SEQ ID NO: 784941 - RNA, 19 nt, Artificial Sequence
  Description of Artificial Sequence: Synthetic oligonucleotide
  Antisense strand to SEQ ID NO: 784940
gaucauaugcuagauacuc

SEQ ID NO: 784942 - RNA, 19 nt, Artificial Sequence
  Description of Artificial Sequence: Synthetic oligonucleotide
  Sense strand starting at position 3060 of SEQ ID NO: 587337
agggaagcaucacuuauua

SEQ ID NO: 784943 - RNA, 19 nt, Artificial Sequence
  Description of Artificial Sequence: Synthetic oligonucleotide
  Antisense strand to SEQ ID NO: 784942
uaauaagugaugcuucccu

SEQ ID NO: 784944 - RNA, 19 nt, Artificial Sequence
  Description of Artificial Sequence: Synthetic oligonucleotide
  Sense strand starting at position 3073 of SEQ ID NO: 587337
uuauuagaaaggugcagaa

SEQ ID NO: 784945 - RNA, 19 nt, Artificial Sequence
  Description of Artificial Sequence: Synthetic oligonucleotide
  Antisense strand to SEQ ID NO: 784944
uucugcaccuuucuaauaa

SEQ ID NO: 784946 - RNA, 19 nt, Artificial Sequence
  Description of Artificial Sequence: Synthetic oligonucleotide
  Sense strand starting at position 3301 of SEQ ID NO: 587337
gcagaugaagacuauguuu

SEQ ID NO: 784947 - RNA, 19 nt, Artificial Sequence
  Description of Artificial Sequence: Synthetic oligonucleotide
  Antisense strand to SEQ ID NO: 784946
aaacauagucuucaucugc

SEQ ID NO: 784948 - RNA, 19 nt, Artificial Sequence
  Description of Artificial Sequence: Synthetic oligonucleotide
  Sense strand starting at position 3692 of SEQ ID NO: 587337
cuugucauuccugauugag

SEQ ID NO: 784949 - RNA, 19 nt, Artificial Sequence
  Description of Artificial Sequence: Synthetic oligonucleotide
  Antisense strand to SEQ ID NO: 784948
cucaaucaggaaugacaag

SEQ ID NO: 784950 - RNA, 19 nt, Artificial Sequence
  Description of Artificial Sequence: Synthetic oligonucleotide
  Sense strand starting at position 3694 of SEQ ID NO: 587337
ugucauuccugauugagua

SEQ ID NO: 784951 - RNA, 19 nt, Artificial Sequence
  Description of Artificial Sequence: Synthetic oligonucleotide
  Antisense strand to SEQ ID NO: 784950
uacucaaucaggaaugaca

SEQ ID NO: 784952 - RNA, 19 nt, Artificial Sequence
  Description of Artificial Sequence: Synthetic oligonucleotide
  Sense strand starting at position 3698 of SEQ ID NO: 587337
auuccugauugaguauaua

SEQ ID NO: 784953 - RNA, 19 nt, Artificial Sequence
  Description of Artificial Sequence: Synthetic oligonucleotide
  Antisense strand to SEQ ID NO: 784952
uauauacucaaucaggaau

SEQ ID NO: 784954 - RNA, 19 nt, Artificial Sequence
  Description of Artificial Sequence: Synthetic oligonucleotide
  Sense strand starting at position 3701 of SEQ ID NO: 587337
ccugauugaguauauaugu

SEQ ID NO: 784955 - RNA, 19 nt, Artificial Sequence
  Description of Artificial Sequence: Synthetic oligonucleotide
  Antisense strand to SEQ ID NO: 784954
acauauauacucaaucagg

SEQ ID NO: 784956 - RNA, 19 nt, Artificial Sequence
  Description of Artificial Sequence: Synthetic oligonucleotide
  Sense strand starting at position 3706 of SEQ ID NO: 587337
uugaguauauauguuggaa

SEQ ID NO: 784957 - RNA, 19 nt, Artificial Sequence
  Description of Artificial Sequence: Synthetic oligonucleotide
  Antisense strand to SEQ ID NO: 784956
uuccaacauauauacucaa

SEQ ID NO: 784958 - RNA, 19 nt, Artificial Sequence
  Description of Artificial Sequence: Synthetic oligonucleotide
  Sense strand starting at position 3804 of SEQ ID NO: 587337
uugagaaaucuguguguag

SEQ ID NO: 784959 - RNA, 19 nt, Artificial Sequence
  Description of Artificial Sequence: Synthetic oligonucleotide
  Antisense strand to SEQ ID NO: 784958
cuacacacagauuucucaa

SEQ ID NO: 784960 - RNA, 19 nt, Artificial Sequence
  Description of Artificial Sequence: Synthetic oligonucleotide
  Sense strand starting at position 3805 of SEQ ID NO: 587337
ugagaaaucuguguguaga

SEQ ID NO: 784961 - RNA, 19 nt, Artificial Sequence
  Description of Artificial Sequence: Synthetic oligonucleotide
  Antisense strand to SEQ ID NO: 784960
ucuacacacagauuucuca

SEQ ID NO: 784962 - RNA, 19 nt, Artificial Sequence
  Description of Artificial Sequence: Synthetic oligonucleotide
  Sense strand starting at position 3806 of SEQ ID NO: 587337
gagaaaucuguguguagac

SEQ ID NO: 784963 - RNA, 19 nt, Artificial Sequence
  Description of Artificial Sequence: Synthetic oligonucleotide
  Antisense strand to SEQ ID NO: 784962
gucuacacacagauuucuc

SEQ ID NO: 784964 - RNA, 19 nt, Artificial Sequence
  Description of Artificial Sequence: Synthetic oligonucleotide
  Sense strand starting at position 3807 of SEQ ID NO: 587337
agaaaucuguguguagaca

SEQ ID NO: 784965 - RNA, 19 nt, Artificial Sequence
  Description of Artificial Sequence: Synthetic oligonucleotide
  Antisense strand to SEQ ID NO: 784964
ugucuacacacagauuucu

SEQ ID NO: 784966 - RNA, 19 nt, Artificial Sequence
  Description of Artificial Sequence: Synthetic oligonucleotide
  Sense strand starting at position 3808 of SEQ ID NO: 587337
gaaaucuguguguagacau

SEQ ID NO: 784967 - RNA, 19 nt, Artificial Sequence
  Description of Artificial Sequence: Synthetic oligonucleotide
  Antisense strand to SEQ ID NO: 784966
augucuacacacagauuuc

SEQ ID NO: 784968 - RNA, 19 nt, Artificial Sequence
  Description of Artificial Sequence: Synthetic oligonucleotide
  Sense strand starting at position 9 of SEQ ID NO: 587338
ucaaguugacccugaauua

SEQ ID NO: 784969 - RNA, 19 nt, Artificial Sequence
  Description of Artificial Sequence: Synthetic oligonucleotide
  Antisense strand to SEQ ID NO: 784968
uaauucagggucaacuuga

SEQ ID NO: 784970 - RNA, 19 nt, Artificial Sequence
  Description of Artificial Sequence: Synthetic oligonucleotide
  Sense strand starting at position 46 of SEQ ID NO: 587338
uugacuuucuacuuaggaa

SEQ ID NO: 784971 - RNA, 19 nt, Artificial Sequence
  Description of Artificial Sequence: Synthetic oligonucleotide
  Antisense strand to SEQ ID NO: 784970
uuccuaaguagaaagucaa

SEQ ID NO: 784972 - RNA, 19 nt, Artificial Sequence
  Description of Artificial Sequence: Synthetic oligonucleotide
  Sense strand starting at position 257 of SEQ ID NO: 587338
aucuuaauagugugacaaa

SEQ ID NO: 784973 - RNA, 19 nt, Artificial Sequence
  Description of Artificial Sequence: Synthetic oligonucleotide
  Antisense strand to SEQ ID NO: 784972
uuugucacacuauuaagau

SEQ ID NO: 784974 - RNA, 19 nt, Artificial Sequence
  Description of Artificial Sequence: Synthetic oligonucleotide
  Sense strand starting at position 356 of SEQ ID NO: 587338
gggcuuucugaagauaugu

SEQ ID NO: 784975 - RNA, 19 nt, Artificial Sequence
  Description of Artificial Sequence: Synthetic oligonucleotide
  Antisense strand to SEQ ID NO: 784974
acauaucuucagaaagccc

SEQ ID NO: 784976 - RNA, 19 nt, Artificial Sequence
  Description of Artificial Sequence: Synthetic oligonucleotide
  Sense strand starting at position 361 of SEQ ID NO: 587338
uucugaagauauguauaug

SEQ ID NO: 784977 - RNA, 19 nt, Artificial Sequence
  Description of Artificial Sequence: Synthetic oligonucleotide
  Antisense strand to SEQ ID NO: 784976
cauauacauaucuucagaa

SEQ ID NO: 784978 - RNA, 19 nt, Artificial Sequence
  Description of Artificial Sequence: Synthetic oligonucleotide
  Sense strand starting at position 491 of SEQ ID NO: 587338
aucgcaugucaacauuaau

SEQ ID NO: 784979 - RNA, 19 nt, Artificial Sequence
  Description of Artificial Sequence: Synthetic oligonucleotide
  Antisense strand to SEQ ID NO: 784978
auuaauguugacaugcgau

SEQ ID NO: 784980 - RNA, 19 nt, Artificial Sequence
  Description of Artificial Sequence: Synthetic oligonucleotide
  Sense strand starting at position 494 of SEQ ID NO: 587338
gcaugucaacauuaaugau

SEQ ID NO: 784981 - RNA, 19 nt, Artificial Sequence
  Description of Artificial Sequence: Synthetic oligonucleotide
  Antisense strand to SEQ ID NO: 784980
aucauuaauguugacaugc

SEQ ID NO: 784982 - RNA, 19 nt, Artificial Sequence
  Description of Artificial Sequence: Synthetic oligonucleotide
  Sense strand starting at position 547 of SEQ ID NO: 587338
aguuuagucuuaucagaug

SEQ ID NO: 784983 - RNA, 19 nt, Artificial Sequence
  Description of Artificial Sequence: Synthetic oligonucleotide
  Antisense strand to SEQ ID NO: 784982
caucugauaagacuaaacu

SEQ ID NO: 784984 - RNA, 19 nt, Artificial Sequence
  Description of Artificial Sequence: Synthetic oligonucleotide
  Sense strand starting at position 682 of SEQ ID NO: 587338
agggcacuauucucaaaga

SEQ ID NO: 784985 - RNA, 19 nt, Artificial Sequence
  Description of Artificial Sequence: Synthetic oligonucleotide
  Antisense strand to SEQ ID NO: 784984
ucuuugagaauagugcccu

SEQ ID NO: 784986 - RNA, 19 nt, Artificial Sequence
  Description of Artificial Sequence: Synthetic oligonucleotide
  Sense strand starting at position 809 of SEQ ID NO: 587338
gaguaccuauuugaugaca

SEQ ID NO: 784987 - RNA, 19 nt, Artificial Sequence
  Description of Artificial Sequence: Synthetic oligonucleotide
  Antisense strand to SEQ ID NO: 784986
ugucaucaaauagguacuc

SEQ ID NO: 784988 - RNA, 19 nt, Artificial Sequence
  Description of Artificial Sequence: Synthetic oligonucleotide
  Sense strand starting at position 932 of SEQ ID NO: 587338
cuaugauugguuuaaguca

SEQ ID NO: 784989 - RNA, 19 nt, Artificial Sequence
  Description of Artificial Sequence: Synthetic oligonucleotide
  Antisense strand to SEQ ID NO: 784988
ugacuuaaaccaaucauag

SEQ ID NO: 784990 - RNA, 19 nt, Artificial Sequence
  Description of Artificial Sequence: Synthetic oligonucleotide
  Sense strand starting at position 988 of SEQ ID NO: 587338
gggaaaguuagauguagau

SEQ ID NO: 784991 - RNA, 19 nt, Artificial Sequence
  Description of Artificial Sequence: Synthetic oligonucleotide
  Antisense strand to SEQ ID NO: 784990
aucuacaucuaacuuuccc

SEQ ID NO: 784992 - RNA, 19 nt, Artificial Sequence
  Description of Artificial Sequence: Synthetic oligonucleotide
  Sense strand starting at position 990 of SEQ ID NO: 587338
gaaaguuagauguagaugu

SEQ ID NO: 784993 - RNA, 19 nt, Artificial Sequence
  Description of Artificial Sequence: Synthetic oligonucleotide
  Antisense strand to SEQ ID NO: 784992
acaucuacaucuaacuuuc

SEQ ID NO: 784994 - RNA, 19 nt, Artificial Sequence
  Description of Artificial Sequence: Synthetic oligonucleotide
  Sense strand starting at position 998 of SEQ ID NO: 587338
gauguagauguagauguua

SEQ ID NO: 784995 - RNA, 19 nt, Artificial Sequence
  Description of Artificial Sequence: Synthetic oligonucleotide
  Antisense strand to SEQ ID NO: 784994
uaacaucuacaucuacauc

SEQ ID NO: 784996 - RNA, 19 nt, Artificial Sequence
  Description of Artificial Sequence: Synthetic oligonucleotide
  Sense strand starting at position 1455 of SEQ ID NO: 587338
gcaggaugguauuuguucu

SEQ ID NO: 784997 - RNA, 19 nt, Artificial Sequence
  Description of Artificial Sequence: Synthetic oligonucleotide
  Antisense strand to SEQ ID NO: 784996
agaacaaauaccauccugc

SEQ ID NO: 784998 - RNA, 19 nt, Artificial Sequence
  Description of Artificial Sequence: Synthetic oligonucleotide
  Sense strand starting at position 1525 of SEQ ID NO: 587338
ggcuuuaaacagugauaac

SEQ ID NO: 784999 - RNA, 19 nt, Artificial Sequence
  Description of Artificial Sequence: Synthetic oligonucleotide
  Antisense strand to SEQ ID NO: 784998
guuaucacuguuuaaagcc

SEQ ID NO: 785000 - RNA, 19 nt, Artificial Sequence
  Description of Artificial Sequence: Synthetic oligonucleotide
  Sense strand starting at position 1609 of SEQ ID NO: 587338
ccgaucucgcaggaaagaa

SEQ ID NO: 785001 - RNA, 19 nt, Artificial Sequence
  Description of Artificial Sequence: Synthetic oligonucleotide
  Antisense strand to SEQ ID NO: 785000
uucuuuccugcgagaucgg

SEQ ID NO: 785002 - RNA, 19 nt, Artificial Sequence
  Description of Artificial Sequence: Synthetic oligonucleotide
  Sense strand starting at position 2178 of SEQ ID NO: 587338
ggaggaaaccgauguguca

SEQ ID NO: 785003 - RNA, 19 nt, Artificial Sequence
  Description of Artificial Sequence: Synthetic oligonucleotide
  Antisense strand to SEQ ID NO: 785002
ugacacaucgguuuccucc

SEQ ID NO: 785004 - RNA, 19 nt, Artificial Sequence
  Description of Artificial Sequence: Synthetic oligonucleotide
  Sense strand starting at position 2187 of SEQ ID NO: 587338
cgaugugucaacuagauaa

SEQ ID NO: 785005 - RNA, 19 nt, Artificial Sequence
  Description of Artificial Sequence: Synthetic oligonucleotide
  Antisense strand to SEQ ID NO: 785004
uuaucuaguugacacaucg

SEQ ID NO: 785006 - RNA, 19 nt, Artificial Sequence
  Description of Artificial Sequence: Synthetic oligonucleotide
  Sense strand starting at position 2379 of SEQ ID NO: 587338
uuauuauucgaauaacagc

SEQ ID NO: 785007 - RNA, 19 nt, Artificial Sequence
  Description of Artificial Sequence: Synthetic oligonucleotide
  Antisense strand to SEQ ID NO: 785006
gcuguuauucgaauaauaa

SEQ ID NO: 785008 - RNA, 19 nt, Artificial Sequence
  Description of Artificial Sequence: Synthetic oligonucleotide
  Sense strand starting at position 2746 of SEQ ID NO: 587338
agcugaagugugaggugua

SEQ ID NO: 785009 - RNA, 19 nt, Artificial Sequence
  Description of Artificial Sequence: Synthetic oligonucleotide
  Antisense strand to SEQ ID NO: 785008
uacaccucacacuucagcu

SEQ ID NO: 785010 - RNA, 19 nt, Artificial Sequence
  Description of Artificial Sequence: Synthetic oligonucleotide
  Sense strand starting at position 2756 of SEQ ID NO: 587338
ugagguguaucacuauaga

SEQ ID NO: 785011 - RNA, 19 nt, Artificial Sequence
  Description of Artificial Sequence: Synthetic oligonucleotide
  Antisense strand to SEQ ID NO: 785010
ucuauagugauacaccuca

SEQ ID NO: 785012 - RNA, 19 nt, Artificial Sequence
  Description of Artificial Sequence: Synthetic oligonucleotide
  Sense strand starting at position 2759 of SEQ ID NO: 587338
gguguaucacuauagaggu

SEQ ID NO: 785013 - RNA, 19 nt, Artificial Sequence
  Description of Artificial Sequence: Synthetic oligonucleotide
  Antisense strand to SEQ ID NO: 785012
accucuauagugauacacc

SEQ ID NO: 785014 - RNA, 19 nt, Artificial Sequence
  Description of Artificial Sequence: Synthetic oligonucleotide
  Sense strand starting at position 2992 of SEQ ID NO: 587338
guggaauaaucacuuggac

SEQ ID NO: 785015 - RNA, 19 nt, Artificial Sequence
  Description of Artificial Sequence: Synthetic oligonucleotide
  Antisense strand to SEQ ID NO: 785014
guccaagugauuauuccac

SEQ ID NO: 785016 - RNA, 19 nt, Artificial Sequence
  Description of Artificial Sequence: Synthetic oligonucleotide
  Sense strand starting at position 3086 of SEQ ID NO: 587338
gcuuauaauuuggcuucca

SEQ ID NO: 785017 - RNA, 19 nt, Artificial Sequence
  Description of Artificial Sequence: Synthetic oligonucleotide
  Antisense strand to SEQ ID NO: 785016
uggaagccaaauuauaagc

SEQ ID NO: 785018 - RNA, 19 nt, Artificial Sequence
  Description of Artificial Sequence: Synthetic oligonucleotide
  Sense strand starting at position 3191 of SEQ ID NO: 587338
uggcauggucuuuauggau

SEQ ID NO: 785019 - RNA, 19 nt, Artificial Sequence
  Description of Artificial Sequence: Synthetic oligonucleotide
  Antisense strand to SEQ ID NO: 785018
auccauaaagaccaugcca

SEQ ID NO: 785020 - RNA, 19 nt, Artificial Sequence
  Description of Artificial Sequence: Synthetic oligonucleotide
  Sense strand starting at position 3197 of SEQ ID NO: 587338
ggucuuuauggauauccuu

SEQ ID NO: 785021 - RNA, 19 nt, Artificial Sequence
  Description of Artificial Sequence: Synthetic oligonucleotide
  Antisense strand to SEQ ID NO: 785020
aaggauauccauaaagacc

SEQ ID NO: 785022 - RNA, 19 nt, Artificial Sequence
  Description of Artificial Sequence: Synthetic oligonucleotide
  Sense strand starting at position 3429 of SEQ ID NO: 587338
ugguacuagcaauaccaaa

SEQ ID NO: 785023 - RNA, 19 nt, Artificial Sequence
  Description of Artificial Sequence: Synthetic oligonucleotide
  Antisense strand to SEQ ID NO: 785022
uuugguauugcuaguacca

SEQ ID NO: 785024 - RNA, 19 nt, Artificial Sequence
  Description of Artificial Sequence: Synthetic oligonucleotide
  Sense strand starting at position 3494 of SEQ ID NO: 587338
cagugaagguacuuauuaa

SEQ ID NO: 785025 - RNA, 19 nt, Artificial Sequence
  Description of Artificial Sequence: Synthetic oligonucleotide
  Antisense strand to SEQ ID NO: 785024
uuaauaaguaccuucacug

SEQ ID NO: 785026 - RNA, 19 nt, Artificial Sequence
  Description of Artificial Sequence: Synthetic oligonucleotide
  Sense strand starting at position 3562 of SEQ ID NO: 587338
gcaucauauuccuccagag

SEQ ID NO: 785027 - RNA, 19 nt, Artificial Sequence
  Description of Artificial Sequence: Synthetic oligonucleotide
  Antisense strand to SEQ ID NO: 785026
cucuggaggaauaugaugc

SEQ ID NO: 785028 - RNA, 19 nt, Artificial Sequence
  Description of Artificial Sequence: Synthetic oligonucleotide
  Sense strand starting at position 3648 of SEQ ID NO: 587338
cuugguaaucaggguggaa

SEQ ID NO: 785029 - RNA, 19 nt, Artificial Sequence
  Description of Artificial Sequence: Synthetic oligonucleotide
  Antisense strand to SEQ ID NO: 785028
uuccacccugauuaccaag

SEQ ID NO: 785030 - RNA, 19 nt, Artificial Sequence
  Description of Artificial Sequence: Synthetic oligonucleotide
  Sense strand starting at position 3693 of SEQ ID NO: 587338
ggaggugaccugcagguau

SEQ ID NO: 785031 - RNA, 19 nt, Artificial Sequence
  Description of Artificial Sequence: Synthetic oligonucleotide
  Antisense strand to SEQ ID NO: 785030
auaccugcaggucaccucc

SEQ ID NO: 785032 - RNA, 19 nt, Artificial Sequence
  Description of Artificial Sequence: Synthetic oligonucleotide
  Sense strand starting at position 3697 of SEQ ID NO: 587338
gugaccugcagguauacua

SEQ ID NO: 785033 - RNA, 19 nt, Artificial Sequence
  Description of Artificial Sequence: Synthetic oligonucleotide
  Antisense strand to SEQ ID NO: 785032
uaguauaccugcaggucac

SEQ ID NO: 785034 - RNA, 19 nt, Artificial Sequence
  Description of Artificial Sequence: Synthetic oligonucleotide
  Sense strand starting at position 3719 of SEQ ID NO: 587338
gcuaaugagaaguggguau

SEQ ID NO: 785035 - RNA, 19 nt, Artificial Sequence
  Description of Artificial Sequence: Synthetic oligonucleotide
  Antisense strand to SEQ ID NO: 785034
auacccacuucucauuagc

SEQ ID NO: 785036 - RNA, 19 nt, Artificial Sequence
  Description of Artificial Sequence: Synthetic oligonucleotide
  Sense strand starting at position 3723 of SEQ ID NO: 587338
augagaaguggguauguuc

SEQ ID NO: 785037 - RNA, 19 nt, Artificial Sequence
  Description of Artificial Sequence: Synthetic oligonucleotide
  Antisense strand to SEQ ID NO: 785036
gaacauacccacuucucau

SEQ ID NO: 785038 - RNA, 19 nt, Artificial Sequence
  Description of Artificial Sequence: Synthetic oligonucleotide
  Sense strand starting at position 3794 of SEQ ID NO: 587338
ccauaauguguccauacac

SEQ ID NO: 785039 - RNA, 19 nt, Artificial Sequence
  Description of Artificial Sequence: Synthetic oligonucleotide
  Antisense strand to SEQ ID NO: 785038
guguauggacacauuaugg

SEQ ID NO: 785040 - RNA, 19 nt, Artificial Sequence
  Description of Artificial Sequence: Synthetic oligonucleotide
  Sense strand starting at position 3849 of SEQ ID NO: 587338
acaacaaugcuauggauau

SEQ ID NO: 785041 - RNA, 19 nt, Artificial Sequence
  Description of Artificial Sequence: Synthetic oligonucleotide
  Antisense strand to SEQ ID NO: 785040
auauccauagcauuguugu

SEQ ID NO: 785042 - RNA, 19 nt, Artificial Sequence
  Description of Artificial Sequence: Synthetic oligonucleotide
  Sense strand starting at position 3859 of SEQ ID NO: 587338
uauggauaugugcauuaau

SEQ ID NO: 785043 - RNA, 19 nt, Artificial Sequence
  Description of Artificial Sequence: Synthetic oligonucleotide
  Antisense strand to SEQ ID NO: 785042
auuaaugcacauauccaua

SEQ ID NO: 785044 - RNA, 19 nt, Artificial Sequence
  Description of Artificial Sequence: Synthetic oligonucleotide
  Sense strand starting at position 3862 of SEQ ID NO: 587338
ggauaugugcauuaauauu

SEQ ID NO: 785045 - RNA, 19 nt, Artificial Sequence
  Description of Artificial Sequence: Synthetic oligonucleotide
  Antisense strand to SEQ ID NO: 785044
aauauuaaugcacauaucc

SEQ ID NO: 785046 - RNA, 19 nt, Artificial Sequence
  Description of Artificial Sequence: Synthetic oligonucleotide
  Sense strand starting at position 3942 of SEQ ID NO: 587338
uggugaagucaggaucuuu

SEQ ID NO: 785047 - RNA, 19 nt, Artificial Sequence
  Description of Artificial Sequence: Synthetic oligonucleotide
  Antisense strand to SEQ ID NO: 785046
aaagauccugacuucacca

SEQ ID NO: 785048 - RNA, 19 nt, Artificial Sequence
  Description of Artificial Sequence: Synthetic oligonucleotide
  Sense strand starting at position 77 of SEQ ID NO: 587339
aguaaucuaagaggugauu

SEQ ID NO: 785049 - RNA, 19 nt, Artificial Sequence
  Description of Artificial Sequence: Synthetic oligonucleotide
  Antisense strand to SEQ ID NO: 785048
aaucaccucuuagauuacu

SEQ ID NO: 785050 - RNA, 19 nt, Artificial Sequence
  Description of Artificial Sequence: Synthetic oligonucleotide
  Sense strand starting at position 104 of SEQ ID NO: 587339
ucaugugucaccgaaugac

SEQ ID NO: 785051 - RNA, 19 nt, Artificial Sequence
  Description of Artificial Sequence: Synthetic oligonucleotide
  Antisense strand to SEQ ID NO: 785050
gucauucggugacacauga

SEQ ID NO: 785052 - RNA, 19 nt, Artificial Sequence
  Description of Artificial Sequence: Synthetic oligonucleotide
  Sense strand starting at position 118 of SEQ ID NO: 587339
augacugugauaggucuga

SEQ ID NO: 785053 - RNA, 19 nt, Artificial Sequence
  Description of Artificial Sequence: Synthetic oligonucleotide
  Antisense strand to SEQ ID NO: 785052
ucagaccuaucacagucau

SEQ ID NO: 785054 - RNA, 19 nt, Artificial Sequence
  Description of Artificial Sequence: Synthetic oligonucleotide
  Sense strand starting at position 122 of SEQ ID NO: 587339
cugugauaggucugagaga

SEQ ID NO: 785055 - RNA, 19 nt, Artificial Sequence
  Description of Artificial Sequence: Synthetic oligonucleotide
  Antisense strand to SEQ ID NO: 785054
ucucucagaccuaucacag

SEQ ID NO: 785056 - RNA, 19 nt, Artificial Sequence
  Description of Artificial Sequence: Synthetic oligonucleotide
  Sense strand starting at position 136 of SEQ ID NO: 587339
agagaucuaucauuaggca

SEQ ID NO: 785057 - RNA, 19 nt, Artificial Sequence
  Description of Artificial Sequence: Synthetic oligonucleotide
  Antisense strand to SEQ ID NO: 785056
ugccuaaugauagaucucu

SEQ ID NO: 785058 - RNA, 19 nt, Artificial Sequence
  Description of Artificial Sequence: Synthetic oligonucleotide
  Sense strand starting at position 372 of SEQ ID NO: 587339
uggucccuuguugaugaaa

SEQ ID NO: 785059 - RNA, 19 nt, Artificial Sequence
  Description of Artificial Sequence: Synthetic oligonucleotide
  Antisense strand to SEQ ID NO: 785058
uuucaucaacaagggacca

SEQ ID NO: 785060 - RNA, 19 nt, Artificial Sequence
  Description of Artificial Sequence: Synthetic oligonucleotide
  Sense strand starting at position 420 of SEQ ID NO: 587339
agacgauguguguagguua

SEQ ID NO: 785061 - RNA, 19 nt, Artificial Sequence
  Description of Artificial Sequence: Synthetic oligonucleotide
  Antisense strand to SEQ ID NO: 785060
uaaccuacacacaucgucu

SEQ ID NO: 785062 - RNA, 19 nt, Artificial Sequence
  Description of Artificial Sequence: Synthetic oligonucleotide
  Sense strand starting at position 559 of SEQ ID NO: 587339
cauagaagcucauugggau

SEQ ID NO: 785063 - RNA, 19 nt, Artificial Sequence
  Description of Artificial Sequence: Synthetic oligonucleotide
  Antisense strand to SEQ ID NO: 785062
aucccaaugagcuucuaug

SEQ ID NO: 785064 - RNA, 19 nt, Artificial Sequence
  Description of Artificial Sequence: Synthetic oligonucleotide
  Sense strand starting at position 560 of SEQ ID NO: 587339
auagaagcucauugggaua

SEQ ID NO: 785065 - RNA, 19 nt, Artificial Sequence
  Description of Artificial Sequence: Synthetic oligonucleotide
  Antisense strand to SEQ ID NO: 785064
uaucccaaugagcuucuau

SEQ ID NO: 785066 - RNA, 19 nt, Artificial Sequence
  Description of Artificial Sequence: Synthetic oligonucleotide
  Sense strand starting at position 703 of SEQ ID NO: 587339
gcaggaauuggauaugugu

SEQ ID NO: 785067 - RNA, 19 nt, Artificial Sequence
  Description of Artificial Sequence: Synthetic oligonucleotide
  Antisense strand to SEQ ID NO: 785066
acacauauccaauuccugc

SEQ ID NO: 785068 - RNA, 19 nt, Artificial Sequence
  Description of Artificial Sequence: Synthetic oligonucleotide
  Sense strand starting at position 705 of SEQ ID NO: 587339
aggaauuggauauguguaa

SEQ ID NO: 785069 - RNA, 19 nt, Artificial Sequence
  Description of Artificial Sequence: Synthetic oligonucleotide
  Antisense strand to SEQ ID NO: 785068
uuacacauauccaauuccu

SEQ ID NO: 785070 - RNA, 19 nt, Artificial Sequence
  Description of Artificial Sequence: Synthetic oligonucleotide
  Sense strand starting at position 955 of SEQ ID NO: 587339
gcaucagguaagugguaaa

SEQ ID NO: 785071 - RNA, 19 nt, Artificial Sequence
  Description of Artificial Sequence: Synthetic oligonucleotide
  Antisense strand to SEQ ID NO: 785070
uuuaccacuuaccugaugc

SEQ ID NO: 785072 - RNA, 19 nt, Artificial Sequence
  Description of Artificial Sequence: Synthetic oligonucleotide
  Sense strand starting at position 982 of SEQ ID NO: 587339
cgacauacugcccaaaucu

SEQ ID NO: 785073 - RNA, 19 nt, Artificial Sequence
  Description of Artificial Sequence: Synthetic oligonucleotide
  Antisense strand to SEQ ID NO: 785072
agauuugggcaguaugucg

SEQ ID NO: 785074 - RNA, 19 nt, Artificial Sequence
  Description of Artificial Sequence: Synthetic oligonucleotide
  Sense strand starting at position 1399 of SEQ ID NO: 587339
aagagagguugucugcaga

SEQ ID NO: 785075 - RNA, 19 nt, Artificial Sequence
  Description of Artificial Sequence: Synthetic oligonucleotide
  Antisense strand to SEQ ID NO: 785074
ucugcagacaaccucucuu

SEQ ID NO: 785076 - RNA, 19 nt, Artificial Sequence
  Description of Artificial Sequence: Synthetic oligonucleotide
  Sense strand starting at position 1402 of SEQ ID NO: 587339
agagguugucugcagaggu

SEQ ID NO: 785077 - RNA, 19 nt, Artificial Sequence
  Description of Artificial Sequence: Synthetic oligonucleotide
  Antisense strand to SEQ ID NO: 785076
accucugcagacaaccucu

SEQ ID NO: 785078 - RNA, 19 nt, Artificial Sequence
  Description of Artificial Sequence: Synthetic oligonucleotide
  Sense strand starting at position 1405 of SEQ ID NO: 587339
gguugucugcagaggugua

SEQ ID NO: 785079 - RNA, 19 nt, Artificial Sequence
  Description of Artificial Sequence: Synthetic oligonucleotide
  Antisense strand to SEQ ID NO: 785078
uacaccucugcagacaacc

SEQ ID NO: 785080 - RNA, 19 nt, Artificial Sequence
  Description of Artificial Sequence: Synthetic oligonucleotide
  Sense strand starting at position 1533 of SEQ ID NO: 587339
guugugaaggucguguuua

SEQ ID NO: 785081 - RNA, 19 nt, Artificial Sequence
  Description of Artificial Sequence: Synthetic oligonucleotide
  Antisense strand to SEQ ID NO: 785080
uaaacacgaccuucacaac

SEQ ID NO: 785082 - RNA, 19 nt, Artificial Sequence
  Description of Artificial Sequence: Synthetic oligonucleotide
  Sense strand starting at position 1544 of SEQ ID NO: 587339
cguguuuauuuaccaggau

SEQ ID NO: 785083 - RNA, 19 nt, Artificial Sequence
  Description of Artificial Sequence: Synthetic oligonucleotide
  Antisense strand to SEQ ID NO: 785082
auccugguaaauaaacacg

SEQ ID NO: 785084 - RNA, 19 nt, Artificial Sequence
  Description of Artificial Sequence: Synthetic oligonucleotide
  Sense strand starting at position 1584 of SEQ ID NO: 587339
uagagagcuugacuuagaa

SEQ ID NO: 785085 - RNA, 19 nt, Artificial Sequence
  Description of Artificial Sequence: Synthetic oligonucleotide
  Antisense strand to SEQ ID NO: 785084
uucuaagucaagcucucua

SEQ ID NO: 785086 - RNA, 19 nt, Artificial Sequence
  Description of Artificial Sequence: Synthetic oligonucleotide
  Sense strand starting at position 1737 of SEQ ID NO: 587339
uaaucagaguguuugcuaa

SEQ ID NO: 785087 - RNA, 19 nt, Artificial Sequence
  Description of Artificial Sequence: Synthetic oligonucleotide
  Antisense strand to SEQ ID NO: 785086
uuagcaaacacucugauua

SEQ ID NO: 785088 - RNA, 19 nt, Artificial Sequence
  Description of Artificial Sequence: Synthetic oligonucleotide
  Sense strand starting at position 1953 of SEQ ID NO: 587339
ccggucuuugcugucagua

SEQ ID NO: 785089 - RNA, 19 nt, Artificial Sequence
  Description of Artificial Sequence: Synthetic oligonucleotide
  Antisense strand to SEQ ID NO: 785088
uacugacagcaaagaccgg

SEQ ID NO: 785090 - RNA, 19 nt, Artificial Sequence
  Description of Artificial Sequence: Synthetic oligonucleotide
  Sense strand starting at position 1954 of SEQ ID NO: 587339
cggucuuugcugucaguac

SEQ ID NO: 785091 - RNA, 19 nt, Artificial Sequence
  Description of Artificial Sequence: Synthetic oligonucleotide
  Antisense strand to SEQ ID NO: 785090
guacugacagcaaagaccg

SEQ ID NO: 785092 - RNA, 19 nt, Artificial Sequence
  Description of Artificial Sequence: Synthetic oligonucleotide
  Sense strand starting at position 2030 of SEQ ID NO: 587339
gagcccaaagauuguguaa

SEQ ID NO: 785093 - RNA, 19 nt, Artificial Sequence
  Description of Artificial Sequence: Synthetic oligonucleotide
  Antisense strand to SEQ ID NO: 785092
uuacacaaucuuugggcuc

SEQ ID NO: 785094 - RNA, 19 nt, Artificial Sequence
  Description of Artificial Sequence: Synthetic oligonucleotide
  Sense strand starting at position 2372 of SEQ ID NO: 587339
cgcugcaguccuucguaaa

SEQ ID NO: 785095 - RNA, 19 nt, Artificial Sequence
  Description of Artificial Sequence: Synthetic oligonucleotide
  Antisense strand to SEQ ID NO: 785094
uuuacgaaggacugcagcg

SEQ ID NO: 785096 - RNA, 19 nt, Artificial Sequence
  Description of Artificial Sequence: Synthetic oligonucleotide
  Sense strand starting at position 2454 of SEQ ID NO: 587339
gugauuugccauugccaga

SEQ ID NO: 785097 - RNA, 19 nt, Artificial Sequence
  Description of Artificial Sequence: Synthetic oligonucleotide
  Antisense strand to SEQ ID NO: 785096
ucuggcaauggcaaaucac

SEQ ID NO: 785098 - RNA, 19 nt, Artificial Sequence
  Description of Artificial Sequence: Synthetic oligonucleotide
  Sense strand starting at position 2503 of SEQ ID NO: 587339
gugcgaucacaggacauaa

SEQ ID NO: 785099 - RNA, 19 nt, Artificial Sequence
  Description of Artificial Sequence: Synthetic oligonucleotide
  Antisense strand to SEQ ID NO: 785098
uuauguccugugaucgcac

SEQ ID NO: 785100 - RNA, 19 nt, Artificial Sequence
  Description of Artificial Sequence: Synthetic oligonucleotide
  Sense strand starting at position 2571 of SEQ ID NO: 587339
caaucugugcuacagaguu

SEQ ID NO: 785101 - RNA, 19 nt, Artificial Sequence
  Description of Artificial Sequence: Synthetic oligonucleotide
  Antisense strand to SEQ ID NO: 785100
aacucuguagcacagauug

SEQ ID NO: 785102 - RNA, 19 nt, Artificial Sequence
  Description of Artificial Sequence: Synthetic oligonucleotide
  Sense strand starting at position 2640 of SEQ ID NO: 587339
cggcaucaccuuuacucua

SEQ ID NO: 785103 - RNA, 19 nt, Artificial Sequence
  Description of Artificial Sequence: Synthetic oligonucleotide
  Antisense strand to SEQ ID NO: 785102
uagaguaaaggugaugccg

SEQ ID NO: 785104 - RNA, 19 nt, Artificial Sequence
  Description of Artificial Sequence: Synthetic oligonucleotide
  Sense strand starting at position 2667 of SEQ ID NO: 587339
aaccacgaucacugugauu

SEQ ID NO: 785105 - RNA, 19 nt, Artificial Sequence
  Description of Artificial Sequence: Synthetic oligonucleotide
  Antisense strand to SEQ ID NO: 785104
aaucacagugaucgugguu

SEQ ID NO: 785106 - RNA, 19 nt, Artificial Sequence
  Description of Artificial Sequence: Synthetic oligonucleotide
  Sense strand starting at position 2669 of SEQ ID NO: 587339
ccacgaucacugugauuag

SEQ ID NO: 785107 - RNA, 19 nt, Artificial Sequence
  Description of Artificial Sequence: Synthetic oligonucleotide
  Antisense strand to SEQ ID NO: 785106
cuaaucacagugaucgugg

SEQ ID NO: 785108 - RNA, 19 nt, Artificial Sequence
  Description of Artificial Sequence: Synthetic oligonucleotide
  Sense strand starting at position 2672 of SEQ ID NO: 587339
cgaucacugugauuaggaa

SEQ ID NO: 785109 - RNA, 19 nt, Artificial Sequence
  Description of Artificial Sequence: Synthetic oligonucleotide
  Antisense strand to SEQ ID NO: 785108
uuccuaaucacagugaucg

SEQ ID NO: 785110 - RNA, 19 nt, Artificial Sequence
  Description of Artificial Sequence: Synthetic oligonucleotide
  Sense strand starting at position 2737 of SEQ ID NO: 587339
gccaguugucauggcauuu

SEQ ID NO: 785111 - RNA, 19 nt, Artificial Sequence
  Description of Artificial Sequence: Synthetic oligonucleotide
  Antisense strand to SEQ ID NO: 785110
aaaugccaugacaacuggc

SEQ ID NO: 785112 - RNA, 19 nt, Artificial Sequence
  Description of Artificial Sequence: Synthetic oligonucleotide
  Sense strand starting at position 2852 of SEQ ID NO: 587339
uuacuaagaguuugguaag

SEQ ID NO: 785113 - RNA, 19 nt, Artificial Sequence
  Description of Artificial Sequence: Synthetic oligonucleotide
  Antisense strand to SEQ ID NO: 785112
cuuaccaaacucuuaguaa

SEQ ID NO: 785114 - RNA, 19 nt, Artificial Sequence
  Description of Artificial Sequence: Synthetic oligonucleotide
  Sense strand starting at position 3058 of SEQ ID NO: 587339
gaccauauaccuggaaagu

SEQ ID NO: 785115 - RNA, 19 nt, Artificial Sequence
  Description of Artificial Sequence: Synthetic oligonucleotide
  Antisense strand to SEQ ID NO: 785114
acuuuccagguauaugguc

SEQ ID NO: 785116 - RNA, 19 nt, Artificial Sequence
  Description of Artificial Sequence: Synthetic oligonucleotide
  Sense strand starting at position 3489 of SEQ ID NO: 587339
aggagaaucguaugagccu

SEQ ID NO: 785117 - RNA, 19 nt, Artificial Sequence
  Description of Artificial Sequence: Synthetic oligonucleotide
  Antisense strand to SEQ ID NO: 785116
aggcucauacgauucuccu

SEQ ID NO: 785118 - RNA, 19 nt, Artificial Sequence
  Description of Artificial Sequence: Synthetic oligonucleotide
  Sense strand starting at position 3636 of SEQ ID NO: 587339
caggcagaucaaugcaaga

SEQ ID NO: 785119 - RNA, 19 nt, Artificial Sequence
  Description of Artificial Sequence: Synthetic oligonucleotide
  Antisense strand to SEQ ID NO: 785118
ucuugcauugaucugccug

SEQ ID NO: 785120 - RNA, 19 nt, Artificial Sequence
  Description of Artificial Sequence: Synthetic oligonucleotide
  Sense strand starting at position 3758 of SEQ ID NO: 587339
gaagcaacggguuaagauu

SEQ ID NO: 785121 - RNA, 19 nt, Artificial Sequence
  Description of Artificial Sequence: Synthetic oligonucleotide
  Antisense strand to SEQ ID NO: 785120
aaucuuaacccguugcuuc

SEQ ID NO: 785122 - RNA, 19 nt, Artificial Sequence
  Description of Artificial Sequence: Synthetic oligonucleotide
  Sense strand starting at position 3881 of SEQ ID NO: 587339
acuaucuugcagugggaua

SEQ ID NO: 785123 - RNA, 19 nt, Artificial Sequence
  Description of Artificial Sequence: Synthetic oligonucleotide
  Antisense strand to SEQ ID NO: 785122
uaucccacugcaagauagu

SEQ ID NO: 785124 - RNA, 19 nt, Artificial Sequence
  Description of Artificial Sequence: Synthetic oligonucleotide
  Sense strand starting at position 3886 of SEQ ID NO: 587339
cuugcagugggauaggaau

SEQ ID NO: 785125 - RNA, 19 nt, Artificial Sequence
  Description of Artificial Sequence: Synthetic oligonucleotide
  Antisense strand to SEQ ID NO: 785124
auuccuaucccacugcaag

SEQ ID NO: 785126 - RNA, 19 nt, Artificial Sequence
  Description of Artificial Sequence: Synthetic oligonucleotide
  Sense strand starting at position 3893 of SEQ ID NO: 587339
ugggauaggaauugucuca

SEQ ID NO: 785127 - RNA, 19 nt, Artificial Sequence
  Description of Artificial Sequence: Synthetic oligonucleotide
  Antisense strand to SEQ ID NO: 785126
ugagacaauuccuauccca

SEQ ID NO: 785128 - RNA, 19 nt, Artificial Sequence
  Description of Artificial Sequence: Synthetic oligonucleotide
  Sense strand starting at position 80 of SEQ ID NO: 587340
gggcgcauucccgcagaca

SEQ ID NO: 785129 - RNA, 19 nt, Artificial Sequence
  Description of Artificial Sequence: Synthetic oligonucleotide
  Antisense strand to SEQ ID NO: 785128
ugucugcgggaaugcgccc

SEQ ID NO: 785130 - RNA, 19 nt, Artificial Sequence
  Description of Artificial Sequence: Synthetic oligonucleotide
  Sense strand starting at position 462 of SEQ ID NO: 587340
acagauacucccgggaaca

SEQ ID NO: 785131 - RNA, 19 nt, Artificial Sequence
  Description of Artificial Sequence: Synthetic oligonucleotide
  Antisense strand to SEQ ID NO: 785130
uguucccgggaguaucugu

SEQ ID NO: 785132 - RNA, 19 nt, Artificial Sequence
  Description of Artificial Sequence: Synthetic oligonucleotide
  Sense strand starting at position 463 of SEQ ID NO: 587340
cagauacucccgggaacau

SEQ ID NO: 785133 - RNA, 19 nt, Artificial Sequence
  Description of Artificial Sequence: Synthetic oligonucleotide
  Antisense strand to SEQ ID NO: 785132
auguucccgggaguaucug

SEQ ID NO: 785134 - RNA, 19 nt, Artificial Sequence
  Description of Artificial Sequence: Synthetic oligonucleotide
  Sense strand starting at position 473 of SEQ ID NO: 587340
cgggaacaucuauggaagu

SEQ ID NO: 785135 - RNA, 19 nt, Artificial Sequence
  Description of Artificial Sequence: Synthetic oligonucleotide
  Antisense strand to SEQ ID NO: 785134
acuuccauagauguucccg

SEQ ID NO: 785136 - RNA, 19 nt, Artificial Sequence
  Description of Artificial Sequence: Synthetic oligonucleotide
  Sense strand starting at position 483 of SEQ ID NO: 587340
uauggaagugcugacugau

SEQ ID NO: 785137 - RNA, 19 nt, Artificial Sequence
  Description of Artificial Sequence: Synthetic oligonucleotide
  Antisense strand to SEQ ID NO: 785136
aucagucagcacuuccaua

SEQ ID NO: 785138 - RNA, 19 nt, Artificial Sequence
  Description of Artificial Sequence: Synthetic oligonucleotide
  Sense strand starting at position 486 of SEQ ID NO: 587340
ggaagugcugacugauaaa

SEQ ID NO: 785139 - RNA, 19 nt, Artificial Sequence
  Description of Artificial Sequence: Synthetic oligonucleotide
  Antisense strand to SEQ ID NO: 785138
uuuaucagucagcacuucc

SEQ ID NO: 785140 - RNA, 19 nt, Artificial Sequence
  Description of Artificial Sequence: Synthetic oligonucleotide
  Sense strand starting at position 627 of SEQ ID NO: 587340
auguucuuucccggagaau

SEQ ID NO: 785141 - RNA, 19 nt, Artificial Sequence
  Description of Artificial Sequence: Synthetic oligonucleotide
  Antisense strand to SEQ ID NO: 785140
auucuccgggaaagaacau

SEQ ID NO: 785142 - RNA, 19 nt, Artificial Sequence
  Description of Artificial Sequence: Synthetic oligonucleotide
  Sense strand starting at position 628 of SEQ ID NO: 587340
uguucuuucccggagaaua

SEQ ID NO: 785143 - RNA, 19 nt, Artificial Sequence
  Description of Artificial Sequence: Synthetic oligonucleotide
  Antisense strand to SEQ ID NO: 785142
uauucuccgggaaagaaca

SEQ ID NO: 785144 - RNA, 19 nt, Artificial Sequence
  Description of Artificial Sequence: Synthetic oligonucleotide
  Sense strand starting at position 821 of SEQ ID NO: 587340
cagugaauguaucugacuu

SEQ ID NO: 785145 - RNA, 19 nt, Artificial Sequence
  Description of Artificial Sequence: Synthetic oligonucleotide
  Antisense strand to SEQ ID NO: 785144
aagucagauacauucacug

SEQ ID NO: 785146 - RNA, 19 nt, Artificial Sequence
  Description of Artificial Sequence: Synthetic oligonucleotide
  Sense strand starting at position 822 of SEQ ID NO: 587340
agugaauguaucugacuug

SEQ ID NO: 785147 - RNA, 19 nt, Artificial Sequence
  Description of Artificial Sequence: Synthetic oligonucleotide
  Antisense strand to SEQ ID NO: 785146
caagucagauacauucacu

SEQ ID NO: 785148 - RNA, 19 nt, Artificial Sequence
  Description of Artificial Sequence: Synthetic oligonucleotide
  Sense strand starting at position 825 of SEQ ID NO: 587340
gaauguaucugacuuggaa

SEQ ID NO: 785149 - RNA, 19 nt, Artificial Sequence
  Description of Artificial Sequence: Synthetic oligonucleotide
  Antisense strand to SEQ ID NO: 785148
uuccaagucagauacauuc

SEQ ID NO: 785150 - RNA, 19 nt, Artificial Sequence
  Description of Artificial Sequence: Synthetic oligonucleotide
  Sense strand starting at position 1065 of SEQ ID NO: 587340
cguagagagcccgaacuuu

SEQ ID NO: 785151 - RNA, 19 nt, Artificial Sequence
  Description of Artificial Sequence: Synthetic oligonucleotide
  Antisense strand to SEQ ID NO: 785150
aaaguucgggcucucuacg

SEQ ID NO: 785152 - RNA, 19 nt, Artificial Sequence
  Description of Artificial Sequence: Synthetic oligonucleotide
  Sense strand starting at position 1604 of SEQ ID NO: 587340
cagucaugucugcagauac

SEQ ID NO: 785153 - RNA, 19 nt, Artificial Sequence
  Description of Artificial Sequence: Synthetic oligonucleotide
  Antisense strand to SEQ ID NO: 785152
guaucugcagacaugacug

SEQ ID NO: 785154 - RNA, 19 nt, Artificial Sequence
  Description of Artificial Sequence: Synthetic oligonucleotide
  Sense strand starting at position 2391 of SEQ ID NO: 587340
cuuccuugcugaccagaga

SEQ ID NO: 785155 - RNA, 19 nt, Artificial Sequence
  Description of Artificial Sequence: Synthetic oligonucleotide
  Antisense strand to SEQ ID NO: 785154
ucucuggucagcaaggaag

SEQ ID NO: 785156 - RNA, 19 nt, Artificial Sequence
  Description of Artificial Sequence: Synthetic oligonucleotide
  Sense strand starting at position 2431 of SEQ ID NO: 587340
aucagaaaugcagguggaa

SEQ ID NO: 785157 - RNA, 19 nt, Artificial Sequence
  Description of Artificial Sequence: Synthetic oligonucleotide
  Antisense strand to SEQ ID NO: 785156
uuccaccugcauuucugau

SEQ ID NO: 785158 - RNA, 19 nt, Artificial Sequence
  Description of Artificial Sequence: Synthetic oligonucleotide
  Sense strand starting at position 2576 of SEQ ID NO: 587340
cugacuuuggauuguguua

SEQ ID NO: 785159 - RNA, 19 nt, Artificial Sequence
  Description of Artificial Sequence: Synthetic oligonucleotide
  Antisense strand to SEQ ID NO: 785158
uaacacaauccaaagucag

SEQ ID NO: 785160 - RNA, 19 nt, Artificial Sequence
  Description of Artificial Sequence: Synthetic oligonucleotide
  Sense strand starting at position 2655 of SEQ ID NO: 587340
uuaauauuauggucugguu

SEQ ID NO: 785161 - RNA, 19 nt, Artificial Sequence
  Description of Artificial Sequence: Synthetic oligonucleotide
  Antisense strand to SEQ ID NO: 785160
aaccagaccauaauauuaa

SEQ ID NO: 785162 - RNA, 19 nt, Artificial Sequence
  Description of Artificial Sequence: Synthetic oligonucleotide
  Sense strand starting at position 2755 of SEQ ID NO: 587340
gagacagguucucccugau

SEQ ID NO: 785163 - RNA, 19 nt, Artificial Sequence
  Description of Artificial Sequence: Synthetic oligonucleotide
  Antisense strand to SEQ ID NO: 785162
aucagggagaaccugucuc

SEQ ID NO: 785164 - RNA, 19 nt, Artificial Sequence
  Description of Artificial Sequence: Synthetic oligonucleotide
  Sense strand starting at position 2758 of SEQ ID NO: 587340
acagguucucccugauucu

SEQ ID NO: 785165 - RNA, 19 nt, Artificial Sequence
  Description of Artificial Sequence: Synthetic oligonucleotide
  Antisense strand to SEQ ID NO: 785164
agaaucagggagaaccugu

SEQ ID NO: 785166 - RNA, 19 nt, Artificial Sequence
  Description of Artificial Sequence: Synthetic oligonucleotide
  Sense strand starting at position 2800 of SEQ ID NO: 587340
agagaacagugcuuuagaa

SEQ ID NO: 785167 - RNA, 19 nt, Artificial Sequence
  Description of Artificial Sequence: Synthetic oligonucleotide
  Antisense strand to SEQ ID NO: 785166
uucuaaagcacuguucucu

SEQ ID NO: 785168 - RNA, 19 nt, Artificial Sequence
  Description of Artificial Sequence: Synthetic oligonucleotide
  Sense strand starting at position 2807 of SEQ ID NO: 587340
agugcuuuagaauagcagu

SEQ ID NO: 785169 - RNA, 19 nt, Artificial Sequence
  Description of Artificial Sequence: Synthetic oligonucleotide
  Antisense strand to SEQ ID NO: 785168
acugcuauucuaaagcacu

SEQ ID NO: 785170 - RNA, 19 nt, Artificial Sequence
  Description of Artificial Sequence: Synthetic oligonucleotide
  Sense strand starting at position 2813 of SEQ ID NO: 587340
uuagaauagcaguacuuga

SEQ ID NO: 785171 - RNA, 19 nt, Artificial Sequence
  Description of Artificial Sequence: Synthetic oligonucleotide
  Antisense strand to SEQ ID NO: 785170
ucaaguacugcuauucuaa

SEQ ID NO: 785172 - RNA, 19 nt, Artificial Sequence
  Description of Artificial Sequence: Synthetic oligonucleotide
  Sense strand starting at position 2916 of SEQ ID NO: 587340
aggagaagguggucaguua

SEQ ID NO: 785173 - RNA, 19 nt, Artificial Sequence
  Description of Artificial Sequence: Synthetic oligonucleotide
  Antisense strand to SEQ ID NO: 785172
uaacugaccaccuucuccu

SEQ ID NO: 785174 - RNA, 19 nt, Artificial Sequence
  Description of Artificial Sequence: Synthetic oligonucleotide
  Sense strand starting at position 2985 of SEQ ID NO: 587340
auucgacauccuugaccaa

SEQ ID NO: 785175 - RNA, 19 nt, Artificial Sequence
  Description of Artificial Sequence: Synthetic oligonucleotide
  Antisense strand to SEQ ID NO: 785174
uuggucaaggaugucgaau

SEQ ID NO: 785176 - RNA, 19 nt, Artificial Sequence
  Description of Artificial Sequence: Synthetic oligonucleotide
  Sense strand starting at position 3178 of SEQ ID NO: 587340
cucugucagucuuugagau

SEQ ID NO: 785177 - RNA, 19 nt, Artificial Sequence
  Description of Artificial Sequence: Synthetic oligonucleotide
  Antisense strand to SEQ ID NO: 785176
aucucaaagacugacagag

SEQ ID NO: 785178 - RNA, 19 nt, Artificial Sequence
  Description of Artificial Sequence: Synthetic oligonucleotide
  Sense strand starting at position 3194 of SEQ ID NO: 587340
gauuaaauggguugacagu

SEQ ID NO: 785179 - RNA, 19 nt, Artificial Sequence
  Description of Artificial Sequence: Synthetic oligonucleotide
  Antisense strand to SEQ ID NO: 785178
acugucaacccauuuaauc

SEQ ID NO: 785180 - RNA, 19 nt, Artificial Sequence
  Description of Artificial Sequence: Synthetic oligonucleotide
  Sense strand starting at position 3406 of SEQ ID NO: 587340
uuucuccucgcagauauau

SEQ ID NO: 785181 - RNA, 19 nt, Artificial Sequence
  Description of Artificial Sequence: Synthetic oligonucleotide
  Antisense strand to SEQ ID NO: 785180
auauaucugcgaggagaaa

SEQ ID NO: 785182 - RNA, 19 nt, Artificial Sequence
  Description of Artificial Sequence: Synthetic oligonucleotide
  Sense strand starting at position 3412 of SEQ ID NO: 587340
cucgcagauauaugagauu

SEQ ID NO: 785183 - RNA, 19 nt, Artificial Sequence
  Description of Artificial Sequence: Synthetic oligonucleotide
  Antisense strand to SEQ ID NO: 785182
aaucucauauaucugcgag

SEQ ID NO: 785184 - RNA, 19 nt, Artificial Sequence
  Description of Artificial Sequence: Synthetic oligonucleotide
  Sense strand starting at position 3415 of SEQ ID NO: 587340
gcagauauaugagauuuaa

SEQ ID NO: 785185 - RNA, 19 nt, Artificial Sequence
  Description of Artificial Sequence: Synthetic oligonucleotide
  Antisense strand to SEQ ID NO: 785184
uuaaaucucauauaucugc

SEQ ID NO: 785186 - RNA, 19 nt, Artificial Sequence
  Description of Artificial Sequence: Synthetic oligonucleotide
  Sense strand starting at position 3517 of SEQ ID NO: 587340
ucccgucuugccucaugua

SEQ ID NO: 785187 - RNA, 19 nt, Artificial Sequence
  Description of Artificial Sequence: Synthetic oligonucleotide
  Antisense strand to SEQ ID NO: 785186
uacaugaggcaagacggga

SEQ ID NO: 785188 - RNA, 19 nt, Artificial Sequence
  Description of Artificial Sequence: Synthetic oligonucleotide
  Sense strand starting at position 3529 of SEQ ID NO: 587340
ucauguaucccuggaggga

SEQ ID NO: 785189 - RNA, 19 nt, Artificial Sequence
  Description of Artificial Sequence: Synthetic oligonucleotide
  Antisense strand to SEQ ID NO: 785188
ucccuccagggauacauga

SEQ ID NO: 785190 - RNA, 19 nt, Artificial Sequence
  Description of Artificial Sequence: Synthetic oligonucleotide
  Sense strand starting at position 3557 of SEQ ID NO: 587340
gacagaaugccucagucac

SEQ ID NO: 785191 - RNA, 19 nt, Artificial Sequence
  Description of Artificial Sequence: Synthetic oligonucleotide
  Antisense strand to SEQ ID NO: 785190
gugacugaggcauucuguc

SEQ ID NO: 785192 - RNA, 19 nt, Artificial Sequence
  Description of Artificial Sequence: Synthetic oligonucleotide
  Sense strand starting at position 3671 of SEQ ID NO: 587340
ucagauaguaucugugagu

SEQ ID NO: 785193 - RNA, 19 nt, Artificial Sequence
  Description of Artificial Sequence: Synthetic oligonucleotide
  Antisense strand to SEQ ID NO: 785192
acucacagauacuaucuga

SEQ ID NO: 785194 - RNA, 19 nt, Artificial Sequence
  Description of Artificial Sequence: Synthetic oligonucleotide
  Sense strand starting at position 3672 of SEQ ID NO: 587340
cagauaguaucugugaguc

SEQ ID NO: 785195 - RNA, 19 nt, Artificial Sequence
  Description of Artificial Sequence: Synthetic oligonucleotide
  Antisense strand to SEQ ID NO: 785194
gacucacagauacuaucug

SEQ ID NO: 785196 - RNA, 19 nt, Artificial Sequence
  Description of Artificial Sequence: Synthetic oligonucleotide
  Sense strand starting at position 3685 of SEQ ID NO: 587340
ugagucagcgagugaacaa

SEQ ID NO: 785197 - RNA, 19 nt, Artificial Sequence
  Description of Artificial Sequence: Synthetic oligonucleotide
  Antisense strand to SEQ ID NO: 785196
uuguucacucgcugacuca

SEQ ID NO: 785198 - RNA, 19 nt, Artificial Sequence
  Description of Artificial Sequence: Synthetic oligonucleotide
  Sense strand starting at position 3686 of SEQ ID NO: 587340
gagucagcgagugaacaaa

SEQ ID NO: 785199 - RNA, 19 nt, Artificial Sequence
  Description of Artificial Sequence: Synthetic oligonucleotide
  Antisense strand to SEQ ID NO: 785198
uuuguucacucgcugacuc

SEQ ID NO: 785200 - RNA, 19 nt, Artificial Sequence
  Description of Artificial Sequence: Synthetic oligonucleotide
  Sense strand starting at position 3789 of SEQ ID NO: 587340
agagcugacuucuucuuga

SEQ ID NO: 785201 - RNA, 19 nt, Artificial Sequence
  Description of Artificial Sequence: Synthetic oligonucleotide
  Antisense strand to SEQ ID NO: 785200
ucaagaagaagucagcucu

SEQ ID NO: 785202 - RNA, 19 nt, Artificial Sequence
  Description of Artificial Sequence: Synthetic oligonucleotide
  Sense strand starting at position 3792 of SEQ ID NO: 587340
gcugacuucuucuugagaa

SEQ ID NO: 785203 - RNA, 19 nt, Artificial Sequence
  Description of Artificial Sequence: Synthetic oligonucleotide
  Antisense strand to SEQ ID NO: 785202
uucucaagaagaagucagc

SEQ ID NO: 785204 - RNA, 19 nt, Artificial Sequence
  Description of Artificial Sequence: Synthetic oligonucleotide
  Sense strand starting at position 3847 of SEQ ID NO: 587340
ucgugucaccaagaaggau

SEQ ID NO: 785205 - RNA, 19 nt, Artificial Sequence
  Description of Artificial Sequence: Synthetic oligonucleotide
  Antisense strand to SEQ ID NO: 785204
auccuucuuggugacacga

SEQ ID NO: 785206 - RNA, 19 nt, Artificial Sequence
  Description of Artificial Sequence: Synthetic oligonucleotide
  Sense strand starting at position 3960 of SEQ ID NO: 587340
gugagugucaccugagaga

SEQ ID NO: 785207 - RNA, 19 nt, Artificial Sequence
  Description of Artificial Sequence: Synthetic oligonucleotide
  Antisense strand to SEQ ID NO: 785206
ucucucaggugacacucac

SEQ ID NO: 785208 - RNA, 19 nt, Artificial Sequence
  Description of Artificial Sequence: Synthetic oligonucleotide
  Sense strand starting at position 134 of SEQ ID NO: 587341
accugagccgugcuuugua

SEQ ID NO: 785209 - RNA, 19 nt, Artificial Sequence
  Description of Artificial Sequence: Synthetic oligonucleotide
  Antisense strand to SEQ ID NO: 785208
uacaaagcacggcucaggu

SEQ ID NO: 785210 - RNA, 19 nt, Artificial Sequence
  Description of Artificial Sequence: Synthetic oligonucleotide
  Sense strand starting at position 151 of SEQ ID NO: 587341
uacauuuggcaguguaguu

SEQ ID NO: 785211 - RNA, 19 nt, Artificial Sequence
  Description of Artificial Sequence: Synthetic oligonucleotide
  Antisense strand to SEQ ID NO: 785210
aacuacacugccaaaugua

SEQ ID NO: 785212 - RNA, 19 nt, Artificial Sequence
  Description of Artificial Sequence: Synthetic oligonucleotide
  Sense strand starting at position 166 of SEQ ID NO: 587341
aguugugccacuuaggaca

SEQ ID NO: 785213 - RNA, 19 nt, Artificial Sequence
  Description of Artificial Sequence: Synthetic oligonucleotide
  Antisense strand to SEQ ID NO: 785212
uguccuaaguggcacaacu

SEQ ID NO: 785214 - RNA, 19 nt, Artificial Sequence
  Description of Artificial Sequence: Synthetic oligonucleotide
  Sense strand starting at position 341 of SEQ ID NO: 587341
cccaucauugguuauagua

SEQ ID NO: 785215 - RNA, 19 nt, Artificial Sequence
  Description of Artificial Sequence: Synthetic oligonucleotide
  Antisense strand to SEQ ID NO: 785214
uacuauaaccaaugauggg

SEQ ID NO: 785216 - RNA, 19 nt, Artificial Sequence
  Description of Artificial Sequence: Synthetic oligonucleotide
  Sense strand starting at position 669 of SEQ ID NO: 587341
cgucuauucgagcugccau

SEQ ID NO: 785217 - RNA, 19 nt, Artificial Sequence
  Description of Artificial Sequence: Synthetic oligonucleotide
  Antisense strand to SEQ ID NO: 785216
auggcagcucgaauagacg

SEQ ID NO: 785218 - RNA, 19 nt, Artificial Sequence
  Description of Artificial Sequence: Synthetic oligonucleotide
  Sense strand starting at position 687 of SEQ ID NO: 587341
ugaguauggagaggugauu

SEQ ID NO: 785219 - RNA, 19 nt, Artificial Sequence
  Description of Artificial Sequence: Synthetic oligonucleotide
  Antisense strand to SEQ ID NO: 785218
aaucaccucuccauacuca

SEQ ID NO: 785220 - RNA, 19 nt, Artificial Sequence
  Description of Artificial Sequence: Synthetic oligonucleotide
  Sense strand starting at position 693 of SEQ ID NO: 587341
uggagaggugauuguucaa

SEQ ID NO: 785221 - RNA, 19 nt, Artificial Sequence
  Description of Artificial Sequence: Synthetic oligonucleotide
  Antisense strand to SEQ ID NO: 785220
uugaacaaucaccucucca

SEQ ID NO: 785222 - RNA, 19 nt, Artificial Sequence
  Description of Artificial Sequence: Synthetic oligonucleotide
  Sense strand starting at position 734 of SEQ ID NO: 587341
acaccuccugaguauucuu

SEQ ID NO: 785223 - RNA, 19 nt, Artificial Sequence
  Description of Artificial Sequence: Synthetic oligonucleotide
  Antisense strand to SEQ ID NO: 785222
aagaauacucaggaggugu

SEQ ID NO: 785224 - RNA, 19 nt, Artificial Sequence
  Description of Artificial Sequence: Synthetic oligonucleotide
  Sense strand starting at position 792 of SEQ ID NO: 587341
ggaagagagcuauggaucu

SEQ ID NO: 785225 - RNA, 19 nt, Artificial Sequence
  Description of Artificial Sequence: Synthetic oligonucleotide
  Antisense strand to SEQ ID NO: 785224
agauccauagcucucuucc

SEQ ID NO: 785226 - RNA, 19 nt, Artificial Sequence
  Description of Artificial Sequence: Synthetic oligonucleotide
  Sense strand starting at position 1366 of SEQ ID NO: 587341
gaggaauucugccuggaua

SEQ ID NO: 785227 - RNA, 19 nt, Artificial Sequence
  Description of Artificial Sequence: Synthetic oligonucleotide
  Antisense strand to SEQ ID NO: 785226
uauccaggcagaauuccuc

SEQ ID NO: 785228 - RNA, 19 nt, Artificial Sequence
  Description of Artificial Sequence: Synthetic oligonucleotide
  Sense strand starting at position 1367 of SEQ ID NO: 587341
aggaauucugccuggauau

SEQ ID NO: 785229 - RNA, 19 nt, Artificial Sequence
  Description of Artificial Sequence: Synthetic oligonucleotide
  Antisense strand to SEQ ID NO: 785228
auauccaggcagaauuccu

SEQ ID NO: 785230 - RNA, 19 nt, Artificial Sequence
  Description of Artificial Sequence: Synthetic oligonucleotide
  Sense strand starting at position 1368 of SEQ ID NO: 587341
ggaauucugccuggauauc

SEQ ID NO: 785231 - RNA, 19 nt, Artificial Sequence
  Description of Artificial Sequence: Synthetic oligonucleotide
  Antisense strand to SEQ ID NO: 785230
gauauccaggcagaauucc

SEQ ID NO: 785232 - RNA, 19 nt, Artificial Sequence
  Description of Artificial Sequence: Synthetic oligonucleotide
  Sense strand starting at position 1389 of SEQ ID NO: 587341
cuaguuagaggcuauacua

SEQ ID NO: 785233 - RNA, 19 nt, Artificial Sequence
  Description of Artificial Sequence: Synthetic oligonucleotide
  Antisense strand to SEQ ID NO: 785232
uaguauagccucuaacuag

SEQ ID NO: 785234 - RNA, 19 nt, Artificial Sequence
  Description of Artificial Sequence: Synthetic oligonucleotide
  Sense strand starting at position 1414 of SEQ ID NO: 587341
ucacguauucguuugagca

SEQ ID NO: 785235 - RNA, 19 nt, Artificial Sequence
  Description of Artificial Sequence: Synthetic oligonucleotide
  Antisense strand to SEQ ID NO: 785234
ugcucaaacgaauacguga

SEQ ID NO: 785236 - RNA, 19 nt, Artificial Sequence
  Description of Artificial Sequence: Synthetic oligonucleotide
  Sense strand starting at position 1426 of SEQ ID NO: 587341
uugagcauacugcaagaau

SEQ ID NO: 785237 - RNA, 19 nt, Artificial Sequence
  Description of Artificial Sequence: Synthetic oligonucleotide
  Antisense strand to SEQ ID NO: 785236
auucuugcaguaugcucaa

SEQ ID NO: 785238 - RNA, 19 nt, Artificial Sequence
  Description of Artificial Sequence: Synthetic oligonucleotide
  Sense strand starting at position 1429 of SEQ ID NO: 587341
agcauacugcaagaauauu

SEQ ID NO: 785239 - RNA, 19 nt, Artificial Sequence
  Description of Artificial Sequence: Synthetic oligonucleotide
  Antisense strand to SEQ ID NO: 785238
aauauucuugcaguaugcu

SEQ ID NO: 785240 - RNA, 19 nt, Artificial Sequence
  Description of Artificial Sequence: Synthetic oligonucleotide
  Sense strand starting at position 1520 of SEQ ID NO: 587341
gggagaacgagcugugaau

SEQ ID NO: 785241 - RNA, 19 nt, Artificial Sequence
  Description of Artificial Sequence: Synthetic oligonucleotide
  Antisense strand to SEQ ID NO: 785240
auucacagcucguucuccc

SEQ ID NO: 785242 - RNA, 19 nt, Artificial Sequence
  Description of Artificial Sequence: Synthetic oligonucleotide
  Sense strand starting at position 1522 of SEQ ID NO: 587341
gagaacgagcugugaauca

SEQ ID NO: 785243 - RNA, 19 nt, Artificial Sequence
  Description of Artificial Sequence: Synthetic oligonucleotide
  Antisense strand to SEQ ID NO: 785242
ugauucacagcucguucuc

SEQ ID NO: 785244 - RNA, 19 nt, Artificial Sequence
  Description of Artificial Sequence: Synthetic oligonucleotide
  Sense strand starting at position 1544 of SEQ ID NO: 587341
ccuuuaguauuaucagauu

SEQ ID NO: 785245 - RNA, 19 nt, Artificial Sequence
  Description of Artificial Sequence: Synthetic oligonucleotide
  Antisense strand to SEQ ID NO: 785244
aaucugauaauacuaaagg

SEQ ID NO: 785246 - RNA, 19 nt, Artificial Sequence
  Description of Artificial Sequence: Synthetic oligonucleotide
  Sense strand starting at position 1932 of SEQ ID NO: 587341
guguuucugggauaccaca

SEQ ID NO: 785247 - RNA, 19 nt, Artificial Sequence
  Description of Artificial Sequence: Synthetic oligonucleotide
  Antisense strand to SEQ ID NO: 785246
ugugguaucccagaaacac

SEQ ID NO: 785248 - RNA, 19 nt, Artificial Sequence
  Description of Artificial Sequence: Synthetic oligonucleotide
  Sense strand starting at position 2347 of SEQ ID NO: 587341
guuauaaugggacaugugu

SEQ ID NO: 785249 - RNA, 19 nt, Artificial Sequence
  Description of Artificial Sequence: Synthetic oligonucleotide
  Antisense strand to SEQ ID NO: 785248
acacaugucccauuauaac

SEQ ID NO: 785250 - RNA, 19 nt, Artificial Sequence
  Description of Artificial Sequence: Synthetic oligonucleotide
  Sense strand starting at position 2513 of SEQ ID NO: 587341
ucaaauaacuacguguaaa

SEQ ID NO: 785251 - RNA, 19 nt, Artificial Sequence
  Description of Artificial Sequence: Synthetic oligonucleotide
  Antisense strand to SEQ ID NO: 785250
uuuacacguaguuauuuga

SEQ ID NO: 785252 - RNA, 19 nt, Artificial Sequence
  Description of Artificial Sequence: Synthetic oligonucleotide
  Sense strand starting at position 2665 of SEQ ID NO: 587341
gugugugccgcaguuaaac

SEQ ID NO: 785253 - RNA, 19 nt, Artificial Sequence
  Description of Artificial Sequence: Synthetic oligonucleotide
  Antisense strand to SEQ ID NO: 785252
guuuaacugcggcacacac

SEQ ID NO: 785254 - RNA, 19 nt, Artificial Sequence
  Description of Artificial Sequence: Synthetic oligonucleotide
  Sense strand starting at position 2694 of SEQ ID NO: 587341
gugguaguuaucuagaaca

SEQ ID NO: 785255 - RNA, 19 nt, Artificial Sequence
  Description of Artificial Sequence: Synthetic oligonucleotide
  Antisense strand to SEQ ID NO: 785254
uguucuagauaacuaccac

SEQ ID NO: 785256 - RNA, 19 nt, Artificial Sequence
  Description of Artificial Sequence: Synthetic oligonucleotide
  Sense strand starting at position 2738 of SEQ ID NO: 587341
gguaccaaauauguaaaua

SEQ ID NO: 785257 - RNA, 19 nt, Artificial Sequence
  Description of Artificial Sequence: Synthetic oligonucleotide
  Antisense strand to SEQ ID NO: 785256
uauuuacauauuugguacc

SEQ ID NO: 785258 - RNA, 19 nt, Artificial Sequence
  Description of Artificial Sequence: Synthetic oligonucleotide
  Sense strand starting at position 2820 of SEQ ID NO: 587341
ccacgcaaggguuaagauu

SEQ ID NO: 785259 - RNA, 19 nt, Artificial Sequence
  Description of Artificial Sequence: Synthetic oligonucleotide
  Antisense strand to SEQ ID NO: 785258
aaucuuaacccuugcgugg

SEQ ID NO: 785260 - RNA, 19 nt, Artificial Sequence
  Description of Artificial Sequence: Synthetic oligonucleotide
  Sense strand starting at position 2826 of SEQ ID NO: 587341
aaggguuaagauugcacaa

SEQ ID NO: 785261 - RNA, 19 nt, Artificial Sequence
  Description of Artificial Sequence: Synthetic oligonucleotide
  Antisense strand to SEQ ID NO: 785260
uugugcaaucuuaacccuu

SEQ ID NO: 785262 - RNA, 19 nt, Artificial Sequence
  Description of Artificial Sequence: Synthetic oligonucleotide
  Sense strand starting at position 2964 of SEQ ID NO: 587341
guaugucgugcuccuugau

SEQ ID NO: 785263 - RNA, 19 nt, Artificial Sequence
  Description of Artificial Sequence: Synthetic oligonucleotide
  Antisense strand to SEQ ID NO: 785262
aucaaggagcacgacauac

SEQ ID NO: 785264 - RNA, 19 nt, Artificial Sequence
  Description of Artificial Sequence: Synthetic oligonucleotide
  Sense strand starting at position 2965 of SEQ ID NO: 587341
uaugucgugcuccuugauu

SEQ ID NO: 785265 - RNA, 19 nt, Artificial Sequence
  Description of Artificial Sequence: Synthetic oligonucleotide
  Antisense strand to SEQ ID NO: 785264
aaucaaggagcacgacaua

SEQ ID NO: 785266 - RNA, 19 nt, Artificial Sequence
  Description of Artificial Sequence: Synthetic oligonucleotide
  Sense strand starting at position 3017 of SEQ ID NO: 587341
augaacaaguuccuuagau

SEQ ID NO: 785267 - RNA, 19 nt, Artificial Sequence
  Description of Artificial Sequence: Synthetic oligonucleotide
  Antisense strand to SEQ ID NO: 785266
aucuaaggaacuuguucau

SEQ ID NO: 785268 - RNA, 19 nt, Artificial Sequence
  Description of Artificial Sequence: Synthetic oligonucleotide
  Sense strand starting at position 3018 of SEQ ID NO: 587341
ugaacaaguuccuuagauu

SEQ ID NO: 785269 - RNA, 19 nt, Artificial Sequence
  Description of Artificial Sequence: Synthetic oligonucleotide
  Antisense strand to SEQ ID NO: 785268
aaucuaaggaacuuguuca

SEQ ID NO: 785270 - RNA, 19 nt, Artificial Sequence
  Description of Artificial Sequence: Synthetic oligonucleotide
  Sense strand starting at position 3036 of SEQ ID NO: 587341
uaggcaacugauuggugau

SEQ ID NO: 785271 - RNA, 19 nt, Artificial Sequence
  Description of Artificial Sequence: Synthetic oligonucleotide
  Antisense strand to SEQ ID NO: 785270
aucaccaaucaguugccua

SEQ ID NO: 785272 - RNA, 19 nt, Artificial Sequence
  Description of Artificial Sequence: Synthetic oligonucleotide
  Sense strand starting at position 3169 of SEQ ID NO: 587341
gggcgugagcgucuaucaa

SEQ ID NO: 785273 - RNA, 19 nt, Artificial Sequence
  Description of Artificial Sequence: Synthetic oligonucleotide
  Antisense strand to SEQ ID NO: 785272
uugauagacgcucacgccc

SEQ ID NO: 785274 - RNA, 19 nt, Artificial Sequence
  Description of Artificial Sequence: Synthetic oligonucleotide
  Sense strand starting at position 3190 of SEQ ID NO: 587341
aggcuuagucuagaggacu

SEQ ID NO: 785275 - RNA, 19 nt, Artificial Sequence
  Description of Artificial Sequence: Synthetic oligonucleotide
  Antisense strand to SEQ ID NO: 785274
aguccucuagacuaagccu

SEQ ID NO: 785276 - RNA, 19 nt, Artificial Sequence
  Description of Artificial Sequence: Synthetic oligonucleotide
  Sense strand starting at position 3232 of SEQ ID NO: 587341
cugcacugugcacaaauaa

SEQ ID NO: 785277 - RNA, 19 nt, Artificial Sequence
  Description of Artificial Sequence: Synthetic oligonucleotide
  Antisense strand to SEQ ID NO: 785276
uuauuugugcacagugcag

SEQ ID NO: 785278 - RNA, 19 nt, Artificial Sequence
  Description of Artificial Sequence: Synthetic oligonucleotide
  Sense strand starting at position 3328 of SEQ ID NO: 587341
agaggaaggcguuagaauc

SEQ ID NO: 785279 - RNA, 19 nt, Artificial Sequence
  Description of Artificial Sequence: Synthetic oligonucleotide
  Antisense strand to SEQ ID NO: 785278
gauucuaacgccuuccucu

SEQ ID NO: 785280 - RNA, 19 nt, Artificial Sequence
  Description of Artificial Sequence: Synthetic oligonucleotide
  Sense strand starting at position 3381 of SEQ ID NO: 587341
gcgaguguccauagguuug

SEQ ID NO: 785281 - RNA, 19 nt, Artificial Sequence
  Description of Artificial Sequence: Synthetic oligonucleotide
  Antisense strand to SEQ ID NO: 785280
caaaccuauggacacucgc

SEQ ID NO: 785282 - RNA, 19 nt, Artificial Sequence
  Description of Artificial Sequence: Synthetic oligonucleotide
  Sense strand starting at position 3559 of SEQ ID NO: 587341
guaagugugcguguuuaug

SEQ ID NO: 785283 - RNA, 19 nt, Artificial Sequence
  Description of Artificial Sequence: Synthetic oligonucleotide
  Antisense strand to SEQ ID NO: 785282
cauaaacacgcacacuuac

SEQ ID NO: 785284 - RNA, 19 nt, Artificial Sequence
  Description of Artificial Sequence: Synthetic oligonucleotide
  Sense strand starting at position 3563 of SEQ ID NO: 587341
gugugcguguuuaugaaag

SEQ ID NO: 785285 - RNA, 19 nt, Artificial Sequence
  Description of Artificial Sequence: Synthetic oligonucleotide
  Antisense strand to SEQ ID NO: 785284
cuuucauaaacacgcacac

SEQ ID NO: 785286 - RNA, 19 nt, Artificial Sequence
  Description of Artificial Sequence: Synthetic oligonucleotide
  Sense strand starting at position 3664 of SEQ ID NO: 587341
uuguguguuagagagggau

SEQ ID NO: 785287 - RNA, 19 nt, Artificial Sequence
  Description of Artificial Sequence: Synthetic oligonucleotide
  Antisense strand to SEQ ID NO: 785286
aucccucucuaacacacaa

SEQ ID NO: 785288 - RNA, 19 nt, Artificial Sequence
  Description of Artificial Sequence: Synthetic oligonucleotide
  Sense strand starting at position 35 of SEQ ID NO: 587342
cagguauucugccuaagga

SEQ ID NO: 785289 - RNA, 19 nt, Artificial Sequence
  Description of Artificial Sequence: Synthetic oligonucleotide
  Antisense strand to SEQ ID NO: 785288
uccuuaggcagaauaccug

SEQ ID NO: 785290 - RNA, 19 nt, Artificial Sequence
  Description of Artificial Sequence: Synthetic oligonucleotide
  Sense strand starting at position 36 of SEQ ID NO: 587342
agguauucugccuaaggaa

SEQ ID NO: 785291 - RNA, 19 nt, Artificial Sequence
  Description of Artificial Sequence: Synthetic oligonucleotide
  Antisense strand to SEQ ID NO: 785290
uuccuuaggcagaauaccu

SEQ ID NO: 785292 - RNA, 19 nt, Artificial Sequence
  Description of Artificial Sequence: Synthetic oligonucleotide
  Sense strand starting at position 200 of SEQ ID NO: 587342
aaugucugccaagagcaua

SEQ ID NO: 785293 - RNA, 19 nt, Artificial Sequence
  Description of Artificial Sequence: Synthetic oligonucleotide
  Antisense strand to SEQ ID NO: 785292
uaugcucuuggcagacauu

SEQ ID NO: 785294 - RNA, 19 nt, Artificial Sequence
  Description of Artificial Sequence: Synthetic oligonucleotide
  Sense strand starting at position 208 of SEQ ID NO: 587342
ccaagagcauaugucuaau

SEQ ID NO: 785295 - RNA, 19 nt, Artificial Sequence
  Description of Artificial Sequence: Synthetic oligonucleotide
  Antisense strand to SEQ ID NO: 785294
auuagacauaugcucuugg

SEQ ID NO: 785296 - RNA, 19 nt, Artificial Sequence
  Description of Artificial Sequence: Synthetic oligonucleotide
  Sense strand starting at position 425 of SEQ ID NO: 587342
auacuuuacgaacagcauu

SEQ ID NO: 785297 - RNA, 19 nt, Artificial Sequence
  Description of Artificial Sequence: Synthetic oligonucleotide
  Antisense strand to SEQ ID NO: 785296
aaugcuguucguaaaguau

SEQ ID NO: 785298 - RNA, 19 nt, Artificial Sequence
  Description of Artificial Sequence: Synthetic oligonucleotide
  Sense strand starting at position 514 of SEQ ID NO: 587342
uugcuaauugcugaagagu

SEQ ID NO: 785299 - RNA, 19 nt, Artificial Sequence
  Description of Artificial Sequence: Synthetic oligonucleotide
  Antisense strand to SEQ ID NO: 785298
acucuucagcaauuagcaa

SEQ ID NO: 785300 - RNA, 19 nt, Artificial Sequence
  Description of Artificial Sequence: Synthetic oligonucleotide
  Sense strand starting at position 587 of SEQ ID NO: 587342
ggaguagcuuauguaagac

SEQ ID NO: 785301 - RNA, 19 nt, Artificial Sequence
  Description of Artificial Sequence: Synthetic oligonucleotide
  Antisense strand to SEQ ID NO: 785300
gucuuacauaagcuacucc

SEQ ID NO: 785302 - RNA, 19 nt, Artificial Sequence
  Description of Artificial Sequence: Synthetic oligonucleotide
  Sense strand starting at position 669 of SEQ ID NO: 587342
ccaggauaauuuggaacua

SEQ ID NO: 785303 - RNA, 19 nt, Artificial Sequence
  Description of Artificial Sequence: Synthetic oligonucleotide
  Antisense strand to SEQ ID NO: 785302
uaguuccaaauuauccugg

SEQ ID NO: 785304 - RNA, 19 nt, Artificial Sequence
  Description of Artificial Sequence: Synthetic oligonucleotide
  Sense strand starting at position 1221 of SEQ ID NO: 587342
ucaagaacuguuuguuuag

SEQ ID NO: 785305 - RNA, 19 nt, Artificial Sequence
  Description of Artificial Sequence: Synthetic oligonucleotide
  Antisense strand to SEQ ID NO: 785304
cuaaacaaacaguucuuga

SEQ ID NO: 785306 - RNA, 19 nt, Artificial Sequence
  Description of Artificial Sequence: Synthetic oligonucleotide
  Sense strand starting at position 1346 of SEQ ID NO: 587342
uuaagaguagguggcaaau

SEQ ID NO: 785307 - RNA, 19 nt, Artificial Sequence
  Description of Artificial Sequence: Synthetic oligonucleotide
  Antisense strand to SEQ ID NO: 785306
auuugccaccuacucuuaa

SEQ ID NO: 785308 - RNA, 19 nt, Artificial Sequence
  Description of Artificial Sequence: Synthetic oligonucleotide
  Sense strand starting at position 2272 of SEQ ID NO: 587342
uuuggagaugcugauaagu

SEQ ID NO: 785309 - RNA, 19 nt, Artificial Sequence
  Description of Artificial Sequence: Synthetic oligonucleotide
  Antisense strand to SEQ ID NO: 785308
acuuaucagcaucuccaaa

SEQ ID NO: 785310 - RNA, 19 nt, Artificial Sequence
  Description of Artificial Sequence: Synthetic oligonucleotide
  Sense strand starting at position 2329 of SEQ ID NO: 587342
uugggagcuuuccuaggau

SEQ ID NO: 785311 - RNA, 19 nt, Artificial Sequence
  Description of Artificial Sequence: Synthetic oligonucleotide
  Antisense strand to SEQ ID NO: 785310
auccuaggaaagcucccaa

SEQ ID NO: 785312 - RNA, 19 nt, Artificial Sequence
  Description of Artificial Sequence: Synthetic oligonucleotide
  Sense strand starting at position 2349 of SEQ ID NO: 587342
uugucuuaugugccagcua

SEQ ID NO: 785313 - RNA, 19 nt, Artificial Sequence
  Description of Artificial Sequence: Synthetic oligonucleotide
  Antisense strand to SEQ ID NO: 785312
uagcuggcacauaagacaa

SEQ ID NO: 785314 - RNA, 19 nt, Artificial Sequence
  Description of Artificial Sequence: Synthetic oligonucleotide
  Sense strand starting at position 2440 of SEQ ID NO: 587342
cgaguuuguguuagacggu

SEQ ID NO: 785315 - RNA, 19 nt, Artificial Sequence
  Description of Artificial Sequence: Synthetic oligonucleotide
  Antisense strand to SEQ ID NO: 785314
accgucuaacacaaacucg

SEQ ID NO: 785316 - RNA, 19 nt, Artificial Sequence
  Description of Artificial Sequence: Synthetic oligonucleotide
  Sense strand starting at position 2643 of SEQ ID NO: 587342
gauuguguugaguaaugau

SEQ ID NO: 785317 - RNA, 19 nt, Artificial Sequence
  Description of Artificial Sequence: Synthetic oligonucleotide
  Antisense strand to SEQ ID NO: 785316
aucauuacucaacacaauc

SEQ ID NO: 785318 - RNA, 19 nt, Artificial Sequence
  Description of Artificial Sequence: Synthetic oligonucleotide
  Sense strand starting at position 2997 of SEQ ID NO: 587342
cggcauuuauucuugguau

SEQ ID NO: 785319 - RNA, 19 nt, Artificial Sequence
  Description of Artificial Sequence: Synthetic oligonucleotide
  Antisense strand to SEQ ID NO: 785318
auaccaagaauaaaugccg

SEQ ID NO: 785320 - RNA, 19 nt, Artificial Sequence
  Description of Artificial Sequence: Synthetic oligonucleotide
  Sense strand starting at position 3003 of SEQ ID NO: 587342
uuauucuugguaugacaau

SEQ ID NO: 785321 - RNA, 19 nt, Artificial Sequence
  Description of Artificial Sequence: Synthetic oligonucleotide
  Antisense strand to SEQ ID NO: 785320
auugucauaccaagaauaa

SEQ ID NO: 785322 - RNA, 19 nt, Artificial Sequence
  Description of Artificial Sequence: Synthetic oligonucleotide
  Sense strand starting at position 3059 of SEQ ID NO: 587342
uaugguguaaugugaagau

SEQ ID NO: 785323 - RNA, 19 nt, Artificial Sequence
  Description of Artificial Sequence: Synthetic oligonucleotide
  Antisense strand to SEQ ID NO: 785322
aucuucacauuacaccaua

SEQ ID NO: 785324 - RNA, 19 nt, Artificial Sequence
  Description of Artificial Sequence: Synthetic oligonucleotide
  Sense strand starting at position 3164 of SEQ ID NO: 587342
gugccaagaccugaauaua

SEQ ID NO: 785325 - RNA, 19 nt, Artificial Sequence
  Description of Artificial Sequence: Synthetic oligonucleotide
  Antisense strand to SEQ ID NO: 785324
uauauucaggucuuggcac

SEQ ID NO: 785326 - RNA, 19 nt, Artificial Sequence
  Description of Artificial Sequence: Synthetic oligonucleotide
  Sense strand starting at position 3219 of SEQ ID NO: 587342
acugacauuccuuguuuag

SEQ ID NO: 785327 - RNA, 19 nt, Artificial Sequence
  Description of Artificial Sequence: Synthetic oligonucleotide
  Antisense strand to SEQ ID NO: 785326
cuaaacaaggaaugucagu

SEQ ID NO: 785328 - RNA, 19 nt, Artificial Sequence
  Description of Artificial Sequence: Synthetic oligonucleotide
  Sense strand starting at position 3221 of SEQ ID NO: 587342
ugacauuccuuguuuagag

SEQ ID NO: 785329 - RNA, 19 nt, Artificial Sequence
  Description of Artificial Sequence: Synthetic oligonucleotide
  Antisense strand to SEQ ID NO: 785328
cucuaaacaaggaauguca

SEQ ID NO: 785330 - RNA, 19 nt, Artificial Sequence
  Description of Artificial Sequence: Synthetic oligonucleotide
  Sense strand starting at position 3222 of SEQ ID NO: 587342
gacauuccuuguuuagaga

SEQ ID NO: 785331 - RNA, 19 nt, Artificial Sequence
  Description of Artificial Sequence: Synthetic oligonucleotide
  Antisense strand to SEQ ID NO: 785330
ucucuaaacaaggaauguc

SEQ ID NO: 785332 - RNA, 19 nt, Artificial Sequence
  Description of Artificial Sequence: Synthetic oligonucleotide
  Sense strand starting at position 3223 of SEQ ID NO: 587342
acauuccuuguuuagagau

SEQ ID NO: 785333 - RNA, 19 nt, Artificial Sequence
  Description of Artificial Sequence: Synthetic oligonucleotide
  Antisense strand to SEQ ID NO: 785332
aucucuaaacaaggaaugu

SEQ ID NO: 785334 - RNA, 19 nt, Artificial Sequence
  Description of Artificial Sequence: Synthetic oligonucleotide
  Sense strand starting at position 3239 of SEQ ID NO: 587342
gauauagucuaguugagga

SEQ ID NO: 785335 - RNA, 19 nt, Artificial Sequence
  Description of Artificial Sequence: Synthetic oligonucleotide
  Antisense strand to SEQ ID NO: 785334
uccucaacuagacuauauc

SEQ ID NO: 785336 - RNA, 19 nt, Artificial Sequence
  Description of Artificial Sequence: Synthetic oligonucleotide
  Sense strand starting at position 3244 of SEQ ID NO: 587342
agucuaguugaggagguaa

SEQ ID NO: 785337 - RNA, 19 nt, Artificial Sequence
  Description of Artificial Sequence: Synthetic oligonucleotide
  Antisense strand to SEQ ID NO: 785336
uuaccuccucaacuagacu

SEQ ID NO: 785338 - RNA, 19 nt, Artificial Sequence
  Description of Artificial Sequence: Synthetic oligonucleotide
  Sense strand starting at position 3246 of SEQ ID NO: 587342
ucuaguugaggagguaaau

SEQ ID NO: 785339 - RNA, 19 nt, Artificial Sequence
  Description of Artificial Sequence: Synthetic oligonucleotide
  Antisense strand to SEQ ID NO: 785338
auuuaccuccucaacuaga

SEQ ID NO: 785340 - RNA, 19 nt, Artificial Sequence
  Description of Artificial Sequence: Synthetic oligonucleotide
  Sense strand starting at position 3325 of SEQ ID NO: 587342
auuuaauccucagaggaua

SEQ ID NO: 785341 - RNA, 19 nt, Artificial Sequence
  Description of Artificial Sequence: Synthetic oligonucleotide
  Antisense strand to SEQ ID NO: 785340
uauccucugaggauuaaau

SEQ ID NO: 785342 - RNA, 19 nt, Artificial Sequence
  Description of Artificial Sequence: Synthetic oligonucleotide
  Sense strand starting at position 3360 of SEQ ID NO: 587342
uacguuauaguggacaaga

SEQ ID NO: 785343 - RNA, 19 nt, Artificial Sequence
  Description of Artificial Sequence: Synthetic oligonucleotide
  Antisense strand to SEQ ID NO: 785342
ucuuguccacuauaacgua

SEQ ID NO: 785344 - RNA, 19 nt, Artificial Sequence
  Description of Artificial Sequence: Synthetic oligonucleotide
  Sense strand starting at position 3460 of SEQ ID NO: 587342
cuuguuuguagaggaaauu

SEQ ID NO: 785345 - RNA, 19 nt, Artificial Sequence
  Description of Artificial Sequence: Synthetic oligonucleotide
  Antisense strand to SEQ ID NO: 785344
aauuuccucuacaaacaag

SEQ ID NO: 785346 - RNA, 19 nt, Artificial Sequence
  Description of Artificial Sequence: Synthetic oligonucleotide
  Sense strand starting at position 3469 of SEQ ID NO: 587342
agaggaaauuuguaugaga

SEQ ID NO: 785347 - RNA, 19 nt, Artificial Sequence
  Description of Artificial Sequence: Synthetic oligonucleotide
  Antisense strand to SEQ ID NO: 785346
ucucauacaaauuuccucu

SEQ ID NO: 785348 - RNA, 19 nt, Artificial Sequence
  Description of Artificial Sequence: Synthetic oligonucleotide
  Sense strand starting at position 3472 of SEQ ID NO: 587342
ggaaauuuguaugagaaug

SEQ ID NO: 785349 - RNA, 19 nt, Artificial Sequence
  Description of Artificial Sequence: Synthetic oligonucleotide
  Antisense strand to SEQ ID NO: 785348
cauucucauacaaauuucc

SEQ ID NO: 785350 - RNA, 19 nt, Artificial Sequence
  Description of Artificial Sequence: Synthetic oligonucleotide
  Sense strand starting at position 3474 of SEQ ID NO: 587342
aaauuuguaugagaauguc

SEQ ID NO: 785351 - RNA, 19 nt, Artificial Sequence
  Description of Artificial Sequence: Synthetic oligonucleotide
  Antisense strand to SEQ ID NO: 785350
gacauucucauacaaauuu

SEQ ID NO: 785352 - RNA, 19 nt, Artificial Sequence
  Description of Artificial Sequence: Synthetic oligonucleotide
  Sense strand starting at position 3477 of SEQ ID NO: 587342
uuuguaugagaaugucuac

SEQ ID NO: 785353 - RNA, 19 nt, Artificial Sequence
  Description of Artificial Sequence: Synthetic oligonucleotide
  Antisense strand to SEQ ID NO: 785352
guagacauucucauacaaa

SEQ ID NO: 785354 - RNA, 19 nt, Artificial Sequence
  Description of Artificial Sequence: Synthetic oligonucleotide
  Sense strand starting at position 3487 of SEQ ID NO: 587342
aaugucuacgugcaagaau

SEQ ID NO: 785355 - RNA, 19 nt, Artificial Sequence
  Description of Artificial Sequence: Synthetic oligonucleotide
  Antisense strand to SEQ ID NO: 785354
auucuugcacguagacauu

SEQ ID NO: 785356 - RNA, 19 nt, Artificial Sequence
  Description of Artificial Sequence: Synthetic oligonucleotide
  Sense strand starting at position 3513 of SEQ ID NO: 587342
gcuuuaaugcaguggauuu

SEQ ID NO: 785357 - RNA, 19 nt, Artificial Sequence
  Description of Artificial Sequence: Synthetic oligonucleotide
  Antisense strand to SEQ ID NO: 785356
aaauccacugcauuaaagc

SEQ ID NO: 785358 - RNA, 19 nt, Artificial Sequence
  Description of Artificial Sequence: Synthetic oligonucleotide
  Sense strand starting at position 3824 of SEQ ID NO: 587342
gagcuuguaguccaugaca

SEQ ID NO: 785359 - RNA, 19 nt, Artificial Sequence
  Description of Artificial Sequence: Synthetic oligonucleotide
  Antisense strand to SEQ ID NO: 785358
ugucauggacuacaagcuc

SEQ ID NO: 785360 - RNA, 19 nt, Artificial Sequence
  Description of Artificial Sequence: Synthetic oligonucleotide
  Sense strand starting at position 3827 of SEQ ID NO: 587342
cuuguaguccaugacaaga

SEQ ID NO: 785361 - RNA, 19 nt, Artificial Sequence
  Description of Artificial Sequence: Synthetic oligonucleotide
  Antisense strand to SEQ ID NO: 785360
ucuugucauggacuacaag

SEQ ID NO: 785362 - RNA, 19 nt, Artificial Sequence
  Description of Artificial Sequence: Synthetic oligonucleotide
  Sense strand starting at position 3940 of SEQ ID NO: 587342
cugggaaauaguggguuaa

SEQ ID NO: 785363 - RNA, 19 nt, Artificial Sequence
  Description of Artificial Sequence: Synthetic oligonucleotide
  Antisense strand to SEQ ID NO: 785362
uuaacccacuauuucccag

SEQ ID NO: 785364 - RNA, 19 nt, Artificial Sequence
  Description of Artificial Sequence: Synthetic oligonucleotide
  Sense strand starting at position 3941 of SEQ ID NO: 587342
ugggaaauaguggguuaau

SEQ ID NO: 785365 - RNA, 19 nt, Artificial Sequence
  Description of Artificial Sequence: Synthetic oligonucleotide
  Antisense strand to SEQ ID NO: 785364
auuaacccacuauuuccca

SEQ ID NO: 785366 - RNA, 19 nt, Artificial Sequence
  Description of Artificial Sequence: Synthetic oligonucleotide
  Sense strand starting at position 3942 of SEQ ID NO: 587342
gggaaauaguggguuaaug

SEQ ID NO: 785367 - RNA, 19 nt, Artificial Sequence
  Description of Artificial Sequence: Synthetic oligonucleotide
  Antisense strand to SEQ ID NO: 785366
cauuaacccacuauuuccc

SEQ ID NO: 785368 - RNA, 19 nt, Artificial Sequence
  Description of Artificial Sequence: Synthetic oligonucleotide
  Sense strand starting at position 60 of SEQ ID NO: 587343
uguucuccuguccagaaca

SEQ ID NO: 785369 - RNA, 19 nt, Artificial Sequence
  Description of Artificial Sequence: Synthetic oligonucleotide
  Antisense strand to SEQ ID NO: 785368
uguucuggacaggagaaca

SEQ ID NO: 785370 - RNA, 19 nt, Artificial Sequence
  Description of Artificial Sequence: Synthetic oligonucleotide
  Sense strand starting at position 87 of SEQ ID NO: 587343
uguuauuucuugucuccau

SEQ ID NO: 785371 - RNA, 19 nt, Artificial Sequence
  Description of Artificial Sequence: Synthetic oligonucleotide
  Antisense strand to SEQ ID NO: 785370
auggagacaagaaauaaca

SEQ ID NO: 785372 - RNA, 19 nt, Artificial Sequence
  Description of Artificial Sequence: Synthetic oligonucleotide
  Sense strand starting at position 97 of SEQ ID NO: 587343
ugucuccaugcagauaauu

SEQ ID NO: 785373 - RNA, 19 nt, Artificial Sequence
  Description of Artificial Sequence: Synthetic oligonucleotide
  Antisense strand to SEQ ID NO: 785372
aauuaucugcauggagaca

SEQ ID NO: 785374 - RNA, 19 nt, Artificial Sequence
  Description of Artificial Sequence: Synthetic oligonucleotide
  Sense strand starting at position 166 of SEQ ID NO: 587343
uaugcaugugugcauuaua

SEQ ID NO: 785375 - RNA, 19 nt, Artificial Sequence
  Description of Artificial Sequence: Synthetic oligonucleotide
  Antisense strand to SEQ ID NO: 785374
uauaaugcacacaugcaua

SEQ ID NO: 785376 - RNA, 19 nt, Artificial Sequence
  Description of Artificial Sequence: Synthetic oligonucleotide
  Sense strand starting at position 169 of SEQ ID NO: 587343
gcaugugugcauuauauuc

SEQ ID NO: 785377 - RNA, 19 nt, Artificial Sequence
  Description of Artificial Sequence: Synthetic oligonucleotide
  Antisense strand to SEQ ID NO: 785376
gaauauaaugcacacaugc

SEQ ID NO: 785378 - RNA, 19 nt, Artificial Sequence
  Description of Artificial Sequence: Synthetic oligonucleotide
  Sense strand starting at position 205 of SEQ ID NO: 587343
agacaaguaguccagcauu

SEQ ID NO: 785379 - RNA, 19 nt, Artificial Sequence
  Description of Artificial Sequence: Synthetic oligonucleotide
  Antisense strand to SEQ ID NO: 785378
aaugcuggacuacuugucu

SEQ ID NO: 785380 - RNA, 19 nt, Artificial Sequence
  Description of Artificial Sequence: Synthetic oligonucleotide
  Sense strand starting at position 208 of SEQ ID NO: 587343
caaguaguccagcauuguu

SEQ ID NO: 785381 - RNA, 19 nt, Artificial Sequence
  Description of Artificial Sequence: Synthetic oligonucleotide
  Antisense strand to SEQ ID NO: 785380
aacaaugcuggacuacuug

SEQ ID NO: 785382 - RNA, 19 nt, Artificial Sequence
  Description of Artificial Sequence: Synthetic oligonucleotide
  Sense strand starting at position 229 of SEQ ID NO: 587343
gcaucuugcuuucucaaga

SEQ ID NO: 785383 - RNA, 19 nt, Artificial Sequence
  Description of Artificial Sequence: Synthetic oligonucleotide
  Antisense strand to SEQ ID NO: 785382
ucuugagaaagcaagaugc

SEQ ID NO: 785384 - RNA, 19 nt, Artificial Sequence
  Description of Artificial Sequence: Synthetic oligonucleotide
  Sense strand starting at position 436 of SEQ ID NO: 587343
ccauguguugcuuagaauc

SEQ ID NO: 785385 - RNA, 19 nt, Artificial Sequence
  Description of Artificial Sequence: Synthetic oligonucleotide
  Antisense strand to SEQ ID NO: 785384
gauucuaagcaacacaugg

SEQ ID NO: 785386 - RNA, 19 nt, Artificial Sequence
  Description of Artificial Sequence: Synthetic oligonucleotide
  Sense strand starting at position 720 of SEQ ID NO: 587343
ucuguaaauggauguuaau

SEQ ID NO: 785387 - RNA, 19 nt, Artificial Sequence
  Description of Artificial Sequence: Synthetic oligonucleotide
  Antisense strand to SEQ ID NO: 785386
auuaacauccauuuacaga

SEQ ID NO: 785388 - RNA, 19 nt, Artificial Sequence
  Description of Artificial Sequence: Synthetic oligonucleotide
  Sense strand starting at position 805 of SEQ ID NO: 587343
uagggaugaugacaaugau

SEQ ID NO: 785389 - RNA, 19 nt, Artificial Sequence
  Description of Artificial Sequence: Synthetic oligonucleotide
  Antisense strand to SEQ ID NO: 785388
aucauugucaucaucccua

SEQ ID NO: 785390 - RNA, 19 nt, Artificial Sequence
  Description of Artificial Sequence: Synthetic oligonucleotide
  Sense strand starting at position 814 of SEQ ID NO: 587343
ugacaaugaugacuguaca

SEQ ID NO: 785391 - RNA, 19 nt, Artificial Sequence
  Description of Artificial Sequence: Synthetic oligonucleotide
  Antisense strand to SEQ ID NO: 785390
uguacagucaucauuguca

SEQ ID NO: 785392 - RNA, 19 nt, Artificial Sequence
  Description of Artificial Sequence: Synthetic oligonucleotide
  Sense strand starting at position 881 of SEQ ID NO: 587343
aauguuaugguguguaaau

SEQ ID NO: 785393 - RNA, 19 nt, Artificial Sequence
  Description of Artificial Sequence: Synthetic oligonucleotide
  Antisense strand to SEQ ID NO: 785392
auuuacacaccauaacauu

SEQ ID NO: 785394 - RNA, 19 nt, Artificial Sequence
  Description of Artificial Sequence: Synthetic oligonucleotide
  Sense strand starting at position 882 of SEQ ID NO: 587343
auguuaugguguguaaauu

SEQ ID NO: 785395 - RNA, 19 nt, Artificial Sequence
  Description of Artificial Sequence: Synthetic oligonucleotide
  Antisense strand to SEQ ID NO: 785394
aauuuacacaccauaacau

SEQ ID NO: 785396 - RNA, 19 nt, Artificial Sequence
  Description of Artificial Sequence: Synthetic oligonucleotide
  Sense strand starting at position 883 of SEQ ID NO: 587343
uguuaugguguguaaauua

SEQ ID NO: 785397 - RNA, 19 nt, Artificial Sequence
  Description of Artificial Sequence: Synthetic oligonucleotide
  Antisense strand to SEQ ID NO: 785396
uaauuuacacaccauaaca

SEQ ID NO: 785398 - RNA, 19 nt, Artificial Sequence
  Description of Artificial Sequence: Synthetic oligonucleotide
  Sense strand starting at position 960 of SEQ ID NO: 587343
auacuaugucaagaagcau

SEQ ID NO: 785399 - RNA, 19 nt, Artificial Sequence
  Description of Artificial Sequence: Synthetic oligonucleotide
  Antisense strand to SEQ ID NO: 785398
augcuucuugacauaguau

SEQ ID NO: 785400 - RNA, 19 nt, Artificial Sequence
  Description of Artificial Sequence: Synthetic oligonucleotide
  Sense strand starting at position 1278 of SEQ ID NO: 587343
agcuaugagcacuauagau

SEQ ID NO: 785401 - RNA, 19 nt, Artificial Sequence
  Description of Artificial Sequence: Synthetic oligonucleotide
  Antisense strand to SEQ ID NO: 785400
aucuauagugcucauagcu

SEQ ID NO: 785402 - RNA, 19 nt, Artificial Sequence
  Description of Artificial Sequence: Synthetic oligonucleotide
  Sense strand starting at position 1307 of SEQ ID NO: 587343
uugacuguaguuuauaaac

SEQ ID NO: 785403 - RNA, 19 nt, Artificial Sequence
  Description of Artificial Sequence: Synthetic oligonucleotide
  Antisense strand to SEQ ID NO: 785402
guuuauaaacuacagucaa

SEQ ID NO: 785404 - RNA, 19 nt, Artificial Sequence
  Description of Artificial Sequence: Synthetic oligonucleotide
  Sense strand starting at position 1360 of SEQ ID NO: 587343
cacaauguagcugaaugau

SEQ ID NO: 785405 - RNA, 19 nt, Artificial Sequence
  Description of Artificial Sequence: Synthetic oligonucleotide
  Antisense strand to SEQ ID NO: 785404
aucauucagcuacauugug

SEQ ID NO: 785406 - RNA, 19 nt, Artificial Sequence
  Description of Artificial Sequence: Synthetic oligonucleotide
  Sense strand starting at position 1368 of SEQ ID NO: 587343
agcugaaugaugggaacuu

SEQ ID NO: 785407 - RNA, 19 nt, Artificial Sequence
  Description of Artificial Sequence: Synthetic oligonucleotide
  Antisense strand to SEQ ID NO: 785406
aaguucccaucauucagcu

SEQ ID NO: 785408 - RNA, 19 nt, Artificial Sequence
  Description of Artificial Sequence: Synthetic oligonucleotide
  Sense strand starting at position 1395 of SEQ ID NO: 587343
ugugucauaucacugcuua

SEQ ID NO: 785409 - RNA, 19 nt, Artificial Sequence
  Description of Artificial Sequence: Synthetic oligonucleotide
  Antisense strand to SEQ ID NO: 785408
uaagcagugauaugacaca

SEQ ID NO: 785410 - RNA, 19 nt, Artificial Sequence
  Description of Artificial Sequence: Synthetic oligonucleotide
  Sense strand starting at position 1461 of SEQ ID NO: 587343
aacauaaguggauguuuau

SEQ ID NO: 785411 - RNA, 19 nt, Artificial Sequence
  Description of Artificial Sequence: Synthetic oligonucleotide
  Antisense strand to SEQ ID NO: 785410
auaaacauccacuuauguu

SEQ ID NO: 785412 - RNA, 19 nt, Artificial Sequence
  Description of Artificial Sequence: Synthetic oligonucleotide
  Sense strand starting at position 1474 of SEQ ID NO: 587343
guuuauggauucuuacaga

SEQ ID NO: 785413 - RNA, 19 nt, Artificial Sequence
  Description of Artificial Sequence: Synthetic oligonucleotide
  Antisense strand to SEQ ID NO: 785412
ucuguaagaauccauaaac

SEQ ID NO: 785414 - RNA, 19 nt, Artificial Sequence
  Description of Artificial Sequence: Synthetic oligonucleotide
  Sense strand starting at position 2024 of SEQ ID NO: 587343
aguuacauaucacuaguca

SEQ ID NO: 785415 - RNA, 19 nt, Artificial Sequence
  Description of Artificial Sequence: Synthetic oligonucleotide
  Antisense strand to SEQ ID NO: 785414
ugacuagugauauguaacu

SEQ ID NO: 785416 - RNA, 19 nt, Artificial Sequence
  Description of Artificial Sequence: Synthetic oligonucleotide
  Sense strand starting at position 2048 of SEQ ID NO: 587343
ggucacaauggauguucua

SEQ ID NO: 785417 - RNA, 19 nt, Artificial Sequence
  Description of Artificial Sequence: Synthetic oligonucleotide
  Antisense strand to SEQ ID NO: 785416
uagaacauccauugugacc

SEQ ID NO: 785418 - RNA, 19 nt, Artificial Sequence
  Description of Artificial Sequence: Synthetic oligonucleotide
  Sense strand starting at position 2163 of SEQ ID NO: 587343
guaaguuuaagguggcuuu

SEQ ID NO: 785419 - RNA, 19 nt, Artificial Sequence
  Description of Artificial Sequence: Synthetic oligonucleotide
  Antisense strand to SEQ ID NO: 785418
aaagccaccuuaaacuuac

SEQ ID NO: 785420 - RNA, 19 nt, Artificial Sequence
  Description of Artificial Sequence: Synthetic oligonucleotide
  Sense strand starting at position 2208 of SEQ ID NO: 587343
ggguuuauguggaagaaug

SEQ ID NO: 785421 - RNA, 19 nt, Artificial Sequence
  Description of Artificial Sequence: Synthetic oligonucleotide
  Antisense strand to SEQ ID NO: 785420
cauucuuccacauaaaccc

SEQ ID NO: 785422 - RNA, 19 nt, Artificial Sequence
  Description of Artificial Sequence: Synthetic oligonucleotide
  Sense strand starting at position 2731 of SEQ ID NO: 587343
uuuaauguuuagucaacag

SEQ ID NO: 785423 - RNA, 19 nt, Artificial Sequence
  Description of Artificial Sequence: Synthetic oligonucleotide
  Antisense strand to SEQ ID NO: 785422
cuguugacuaaacauuaaa

SEQ ID NO: 785424 - RNA, 19 nt, Artificial Sequence
  Description of Artificial Sequence: Synthetic oligonucleotide
  Sense strand starting at position 2800 of SEQ ID NO: 587343
uggcauuagagguaaguca

SEQ ID NO: 785425 - RNA, 19 nt, Artificial Sequence
  Description of Artificial Sequence: Synthetic oligonucleotide
  Antisense strand to SEQ ID NO: 785424
ugacuuaccucuaaugcca

SEQ ID NO: 785426 - RNA, 19 nt, Artificial Sequence
  Description of Artificial Sequence: Synthetic oligonucleotide
  Sense strand starting at position 2919 of SEQ ID NO: 587343
cacggugaggcuuacuuau

SEQ ID NO: 785427 - RNA, 19 nt, Artificial Sequence
  Description of Artificial Sequence: Synthetic oligonucleotide
  Antisense strand to SEQ ID NO: 785426
auaaguaagccucaccgug

SEQ ID NO: 785428 - RNA, 19 nt, Artificial Sequence
  Description of Artificial Sequence: Synthetic oligonucleotide
  Sense strand starting at position 2921 of SEQ ID NO: 587343
cggugaggcuuacuuauug

SEQ ID NO: 785429 - RNA, 19 nt, Artificial Sequence
  Description of Artificial Sequence: Synthetic oligonucleotide
  Antisense strand to SEQ ID NO: 785428
caauaaguaagccucaccg

SEQ ID NO: 785430 - RNA, 19 nt, Artificial Sequence
  Description of Artificial Sequence: Synthetic oligonucleotide
  Sense strand starting at position 2939 of SEQ ID NO: 587343
gugccuguugucuucugau

SEQ ID NO: 785431 - RNA, 19 nt, Artificial Sequence
  Description of Artificial Sequence: Synthetic oligonucleotide
  Antisense strand to SEQ ID NO: 785430
aucagaagacaacaggcac

SEQ ID NO: 785432 - RNA, 19 nt, Artificial Sequence
  Description of Artificial Sequence: Synthetic oligonucleotide
  Sense strand starting at position 2971 of SEQ ID NO: 587343
aguaaagcauuugugucau

SEQ ID NO: 785433 - RNA, 19 nt, Artificial Sequence
  Description of Artificial Sequence: Synthetic oligonucleotide
  Antisense strand to SEQ ID NO: 785432
augacacaaaugcuuuacu

SEQ ID NO: 785434 - RNA, 19 nt, Artificial Sequence
  Description of Artificial Sequence: Synthetic oligonucleotide
  Sense strand starting at position 3100 of SEQ ID NO: 587343
acaguuguggcuuacauaa

SEQ ID NO: 785435 - RNA, 19 nt, Artificial Sequence
  Description of Artificial Sequence: Synthetic oligonucleotide
  Antisense strand to SEQ ID NO: 785434
uuauguaagccacaacugu

SEQ ID NO: 785436 - RNA, 19 nt, Artificial Sequence
  Description of Artificial Sequence: Synthetic oligonucleotide
  Sense strand starting at position 3301 of SEQ ID NO: 587343
gccuuuacacaauggguga

SEQ ID NO: 785437 - RNA, 19 nt, Artificial Sequence
  Description of Artificial Sequence: Synthetic oligonucleotide
  Antisense strand to SEQ ID NO: 785436
ucacccauuguguaaaggc

SEQ ID NO: 785438 - RNA, 19 nt, Artificial Sequence
  Description of Artificial Sequence: Synthetic oligonucleotide
  Sense strand starting at position 3305 of SEQ ID NO: 587343
uuacacaaugggugacuua

SEQ ID NO: 785439 - RNA, 19 nt, Artificial Sequence
  Description of Artificial Sequence: Synthetic oligonucleotide
  Antisense strand to SEQ ID NO: 785438
uaagucacccauuguguaa

SEQ ID NO: 785440 - RNA, 19 nt, Artificial Sequence
  Description of Artificial Sequence: Synthetic oligonucleotide
  Sense strand starting at position 3308 of SEQ ID NO: 587343
cacaaugggugacuuacaa

SEQ ID NO: 785441 - RNA, 19 nt, Artificial Sequence
  Description of Artificial Sequence: Synthetic oligonucleotide
  Antisense strand to SEQ ID NO: 785440
uuguaagucacccauugug

SEQ ID NO: 785442 - RNA, 19 nt, Artificial Sequence
  Description of Artificial Sequence: Synthetic oligonucleotide
  Sense strand starting at position 3426 of SEQ ID NO: 587343
guagaagaguaucugugau

SEQ ID NO: 785443 - RNA, 19 nt, Artificial Sequence
  Description of Artificial Sequence: Synthetic oligonucleotide
  Antisense strand to SEQ ID NO: 785442
aucacagauacucuucuac

SEQ ID NO: 785444 - RNA, 19 nt, Artificial Sequence
  Description of Artificial Sequence: Synthetic oligonucleotide
  Sense strand starting at position 3430 of SEQ ID NO: 587343
aagaguaucugugauuuag

SEQ ID NO: 785445 - RNA, 19 nt, Artificial Sequence
  Description of Artificial Sequence: Synthetic oligonucleotide
  Antisense strand to SEQ ID NO: 785444
cuaaaucacagauacucuu

SEQ ID NO: 785446 - RNA, 19 nt, Artificial Sequence
  Description of Artificial Sequence: Synthetic oligonucleotide
  Sense strand starting at position 3860 of SEQ ID NO: 587343
aagggaggaucguuugaac

SEQ ID NO: 785447 - RNA, 19 nt, Artificial Sequence
  Description of Artificial Sequence: Synthetic oligonucleotide
  Antisense strand to SEQ ID NO: 785446
guucaaacgauccucccuu

SEQ ID NO: 785448 - RNA, 19 nt, Artificial Sequence
  Description of Artificial Sequence: Synthetic oligonucleotide
  Sense strand starting at position 33 of SEQ ID NO: 587344
augaaagguucuccaucuu

SEQ ID NO: 785449 - RNA, 19 nt, Artificial Sequence
  Description of Artificial Sequence: Synthetic oligonucleotide
  Antisense strand to SEQ ID NO: 785448
aagauggagaaccuuucau

SEQ ID NO: 785450 - RNA, 19 nt, Artificial Sequence
  Description of Artificial Sequence: Synthetic oligonucleotide
  Sense strand starting at position 266 of SEQ ID NO: 587344
acggcaguagcauaaauua

SEQ ID NO: 785451 - RNA, 19 nt, Artificial Sequence
  Description of Artificial Sequence: Synthetic oligonucleotide
  Antisense strand to SEQ ID NO: 785450
uaauuuaugcuacugccgu

SEQ ID NO: 785452 - RNA, 19 nt, Artificial Sequence
  Description of Artificial Sequence: Synthetic oligonucleotide
  Sense strand starting at position 278 of SEQ ID NO: 587344
uaaauuagccuuuggguua

SEQ ID NO: 785453 - RNA, 19 nt, Artificial Sequence
  Description of Artificial Sequence: Synthetic oligonucleotide
  Antisense strand to SEQ ID NO: 785452
uaacccaaaggcuaauuua

SEQ ID NO: 785454 - RNA, 19 nt, Artificial Sequence
  Description of Artificial Sequence: Synthetic oligonucleotide
  Sense strand starting at position 389 of SEQ ID NO: 587344
ucugaaaucugcucaaaug

SEQ ID NO: 785455 - RNA, 19 nt, Artificial Sequence
  Description of Artificial Sequence: Synthetic oligonucleotide
  Antisense strand to SEQ ID NO: 785454
cauuugagcagauuucaga

SEQ ID NO: 785456 - RNA, 19 nt, Artificial Sequence
  Description of Artificial Sequence: Synthetic oligonucleotide
  Sense strand starting at position 390 of SEQ ID NO: 587344
cugaaaucugcucaaaugu

SEQ ID NO: 785457 - RNA, 19 nt, Artificial Sequence
  Description of Artificial Sequence: Synthetic oligonucleotide
  Antisense strand to SEQ ID NO: 785456
acauuugagcagauuucag

SEQ ID NO: 785458 - RNA, 19 nt, Artificial Sequence
  Description of Artificial Sequence: Synthetic oligonucleotide
  Sense strand starting at position 398 of SEQ ID NO: 587344
ugcucaaauguguaacagu

SEQ ID NO: 785459 - RNA, 19 nt, Artificial Sequence
  Description of Artificial Sequence: Synthetic oligonucleotide
  Antisense strand to SEQ ID NO: 785458
acuguuacacauuugagca

SEQ ID NO: 785460 - RNA, 19 nt, Artificial Sequence
  Description of Artificial Sequence: Synthetic oligonucleotide
  Sense strand starting at position 421 of SEQ ID NO: 587344
ucauauuugucugaaagcu

SEQ ID NO: 785461 - RNA, 19 nt, Artificial Sequence
  Description of Artificial Sequence: Synthetic oligonucleotide
  Antisense strand to SEQ ID NO: 785460
agcuuucagacaaauauga

SEQ ID NO: 785462 - RNA, 19 nt, Artificial Sequence
  Description of Artificial Sequence: Synthetic oligonucleotide
  Sense strand starting at position 847 of SEQ ID NO: 587344
ggagcuugucaacauuaca

SEQ ID NO: 785463 - RNA, 19 nt, Artificial Sequence
  Description of Artificial Sequence: Synthetic oligonucleotide
  Antisense strand to SEQ ID NO: 785462
uguaauguugacaagcucc

SEQ ID NO: 785464 - RNA, 19 nt, Artificial Sequence
  Description of Artificial Sequence: Synthetic oligonucleotide
  Sense strand starting at position 850 of SEQ ID NO: 587344
gcuugucaacauuacaagu

SEQ ID NO: 785465 - RNA, 19 nt, Artificial Sequence
  Description of Artificial Sequence: Synthetic oligonucleotide
  Antisense strand to SEQ ID NO: 785464
acuuguaauguugacaagc

SEQ ID NO: 785466 - RNA, 19 nt, Artificial Sequence
  Description of Artificial Sequence: Synthetic oligonucleotide
  Sense strand starting at position 943 of SEQ ID NO: 587344
uuuccaagguguuuggaaa

SEQ ID NO: 785467 - RNA, 19 nt, Artificial Sequence
  Description of Artificial Sequence: Synthetic oligonucleotide
  Antisense strand to SEQ ID NO: 785466
uuuccaaacaccuuggaaa

SEQ ID NO: 785468 - RNA, 19 nt, Artificial Sequence
  Description of Artificial Sequence: Synthetic oligonucleotide
  Sense strand starting at position 965 of SEQ ID NO: 587344
ggugaugguuuacuucaga

SEQ ID NO: 785469 - RNA, 19 nt, Artificial Sequence
  Description of Artificial Sequence: Synthetic oligonucleotide
  Antisense strand to SEQ ID NO: 785468
ucugaaguaaaccaucacc

SEQ ID NO: 785470 - RNA, 19 nt, Artificial Sequence
  Description of Artificial Sequence: Synthetic oligonucleotide
  Sense strand starting at position 1087 of SEQ ID NO: 587344
ggauuugagucccacauaa

SEQ ID NO: 785471 - RNA, 19 nt, Artificial Sequence
  Description of Artificial Sequence: Synthetic oligonucleotide
  Antisense strand to SEQ ID NO: 785470
uuaugugggacucaaaucc

SEQ ID NO: 785472 - RNA, 19 nt, Artificial Sequence
  Description of Artificial Sequence: Synthetic oligonucleotide
  Sense strand starting at position 1198 of SEQ ID NO: 587344
acgagcuacggugaagauu

SEQ ID NO: 785473 - RNA, 19 nt, Artificial Sequence
  Description of Artificial Sequence: Synthetic oligonucleotide
  Antisense strand to SEQ ID NO: 785472
aaucuucaccguagcucgu

SEQ ID NO: 785474 - RNA, 19 nt, Artificial Sequence
  Description of Artificial Sequence: Synthetic oligonucleotide
  Sense strand starting at position 2267 of SEQ ID NO: 587344
guguaagagccuggaaaga

SEQ ID NO: 785475 - RNA, 19 nt, Artificial Sequence
  Description of Artificial Sequence: Synthetic oligonucleotide
  Antisense strand to SEQ ID NO: 785474
ucuuuccaggcucuuacac

SEQ ID NO: 785476 - RNA, 19 nt, Artificial Sequence
  Description of Artificial Sequence: Synthetic oligonucleotide
  Sense strand starting at position 2428 of SEQ ID NO: 587344
cgcauauggccauaugcua

SEQ ID NO: 785477 - RNA, 19 nt, Artificial Sequence
  Description of Artificial Sequence: Synthetic oligonucleotide
  Antisense strand to SEQ ID NO: 785476
uagcauauggccauaugcg

SEQ ID NO: 785478 - RNA, 19 nt, Artificial Sequence
  Description of Artificial Sequence: Synthetic oligonucleotide
  Sense strand starting at position 2464 of SEQ ID NO: 587344
ucuaguuucccaggagagu

SEQ ID NO: 785479 - RNA, 19 nt, Artificial Sequence
  Description of Artificial Sequence: Synthetic oligonucleotide
  Antisense strand to SEQ ID NO: 785478
acucuccugggaaacuaga

SEQ ID NO: 785480 - RNA, 19 nt, Artificial Sequence
  Description of Artificial Sequence: Synthetic oligonucleotide
  Sense strand starting at position 2465 of SEQ ID NO: 587344
cuaguuucccaggagagug

SEQ ID NO: 785481 - RNA, 19 nt, Artificial Sequence
  Description of Artificial Sequence: Synthetic oligonucleotide
  Antisense strand to SEQ ID NO: 785480
cacucuccugggaaacuag

SEQ ID NO: 785482 - RNA, 19 nt, Artificial Sequence
  Description of Artificial Sequence: Synthetic oligonucleotide
  Sense strand starting at position 2484 of SEQ ID NO: 587344
gaacuaaggguagguauua

SEQ ID NO: 785483 - RNA, 19 nt, Artificial Sequence
  Description of Artificial Sequence: Synthetic oligonucleotide
  Antisense strand to SEQ ID NO: 785482
uaauaccuacccuuaguuc

SEQ ID NO: 785484 - RNA, 19 nt, Artificial Sequence
  Description of Artificial Sequence: Synthetic oligonucleotide
  Sense strand starting at position 2560 of SEQ ID NO: 587344
acggaaagucagugccaaa

SEQ ID NO: 785485 - RNA, 19 nt, Artificial Sequence
  Description of Artificial Sequence: Synthetic oligonucleotide
  Antisense strand to SEQ ID NO: 785484
uuuggcacugacuuuccgu

SEQ ID NO: 785486 - RNA, 19 nt, Artificial Sequence
  Description of Artificial Sequence: Synthetic oligonucleotide
  Sense strand starting at position 2585 of SEQ ID NO: 587344
agcugugguguggauucaa

SEQ ID NO: 785487 - RNA, 19 nt, Artificial Sequence
  Description of Artificial Sequence: Synthetic oligonucleotide
  Antisense strand to SEQ ID NO: 785486
uugaauccacaccacagcu

SEQ ID NO: 785488 - RNA, 19 nt, Artificial Sequence
  Description of Artificial Sequence: Synthetic oligonucleotide
  Sense strand starting at position 2633 of SEQ ID NO: 587344
auuacaacgcauuguaaca

SEQ ID NO: 785489 - RNA, 19 nt, Artificial Sequence
  Description of Artificial Sequence: Synthetic oligonucleotide
  Antisense strand to SEQ ID NO: 785488
uguuacaaugcguuguaau

SEQ ID NO: 785490 - RNA, 19 nt, Artificial Sequence
  Description of Artificial Sequence: Synthetic oligonucleotide
  Sense strand starting at position 2696 of SEQ ID NO: 587344
ugguaauuggagcgucaag

SEQ ID NO: 785491 - RNA, 19 nt, Artificial Sequence
  Description of Artificial Sequence: Synthetic oligonucleotide
  Antisense strand to SEQ ID NO: 785490
cuugacgcuccaauuacca

SEQ ID NO: 785492 - RNA, 19 nt, Artificial Sequence
  Description of Artificial Sequence: Synthetic oligonucleotide
  Sense strand starting at position 2714 of SEQ ID NO: 587344
gaaagaguucguggucgau

SEQ ID NO: 785493 - RNA, 19 nt, Artificial Sequence
  Description of Artificial Sequence: Synthetic oligonucleotide
  Antisense strand to SEQ ID NO: 785492
aucgaccacgaacucuuuc

SEQ ID NO: 785494 - RNA, 19 nt, Artificial Sequence
  Description of Artificial Sequence: Synthetic oligonucleotide
  Sense strand starting at position 2720 of SEQ ID NO: 587344
guucguggucgaucucacu

SEQ ID NO: 785495 - RNA, 19 nt, Artificial Sequence
  Description of Artificial Sequence: Synthetic oligonucleotide
  Antisense strand to SEQ ID NO: 785494
agugagaucgaccacgaac

SEQ ID NO: 785496 - RNA, 19 nt, Artificial Sequence
  Description of Artificial Sequence: Synthetic oligonucleotide
  Sense strand starting at position 2801 of SEQ ID NO: 587344
agcaaugcugaccacauau

SEQ ID NO: 785497 - RNA, 19 nt, Artificial Sequence
  Description of Artificial Sequence: Synthetic oligonucleotide
  Antisense strand to SEQ ID NO: 785496
auauguggucagcauugcu

SEQ ID NO: 785498 - RNA, 19 nt, Artificial Sequence
  Description of Artificial Sequence: Synthetic oligonucleotide
  Sense strand starting at position 2835 of SEQ ID NO: 587344
agauaucugcauugcuaga

SEQ ID NO: 785499 - RNA, 19 nt, Artificial Sequence
  Description of Artificial Sequence: Synthetic oligonucleotide
  Antisense strand to SEQ ID NO: 785498
ucuagcaaugcagauaucu

SEQ ID NO: 785500 - RNA, 19 nt, Artificial Sequence
  Description of Artificial Sequence: Synthetic oligonucleotide
  Sense strand starting at position 2837 of SEQ ID NO: 587344
auaucugcauugcuagaau

SEQ ID NO: 785501 - RNA, 19 nt, Artificial Sequence
  Description of Artificial Sequence: Synthetic oligonucleotide
  Antisense strand to SEQ ID NO: 785500
auucuagcaaugcagauau

SEQ ID NO: 785502 - RNA, 19 nt, Artificial Sequence
  Description of Artificial Sequence: Synthetic oligonucleotide
  Sense strand starting at position 2840 of SEQ ID NO: 587344
ucugcauugcuagaaugaa

SEQ ID NO: 785503 - RNA, 19 nt, Artificial Sequence
  Description of Artificial Sequence: Synthetic oligonucleotide
  Antisense strand to SEQ ID NO: 785502
uucauucuagcaaugcaga

SEQ ID NO: 785504 - RNA, 19 nt, Artificial Sequence
  Description of Artificial Sequence: Synthetic oligonucleotide
  Sense strand starting at position 2995 of SEQ ID NO: 587344
ugagacuggcucugucuaa

SEQ ID NO: 785505 - RNA, 19 nt, Artificial Sequence
  Description of Artificial Sequence: Synthetic oligonucleotide
  Antisense strand to SEQ ID NO: 785504
uuagacagagccagucuca

SEQ ID NO: 785506 - RNA, 19 nt, Artificial Sequence
  Description of Artificial Sequence: Synthetic oligonucleotide
  Sense strand starting at position 3361 of SEQ ID NO: 587344
ugcucccugugucuugaaa

SEQ ID NO: 785507 - RNA, 19 nt, Artificial Sequence
  Description of Artificial Sequence: Synthetic oligonucleotide
  Antisense strand to SEQ ID NO: 785506
uuucaagacacagggagca

SEQ ID NO: 785508 - RNA, 19 nt, Artificial Sequence
  Description of Artificial Sequence: Synthetic oligonucleotide
  Sense strand starting at position 3463 of SEQ ID NO: 587344
guauuaacuguaggaagaa

SEQ ID NO: 785509 - RNA, 19 nt, Artificial Sequence
  Description of Artificial Sequence: Synthetic oligonucleotide
  Antisense strand to SEQ ID NO: 785508
uucuuccuacaguuaauac

SEQ ID NO: 785510 - RNA, 19 nt, Artificial Sequence
  Description of Artificial Sequence: Synthetic oligonucleotide
  Sense strand starting at position 3501 of SEQ ID NO: 587344
uuaauuacgcuuugggaac

SEQ ID NO: 785511 - RNA, 19 nt, Artificial Sequence
  Description of Artificial Sequence: Synthetic oligonucleotide
  Antisense strand to SEQ ID NO: 785510
guucccaaagcguaauuaa

SEQ ID NO: 785512 - RNA, 19 nt, Artificial Sequence
  Description of Artificial Sequence: Synthetic oligonucleotide
  Sense strand starting at position 3593 of SEQ ID NO: 587344
ucaguaauggcacauuaua

SEQ ID NO: 785513 - RNA, 19 nt, Artificial Sequence
  Description of Artificial Sequence: Synthetic oligonucleotide
  Antisense strand to SEQ ID NO: 785512
uauaaugugccauuacuga

SEQ ID NO: 785514 - RNA, 19 nt, Artificial Sequence
  Description of Artificial Sequence: Synthetic oligonucleotide
  Sense strand starting at position 3670 of SEQ ID NO: 587344
ccuccucgcaucgauagaa

SEQ ID NO: 785515 - RNA, 19 nt, Artificial Sequence
  Description of Artificial Sequence: Synthetic oligonucleotide
  Antisense strand to SEQ ID NO: 785514
uucuaucgaugcgaggagg

SEQ ID NO: 785516 - RNA, 19 nt, Artificial Sequence
  Description of Artificial Sequence: Synthetic oligonucleotide
  Sense strand starting at position 3747 of SEQ ID NO: 587344
uacagugagucaucuugaa

SEQ ID NO: 785517 - RNA, 19 nt, Artificial Sequence
  Description of Artificial Sequence: Synthetic oligonucleotide
  Antisense strand to SEQ ID NO: 785516
uucaagaugacucacugua

SEQ ID NO: 785518 - RNA, 19 nt, Artificial Sequence
  Description of Artificial Sequence: Synthetic oligonucleotide
  Sense strand starting at position 3759 of SEQ ID NO: 587344
ucuugaaguaaacgggaau

SEQ ID NO: 785519 - RNA, 19 nt, Artificial Sequence
  Description of Artificial Sequence: Synthetic oligonucleotide
  Antisense strand to SEQ ID NO: 785518
auucccguuuacuucaaga

SEQ ID NO: 785520 - RNA, 19 nt, Artificial Sequence
  Description of Artificial Sequence: Synthetic oligonucleotide
  Sense strand starting at position 3770 of SEQ ID NO: 587344
acgggaaugccauguuuau

SEQ ID NO: 785521 - RNA, 19 nt, Artificial Sequence
  Description of Artificial Sequence: Synthetic oligonucleotide
  Antisense strand to SEQ ID NO: 785520
auaaacauggcauucccgu

SEQ ID NO: 785522 - RNA, 19 nt, Artificial Sequence
  Description of Artificial Sequence: Synthetic oligonucleotide
  Sense strand starting at position 3821 of SEQ ID NO: 587344
agcucaguuguacaacaga

SEQ ID NO: 785523 - RNA, 19 nt, Artificial Sequence
  Description of Artificial Sequence: Synthetic oligonucleotide
  Antisense strand to SEQ ID NO: 785522
ucuguuguacaacugagcu

SEQ ID NO: 785524 - RNA, 19 nt, Artificial Sequence
  Description of Artificial Sequence: Synthetic oligonucleotide
  Sense strand starting at position 3934 of SEQ ID NO: 587344
ggcuccagcuaccuuuaau

SEQ ID NO: 785525 - RNA, 19 nt, Artificial Sequence
  Description of Artificial Sequence: Synthetic oligonucleotide
  Antisense strand to SEQ ID NO: 785524
auuaaagguagcuggagcc

SEQ ID NO: 785526 - RNA, 19 nt, Artificial Sequence
  Description of Artificial Sequence: Synthetic oligonucleotide
  Sense strand starting at position 3971 of SEQ ID NO: 587344
gcgcauuagaagcagagaa

SEQ ID NO: 785527 - RNA, 19 nt, Artificial Sequence
  Description of Artificial Sequence: Synthetic oligonucleotide
  Antisense strand to SEQ ID NO: 785526
uucucugcuucuaaugcgc

SEQ ID NO: 785528 - RNA, 19 nt, Artificial Sequence
  Description of Artificial Sequence: Synthetic oligonucleotide
  Sense strand starting at position 30 of SEQ ID NO: 587345
uccucuauuuguguaaguu

SEQ ID NO: 785529 - RNA, 19 nt, Artificial Sequence
  Description of Artificial Sequence: Synthetic oligonucleotide
  Antisense strand to SEQ ID NO: 785528
aacuuacacaaauagagga

SEQ ID NO: 785530 - RNA, 19 nt, Artificial Sequence
  Description of Artificial Sequence: Synthetic oligonucleotide
  Sense strand starting at position 40 of SEQ ID NO: 587345
guguaaguugccuaguauu

SEQ ID NO: 785531 - RNA, 19 nt, Artificial Sequence
  Description of Artificial Sequence: Synthetic oligonucleotide
  Antisense strand to SEQ ID NO: 785530
aauacuaggcaacuuacac

SEQ ID NO: 785532 - RNA, 19 nt, Artificial Sequence
  Description of Artificial Sequence: Synthetic oligonucleotide
  Sense strand starting at position 48 of SEQ ID NO: 587345
ugccuaguauuauucugua

SEQ ID NO: 785533 - RNA, 19 nt, Artificial Sequence
  Description of Artificial Sequence: Synthetic oligonucleotide
  Antisense strand to SEQ ID NO: 785532
uacagaauaauacuaggca

SEQ ID NO: 785534 - RNA, 19 nt, Artificial Sequence
  Description of Artificial Sequence: Synthetic oligonucleotide
  Sense strand starting at position 146 of SEQ ID NO: 587345
guaucugggauuggaugau

SEQ ID NO: 785535 - RNA, 19 nt, Artificial Sequence
  Description of Artificial Sequence: Synthetic oligonucleotide
  Antisense strand to SEQ ID NO: 785534
aucauccaaucccagauac

SEQ ID NO: 785536 - RNA, 19 nt, Artificial Sequence
  Description of Artificial Sequence: Synthetic oligonucleotide
  Sense strand starting at position 168 of SEQ ID NO: 587345
auccaauaguugucuggga

SEQ ID NO: 785537 - RNA, 19 nt, Artificial Sequence
  Description of Artificial Sequence: Synthetic oligonucleotide
  Antisense strand to SEQ ID NO: 785536
ucccagacaacuauuggau

SEQ ID NO: 785538 - RNA, 19 nt, Artificial Sequence
  Description of Artificial Sequence: Synthetic oligonucleotide
  Sense strand starting at position 169 of SEQ ID NO: 587345
uccaauaguugucugggaa

SEQ ID NO: 785539 - RNA, 19 nt, Artificial Sequence
  Description of Artificial Sequence: Synthetic oligonucleotide
  Antisense strand to SEQ ID NO: 785538
uucccagacaacuauugga

SEQ ID NO: 785540 - RNA, 19 nt, Artificial Sequence
  Description of Artificial Sequence: Synthetic oligonucleotide
  Sense strand starting at position 170 of SEQ ID NO: 587345
ccaauaguugucugggaag

SEQ ID NO: 785541 - RNA, 19 nt, Artificial Sequence
  Description of Artificial Sequence: Synthetic oligonucleotide
  Antisense strand to SEQ ID NO: 785540
cuucccagacaacuauugg

SEQ ID NO: 785542 - RNA, 19 nt, Artificial Sequence
  Description of Artificial Sequence: Synthetic oligonucleotide
  Sense strand starting at position 172 of SEQ ID NO: 587345
aauaguugucugggaagaa

SEQ ID NO: 785543 - RNA, 19 nt, Artificial Sequence
  Description of Artificial Sequence: Synthetic oligonucleotide
  Antisense strand to SEQ ID NO: 785542
uucuucccagacaacuauu

SEQ ID NO: 785544 - RNA, 19 nt, Artificial Sequence
  Description of Artificial Sequence: Synthetic oligonucleotide
  Sense strand starting at position 182 of SEQ ID NO: 587345
ugggaagaauccuauauaa

SEQ ID NO: 785545 - RNA, 19 nt, Artificial Sequence
  Description of Artificial Sequence: Synthetic oligonucleotide
  Antisense strand to SEQ ID NO: 785544
uuauauaggauucuuccca

SEQ ID NO: 785546 - RNA, 19 nt, Artificial Sequence
  Description of Artificial Sequence: Synthetic oligonucleotide
  Sense strand starting at position 195 of SEQ ID NO: 587345
auauaauuagacugaugcu

SEQ ID NO: 785547 - RNA, 19 nt, Artificial Sequence
  Description of Artificial Sequence: Synthetic oligonucleotide
  Antisense strand to SEQ ID NO: 785546
agcaucagucuaauuauau

SEQ ID NO: 785548 - RNA, 19 nt, Artificial Sequence
  Description of Artificial Sequence: Synthetic oligonucleotide
  Sense strand starting at position 201 of SEQ ID NO: 587345
uuagacugaugcuugcuaa

SEQ ID NO: 785549 - RNA, 19 nt, Artificial Sequence
  Description of Artificial Sequence: Synthetic oligonucleotide
  Antisense strand to SEQ ID NO: 785548
uuagcaagcaucagucuaa

SEQ ID NO: 785550 - RNA, 19 nt, Artificial Sequence
  Description of Artificial Sequence: Synthetic oligonucleotide
  Sense strand starting at position 325 of SEQ ID NO: 587345
cuuauuuacugucagagaa

SEQ ID NO: 785551 - RNA, 19 nt, Artificial Sequence
  Description of Artificial Sequence: Synthetic oligonucleotide
  Antisense strand to SEQ ID NO: 785550
uucucugacaguaaauaag

SEQ ID NO: 785552 - RNA, 19 nt, Artificial Sequence
  Description of Artificial Sequence: Synthetic oligonucleotide
  Sense strand starting at position 545 of SEQ ID NO: 587345
ugcuucugauauucuuuga

SEQ ID NO: 785553 - RNA, 19 nt, Artificial Sequence
  Description of Artificial Sequence: Synthetic oligonucleotide
  Antisense strand to SEQ ID NO: 785552
ucaaagaauaucagaagca

SEQ ID NO: 785554 - RNA, 19 nt, Artificial Sequence
  Description of Artificial Sequence: Synthetic oligonucleotide
  Sense strand starting at position 621 of SEQ ID NO: 587345
auuauauaucaguggaucu

SEQ ID NO: 785555 - RNA, 19 nt, Artificial Sequence
  Description of Artificial Sequence: Synthetic oligonucleotide
  Antisense strand to SEQ ID NO: 785554
agauccacugauauauaau

SEQ ID NO: 785556 - RNA, 19 nt, Artificial Sequence
  Description of Artificial Sequence: Synthetic oligonucleotide
  Sense strand starting at position 669 of SEQ ID NO: 587345
acacuuggcuaugucuaga

SEQ ID NO: 785557 - RNA, 19 nt, Artificial Sequence
  Description of Artificial Sequence: Synthetic oligonucleotide
  Antisense strand to SEQ ID NO: 785556
ucuagacauagccaagugu

SEQ ID NO: 785558 - RNA, 19 nt, Artificial Sequence
  Description of Artificial Sequence: Synthetic oligonucleotide
  Sense strand starting at position 729 of SEQ ID NO: 587345
uggcaucuaguauguacaa

SEQ ID NO: 785559 - RNA, 19 nt, Artificial Sequence
  Description of Artificial Sequence: Synthetic oligonucleotide
  Antisense strand to SEQ ID NO: 785558
uuguacauacuagaugcca

SEQ ID NO: 785560 - RNA, 19 nt, Artificial Sequence
  Description of Artificial Sequence: Synthetic oligonucleotide
  Sense strand starting at position 730 of SEQ ID NO: 587345
ggcaucuaguauguacaaa

SEQ ID NO: 785561 - RNA, 19 nt, Artificial Sequence
  Description of Artificial Sequence: Synthetic oligonucleotide
  Antisense strand to SEQ ID NO: 785560
uuuguacauacuagaugcc

SEQ ID NO: 785562 - RNA, 19 nt, Artificial Sequence
  Description of Artificial Sequence: Synthetic oligonucleotide
  Sense strand starting at position 905 of SEQ ID NO: 587345
gguguuacaucagucuucu

SEQ ID NO: 785563 - RNA, 19 nt, Artificial Sequence
  Description of Artificial Sequence: Synthetic oligonucleotide
  Antisense strand to SEQ ID NO: 785562
agaagacugauguaacacc

SEQ ID NO: 785564 - RNA, 19 nt, Artificial Sequence
  Description of Artificial Sequence: Synthetic oligonucleotide
  Sense strand starting at position 1069 of SEQ ID NO: 587345
aaaggaacgcuuugaaaga

SEQ ID NO: 785565 - RNA, 19 nt, Artificial Sequence
  Description of Artificial Sequence: Synthetic oligonucleotide
  Antisense strand to SEQ ID NO: 785564
ucuuucaaagcguuccuuu

SEQ ID NO: 785566 - RNA, 19 nt, Artificial Sequence
  Description of Artificial Sequence: Synthetic oligonucleotide
  Sense strand starting at position 1126 of SEQ ID NO: 587345
ccuuaaugacuguggacuu

SEQ ID NO: 785567 - RNA, 19 nt, Artificial Sequence
  Description of Artificial Sequence: Synthetic oligonucleotide
  Antisense strand to SEQ ID NO: 785566
aaguccacagucauuaagg

SEQ ID NO: 785568 - RNA, 19 nt, Artificial Sequence
  Description of Artificial Sequence: Synthetic oligonucleotide
  Sense strand starting at position 1138 of SEQ ID NO: 587345
uggacuucuucugucagca

SEQ ID NO: 785569 - RNA, 19 nt, Artificial Sequence
  Description of Artificial Sequence: Synthetic oligonucleotide
  Antisense strand to SEQ ID NO: 785568
ugcugacagaagaagucca

SEQ ID NO: 785570 - RNA, 19 nt, Artificial Sequence
  Description of Artificial Sequence: Synthetic oligonucleotide
  Sense strand starting at position 1206 of SEQ ID NO: 587345
uuccaagucuggcuagagu

SEQ ID NO: 785571 - RNA, 19 nt, Artificial Sequence
  Description of Artificial Sequence: Synthetic oligonucleotide
  Antisense strand to SEQ ID NO: 785570
acucuagccagacuuggaa

SEQ ID NO: 785572 - RNA, 19 nt, Artificial Sequence
  Description of Artificial Sequence: Synthetic oligonucleotide
  Sense strand starting at position 1298 of SEQ ID NO: 587345
uguguaucauaacuacaga

SEQ ID NO: 785573 - RNA, 19 nt, Artificial Sequence
  Description of Artificial Sequence: Synthetic oligonucleotide
  Antisense strand to SEQ ID NO: 785572
ucuguaguuaugauacaca

SEQ ID NO: 785574 - RNA, 19 nt, Artificial Sequence
  Description of Artificial Sequence: Synthetic oligonucleotide
  Sense strand starting at position 1386 of SEQ ID NO: 587345
uagaacuguugccugaaca

SEQ ID NO: 785575 - RNA, 19 nt, Artificial Sequence
  Description of Artificial Sequence: Synthetic oligonucleotide
  Antisense strand to SEQ ID NO: 785574
uguucaggcaacaguucua

SEQ ID NO: 785576 - RNA, 19 nt, Artificial Sequence
  Description of Artificial Sequence: Synthetic oligonucleotide
  Sense strand starting at position 1387 of SEQ ID NO: 587345
agaacuguugccugaacac

SEQ ID NO: 785577 - RNA, 19 nt, Artificial Sequence
  Description of Artificial Sequence: Synthetic oligonucleotide
  Antisense strand to SEQ ID NO: 785576
guguucaggcaacaguucu

SEQ ID NO: 785578 - RNA, 19 nt, Artificial Sequence
  Description of Artificial Sequence: Synthetic oligonucleotide
  Sense strand starting at position 1457 of SEQ ID NO: 587345
gugugaaauggcgggaauu

SEQ ID NO: 785579 - RNA, 19 nt, Artificial Sequence
  Description of Artificial Sequence: Synthetic oligonucleotide
  Antisense strand to SEQ ID NO: 785578
aauucccgccauuucacac

SEQ ID NO: 785580 - RNA, 19 nt, Artificial Sequence
  Description of Artificial Sequence: Synthetic oligonucleotide
  Sense strand starting at position 1524 of SEQ ID NO: 587345
uugguauauuagcucaguu

SEQ ID NO: 785581 - RNA, 19 nt, Artificial Sequence
  Description of Artificial Sequence: Synthetic oligonucleotide
  Antisense strand to SEQ ID NO: 785580
aacugagcuaauauaccaa

SEQ ID NO: 785582 - RNA, 19 nt, Artificial Sequence
  Description of Artificial Sequence: Synthetic oligonucleotide
  Sense strand starting at position 1526 of SEQ ID NO: 587345
gguauauuagcucaguuua

SEQ ID NO: 785583 - RNA, 19 nt, Artificial Sequence
  Description of Artificial Sequence: Synthetic oligonucleotide
  Antisense strand to SEQ ID NO: 785582
uaaacugagcuaauauacc

SEQ ID NO: 785584 - RNA, 19 nt, Artificial Sequence
  Description of Artificial Sequence: Synthetic oligonucleotide
  Sense strand starting at position 1609 of SEQ ID NO: 587345
uugcaaugccuguaaauca

SEQ ID NO: 785585 - RNA, 19 nt, Artificial Sequence
  Description of Artificial Sequence: Synthetic oligonucleotide
  Antisense strand to SEQ ID NO: 785584
ugauuuacaggcauugcaa

SEQ ID NO: 785586 - RNA, 19 nt, Artificial Sequence
  Description of Artificial Sequence: Synthetic oligonucleotide
  Sense strand starting at position 1626 of SEQ ID NO: 587345
cauguuugucugcaaguga

SEQ ID NO: 785587 - RNA, 19 nt, Artificial Sequence
  Description of Artificial Sequence: Synthetic oligonucleotide
  Antisense strand to SEQ ID NO: 785586
ucacuugcagacaaacaug

SEQ ID NO: 785588 - RNA, 19 nt, Artificial Sequence
  Description of Artificial Sequence: Synthetic oligonucleotide
  Sense strand starting at position 1637 of SEQ ID NO: 587345
gcaagugagacugaaguuu

SEQ ID NO: 785589 - RNA, 19 nt, Artificial Sequence
  Description of Artificial Sequence: Synthetic oligonucleotide
  Antisense strand to SEQ ID NO: 785588
aaacuucagucucacuugc

SEQ ID NO: 785590 - RNA, 19 nt, Artificial Sequence
  Description of Artificial Sequence: Synthetic oligonucleotide
  Sense strand starting at position 2019 of SEQ ID NO: 587345
agcugugguuguccaacaa

SEQ ID NO: 785591 - RNA, 19 nt, Artificial Sequence
  Description of Artificial Sequence: Synthetic oligonucleotide
  Antisense strand to SEQ ID NO: 785590
uuguuggacaaccacagcu

SEQ ID NO: 785592 - RNA, 19 nt, Artificial Sequence
  Description of Artificial Sequence: Synthetic oligonucleotide
  Sense strand starting at position 2023 of SEQ ID NO: 587345
gugguuguccaacaaagua

SEQ ID NO: 785593 - RNA, 19 nt, Artificial Sequence
  Description of Artificial Sequence: Synthetic oligonucleotide
  Antisense strand to SEQ ID NO: 785592
uacuuuguuggacaaccac

SEQ ID NO: 785594 - RNA, 19 nt, Artificial Sequence
  Description of Artificial Sequence: Synthetic oligonucleotide
  Sense strand starting at position 2048 of SEQ ID NO: 587345
agcccauacucccuaggaa

SEQ ID NO: 785595 - RNA, 19 nt, Artificial Sequence
  Description of Artificial Sequence: Synthetic oligonucleotide
  Antisense strand to SEQ ID NO: 785594
uuccuagggaguaugggcu

SEQ ID NO: 785596 - RNA, 19 nt, Artificial Sequence
  Description of Artificial Sequence: Synthetic oligonucleotide
  Sense strand starting at position 2051 of SEQ ID NO: 587345
ccauacucccuaggaagau

SEQ ID NO: 785597 - RNA, 19 nt, Artificial Sequence
  Description of Artificial Sequence: Synthetic oligonucleotide
  Antisense strand to SEQ ID NO: 785596
aucuuccuagggaguaugg

SEQ ID NO: 785598 - RNA, 19 nt, Artificial Sequence
  Description of Artificial Sequence: Synthetic oligonucleotide
  Sense strand starting at position 3140 of SEQ ID NO: 587345
gggauucccgcagguaaca

SEQ ID NO: 785599 - RNA, 19 nt, Artificial Sequence
  Description of Artificial Sequence: Synthetic oligonucleotide
  Antisense strand to SEQ ID NO: 785598
uguuaccugcgggaauccc

SEQ ID NO: 785600 - RNA, 19 nt, Artificial Sequence
  Description of Artificial Sequence: Synthetic oligonucleotide
  Sense strand starting at position 3180 of SEQ ID NO: 587345
uuuagagacacguggcuua

SEQ ID NO: 785601 - RNA, 19 nt, Artificial Sequence
  Description of Artificial Sequence: Synthetic oligonucleotide
  Antisense strand to SEQ ID NO: 785600
uaagccacgugucucuaaa

SEQ ID NO: 785602 - RNA, 19 nt, Artificial Sequence
  Description of Artificial Sequence: Synthetic oligonucleotide
  Sense strand starting at position 3191 of SEQ ID NO: 587345
guggcuuaaccuggguaca

SEQ ID NO: 785603 - RNA, 19 nt, Artificial Sequence
  Description of Artificial Sequence: Synthetic oligonucleotide
  Antisense strand to SEQ ID NO: 785602
uguacccagguuaagccac

SEQ ID NO: 785604 - RNA, 19 nt, Artificial Sequence
  Description of Artificial Sequence: Synthetic oligonucleotide
  Sense strand starting at position 3243 of SEQ ID NO: 587345
ugggucggcgagucuuauu

SEQ ID NO: 785605 - RNA, 19 nt, Artificial Sequence
  Description of Artificial Sequence: Synthetic oligonucleotide
  Antisense strand to SEQ ID NO: 785604
aauaagacucgccgaccca

SEQ ID NO: 785606 - RNA, 19 nt, Artificial Sequence
  Description of Artificial Sequence: Synthetic oligonucleotide
  Sense strand starting at position 3248 of SEQ ID NO: 587345
cggcgagucuuauuuguuu

SEQ ID NO: 785607 - RNA, 19 nt, Artificial Sequence
  Description of Artificial Sequence: Synthetic oligonucleotide
  Antisense strand to SEQ ID NO: 785606
aaacaaauaagacucgccg

SEQ ID NO: 785608 - RNA, 19 nt, Artificial Sequence
  Description of Artificial Sequence: Synthetic oligonucleotide
  Sense strand starting at position 151 of SEQ ID NO: 587346
aaaggaacgcuuugaaaga

SEQ ID NO: 785609 - RNA, 19 nt, Artificial Sequence
  Description of Artificial Sequence: Synthetic oligonucleotide
  Antisense strand to SEQ ID NO: 785608
ucuuucaaagcguuccuuu

SEQ ID NO: 785610 - RNA, 19 nt, Artificial Sequence
  Description of Artificial Sequence: Synthetic oligonucleotide
  Sense strand starting at position 208 of SEQ ID NO: 587346
ccuuaaugacuguggacuu

SEQ ID NO: 785611 - RNA, 19 nt, Artificial Sequence
  Description of Artificial Sequence: Synthetic oligonucleotide
  Antisense strand to SEQ ID NO: 785610
aaguccacagucauuaagg

SEQ ID NO: 785612 - RNA, 19 nt, Artificial Sequence
  Description of Artificial Sequence: Synthetic oligonucleotide
  Sense strand starting at position 220 of SEQ ID NO: 587346
uggacuucuucugucagca

SEQ ID NO: 785613 - RNA, 19 nt, Artificial Sequence
  Description of Artificial Sequence: Synthetic oligonucleotide
  Antisense strand to SEQ ID NO: 785612
ugcugacagaagaagucca

SEQ ID NO: 785614 - RNA, 19 nt, Artificial Sequence
  Description of Artificial Sequence: Synthetic oligonucleotide
  Sense strand starting at position 288 of SEQ ID NO: 587346
uuccaagucuggcuagagu

SEQ ID NO: 785615 - RNA, 19 nt, Artificial Sequence
  Description of Artificial Sequence: Synthetic oligonucleotide
  Antisense strand to SEQ ID NO: 785614
acucuagccagacuuggaa

SEQ ID NO: 785616 - RNA, 19 nt, Artificial Sequence
  Description of Artificial Sequence: Synthetic oligonucleotide
  Sense strand starting at position 380 of SEQ ID NO: 587346
uguguaucauaacuacaga

SEQ ID NO: 785617 - RNA, 19 nt, Artificial Sequence
  Description of Artificial Sequence: Synthetic oligonucleotide
  Antisense strand to SEQ ID NO: 785616
ucuguaguuaugauacaca

SEQ ID NO: 785618 - RNA, 19 nt, Artificial Sequence
  Description of Artificial Sequence: Synthetic oligonucleotide
  Sense strand starting at position 468 of SEQ ID NO: 587346
uagaacuguugccugaaca

SEQ ID NO: 785619 - RNA, 19 nt, Artificial Sequence
  Description of Artificial Sequence: Synthetic oligonucleotide
  Antisense strand to SEQ ID NO: 785618
uguucaggcaacaguucua

SEQ ID NO: 785620 - RNA, 19 nt, Artificial Sequence
  Description of Artificial Sequence: Synthetic oligonucleotide
  Sense strand starting at position 469 of SEQ ID NO: 587346
agaacuguugccugaacac

SEQ ID NO: 785621 - RNA, 19 nt, Artificial Sequence
  Description of Artificial Sequence: Synthetic oligonucleotide
  Antisense strand to SEQ ID NO: 785620
guguucaggcaacaguucu

SEQ ID NO: 785622 - RNA, 19 nt, Artificial Sequence
  Description of Artificial Sequence: Synthetic oligonucleotide
  Sense strand starting at position 539 of SEQ ID NO: 587346
gugugaaauggcgggaauu

SEQ ID NO: 785623 - RNA, 19 nt, Artificial Sequence
  Description of Artificial Sequence: Synthetic oligonucleotide
  Antisense strand to SEQ ID NO: 785622
aauucccgccauuucacac

SEQ ID NO: 785624 - RNA, 19 nt, Artificial Sequence
  Description of Artificial Sequence: Synthetic oligonucleotide
  Sense strand starting at position 606 of SEQ ID NO: 587346
uugguauauuagcucaguu

SEQ ID NO: 785625 - RNA, 19 nt, Artificial Sequence
  Description of Artificial Sequence: Synthetic oligonucleotide
  Antisense strand to SEQ ID NO: 785624
aacugagcuaauauaccaa

SEQ ID NO: 785626 - RNA, 19 nt, Artificial Sequence
  Description of Artificial Sequence: Synthetic oligonucleotide
  Sense strand starting at position 608 of SEQ ID NO: 587346
gguauauuagcucaguuua

SEQ ID NO: 785627 - RNA, 19 nt, Artificial Sequence
  Description of Artificial Sequence: Synthetic oligonucleotide
  Antisense strand to SEQ ID NO: 785626
uaaacugagcuaauauacc

SEQ ID NO: 785628 - RNA, 19 nt, Artificial Sequence
  Description of Artificial Sequence: Synthetic oligonucleotide
  Sense strand starting at position 689 of SEQ ID NO: 587346
ucuugcaaugccuguaaau

SEQ ID NO: 785629 - RNA, 19 nt, Artificial Sequence
  Description of Artificial Sequence: Synthetic oligonucleotide
  Antisense strand to SEQ ID NO: 785628
auuuacaggcauugcaaga

SEQ ID NO: 785630 - RNA, 19 nt, Artificial Sequence
  Description of Artificial Sequence: Synthetic oligonucleotide
  Sense strand starting at position 691 of SEQ ID NO: 587346
uugcaaugccuguaaauca

SEQ ID NO: 785631 - RNA, 19 nt, Artificial Sequence
  Description of Artificial Sequence: Synthetic oligonucleotide
  Antisense strand to SEQ ID NO: 785630
ugauuuacaggcauugcaa

SEQ ID NO: 785632 - RNA, 19 nt, Artificial Sequence
  Description of Artificial Sequence: Synthetic oligonucleotide
  Sense strand starting at position 708 of SEQ ID NO: 587346
cauguuugucugcaaguga

SEQ ID NO: 785633 - RNA, 19 nt, Artificial Sequence
  Description of Artificial Sequence: Synthetic oligonucleotide
  Antisense strand to SEQ ID NO: 785632
ucacuugcagacaaacaug

SEQ ID NO: 785634 - RNA, 19 nt, Artificial Sequence
  Description of Artificial Sequence: Synthetic oligonucleotide
  Sense strand starting at position 719 of SEQ ID NO: 587346
gcaagugagacugaaguuu

SEQ ID NO: 785635 - RNA, 19 nt, Artificial Sequence
  Description of Artificial Sequence: Synthetic oligonucleotide
  Antisense strand to SEQ ID NO: 785634
aaacuucagucucacuugc

SEQ ID NO: 785636 - RNA, 19 nt, Artificial Sequence
  Description of Artificial Sequence: Synthetic oligonucleotide
  Sense strand starting at position 727 of SEQ ID NO: 587346
gacugaaguuuauaauaug

SEQ ID NO: 785637 - RNA, 19 nt, Artificial Sequence
  Description of Artificial Sequence: Synthetic oligonucleotide
  Antisense strand to SEQ ID NO: 785636
cauauuauaaacuucaguc

SEQ ID NO: 785638 - RNA, 19 nt, Artificial Sequence
  Description of Artificial Sequence: Synthetic oligonucleotide
  Sense strand starting at position 1101 of SEQ ID NO: 587346
agcugugguuguccaacaa

SEQ ID NO: 785639 - RNA, 19 nt, Artificial Sequence
  Description of Artificial Sequence: Synthetic oligonucleotide
  Antisense strand to SEQ ID NO: 785638
uuguuggacaaccacagcu

SEQ ID NO: 785640 - RNA, 19 nt, Artificial Sequence
  Description of Artificial Sequence: Synthetic oligonucleotide
  Sense strand starting at position 1105 of SEQ ID NO: 587346
gugguuguccaacaaagua

SEQ ID NO: 785641 - RNA, 19 nt, Artificial Sequence
  Description of Artificial Sequence: Synthetic oligonucleotide
  Antisense strand to SEQ ID NO: 785640
uacuuuguuggacaaccac

SEQ ID NO: 785642 - RNA, 19 nt, Artificial Sequence
  Description of Artificial Sequence: Synthetic oligonucleotide
  Sense strand starting at position 1130 of SEQ ID NO: 587346
agcccauacucccuaggaa

SEQ ID NO: 785643 - RNA, 19 nt, Artificial Sequence
  Description of Artificial Sequence: Synthetic oligonucleotide
  Antisense strand to SEQ ID NO: 785642
uuccuagggaguaugggcu

SEQ ID NO: 785644 - RNA, 19 nt, Artificial Sequence
  Description of Artificial Sequence: Synthetic oligonucleotide
  Sense strand starting at position 1133 of SEQ ID NO: 587346
ccauacucccuaggaagau

SEQ ID NO: 785645 - RNA, 19 nt, Artificial Sequence
  Description of Artificial Sequence: Synthetic oligonucleotide
  Antisense strand to SEQ ID NO: 785644
aucuuccuagggaguaugg

SEQ ID NO: 785646 - RNA, 19 nt, Artificial Sequence
  Description of Artificial Sequence: Synthetic oligonucleotide
  Sense strand starting at position 2222 of SEQ ID NO: 587346
gggauucccgcagguaaca

SEQ ID NO: 785647 - RNA, 19 nt, Artificial Sequence
  Description of Artificial Sequence: Synthetic oligonucleotide
  Antisense strand to SEQ ID NO: 785646
uguuaccugcgggaauccc

SEQ ID NO: 785648 - RNA, 19 nt, Artificial Sequence
  Description of Artificial Sequence: Synthetic oligonucleotide
  Sense strand starting at position 2262 of SEQ ID NO: 587346
uuuagagacacguggcuua

SEQ ID NO: 785649 - RNA, 19 nt, Artificial Sequence
  Description of Artificial Sequence: Synthetic oligonucleotide
  Antisense strand to SEQ ID NO: 785648
uaagccacgugucucuaaa

SEQ ID NO: 785650 - RNA, 19 nt, Artificial Sequence
  Description of Artificial Sequence: Synthetic oligonucleotide
  Sense strand starting at position 2273 of SEQ ID NO: 587346
guggcuuaaccuggguaca

SEQ ID NO: 785651 - RNA, 19 nt, Artificial Sequence
  Description of Artificial Sequence: Synthetic oligonucleotide
  Antisense strand to SEQ ID NO: 785650
uguacccagguuaagccac

SEQ ID NO: 785652 - RNA, 19 nt, Artificial Sequence
  Description of Artificial Sequence: Synthetic oligonucleotide
  Sense strand starting at position 2325 of SEQ ID NO: 587346
ugggucggcgagucuuauu

SEQ ID NO: 785653 - RNA, 19 nt, Artificial Sequence
  Description of Artificial Sequence: Synthetic oligonucleotide
  Antisense strand to SEQ ID NO: 785652
aauaagacucgccgaccca

SEQ ID NO: 785654 - RNA, 19 nt, Artificial Sequence
  Description of Artificial Sequence: Synthetic oligonucleotide
  Sense strand starting at position 2330 of SEQ ID NO: 587346
cggcgagucuuauuuguuu

SEQ ID NO: 785655 - RNA, 19 nt, Artificial Sequence
  Description of Artificial Sequence: Synthetic oligonucleotide
  Antisense strand to SEQ ID NO: 785654
aaacaaauaagacucgccg

SEQ ID NO: 785656 - RNA, 19 nt, Artificial Sequence
  Description of Artificial Sequence: Synthetic oligonucleotide
  Sense strand starting at position 3115 of SEQ ID NO: 587346
cuuacuaagcucuggcaca

SEQ ID NO: 785657 - RNA, 19 nt, Artificial Sequence
  Description of Artificial Sequence: Synthetic oligonucleotide
  Antisense strand to SEQ ID NO: 785656
ugugccagagcuuaguaag

SEQ ID NO: 785658 - RNA, 19 nt, Artificial Sequence
  Description of Artificial Sequence: Synthetic oligonucleotide
  Sense strand starting at position 3285 of SEQ ID NO: 587346
uugaguacucuuugccucu

SEQ ID NO: 785659 - RNA, 19 nt, Artificial Sequence
  Description of Artificial Sequence: Synthetic oligonucleotide
  Antisense strand to SEQ ID NO: 785658
agaggcaaagaguacucaa

SEQ ID NO: 785660 - RNA, 19 nt, Artificial Sequence
  Description of Artificial Sequence: Synthetic oligonucleotide
  Sense strand starting at position 3287 of SEQ ID NO: 587346
gaguacucuuugccucuga

SEQ ID NO: 785661 - RNA, 19 nt, Artificial Sequence
  Description of Artificial Sequence: Synthetic oligonucleotide
  Antisense strand to SEQ ID NO: 785660
ucagaggcaaagaguacuc

SEQ ID NO: 785662 - RNA, 19 nt, Artificial Sequence
  Description of Artificial Sequence: Synthetic oligonucleotide
  Sense strand starting at position 3291 of SEQ ID NO: 587346
acucuuugccucugaugga

SEQ ID NO: 785663 - RNA, 19 nt, Artificial Sequence
  Description of Artificial Sequence: Synthetic oligonucleotide
  Antisense strand to SEQ ID NO: 785662
uccaucagaggcaaagagu

SEQ ID NO: 785664 - RNA, 19 nt, Artificial Sequence
  Description of Artificial Sequence: Synthetic oligonucleotide
  Sense strand starting at position 3295 of SEQ ID NO: 587346
uuugccucugauggauauu

SEQ ID NO: 785665 - RNA, 19 nt, Artificial Sequence
  Description of Artificial Sequence: Synthetic oligonucleotide
  Antisense strand to SEQ ID NO: 785664
aauauccaucagaggcaaa

SEQ ID NO: 785666 - RNA, 19 nt, Artificial Sequence
  Description of Artificial Sequence: Synthetic oligonucleotide
  Sense strand starting at position 3298 of SEQ ID NO: 587346
gccucugauggauauuauc

SEQ ID NO: 785667 - RNA, 19 nt, Artificial Sequence
  Description of Artificial Sequence: Synthetic oligonucleotide
  Antisense strand to SEQ ID NO: 785666
gauaauauccaucagaggc

SEQ ID NO: 785668 - RNA, 19 nt, Artificial Sequence
  Description of Artificial Sequence: Synthetic oligonucleotide
  Sense strand starting at position 3343 of SEQ ID NO: 587346
uggccuguccauuguagaa

SEQ ID NO: 785669 - RNA, 19 nt, Artificial Sequence
  Description of Artificial Sequence: Synthetic oligonucleotide
  Antisense strand to SEQ ID NO: 785668
uucuacaauggacaggcca

SEQ ID NO: 785670 - RNA, 19 nt, Artificial Sequence
  Description of Artificial Sequence: Synthetic oligonucleotide
  Sense strand starting at position 3425 of SEQ ID NO: 587346
auauauaacuggcuggaau

SEQ ID NO: 785671 - RNA, 19 nt, Artificial Sequence
  Description of Artificial Sequence: Synthetic oligonucleotide
  Antisense strand to SEQ ID NO: 785670
auuccagccaguuauauau

SEQ ID NO: 785672 - RNA, 19 nt, Artificial Sequence
  Description of Artificial Sequence: Synthetic oligonucleotide
  Sense strand starting at position 3482 of SEQ ID NO: 587346
gagguugugacggauggua

SEQ ID NO: 785673 - RNA, 19 nt, Artificial Sequence
  Description of Artificial Sequence: Synthetic oligonucleotide
  Antisense strand to SEQ ID NO: 785672
uaccauccgucacaaccuc

SEQ ID NO: 785674 - RNA, 19 nt, Artificial Sequence
  Description of Artificial Sequence: Synthetic oligonucleotide
  Sense strand starting at position 3484 of SEQ ID NO: 587346
gguugugacggaugguaau

SEQ ID NO: 785675 - RNA, 19 nt, Artificial Sequence
  Description of Artificial Sequence: Synthetic oligonucleotide
  Antisense strand to SEQ ID NO: 785674
auuaccauccgucacaacc

SEQ ID NO: 785676 - RNA, 19 nt, Artificial Sequence
  Description of Artificial Sequence: Synthetic oligonucleotide
  Sense strand starting at position 3495 of SEQ ID NO: 587346
augguaauacugugaaguc

SEQ ID NO: 785677 - RNA, 19 nt, Artificial Sequence
  Description of Artificial Sequence: Synthetic oligonucleotide
  Antisense strand to SEQ ID NO: 785676
gacuucacaguauuaccau

SEQ ID NO: 785678 - RNA, 19 nt, Artificial Sequence
  Description of Artificial Sequence: Synthetic oligonucleotide
  Sense strand starting at position 3568 of SEQ ID NO: 587346
gugaguccagcugauggau

SEQ ID NO: 785679 - RNA, 19 nt, Artificial Sequence
  Description of Artificial Sequence: Synthetic oligonucleotide
  Antisense strand to SEQ ID NO: 785678
auccaucagcuggacucac

SEQ ID NO: 785680 - RNA, 19 nt, Artificial Sequence
  Description of Artificial Sequence: Synthetic oligonucleotide
  Sense strand starting at position 3574 of SEQ ID NO: 587346
ccagcugauggauguuaaa

SEQ ID NO: 785681 - RNA, 19 nt, Artificial Sequence
  Description of Artificial Sequence: Synthetic oligonucleotide
  Antisense strand to SEQ ID NO: 785680
uuuaacauccaucagcugg

SEQ ID NO: 785682 - RNA, 19 nt, Artificial Sequence
  Description of Artificial Sequence: Synthetic oligonucleotide
  Sense strand starting at position 3811 of SEQ ID NO: 587346
gugucaauggagcauuaaa

SEQ ID NO: 785683 - RNA, 19 nt, Artificial Sequence
  Description of Artificial Sequence: Synthetic oligonucleotide
  Antisense strand to SEQ ID NO: 785682
uuuaaugcuccauugacac

SEQ ID NO: 785684 - RNA, 19 nt, Artificial Sequence
  Description of Artificial Sequence: Synthetic oligonucleotide
  Sense strand starting at position 3875 of SEQ ID NO: 587346
aggucauaugcccaugaaa

SEQ ID NO: 785685 - RNA, 19 nt, Artificial Sequence
  Description of Artificial Sequence: Synthetic oligonucleotide
  Antisense strand to SEQ ID NO: 785684
uuucaugggcauaugaccu

SEQ ID NO: 785686 - RNA, 19 nt, Artificial Sequence
  Description of Artificial Sequence: Synthetic oligonucleotide
  Sense strand starting at position 3877 of SEQ ID NO: 587346
gucauaugcccaugaaacu

SEQ ID NO: 785687 - RNA, 19 nt, Artificial Sequence
  Description of Artificial Sequence: Synthetic oligonucleotide
  Antisense strand to SEQ ID NO: 785686
aguuucaugggcauaugac

SEQ ID NO: 785688 - RNA, 19 nt, Artificial Sequence
  Description of Artificial Sequence: Synthetic oligonucleotide
  Sense strand starting at position 30 of SEQ ID NO: 587347
ggugcaacuucucuuccaa

SEQ ID NO: 785689 - RNA, 19 nt, Artificial Sequence
  Description of Artificial Sequence: Synthetic oligonucleotide
  Antisense strand to SEQ ID NO: 785688
uuggaagagaaguugcacc

SEQ ID NO: 785690 - RNA, 19 nt, Artificial Sequence
  Description of Artificial Sequence: Synthetic oligonucleotide
  Sense strand starting at position 170 of SEQ ID NO: 587347
cgccuaaccaguuggaaac

SEQ ID NO: 785691 - RNA, 19 nt, Artificial Sequence
  Description of Artificial Sequence: Synthetic oligonucleotide
  Antisense strand to SEQ ID NO: 785690
guuuccaacugguuaggcg

SEQ ID NO: 785692 - RNA, 19 nt, Artificial Sequence
  Description of Artificial Sequence: Synthetic oligonucleotide
  Sense strand starting at position 330 of SEQ ID NO: 587347
gccucuguucuccaggaga

SEQ ID NO: 785693 - RNA, 19 nt, Artificial Sequence
  Description of Artificial Sequence: Synthetic oligonucleotide
  Antisense strand to SEQ ID NO: 785692
ucuccuggagaacagaggc

SEQ ID NO: 785694 - RNA, 19 nt, Artificial Sequence
  Description of Artificial Sequence: Synthetic oligonucleotide
  Sense strand starting at position 341 of SEQ ID NO: 587347
ccaggagacguuugacucu

SEQ ID NO: 785695 - RNA, 19 nt, Artificial Sequence
  Description of Artificial Sequence: Synthetic oligonucleotide
  Antisense strand to SEQ ID NO: 785694
agagucaaacgucuccugg

SEQ ID NO: 785696 - RNA, 19 nt, Artificial Sequence
  Description of Artificial Sequence: Synthetic oligonucleotide
  Sense strand starting at position 347 of SEQ ID NO: 587347
gacguuugacucugucuuu

SEQ ID NO: 785697 - RNA, 19 nt, Artificial Sequence
  Description of Artificial Sequence: Synthetic oligonucleotide
  Antisense strand to SEQ ID NO: 785696
aaagacagagucaaacguc

SEQ ID NO: 785698 - RNA, 19 nt, Artificial Sequence
  Description of Artificial Sequence: Synthetic oligonucleotide
  Sense strand starting at position 352 of SEQ ID NO: 587347
uugacucugucuuugggaa

SEQ ID NO: 785699 - RNA, 19 nt, Artificial Sequence
  Description of Artificial Sequence: Synthetic oligonucleotide
  Antisense strand to SEQ ID NO: 785698
uucccaaagacagagucaa

SEQ ID NO: 785700 - RNA, 19 nt, Artificial Sequence
  Description of Artificial Sequence: Synthetic oligonucleotide
  Sense strand starting at position 353 of SEQ ID NO: 587347
ugacucugucuuugggaaa

SEQ ID NO: 785701 - RNA, 19 nt, Artificial Sequence
  Description of Artificial Sequence: Synthetic oligonucleotide
  Antisense strand to SEQ ID NO: 785700
uuucccaaagacagaguca

SEQ ID NO: 785702 - RNA, 19 nt, Artificial Sequence
  Description of Artificial Sequence: Synthetic oligonucleotide
  Sense strand starting at position 835 of SEQ ID NO: 587347
gugccaggucugcauuuga

SEQ ID NO: 785703 - RNA, 19 nt, Artificial Sequence
  Description of Artificial Sequence: Synthetic oligonucleotide
  Antisense strand to SEQ ID NO: 785702
ucaaaugcagaccuggcac

SEQ ID NO: 785704 - RNA, 19 nt, Artificial Sequence
  Description of Artificial Sequence: Synthetic oligonucleotide
  Sense strand starting at position 865 of SEQ ID NO: 587347
ucacuucuccaguggguuu

SEQ ID NO: 785705 - RNA, 19 nt, Artificial Sequence
  Description of Artificial Sequence: Synthetic oligonucleotide
  Antisense strand to SEQ ID NO: 785704
aaacccacuggagaaguga

SEQ ID NO: 785706 - RNA, 19 nt, Artificial Sequence
  Description of Artificial Sequence: Synthetic oligonucleotide
  Sense strand starting at position 1247 of SEQ ID NO: 587347
uucucuuccuguuuaugga

SEQ ID NO: 785707 - RNA, 19 nt, Artificial Sequence
  Description of Artificial Sequence: Synthetic oligonucleotide
  Antisense strand to SEQ ID NO: 785706
uccauaaacaggaagagaa

SEQ ID NO: 785708 - RNA, 19 nt, Artificial Sequence
  Description of Artificial Sequence: Synthetic oligonucleotide
  Sense strand starting at position 1251 of SEQ ID NO: 587347
cuuccuguuuauggauuua

SEQ ID NO: 785709 - RNA, 19 nt, Artificial Sequence
  Description of Artificial Sequence: Synthetic oligonucleotide
  Antisense strand to SEQ ID NO: 785708
uaaauccauaaacaggaag

SEQ ID NO: 785710 - RNA, 19 nt, Artificial Sequence
  Description of Artificial Sequence: Synthetic oligonucleotide
  Sense strand starting at position 1344 of SEQ ID NO: 587347
ccaggaauugcgugggauc

SEQ ID NO: 785711 - RNA, 19 nt, Artificial Sequence
  Description of Artificial Sequence: Synthetic oligonucleotide
  Antisense strand to SEQ ID NO: 785710
gaucccacgcaauuccugg

SEQ ID NO: 785712 - RNA, 19 nt, Artificial Sequence
  Description of Artificial Sequence: Synthetic oligonucleotide
  Sense strand starting at position 1345 of SEQ ID NO: 587347
caggaauugcgugggaucu

SEQ ID NO: 785713 - RNA, 19 nt, Artificial Sequence
  Description of Artificial Sequence: Synthetic oligonucleotide
  Antisense strand to SEQ ID NO: 785712
agaucccacgcaauuccug

SEQ ID NO: 785714 - RNA, 19 nt, Artificial Sequence
  Description of Artificial Sequence: Synthetic oligonucleotide
  Sense strand starting at position 1346 of SEQ ID NO: 587347
aggaauugcgugggaucuu

SEQ ID NO: 785715 - RNA, 19 nt, Artificial Sequence
  Description of Artificial Sequence: Synthetic oligonucleotide
  Antisense strand to SEQ ID NO: 785714
aagaucccacgcaauuccu

SEQ ID NO: 785716 - RNA, 19 nt, Artificial Sequence
  Description of Artificial Sequence: Synthetic oligonucleotide
  Sense strand starting at position 1355 of SEQ ID NO: 587347
gugggaucuugcgcagaaa

SEQ ID NO: 785717 - RNA, 19 nt, Artificial Sequence
  Description of Artificial Sequence: Synthetic oligonucleotide
  Antisense strand to SEQ ID NO: 785716
uuucugcgcaagaucccac

SEQ ID NO: 785718 - RNA, 19 nt, Artificial Sequence
  Description of Artificial Sequence: Synthetic oligonucleotide
  Sense strand starting at position 1356 of SEQ ID NO: 587347
ugggaucuugcgcagaaag

SEQ ID NO: 785719 - RNA, 19 nt, Artificial Sequence
  Description of Artificial Sequence: Synthetic oligonucleotide
  Antisense strand to SEQ ID NO: 785718
cuuucugcgcaagauccca

SEQ ID NO: 785720 - RNA, 19 nt, Artificial Sequence
  Description of Artificial Sequence: Synthetic oligonucleotide
  Sense strand starting at position 1358 of SEQ ID NO: 587347
ggaucuugcgcagaaaguu

SEQ ID NO: 785721 - RNA, 19 nt, Artificial Sequence
  Description of Artificial Sequence: Synthetic oligonucleotide
  Antisense strand to SEQ ID NO: 785720
aacuuucugcgcaagaucc

SEQ ID NO: 785722 - RNA, 19 nt, Artificial Sequence
  Description of Artificial Sequence: Synthetic oligonucleotide
  Sense strand starting at position 1370 of SEQ ID NO: 587347
gaaaguuggccaggcaaau

SEQ ID NO: 785723 - RNA, 19 nt, Artificial Sequence
  Description of Artificial Sequence: Synthetic oligonucleotide
  Antisense strand to SEQ ID NO: 785722
auuugccuggccaacuuuc

SEQ ID NO: 785724 - RNA, 19 nt, Artificial Sequence
  Description of Artificial Sequence: Synthetic oligonucleotide
  Sense strand starting at position 1381 of SEQ ID NO: 587347
aggcaaauccuucgcaaug

SEQ ID NO: 785725 - RNA, 19 nt, Artificial Sequence
  Description of Artificial Sequence: Synthetic oligonucleotide
  Antisense strand to SEQ ID NO: 785724
cauugcgaaggauuugccu

SEQ ID NO: 785726 - RNA, 19 nt, Artificial Sequence
  Description of Artificial Sequence: Synthetic oligonucleotide
  Sense strand starting at position 1382 of SEQ ID NO: 587347
ggcaaauccuucgcaauga

SEQ ID NO: 785727 - RNA, 19 nt, Artificial Sequence
  Description of Artificial Sequence: Synthetic oligonucleotide
  Antisense strand to SEQ ID NO: 785726
ucauugcgaaggauuugcc

SEQ ID NO: 785728 - RNA, 19 nt, Artificial Sequence
  Description of Artificial Sequence: Synthetic oligonucleotide
  Sense strand starting at position 1436 of SEQ ID NO: 587347
cgauuaugucggcaguuug

SEQ ID NO: 785729 - RNA, 19 nt, Artificial Sequence
  Description of Artificial Sequence: Synthetic oligonucleotide
  Antisense strand to SEQ ID NO: 785728
caaacugccgacauaaucg

SEQ ID NO: 785730 - RNA, 19 nt, Artificial Sequence
  Description of Artificial Sequence: Synthetic oligonucleotide
  Sense strand starting at position 1447 of SEQ ID NO: 587347
gcaguuuggcccggagaca

SEQ ID NO: 785731 - RNA, 19 nt, Artificial Sequence
  Description of Artificial Sequence: Synthetic oligonucleotide
  Antisense strand to SEQ ID NO: 785730
ugucuccgggccaaacugc

SEQ ID NO: 785732 - RNA, 19 nt, Artificial Sequence
  Description of Artificial Sequence: Synthetic oligonucleotide
  Sense strand starting at position 2225 of SEQ ID NO: 587347
uggcgaaacgcugcgaauu

SEQ ID NO: 785733 - RNA, 19 nt, Artificial Sequence
  Description of Artificial Sequence: Synthetic oligonucleotide
  Antisense strand to SEQ ID NO: 785732
aauucgcagcguuucgcca

SEQ ID NO: 785734 - RNA, 19 nt, Artificial Sequence
  Description of Artificial Sequence: Synthetic oligonucleotide
  Sense strand starting at position 2397 of SEQ ID NO: 587347
cgccgucgcuuauuucauu

SEQ ID NO: 785735 - RNA, 19 nt, Artificial Sequence
  Description of Artificial Sequence: Synthetic oligonucleotide
  Antisense strand to SEQ ID NO: 785734
aaugaaauaagcgacggcg

SEQ ID NO: 785736 - RNA, 19 nt, Artificial Sequence
  Description of Artificial Sequence: Synthetic oligonucleotide
  Sense strand starting at position 2613 of SEQ ID NO: 587347
cggaaaucgguuuggcaca

SEQ ID NO: 785737 - RNA, 19 nt, Artificial Sequence
  Description of Artificial Sequence: Synthetic oligonucleotide
  Antisense strand to SEQ ID NO: 785736
ugugccaaaccgauuuccg

SEQ ID NO: 785738 - RNA, 19 nt, Artificial Sequence
  Description of Artificial Sequence: Synthetic oligonucleotide
  Sense strand starting at position 3374 of SEQ ID NO: 587347
gcgugaacccgugagcuga

SEQ ID NO: 785739 - RNA, 19 nt, Artificial Sequence
  Description of Artificial Sequence: Synthetic oligonucleotide
  Antisense strand to SEQ ID NO: 785738
ucagcucacggguucacgc

SEQ ID NO: 785740 - RNA, 19 nt, Artificial Sequence
  Description of Artificial Sequence: Synthetic oligonucleotide
  Sense strand starting at position 3541 of SEQ ID NO: 587347
cagagacaugccuguacuc

SEQ ID NO: 785741 - RNA, 19 nt, Artificial Sequence
  Description of Artificial Sequence: Synthetic oligonucleotide
  Antisense strand to SEQ ID NO: 785740
gaguacaggcaugucucug

SEQ ID NO: 785742 - RNA, 19 nt, Artificial Sequence
  Description of Artificial Sequence: Synthetic oligonucleotide
  Sense strand starting at position 3616 of SEQ ID NO: 587347
gcccaaacauggucacuaa

SEQ ID NO: 785743 - RNA, 19 nt, Artificial Sequence
  Description of Artificial Sequence: Synthetic oligonucleotide
  Antisense strand to SEQ ID NO: 785742
uuagugaccauguuugggc

SEQ ID NO: 785744 - RNA, 19 nt, Artificial Sequence
  Description of Artificial Sequence: Synthetic oligonucleotide
  Sense strand starting at position 3703 of SEQ ID NO: 587347
gccugcucacccuagucau

SEQ ID NO: 785745 - RNA, 19 nt, Artificial Sequence
  Description of Artificial Sequence: Synthetic oligonucleotide
  Antisense strand to SEQ ID NO: 785744
augacuagggugagcaggc

SEQ ID NO: 785746 - RNA, 19 nt, Artificial Sequence
  Description of Artificial Sequence: Synthetic oligonucleotide
  Sense strand starting at position 3706 of SEQ ID NO: 587347
ugcucacccuagucauauc

SEQ ID NO: 785747 - RNA, 19 nt, Artificial Sequence
  Description of Artificial Sequence: Synthetic oligonucleotide
  Antisense strand to SEQ ID NO: 785746
gauaugacuagggugagca

SEQ ID NO: 785748 - RNA, 19 nt, Artificial Sequence
  Description of Artificial Sequence: Synthetic oligonucleotide
  Sense strand starting at position 3829 of SEQ ID NO: 587347
ccucucucauccuuagagu

SEQ ID NO: 785749 - RNA, 19 nt, Artificial Sequence
  Description of Artificial Sequence: Synthetic oligonucleotide
  Antisense strand to SEQ ID NO: 785748
acucuaaggaugagagagg

SEQ ID NO: 785750 - RNA, 19 nt, Artificial Sequence
  Description of Artificial Sequence: Synthetic oligonucleotide
  Sense strand starting at position 3835 of SEQ ID NO: 587347
ucauccuuagagugugaca

SEQ ID NO: 785751 - RNA, 19 nt, Artificial Sequence
  Description of Artificial Sequence: Synthetic oligonucleotide
  Antisense strand to SEQ ID NO: 785750
ugucacacucuaaggauga

SEQ ID NO: 785752 - RNA, 19 nt, Artificial Sequence
  Description of Artificial Sequence: Synthetic oligonucleotide
  Sense strand starting at position 3837 of SEQ ID NO: 587347
auccuuagagugugacaga

SEQ ID NO: 785753 - RNA, 19 nt, Artificial Sequence
  Description of Artificial Sequence: Synthetic oligonucleotide
  Antisense strand to SEQ ID NO: 785752
ucugucacacucuaaggau

SEQ ID NO: 785754 - RNA, 19 nt, Artificial Sequence
  Description of Artificial Sequence: Synthetic oligonucleotide
  Sense strand starting at position 3838 of SEQ ID NO: 587347
uccuuagagugugacagaa

SEQ ID NO: 785755 - RNA, 19 nt, Artificial Sequence
  Description of Artificial Sequence: Synthetic oligonucleotide
  Antisense strand to SEQ ID NO: 785754
uucugucacacucuaagga

SEQ ID NO: 785756 - RNA, 19 nt, Artificial Sequence
  Description of Artificial Sequence: Synthetic oligonucleotide
  Sense strand starting at position 3864 of SEQ ID NO: 587347
agagcagagugcuugacau

SEQ ID NO: 785757 - RNA, 19 nt, Artificial Sequence
  Description of Artificial Sequence: Synthetic oligonucleotide
  Antisense strand to SEQ ID NO: 785756
augucaagcacucugcucu

SEQ ID NO: 785758 - RNA, 19 nt, Artificial Sequence
  Description of Artificial Sequence: Synthetic oligonucleotide
  Sense strand starting at position 3870 of SEQ ID NO: 587347
gagugcuugacaugcguua

SEQ ID NO: 785759 - RNA, 19 nt, Artificial Sequence
  Description of Artificial Sequence: Synthetic oligonucleotide
  Antisense strand to SEQ ID NO: 785758
uaacgcaugucaagcacuc

SEQ ID NO: 785760 - RNA, 19 nt, Artificial Sequence
  Description of Artificial Sequence: Synthetic oligonucleotide
  Sense strand starting at position 3871 of SEQ ID NO: 587347
agugcuugacaugcguuau

SEQ ID NO: 785761 - RNA, 19 nt, Artificial Sequence
  Description of Artificial Sequence: Synthetic oligonucleotide
  Antisense strand to SEQ ID NO: 785760
auaacgcaugucaagcacu

SEQ ID NO: 785762 - RNA, 19 nt, Artificial Sequence
  Description of Artificial Sequence: Synthetic oligonucleotide
  Sense strand starting at position 3881 of SEQ ID NO: 587347
augcguuauggcuauuuga

SEQ ID NO: 785763 - RNA, 19 nt, Artificial Sequence
  Description of Artificial Sequence: Synthetic oligonucleotide
  Antisense strand to SEQ ID NO: 785762
ucaaauagccauaacgcau

SEQ ID NO: 785764 - RNA, 19 nt, Artificial Sequence
  Description of Artificial Sequence: Synthetic oligonucleotide
  Sense strand starting at position 3888 of SEQ ID NO: 587347
auggcuauuugauggaauu

SEQ ID NO: 785765 - RNA, 19 nt, Artificial Sequence
  Description of Artificial Sequence: Synthetic oligonucleotide
  Antisense strand to SEQ ID NO: 785764
aauuccaucaaauagccau

SEQ ID NO: 785766 - RNA, 19 nt, Artificial Sequence
  Description of Artificial Sequence: Synthetic oligonucleotide
  Sense strand starting at position 3909 of SEQ ID NO: 587347
ccaucagugucauuauaga

SEQ ID NO: 785767 - RNA, 19 nt, Artificial Sequence
  Description of Artificial Sequence: Synthetic oligonucleotide
  Antisense strand to SEQ ID NO: 785766
ucuauaaugacacugaugg

SEQ ID NO: 785768 - RNA, 19 nt, Artificial Sequence
  Description of Artificial Sequence: Synthetic oligonucleotide
  Sense strand starting at position 24 of SEQ ID NO: 587348
gggcuauucucaggcucau

SEQ ID NO: 785769 - RNA, 19 nt, Artificial Sequence
  Description of Artificial Sequence: Synthetic oligonucleotide
  Antisense strand to SEQ ID NO: 785768
augagccugagaauagccc

SEQ ID NO: 785770 - RNA, 19 nt, Artificial Sequence
  Description of Artificial Sequence: Synthetic oligonucleotide
  Sense strand starting at position 283 of SEQ ID NO: 587348
gccucuuaccaucgucaaa

SEQ ID NO: 785771 - RNA, 19 nt, Artificial Sequence
  Description of Artificial Sequence: Synthetic oligonucleotide
  Antisense strand to SEQ ID NO: 785770
uuugacgaugguaagaggc

SEQ ID NO: 785772 - RNA, 19 nt, Artificial Sequence
  Description of Artificial Sequence: Synthetic oligonucleotide
  Sense strand starting at position 938 of SEQ ID NO: 587348
agcugaagauuccaccuua

SEQ ID NO: 785773 - RNA, 19 nt, Artificial Sequence
  Description of Artificial Sequence: Synthetic oligonucleotide
  Antisense strand to SEQ ID NO: 785772
uaagguggaaucuucagcu

SEQ ID NO: 785774 - RNA, 19 nt, Artificial Sequence
  Description of Artificial Sequence: Synthetic oligonucleotide
  Sense strand starting at position 1372 of SEQ ID NO: 587348
gugauucgcucucaggaga

SEQ ID NO: 785775 - RNA, 19 nt, Artificial Sequence
  Description of Artificial Sequence: Synthetic oligonucleotide
  Antisense strand to SEQ ID NO: 785774
ucuccugagagcgaaucac

SEQ ID NO: 785776 - RNA, 19 nt, Artificial Sequence
  Description of Artificial Sequence: Synthetic oligonucleotide
  Sense strand starting at position 1614 of SEQ ID NO: 587348
gcucucugccguucggaga

SEQ ID NO: 785777 - RNA, 19 nt, Artificial Sequence
  Description of Artificial Sequence: Synthetic oligonucleotide
  Antisense strand to SEQ ID NO: 785776
ucuccgaacggcagagagc

SEQ ID NO: 785778 - RNA, 19 nt, Artificial Sequence
  Description of Artificial Sequence: Synthetic oligonucleotide
  Sense strand starting at position 1749 of SEQ ID NO: 587348
ccgugaccuucacggagau

SEQ ID NO: 785779 - RNA, 19 nt, Artificial Sequence
  Description of Artificial Sequence: Synthetic oligonucleotide
  Antisense strand to SEQ ID NO: 785778
aucuccgugaaggucacgg

SEQ ID NO: 785780 - RNA, 19 nt, Artificial Sequence
  Description of Artificial Sequence: Synthetic oligonucleotide
  Sense strand starting at position 2129 of SEQ ID NO: 587348
uucggguugucguggaaac

SEQ ID NO: 785781 - RNA, 19 nt, Artificial Sequence
  Description of Artificial Sequence: Synthetic oligonucleotide
  Antisense strand to SEQ ID NO: 785780
guuuccacgacaacccgaa

SEQ ID NO: 785782 - RNA, 19 nt, Artificial Sequence
  Description of Artificial Sequence: Synthetic oligonucleotide
  Sense strand starting at position 2130 of SEQ ID NO: 587348
ucggguugucguggaaacu

SEQ ID NO: 785783 - RNA, 19 nt, Artificial Sequence
  Description of Artificial Sequence: Synthetic oligonucleotide
  Antisense strand to SEQ ID NO: 785782
aguuuccacgacaacccga

SEQ ID NO: 785784 - RNA, 19 nt, Artificial Sequence
  Description of Artificial Sequence: Synthetic oligonucleotide
  Sense strand starting at position 2603 of SEQ ID NO: 587348
auaugaucuuguuauguga

SEQ ID NO: 785785 - RNA, 19 nt, Artificial Sequence
  Description of Artificial Sequence: Synthetic oligonucleotide
  Antisense strand to SEQ ID NO: 785784
ucacauaacaagaucauau

SEQ ID NO: 785786 - RNA, 19 nt, Artificial Sequence
  Description of Artificial Sequence: Synthetic oligonucleotide
  Sense strand starting at position 2605 of SEQ ID NO: 587348
augaucuuguuaugugaga

SEQ ID NO: 785787 - RNA, 19 nt, Artificial Sequence
  Description of Artificial Sequence: Synthetic oligonucleotide
  Antisense strand to SEQ ID NO: 785786
ucucacauaacaagaucau

SEQ ID NO: 785788 - RNA, 19 nt, Artificial Sequence
  Description of Artificial Sequence: Synthetic oligonucleotide
  Sense strand starting at position 2606 of SEQ ID NO: 587348
ugaucuuguuaugugagaa

SEQ ID NO: 785789 - RNA, 19 nt, Artificial Sequence
  Description of Artificial Sequence: Synthetic oligonucleotide
  Antisense strand to SEQ ID NO: 785788
uucucacauaacaagauca

SEQ ID NO: 785790 - RNA, 19 nt, Artificial Sequence
  Description of Artificial Sequence: Synthetic oligonucleotide
  Sense strand starting at position 2610 of SEQ ID NO: 587348
cuuguuaugugagaauauu

SEQ ID NO: 785791 - RNA, 19 nt, Artificial Sequence
  Description of Artificial Sequence: Synthetic oligonucleotide
  Antisense strand to SEQ ID NO: 785790
aauauucucacauaacaag

SEQ ID NO: 785792 - RNA, 19 nt, Artificial Sequence
  Description of Artificial Sequence: Synthetic oligonucleotide
  Sense strand starting at position 2924 of SEQ ID NO: 587348
acggaagacucccucucaa

SEQ ID NO: 785793 - RNA, 19 nt, Artificial Sequence
  Description of Artificial Sequence: Synthetic oligonucleotide
  Antisense strand to SEQ ID NO: 785792
uugagagggagucuuccgu

SEQ ID NO: 785794 - RNA, 19 nt, Artificial Sequence
  Description of Artificial Sequence: Synthetic oligonucleotide
  Sense strand starting at position 3070 of SEQ ID NO: 587348
ggagaaacccuguguuaua

SEQ ID NO: 785795 - RNA, 19 nt, Artificial Sequence
  Description of Artificial Sequence: Synthetic oligonucleotide
  Antisense strand to SEQ ID NO: 785794
uauaacacaggguuucucc

SEQ ID NO: 785796 - RNA, 19 nt, Artificial Sequence
  Description of Artificial Sequence: Synthetic oligonucleotide
  Sense strand starting at position 3071 of SEQ ID NO: 587348
gagaaacccuguguuauau

SEQ ID NO: 785797 - RNA, 19 nt, Artificial Sequence
  Description of Artificial Sequence: Synthetic oligonucleotide
  Antisense strand to SEQ ID NO: 785796
auauaacacaggguuucuc

SEQ ID NO: 785798 - RNA, 19 nt, Artificial Sequence
  Description of Artificial Sequence: Synthetic oligonucleotide
  Sense strand starting at position 3073 of SEQ ID NO: 587348
gaaacccuguguuauaugu

SEQ ID NO: 785799 - RNA, 19 nt, Artificial Sequence
  Description of Artificial Sequence: Synthetic oligonucleotide
  Antisense strand to SEQ ID NO: 785798
acauauaacacaggguuuc

SEQ ID NO: 785800 - RNA, 19 nt, Artificial Sequence
  Description of Artificial Sequence: Synthetic oligonucleotide
  Sense strand starting at position 3112 of SEQ ID NO: 587348
gaacgcuuguucccuggua

SEQ ID NO: 785801 - RNA, 19 nt, Artificial Sequence
  Description of Artificial Sequence: Synthetic oligonucleotide
  Antisense strand to SEQ ID NO: 785800
uaccagggaacaagcguuc

SEQ ID NO: 785802 - RNA, 19 nt, Artificial Sequence
  Description of Artificial Sequence: Synthetic oligonucleotide
  Sense strand starting at position 3117 of SEQ ID NO: 587348
cuuguucccugguaccaua

SEQ ID NO: 785803 - RNA, 19 nt, Artificial Sequence
  Description of Artificial Sequence: Synthetic oligonucleotide
  Antisense strand to SEQ ID NO: 785802
uaugguaccagggaacaag

SEQ ID NO: 785804 - RNA, 19 nt, Artificial Sequence
  Description of Artificial Sequence: Synthetic oligonucleotide
  Sense strand starting at position 3141 of SEQ ID NO: 587348
agaucagcauuccgacaaa

SEQ ID NO: 785805 - RNA, 19 nt, Artificial Sequence
  Description of Artificial Sequence: Synthetic oligonucleotide
  Antisense strand to SEQ ID NO: 785804
uuugucggaaugcugaucu

SEQ ID NO: 785806 - RNA, 19 nt, Artificial Sequence
  Description of Artificial Sequence: Synthetic oligonucleotide
  Sense strand starting at position 3196 of SEQ ID NO: 587348
gagggugcuccucacagau

SEQ ID NO: 785807 - RNA, 19 nt, Artificial Sequence
  Description of Artificial Sequence: Synthetic oligonucleotide
  Antisense strand to SEQ ID NO: 785806
aucugugaggagcacccuc

SEQ ID NO: 785808 - RNA, 19 nt, Artificial Sequence
  Description of Artificial Sequence: Synthetic oligonucleotide
  Sense strand starting at position 3336 of SEQ ID NO: 587348
aaagucgacuggcuaauaa

SEQ ID NO: 785809 - RNA, 19 nt, Artificial Sequence
  Description of Artificial Sequence: Synthetic oligonucleotide
  Antisense strand to SEQ ID NO: 785808
uuauuagccagucgacuuu

SEQ ID NO: 785810 - RNA, 19 nt, Artificial Sequence
  Description of Artificial Sequence: Synthetic oligonucleotide
  Sense strand starting at position 3340 of SEQ ID NO: 587348
ucgacuggcuaauaauuua

SEQ ID NO: 785811 - RNA, 19 nt, Artificial Sequence
  Description of Artificial Sequence: Synthetic oligonucleotide
  Antisense strand to SEQ ID NO: 785810
uaaauuauuagccagucga

SEQ ID NO: 785812 - RNA, 19 nt, Artificial Sequence
  Description of Artificial Sequence: Synthetic oligonucleotide
  Sense strand starting at position 3531 of SEQ ID NO: 587348
guuuaacagcuacauaaga

SEQ ID NO: 785813 - RNA, 19 nt, Artificial Sequence
  Description of Artificial Sequence: Synthetic oligonucleotide
  Antisense strand to SEQ ID NO: 785812
ucuuauguagcuguuaaac

SEQ ID NO: 785814 - RNA, 19 nt, Artificial Sequence
  Description of Artificial Sequence: Synthetic oligonucleotide
  Sense strand starting at position 18 of SEQ ID NO: 587349
gggucuuccugacaauagu

SEQ ID NO: 785815 - RNA, 19 nt, Artificial Sequence
  Description of Artificial Sequence: Synthetic oligonucleotide
  Antisense strand to SEQ ID NO: 785814
acuauugucaggaagaccc

SEQ ID NO: 785816 - RNA, 19 nt, Artificial Sequence
  Description of Artificial Sequence: Synthetic oligonucleotide
  Sense strand starting at position 287 of SEQ ID NO: 587349
cauucuggucuagacaagu

SEQ ID NO: 785817 - RNA, 19 nt, Artificial Sequence
  Description of Artificial Sequence: Synthetic oligonucleotide
  Antisense strand to SEQ ID NO: 785816
acuugucuagaccagaaug

SEQ ID NO: 785818 - RNA, 19 nt, Artificial Sequence
  Description of Artificial Sequence: Synthetic oligonucleotide
  Sense strand starting at position 433 of SEQ ID NO: 587349
gaaaguguucggcagggca

SEQ ID NO: 785819 - RNA, 19 nt, Artificial Sequence
  Description of Artificial Sequence: Synthetic oligonucleotide
  Antisense strand to SEQ ID NO: 785818
ugcccugccgaacacuuuc

SEQ ID NO: 785820 - RNA, 19 nt, Artificial Sequence
  Description of Artificial Sequence: Synthetic oligonucleotide
  Sense strand starting at position 435 of SEQ ID NO: 587349
aaguguucggcagggcaga

SEQ ID NO: 785821 - RNA, 19 nt, Artificial Sequence
  Description of Artificial Sequence: Synthetic oligonucleotide
  Antisense strand to SEQ ID NO: 785820
ucugcccugccgaacacuu

SEQ ID NO: 785822 - RNA, 19 nt, Artificial Sequence
  Description of Artificial Sequence: Synthetic oligonucleotide
  Sense strand starting at position 552 of SEQ ID NO: 587349
cagacauccuccuucggua

SEQ ID NO: 785823 - RNA, 19 nt, Artificial Sequence
  Description of Artificial Sequence: Synthetic oligonucleotide
  Antisense strand to SEQ ID NO: 785822
uaccgaaggaggaugucug

SEQ ID NO: 785824 - RNA, 19 nt, Artificial Sequence
  Description of Artificial Sequence: Synthetic oligonucleotide
  Sense strand starting at position 644 of SEQ ID NO: 587349
auaaguguuggccgugaag

SEQ ID NO: 785825 - RNA, 19 nt, Artificial Sequence
  Description of Artificial Sequence: Synthetic oligonucleotide
  Antisense strand to SEQ ID NO: 785824
cuucacggccaacacuuau

SEQ ID NO: 785826 - RNA, 19 nt, Artificial Sequence
  Description of Artificial Sequence: Synthetic oligonucleotide
  Sense strand starting at position 646 of SEQ ID NO: 587349
aaguguuggccgugaagac

SEQ ID NO: 785827 - RNA, 19 nt, Artificial Sequence
  Description of Artificial Sequence: Synthetic oligonucleotide
  Antisense strand to SEQ ID NO: 785826
gucuucacggccaacacuu

SEQ ID NO: 785828 - RNA, 19 nt, Artificial Sequence
  Description of Artificial Sequence: Synthetic oligonucleotide
  Sense strand starting at position 647 of SEQ ID NO: 587349
aguguuggccgugaagaca

SEQ ID NO: 785829 - RNA, 19 nt, Artificial Sequence
  Description of Artificial Sequence: Synthetic oligonucleotide
  Antisense strand to SEQ ID NO: 785828
ugucuucacggccaacacu

SEQ ID NO: 785830 - RNA, 19 nt, Artificial Sequence
  Description of Artificial Sequence: Synthetic oligonucleotide
  Sense strand starting at position 954 of SEQ ID NO: 587349
ccucgacuugccugucaac

SEQ ID NO: 785831 - RNA, 19 nt, Artificial Sequence
  Description of Artificial Sequence: Synthetic oligonucleotide
  Antisense strand to SEQ ID NO: 785830
guugacaggcaagucgagg

SEQ ID NO: 785832 - RNA, 19 nt, Artificial Sequence
  Description of Artificial Sequence: Synthetic oligonucleotide
  Sense strand starting at position 957 of SEQ ID NO: 587349
cgacuugccugucaacaca

SEQ ID NO: 785833 - RNA, 19 nt, Artificial Sequence
  Description of Artificial Sequence: Synthetic oligonucleotide
  Antisense strand to SEQ ID NO: 785832
uguguugacaggcaagucg

SEQ ID NO: 785834 - RNA, 19 nt, Artificial Sequence
  Description of Artificial Sequence: Synthetic oligonucleotide
  Sense strand starting at position 1266 of SEQ ID NO: 587349
ggcaguauguacgaggaca

SEQ ID NO: 785835 - RNA, 19 nt, Artificial Sequence
  Description of Artificial Sequence: Synthetic oligonucleotide
  Antisense strand to SEQ ID NO: 785834
uguccucguacauacugcc

SEQ ID NO: 785836 - RNA, 19 nt, Artificial Sequence
  Description of Artificial Sequence: Synthetic oligonucleotide
  Sense strand starting at position 1388 of SEQ ID NO: 587349
acuggauguuaggagaagu

SEQ ID NO: 785837 - RNA, 19 nt, Artificial Sequence
  Description of Artificial Sequence: Synthetic oligonucleotide
  Antisense strand to SEQ ID NO: 785836
acuucuccuaacauccagu

SEQ ID NO: 785838 - RNA, 19 nt, Artificial Sequence
  Description of Artificial Sequence: Synthetic oligonucleotide
  Sense strand starting at position 1398 of SEQ ID NO: 587349
aggagaaguucaguccuag

SEQ ID NO: 785839 - RNA, 19 nt, Artificial Sequence
  Description of Artificial Sequence: Synthetic oligonucleotide
  Antisense strand to SEQ ID NO: 785838
cuaggacugaacuucuccu

SEQ ID NO: 785840 - RNA, 19 nt, Artificial Sequence
  Description of Artificial Sequence: Synthetic oligonucleotide
  Sense strand starting at position 2013 of SEQ ID NO: 587349
ugggcauagugguuuggaa

SEQ ID NO: 785841 - RNA, 19 nt, Artificial Sequence
  Description of Artificial Sequence: Synthetic oligonucleotide
  Antisense strand to SEQ ID NO: 785840
uuccaaaccacuaugccca

SEQ ID NO: 785842 - RNA, 19 nt, Artificial Sequence
  Description of Artificial Sequence: Synthetic oligonucleotide
  Sense strand starting at position 2428 of SEQ ID NO: 587349
uguugaaggcuccgcgaaa

SEQ ID NO: 785843 - RNA, 19 nt, Artificial Sequence
  Description of Artificial Sequence: Synthetic oligonucleotide
  Antisense strand to SEQ ID NO: 785842
uuucgcggagccuucaaca

SEQ ID NO: 785844 - RNA, 19 nt, Artificial Sequence
  Description of Artificial Sequence: Synthetic oligonucleotide
  Sense strand starting at position 2476 of SEQ ID NO: 587349
gggagggauuccgagagga

SEQ ID NO: 785845 - RNA, 19 nt, Artificial Sequence
  Description of Artificial Sequence: Synthetic oligonucleotide
  Antisense strand to SEQ ID NO: 785844
uccucucggaaucccuccc

SEQ ID NO: 785846 - RNA, 19 nt, Artificial Sequence
  Description of Artificial Sequence: Synthetic oligonucleotide
  Sense strand starting at position 3531 of SEQ ID NO: 587349
cucggauucuugucuccuu

SEQ ID NO: 785847 - RNA, 19 nt, Artificial Sequence
  Description of Artificial Sequence: Synthetic oligonucleotide
  Antisense strand to SEQ ID NO: 785846
aaggagacaagaauccgag

SEQ ID NO: 785848 - RNA, 19 nt, Artificial Sequence
  Description of Artificial Sequence: Synthetic oligonucleotide
  Sense strand starting at position 3732 of SEQ ID NO: 587349
ggagcaaaucccgguagaa

SEQ ID NO: 785849 - RNA, 19 nt, Artificial Sequence
  Description of Artificial Sequence: Synthetic oligonucleotide
  Antisense strand to SEQ ID NO: 785848
uucuaccgggauuugcucc

SEQ ID NO: 785850 - RNA, 19 nt, Artificial Sequence
  Description of Artificial Sequence: Synthetic oligonucleotide
  Sense strand starting at position 3771 of SEQ ID NO: 587349
gggucauguuccggaagau

SEQ ID NO: 785851 - RNA, 19 nt, Artificial Sequence
  Description of Artificial Sequence: Synthetic oligonucleotide
  Antisense strand to SEQ ID NO: 785850
aucuuccggaacaugaccc

SEQ ID NO: 785852 - RNA, 19 nt, Artificial Sequence
  Description of Artificial Sequence: Synthetic oligonucleotide
  Sense strand starting at position 3772 of SEQ ID NO: 587349
ggucauguuccggaagauu

SEQ ID NO: 785853 - RNA, 19 nt, Artificial Sequence
  Description of Artificial Sequence: Synthetic oligonucleotide
  Antisense strand to SEQ ID NO: 785852
aaucuuccggaacaugacc

SEQ ID NO: 785854 - RNA, 19 nt, Artificial Sequence
  Description of Artificial Sequence: Synthetic oligonucleotide
  Sense strand starting at position 3781 of SEQ ID NO: 587349
ccggaagauuuggacuaga

SEQ ID NO: 785855 - RNA, 19 nt, Artificial Sequence
  Description of Artificial Sequence: Synthetic oligonucleotide
  Antisense strand to SEQ ID NO: 785854
ucuaguccaaaucuuccgg

SEQ ID NO: 785856 - RNA, 19 nt, Artificial Sequence
  Description of Artificial Sequence: Synthetic oligonucleotide
  Sense strand starting at position 9 of SEQ ID NO: 587350
gcgaaucagcucugggaag

SEQ ID NO: 785857 - RNA, 19 nt, Artificial Sequence
  Description of Artificial Sequence: Synthetic oligonucleotide
  Antisense strand to SEQ ID NO: 785856
cuucccagagcugauucgc

SEQ ID NO: 785858 - RNA, 19 nt, Artificial Sequence
  Description of Artificial Sequence: Synthetic oligonucleotide
  Sense strand starting at position 11 of SEQ ID NO: 587350
gaaucagcucugggaagga

SEQ ID NO: 785859 - RNA, 19 nt, Artificial Sequence
  Description of Artificial Sequence: Synthetic oligonucleotide
  Antisense strand to SEQ ID NO: 785858
uccuucccagagcugauuc

SEQ ID NO: 785860 - RNA, 19 nt, Artificial Sequence
  Description of Artificial Sequence: Synthetic oligonucleotide
  Sense strand starting at position 27 of SEQ ID NO: 587350
ggaugugcguuucucgaaa

SEQ ID NO: 785861 - RNA, 19 nt, Artificial Sequence
  Description of Artificial Sequence: Synthetic oligonucleotide
  Antisense strand to SEQ ID NO: 785860
uuucgagaaacgcacaucc

SEQ ID NO: 785862 - RNA, 19 nt, Artificial Sequence
  Description of Artificial Sequence: Synthetic oligonucleotide
  Sense strand starting at position 38 of SEQ ID NO: 587350
ucucgaaacgccuguggua

SEQ ID NO: 785863 - RNA, 19 nt, Artificial Sequence
  Description of Artificial Sequence: Synthetic oligonucleotide
  Antisense strand to SEQ ID NO: 785862
uaccacaggcguuucgaga

SEQ ID NO: 785864 - RNA, 19 nt, Artificial Sequence
  Description of Artificial Sequence: Synthetic oligonucleotide
  Sense strand starting at position 150 of SEQ ID NO: 587350
caccaugucccuggagagu

SEQ ID NO: 785865 - RNA, 19 nt, Artificial Sequence
  Description of Artificial Sequence: Synthetic oligonucleotide
  Antisense strand to SEQ ID NO: 785864
acucuccagggacauggug

SEQ ID NO: 785866 - RNA, 19 nt, Artificial Sequence
  Description of Artificial Sequence: Synthetic oligonucleotide
  Sense strand starting at position 200 of SEQ ID NO: 587350
gggucuuccugacaauagu

SEQ ID NO: 785867 - RNA, 19 nt, Artificial Sequence
  Description of Artificial Sequence: Synthetic oligonucleotide
  Antisense strand to SEQ ID NO: 785866
acuauugucaggaagaccc

SEQ ID NO: 785868 - RNA, 19 nt, Artificial Sequence
  Description of Artificial Sequence: Synthetic oligonucleotide
  Sense strand starting at position 469 of SEQ ID NO: 587350
cauucuggucuagacaagu

SEQ ID NO: 785869 - RNA, 19 nt, Artificial Sequence
  Description of Artificial Sequence: Synthetic oligonucleotide
  Antisense strand to SEQ ID NO: 785868
acuugucuagaccagaaug

SEQ ID NO: 785870 - RNA, 19 nt, Artificial Sequence
  Description of Artificial Sequence: Synthetic oligonucleotide
  Sense strand starting at position 615 of SEQ ID NO: 587350
gaaaguguucggcagggca

SEQ ID NO: 785871 - RNA, 19 nt, Artificial Sequence
  Description of Artificial Sequence: Synthetic oligonucleotide
  Antisense strand to SEQ ID NO: 785870
ugcccugccgaacacuuuc

SEQ ID NO: 785872 - RNA, 19 nt, Artificial Sequence
  Description of Artificial Sequence: Synthetic oligonucleotide
  Sense strand starting at position 617 of SEQ ID NO: 587350
aaguguucggcagggcaga

SEQ ID NO: 785873 - RNA, 19 nt, Artificial Sequence
  Description of Artificial Sequence: Synthetic oligonucleotide
  Antisense strand to SEQ ID NO: 785872
ucugcccugccgaacacuu

SEQ ID NO: 785874 - RNA, 19 nt, Artificial Sequence
  Description of Artificial Sequence: Synthetic oligonucleotide
  Sense strand starting at position 734 of SEQ ID NO: 587350
cagacauccuccuucggua

SEQ ID NO: 785875 - RNA, 19 nt, Artificial Sequence
  Description of Artificial Sequence: Synthetic oligonucleotide
  Antisense strand to SEQ ID NO: 785874
uaccgaaggaggaugucug

SEQ ID NO: 785876 - RNA, 19 nt, Artificial Sequence
  Description of Artificial Sequence: Synthetic oligonucleotide
  Sense strand starting at position 826 of SEQ ID NO: 587350
auaaguguuggccgugaag

SEQ ID NO: 785877 - RNA, 19 nt, Artificial Sequence
  Description of Artificial Sequence: Synthetic oligonucleotide
  Antisense strand to SEQ ID NO: 785876
cuucacggccaacacuuau

SEQ ID NO: 785878 - RNA, 19 nt, Artificial Sequence
  Description of Artificial Sequence: Synthetic oligonucleotide
  Sense strand starting at position 828 of SEQ ID NO: 587350
aaguguuggccgugaagac

SEQ ID NO: 785879 - RNA, 19 nt, Artificial Sequence
  Description of Artificial Sequence: Synthetic oligonucleotide
  Antisense strand to SEQ ID NO: 785878
gucuucacggccaacacuu

SEQ ID NO: 785880 - RNA, 19 nt, Artificial Sequence
  Description of Artificial Sequence: Synthetic oligonucleotide
  Sense strand starting at position 829 of SEQ ID NO: 587350
aguguuggccgugaagaca

SEQ ID NO: 785881 - RNA, 19 nt, Artificial Sequence
  Description of Artificial Sequence: Synthetic oligonucleotide
  Antisense strand to SEQ ID NO: 785880
ugucuucacggccaacacu

SEQ ID NO: 785882 - RNA, 19 nt, Artificial Sequence
  Description of Artificial Sequence: Synthetic oligonucleotide
  Sense strand starting at position 1136 of SEQ ID NO: 587350
ccucgacuugccugucaac

SEQ ID NO: 785883 - RNA, 19 nt, Artificial Sequence
  Description of Artificial Sequence: Synthetic oligonucleotide
  Antisense strand to SEQ ID NO: 785882
guugacaggcaagucgagg

SEQ ID NO: 785884 - RNA, 19 nt, Artificial Sequence
  Description of Artificial Sequence: Synthetic oligonucleotide
  Sense strand starting at position 1139 of SEQ ID NO: 587350
cgacuugccugucaacaca

SEQ ID NO: 785885 - RNA, 19 nt, Artificial Sequence
  Description of Artificial Sequence: Synthetic oligonucleotide
  Antisense strand to SEQ ID NO: 785884
uguguugacaggcaagucg

SEQ ID NO: 785886 - RNA, 19 nt, Artificial Sequence
  Description of Artificial Sequence: Synthetic oligonucleotide
  Sense strand starting at position 1448 of SEQ ID NO: 587350
ggcaguauguacgaggaca

SEQ ID NO: 785887 - RNA, 19 nt, Artificial Sequence
  Description of Artificial Sequence: Synthetic oligonucleotide
  Antisense strand to SEQ ID NO: 785886
uguccucguacauacugcc

SEQ ID NO: 785888 - RNA, 19 nt, Artificial Sequence
  Description of Artificial Sequence: Synthetic oligonucleotide
  Sense strand starting at position 1570 of SEQ ID NO: 587350
acuggauguuaggagaagu

SEQ ID NO: 785889 - RNA, 19 nt, Artificial Sequence
  Description of Artificial Sequence: Synthetic oligonucleotide
  Antisense strand to SEQ ID NO: 785888
acuucuccuaacauccagu

SEQ ID NO: 785890 - RNA, 19 nt, Artificial Sequence
  Description of Artificial Sequence: Synthetic oligonucleotide
  Sense strand starting at position 1580 of SEQ ID NO: 587350
aggagaaguucaguccuag

SEQ ID NO: 785891 - RNA, 19 nt, Artificial Sequence
  Description of Artificial Sequence: Synthetic oligonucleotide
  Antisense strand to SEQ ID NO: 785890
cuaggacugaacuucuccu

SEQ ID NO: 785892 - RNA, 19 nt, Artificial Sequence
  Description of Artificial Sequence: Synthetic oligonucleotide
  Sense strand starting at position 2195 of SEQ ID NO: 587350
ugggcauagugguuuggaa

SEQ ID NO: 785893 - RNA, 19 nt, Artificial Sequence
  Description of Artificial Sequence: Synthetic oligonucleotide
  Antisense strand to SEQ ID NO: 785892
uuccaaaccacuaugccca

SEQ ID NO: 785894 - RNA, 19 nt, Artificial Sequence
  Description of Artificial Sequence: Synthetic oligonucleotide
  Sense strand starting at position 2610 of SEQ ID NO: 587350
uguugaaggcuccgcgaaa

SEQ ID NO: 785895 - RNA, 19 nt, Artificial Sequence
  Description of Artificial Sequence: Synthetic oligonucleotide
  Antisense strand to SEQ ID NO: 785894
uuucgcggagccuucaaca

SEQ ID NO: 785896 - RNA, 19 nt, Artificial Sequence
  Description of Artificial Sequence: Synthetic oligonucleotide
  Sense strand starting at position 2658 of SEQ ID NO: 587350
gggagggauuccgagagga

SEQ ID NO: 785897 - RNA, 19 nt, Artificial Sequence
  Description of Artificial Sequence: Synthetic oligonucleotide
  Antisense strand to SEQ ID NO: 785896
uccucucggaaucccuccc

SEQ ID NO: 785898 - RNA, 19 nt, Artificial Sequence
  Description of Artificial Sequence: Synthetic oligonucleotide
  Sense strand starting at position 3713 of SEQ ID NO: 587350
cucggauucuugucuccuu

SEQ ID NO: 785899 - RNA, 19 nt, Artificial Sequence
  Description of Artificial Sequence: Synthetic oligonucleotide
  Antisense strand to SEQ ID NO: 785898
aaggagacaagaauccgag

SEQ ID NO: 785900 - RNA, 19 nt, Artificial Sequence
  Description of Artificial Sequence: Synthetic oligonucleotide
  Sense strand starting at position 3914 of SEQ ID NO: 587350
ggagcaaaucccgguagaa

SEQ ID NO: 785901 - RNA, 19 nt, Artificial Sequence
  Description of Artificial Sequence: Synthetic oligonucleotide
  Antisense strand to SEQ ID NO: 785900
uucuaccgggauuugcucc

SEQ ID NO: 785902 - RNA, 19 nt, Artificial Sequence
  Description of Artificial Sequence: Synthetic oligonucleotide
  Sense strand starting at position 3953 of SEQ ID NO: 587350
gggucauguuccggaagau

SEQ ID NO: 785903 - RNA, 19 nt, Artificial Sequence
  Description of Artificial Sequence: Synthetic oligonucleotide
  Antisense strand to SEQ ID NO: 785902
aucuuccggaacaugaccc

SEQ ID NO: 785904 - RNA, 19 nt, Artificial Sequence
  Description of Artificial Sequence: Synthetic oligonucleotide
  Sense strand starting at position 3954 of SEQ ID NO: 587350
ggucauguuccggaagauu

SEQ ID NO: 785905 - RNA, 19 nt, Artificial Sequence
  Description of Artificial Sequence: Synthetic oligonucleotide
  Antisense strand to SEQ ID NO: 785904
aaucuuccggaacaugacc

SEQ ID NO: 785906 - RNA, 19 nt, Artificial Sequence
  Description of Artificial Sequence: Synthetic oligonucleotide
  Sense strand starting at position 3963 of SEQ ID NO: 587350
ccggaagauuuggacuaga

SEQ ID NO: 785907 - RNA, 19 nt, Artificial Sequence
  Description of Artificial Sequence: Synthetic oligonucleotide
  Antisense strand to SEQ ID NO: 785906
ucuaguccaaaucuuccgg

SEQ ID NO: 785908 - RNA, 19 nt, Artificial Sequence
  Description of Artificial Sequence: Synthetic oligonucleotide
  Sense strand starting at position 145 of SEQ ID NO: 587351
aagacucaggcuuguguua

SEQ ID NO: 785909 - RNA, 19 nt, Artificial Sequence
  Description of Artificial Sequence: Synthetic oligonucleotide
  Antisense strand to SEQ ID NO: 785908
uaacacaagccugagucuu

SEQ ID NO: 785910 - RNA, 19 nt, Artificial Sequence
  Description of Artificial Sequence: Synthetic oligonucleotide
  Sense strand starting at position 269 of SEQ ID NO: 587351
cggagagacuuccaggaga

SEQ ID NO: 785911 - RNA, 19 nt, Artificial Sequence
  Description of Artificial Sequence: Synthetic oligonucleotide
  Antisense strand to SEQ ID NO: 785910
ucuccuggaagucucuccg

SEQ ID NO: 785912 - RNA, 19 nt, Artificial Sequence
  Description of Artificial Sequence: Synthetic oligonucleotide
  Sense strand starting at position 384 of SEQ ID NO: 587351
aaacgaagguauuagggaa

SEQ ID NO: 785913 - RNA, 19 nt, Artificial Sequence
  Description of Artificial Sequence: Synthetic oligonucleotide
  Antisense strand to SEQ ID NO: 785912
uucccuaauaccuucguuu

SEQ ID NO: 785914 - RNA, 19 nt, Artificial Sequence
  Description of Artificial Sequence: Synthetic oligonucleotide
  Sense strand starting at position 440 of SEQ ID NO: 587351
gcgaaucagcucugggaag

SEQ ID NO: 785915 - RNA, 19 nt, Artificial Sequence
  Description of Artificial Sequence: Synthetic oligonucleotide
  Antisense strand to SEQ ID NO: 785914
cuucccagagcugauucgc

SEQ ID NO: 785916 - RNA, 19 nt, Artificial Sequence
  Description of Artificial Sequence: Synthetic oligonucleotide
  Sense strand starting at position 442 of SEQ ID NO: 587351
gaaucagcucugggaagga

SEQ ID NO: 785917 - RNA, 19 nt, Artificial Sequence
  Description of Artificial Sequence: Synthetic oligonucleotide
  Antisense strand to SEQ ID NO: 785916
uccuucccagagcugauuc

SEQ ID NO: 785918 - RNA, 19 nt, Artificial Sequence
  Description of Artificial Sequence: Synthetic oligonucleotide
  Sense strand starting at position 458 of SEQ ID NO: 587351
ggaugugcguuucucgaaa

SEQ ID NO: 785919 - RNA, 19 nt, Artificial Sequence
  Description of Artificial Sequence: Synthetic oligonucleotide
  Antisense strand to SEQ ID NO: 785918
uuucgagaaacgcacaucc

SEQ ID NO: 785920 - RNA, 19 nt, Artificial Sequence
  Description of Artificial Sequence: Synthetic oligonucleotide
  Sense strand starting at position 469 of SEQ ID NO: 587351
ucucgaaacgccuguggua

SEQ ID NO: 785921 - RNA, 19 nt, Artificial Sequence
  Description of Artificial Sequence: Synthetic oligonucleotide
  Antisense strand to SEQ ID NO: 785920
uaccacaggcguuucgaga

SEQ ID NO: 785922 - RNA, 19 nt, Artificial Sequence
  Description of Artificial Sequence: Synthetic oligonucleotide
  Sense strand starting at position 581 of SEQ ID NO: 587351
caccaugucccuggagagu

SEQ ID NO: 785923 - RNA, 19 nt, Artificial Sequence
  Description of Artificial Sequence: Synthetic oligonucleotide
  Antisense strand to SEQ ID NO: 785922
acucuccagggacauggug

SEQ ID NO: 785924 - RNA, 19 nt, Artificial Sequence
  Description of Artificial Sequence: Synthetic oligonucleotide
  Sense strand starting at position 631 of SEQ ID NO: 587351
gggucuuccugacaauagu

SEQ ID NO: 785925 - RNA, 19 nt, Artificial Sequence
  Description of Artificial Sequence: Synthetic oligonucleotide
  Antisense strand to SEQ ID NO: 785924
acuauugucaggaagaccc

SEQ ID NO: 785926 - RNA, 19 nt, Artificial Sequence
  Description of Artificial Sequence: Synthetic oligonucleotide
  Sense strand starting at position 900 of SEQ ID NO: 587351
cauucuggucuagacaagu

SEQ ID NO: 785927 - RNA, 19 nt, Artificial Sequence
  Description of Artificial Sequence: Synthetic oligonucleotide
  Antisense strand to SEQ ID NO: 785926
acuugucuagaccagaaug

SEQ ID NO: 785928 - RNA, 19 nt, Artificial Sequence
  Description of Artificial Sequence: Synthetic oligonucleotide
  Sense strand starting at position 1046 of SEQ ID NO: 587351
gaaaguguucggcagggca

SEQ ID NO: 785929 - RNA, 19 nt, Artificial Sequence
  Description of Artificial Sequence: Synthetic oligonucleotide
  Antisense strand to SEQ ID NO: 785928
ugcccugccgaacacuuuc

SEQ ID NO: 785930 - RNA, 19 nt, Artificial Sequence
  Description of Artificial Sequence: Synthetic oligonucleotide
  Sense strand starting at position 1048 of SEQ ID NO: 587351
aaguguucggcagggcaga

SEQ ID NO: 785931 - RNA, 19 nt, Artificial Sequence
  Description of Artificial Sequence: Synthetic oligonucleotide
  Antisense strand to SEQ ID NO: 785930
ucugcccugccgaacacuu

SEQ ID NO: 785932 - RNA, 19 nt, Artificial Sequence
  Description of Artificial Sequence: Synthetic oligonucleotide
  Sense strand starting at position 1165 of SEQ ID NO: 587351
cagacauccuccuucggua

SEQ ID NO: 785933 - RNA, 19 nt, Artificial Sequence
  Description of Artificial Sequence: Synthetic oligonucleotide
  Antisense strand to SEQ ID NO: 785932
uaccgaaggaggaugucug

SEQ ID NO: 785934 - RNA, 19 nt, Artificial Sequence
  Description of Artificial Sequence: Synthetic oligonucleotide
  Sense strand starting at position 1257 of SEQ ID NO: 587351
auaaguguuggccgugaag

SEQ ID NO: 785935 - RNA, 19 nt, Artificial Sequence
  Description of Artificial Sequence: Synthetic oligonucleotide
  Antisense strand to SEQ ID NO: 785934
cuucacggccaacacuuau

SEQ ID NO: 785936 - RNA, 19 nt, Artificial Sequence
  Description of Artificial Sequence: Synthetic oligonucleotide
  Sense strand starting at position 1259 of SEQ ID NO: 587351
aaguguuggccgugaagac

SEQ ID NO: 785937 - RNA, 19 nt, Artificial Sequence
  Description of Artificial Sequence: Synthetic oligonucleotide
  Antisense strand to SEQ ID NO: 785936
gucuucacggccaacacuu

SEQ ID NO: 785938 - RNA, 19 nt, Artificial Sequence
  Description of Artificial Sequence: Synthetic oligonucleotide
  Sense strand starting at position 1260 of SEQ ID NO: 587351
aguguuggccgugaagaca

SEQ ID NO: 785939 - RNA, 19 nt, Artificial Sequence
  Description of Artificial Sequence: Synthetic oligonucleotide
  Antisense strand to SEQ ID NO: 785938
ugucuucacggccaacacu

SEQ ID NO: 785940 - RNA, 19 nt, Artificial Sequence
  Description of Artificial Sequence: Synthetic oligonucleotide
  Sense strand starting at position 1567 of SEQ ID NO: 587351
ccucgacuugccugucaac

SEQ ID NO: 785941 - RNA, 19 nt, Artificial Sequence
  Description of Artificial Sequence: Synthetic oligonucleotide
  Antisense strand to SEQ ID NO: 785940
guugacaggcaagucgagg

SEQ ID NO: 785942 - RNA, 19 nt, Artificial Sequence
  Description of Artificial Sequence: Synthetic oligonucleotide
  Sense strand starting at position 1570 of SEQ ID NO: 587351
cgacuugccugucaacaca

SEQ ID NO: 785943 - RNA, 19 nt, Artificial Sequence
  Description of Artificial Sequence: Synthetic oligonucleotide
  Antisense strand to SEQ ID NO: 785942
uguguugacaggcaagucg

SEQ ID NO: 785944 - RNA, 19 nt, Artificial Sequence
  Description of Artificial Sequence: Synthetic oligonucleotide
  Sense strand starting at position 1879 of SEQ ID NO: 587351
ggcaguauguacgaggaca

SEQ ID NO: 785945 - RNA, 19 nt, Artificial Sequence
  Description of Artificial Sequence: Synthetic oligonucleotide
  Antisense strand to SEQ ID NO: 785944
uguccucguacauacugcc

SEQ ID NO: 785946 - RNA, 19 nt, Artificial Sequence
  Description of Artificial Sequence: Synthetic oligonucleotide
  Sense strand starting at position 2001 of SEQ ID NO: 587351
acuggauguuaggagaagu

SEQ ID NO: 785947 - RNA, 19 nt, Artificial Sequence
  Description of Artificial Sequence: Synthetic oligonucleotide
  Antisense strand to SEQ ID NO: 785946
acuucuccuaacauccagu

SEQ ID NO: 785948 - RNA, 19 nt, Artificial Sequence
  Description of Artificial Sequence: Synthetic oligonucleotide
  Sense strand starting at position 2011 of SEQ ID NO: 587351
aggagaaguucaguccuag

SEQ ID NO: 785949 - RNA, 19 nt, Artificial Sequence
  Description of Artificial Sequence: Synthetic oligonucleotide
  Antisense strand to SEQ ID NO: 785948
cuaggacugaacuucuccu

SEQ ID NO: 785950 - RNA, 19 nt, Artificial Sequence
  Description of Artificial Sequence: Synthetic oligonucleotide
  Sense strand starting at position 2626 of SEQ ID NO: 587351
ugggcauagugguuuggaa

SEQ ID NO: 785951 - RNA, 19 nt, Artificial Sequence
  Description of Artificial Sequence: Synthetic oligonucleotide
  Antisense strand to SEQ ID NO: 785950
uuccaaaccacuaugccca

SEQ ID NO: 785952 - RNA, 19 nt, Artificial Sequence
  Description of Artificial Sequence: Synthetic oligonucleotide
  Sense strand starting at position 3041 of SEQ ID NO: 587351
uguugaaggcuccgcgaaa

SEQ ID NO: 785953 - RNA, 19 nt, Artificial Sequence
  Description of Artificial Sequence: Synthetic oligonucleotide
  Antisense strand to SEQ ID NO: 785952
uuucgcggagccuucaaca

SEQ ID NO: 785954 - RNA, 19 nt, Artificial Sequence
  Description of Artificial Sequence: Synthetic oligonucleotide
  Sense strand starting at position 3089 of SEQ ID NO: 587351
gggagggauuccgagagga

SEQ ID NO: 785955 - RNA, 19 nt, Artificial Sequence
  Description of Artificial Sequence: Synthetic oligonucleotide
  Antisense strand to SEQ ID NO: 785954
uccucucggaaucccuccc

SEQ ID NO: 785956 - RNA, 19 nt, Artificial Sequence
  Description of Artificial Sequence: Synthetic oligonucleotide
  Sense strand starting at position 48 of SEQ ID NO: 587352
ggcuguugugagcuguuga

SEQ ID NO: 785957 - RNA, 19 nt, Artificial Sequence
  Description of Artificial Sequence: Synthetic oligonucleotide
  Antisense strand to SEQ ID NO: 785956
ucaacagcucacaacagcc

SEQ ID NO: 785958 - RNA, 19 nt, Artificial Sequence
  Description of Artificial Sequence: Synthetic oligonucleotide
  Sense strand starting at position 512 of SEQ ID NO: 587352
ggcugucgccacugugaca

SEQ ID NO: 785959 - RNA, 19 nt, Artificial Sequence
  Description of Artificial Sequence: Synthetic oligonucleotide
  Antisense strand to SEQ ID NO: 785958
ugucacaguggcgacagcc

SEQ ID NO: 785960 - RNA, 19 nt, Artificial Sequence
  Description of Artificial Sequence: Synthetic oligonucleotide
  Sense strand starting at position 550 of SEQ ID NO: 587352
ccguccuaaugacaacauu

SEQ ID NO: 785961 - RNA, 19 nt, Artificial Sequence
  Description of Artificial Sequence: Synthetic oligonucleotide
  Antisense strand to SEQ ID NO: 785960
aauguugucauuaggacgg

SEQ ID NO: 785962 - RNA, 19 nt, Artificial Sequence
  Description of Artificial Sequence: Synthetic oligonucleotide
  Sense strand starting at position 561 of SEQ ID NO: 587352
acaacauuccugcagguga

SEQ ID NO: 785963 - RNA, 19 nt, Artificial Sequence
  Description of Artificial Sequence: Synthetic oligonucleotide
  Antisense strand to SEQ ID NO: 785962
ucaccugcaggaauguugu

SEQ ID NO: 785964 - RNA, 19 nt, Artificial Sequence
  Description of Artificial Sequence: Synthetic oligonucleotide
  Sense strand starting at position 678 of SEQ ID NO: 587352
ucgugccuugcuucugaga

SEQ ID NO: 785965 - RNA, 19 nt, Artificial Sequence
  Description of Artificial Sequence: Synthetic oligonucleotide
  Antisense strand to SEQ ID NO: 785964
ucucagaagcaaggcacga

SEQ ID NO: 785966 - RNA, 19 nt, Artificial Sequence
  Description of Artificial Sequence: Synthetic oligonucleotide
  Sense strand starting at position 922 of SEQ ID NO: 587352
gaaagcaucggccaagguu

SEQ ID NO: 785967 - RNA, 19 nt, Artificial Sequence
  Description of Artificial Sequence: Synthetic oligonucleotide
  Antisense strand to SEQ ID NO: 785966
aaccuuggccgaugcuuuc

SEQ ID NO: 785968 - RNA, 19 nt, Artificial Sequence
  Description of Artificial Sequence: Synthetic oligonucleotide
  Sense strand starting at position 971 of SEQ ID NO: 587352
ggcucauugcucugcaucu

SEQ ID NO: 785969 - RNA, 19 nt, Artificial Sequence
  Description of Artificial Sequence: Synthetic oligonucleotide
  Antisense strand to SEQ ID NO: 785968
agaugcagagcaaugagcc

SEQ ID NO: 785970 - RNA, 19 nt, Artificial Sequence
  Description of Artificial Sequence: Synthetic oligonucleotide
  Sense strand starting at position 972 of SEQ ID NO: 587352
gcucauugcucugcaucuu

SEQ ID NO: 785971 - RNA, 19 nt, Artificial Sequence
  Description of Artificial Sequence: Synthetic oligonucleotide
  Antisense strand to SEQ ID NO: 785970
aagaugcagagcaaugagc

SEQ ID NO: 785972 - RNA, 19 nt, Artificial Sequence
  Description of Artificial Sequence: Synthetic oligonucleotide
  Sense strand starting at position 984 of SEQ ID NO: 587352
gcaucuucucugcagaggu

SEQ ID NO: 785973 - RNA, 19 nt, Artificial Sequence
  Description of Artificial Sequence: Synthetic oligonucleotide
  Antisense strand to SEQ ID NO: 785972
accucugcagagaagaugc

SEQ ID NO: 785974 - RNA, 19 nt, Artificial Sequence
  Description of Artificial Sequence: Synthetic oligonucleotide
  Sense strand starting at position 1563 of SEQ ID NO: 587352
ugggauuugcucugcacca

SEQ ID NO: 785975 - RNA, 19 nt, Artificial Sequence
  Description of Artificial Sequence: Synthetic oligonucleotide
  Antisense strand to SEQ ID NO: 785974
uggugcagagcaaauccca

SEQ ID NO: 785976 - RNA, 19 nt, Artificial Sequence
  Description of Artificial Sequence: Synthetic oligonucleotide
  Sense strand starting at position 1564 of SEQ ID NO: 587352
gggauuugcucugcaccau

SEQ ID NO: 785977 - RNA, 19 nt, Artificial Sequence
  Description of Artificial Sequence: Synthetic oligonucleotide
  Antisense strand to SEQ ID NO: 785976
auggugcagagcaaauccc

SEQ ID NO: 785978 - RNA, 19 nt, Artificial Sequence
  Description of Artificial Sequence: Synthetic oligonucleotide
  Sense strand starting at position 1765 of SEQ ID NO: 587352
gcccuaguuccuggaaggu

SEQ ID NO: 785979 - RNA, 19 nt, Artificial Sequence
  Description of Artificial Sequence: Synthetic oligonucleotide
  Antisense strand to SEQ ID NO: 785978
accuuccaggaacuagggc

SEQ ID NO: 785980 - RNA, 19 nt, Artificial Sequence
  Description of Artificial Sequence: Synthetic oligonucleotide
  Sense strand starting at position 2046 of SEQ ID NO: 587352
ccuugccuucgagagggau

SEQ ID NO: 785981 - RNA, 19 nt, Artificial Sequence
  Description of Artificial Sequence: Synthetic oligonucleotide
  Antisense strand to SEQ ID NO: 785980
aucccucucgaaggcaagg

SEQ ID NO: 785982 - RNA, 19 nt, Artificial Sequence
  Description of Artificial Sequence: Synthetic oligonucleotide
  Sense strand starting at position 2048 of SEQ ID NO: 587352
uugccuucgagagggauca

SEQ ID NO: 785983 - RNA, 19 nt, Artificial Sequence
  Description of Artificial Sequence: Synthetic oligonucleotide
  Antisense strand to SEQ ID NO: 785982
ugaucccucucgaaggcaa

SEQ ID NO: 785984 - RNA, 19 nt, Artificial Sequence
  Description of Artificial Sequence: Synthetic oligonucleotide
  Sense strand starting at position 2060 of SEQ ID NO: 587352
gggaucacgucaugggaga

SEQ ID NO: 785985 - RNA, 19 nt, Artificial Sequence
  Description of Artificial Sequence: Synthetic oligonucleotide
  Antisense strand to SEQ ID NO: 785984
ucucccaugacgugauccc

SEQ ID NO: 785986 - RNA, 19 nt, Artificial Sequence
  Description of Artificial Sequence: Synthetic oligonucleotide
  Sense strand starting at position 2061 of SEQ ID NO: 587352
ggaucacgucaugggagaa

SEQ ID NO: 785987 - RNA, 19 nt, Artificial Sequence
  Description of Artificial Sequence: Synthetic oligonucleotide
  Antisense strand to SEQ ID NO: 785986
uucucccaugacgugaucc

SEQ ID NO: 785988 - RNA, 19 nt, Artificial Sequence
  Description of Artificial Sequence: Synthetic oligonucleotide
  Sense strand starting at position 2085 of SEQ ID NO: 587352
ccuggaucugccugagaga

SEQ ID NO: 785989 - RNA, 19 nt, Artificial Sequence
  Description of Artificial Sequence: Synthetic oligonucleotide
  Antisense strand to SEQ ID NO: 785988
ucucucaggcagauccagg

SEQ ID NO: 785990 - RNA, 19 nt, Artificial Sequence
  Description of Artificial Sequence: Synthetic oligonucleotide
  Sense strand starting at position 2215 of SEQ ID NO: 587352
gggcccuuaucuuauccaa

SEQ ID NO: 785991 - RNA, 19 nt, Artificial Sequence
  Description of Artificial Sequence: Synthetic oligonucleotide
  Antisense strand to SEQ ID NO: 785990
uuggauaagauaagggccc

SEQ ID NO: 785992 - RNA, 19 nt, Artificial Sequence
  Description of Artificial Sequence: Synthetic oligonucleotide
  Sense strand starting at position 2228 of SEQ ID NO: 587352
auccaagagccuuggauua

SEQ ID NO: 785993 - RNA, 19 nt, Artificial Sequence
  Description of Artificial Sequence: Synthetic oligonucleotide
  Antisense strand to SEQ ID NO: 785992
uaauccaaggcucuuggau

SEQ ID NO: 785994 - RNA, 19 nt, Artificial Sequence
  Description of Artificial Sequence: Synthetic oligonucleotide
  Sense strand starting at position 2230 of SEQ ID NO: 587352
ccaagagccuuggauuauu

SEQ ID NO: 785995 - RNA, 19 nt, Artificial Sequence
  Description of Artificial Sequence: Synthetic oligonucleotide
  Antisense strand to SEQ ID NO: 785994
aauaauccaaggcucuugg

SEQ ID NO: 785996 - RNA, 19 nt, Artificial Sequence
  Description of Artificial Sequence: Synthetic oligonucleotide
  Sense strand starting at position 2256 of SEQ ID NO: 587352
uugcaagguuuauagcaaa

SEQ ID NO: 785997 - RNA, 19 nt, Artificial Sequence
  Description of Artificial Sequence: Synthetic oligonucleotide
  Antisense strand to SEQ ID NO: 785996
uuugcuauaaaccuugcaa

SEQ ID NO: 785998 - RNA, 19 nt, Artificial Sequence
  Description of Artificial Sequence: Synthetic oligonucleotide
  Sense strand starting at position 2279 of SEQ ID NO: 587352
gagggaaugaguuggcaug

SEQ ID NO: 785999 - RNA, 19 nt, Artificial Sequence
  Description of Artificial Sequence: Synthetic oligonucleotide
  Antisense strand to SEQ ID NO: 785998
caugccaacucauucccuc

SEQ ID NO: 786000 - RNA, 19 nt, Artificial Sequence
  Description of Artificial Sequence: Synthetic oligonucleotide
  Sense strand starting at position 2280 of SEQ ID NO: 587352
agggaaugaguuggcauga

SEQ ID NO: 786001 - RNA, 19 nt, Artificial Sequence
  Description of Artificial Sequence: Synthetic oligonucleotide
  Antisense strand to SEQ ID NO: 786000
ucaugccaacucauucccu

SEQ ID NO: 786002 - RNA, 19 nt, Artificial Sequence
  Description of Artificial Sequence: Synthetic oligonucleotide
  Sense strand starting at position 2281 of SEQ ID NO: 587352
gggaaugaguuggcaugaa

SEQ ID NO: 786003 - RNA, 19 nt, Artificial Sequence
  Description of Artificial Sequence: Synthetic oligonucleotide
  Antisense strand to SEQ ID NO: 786002
uucaugccaacucauuccc

SEQ ID NO: 786004 - RNA, 19 nt, Artificial Sequence
  Description of Artificial Sequence: Synthetic oligonucleotide
  Sense strand starting at position 2285 of SEQ ID NO: 587352
augaguuggcaugaauugu

SEQ ID NO: 786005 - RNA, 19 nt, Artificial Sequence
  Description of Artificial Sequence: Synthetic oligonucleotide
  Antisense strand to SEQ ID NO: 786004
acaauucaugccaacucau

SEQ ID NO: 786006 - RNA, 19 nt, Artificial Sequence
  Description of Artificial Sequence: Synthetic oligonucleotide
  Sense strand starting at position 2289 of SEQ ID NO: 587352
guuggcaugaauuguauua

SEQ ID NO: 786007 - RNA, 19 nt, Artificial Sequence
  Description of Artificial Sequence: Synthetic oligonucleotide
  Antisense strand to SEQ ID NO: 786006
uaauacaauucaugccaac

SEQ ID NO: 786008 - RNA, 19 nt, Artificial Sequence
  Description of Artificial Sequence: Synthetic oligonucleotide
  Sense strand starting at position 2291 of SEQ ID NO: 587352
uggcaugaauuguauuaaa

SEQ ID NO: 786009 - RNA, 19 nt, Artificial Sequence
  Description of Artificial Sequence: Synthetic oligonucleotide
  Antisense strand to SEQ ID NO: 786008
uuuaauacaauucaugcca

SEQ ID NO: 786010 - RNA, 19 nt, Artificial Sequence
  Description of Artificial Sequence: Synthetic oligonucleotide
  Sense strand starting at position 2301 of SEQ ID NO: 587352
uguauuaaaccacauguau

SEQ ID NO: 786011 - RNA, 19 nt, Artificial Sequence
  Description of Artificial Sequence: Synthetic oligonucleotide
  Antisense strand to SEQ ID NO: 786010
auacaugugguuuaauaca

SEQ ID NO: 786012 - RNA, 19 nt, Artificial Sequence
  Description of Artificial Sequence: Synthetic oligonucleotide
  Sense strand starting at position 3082 of SEQ ID NO: 587352
gccgaauuauaccagacgu

SEQ ID NO: 786013 - RNA, 19 nt, Artificial Sequence
  Description of Artificial Sequence: Synthetic oligonucleotide
  Antisense strand to SEQ ID NO: 786012
acgucugguauaauucggc

SEQ ID NO: 786014 - RNA, 19 nt, Artificial Sequence
  Description of Artificial Sequence: Synthetic oligonucleotide
  Sense strand starting at position 3084 of SEQ ID NO: 587352
cgaauuauaccagacguac

SEQ ID NO: 786015 - RNA, 19 nt, Artificial Sequence
  Description of Artificial Sequence: Synthetic oligonucleotide
  Antisense strand to SEQ ID NO: 786014
guacgucugguauaauucg

SEQ ID NO: 786016 - RNA, 19 nt, Artificial Sequence
  Description of Artificial Sequence: Synthetic oligonucleotide
  Sense strand starting at position 3977 of SEQ ID NO: 587352
ugcgaaggaucucuuuaag

SEQ ID NO: 786017 - RNA, 19 nt, Artificial Sequence
  Description of Artificial Sequence: Synthetic oligonucleotide
  Antisense strand to SEQ ID NO: 786016
cuuaaagagauccuucgca

SEQ ID NO: 786018 - RNA, 19 nt, Artificial Sequence
  Description of Artificial Sequence: Synthetic oligonucleotide
  Sense strand starting at position 138 of SEQ ID NO: 587353
ugaagagacgcaugugcau

SEQ ID NO: 786019 - RNA, 19 nt, Artificial Sequence
  Description of Artificial Sequence: Synthetic oligonucleotide
  Antisense strand to SEQ ID NO: 786018
augcacaugcgucucuuca

SEQ ID NO: 786020 - RNA, 19 nt, Artificial Sequence
  Description of Artificial Sequence: Synthetic oligonucleotide
  Sense strand starting at position 404 of SEQ ID NO: 587353
agaugucaucuauaggcca

SEQ ID NO: 786021 - RNA, 19 nt, Artificial Sequence
  Description of Artificial Sequence: Synthetic oligonucleotide
  Antisense strand to SEQ ID NO: 786020
uggccuauagaugacaucu

SEQ ID NO: 786022 - RNA, 19 nt, Artificial Sequence
  Description of Artificial Sequence: Synthetic oligonucleotide
  Sense strand starting at position 509 of SEQ ID NO: 587353
ggcugucaccacugugaca

SEQ ID NO: 786023 - RNA, 19 nt, Artificial Sequence
  Description of Artificial Sequence: Synthetic oligonucleotide
  Antisense strand to SEQ ID NO: 786022
ugucacaguggugacagcc

SEQ ID NO: 786024 - RNA, 19 nt, Artificial Sequence
  Description of Artificial Sequence: Synthetic oligonucleotide
  Sense strand starting at position 680 of SEQ ID NO: 587353
ccuugcuucugagaacaac

SEQ ID NO: 786025 - RNA, 19 nt, Artificial Sequence
  Description of Artificial Sequence: Synthetic oligonucleotide
  Antisense strand to SEQ ID NO: 786024
guuguucucagaagcaagg

SEQ ID NO: 786026 - RNA, 19 nt, Artificial Sequence
  Description of Artificial Sequence: Synthetic oligonucleotide
  Sense strand starting at position 981 of SEQ ID NO: 587353
gcgucuucucugcagaggu

SEQ ID NO: 786027 - RNA, 19 nt, Artificial Sequence
  Description of Artificial Sequence: Synthetic oligonucleotide
  Antisense strand to SEQ ID NO: 786026
accucugcagagaagacgc

SEQ ID NO: 786028 - RNA, 19 nt, Artificial Sequence
  Description of Artificial Sequence: Synthetic oligonucleotide
  Sense strand starting at position 2044 of SEQ ID NO: 587353
ccaggaaccugcucuggaa

SEQ ID NO: 786029 - RNA, 19 nt, Artificial Sequence
  Description of Artificial Sequence: Synthetic oligonucleotide
  Antisense strand to SEQ ID NO: 786028
uuccagagcagguuccugg

SEQ ID NO: 786030 - RNA, 19 nt, Artificial Sequence
  Description of Artificial Sequence: Synthetic oligonucleotide
  Sense strand starting at position 2047 of SEQ ID NO: 587353
ggaaccugcucuggaaaca

SEQ ID NO: 786031 - RNA, 19 nt, Artificial Sequence
  Description of Artificial Sequence: Synthetic oligonucleotide
  Antisense strand to SEQ ID NO: 786030
uguuuccagagcagguucc

SEQ ID NO: 786032 - RNA, 19 nt, Artificial Sequence
  Description of Artificial Sequence: Synthetic oligonucleotide
  Sense strand starting at position 2065 of SEQ ID NO: 587353
auaucacgucaugggagaa

SEQ ID NO: 786033 - RNA, 19 nt, Artificial Sequence
  Description of Artificial Sequence: Synthetic oligonucleotide
  Antisense strand to SEQ ID NO: 786032
uucucccaugacgugauau

SEQ ID NO: 786034 - RNA, 19 nt, Artificial Sequence
  Description of Artificial Sequence: Synthetic oligonucleotide
  Sense strand starting at position 2100 of SEQ ID NO: 587353
cugagacucucagagcgaa

SEQ ID NO: 786035 - RNA, 19 nt, Artificial Sequence
  Description of Artificial Sequence: Synthetic oligonucleotide
  Antisense strand to SEQ ID NO: 786034
uucgcucugagagucucag

SEQ ID NO: 786036 - RNA, 19 nt, Artificial Sequence
  Description of Artificial Sequence: Synthetic oligonucleotide
  Sense strand starting at position 2156 of SEQ ID NO: 587353
ggagaagucaggugccuaa

SEQ ID NO: 786037 - RNA, 19 nt, Artificial Sequence
  Description of Artificial Sequence: Synthetic oligonucleotide
  Antisense strand to SEQ ID NO: 786036
uuaggcaccugacuucucc

SEQ ID NO: 786038 - RNA, 19 nt, Artificial Sequence
  Description of Artificial Sequence: Synthetic oligonucleotide
  Sense strand starting at position 2187 of SEQ ID NO: 587353
gcaaguccugcuggucuga

SEQ ID NO: 786039 - RNA, 19 nt, Artificial Sequence
  Description of Artificial Sequence: Synthetic oligonucleotide
  Antisense strand to SEQ ID NO: 786038
ucagaccagcaggacuugc

SEQ ID NO: 786040 - RNA, 19 nt, Artificial Sequence
  Description of Artificial Sequence: Synthetic oligonucleotide
  Sense strand starting at position 2200 of SEQ ID NO: 587353
gucugaggaugcugagaaa

SEQ ID NO: 786041 - RNA, 19 nt, Artificial Sequence
  Description of Artificial Sequence: Synthetic oligonucleotide
  Antisense strand to SEQ ID NO: 786040
uuucucagcauccucagac

SEQ ID NO: 786042 - RNA, 19 nt, Artificial Sequence
  Description of Artificial Sequence: Synthetic oligonucleotide
  Sense strand starting at position 2313 of SEQ ID NO: 587353
gacuuuaucuuaucgugag

SEQ ID NO: 786043 - RNA, 19 nt, Artificial Sequence
  Description of Artificial Sequence: Synthetic oligonucleotide
  Antisense strand to SEQ ID NO: 786042
cucacgauaagauaaaguc

SEQ ID NO: 786044 - RNA, 19 nt, Artificial Sequence
  Description of Artificial Sequence: Synthetic oligonucleotide
  Sense strand starting at position 2317 of SEQ ID NO: 587353
uuaucuuaucgugagauga

SEQ ID NO: 786045 - RNA, 19 nt, Artificial Sequence
  Description of Artificial Sequence: Synthetic oligonucleotide
  Antisense strand to SEQ ID NO: 786044
ucaucucacgauaagauaa

SEQ ID NO: 786046 - RNA, 19 nt, Artificial Sequence
  Description of Artificial Sequence: Synthetic oligonucleotide
  Sense strand starting at position 2319 of SEQ ID NO: 587353
aucuuaucgugagaugaga

SEQ ID NO: 786047 - RNA, 19 nt, Artificial Sequence
  Description of Artificial Sequence: Synthetic oligonucleotide
  Antisense strand to SEQ ID NO: 786046
ucucaucucacgauaagau

SEQ ID NO: 786048 - RNA, 19 nt, Artificial Sequence
  Description of Artificial Sequence: Synthetic oligonucleotide
  Sense strand starting at position 2336 of SEQ ID NO: 587353
gagggagccuuggauucuu

SEQ ID NO: 786049 - RNA, 19 nt, Artificial Sequence
  Description of Artificial Sequence: Synthetic oligonucleotide
  Antisense strand to SEQ ID NO: 786048
aagaauccaaggcucccuc

SEQ ID NO: 786050 - RNA, 19 nt, Artificial Sequence
  Description of Artificial Sequence: Synthetic oligonucleotide
  Sense strand starting at position 2473 of SEQ ID NO: 587353
acugguuccaugugaggaa

SEQ ID NO: 786051 - RNA, 19 nt, Artificial Sequence
  Description of Artificial Sequence: Synthetic oligonucleotide
  Antisense strand to SEQ ID NO: 786050
uuccucacauggaaccagu

SEQ ID NO: 786052 - RNA, 19 nt, Artificial Sequence
  Description of Artificial Sequence: Synthetic oligonucleotide
  Sense strand starting at position 2474 of SEQ ID NO: 587353
cugguuccaugugaggaau

SEQ ID NO: 786053 - RNA, 19 nt, Artificial Sequence
  Description of Artificial Sequence: Synthetic oligonucleotide
  Antisense strand to SEQ ID NO: 786052
auuccucacauggaaccag

SEQ ID NO: 786054 - RNA, 19 nt, Artificial Sequence
  Description of Artificial Sequence: Synthetic oligonucleotide
  Sense strand starting at position 2486 of SEQ ID NO: 587353
gaggaaucucgauacguug

SEQ ID NO: 786055 - RNA, 19 nt, Artificial Sequence
  Description of Artificial Sequence: Synthetic oligonucleotide
  Antisense strand to SEQ ID NO: 786054
caacguaucgagauuccuc

SEQ ID NO: 786056 - RNA, 19 nt, Artificial Sequence
  Description of Artificial Sequence: Synthetic oligonucleotide
  Sense strand starting at position 2488 of SEQ ID NO: 587353
ggaaucucgauacguuguu

SEQ ID NO: 786057 - RNA, 19 nt, Artificial Sequence
  Description of Artificial Sequence: Synthetic oligonucleotide
  Antisense strand to SEQ ID NO: 786056
aacaacguaucgagauucc

SEQ ID NO: 786058 - RNA, 19 nt, Artificial Sequence
  Description of Artificial Sequence: Synthetic oligonucleotide
  Sense strand starting at position 2489 of SEQ ID NO: 587353
gaaucucgauacguuguua

SEQ ID NO: 786059 - RNA, 19 nt, Artificial Sequence
  Description of Artificial Sequence: Synthetic oligonucleotide
  Antisense strand to SEQ ID NO: 786058
uaacaacguaucgagauuc

SEQ ID NO: 786060 - RNA, 19 nt, Artificial Sequence
  Description of Artificial Sequence: Synthetic oligonucleotide
  Sense strand starting at position 2493 of SEQ ID NO: 587353
cucgauacguuguuaucaa

SEQ ID NO: 786061 - RNA, 19 nt, Artificial Sequence
  Description of Artificial Sequence: Synthetic oligonucleotide
  Antisense strand to SEQ ID NO: 786060
uugauaacaacguaucgag

SEQ ID NO: 786062 - RNA, 19 nt, Artificial Sequence
  Description of Artificial Sequence: Synthetic oligonucleotide
  Sense strand starting at position 2576 of SEQ ID NO: 587353
guauguaauuuguaucccu

SEQ ID NO: 786063 - RNA, 19 nt, Artificial Sequence
  Description of Artificial Sequence: Synthetic oligonucleotide
  Antisense strand to SEQ ID NO: 786062
agggauacaaauuacauac

SEQ ID NO: 786064 - RNA, 19 nt, Artificial Sequence
  Description of Artificial Sequence: Synthetic oligonucleotide
  Sense strand starting at position 2599 of SEQ ID NO: 587353
gcaggauccuaggaguauu

SEQ ID NO: 786065 - RNA, 19 nt, Artificial Sequence
  Description of Artificial Sequence: Synthetic oligonucleotide
  Antisense strand to SEQ ID NO: 786064
aauacuccuaggauccugc

SEQ ID NO: 786066 - RNA, 19 nt, Artificial Sequence
  Description of Artificial Sequence: Synthetic oligonucleotide
  Sense strand starting at position 2682 of SEQ ID NO: 587353
cccugacaucuccgaucuu

SEQ ID NO: 786067 - RNA, 19 nt, Artificial Sequence
  Description of Artificial Sequence: Synthetic oligonucleotide
  Antisense strand to SEQ ID NO: 786066
aagaucggagaugucaggg

SEQ ID NO: 786068 - RNA, 19 nt, Artificial Sequence
  Description of Artificial Sequence: Synthetic oligonucleotide
  Sense strand starting at position 2732 of SEQ ID NO: 587353
aauguuguauaguuggaau

SEQ ID NO: 786069 - RNA, 19 nt, Artificial Sequence
  Description of Artificial Sequence: Synthetic oligonucleotide
  Antisense strand to SEQ ID NO: 786068
auuccaacuauacaacauu

SEQ ID NO: 786070 - RNA, 19 nt, Artificial Sequence
  Description of Artificial Sequence: Synthetic oligonucleotide
  Sense strand starting at position 2734 of SEQ ID NO: 587353
uguuguauaguuggaauga

SEQ ID NO: 786071 - RNA, 19 nt, Artificial Sequence
  Description of Artificial Sequence: Synthetic oligonucleotide
  Antisense strand to SEQ ID NO: 786070
ucauuccaacuauacaaca

SEQ ID NO: 786072 - RNA, 19 nt, Artificial Sequence
  Description of Artificial Sequence: Synthetic oligonucleotide
  Sense strand starting at position 2776 of SEQ ID NO: 587353
ugacguaucucaguuagua

SEQ ID NO: 786073 - RNA, 19 nt, Artificial Sequence
  Description of Artificial Sequence: Synthetic oligonucleotide
  Antisense strand to SEQ ID NO: 786072
uacuaacugagauacguca

SEQ ID NO: 786074 - RNA, 19 nt, Artificial Sequence
  Description of Artificial Sequence: Synthetic oligonucleotide
  Sense strand starting at position 2778 of SEQ ID NO: 587353
acguaucucaguuaguaau

SEQ ID NO: 786075 - RNA, 19 nt, Artificial Sequence
  Description of Artificial Sequence: Synthetic oligonucleotide
  Antisense strand to SEQ ID NO: 786074
auuacuaacugagauacgu

SEQ ID NO: 786076 - RNA, 19 nt, Artificial Sequence
  Description of Artificial Sequence: Synthetic oligonucleotide
  Sense strand starting at position 2780 of SEQ ID NO: 587353
guaucucaguuaguaauau

SEQ ID NO: 786077 - RNA, 19 nt, Artificial Sequence
  Description of Artificial Sequence: Synthetic oligonucleotide
  Antisense strand to SEQ ID NO: 786076
auauuacuaacugagauac

SEQ ID NO: 786078 - RNA, 19 nt, Artificial Sequence
  Description of Artificial Sequence: Synthetic oligonucleotide
  Sense strand starting at position 2788 of SEQ ID NO: 587353
guuaguaauaugcguuuaa

SEQ ID NO: 786079 - RNA, 19 nt, Artificial Sequence
  Description of Artificial Sequence: Synthetic oligonucleotide
  Antisense strand to SEQ ID NO: 786078
uuaaacgcauauuacuaac

SEQ ID NO: 786080 - RNA, 19 nt, Artificial Sequence
  Description of Artificial Sequence: Synthetic oligonucleotide
  Sense strand starting at position 2800 of SEQ ID NO: 587353
cguuuaagguuccuccauu

SEQ ID NO: 786081 - RNA, 19 nt, Artificial Sequence
  Description of Artificial Sequence: Synthetic oligonucleotide
  Antisense strand to SEQ ID NO: 786080
aauggaggaaccuuaaacg

SEQ ID NO: 786082 - RNA, 19 nt, Artificial Sequence
  Description of Artificial Sequence: Synthetic oligonucleotide
  Sense strand starting at position 2801 of SEQ ID NO: 587353
guuuaagguuccuccauuu

SEQ ID NO: 786083 - RNA, 19 nt, Artificial Sequence
  Description of Artificial Sequence: Synthetic oligonucleotide
  Antisense strand to SEQ ID NO: 786082
aaauggaggaaccuuaaac

SEQ ID NO: 786084 - RNA, 19 nt, Artificial Sequence
  Description of Artificial Sequence: Synthetic oligonucleotide
  Sense strand starting at position 2903 of SEQ ID NO: 587353
uuugcaauauacgcuuaaa

SEQ ID NO: 786085 - RNA, 19 nt, Artificial Sequence
  Description of Artificial Sequence: Synthetic oligonucleotide
  Antisense strand to SEQ ID NO: 786084
uuuaagcguauauugcaaa

SEQ ID NO: 786086 - RNA, 19 nt, Artificial Sequence
  Description of Artificial Sequence: Synthetic oligonucleotide
  Sense strand starting at position 2992 of SEQ ID NO: 587353
aucagauauucuuaggcug

SEQ ID NO: 786087 - RNA, 19 nt, Artificial Sequence
  Description of Artificial Sequence: Synthetic oligonucleotide
  Antisense strand to SEQ ID NO: 786086
cagccuaagaauaucugau

SEQ ID NO: 786088 - RNA, 19 nt, Artificial Sequence
  Description of Artificial Sequence: Synthetic oligonucleotide
  Sense strand starting at position 3160 of SEQ ID NO: 587353
gccuguaaucucggcuucu

SEQ ID NO: 786089 - RNA, 19 nt, Artificial Sequence
  Description of Artificial Sequence: Synthetic oligonucleotide
  Antisense strand to SEQ ID NO: 786088
agaagccgagauuacaggc

SEQ ID NO: 786090 - RNA, 19 nt, Artificial Sequence
  Description of Artificial Sequence: Synthetic oligonucleotide
  Sense strand starting at position 3189 of SEQ ID NO: 587353
agucaagaugaaugcuuga

SEQ ID NO: 786091 - RNA, 19 nt, Artificial Sequence
  Description of Artificial Sequence: Synthetic oligonucleotide
  Antisense strand to SEQ ID NO: 786090
ucaagcauucaucuugacu

SEQ ID NO: 786092 - RNA, 19 nt, Artificial Sequence
  Description of Artificial Sequence: Synthetic oligonucleotide
  Sense strand starting at position 3819 of SEQ ID NO: 587353
acugauuccuucugaaaug

SEQ ID NO: 786093 - RNA, 19 nt, Artificial Sequence
  Description of Artificial Sequence: Synthetic oligonucleotide
  Antisense strand to SEQ ID NO: 786092
cauuucagaaggaaucagu

SEQ ID NO: 786094 - RNA, 19 nt, Artificial Sequence
  Description of Artificial Sequence: Synthetic oligonucleotide
  Sense strand starting at position 3864 of SEQ ID NO: 587353
guugcugaccuguaucauu

SEQ ID NO: 786095 - RNA, 19 nt, Artificial Sequence
  Description of Artificial Sequence: Synthetic oligonucleotide
  Antisense strand to SEQ ID NO: 786094
aaugauacaggucagcaac

SEQ ID NO: 786096 - RNA, 19 nt, Artificial Sequence
  Description of Artificial Sequence: Synthetic oligonucleotide
  Sense strand starting at position 3916 of SEQ ID NO: 587353
ucuggcaagucaguucuau

SEQ ID NO: 786097 - RNA, 19 nt, Artificial Sequence
  Description of Artificial Sequence: Synthetic oligonucleotide
  Antisense strand to SEQ ID NO: 786096
auagaacugacuugccaga

SEQ ID NO: 786098 - RNA, 19 nt, Artificial Sequence
  Description of Artificial Sequence: Synthetic oligonucleotide
  Sense strand starting at position 118 of SEQ ID NO: 587354
ggcacaacaccuuauggua

SEQ ID NO: 786099 - RNA, 19 nt, Artificial Sequence
  Description of Artificial Sequence: Synthetic oligonucleotide
  Antisense strand to SEQ ID NO: 786098
uaccauaagguguugugcc

SEQ ID NO: 786100 - RNA, 19 nt, Artificial Sequence
  Description of Artificial Sequence: Synthetic oligonucleotide
  Sense strand starting at position 311 of SEQ ID NO: 587354
gucagacacaaguguauga

SEQ ID NO: 786101 - RNA, 19 nt, Artificial Sequence
  Description of Artificial Sequence: Synthetic oligonucleotide
  Antisense strand to SEQ ID NO: 786100
ucauacacuugugucugac

SEQ ID NO: 786102 - RNA, 19 nt, Artificial Sequence
  Description of Artificial Sequence: Synthetic oligonucleotide
  Sense strand starting at position 315 of SEQ ID NO: 587354
gacacaaguguaugauaga

SEQ ID NO: 786103 - RNA, 19 nt, Artificial Sequence
  Description of Artificial Sequence: Synthetic oligonucleotide
  Antisense strand to SEQ ID NO: 786102
ucuaucauacacuuguguc

SEQ ID NO: 786104 - RNA, 19 nt, Artificial Sequence
  Description of Artificial Sequence: Synthetic oligonucleotide
  Sense strand starting at position 468 of SEQ ID NO: 587354
agguuauauuaaccuagua

SEQ ID NO: 786105 - RNA, 19 nt, Artificial Sequence
  Description of Artificial Sequence: Synthetic oligonucleotide
  Antisense strand to SEQ ID NO: 786104
uacuagguuaauauaaccu

SEQ ID NO: 786106 - RNA, 19 nt, Artificial Sequence
  Description of Artificial Sequence: Synthetic oligonucleotide
  Sense strand starting at position 487 of SEQ ID NO: 587354
acaugauauguugguggaa

SEQ ID NO: 786107 - RNA, 19 nt, Artificial Sequence
  Description of Artificial Sequence: Synthetic oligonucleotide
  Antisense strand to SEQ ID NO: 786106
uuccaccaacauaucaugu

SEQ ID NO: 786108 - RNA, 19 nt, Artificial Sequence
  Description of Artificial Sequence: Synthetic oligonucleotide
  Sense strand starting at position 488 of SEQ ID NO: 587354
caugauauguugguggaaa

SEQ ID NO: 786109 - RNA, 19 nt, Artificial Sequence
  Description of Artificial Sequence: Synthetic oligonucleotide
  Antisense strand to SEQ ID NO: 786108
uuuccaccaacauaucaug

SEQ ID NO: 786110 - RNA, 19 nt, Artificial Sequence
  Description of Artificial Sequence: Synthetic oligonucleotide
  Sense strand starting at position 977 of SEQ ID NO: 587354
ucuguaccucuugauagaa

SEQ ID NO: 786111 - RNA, 19 nt, Artificial Sequence
  Description of Artificial Sequence: Synthetic oligonucleotide
  Antisense strand to SEQ ID NO: 786110
uucuaucaagagguacaga

SEQ ID NO: 786112 - RNA, 19 nt, Artificial Sequence
  Description of Artificial Sequence: Synthetic oligonucleotide
  Sense strand starting at position 1283 of SEQ ID NO: 587354
aaaugaaaucgaugucaca

SEQ ID NO: 786113 - RNA, 19 nt, Artificial Sequence
  Description of Artificial Sequence: Synthetic oligonucleotide
  Antisense strand to SEQ ID NO: 786112
ugugacaucgauuucauuu

SEQ ID NO: 786114 - RNA, 19 nt, Artificial Sequence
  Description of Artificial Sequence: Synthetic oligonucleotide
  Sense strand starting at position 1358 of SEQ ID NO: 587354
guaauagaaugaucagcuc

SEQ ID NO: 786115 - RNA, 19 nt, Artificial Sequence
  Description of Artificial Sequence: Synthetic oligonucleotide
  Antisense strand to SEQ ID NO: 786114
gagcugaucauucuauuac

SEQ ID NO: 786116 - RNA, 19 nt, Artificial Sequence
  Description of Artificial Sequence: Synthetic oligonucleotide
  Sense strand starting at position 1411 of SEQ ID NO: 587354
cuaugcgaugcacaagaau

SEQ ID NO: 786117 - RNA, 19 nt, Artificial Sequence
  Description of Artificial Sequence: Synthetic oligonucleotide
  Antisense strand to SEQ ID NO: 786116
auucuugugcaucgcauag

SEQ ID NO: 786118 - RNA, 19 nt, Artificial Sequence
  Description of Artificial Sequence: Synthetic oligonucleotide
  Sense strand starting at position 1420 of SEQ ID NO: 587354
gcacaagaaugagcuuaaa

SEQ ID NO: 786119 - RNA, 19 nt, Artificial Sequence
  Description of Artificial Sequence: Synthetic oligonucleotide
  Antisense strand to SEQ ID NO: 786118
uuuaagcucauucuugugc

SEQ ID NO: 786120 - RNA, 19 nt, Artificial Sequence
  Description of Artificial Sequence: Synthetic oligonucleotide
  Sense strand starting at position 1467 of SEQ ID NO: 587354
auugaagccaugugagaga

SEQ ID NO: 786121 - RNA, 19 nt, Artificial Sequence
  Description of Artificial Sequence: Synthetic oligonucleotide
  Antisense strand to SEQ ID NO: 786120
ucucucacauggcuucaau

SEQ ID NO: 786122 - RNA, 19 nt, Artificial Sequence
  Description of Artificial Sequence: Synthetic oligonucleotide
  Sense strand starting at position 1540 of SEQ ID NO: 587354
gggcuuccucuuuagauac

SEQ ID NO: 786123 - RNA, 19 nt, Artificial Sequence
  Description of Artificial Sequence: Synthetic oligonucleotide
  Antisense strand to SEQ ID NO: 786122
guaucuaaagaggaagccc

SEQ ID NO: 786124 - RNA, 19 nt, Artificial Sequence
  Description of Artificial Sequence: Synthetic oligonucleotide
  Sense strand starting at position 1638 of SEQ ID NO: 587354
gguauaugccaauacuaaa

SEQ ID NO: 786125 - RNA, 19 nt, Artificial Sequence
  Description of Artificial Sequence: Synthetic oligonucleotide
  Antisense strand to SEQ ID NO: 786124
uuuaguauuggcauauacc

SEQ ID NO: 786126 - RNA, 19 nt, Artificial Sequence
  Description of Artificial Sequence: Synthetic oligonucleotide
  Sense strand starting at position 1673 of SEQ ID NO: 587354
ugucuugugagauauagua

SEQ ID NO: 786127 - RNA, 19 nt, Artificial Sequence
  Description of Artificial Sequence: Synthetic oligonucleotide
  Antisense strand to SEQ ID NO: 786126
uacuauaucucacaagaca

SEQ ID NO: 786128 - RNA, 19 nt, Artificial Sequence
  Description of Artificial Sequence: Synthetic oligonucleotide
  Sense strand starting at position 1920 of SEQ ID NO: 587354
caaagauguggucaucauu

SEQ ID NO: 786129 - RNA, 19 nt, Artificial Sequence
  Description of Artificial Sequence: Synthetic oligonucleotide
  Antisense strand to SEQ ID NO: 786128
aaugaugaccacaucuuug

SEQ ID NO: 786130 - RNA, 19 nt, Artificial Sequence
  Description of Artificial Sequence: Synthetic oligonucleotide
  Sense strand starting at position 2122 of SEQ ID NO: 587354
guaacuggccuugaacuaa

SEQ ID NO: 786131 - RNA, 19 nt, Artificial Sequence
  Description of Artificial Sequence: Synthetic oligonucleotide
  Antisense strand to SEQ ID NO: 786130
uuaguucaaggccaguuac

SEQ ID NO: 786132 - RNA, 19 nt, Artificial Sequence
  Description of Artificial Sequence: Synthetic oligonucleotide
  Sense strand starting at position 2180 of SEQ ID NO: 587354
ccugcaauacuugauaagu

SEQ ID NO: 786133 - RNA, 19 nt, Artificial Sequence
  Description of Artificial Sequence: Synthetic oligonucleotide
  Antisense strand to SEQ ID NO: 786132
acuuaucaaguauugcagg

SEQ ID NO: 786134 - RNA, 19 nt, Artificial Sequence
  Description of Artificial Sequence: Synthetic oligonucleotide
  Sense strand starting at position 2196 of SEQ ID NO: 587354
aguugaaggucucucaaau

SEQ ID NO: 786135 - RNA, 19 nt, Artificial Sequence
  Description of Artificial Sequence: Synthetic oligonucleotide
  Antisense strand to SEQ ID NO: 786134
auuugagagaccuucaacu

SEQ ID NO: 786136 - RNA, 19 nt, Artificial Sequence
  Description of Artificial Sequence: Synthetic oligonucleotide
  Sense strand starting at position 2254 of SEQ ID NO: 587354
auauuaagaguuugguaug

SEQ ID NO: 786137 - RNA, 19 nt, Artificial Sequence
  Description of Artificial Sequence: Synthetic oligonucleotide
  Antisense strand to SEQ ID NO: 786136
cauaccaaacucuuaauau

SEQ ID NO: 786138 - RNA, 19 nt, Artificial Sequence
  Description of Artificial Sequence: Synthetic oligonucleotide
  Sense strand starting at position 2297 of SEQ ID NO: 587354
uuaagaugggcauagcuaa

SEQ ID NO: 786139 - RNA, 19 nt, Artificial Sequence
  Description of Artificial Sequence: Synthetic oligonucleotide
  Antisense strand to SEQ ID NO: 786138
uuagcuaugcccaucuuaa

SEQ ID NO: 786140 - RNA, 19 nt, Artificial Sequence
  Description of Artificial Sequence: Synthetic oligonucleotide
  Sense strand starting at position 2371 of SEQ ID NO: 587354
cuuauaauuuggucuuguu

SEQ ID NO: 786141 - RNA, 19 nt, Artificial Sequence
  Description of Artificial Sequence: Synthetic oligonucleotide
  Antisense strand to SEQ ID NO: 786140
aacaagaccaaauuauaag

SEQ ID NO: 786142 - RNA, 19 nt, Artificial Sequence
  Description of Artificial Sequence: Synthetic oligonucleotide
  Sense strand starting at position 2415 of SEQ ID NO: 587354
gugcuuugccagagagacg

SEQ ID NO: 786143 - RNA, 19 nt, Artificial Sequence
  Description of Artificial Sequence: Synthetic oligonucleotide
  Antisense strand to SEQ ID NO: 786142
cgucucucuggcaaagcac

SEQ ID NO: 786144 - RNA, 19 nt, Artificial Sequence
  Description of Artificial Sequence: Synthetic oligonucleotide
  Sense strand starting at position 2426 of SEQ ID NO: 587354
gagagacggugaucaaguu

SEQ ID NO: 786145 - RNA, 19 nt, Artificial Sequence
  Description of Artificial Sequence: Synthetic oligonucleotide
  Antisense strand to SEQ ID NO: 786144
aacuugaucaccgucucuc

SEQ ID NO: 786146 - RNA, 19 nt, Artificial Sequence
  Description of Artificial Sequence: Synthetic oligonucleotide
  Sense strand starting at position 2554 of SEQ ID NO: 587354
ucaagagaguauucuacau

SEQ ID NO: 786147 - RNA, 19 nt, Artificial Sequence
  Description of Artificial Sequence: Synthetic oligonucleotide
  Antisense strand to SEQ ID NO: 786146
auguagaauacucucuuga

SEQ ID NO: 786148 - RNA, 19 nt, Artificial Sequence
  Description of Artificial Sequence: Synthetic oligonucleotide
  Sense strand starting at position 2575 of SEQ ID NO: 587354
gugcauccucuagauaaau

SEQ ID NO: 786149 - RNA, 19 nt, Artificial Sequence
  Description of Artificial Sequence: Synthetic oligonucleotide
  Antisense strand to SEQ ID NO: 786148
auuuaucuagaggaugcac

SEQ ID NO: 786150 - RNA, 19 nt, Artificial Sequence
  Description of Artificial Sequence: Synthetic oligonucleotide
  Sense strand starting at position 2710 of SEQ ID NO: 587354
acauaucuugguggaaagu

SEQ ID NO: 786151 - RNA, 19 nt, Artificial Sequence
  Description of Artificial Sequence: Synthetic oligonucleotide
  Antisense strand to SEQ ID NO: 786150
acuuuccaccaagauaugu

SEQ ID NO: 786152 - RNA, 19 nt, Artificial Sequence
  Description of Artificial Sequence: Synthetic oligonucleotide
  Sense strand starting at position 2813 of SEQ ID NO: 587354
acuuuauuucuguguacac

SEQ ID NO: 786153 - RNA, 19 nt, Artificial Sequence
  Description of Artificial Sequence: Synthetic oligonucleotide
  Antisense strand to SEQ ID NO: 786152
guguacacagaaauaaagu

SEQ ID NO: 786154 - RNA, 19 nt, Artificial Sequence
  Description of Artificial Sequence: Synthetic oligonucleotide
  Sense strand starting at position 2846 of SEQ ID NO: 587354
aguauuuauuacgugccaa

SEQ ID NO: 786155 - RNA, 19 nt, Artificial Sequence
  Description of Artificial Sequence: Synthetic oligonucleotide
  Antisense strand to SEQ ID NO: 786154
uuggcacguaauaaauacu

SEQ ID NO: 786156 - RNA, 19 nt, Artificial Sequence
  Description of Artificial Sequence: Synthetic oligonucleotide
  Sense strand starting at position 2847 of SEQ ID NO: 587354
guauuuauuacgugccaag

SEQ ID NO: 786157 - RNA, 19 nt, Artificial Sequence
  Description of Artificial Sequence: Synthetic oligonucleotide
  Antisense strand to SEQ ID NO: 786156
cuuggcacguaauaaauac

SEQ ID NO: 786158 - RNA, 19 nt, Artificial Sequence
  Description of Artificial Sequence: Synthetic oligonucleotide
  Sense strand starting at position 2926 of SEQ ID NO: 587354
uggagauucuauuccaaug

SEQ ID NO: 786159 - RNA, 19 nt, Artificial Sequence
  Description of Artificial Sequence: Synthetic oligonucleotide
  Antisense strand to SEQ ID NO: 786158
cauuggaauagaaucucca

SEQ ID NO: 786160 - RNA, 19 nt, Artificial Sequence
  Description of Artificial Sequence: Synthetic oligonucleotide
  Sense strand starting at position 3050 of SEQ ID NO: 587354
cugaaauugugacauuuga

SEQ ID NO: 786161 - RNA, 19 nt, Artificial Sequence
  Description of Artificial Sequence: Synthetic oligonucleotide
  Antisense strand to SEQ ID NO: 786160
ucaaaugucacaauuucag

SEQ ID NO: 786162 - RNA, 19 nt, Artificial Sequence
  Description of Artificial Sequence: Synthetic oligonucleotide
  Sense strand starting at position 3142 of SEQ ID NO: 587354
augcaaugucuugagucaa

SEQ ID NO: 786163 - RNA, 19 nt, Artificial Sequence
  Description of Artificial Sequence: Synthetic oligonucleotide
  Antisense strand to SEQ ID NO: 786162
uugacucaagacauugcau

SEQ ID NO: 786164 - RNA, 19 nt, Artificial Sequence
  Description of Artificial Sequence: Synthetic oligonucleotide
  Sense strand starting at position 3162 of SEQ ID NO: 587354
gaucaacuuggugagucua

SEQ ID NO: 786165 - RNA, 19 nt, Artificial Sequence
  Description of Artificial Sequence: Synthetic oligonucleotide
  Antisense strand to SEQ ID NO: 786164
uagacucaccaaguugauc

SEQ ID NO: 786166 - RNA, 19 nt, Artificial Sequence
  Description of Artificial Sequence: Synthetic oligonucleotide
  Sense strand starting at position 3211 of SEQ ID NO: 587354
agcagagugaaugagaguu

SEQ ID NO: 786167 - RNA, 19 nt, Artificial Sequence
  Description of Artificial Sequence: Synthetic oligonucleotide
  Antisense strand to SEQ ID NO: 786166
aacucucauucacucugcu

SEQ ID NO: 786168 - RNA, 19 nt, Artificial Sequence
  Description of Artificial Sequence: Synthetic oligonucleotide
  Sense strand starting at position 3369 of SEQ ID NO: 587354
ugaauaugugcuuaaucuu

SEQ ID NO: 786169 - RNA, 19 nt, Artificial Sequence
  Description of Artificial Sequence: Synthetic oligonucleotide
  Antisense strand to SEQ ID NO: 786168
aagauuaagcacauauuca

SEQ ID NO: 786170 - RNA, 19 nt, Artificial Sequence
  Description of Artificial Sequence: Synthetic oligonucleotide
  Sense strand starting at position 3384 of SEQ ID NO: 587354
ucuuccauuggauaaaugu

SEQ ID NO: 786171 - RNA, 19 nt, Artificial Sequence
  Description of Artificial Sequence: Synthetic oligonucleotide
  Antisense strand to SEQ ID NO: 786170
acauuuauccaauggaaga

SEQ ID NO: 786172 - RNA, 19 nt, Artificial Sequence
  Description of Artificial Sequence: Synthetic oligonucleotide
  Sense strand starting at position 3623 of SEQ ID NO: 587354
ugcauuuauuuagacaggu

SEQ ID NO: 786173 - RNA, 19 nt, Artificial Sequence
  Description of Artificial Sequence: Synthetic oligonucleotide
  Antisense strand to SEQ ID NO: 786172
accugucuaaauaaaugca

SEQ ID NO: 786174 - RNA, 19 nt, Artificial Sequence
  Description of Artificial Sequence: Synthetic oligonucleotide
  Sense strand starting at position 3779 of SEQ ID NO: 587354
uuacuucucgggcaaauga

SEQ ID NO: 786175 - RNA, 19 nt, Artificial Sequence
  Description of Artificial Sequence: Synthetic oligonucleotide
  Antisense strand to SEQ ID NO: 786174
ucauuugcccgagaaguaa

SEQ ID NO: 786176 - RNA, 19 nt, Artificial Sequence
  Description of Artificial Sequence: Synthetic oligonucleotide
  Sense strand starting at position 3824 of SEQ ID NO: 587354
aaggaagucaggcauggua

SEQ ID NO: 786177 - RNA, 19 nt, Artificial Sequence
  Description of Artificial Sequence: Synthetic oligonucleotide
  Antisense strand to SEQ ID NO: 786176
uaccaugccugacuuccuu

SEQ ID NO: 786178 - RNA, 19 nt, Artificial Sequence
  Description of Artificial Sequence: Synthetic oligonucleotide
  Sense strand starting at position 22 of SEQ ID NO: 587355
ugcauauuagcauaagcuu

SEQ ID NO: 786179 - RNA, 19 nt, Artificial Sequence
  Description of Artificial Sequence: Synthetic oligonucleotide
  Antisense strand to SEQ ID NO: 786178
aagcuuaugcuaauaugca

SEQ ID NO: 786180 - RNA, 19 nt, Artificial Sequence
  Description of Artificial Sequence: Synthetic oligonucleotide
  Sense strand starting at position 83 of SEQ ID NO: 587355
ucuguucuuagaggugaua

SEQ ID NO: 786181 - RNA, 19 nt, Artificial Sequence
  Description of Artificial Sequence: Synthetic oligonucleotide
  Antisense strand to SEQ ID NO: 786180
uaucaccucuaagaacaga

SEQ ID NO: 786182 - RNA, 19 nt, Artificial Sequence
  Description of Artificial Sequence: Synthetic oligonucleotide
  Sense strand starting at position 85 of SEQ ID NO: 587355
uguucuuagaggugauauc

SEQ ID NO: 786183 - RNA, 19 nt, Artificial Sequence
  Description of Artificial Sequence: Synthetic oligonucleotide
  Antisense strand to SEQ ID NO: 786182
gauaucaccucuaagaaca

SEQ ID NO: 786184 - RNA, 19 nt, Artificial Sequence
  Description of Artificial Sequence: Synthetic oligonucleotide
  Sense strand starting at position 86 of SEQ ID NO: 587355
guucuuagaggugauaucu

SEQ ID NO: 786185 - RNA, 19 nt, Artificial Sequence
  Description of Artificial Sequence: Synthetic oligonucleotide
  Antisense strand to SEQ ID NO: 786184
agauaucaccucuaagaac

SEQ ID NO: 786186 - RNA, 19 nt, Artificial Sequence
  Description of Artificial Sequence: Synthetic oligonucleotide
  Sense strand starting at position 158 of SEQ ID NO: 587355
ggaacaugacucuguacug

SEQ ID NO: 786187 - RNA, 19 nt, Artificial Sequence
  Description of Artificial Sequence: Synthetic oligonucleotide
  Antisense strand to SEQ ID NO: 786186
caguacagagucauguucc

SEQ ID NO: 786188 - RNA, 19 nt, Artificial Sequence
  Description of Artificial Sequence: Synthetic oligonucleotide
  Sense strand starting at position 164 of SEQ ID NO: 587355
ugacucuguacugggacaa

SEQ ID NO: 786189 - RNA, 19 nt, Artificial Sequence
  Description of Artificial Sequence: Synthetic oligonucleotide
  Antisense strand to SEQ ID NO: 786188
uugucccaguacagaguca

SEQ ID NO: 786190 - RNA, 19 nt, Artificial Sequence
  Description of Artificial Sequence: Synthetic oligonucleotide
  Sense strand starting at position 165 of SEQ ID NO: 587355
gacucuguacugggacaaa

SEQ ID NO: 786191 - RNA, 19 nt, Artificial Sequence
  Description of Artificial Sequence: Synthetic oligonucleotide
  Antisense strand to SEQ ID NO: 786190
uuugucccaguacagaguc

SEQ ID NO: 786192 - RNA, 19 nt, Artificial Sequence
  Description of Artificial Sequence: Synthetic oligonucleotide
  Sense strand starting at position 202 of SEQ ID NO: 587355
acugaaaugcaguauaauc

SEQ ID NO: 786193 - RNA, 19 nt, Artificial Sequence
  Description of Artificial Sequence: Synthetic oligonucleotide
  Antisense strand to SEQ ID NO: 786192
gauuauacugcauuucagu

SEQ ID NO: 786194 - RNA, 19 nt, Artificial Sequence
  Description of Artificial Sequence: Synthetic oligonucleotide
  Sense strand starting at position 264 of SEQ ID NO: 587355
guaugaaggaauuggcagu

SEQ ID NO: 786195 - RNA, 19 nt, Artificial Sequence
  Description of Artificial Sequence: Synthetic oligonucleotide
  Antisense strand to SEQ ID NO: 786194
acugccaauuccuucauac

SEQ ID NO: 786196 - RNA, 19 nt, Artificial Sequence
  Description of Artificial Sequence: Synthetic oligonucleotide
  Sense strand starting at position 280 of SEQ ID NO: 587355
aguugauggcaugaauauc

SEQ ID NO: 786197 - RNA, 19 nt, Artificial Sequence
  Description of Artificial Sequence: Synthetic oligonucleotide
  Antisense strand to SEQ ID NO: 786196
gauauucaugccaucaacu

SEQ ID NO: 786198 - RNA, 19 nt, Artificial Sequence
  Description of Artificial Sequence: Synthetic oligonucleotide
  Sense strand starting at position 286 of SEQ ID NO: 587355
uggcaugaauaucucagua

SEQ ID NO: 786199 - RNA, 19 nt, Artificial Sequence
  Description of Artificial Sequence: Synthetic oligonucleotide
  Antisense strand to SEQ ID NO: 786198
uacugagauauucaugcca

SEQ ID NO: 786200 - RNA, 19 nt, Artificial Sequence
  Description of Artificial Sequence: Synthetic oligonucleotide
  Sense strand starting at position 330 of SEQ ID NO: 587355
agaucagccuauucucaga

SEQ ID NO: 786201 - RNA, 19 nt, Artificial Sequence
  Description of Artificial Sequence: Synthetic oligonucleotide
  Antisense strand to SEQ ID NO: 786200
ucugagaauaggcugaucu

SEQ ID NO: 786202 - RNA, 19 nt, Artificial Sequence
  Description of Artificial Sequence: Synthetic oligonucleotide
  Sense strand starting at position 338 of SEQ ID NO: 587355
cuauucucagaaugcuaga

SEQ ID NO: 786203 - RNA, 19 nt, Artificial Sequence
  Description of Artificial Sequence: Synthetic oligonucleotide
  Antisense strand to SEQ ID NO: 786202
ucuagcauucugagaauag

SEQ ID NO: 786204 - RNA, 19 nt, Artificial Sequence
  Description of Artificial Sequence: Synthetic oligonucleotide
  Sense strand starting at position 466 of SEQ ID NO: 587355
cugcauguaaagugggaau

SEQ ID NO: 786205 - RNA, 19 nt, Artificial Sequence
  Description of Artificial Sequence: Synthetic oligonucleotide
  Antisense strand to SEQ ID NO: 786204
auucccacuuuacaugcag

SEQ ID NO: 786206 - RNA, 19 nt, Artificial Sequence
  Description of Artificial Sequence: Synthetic oligonucleotide
  Sense strand starting at position 634 of SEQ ID NO: 587355
uccucaucuugggcucuaa

SEQ ID NO: 786207 - RNA, 19 nt, Artificial Sequence
  Description of Artificial Sequence: Synthetic oligonucleotide
  Antisense strand to SEQ ID NO: 786206
uuagagcccaagaugagga

SEQ ID NO: 786208 - RNA, 19 nt, Artificial Sequence
  Description of Artificial Sequence: Synthetic oligonucleotide
  Sense strand starting at position 759 of SEQ ID NO: 587355
ccaggcauucuagaaaugu

SEQ ID NO: 786209 - RNA, 19 nt, Artificial Sequence
  Description of Artificial Sequence: Synthetic oligonucleotide
  Antisense strand to SEQ ID NO: 786208
acauuucuagaaugccugg

SEQ ID NO: 786210 - RNA, 19 nt, Artificial Sequence
  Description of Artificial Sequence: Synthetic oligonucleotide
  Sense strand starting at position 1176 of SEQ ID NO: 587355
ucacgaggcauguacuauu

SEQ ID NO: 786211 - RNA, 19 nt, Artificial Sequence
  Description of Artificial Sequence: Synthetic oligonucleotide
  Antisense strand to SEQ ID NO: 786210
aauaguacaugccucguga

SEQ ID NO: 786212 - RNA, 19 nt, Artificial Sequence
  Description of Artificial Sequence: Synthetic oligonucleotide
  Sense strand starting at position 1242 of SEQ ID NO: 587355
ggcacucagaguuauuguu

SEQ ID NO: 786213 - RNA, 19 nt, Artificial Sequence
  Description of Artificial Sequence: Synthetic oligonucleotide
  Antisense strand to SEQ ID NO: 786212
aacaauaacucugagugcc

SEQ ID NO: 786214 - RNA, 19 nt, Artificial Sequence
  Description of Artificial Sequence: Synthetic oligonucleotide
  Sense strand starting at position 1331 of SEQ ID NO: 587355
ugaaaugcucuaugaauuc

SEQ ID NO: 786215 - RNA, 19 nt, Artificial Sequence
  Description of Artificial Sequence: Synthetic oligonucleotide
  Antisense strand to SEQ ID NO: 786214
gaauucauagagcauuuca

SEQ ID NO: 786216 - RNA, 19 nt, Artificial Sequence
  Description of Artificial Sequence: Synthetic oligonucleotide
  Sense strand starting at position 1340 of SEQ ID NO: 587355
cuaugaauucuaggccaua

SEQ ID NO: 786217 - RNA, 19 nt, Artificial Sequence
  Description of Artificial Sequence: Synthetic oligonucleotide
  Antisense strand to SEQ ID NO: 786216
uauggccuagaauucauag

SEQ ID NO: 786218 - RNA, 19 nt, Artificial Sequence
  Description of Artificial Sequence: Synthetic oligonucleotide
  Sense strand starting at position 1384 of SEQ ID NO: 587355
acacaaugugucugugaug

SEQ ID NO: 786219 - RNA, 19 nt, Artificial Sequence
  Description of Artificial Sequence: Synthetic oligonucleotide
  Antisense strand to SEQ ID NO: 786218
caucacagacacauugugu

SEQ ID NO: 786220 - RNA, 19 nt, Artificial Sequence
  Description of Artificial Sequence: Synthetic oligonucleotide
  Sense strand starting at position 1466 of SEQ ID NO: 587355
gucccaaagcuuuaauaug

SEQ ID NO: 786221 - RNA, 19 nt, Artificial Sequence
  Description of Artificial Sequence: Synthetic oligonucleotide
  Antisense strand to SEQ ID NO: 786220
cauauuaaagcuuugggac

SEQ ID NO: 786222 - RNA, 19 nt, Artificial Sequence
  Description of Artificial Sequence: Synthetic oligonucleotide
  Sense strand starting at position 1509 of SEQ ID NO: 587355
agaagaagccuuuguuauu

SEQ ID NO: 786223 - RNA, 19 nt, Artificial Sequence
  Description of Artificial Sequence: Synthetic oligonucleotide
  Antisense strand to SEQ ID NO: 786222
aauaacaaaggcuucuucu

SEQ ID NO: 786224 - RNA, 19 nt, Artificial Sequence
  Description of Artificial Sequence: Synthetic oligonucleotide
  Sense strand starting at position 1510 of SEQ ID NO: 587355
gaagaagccuuuguuauua

SEQ ID NO: 786225 - RNA, 19 nt, Artificial Sequence
  Description of Artificial Sequence: Synthetic oligonucleotide
  Antisense strand to SEQ ID NO: 786224
uaauaacaaaggcuucuuc

SEQ ID NO: 786226 - RNA, 19 nt, Artificial Sequence
  Description of Artificial Sequence: Synthetic oligonucleotide
  Sense strand starting at position 1568 of SEQ ID NO: 587355
gacugucugcacuggaaau

SEQ ID NO: 786227 - RNA, 19 nt, Artificial Sequence
  Description of Artificial Sequence: Synthetic oligonucleotide
  Antisense strand to SEQ ID NO: 786226
auuuccagugcagacaguc

SEQ ID NO: 786228 - RNA, 19 nt, Artificial Sequence
  Description of Artificial Sequence: Synthetic oligonucleotide
  Sense strand starting at position 2244 of SEQ ID NO: 587355
cugcuugucccucaagaug

SEQ ID NO: 786229 - RNA, 19 nt, Artificial Sequence
  Description of Artificial Sequence: Synthetic oligonucleotide
  Antisense strand to SEQ ID NO: 786228
caucuugagggacaagcag

SEQ ID NO: 786230 - RNA, 19 nt, Artificial Sequence
  Description of Artificial Sequence: Synthetic oligonucleotide
  Sense strand starting at position 2252 of SEQ ID NO: 587355
cccucaagaugcuugugaa

SEQ ID NO: 786231 - RNA, 19 nt, Artificial Sequence
  Description of Artificial Sequence: Synthetic oligonucleotide
  Antisense strand to SEQ ID NO: 786230
uucacaagcaucuugaggg

SEQ ID NO: 786232 - RNA, 19 nt, Artificial Sequence
  Description of Artificial Sequence: Synthetic oligonucleotide
  Sense strand starting at position 2253 of SEQ ID NO: 587355
ccucaagaugcuugugaag

SEQ ID NO: 786233 - RNA, 19 nt, Artificial Sequence
  Description of Artificial Sequence: Synthetic oligonucleotide
  Antisense strand to SEQ ID NO: 786232
cuucacaagcaucuugagg

SEQ ID NO: 786234 - RNA, 19 nt, Artificial Sequence
  Description of Artificial Sequence: Synthetic oligonucleotide
  Sense strand starting at position 2572 of SEQ ID NO: 587355
agagaagugguucaaguac

SEQ ID NO: 786235 - RNA, 19 nt, Artificial Sequence
  Description of Artificial Sequence: Synthetic oligonucleotide
  Antisense strand to SEQ ID NO: 786234
guacuugaaccacuucucu

SEQ ID NO: 786236 - RNA, 19 nt, Artificial Sequence
  Description of Artificial Sequence: Synthetic oligonucleotide
  Sense strand starting at position 2748 of SEQ ID NO: 587355
gguugcucacuugauaaau

SEQ ID NO: 786237 - RNA, 19 nt, Artificial Sequence
  Description of Artificial Sequence: Synthetic oligonucleotide
  Antisense strand to SEQ ID NO: 786236
auuuaucaagugagcaacc

SEQ ID NO: 786238 - RNA, 19 nt, Artificial Sequence
  Description of Artificial Sequence: Synthetic oligonucleotide
  Sense strand starting at position 2808 of SEQ ID NO: 587355
gguccuauucgaggacuug

SEQ ID NO: 786239 - RNA, 19 nt, Artificial Sequence
  Description of Artificial Sequence: Synthetic oligonucleotide
  Antisense strand to SEQ ID NO: 786238
caaguccucgaauaggacc

SEQ ID NO: 786240 - RNA, 19 nt, Artificial Sequence
  Description of Artificial Sequence: Synthetic oligonucleotide
  Sense strand starting at position 2809 of SEQ ID NO: 587355
guccuauucgaggacuugu

SEQ ID NO: 786241 - RNA, 19 nt, Artificial Sequence
  Description of Artificial Sequence: Synthetic oligonucleotide
  Antisense strand to SEQ ID NO: 786240
acaaguccucgaauaggac

SEQ ID NO: 786242 - RNA, 19 nt, Artificial Sequence
  Description of Artificial Sequence: Synthetic oligonucleotide
  Sense strand starting at position 2839 of SEQ ID NO: 587355
augcaacacuucucuggaa

SEQ ID NO: 786243 - RNA, 19 nt, Artificial Sequence
  Description of Artificial Sequence: Synthetic oligonucleotide
  Antisense strand to SEQ ID NO: 786242
uuccagagaaguguugcau

SEQ ID NO: 786244 - RNA, 19 nt, Artificial Sequence
  Description of Artificial Sequence: Synthetic oligonucleotide
  Sense strand starting at position 2840 of SEQ ID NO: 587355
ugcaacacuucucuggaau

SEQ ID NO: 786245 - RNA, 19 nt, Artificial Sequence
  Description of Artificial Sequence: Synthetic oligonucleotide
  Antisense strand to SEQ ID NO: 786244
auuccagagaaguguugca

SEQ ID NO: 786246 - RNA, 19 nt, Artificial Sequence
  Description of Artificial Sequence: Synthetic oligonucleotide
  Sense strand starting at position 2841 of SEQ ID NO: 587355
gcaacacuucucuggaaug

SEQ ID NO: 786247 - RNA, 19 nt, Artificial Sequence
  Description of Artificial Sequence: Synthetic oligonucleotide
  Antisense strand to SEQ ID NO: 786246
cauuccagagaaguguugc

SEQ ID NO: 786248 - RNA, 19 nt, Artificial Sequence
  Description of Artificial Sequence: Synthetic oligonucleotide
  Sense strand starting at position 3014 of SEQ ID NO: 587355
ugagaagcccugcacaaau

SEQ ID NO: 786249 - RNA, 19 nt, Artificial Sequence
  Description of Artificial Sequence: Synthetic oligonucleotide
  Antisense strand to SEQ ID NO: 786248
auuugugcagggcuucuca

SEQ ID NO: 786250 - RNA, 19 nt, Artificial Sequence
  Description of Artificial Sequence: Synthetic oligonucleotide
  Sense strand starting at position 3165 of SEQ ID NO: 587355
cucuaaugaucagugucau

SEQ ID NO: 786251 - RNA, 19 nt, Artificial Sequence
  Description of Artificial Sequence: Synthetic oligonucleotide
  Antisense strand to SEQ ID NO: 786250
augacacugaucauuagag

SEQ ID NO: 786252 - RNA, 19 nt, Artificial Sequence
  Description of Artificial Sequence: Synthetic oligonucleotide
  Sense strand starting at position 3220 of SEQ ID NO: 587355
uuuggaaaucaguguggua

SEQ ID NO: 786253 - RNA, 19 nt, Artificial Sequence
  Description of Artificial Sequence: Synthetic oligonucleotide
  Antisense strand to SEQ ID NO: 786252
uaccacacugauuuccaaa

SEQ ID NO: 786254 - RNA, 19 nt, Artificial Sequence
  Description of Artificial Sequence: Synthetic oligonucleotide
  Sense strand starting at position 3933 of SEQ ID NO: 587355
gcugaagagguuggcuaaa

SEQ ID NO: 786255 - RNA, 19 nt, Artificial Sequence
  Description of Artificial Sequence: Synthetic oligonucleotide
  Antisense strand to SEQ ID NO: 786254
uuuagccaaccucuucagc

SEQ ID NO: 786256 - RNA, 19 nt, Artificial Sequence
  Description of Artificial Sequence: Synthetic oligonucleotide
  Sense strand starting at position 3935 of SEQ ID NO: 587355
ugaagagguuggcuaaaca

SEQ ID NO: 786257 - RNA, 19 nt, Artificial Sequence
  Description of Artificial Sequence: Synthetic oligonucleotide
  Antisense strand to SEQ ID NO: 786256
uguuuagccaaccucuuca

SEQ ID NO: 786258 - RNA, 19 nt, Artificial Sequence
  Description of Artificial Sequence: Synthetic oligonucleotide
  Sense strand starting at position 214 of SEQ ID NO: 587356
acugaaacgcacugagauu

SEQ ID NO: 786259 - RNA, 19 nt, Artificial Sequence
  Description of Artificial Sequence: Synthetic oligonucleotide
  Antisense strand to SEQ ID NO: 786258
aaucucagugcguuucagu

SEQ ID NO: 786260 - RNA, 19 nt, Artificial Sequence
  Description of Artificial Sequence: Synthetic oligonucleotide
  Sense strand starting at position 263 of SEQ ID NO: 587356
aaacguagugacugacuaa

SEQ ID NO: 786261 - RNA, 19 nt, Artificial Sequence
  Description of Artificial Sequence: Synthetic oligonucleotide
  Antisense strand to SEQ ID NO: 786260
uuagucagucacuacguuu

SEQ ID NO: 786262 - RNA, 19 nt, Artificial Sequence
  Description of Artificial Sequence: Synthetic oligonucleotide
  Sense strand starting at position 402 of SEQ ID NO: 587356
agcagagacuuauuagcaa

SEQ ID NO: 786263 - RNA, 19 nt, Artificial Sequence
  Description of Artificial Sequence: Synthetic oligonucleotide
  Antisense strand to SEQ ID NO: 786262
uugcuaauaagucucugcu

SEQ ID NO: 786264 - RNA, 19 nt, Artificial Sequence
  Description of Artificial Sequence: Synthetic oligonucleotide
  Sense strand starting at position 612 of SEQ ID NO: 587356
guuggucccuugucauuua

SEQ ID NO: 786265 - RNA, 19 nt, Artificial Sequence
  Description of Artificial Sequence: Synthetic oligonucleotide
  Antisense strand to SEQ ID NO: 786264
uaaaugacaagggaccaac

SEQ ID NO: 786266 - RNA, 19 nt, Artificial Sequence
  Description of Artificial Sequence: Synthetic oligonucleotide
  Sense strand starting at position 615 of SEQ ID NO: 587356
ggucccuugucauuuaggu

SEQ ID NO: 786267 - RNA, 19 nt, Artificial Sequence
  Description of Artificial Sequence: Synthetic oligonucleotide
  Antisense strand to SEQ ID NO: 786266
accuaaaugacaagggacc

SEQ ID NO: 786268 - RNA, 19 nt, Artificial Sequence
  Description of Artificial Sequence: Synthetic oligonucleotide
  Sense strand starting at position 624 of SEQ ID NO: 587356
ucauuuagguaucacaaag

SEQ ID NO: 786269 - RNA, 19 nt, Artificial Sequence
  Description of Artificial Sequence: Synthetic oligonucleotide
  Antisense strand to SEQ ID NO: 786268
cuuugugauaccuaaauga

SEQ ID NO: 786270 - RNA, 19 nt, Artificial Sequence
  Description of Artificial Sequence: Synthetic oligonucleotide
  Sense strand starting at position 1074 of SEQ ID NO: 587356
gcgaaagguaacugagaaa

SEQ ID NO: 786271 - RNA, 19 nt, Artificial Sequence
  Description of Artificial Sequence: Synthetic oligonucleotide
  Antisense strand to SEQ ID NO: 786270
uuucucaguuaccuuucgc

SEQ ID NO: 786272 - RNA, 19 nt, Artificial Sequence
  Description of Artificial Sequence: Synthetic oligonucleotide
  Sense strand starting at position 2328 of SEQ ID NO: 587356
ugggauagggcguaaucuu

SEQ ID NO: 786273 - RNA, 19 nt, Artificial Sequence
  Description of Artificial Sequence: Synthetic oligonucleotide
  Antisense strand to SEQ ID NO: 786272
aagauuacgcccuauccca

SEQ ID NO: 786274 - RNA, 19 nt, Artificial Sequence
  Description of Artificial Sequence: Synthetic oligonucleotide
  Sense strand starting at position 2360 of SEQ ID NO: 587356
ggaguagauuuagaauaga

SEQ ID NO: 786275 - RNA, 19 nt, Artificial Sequence
  Description of Artificial Sequence: Synthetic oligonucleotide
  Antisense strand to SEQ ID NO: 786274
ucuauucuaaaucuacucc

SEQ ID NO: 786276 - RNA, 19 nt, Artificial Sequence
  Description of Artificial Sequence: Synthetic oligonucleotide
  Sense strand starting at position 2408 of SEQ ID NO: 587356
uguagaaugguacaaguuu

SEQ ID NO: 786277 - RNA, 19 nt, Artificial Sequence
  Description of Artificial Sequence: Synthetic oligonucleotide
  Antisense strand to SEQ ID NO: 786276
aaacuuguaccauucuaca

SEQ ID NO: 786278 - RNA, 19 nt, Artificial Sequence
  Description of Artificial Sequence: Synthetic oligonucleotide
  Sense strand starting at position 2473 of SEQ ID NO: 587356
augaauugaguauguugaa

SEQ ID NO: 786279 - RNA, 19 nt, Artificial Sequence
  Description of Artificial Sequence: Synthetic oligonucleotide
  Antisense strand to SEQ ID NO: 786278
uucaacauacucaauucau

SEQ ID NO: 786280 - RNA, 19 nt, Artificial Sequence
  Description of Artificial Sequence: Synthetic oligonucleotide
  Sense strand starting at position 2474 of SEQ ID NO: 587356
ugaauugaguauguugaaa

SEQ ID NO: 786281 - RNA, 19 nt, Artificial Sequence
  Description of Artificial Sequence: Synthetic oligonucleotide
  Antisense strand to SEQ ID NO: 786280
uuucaacauacucaauuca

SEQ ID NO: 786282 - RNA, 19 nt, Artificial Sequence
  Description of Artificial Sequence: Synthetic oligonucleotide
  Sense strand starting at position 2691 of SEQ ID NO: 587356
auauuuguagacugcugua

SEQ ID NO: 786283 - RNA, 19 nt, Artificial Sequence
  Description of Artificial Sequence: Synthetic oligonucleotide
  Antisense strand to SEQ ID NO: 786282
uacagcagucuacaaauau

SEQ ID NO: 786284 - RNA, 19 nt, Artificial Sequence
  Description of Artificial Sequence: Synthetic oligonucleotide
  Sense strand starting at position 2703 of SEQ ID NO: 587356
ugcuguaugggcuacagaa

SEQ ID NO: 786285 - RNA, 19 nt, Artificial Sequence
  Description of Artificial Sequence: Synthetic oligonucleotide
  Antisense strand to SEQ ID NO: 786284
uucuguagcccauacagca

SEQ ID NO: 786286 - RNA, 19 nt, Artificial Sequence
  Description of Artificial Sequence: Synthetic oligonucleotide
  Sense strand starting at position 2757 of SEQ ID NO: 587356
aauuuaauuguaggcguua

SEQ ID NO: 786287 - RNA, 19 nt, Artificial Sequence
  Description of Artificial Sequence: Synthetic oligonucleotide
  Antisense strand to SEQ ID NO: 786286
uaacgccuacaauuaaauu

SEQ ID NO: 786288 - RNA, 19 nt, Artificial Sequence
  Description of Artificial Sequence: Synthetic oligonucleotide
  Sense strand starting at position 2969 of SEQ ID NO: 587356
gaacccguucuaugaagga

SEQ ID NO: 786289 - RNA, 19 nt, Artificial Sequence
  Description of Artificial Sequence: Synthetic oligonucleotide
  Antisense strand to SEQ ID NO: 786288
uccuucauagaacggguuc

SEQ ID NO: 786290 - RNA, 19 nt, Artificial Sequence
  Description of Artificial Sequence: Synthetic oligonucleotide
  Sense strand starting at position 3002 of SEQ ID NO: 587356
uauggaguauuaucucuag

SEQ ID NO: 786291 - RNA, 19 nt, Artificial Sequence
  Description of Artificial Sequence: Synthetic oligonucleotide
  Antisense strand to SEQ ID NO: 786290
cuagagauaauacuccaua

SEQ ID NO: 786292 - RNA, 19 nt, Artificial Sequence
  Description of Artificial Sequence: Synthetic oligonucleotide
  Sense strand starting at position 3005 of SEQ ID NO: 587356
ggaguauuaucucuagaaa

SEQ ID NO: 786293 - RNA, 19 nt, Artificial Sequence
  Description of Artificial Sequence: Synthetic oligonucleotide
  Antisense strand to SEQ ID NO: 786292
uuucuagagauaauacucc

SEQ ID NO: 786294 - RNA, 19 nt, Artificial Sequence
  Description of Artificial Sequence: Synthetic oligonucleotide
  Sense strand starting at position 3089 of SEQ ID NO: 587356
acaaguaaucuuuaucgag

SEQ ID NO: 786295 - RNA, 19 nt, Artificial Sequence
  Description of Artificial Sequence: Synthetic oligonucleotide
  Antisense strand to SEQ ID NO: 786294
cucgauaaagauuacuugu

SEQ ID NO: 786296 - RNA, 19 nt, Artificial Sequence
  Description of Artificial Sequence: Synthetic oligonucleotide
  Sense strand starting at position 3127 of SEQ ID NO: 587356
agugaacuaugcuuuagau

SEQ ID NO: 786297 - RNA, 19 nt, Artificial Sequence
  Description of Artificial Sequence: Synthetic oligonucleotide
  Antisense strand to SEQ ID NO: 786296
aucuaaagcauaguucacu

SEQ ID NO: 786298 - RNA, 19 nt, Artificial Sequence
  Description of Artificial Sequence: Synthetic oligonucleotide
  Sense strand starting at position 3183 of SEQ ID NO: 587356
ggaacaauccugugaguuu

SEQ ID NO: 786299 - RNA, 19 nt, Artificial Sequence
  Description of Artificial Sequence: Synthetic oligonucleotide
  Antisense strand to SEQ ID NO: 786298
aaacucacaggauuguucc

SEQ ID NO: 786300 - RNA, 19 nt, Artificial Sequence
  Description of Artificial Sequence: Synthetic oligonucleotide
  Sense strand starting at position 3203 of SEQ ID NO: 587356
ugauaucugcuauacagau

SEQ ID NO: 786301 - RNA, 19 nt, Artificial Sequence
  Description of Artificial Sequence: Synthetic oligonucleotide
  Antisense strand to SEQ ID NO: 786300
aucuguauagcagauauca

SEQ ID NO: 786302 - RNA, 19 nt, Artificial Sequence
  Description of Artificial Sequence: Synthetic oligonucleotide
  Sense strand starting at position 3209 of SEQ ID NO: 587356
cugcuauacagaugaggau

SEQ ID NO: 786303 - RNA, 19 nt, Artificial Sequence
  Description of Artificial Sequence: Synthetic oligonucleotide
  Antisense strand to SEQ ID NO: 786302
auccucaucuguauagcag

SEQ ID NO: 786304 - RNA, 19 nt, Artificial Sequence
  Description of Artificial Sequence: Synthetic oligonucleotide
  Sense strand starting at position 3252 of SEQ ID NO: 587356
agucacaaguuuguaaaga

SEQ ID NO: 786305 - RNA, 19 nt, Artificial Sequence
  Description of Artificial Sequence: Synthetic oligonucleotide
  Antisense strand to SEQ ID NO: 786304
ucuuuacaaacuugugacu

SEQ ID NO: 786306 - RNA, 19 nt, Artificial Sequence
  Description of Artificial Sequence: Synthetic oligonucleotide
  Sense strand starting at position 3290 of SEQ ID NO: 587356
cagguaaucuaacucugga

SEQ ID NO: 786307 - RNA, 19 nt, Artificial Sequence
  Description of Artificial Sequence: Synthetic oligonucleotide
  Antisense strand to SEQ ID NO: 786306
uccagaguuagauuaccug

SEQ ID NO: 786308 - RNA, 19 nt, Artificial Sequence
  Description of Artificial Sequence: Synthetic oligonucleotide
  Sense strand starting at position 3334 of SEQ ID NO: 587356
guauuaccucuauaaguac

SEQ ID NO: 786309 - RNA, 19 nt, Artificial Sequence
  Description of Artificial Sequence: Synthetic oligonucleotide
  Antisense strand to SEQ ID NO: 786308
guacuuauagagguaauac

SEQ ID NO: 786310 - RNA, 19 nt, Artificial Sequence
  Description of Artificial Sequence: Synthetic oligonucleotide
  Sense strand starting at position 3355 of SEQ ID NO: 587356
guuauacaaugguuugaac

SEQ ID NO: 786311 - RNA, 19 nt, Artificial Sequence
  Description of Artificial Sequence: Synthetic oligonucleotide
  Antisense strand to SEQ ID NO: 786310
guucaaaccauuguauaac

SEQ ID NO: 786312 - RNA, 19 nt, Artificial Sequence
  Description of Artificial Sequence: Synthetic oligonucleotide
  Sense strand starting at position 3464 of SEQ ID NO: 587356
gauagucgaggugaucauu

SEQ ID NO: 786313 - RNA, 19 nt, Artificial Sequence
  Description of Artificial Sequence: Synthetic oligonucleotide
  Antisense strand to SEQ ID NO: 786312
aaugaucaccucgacuauc

SEQ ID NO: 786314 - RNA, 19 nt, Artificial Sequence
  Description of Artificial Sequence: Synthetic oligonucleotide
  Sense strand starting at position 3467 of SEQ ID NO: 587356
agucgaggugaucauugaa

SEQ ID NO: 786315 - RNA, 19 nt, Artificial Sequence
  Description of Artificial Sequence: Synthetic oligonucleotide
  Antisense strand to SEQ ID NO: 786314
uucaaugaucaccucgacu

SEQ ID NO: 786316 - RNA, 19 nt, Artificial Sequence
  Description of Artificial Sequence: Synthetic oligonucleotide
  Sense strand starting at position 3470 of SEQ ID NO: 587356
cgaggugaucauugaagaa

SEQ ID NO: 786317 - RNA, 19 nt, Artificial Sequence
  Description of Artificial Sequence: Synthetic oligonucleotide
  Antisense strand to SEQ ID NO: 786316
uucuucaaugaucaccucg

SEQ ID NO: 786318 - RNA, 19 nt, Artificial Sequence
  Description of Artificial Sequence: Synthetic oligonucleotide
  Sense strand starting at position 3500 of SEQ ID NO: 587356
gccugaugaguuuagacag

SEQ ID NO: 786319 - RNA, 19 nt, Artificial Sequence
  Description of Artificial Sequence: Synthetic oligonucleotide
  Antisense strand to SEQ ID NO: 786318
cugucuaaacucaucaggc

SEQ ID NO: 786320 - RNA, 19 nt, Artificial Sequence
  Description of Artificial Sequence: Synthetic oligonucleotide
  Sense strand starting at position 3524 of SEQ ID NO: 587356
ugaagcauaucauuccuga

SEQ ID NO: 786321 - RNA, 19 nt, Artificial Sequence
  Description of Artificial Sequence: Synthetic oligonucleotide
  Antisense strand to SEQ ID NO: 786320
ucaggaaugauaugcuuca

SEQ ID NO: 786322 - RNA, 19 nt, Artificial Sequence
  Description of Artificial Sequence: Synthetic oligonucleotide
  Sense strand starting at position 3527 of SEQ ID NO: 587356
agcauaucauuccugagga

SEQ ID NO: 786323 - RNA, 19 nt, Artificial Sequence
  Description of Artificial Sequence: Synthetic oligonucleotide
  Antisense strand to SEQ ID NO: 786322
uccucaggaaugauaugcu

SEQ ID NO: 786324 - RNA, 19 nt, Artificial Sequence
  Description of Artificial Sequence: Synthetic oligonucleotide
  Sense strand starting at position 3546 of SEQ ID NO: 587356
aagggaauucuugguaccu

SEQ ID NO: 786325 - RNA, 19 nt, Artificial Sequence
  Description of Artificial Sequence: Synthetic oligonucleotide
  Antisense strand to SEQ ID NO: 786324
agguaccaagaauucccuu

SEQ ID NO: 786326 - RNA, 19 nt, Artificial Sequence
  Description of Artificial Sequence: Synthetic oligonucleotide
  Sense strand starting at position 3547 of SEQ ID NO: 587356
agggaauucuugguaccug

SEQ ID NO: 786327 - RNA, 19 nt, Artificial Sequence
  Description of Artificial Sequence: Synthetic oligonucleotide
  Antisense strand to SEQ ID NO: 786326
cagguaccaagaauucccu

SEQ ID NO: 786328 - RNA, 19 nt, Artificial Sequence
  Description of Artificial Sequence: Synthetic oligonucleotide
  Sense strand starting at position 3551 of SEQ ID NO: 587356
aauucuugguaccugagaa

SEQ ID NO: 786329 - RNA, 19 nt, Artificial Sequence
  Description of Artificial Sequence: Synthetic oligonucleotide
  Antisense strand to SEQ ID NO: 786328
uucucagguaccaagaauu

SEQ ID NO: 786330 - RNA, 19 nt, Artificial Sequence
  Description of Artificial Sequence: Synthetic oligonucleotide
  Sense strand starting at position 3552 of SEQ ID NO: 587356
auucuugguaccugagaag

SEQ ID NO: 786331 - RNA, 19 nt, Artificial Sequence
  Description of Artificial Sequence: Synthetic oligonucleotide
  Antisense strand to SEQ ID NO: 786330
cuucucagguaccaagaau

SEQ ID NO: 786332 - RNA, 19 nt, Artificial Sequence
  Description of Artificial Sequence: Synthetic oligonucleotide
  Sense strand starting at position 3567 of SEQ ID NO: 587356
gaagauuaauagucuugau

SEQ ID NO: 786333 - RNA, 19 nt, Artificial Sequence
  Description of Artificial Sequence: Synthetic oligonucleotide
  Antisense strand to SEQ ID NO: 786332
aucaagacuauuaaucuuc

SEQ ID NO: 786334 - RNA, 19 nt, Artificial Sequence
  Description of Artificial Sequence: Synthetic oligonucleotide
  Sense strand starting at position 3680 of SEQ ID NO: 587356
gaagcaggacuuuguaaua

SEQ ID NO: 786335 - RNA, 19 nt, Artificial Sequence
  Description of Artificial Sequence: Synthetic oligonucleotide
  Antisense strand to SEQ ID NO: 786334
uauuacaaaguccugcuuc

SEQ ID NO: 786336 - RNA, 19 nt, Artificial Sequence
  Description of Artificial Sequence: Synthetic oligonucleotide
  Sense strand starting at position 3786 of SEQ ID NO: 587356
aucagugcugaguaacaua

SEQ ID NO: 786337 - RNA, 19 nt, Artificial Sequence
  Description of Artificial Sequence: Synthetic oligonucleotide
  Antisense strand to SEQ ID NO: 786336
uauguuacucagcacugau

SEQ ID NO: 786338 - RNA, 19 nt, Artificial Sequence
  Description of Artificial Sequence: Synthetic oligonucleotide
  Sense strand starting at position 80 of SEQ ID NO: 587357
cacguuaaggacuguuuaa

SEQ ID NO: 786339 - RNA, 19 nt, Artificial Sequence
  Description of Artificial Sequence: Synthetic oligonucleotide
  Antisense strand to SEQ ID NO: 786338
uuaaacaguccuuaacgug

SEQ ID NO: 786340 - RNA, 19 nt, Artificial Sequence
  Description of Artificial Sequence: Synthetic oligonucleotide
  Sense strand starting at position 155 of SEQ ID NO: 587357
aaaggagaaucucagagau

SEQ ID NO: 786341 - RNA, 19 nt, Artificial Sequence
  Description of Artificial Sequence: Synthetic oligonucleotide
  Antisense strand to SEQ ID NO: 786340
aucucugagauucuccuuu

SEQ ID NO: 786342 - RNA, 19 nt, Artificial Sequence
  Description of Artificial Sequence: Synthetic oligonucleotide
  Sense strand starting at position 175 of SEQ ID NO: 587357
ugcuauugaguuugagaag

SEQ ID NO: 786343 - RNA, 19 nt, Artificial Sequence
  Description of Artificial Sequence: Synthetic oligonucleotide
  Antisense strand to SEQ ID NO: 786342
cuucucaaacucaauagca

SEQ ID NO: 786344 - RNA, 19 nt, Artificial Sequence
  Description of Artificial Sequence: Synthetic oligonucleotide
  Sense strand starting at position 184 of SEQ ID NO: 587357
guuugagaaggccaaguuu

SEQ ID NO: 786345 - RNA, 19 nt, Artificial Sequence
  Description of Artificial Sequence: Synthetic oligonucleotide
  Antisense strand to SEQ ID NO: 786344
aaacuuggccuucucaaac

SEQ ID NO: 786346 - RNA, 19 nt, Artificial Sequence
  Description of Artificial Sequence: Synthetic oligonucleotide
  Sense strand starting at position 594 of SEQ ID NO: 587357
gccggauggaugggaucua

SEQ ID NO: 786347 - RNA, 19 nt, Artificial Sequence
  Description of Artificial Sequence: Synthetic oligonucleotide
  Antisense strand to SEQ ID NO: 786346
uagaucccauccauccggc

SEQ ID NO: 786348 - RNA, 19 nt, Artificial Sequence
  Description of Artificial Sequence: Synthetic oligonucleotide
  Sense strand starting at position 639 of SEQ ID NO: 587357
gcucauagaaacgguaaua

SEQ ID NO: 786349 - RNA, 19 nt, Artificial Sequence
  Description of Artificial Sequence: Synthetic oligonucleotide
  Antisense strand to SEQ ID NO: 786348
uauuaccguuucuaugagc

SEQ ID NO: 786350 - RNA, 19 nt, Artificial Sequence
  Description of Artificial Sequence: Synthetic oligonucleotide
  Sense strand starting at position 709 of SEQ ID NO: 587357
ugaagaauuaaccguagga

SEQ ID NO: 786351 - RNA, 19 nt, Artificial Sequence
  Description of Artificial Sequence: Synthetic oligonucleotide
  Antisense strand to SEQ ID NO: 786350
uccuacgguuaauucuuca

SEQ ID NO: 786352 - RNA, 19 nt, Artificial Sequence
  Description of Artificial Sequence: Synthetic oligonucleotide
  Sense strand starting at position 949 of SEQ ID NO: 587357
guagguaggcggaguuauu

SEQ ID NO: 786353 - RNA, 19 nt, Artificial Sequence
  Description of Artificial Sequence: Synthetic oligonucleotide
  Antisense strand to SEQ ID NO: 786352
aauaacuccgccuaccuac

SEQ ID NO: 786354 - RNA, 19 nt, Artificial Sequence
  Description of Artificial Sequence: Synthetic oligonucleotide
  Sense strand starting at position 1010 of SEQ ID NO: 587357
gucccacagcuugauaguu

SEQ ID NO: 786355 - RNA, 19 nt, Artificial Sequence
  Description of Artificial Sequence: Synthetic oligonucleotide
  Antisense strand to SEQ ID NO: 786354
aacuaucaagcugugggac

SEQ ID NO: 786356 - RNA, 19 nt, Artificial Sequence
  Description of Artificial Sequence: Synthetic oligonucleotide
  Sense strand starting at position 1076 of SEQ ID NO: 587357
cagagaagucacugcugaa

SEQ ID NO: 786357 - RNA, 19 nt, Artificial Sequence
  Description of Artificial Sequence: Synthetic oligonucleotide
  Antisense strand to SEQ ID NO: 786356
uucagcagugacuucucug

SEQ ID NO: 786358 - RNA, 19 nt, Artificial Sequence
  Description of Artificial Sequence: Synthetic oligonucleotide
  Sense strand starting at position 1080 of SEQ ID NO: 587357
gaagucacugcugaaucau

SEQ ID NO: 786359 - RNA, 19 nt, Artificial Sequence
  Description of Artificial Sequence: Synthetic oligonucleotide
  Antisense strand to SEQ ID NO: 786358
augauucagcagugacuuc

SEQ ID NO: 786360 - RNA, 19 nt, Artificial Sequence
  Description of Artificial Sequence: Synthetic oligonucleotide
  Sense strand starting at position 1128 of SEQ ID NO: 587357
ccuugauuuccacagcgca

SEQ ID NO: 786361 - RNA, 19 nt, Artificial Sequence
  Description of Artificial Sequence: Synthetic oligonucleotide
  Antisense strand to SEQ ID NO: 786360
ugcgcuguggaaaucaagg

SEQ ID NO: 786362 - RNA, 19 nt, Artificial Sequence
  Description of Artificial Sequence: Synthetic oligonucleotide
  Sense strand starting at position 1193 of SEQ ID NO: 587357
aggagucaugauugcaaac

SEQ ID NO: 786363 - RNA, 19 nt, Artificial Sequence
  Description of Artificial Sequence: Synthetic oligonucleotide
  Antisense strand to SEQ ID NO: 786362
guuugcaaucaugacuccu

SEQ ID NO: 786364 - RNA, 19 nt, Artificial Sequence
  Description of Artificial Sequence: Synthetic oligonucleotide
  Sense strand starting at position 1219 of SEQ ID NO: 587357
ccaagacaucacugcuagu

SEQ ID NO: 786365 - RNA, 19 nt, Artificial Sequence
  Description of Artificial Sequence: Synthetic oligonucleotide
  Antisense strand to SEQ ID NO: 786364
acuagcagugaugucuugg

SEQ ID NO: 786366 - RNA, 19 nt, Artificial Sequence
  Description of Artificial Sequence: Synthetic oligonucleotide
  Sense strand starting at position 1350 of SEQ ID NO: 587357
gcaucagggaucuggaaac

SEQ ID NO: 786367 - RNA, 19 nt, Artificial Sequence
  Description of Artificial Sequence: Synthetic oligonucleotide
  Antisense strand to SEQ ID NO: 786366
guuuccagaucccugaugc

SEQ ID NO: 786368 - RNA, 19 nt, Artificial Sequence
  Description of Artificial Sequence: Synthetic oligonucleotide
  Sense strand starting at position 1396 of SEQ ID NO: 587357
cugggaagcuaccuaugaa

SEQ ID NO: 786369 - RNA, 19 nt, Artificial Sequence
  Description of Artificial Sequence: Synthetic oligonucleotide
  Antisense strand to SEQ ID NO: 786368
uucauagguagcuucccag

SEQ ID NO: 786370 - RNA, 19 nt, Artificial Sequence
  Description of Artificial Sequence: Synthetic oligonucleotide
  Sense strand starting at position 1630 of SEQ ID NO: 587357
cuugguucacugugaagag

SEQ ID NO: 786371 - RNA, 19 nt, Artificial Sequence
  Description of Artificial Sequence: Synthetic oligonucleotide
  Antisense strand to SEQ ID NO: 786370
cucuucacagugaaccaag

SEQ ID NO: 786372 - RNA, 19 nt, Artificial Sequence
  Description of Artificial Sequence: Synthetic oligonucleotide
  Sense strand starting at position 1642 of SEQ ID NO: 587357
ugaagagcuggucaguguu

SEQ ID NO: 786373 - RNA, 19 nt, Artificial Sequence
  Description of Artificial Sequence: Synthetic oligonucleotide
  Antisense strand to SEQ ID NO: 786372
aacacugaccagcucuuca

SEQ ID NO: 786374 - RNA, 19 nt, Artificial Sequence
  Description of Artificial Sequence: Synthetic oligonucleotide
  Sense strand starting at position 1981 of SEQ ID NO: 587357
acgacuuggcacggaagaa

SEQ ID NO: 786375 - RNA, 19 nt, Artificial Sequence
  Description of Artificial Sequence: Synthetic oligonucleotide
  Antisense strand to SEQ ID NO: 786374
uucuuccgugccaagucgu

SEQ ID NO: 786376 - RNA, 19 nt, Artificial Sequence
  Description of Artificial Sequence: Synthetic oligonucleotide
  Sense strand starting at position 2094 of SEQ ID NO: 587357
acauaacucucguuagaau

SEQ ID NO: 786377 - RNA, 19 nt, Artificial Sequence
  Description of Artificial Sequence: Synthetic oligonucleotide
  Antisense strand to SEQ ID NO: 786376
auucuaacgagaguuaugu

SEQ ID NO: 786378 - RNA, 19 nt, Artificial Sequence
  Description of Artificial Sequence: Synthetic oligonucleotide
  Sense strand starting at position 2102 of SEQ ID NO: 587357
cucguuagaaucgcgugau

SEQ ID NO: 786379 - RNA, 19 nt, Artificial Sequence
  Description of Artificial Sequence: Synthetic oligonucleotide
  Antisense strand to SEQ ID NO: 786378
aucacgcgauucuaacgag

SEQ ID NO: 786380 - RNA, 19 nt, Artificial Sequence
  Description of Artificial Sequence: Synthetic oligonucleotide
  Sense strand starting at position 2115 of SEQ ID NO: 587357
cgugaucugaaacaagagu

SEQ ID NO: 786381 - RNA, 19 nt, Artificial Sequence
  Description of Artificial Sequence: Synthetic oligonucleotide
  Antisense strand to SEQ ID NO: 786380
acucuuguuucagaucacg

SEQ ID NO: 786382 - RNA, 19 nt, Artificial Sequence
  Description of Artificial Sequence: Synthetic oligonucleotide
  Sense strand starting at position 2185 of SEQ ID NO: 587357
uucuauuccuguuuagaga

SEQ ID NO: 786383 - RNA, 19 nt, Artificial Sequence
  Description of Artificial Sequence: Synthetic oligonucleotide
  Antisense strand to SEQ ID NO: 786382
ucucuaaacaggaauagaa

SEQ ID NO: 786384 - RNA, 19 nt, Artificial Sequence
  Description of Artificial Sequence: Synthetic oligonucleotide
  Sense strand starting at position 2186 of SEQ ID NO: 587357
ucuauuccuguuuagagau

SEQ ID NO: 786385 - RNA, 19 nt, Artificial Sequence
  Description of Artificial Sequence: Synthetic oligonucleotide
  Antisense strand to SEQ ID NO: 786384
aucucuaaacaggaauaga

SEQ ID NO: 786386 - RNA, 19 nt, Artificial Sequence
  Description of Artificial Sequence: Synthetic oligonucleotide
  Sense strand starting at position 2230 of SEQ ID NO: 587357
ucauaauagcuguaugcau

SEQ ID NO: 786387 - RNA, 19 nt, Artificial Sequence
  Description of Artificial Sequence: Synthetic oligonucleotide
  Antisense strand to SEQ ID NO: 786386
augcauacagcuauuauga

SEQ ID NO: 786388 - RNA, 19 nt, Artificial Sequence
  Description of Artificial Sequence: Synthetic oligonucleotide
  Sense strand starting at position 2257 of SEQ ID NO: 587357
cuuauuuacuaagaaguga

SEQ ID NO: 786389 - RNA, 19 nt, Artificial Sequence
  Description of Artificial Sequence: Synthetic oligonucleotide
  Antisense strand to SEQ ID NO: 786388
ucacuucuuaguaaauaag

SEQ ID NO: 786390 - RNA, 19 nt, Artificial Sequence
  Description of Artificial Sequence: Synthetic oligonucleotide
  Sense strand starting at position 2272 of SEQ ID NO: 587357
gugaaauuggcccagcacu

SEQ ID NO: 786391 - RNA, 19 nt, Artificial Sequence
  Description of Artificial Sequence: Synthetic oligonucleotide
  Antisense strand to SEQ ID NO: 786390
agugcugggccaauuucac

SEQ ID NO: 786392 - RNA, 19 nt, Artificial Sequence
  Description of Artificial Sequence: Synthetic oligonucleotide
  Sense strand starting at position 2546 of SEQ ID NO: 587357
uugaaaguggaggguuauu

SEQ ID NO: 786393 - RNA, 19 nt, Artificial Sequence
  Description of Artificial Sequence: Synthetic oligonucleotide
  Antisense strand to SEQ ID NO: 786392
aauaacccuccacuuucaa

SEQ ID NO: 786394 - RNA, 19 nt, Artificial Sequence
  Description of Artificial Sequence: Synthetic oligonucleotide
  Sense strand starting at position 2551 of SEQ ID NO: 587357
aguggaggguuauuaggua

SEQ ID NO: 786395 - RNA, 19 nt, Artificial Sequence
  Description of Artificial Sequence: Synthetic oligonucleotide
  Antisense strand to SEQ ID NO: 786394
uaccuaauaacccuccacu

SEQ ID NO: 786396 - RNA, 19 nt, Artificial Sequence
  Description of Artificial Sequence: Synthetic oligonucleotide
  Sense strand starting at position 2555 of SEQ ID NO: 587357
gaggguuauuagguagaca

SEQ ID NO: 786397 - RNA, 19 nt, Artificial Sequence
  Description of Artificial Sequence: Synthetic oligonucleotide
  Antisense strand to SEQ ID NO: 786396
ugucuaccuaauaacccuc

SEQ ID NO: 786398 - RNA, 19 nt, Artificial Sequence
  Description of Artificial Sequence: Synthetic oligonucleotide
  Sense strand starting at position 2569 of SEQ ID NO: 587357
agacauauauagcuuaagu

SEQ ID NO: 786399 - RNA, 19 nt, Artificial Sequence
  Description of Artificial Sequence: Synthetic oligonucleotide
  Antisense strand to SEQ ID NO: 786398
acuuaagcuauauaugucu

SEQ ID NO: 786400 - RNA, 19 nt, Artificial Sequence
  Description of Artificial Sequence: Synthetic oligonucleotide
  Sense strand starting at position 2625 of SEQ ID NO: 587357
ggcuuaaguagauauugac

SEQ ID NO: 786401 - RNA, 19 nt, Artificial Sequence
  Description of Artificial Sequence: Synthetic oligonucleotide
  Antisense strand to SEQ ID NO: 786400
gucaauaucuacuuaagcc

SEQ ID NO: 786402 - RNA, 19 nt, Artificial Sequence
  Description of Artificial Sequence: Synthetic oligonucleotide
  Sense strand starting at position 2739 of SEQ ID NO: 587357
ugucuuccuguugaaagau

SEQ ID NO: 786403 - RNA, 19 nt, Artificial Sequence
  Description of Artificial Sequence: Synthetic oligonucleotide
  Antisense strand to SEQ ID NO: 786402
aucuuucaacaggaagaca

SEQ ID NO: 786404 - RNA, 19 nt, Artificial Sequence
  Description of Artificial Sequence: Synthetic oligonucleotide
  Sense strand starting at position 2748 of SEQ ID NO: 587357
guugaaagauugccauuau

SEQ ID NO: 786405 - RNA, 19 nt, Artificial Sequence
  Description of Artificial Sequence: Synthetic oligonucleotide
  Antisense strand to SEQ ID NO: 786404
auaauggcaaucuuucaac

SEQ ID NO: 786406 - RNA, 19 nt, Artificial Sequence
  Description of Artificial Sequence: Synthetic oligonucleotide
  Sense strand starting at position 3662 of SEQ ID NO: 587357
uuuaccuuugaaugugagu

SEQ ID NO: 786407 - RNA, 19 nt, Artificial Sequence
  Description of Artificial Sequence: Synthetic oligonucleotide
  Antisense strand to SEQ ID NO: 786406
acucacauucaaagguaaa

SEQ ID NO: 786408 - RNA, 19 nt, Artificial Sequence
  Description of Artificial Sequence: Synthetic oligonucleotide
  Sense strand starting at position 3675 of SEQ ID NO: 587357
gugagugucuaggcaauuu

SEQ ID NO: 786409 - RNA, 19 nt, Artificial Sequence
  Description of Artificial Sequence: Synthetic oligonucleotide
  Antisense strand to SEQ ID NO: 786408
aaauugccuagacacucac

SEQ ID NO: 786410 - RNA, 19 nt, Artificial Sequence
  Description of Artificial Sequence: Synthetic oligonucleotide
  Sense strand starting at position 3722 of SEQ ID NO: 587357
cuugaacagucuuagauuu

SEQ ID NO: 786411 - RNA, 19 nt, Artificial Sequence
  Description of Artificial Sequence: Synthetic oligonucleotide
  Antisense strand to SEQ ID NO: 786410
aaaucuaagacuguucaag

SEQ ID NO: 786412 - RNA, 19 nt, Artificial Sequence
  Description of Artificial Sequence: Synthetic oligonucleotide
  Sense strand starting at position 3724 of SEQ ID NO: 587357
ugaacagucuuagauuuac

SEQ ID NO: 786413 - RNA, 19 nt, Artificial Sequence
  Description of Artificial Sequence: Synthetic oligonucleotide
  Antisense strand to SEQ ID NO: 786412
guaaaucuaagacuguuca

SEQ ID NO: 786414 - RNA, 19 nt, Artificial Sequence
  Description of Artificial Sequence: Synthetic oligonucleotide
  Sense strand starting at position 3730 of SEQ ID NO: 587357
gucuuagauuuacagggaa

SEQ ID NO: 786415 - RNA, 19 nt, Artificial Sequence
  Description of Artificial Sequence: Synthetic oligonucleotide
  Antisense strand to SEQ ID NO: 786414
uucccuguaaaucuaagac

SEQ ID NO: 786416 - RNA, 19 nt, Artificial Sequence
  Description of Artificial Sequence: Synthetic oligonucleotide
  Sense strand starting at position 3929 of SEQ ID NO: 587357
ggaucccauccaugauaua

SEQ ID NO: 786417 - RNA, 19 nt, Artificial Sequence
  Description of Artificial Sequence: Synthetic oligonucleotide
  Antisense strand to SEQ ID NO: 786416
uauaucauggaugggaucc

SEQ ID NO: 786418 - RNA, 19 nt, Artificial Sequence
  Description of Artificial Sequence: Synthetic oligonucleotide
  Sense strand starting at position 186 of SEQ ID NO: 587358
agcuguugccaugggaaac

SEQ ID NO: 786419 - RNA, 19 nt, Artificial Sequence
  Description of Artificial Sequence: Synthetic oligonucleotide
  Antisense strand to SEQ ID NO: 786418
guuucccauggcaacagcu

SEQ ID NO: 786420 - RNA, 19 nt, Artificial Sequence
  Description of Artificial Sequence: Synthetic oligonucleotide
  Sense strand starting at position 187 of SEQ ID NO: 587358
gcuguugccaugggaaaca

SEQ ID NO: 786421 - RNA, 19 nt, Artificial Sequence
  Description of Artificial Sequence: Synthetic oligonucleotide
  Antisense strand to SEQ ID NO: 786420
uguuucccauggcaacagc

SEQ ID NO: 786422 - RNA, 19 nt, Artificial Sequence
  Description of Artificial Sequence: Synthetic oligonucleotide
  Sense strand starting at position 293 of SEQ ID NO: 587358
augggaucucagugucagu

SEQ ID NO: 786423 - RNA, 19 nt, Artificial Sequence
  Description of Artificial Sequence: Synthetic oligonucleotide
  Antisense strand to SEQ ID NO: 786422
acugacacugagaucccau

SEQ ID NO: 786424 - RNA, 19 nt, Artificial Sequence
  Description of Artificial Sequence: Synthetic oligonucleotide
  Sense strand starting at position 576 of SEQ ID NO: 587358
ggguauugaagcugcacau

SEQ ID NO: 786425 - RNA, 19 nt, Artificial Sequence
  Description of Artificial Sequence: Synthetic oligonucleotide
  Antisense strand to SEQ ID NO: 786424
augugcagcuucaauaccc

SEQ ID NO: 786426 - RNA, 19 nt, Artificial Sequence
  Description of Artificial Sequence: Synthetic oligonucleotide
  Sense strand starting at position 641 of SEQ ID NO: 587358
ugcuauugaaaguguggga

SEQ ID NO: 786427 - RNA, 19 nt, Artificial Sequence
  Description of Artificial Sequence: Synthetic oligonucleotide
  Antisense strand to SEQ ID NO: 786426
ucccacacuuucaauagca

SEQ ID NO: 786428 - RNA, 19 nt, Artificial Sequence
  Description of Artificial Sequence: Synthetic oligonucleotide
  Sense strand starting at position 661 of SEQ ID NO: 587358
gaagaaaugugaccuucuc

SEQ ID NO: 786429 - RNA, 19 nt, Artificial Sequence
  Description of Artificial Sequence: Synthetic oligonucleotide
  Antisense strand to SEQ ID NO: 786428
gagaaggucacauuucuuc

SEQ ID NO: 786430 - RNA, 19 nt, Artificial Sequence
  Description of Artificial Sequence: Synthetic oligonucleotide
  Sense strand starting at position 770 of SEQ ID NO: 587358
ugcaauucccauuaaguga

SEQ ID NO: 786431 - RNA, 19 nt, Artificial Sequence
  Description of Artificial Sequence: Synthetic oligonucleotide
  Antisense strand to SEQ ID NO: 786430
ucacuuaaugggaauugca

SEQ ID NO: 786432 - RNA, 19 nt, Artificial Sequence
  Description of Artificial Sequence: Synthetic oligonucleotide
  Sense strand starting at position 825 of SEQ ID NO: 587358
auggcuuaugcucaacaag

SEQ ID NO: 786433 - RNA, 19 nt, Artificial Sequence
  Description of Artificial Sequence: Synthetic oligonucleotide
  Antisense strand to SEQ ID NO: 786432
cuuguugagcauaagccau

SEQ ID NO: 786434 - RNA, 19 nt, Artificial Sequence
  Description of Artificial Sequence: Synthetic oligonucleotide
  Sense strand starting at position 834 of SEQ ID NO: 587358
gcucaacaagcccagauau

SEQ ID NO: 786435 - RNA, 19 nt, Artificial Sequence
  Description of Artificial Sequence: Synthetic oligonucleotide
  Antisense strand to SEQ ID NO: 786434
auaucugggcuuguugagc

SEQ ID NO: 786436 - RNA, 19 nt, Artificial Sequence
  Description of Artificial Sequence: Synthetic oligonucleotide
  Sense strand starting at position 845 of SEQ ID NO: 587358
ccagauauagucugcagac

SEQ ID NO: 786437 - RNA, 19 nt, Artificial Sequence
  Description of Artificial Sequence: Synthetic oligonucleotide
  Antisense strand to SEQ ID NO: 786436
gucugcagacuauaucugg

SEQ ID NO: 786438 - RNA, 19 nt, Artificial Sequence
  Description of Artificial Sequence: Synthetic oligonucleotide
  Sense strand starting at position 846 of SEQ ID NO: 587358
cagauauagucugcagaca

SEQ ID NO: 786439 - RNA, 19 nt, Artificial Sequence
  Description of Artificial Sequence: Synthetic oligonucleotide
  Antisense strand to SEQ ID NO: 786438
ugucugcagacuauaucug

SEQ ID NO: 786440 - RNA, 19 nt, Artificial Sequence
  Description of Artificial Sequence: Synthetic oligonucleotide
  Sense strand starting at position 889 of SEQ ID NO: 587358
ggacaagcacucuguucuu

SEQ ID NO: 786441 - RNA, 19 nt, Artificial Sequence
  Description of Artificial Sequence: Synthetic oligonucleotide
  Antisense strand to SEQ ID NO: 786440
aagaacagagugcuugucc

SEQ ID NO: 786442 - RNA, 19 nt, Artificial Sequence
  Description of Artificial Sequence: Synthetic oligonucleotide
  Sense strand starting at position 975 of SEQ ID NO: 587358
acuggcuugaugugaaucu

SEQ ID NO: 786443 - RNA, 19 nt, Artificial Sequence
  Description of Artificial Sequence: Synthetic oligonucleotide
  Antisense strand to SEQ ID NO: 786442
agauucacaucaagccagu

SEQ ID NO: 786444 - RNA, 19 nt, Artificial Sequence
  Description of Artificial Sequence: Synthetic oligonucleotide
  Sense strand starting at position 1086 of SEQ ID NO: 587358
gguugcguggccuuggaua

SEQ ID NO: 786445 - RNA, 19 nt, Artificial Sequence
  Description of Artificial Sequence: Synthetic oligonucleotide
  Antisense strand to SEQ ID NO: 786444
uauccaaggccacgcaacc

SEQ ID NO: 786446 - RNA, 19 nt, Artificial Sequence
  Description of Artificial Sequence: Synthetic oligonucleotide
  Sense strand starting at position 1377 of SEQ ID NO: 587358
guucucucagacugccaaa

SEQ ID NO: 786447 - RNA, 19 nt, Artificial Sequence
  Description of Artificial Sequence: Synthetic oligonucleotide
  Antisense strand to SEQ ID NO: 786446
uuuggcagucugagagaac

SEQ ID NO: 786448 - RNA, 19 nt, Artificial Sequence
  Description of Artificial Sequence: Synthetic oligonucleotide
  Sense strand starting at position 1461 of SEQ ID NO: 587358
uuguucuugccuugggaaa

SEQ ID NO: 786449 - RNA, 19 nt, Artificial Sequence
  Description of Artificial Sequence: Synthetic oligonucleotide
  Antisense strand to SEQ ID NO: 786448
uuucccaaggcaagaacaa

SEQ ID NO: 786450 - RNA, 19 nt, Artificial Sequence
  Description of Artificial Sequence: Synthetic oligonucleotide
  Sense strand starting at position 1462 of SEQ ID NO: 587358
uguucuugccuugggaaag

SEQ ID NO: 786451 - RNA, 19 nt, Artificial Sequence
  Description of Artificial Sequence: Synthetic oligonucleotide
  Antisense strand to SEQ ID NO: 786450
cuuucccaaggcaagaaca

SEQ ID NO: 786452 - RNA, 19 nt, Artificial Sequence
  Description of Artificial Sequence: Synthetic oligonucleotide
  Sense strand starting at position 1537 of SEQ ID NO: 587358
gaacgcuacuagguaaaca

SEQ ID NO: 786453 - RNA, 19 nt, Artificial Sequence
  Description of Artificial Sequence: Synthetic oligonucleotide
  Antisense strand to SEQ ID NO: 786452
uguuuaccuaguagcguuc

SEQ ID NO: 786454 - RNA, 19 nt, Artificial Sequence
  Description of Artificial Sequence: Synthetic oligonucleotide
  Sense strand starting at position 1845 of SEQ ID NO: 587358
guaugcucuggucacaauu

SEQ ID NO: 786455 - RNA, 19 nt, Artificial Sequence
  Description of Artificial Sequence: Synthetic oligonucleotide
  Antisense strand to SEQ ID NO: 786454
aauugugaccagagcauac

SEQ ID NO: 786456 - RNA, 19 nt, Artificial Sequence
  Description of Artificial Sequence: Synthetic oligonucleotide
  Sense strand starting at position 1930 of SEQ ID NO: 587358
cuuacagguuucucucaga

SEQ ID NO: 786457 - RNA, 19 nt, Artificial Sequence
  Description of Artificial Sequence: Synthetic oligonucleotide
  Antisense strand to SEQ ID NO: 786456
ucugagagaaaccuguaag

SEQ ID NO: 786458 - RNA, 19 nt, Artificial Sequence
  Description of Artificial Sequence: Synthetic oligonucleotide
  Sense strand starting at position 2212 of SEQ ID NO: 587358
aagagagugaguugugaaa

SEQ ID NO: 786459 - RNA, 19 nt, Artificial Sequence
  Description of Artificial Sequence: Synthetic oligonucleotide
  Antisense strand to SEQ ID NO: 786458
uuucacaacucacucucuu

SEQ ID NO: 786460 - RNA, 19 nt, Artificial Sequence
  Description of Artificial Sequence: Synthetic oligonucleotide
  Sense strand starting at position 2291 of SEQ ID NO: 587358
acucgagccauugggaaau

SEQ ID NO: 786461 - RNA, 19 nt, Artificial Sequence
  Description of Artificial Sequence: Synthetic oligonucleotide
  Antisense strand to SEQ ID NO: 786460
auuucccaauggcucgagu

SEQ ID NO: 786462 - RNA, 19 nt, Artificial Sequence
  Description of Artificial Sequence: Synthetic oligonucleotide
  Sense strand starting at position 2431 of SEQ ID NO: 587358
acaugugacuuuccaucuu

SEQ ID NO: 786463 - RNA, 19 nt, Artificial Sequence
  Description of Artificial Sequence: Synthetic oligonucleotide
  Antisense strand to SEQ ID NO: 786462
aagauggaaagucacaugu

SEQ ID NO: 786464 - RNA, 19 nt, Artificial Sequence
  Description of Artificial Sequence: Synthetic oligonucleotide
  Sense strand starting at position 2485 of SEQ ID NO: 587358
uguaguuucggagaguuag

SEQ ID NO: 786465 - RNA, 19 nt, Artificial Sequence
  Description of Artificial Sequence: Synthetic oligonucleotide
  Antisense strand to SEQ ID NO: 786464
cuaacucuccgaaacuaca

SEQ ID NO: 786466 - RNA, 19 nt, Artificial Sequence
  Description of Artificial Sequence: Synthetic oligonucleotide
  Sense strand starting at position 2638 of SEQ ID NO: 587358
cugcaugucccucaugagu

SEQ ID NO: 786467 - RNA, 19 nt, Artificial Sequence
  Description of Artificial Sequence: Synthetic oligonucleotide
  Antisense strand to SEQ ID NO: 786466
acucaugagggacaugcag

SEQ ID NO: 786468 - RNA, 19 nt, Artificial Sequence
  Description of Artificial Sequence: Synthetic oligonucleotide
  Sense strand starting at position 2750 of SEQ ID NO: 587358
gggugucugauugagucau

SEQ ID NO: 786469 - RNA, 19 nt, Artificial Sequence
  Description of Artificial Sequence: Synthetic oligonucleotide
  Antisense strand to SEQ ID NO: 786468
augacucaaucagacaccc

SEQ ID NO: 786470 - RNA, 19 nt, Artificial Sequence
  Description of Artificial Sequence: Synthetic oligonucleotide
  Sense strand starting at position 2754 of SEQ ID NO: 587358
gucugauugagucauccag

SEQ ID NO: 786471 - RNA, 19 nt, Artificial Sequence
  Description of Artificial Sequence: Synthetic oligonucleotide
  Antisense strand to SEQ ID NO: 786470
cuggaugacucaaucagac

SEQ ID NO: 786472 - RNA, 19 nt, Artificial Sequence
  Description of Artificial Sequence: Synthetic oligonucleotide
  Sense strand starting at position 2756 of SEQ ID NO: 587358
cugauugagucauccagaa

SEQ ID NO: 786473 - RNA, 19 nt, Artificial Sequence
  Description of Artificial Sequence: Synthetic oligonucleotide
  Antisense strand to SEQ ID NO: 786472
uucuggaugacucaaucag

SEQ ID NO: 786474 - RNA, 19 nt, Artificial Sequence
  Description of Artificial Sequence: Synthetic oligonucleotide
  Sense strand starting at position 2760 of SEQ ID NO: 587358
uugagucauccagaagcag

SEQ ID NO: 786475 - RNA, 19 nt, Artificial Sequence
  Description of Artificial Sequence: Synthetic oligonucleotide
  Antisense strand to SEQ ID NO: 786474
cugcuucuggaugacucaa

SEQ ID NO: 786476 - RNA, 19 nt, Artificial Sequence
  Description of Artificial Sequence: Synthetic oligonucleotide
  Sense strand starting at position 2841 of SEQ ID NO: 587358
agacuuuggugagugggaa

SEQ ID NO: 786477 - RNA, 19 nt, Artificial Sequence
  Description of Artificial Sequence: Synthetic oligonucleotide
  Antisense strand to SEQ ID NO: 786476
uucccacucaccaaagucu

SEQ ID NO: 786478 - RNA, 19 nt, Artificial Sequence
  Description of Artificial Sequence: Synthetic oligonucleotide
  Sense strand starting at position 2867 of SEQ ID NO: 587358
guguuucuggaagagccau

SEQ ID NO: 786479 - RNA, 19 nt, Artificial Sequence
  Description of Artificial Sequence: Synthetic oligonucleotide
  Antisense strand to SEQ ID NO: 786478
auggcucuuccagaaacac

SEQ ID NO: 786480 - RNA, 19 nt, Artificial Sequence
  Description of Artificial Sequence: Synthetic oligonucleotide
  Sense strand starting at position 2997 of SEQ ID NO: 587358
aguagugcuagggauggaa

SEQ ID NO: 786481 - RNA, 19 nt, Artificial Sequence
  Description of Artificial Sequence: Synthetic oligonucleotide
  Antisense strand to SEQ ID NO: 786480
uuccaucccuagcacuacu

SEQ ID NO: 786482 - RNA, 19 nt, Artificial Sequence
  Description of Artificial Sequence: Synthetic oligonucleotide
  Sense strand starting at position 2999 of SEQ ID NO: 587358
uagugcuagggauggaaau

SEQ ID NO: 786483 - RNA, 19 nt, Artificial Sequence
  Description of Artificial Sequence: Synthetic oligonucleotide
  Antisense strand to SEQ ID NO: 786482
auuuccaucccuagcacua

SEQ ID NO: 786484 - RNA, 19 nt, Artificial Sequence
  Description of Artificial Sequence: Synthetic oligonucleotide
  Sense strand starting at position 3038 of SEQ ID NO: 587358
uagagagguagugguuuga

SEQ ID NO: 786485 - RNA, 19 nt, Artificial Sequence
  Description of Artificial Sequence: Synthetic oligonucleotide
  Antisense strand to SEQ ID NO: 786484
ucaaaccacuaccucucua

SEQ ID NO: 786486 - RNA, 19 nt, Artificial Sequence
  Description of Artificial Sequence: Synthetic oligonucleotide
  Sense strand starting at position 3222 of SEQ ID NO: 587358
acagaaguugcuggaucau

SEQ ID NO: 786487 - RNA, 19 nt, Artificial Sequence
  Description of Artificial Sequence: Synthetic oligonucleotide
  Antisense strand to SEQ ID NO: 786486
augauccagcaacuucugu

SEQ ID NO: 786488 - RNA, 19 nt, Artificial Sequence
  Description of Artificial Sequence: Synthetic oligonucleotide
  Sense strand starting at position 3449 of SEQ ID NO: 587358
uuauauuugcaugguaugu

SEQ ID NO: 786489 - RNA, 19 nt, Artificial Sequence
  Description of Artificial Sequence: Synthetic oligonucleotide
  Antisense strand to SEQ ID NO: 786488
acauaccaugcaaauauaa

SEQ ID NO: 786490 - RNA, 19 nt, Artificial Sequence
  Description of Artificial Sequence: Synthetic oligonucleotide
  Sense strand starting at position 3549 of SEQ ID NO: 587358
acagaucagcauugauugu

SEQ ID NO: 786491 - RNA, 19 nt, Artificial Sequence
  Description of Artificial Sequence: Synthetic oligonucleotide
  Antisense strand to SEQ ID NO: 786490
acaaucaaugcugaucugu

SEQ ID NO: 786492 - RNA, 19 nt, Artificial Sequence
  Description of Artificial Sequence: Synthetic oligonucleotide
  Sense strand starting at position 3553 of SEQ ID NO: 587358
aucagcauugauuguaaua

SEQ ID NO: 786493 - RNA, 19 nt, Artificial Sequence
  Description of Artificial Sequence: Synthetic oligonucleotide
  Antisense strand to SEQ ID NO: 786492
uauuacaaucaaugcugau

SEQ ID NO: 786494 - RNA, 19 nt, Artificial Sequence
  Description of Artificial Sequence: Synthetic oligonucleotide
  Sense strand starting at position 3739 of SEQ ID NO: 587358
ccugauuacucccuuagua

SEQ ID NO: 786495 - RNA, 19 nt, Artificial Sequence
  Description of Artificial Sequence: Synthetic oligonucleotide
  Antisense strand to SEQ ID NO: 786494
uacuaagggaguaaucagg

SEQ ID NO: 786496 - RNA, 19 nt, Artificial Sequence
  Description of Artificial Sequence: Synthetic oligonucleotide
  Sense strand starting at position 3885 of SEQ ID NO: 587358
ugaaucugggcuuaaccau

SEQ ID NO: 786497 - RNA, 19 nt, Artificial Sequence
  Description of Artificial Sequence: Synthetic oligonucleotide
  Antisense strand to SEQ ID NO: 786496
augguuaagcccagauuca

SEQ ID NO: 786498 - RNA, 19 nt, Artificial Sequence
  Description of Artificial Sequence: Synthetic oligonucleotide
  Sense strand starting at position 73 of SEQ ID NO: 587359
gaacuuguccugggcaacu

SEQ ID NO: 786499 - RNA, 19 nt, Artificial Sequence
  Description of Artificial Sequence: Synthetic oligonucleotide
  Antisense strand to SEQ ID NO: 786498
aguugcccaggacaaguuc

SEQ ID NO: 786500 - RNA, 19 nt, Artificial Sequence
  Description of Artificial Sequence: Synthetic oligonucleotide
  Sense strand starting at position 214 of SEQ ID NO: 587359
aaacguggucccgauaucu

SEQ ID NO: 786501 - RNA, 19 nt, Artificial Sequence
  Description of Artificial Sequence: Synthetic oligonucleotide
  Antisense strand to SEQ ID NO: 786500
agauaucgggaccacguuu

SEQ ID NO: 786502 - RNA, 19 nt, Artificial Sequence
  Description of Artificial Sequence: Synthetic oligonucleotide
  Sense strand starting at position 223 of SEQ ID NO: 587359
cccgauaucucugcaagga

SEQ ID NO: 786503 - RNA, 19 nt, Artificial Sequence
  Description of Artificial Sequence: Synthetic oligonucleotide
  Antisense strand to SEQ ID NO: 786502
uccuugcagagauaucggg

SEQ ID NO: 786504 - RNA, 19 nt, Artificial Sequence
  Description of Artificial Sequence: Synthetic oligonucleotide
  Sense strand starting at position 224 of SEQ ID NO: 587359
ccgauaucucugcaaggac

SEQ ID NO: 786505 - RNA, 19 nt, Artificial Sequence
  Description of Artificial Sequence: Synthetic oligonucleotide
  Antisense strand to SEQ ID NO: 786504
guccuugcagagauaucgg

SEQ ID NO: 786506 - RNA, 19 nt, Artificial Sequence
  Description of Artificial Sequence: Synthetic oligonucleotide
  Sense strand starting at position 245 of SEQ ID NO: 587359
cuuguaucucggaguggug

SEQ ID NO: 786507 - RNA, 19 nt, Artificial Sequence
  Description of Artificial Sequence: Synthetic oligonucleotide
  Antisense strand to SEQ ID NO: 786506
caccacuccgagauacaag

SEQ ID NO: 786508 - RNA, 19 nt, Artificial Sequence
  Description of Artificial Sequence: Synthetic oligonucleotide
  Sense strand starting at position 429 of SEQ ID NO: 587359
auuacagaguaucuacuua

SEQ ID NO: 786509 - RNA, 19 nt, Artificial Sequence
  Description of Artificial Sequence: Synthetic oligonucleotide
  Antisense strand to SEQ ID NO: 786508
uaaguagauacucuguaau

SEQ ID NO: 786510 - RNA, 19 nt, Artificial Sequence
  Description of Artificial Sequence: Synthetic oligonucleotide
  Sense strand starting at position 468 of SEQ ID NO: 587359
uuuaauuuauggcaccaga

SEQ ID NO: 786511 - RNA, 19 nt, Artificial Sequence
  Description of Artificial Sequence: Synthetic oligonucleotide
  Antisense strand to SEQ ID NO: 786510
ucuggugccauaaauuaaa

SEQ ID NO: 786512 - RNA, 19 nt, Artificial Sequence
  Description of Artificial Sequence: Synthetic oligonucleotide
  Sense strand starting at position 547 of SEQ ID NO: 587359
ucgaaauggcuuuacuuau

SEQ ID NO: 786513 - RNA, 19 nt, Artificial Sequence
  Description of Artificial Sequence: Synthetic oligonucleotide
  Antisense strand to SEQ ID NO: 786512
auaaguaaagccauuucga

SEQ ID NO: 786514 - RNA, 19 nt, Artificial Sequence
  Description of Artificial Sequence: Synthetic oligonucleotide
  Sense strand starting at position 902 of SEQ ID NO: 587359
ugacuaucacuguacuauu

SEQ ID NO: 786515 - RNA, 19 nt, Artificial Sequence
  Description of Artificial Sequence: Synthetic oligonucleotide
  Antisense strand to SEQ ID NO: 786514
aauaguacagugauaguca

SEQ ID NO: 786516 - RNA, 19 nt, Artificial Sequence
  Description of Artificial Sequence: Synthetic oligonucleotide
  Sense strand starting at position 977 of SEQ ID NO: 587359
ggaaaugugguguaucuau

SEQ ID NO: 786517 - RNA, 19 nt, Artificial Sequence
  Description of Artificial Sequence: Synthetic oligonucleotide
  Antisense strand to SEQ ID NO: 786516
auagauacaccacauuucc

SEQ ID NO: 786518 - RNA, 19 nt, Artificial Sequence
  Description of Artificial Sequence: Synthetic oligonucleotide
  Sense strand starting at position 1071 of SEQ ID NO: 587359
auuaccuuacgcgauaacu

SEQ ID NO: 786519 - RNA, 19 nt, Artificial Sequence
  Description of Artificial Sequence: Synthetic oligonucleotide
  Antisense strand to SEQ ID NO: 786518
aguuaucgcguaagguaau

SEQ ID NO: 786520 - RNA, 19 nt, Artificial Sequence
  Description of Artificial Sequence: Synthetic oligonucleotide
  Sense strand starting at position 1317 of SEQ ID NO: 587359
gcgcaaguacuccuugcau

SEQ ID NO: 786521 - RNA, 19 nt, Artificial Sequence
  Description of Artificial Sequence: Synthetic oligonucleotide
  Antisense strand to SEQ ID NO: 786520
augcaaggaguacuugcgc

SEQ ID NO: 786522 - RNA, 19 nt, Artificial Sequence
  Description of Artificial Sequence: Synthetic oligonucleotide
  Sense strand starting at position 2113 of SEQ ID NO: 587359
ggacuuuagcccugcauag

SEQ ID NO: 786523 - RNA, 19 nt, Artificial Sequence
  Description of Artificial Sequence: Synthetic oligonucleotide
  Antisense strand to SEQ ID NO: 786522
cuaugcagggcuaaagucc

SEQ ID NO: 786524 - RNA, 19 nt, Artificial Sequence
  Description of Artificial Sequence: Synthetic oligonucleotide
  Sense strand starting at position 2423 of SEQ ID NO: 587359
uagaucgugucucugauaa

SEQ ID NO: 786525 - RNA, 19 nt, Artificial Sequence
  Description of Artificial Sequence: Synthetic oligonucleotide
  Antisense strand to SEQ ID NO: 786524
uuaucagagacacgaucua

SEQ ID NO: 786526 - RNA, 19 nt, Artificial Sequence
  Description of Artificial Sequence: Synthetic oligonucleotide
  Sense strand starting at position 2501 of SEQ ID NO: 587359
ucgcguaggcguaauuaca

SEQ ID NO: 786527 - RNA, 19 nt, Artificial Sequence
  Description of Artificial Sequence: Synthetic oligonucleotide
  Antisense strand to SEQ ID NO: 786526
uguaauuacgccuacgcga

SEQ ID NO: 786528 - RNA, 19 nt, Artificial Sequence
  Description of Artificial Sequence: Synthetic oligonucleotide
  Sense strand starting at position 2511 of SEQ ID NO: 587359
guaauuacacccuaaaggu

SEQ ID NO: 786529 - RNA, 19 nt, Artificial Sequence
  Description of Artificial Sequence: Synthetic oligonucleotide
  Antisense strand to SEQ ID NO: 786528
accuuuaggguguaauuac

SEQ ID NO: 786530 - RNA, 19 nt, Artificial Sequence
  Description of Artificial Sequence: Synthetic oligonucleotide
  Sense strand starting at position 2618 of SEQ ID NO: 587359
gcauccuuccuauagguua

SEQ ID NO: 786531 - RNA, 19 nt, Artificial Sequence
  Description of Artificial Sequence: Synthetic oligonucleotide
  Antisense strand to SEQ ID NO: 786530
uaaccuauaggaaggaugc

SEQ ID NO: 786532 - RNA, 19 nt, Artificial Sequence
  Description of Artificial Sequence: Synthetic oligonucleotide
  Sense strand starting at position 2649 of SEQ ID NO: 587359
cuguuugcucucuaaugaa

SEQ ID NO: 786533 - RNA, 19 nt, Artificial Sequence
  Description of Artificial Sequence: Synthetic oligonucleotide
  Antisense strand to SEQ ID NO: 786532
uucauuagagagcaaacag

SEQ ID NO: 786534 - RNA, 19 nt, Artificial Sequence
  Description of Artificial Sequence: Synthetic oligonucleotide
  Sense strand starting at position 2661 of SEQ ID NO: 587359
uaaugaaugucucugguuc

SEQ ID NO: 786535 - RNA, 19 nt, Artificial Sequence
  Description of Artificial Sequence: Synthetic oligonucleotide
  Antisense strand to SEQ ID NO: 786534
gaaccagagacauucauua

SEQ ID NO: 786536 - RNA, 19 nt, Artificial Sequence
  Description of Artificial Sequence: Synthetic oligonucleotide
  Sense strand starting at position 2662 of SEQ ID NO: 587359
aaugaaugucucugguucu

SEQ ID NO: 786537 - RNA, 19 nt, Artificial Sequence
  Description of Artificial Sequence: Synthetic oligonucleotide
  Antisense strand to SEQ ID NO: 786536
agaaccagagacauucauu

SEQ ID NO: 786538 - RNA, 19 nt, Artificial Sequence
  Description of Artificial Sequence: Synthetic oligonucleotide
  Sense strand starting at position 2702 of SEQ ID NO: 587359
accugacauucgguugacu

SEQ ID NO: 786539 - RNA, 19 nt, Artificial Sequence
  Description of Artificial Sequence: Synthetic oligonucleotide
  Antisense strand to SEQ ID NO: 786538
agucaaccgaaugucaggu

SEQ ID NO: 786540 - RNA, 19 nt, Artificial Sequence
  Description of Artificial Sequence: Synthetic oligonucleotide
  Sense strand starting at position 2704 of SEQ ID NO: 587359
cugacauucgguugacuaa

SEQ ID NO: 786541 - RNA, 19 nt, Artificial Sequence
  Description of Artificial Sequence: Synthetic oligonucleotide
  Antisense strand to SEQ ID NO: 786540
uuagucaaccgaaugucag

SEQ ID NO: 786542 - RNA, 19 nt, Artificial Sequence
  Description of Artificial Sequence: Synthetic oligonucleotide
  Sense strand starting at position 2705 of SEQ ID NO: 587359
ugacauucgguugacuaau

SEQ ID NO: 786543 - RNA, 19 nt, Artificial Sequence
  Description of Artificial Sequence: Synthetic oligonucleotide
  Antisense strand to SEQ ID NO: 786542
auuagucaaccgaauguca

SEQ ID NO: 786544 - RNA, 19 nt, Artificial Sequence
  Description of Artificial Sequence: Synthetic oligonucleotide
  Sense strand starting at position 2711 of SEQ ID NO: 587359
ucgguugacuaauugacau

SEQ ID NO: 786545 - RNA, 19 nt, Artificial Sequence
  Description of Artificial Sequence: Synthetic oligonucleotide
  Antisense strand to SEQ ID NO: 786544
augucaauuagucaaccga

SEQ ID NO: 786546 - RNA, 19 nt, Artificial Sequence
  Description of Artificial Sequence: Synthetic oligonucleotide
  Sense strand starting at position 2722 of SEQ ID NO: 587359
auugacaucuccgcucaga

SEQ ID NO: 786547 - RNA, 19 nt, Artificial Sequence
  Description of Artificial Sequence: Synthetic oligonucleotide
  Antisense strand to SEQ ID NO: 786546
ucugagcggagaugucaau

SEQ ID NO: 786548 - RNA, 19 nt, Artificial Sequence
  Description of Artificial Sequence: Synthetic oligonucleotide
  Sense strand starting at position 2737 of SEQ ID NO: 587359
cagagucguaucgaaccua

SEQ ID NO: 786549 - RNA, 19 nt, Artificial Sequence
  Description of Artificial Sequence: Synthetic oligonucleotide
  Antisense strand to SEQ ID NO: 786548
uagguucgauacgacucug

SEQ ID NO: 786550 - RNA, 19 nt, Artificial Sequence
  Description of Artificial Sequence: Synthetic oligonucleotide
  Sense strand starting at position 2890 of SEQ ID NO: 587359
uguaauagaucugcaaguu

SEQ ID NO: 786551 - RNA, 19 nt, Artificial Sequence
  Description of Artificial Sequence: Synthetic oligonucleotide
  Antisense strand to SEQ ID NO: 786550
aacuugcagaucuauuaca

SEQ ID NO: 786552 - RNA, 19 nt, Artificial Sequence
  Description of Artificial Sequence: Synthetic oligonucleotide
  Sense strand starting at position 2891 of SEQ ID NO: 587359
guaauagaucugcaaguuc

SEQ ID NO: 786553 - RNA, 19 nt, Artificial Sequence
  Description of Artificial Sequence: Synthetic oligonucleotide
  Antisense strand to SEQ ID NO: 786552
gaacuugcagaucuauuac

SEQ ID NO: 786554 - RNA, 19 nt, Artificial Sequence
  Description of Artificial Sequence: Synthetic oligonucleotide
  Sense strand starting at position 2925 of SEQ ID NO: 587359
gggucucaugcuuacacuu

SEQ ID NO: 786555 - RNA, 19 nt, Artificial Sequence
  Description of Artificial Sequence: Synthetic oligonucleotide
  Antisense strand to SEQ ID NO: 786554
aaguguaagcaugagaccc

SEQ ID NO: 786556 - RNA, 19 nt, Artificial Sequence
  Description of Artificial Sequence: Synthetic oligonucleotide
  Sense strand starting at position 2950 of SEQ ID NO: 587359
accggaccaucucucuaau

SEQ ID NO: 786557 - RNA, 19 nt, Artificial Sequence
  Description of Artificial Sequence: Synthetic oligonucleotide
  Antisense strand to SEQ ID NO: 786556
auuagagagaugguccggu

SEQ ID NO: 786558 - RNA, 19 nt, Artificial Sequence
  Description of Artificial Sequence: Synthetic oligonucleotide
  Sense strand starting at position 3007 of SEQ ID NO: 587359
guacuuggccucugaaauc

SEQ ID NO: 786559 - RNA, 19 nt, Artificial Sequence
  Description of Artificial Sequence: Synthetic oligonucleotide
  Antisense strand to SEQ ID NO: 786558
gauuucagaggccaaguac

SEQ ID NO: 786560 - RNA, 19 nt, Artificial Sequence
  Description of Artificial Sequence: Synthetic oligonucleotide
  Sense strand starting at position 3208 of SEQ ID NO: 587359
augaucccgucucuauaua

SEQ ID NO: 786561 - RNA, 19 nt, Artificial Sequence
  Description of Artificial Sequence: Synthetic oligonucleotide
  Antisense strand to SEQ ID NO: 786560
uauauagagacgggaucau

SEQ ID NO: 786562 - RNA, 19 nt, Artificial Sequence
  Description of Artificial Sequence: Synthetic oligonucleotide
  Sense strand starting at position 3209 of SEQ ID NO: 587359
ugaucccgucucuauauau

SEQ ID NO: 786563 - RNA, 19 nt, Artificial Sequence
  Description of Artificial Sequence: Synthetic oligonucleotide
  Antisense strand to SEQ ID NO: 786562
auauauagagacgggauca

SEQ ID NO: 786564 - RNA, 19 nt, Artificial Sequence
  Description of Artificial Sequence: Synthetic oligonucleotide
  Sense strand starting at position 3474 of SEQ ID NO: 587359
gacccuuuaugucucggau

SEQ ID NO: 786565 - RNA, 19 nt, Artificial Sequence
  Description of Artificial Sequence: Synthetic oligonucleotide
  Antisense strand to SEQ ID NO: 786564
auccgagacauaaaggguc

SEQ ID NO: 786566 - RNA, 19 nt, Artificial Sequence
  Description of Artificial Sequence: Synthetic oligonucleotide
  Sense strand starting at position 3526 of SEQ ID NO: 587359
acuaguaguagauggauau

SEQ ID NO: 786567 - RNA, 19 nt, Artificial Sequence
  Description of Artificial Sequence: Synthetic oligonucleotide
  Antisense strand to SEQ ID NO: 786566
auauccaucuacuacuagu

SEQ ID NO: 786568 - RNA, 19 nt, Artificial Sequence
  Description of Artificial Sequence: Synthetic oligonucleotide
  Sense strand starting at position 3649 of SEQ ID NO: 587359
uguuguucacaggaggaau

SEQ ID NO: 786569 - RNA, 19 nt, Artificial Sequence
  Description of Artificial Sequence: Synthetic oligonucleotide
  Antisense strand to SEQ ID NO: 786568
auuccuccugugaacaaca

SEQ ID NO: 786570 - RNA, 19 nt, Artificial Sequence
  Description of Artificial Sequence: Synthetic oligonucleotide
  Sense strand starting at position 3726 of SEQ ID NO: 587359
ccagauuagcuaggauaau

SEQ ID NO: 786571 - RNA, 19 nt, Artificial Sequence
  Description of Artificial Sequence: Synthetic oligonucleotide
  Antisense strand to SEQ ID NO: 786570
auuauccuagcuaaucugg

SEQ ID NO: 786572 - RNA, 19 nt, Artificial Sequence
  Description of Artificial Sequence: Synthetic oligonucleotide
  Sense strand starting at position 3762 of SEQ ID NO: 587359
aacugaugaugggcuuuaa

SEQ ID NO: 786573 - RNA, 19 nt, Artificial Sequence
  Description of Artificial Sequence: Synthetic oligonucleotide
  Antisense strand to SEQ ID NO: 786572
uuaaagcccaucaucaguu

SEQ ID NO: 786574 - RNA, 19 nt, Artificial Sequence
  Description of Artificial Sequence: Synthetic oligonucleotide
  Sense strand starting at position 3817 of SEQ ID NO: 587359
auuaguguuugacuaauga

SEQ ID NO: 786575 - RNA, 19 nt, Artificial Sequence
  Description of Artificial Sequence: Synthetic oligonucleotide
  Antisense strand to SEQ ID NO: 786574
ucauuagucaaacacuaau

SEQ ID NO: 786576 - RNA, 19 nt, Artificial Sequence
  Description of Artificial Sequence: Synthetic oligonucleotide
  Sense strand starting at position 3966 of SEQ ID NO: 587359
gacaucugugacugguuga

SEQ ID NO: 786577 - RNA, 19 nt, Artificial Sequence
  Description of Artificial Sequence: Synthetic oligonucleotide
  Antisense strand to SEQ ID NO: 786576
ucaaccagucacagauguc

SEQ ID NO: 786578 - RNA, 19 nt, Artificial Sequence
  Description of Artificial Sequence: Synthetic oligonucleotide
  Sense strand starting at position 382 of SEQ ID NO: 587360
guguaacacgccuguaauc

SEQ ID NO: 786579 - RNA, 19 nt, Artificial Sequence
  Description of Artificial Sequence: Synthetic oligonucleotide
  Antisense strand to SEQ ID NO: 786578
gauuacaggcguguuacac

SEQ ID NO: 786580 - RNA, 19 nt, Artificial Sequence
  Description of Artificial Sequence: Synthetic oligonucleotide
  Sense strand starting at position 505 of SEQ ID NO: 587360
uuggguaacuaugcagaaa

SEQ ID NO: 786581 - RNA, 19 nt, Artificial Sequence
  Description of Artificial Sequence: Synthetic oligonucleotide
  Antisense strand to SEQ ID NO: 786580
uuucugcauaguuacccaa

SEQ ID NO: 786582 - RNA, 19 nt, Artificial Sequence
  Description of Artificial Sequence: Synthetic oligonucleotide
  Sense strand starting at position 568 of SEQ ID NO: 587360
auuauugauuggcuaggua

SEQ ID NO: 786583 - RNA, 19 nt, Artificial Sequence
  Description of Artificial Sequence: Synthetic oligonucleotide
  Antisense strand to SEQ ID NO: 786582
uaccuagccaaucaauaau

SEQ ID NO: 786584 - RNA, 19 nt, Artificial Sequence
  Description of Artificial Sequence: Synthetic oligonucleotide
  Sense strand starting at position 571 of SEQ ID NO: 587360
auugauuggcuagguauua

SEQ ID NO: 786585 - RNA, 19 nt, Artificial Sequence
  Description of Artificial Sequence: Synthetic oligonucleotide
  Antisense strand to SEQ ID NO: 786584
uaauaccuagccaaucaau

SEQ ID NO: 786586 - RNA, 19 nt, Artificial Sequence
  Description of Artificial Sequence: Synthetic oligonucleotide
  Sense strand starting at position 581 of SEQ ID NO: 587360
uagguauuagugcagaagu

SEQ ID NO: 786587 - RNA, 19 nt, Artificial Sequence
  Description of Artificial Sequence: Synthetic oligonucleotide
  Antisense strand to SEQ ID NO: 786586
acuucugcacuaauaccua

SEQ ID NO: 786588 - RNA, 19 nt, Artificial Sequence
  Description of Artificial Sequence: Synthetic oligonucleotide
  Sense strand starting at position 583 of SEQ ID NO: 587360
gguauuagugcagaaguuc

SEQ ID NO: 786589 - RNA, 19 nt, Artificial Sequence
  Description of Artificial Sequence: Synthetic oligonucleotide
  Antisense strand to SEQ ID NO: 786588
gaacuucugcacuaauacc

SEQ ID NO: 786590 - RNA, 19 nt, Artificial Sequence
  Description of Artificial Sequence: Synthetic oligonucleotide
  Sense strand starting at position 615 of SEQ ID NO: 587360
guaagaaauuauguaacug

SEQ ID NO: 786591 - RNA, 19 nt, Artificial Sequence
  Description of Artificial Sequence: Synthetic oligonucleotide
  Antisense strand to SEQ ID NO: 786590
caguuacauaauuucuuac

SEQ ID NO: 786592 - RNA, 19 nt, Artificial Sequence
  Description of Artificial Sequence: Synthetic oligonucleotide
  Sense strand starting at position 699 of SEQ ID NO: 587360
gggagagucuuugucuauu

SEQ ID NO: 786593 - RNA, 19 nt, Artificial Sequence
  Description of Artificial Sequence: Synthetic oligonucleotide
  Antisense strand to SEQ ID NO: 786592
aauagacaaagacucuccc

SEQ ID NO: 786594 - RNA, 19 nt, Artificial Sequence
  Description of Artificial Sequence: Synthetic oligonucleotide
  Sense strand starting at position 702 of SEQ ID NO: 587360
agagucuuugucuauucca

SEQ ID NO: 786595 - RNA, 19 nt, Artificial Sequence
  Description of Artificial Sequence: Synthetic oligonucleotide
  Antisense strand to SEQ ID NO: 786594
uggaauagacaaagacucu

SEQ ID NO: 786596 - RNA, 19 nt, Artificial Sequence
  Description of Artificial Sequence: Synthetic oligonucleotide
  Sense strand starting at position 705 of SEQ ID NO: 587360
gucuuugucuauuccaagu

SEQ ID NO: 786597 - RNA, 19 nt, Artificial Sequence
  Description of Artificial Sequence: Synthetic oligonucleotide
  Antisense strand to SEQ ID NO: 786596
acuuggaauagacaaagac

SEQ ID NO: 786598 - RNA, 19 nt, Artificial Sequence
  Description of Artificial Sequence: Synthetic oligonucleotide
  Sense strand starting at position 994 of SEQ ID NO: 587360
aaacgaacuuaacugugua

SEQ ID NO: 786599 - RNA, 19 nt, Artificial Sequence
  Description of Artificial Sequence: Synthetic oligonucleotide
  Antisense strand to SEQ ID NO: 786598
uacacaguuaaguucguuu

SEQ ID NO: 786600 - RNA, 19 nt, Artificial Sequence
  Description of Artificial Sequence: Synthetic oligonucleotide
  Sense strand starting at position 997 of SEQ ID NO: 587360
cgaacuuaacuguguaacu

SEQ ID NO: 786601 - RNA, 19 nt, Artificial Sequence
  Description of Artificial Sequence: Synthetic oligonucleotide
  Antisense strand to SEQ ID NO: 786600
aguuacacaguuaaguucg

SEQ ID NO: 786602 - RNA, 19 nt, Artificial Sequence
  Description of Artificial Sequence: Synthetic oligonucleotide
  Sense strand starting at position 998 of SEQ ID NO: 587360
gaacuuaacuguguaacug

SEQ ID NO: 786603 - RNA, 19 nt, Artificial Sequence
  Description of Artificial Sequence: Synthetic oligonucleotide
  Antisense strand to SEQ ID NO: 786602
caguuacacaguuaaguuc

SEQ ID NO: 786604 - RNA, 19 nt, Artificial Sequence
  Description of Artificial Sequence: Synthetic oligonucleotide
  Sense strand starting at position 1006 of SEQ ID NO: 587360
cuguguaacuguucgcaca

SEQ ID NO: 786605 - RNA, 19 nt, Artificial Sequence
  Description of Artificial Sequence: Synthetic oligonucleotide
  Antisense strand to SEQ ID NO: 786604
ugugcgaacaguuacacag

SEQ ID NO: 786606 - RNA, 19 nt, Artificial Sequence
  Description of Artificial Sequence: Synthetic oligonucleotide
  Sense strand starting at position 1008 of SEQ ID NO: 587360
guguaacuguucgcacaca

SEQ ID NO: 786607 - RNA, 19 nt, Artificial Sequence
  Description of Artificial Sequence: Synthetic oligonucleotide
  Antisense strand to SEQ ID NO: 786606
ugugugcgaacaguuacac

SEQ ID NO: 786608 - RNA, 19 nt, Artificial Sequence
  Description of Artificial Sequence: Synthetic oligonucleotide
  Sense strand starting at position 1172 of SEQ ID NO: 587360
ugcacagaguucucaauuc

SEQ ID NO: 786609 - RNA, 19 nt, Artificial Sequence
  Description of Artificial Sequence: Synthetic oligonucleotide
  Antisense strand to SEQ ID NO: 786608
gaauugagaacucugugca

SEQ ID NO: 786610 - RNA, 19 nt, Artificial Sequence
  Description of Artificial Sequence: Synthetic oligonucleotide
  Sense strand starting at position 1180 of SEQ ID NO: 587360
guucucaauucucucagua

SEQ ID NO: 786611 - RNA, 19 nt, Artificial Sequence
  Description of Artificial Sequence: Synthetic oligonucleotide
  Antisense strand to SEQ ID NO: 786610
uacugagagaauugagaac

SEQ ID NO: 786612 - RNA, 19 nt, Artificial Sequence
  Description of Artificial Sequence: Synthetic oligonucleotide
  Sense strand starting at position 1192 of SEQ ID NO: 587360
cucaguaaacuggguaauu

SEQ ID NO: 786613 - RNA, 19 nt, Artificial Sequence
  Description of Artificial Sequence: Synthetic oligonucleotide
  Antisense strand to SEQ ID NO: 786612
aauuacccaguuuacugag

SEQ ID NO: 786614 - RNA, 19 nt, Artificial Sequence
  Description of Artificial Sequence: Synthetic oligonucleotide
  Sense strand starting at position 1211 of SEQ ID NO: 587360
uuacucaguccauaaguua

SEQ ID NO: 786615 - RNA, 19 nt, Artificial Sequence
  Description of Artificial Sequence: Synthetic oligonucleotide
  Antisense strand to SEQ ID NO: 786614
uaacuuauggacugaguaa

SEQ ID NO: 786616 - RNA, 19 nt, Artificial Sequence
  Description of Artificial Sequence: Synthetic oligonucleotide
  Sense strand starting at position 1214 of SEQ ID NO: 587360
cucaguccauaaguuauaa

SEQ ID NO: 786617 - RNA, 19 nt, Artificial Sequence
  Description of Artificial Sequence: Synthetic oligonucleotide
  Antisense strand to SEQ ID NO: 786616
uuauaacuuauggacugag

SEQ ID NO: 786618 - RNA, 19 nt, Artificial Sequence
  Description of Artificial Sequence: Synthetic oligonucleotide
  Sense strand starting at position 1251 of SEQ ID NO: 587360
ggaccacaugcucgaaacu

SEQ ID NO: 786619 - RNA, 19 nt, Artificial Sequence
  Description of Artificial Sequence: Synthetic oligonucleotide
  Antisense strand to SEQ ID NO: 786618
aguuucgagcauguggucc

SEQ ID NO: 786620 - RNA, 19 nt, Artificial Sequence
  Description of Artificial Sequence: Synthetic oligonucleotide
  Sense strand starting at position 1463 of SEQ ID NO: 587360
uuugauggauccuugaagu

SEQ ID NO: 786621 - RNA, 19 nt, Artificial Sequence
  Description of Artificial Sequence: Synthetic oligonucleotide
  Antisense strand to SEQ ID NO: 786620
acuucaaggauccaucaaa

SEQ ID NO: 786622 - RNA, 19 nt, Artificial Sequence
  Description of Artificial Sequence: Synthetic oligonucleotide
  Sense strand starting at position 1482 of SEQ ID NO: 587360
cgcuuaaugggugguggua

SEQ ID NO: 786623 - RNA, 19 nt, Artificial Sequence
  Description of Artificial Sequence: Synthetic oligonucleotide
  Antisense strand to SEQ ID NO: 786622
uaccaccacccauuaagcg

SEQ ID NO: 786624 - RNA, 19 nt, Artificial Sequence
  Description of Artificial Sequence: Synthetic oligonucleotide
  Sense strand starting at position 1494 of SEQ ID NO: 587360
ggugguacaaauugggaaa

SEQ ID NO: 786625 - RNA, 19 nt, Artificial Sequence
  Description of Artificial Sequence: Synthetic oligonucleotide
  Antisense strand to SEQ ID NO: 786624
uuucccaauuuguaccacc

SEQ ID NO: 786626 - RNA, 19 nt, Artificial Sequence
  Description of Artificial Sequence: Synthetic oligonucleotide
  Sense strand starting at position 1565 of SEQ ID NO: 587360
gccagaaucucagaugaaa

SEQ ID NO: 786627 - RNA, 19 nt, Artificial Sequence
  Description of Artificial Sequence: Synthetic oligonucleotide
  Antisense strand to SEQ ID NO: 786626
uuucaucugagauucuggc

SEQ ID NO: 786628 - RNA, 19 nt, Artificial Sequence
  Description of Artificial Sequence: Synthetic oligonucleotide
  Sense strand starting at position 2466 of SEQ ID NO: 587360
gagaguuucgaguguccgu

SEQ ID NO: 786629 - RNA, 19 nt, Artificial Sequence
  Description of Artificial Sequence: Synthetic oligonucleotide
  Antisense strand to SEQ ID NO: 786628
acggacacucgaaacucuc

SEQ ID NO: 786630 - RNA, 19 nt, Artificial Sequence
  Description of Artificial Sequence: Synthetic oligonucleotide
  Sense strand starting at position 2499 of SEQ ID NO: 587360
cgagaucaguuucuaguau

SEQ ID NO: 786631 - RNA, 19 nt, Artificial Sequence
  Description of Artificial Sequence: Synthetic oligonucleotide
  Antisense strand to SEQ ID NO: 786630
auacuagaaacugaucucg

SEQ ID NO: 786632 - RNA, 19 nt, Artificial Sequence
  Description of Artificial Sequence: Synthetic oligonucleotide
  Sense strand starting at position 2510 of SEQ ID NO: 587360
ucuaguauccgugacggca

SEQ ID NO: 786633 - RNA, 19 nt, Artificial Sequence
  Description of Artificial Sequence: Synthetic oligonucleotide
  Antisense strand to SEQ ID NO: 786632
ugccgucacggauacuaga

SEQ ID NO: 786634 - RNA, 19 nt, Artificial Sequence
  Description of Artificial Sequence: Synthetic oligonucleotide
  Sense strand starting at position 2605 of SEQ ID NO: 587360
ucggaaugauccucgggau

SEQ ID NO: 786635 - RNA, 19 nt, Artificial Sequence
  Description of Artificial Sequence: Synthetic oligonucleotide
  Antisense strand to SEQ ID NO: 786634
aucccgaggaucauuccga

SEQ ID NO: 786636 - RNA, 19 nt, Artificial Sequence
  Description of Artificial Sequence: Synthetic oligonucleotide
  Sense strand starting at position 2606 of SEQ ID NO: 587360
cggaaugauccucgggaua

SEQ ID NO: 786637 - RNA, 19 nt, Artificial Sequence
  Description of Artificial Sequence: Synthetic oligonucleotide
  Antisense strand to SEQ ID NO: 786636
uaucccgaggaucauuccg

SEQ ID NO: 786638 - RNA, 19 nt, Artificial Sequence
  Description of Artificial Sequence: Synthetic oligonucleotide
  Sense strand starting at position 2813 of SEQ ID NO: 587360
ccgugcauuuauuaugauu

SEQ ID NO: 786639 - RNA, 19 nt, Artificial Sequence
  Description of Artificial Sequence: Synthetic oligonucleotide
  Antisense strand to SEQ ID NO: 786638
aaucauaauaaaugcacgg

SEQ ID NO: 786640 - RNA, 19 nt, Artificial Sequence
  Description of Artificial Sequence: Synthetic oligonucleotide
  Sense strand starting at position 2997 of SEQ ID NO: 587360
cugcgacacuagucucuaa

SEQ ID NO: 786641 - RNA, 19 nt, Artificial Sequence
  Description of Artificial Sequence: Synthetic oligonucleotide
  Antisense strand to SEQ ID NO: 786640
uuagagacuagugucgcag

SEQ ID NO: 786642 - RNA, 19 nt, Artificial Sequence
  Description of Artificial Sequence: Synthetic oligonucleotide
  Sense strand starting at position 3000 of SEQ ID NO: 587360
cgacacuagucucuaaaca

SEQ ID NO: 786643 - RNA, 19 nt, Artificial Sequence
  Description of Artificial Sequence: Synthetic oligonucleotide
  Antisense strand to SEQ ID NO: 786642
uguuuagagacuagugucg

SEQ ID NO: 786644 - RNA, 19 nt, Artificial Sequence
  Description of Artificial Sequence: Synthetic oligonucleotide
  Sense strand starting at position 3105 of SEQ ID NO: 587360
agauacugcuguccaaaca

SEQ ID NO: 786645 - RNA, 19 nt, Artificial Sequence
  Description of Artificial Sequence: Synthetic oligonucleotide
  Antisense strand to SEQ ID NO: 786644
uguuuggacagcaguaucu

SEQ ID NO: 786646 - RNA, 19 nt, Artificial Sequence
  Description of Artificial Sequence: Synthetic oligonucleotide
  Sense strand starting at position 3127 of SEQ ID NO: 587360
agacauaacugaggugaaa

SEQ ID NO: 786647 - RNA, 19 nt, Artificial Sequence
  Description of Artificial Sequence: Synthetic oligonucleotide
  Antisense strand to SEQ ID NO: 786646
uuucaccucaguuaugucu

SEQ ID NO: 786648 - RNA, 19 nt, Artificial Sequence
  Description of Artificial Sequence: Synthetic oligonucleotide
  Sense strand starting at position 3429 of SEQ ID NO: 587360
agagaaauuucccgcaguc

SEQ ID NO: 786649 - RNA, 19 nt, Artificial Sequence
  Description of Artificial Sequence: Synthetic oligonucleotide
  Antisense strand to SEQ ID NO: 786648
gacugcgggaaauuucucu

SEQ ID NO: 786650 - RNA, 19 nt, Artificial Sequence
  Description of Artificial Sequence: Synthetic oligonucleotide
  Sense strand starting at position 3444 of SEQ ID NO: 587360
agucaugaggucgaguaca

SEQ ID NO: 786651 - RNA, 19 nt, Artificial Sequence
  Description of Artificial Sequence: Synthetic oligonucleotide
  Antisense strand to SEQ ID NO: 786650
uguacucgaccucaugacu

SEQ ID NO: 786652 - RNA, 19 nt, Artificial Sequence
  Description of Artificial Sequence: Synthetic oligonucleotide
  Sense strand starting at position 3469 of SEQ ID NO: 587360
gcccgacucuccuuaguau

SEQ ID NO: 786653 - RNA, 19 nt, Artificial Sequence
  Description of Artificial Sequence: Synthetic oligonucleotide
  Antisense strand to SEQ ID NO: 786652
auacuaaggagagucgggc

SEQ ID NO: 786654 - RNA, 19 nt, Artificial Sequence
  Description of Artificial Sequence: Synthetic oligonucleotide
  Sense strand starting at position 3470 of SEQ ID NO: 587360
cccgacucuccuuaguauu

SEQ ID NO: 786655 - RNA, 19 nt, Artificial Sequence
  Description of Artificial Sequence: Synthetic oligonucleotide
  Antisense strand to SEQ ID NO: 786654
aauacuaaggagagucggg

SEQ ID NO: 786656 - RNA, 19 nt, Artificial Sequence
  Description of Artificial Sequence: Synthetic oligonucleotide
  Sense strand starting at position 3537 of SEQ ID NO: 587360
acuagauuauagggcauuu

SEQ ID NO: 786657 - RNA, 19 nt, Artificial Sequence
  Description of Artificial Sequence: Synthetic oligonucleotide
  Antisense strand to SEQ ID NO: 786656
aaaugcccuauaaucuagu

SEQ ID NO: 786658 - RNA, 19 nt, Artificial Sequence
  Description of Artificial Sequence: Synthetic oligonucleotide
  Sense strand starting at position 43 of SEQ ID NO: 587361
uuggguaacuaugcagaaa

SEQ ID NO: 786659 - RNA, 19 nt, Artificial Sequence
  Description of Artificial Sequence: Synthetic oligonucleotide
  Antisense strand to SEQ ID NO: 786658
uuucugcauaguuacccaa

SEQ ID NO: 786660 - RNA, 19 nt, Artificial Sequence
  Description of Artificial Sequence: Synthetic oligonucleotide
  Sense strand starting at position 106 of SEQ ID NO: 587361
auuauugauuggcuaggua

SEQ ID NO: 786661 - RNA, 19 nt, Artificial Sequence
  Description of Artificial Sequence: Synthetic oligonucleotide
  Antisense strand to SEQ ID NO: 786660
uaccuagccaaucaauaau

SEQ ID NO: 786662 - RNA, 19 nt, Artificial Sequence
  Description of Artificial Sequence: Synthetic oligonucleotide
  Sense strand starting at position 109 of SEQ ID NO: 587361
auugauuggcuagguauua

SEQ ID NO: 786663 - RNA, 19 nt, Artificial Sequence
  Description of Artificial Sequence: Synthetic oligonucleotide
  Antisense strand to SEQ ID NO: 786662
uaauaccuagccaaucaau

SEQ ID NO: 786664 - RNA, 19 nt, Artificial Sequence
  Description of Artificial Sequence: Synthetic oligonucleotide
  Sense strand starting at position 119 of SEQ ID NO: 587361
uagguauuagugcagaagu

SEQ ID NO: 786665 - RNA, 19 nt, Artificial Sequence
  Description of Artificial Sequence: Synthetic oligonucleotide
  Antisense strand to SEQ ID NO: 786664
acuucugcacuaauaccua

SEQ ID NO: 786666 - RNA, 19 nt, Artificial Sequence
  Description of Artificial Sequence: Synthetic oligonucleotide
  Sense strand starting at position 121 of SEQ ID NO: 587361
gguauuagugcagaaguuc

SEQ ID NO: 786667 - RNA, 19 nt, Artificial Sequence
  Description of Artificial Sequence: Synthetic oligonucleotide
  Antisense strand to SEQ ID NO: 786666
gaacuucugcacuaauacc

SEQ ID NO: 786668 - RNA, 19 nt, Artificial Sequence
  Description of Artificial Sequence: Synthetic oligonucleotide
  Sense strand starting at position 153 of SEQ ID NO: 587361
guaagaaauuauguaacug

SEQ ID NO: 786669 - RNA, 19 nt, Artificial Sequence
  Description of Artificial Sequence: Synthetic oligonucleotide
  Antisense strand to SEQ ID NO: 786668
caguuacauaauuucuuac

SEQ ID NO: 786670 - RNA, 19 nt, Artificial Sequence
  Description of Artificial Sequence: Synthetic oligonucleotide
  Sense strand starting at position 237 of SEQ ID NO: 587361
gggagagucuuugucuauu

SEQ ID NO: 786671 - RNA, 19 nt, Artificial Sequence
  Description of Artificial Sequence: Synthetic oligonucleotide
  Antisense strand to SEQ ID NO: 786670
aauagacaaagacucuccc

SEQ ID NO: 786672 - RNA, 19 nt, Artificial Sequence
  Description of Artificial Sequence: Synthetic oligonucleotide
  Sense strand starting at position 240 of SEQ ID NO: 587361
agagucuuugucuauucca

SEQ ID NO: 786673 - RNA, 19 nt, Artificial Sequence
  Description of Artificial Sequence: Synthetic oligonucleotide
  Antisense strand to SEQ ID NO: 786672
uggaauagacaaagacucu

SEQ ID NO: 786674 - RNA, 19 nt, Artificial Sequence
  Description of Artificial Sequence: Synthetic oligonucleotide
  Sense strand starting at position 243 of SEQ ID NO: 587361
gucuuugucuauuccaagu

SEQ ID NO: 786675 - RNA, 19 nt, Artificial Sequence
  Description of Artificial Sequence: Synthetic oligonucleotide
  Antisense strand to SEQ ID NO: 786674
acuuggaauagacaaagac

SEQ ID NO: 786676 - RNA, 19 nt, Artificial Sequence
  Description of Artificial Sequence: Synthetic oligonucleotide
  Sense strand starting at position 532 of SEQ ID NO: 587361
aaacgaacuuaacugugua

SEQ ID NO: 786677 - RNA, 19 nt, Artificial Sequence
  Description of Artificial Sequence: Synthetic oligonucleotide
  Antisense strand to SEQ ID NO: 786676
uacacaguuaaguucguuu

SEQ ID NO: 786678 - RNA, 19 nt, Artificial Sequence
  Description of Artificial Sequence: Synthetic oligonucleotide
  Sense strand starting at position 535 of SEQ ID NO: 587361
cgaacuuaacuguguaacu

SEQ ID NO: 786679 - RNA, 19 nt, Artificial Sequence
  Description of Artificial Sequence: Synthetic oligonucleotide
  Antisense strand to SEQ ID NO: 786678
aguuacacaguuaaguucg

SEQ ID NO: 786680 - RNA, 19 nt, Artificial Sequence
  Description of Artificial Sequence: Synthetic oligonucleotide
  Sense strand starting at position 536 of SEQ ID NO: 587361
gaacuuaacuguguaacug

SEQ ID NO: 786681 - RNA, 19 nt, Artificial Sequence
  Description of Artificial Sequence: Synthetic oligonucleotide
  Antisense strand to SEQ ID NO: 786680
caguuacacaguuaaguuc

SEQ ID NO: 786682 - RNA, 19 nt, Artificial Sequence
  Description of Artificial Sequence: Synthetic oligonucleotide
  Sense strand starting at position 544 of SEQ ID NO: 587361
cuguguaacuguucgcaca

SEQ ID NO: 786683 - RNA, 19 nt, Artificial Sequence
  Description of Artificial Sequence: Synthetic oligonucleotide
  Antisense strand to SEQ ID NO: 786682
ugugcgaacaguuacacag

SEQ ID NO: 786684 - RNA, 19 nt, Artificial Sequence
  Description of Artificial Sequence: Synthetic oligonucleotide
  Sense strand starting at position 546 of SEQ ID NO: 587361
guguaacuguucgcacaca

SEQ ID NO: 786685 - RNA, 19 nt, Artificial Sequence
  Description of Artificial Sequence: Synthetic oligonucleotide
  Antisense strand to SEQ ID NO: 786684
ugugugcgaacaguuacac

SEQ ID NO: 786686 - RNA, 19 nt, Artificial Sequence
  Description of Artificial Sequence: Synthetic oligonucleotide
  Sense strand starting at position 590 of SEQ ID NO: 587361
cggagccauuucugcaaca

SEQ ID NO: 786687 - RNA, 19 nt, Artificial Sequence
  Description of Artificial Sequence: Synthetic oligonucleotide
  Antisense strand to SEQ ID NO: 786686
uguugcagaaauggcuccg

SEQ ID NO: 786688 - RNA, 19 nt, Artificial Sequence
  Description of Artificial Sequence: Synthetic oligonucleotide
  Sense strand starting at position 710 of SEQ ID NO: 587361
ugcacagaguucucaauuc

SEQ ID NO: 786689 - RNA, 19 nt, Artificial Sequence
  Description of Artificial Sequence: Synthetic oligonucleotide
  Antisense strand to SEQ ID NO: 786688
gaauugagaacucugugca

SEQ ID NO: 786690 - RNA, 19 nt, Artificial Sequence
  Description of Artificial Sequence: Synthetic oligonucleotide
  Sense strand starting at position 718 of SEQ ID NO: 587361
guucucaauucucucagua

SEQ ID NO: 786691 - RNA, 19 nt, Artificial Sequence
  Description of Artificial Sequence: Synthetic oligonucleotide
  Antisense strand to SEQ ID NO: 786690
uacugagagaauugagaac

SEQ ID NO: 786692 - RNA, 19 nt, Artificial Sequence
  Description of Artificial Sequence: Synthetic oligonucleotide
  Sense strand starting at position 730 of SEQ ID NO: 587361
cucaguaaacuggguaauu

SEQ ID NO: 786693 - RNA, 19 nt, Artificial Sequence
  Description of Artificial Sequence: Synthetic oligonucleotide
  Antisense strand to SEQ ID NO: 786692
aauuacccaguuuacugag

SEQ ID NO: 786694 - RNA, 19 nt, Artificial Sequence
  Description of Artificial Sequence: Synthetic oligonucleotide
  Sense strand starting at position 749 of SEQ ID NO: 587361
uuacucaguccauaaguua

SEQ ID NO: 786695 - RNA, 19 nt, Artificial Sequence
  Description of Artificial Sequence: Synthetic oligonucleotide
  Antisense strand to SEQ ID NO: 786694
uaacuuauggacugaguaa

SEQ ID NO: 786696 - RNA, 19 nt, Artificial Sequence
  Description of Artificial Sequence: Synthetic oligonucleotide
  Sense strand starting at position 752 of SEQ ID NO: 587361
cucaguccauaaguuauaa

SEQ ID NO: 786697 - RNA, 19 nt, Artificial Sequence
  Description of Artificial Sequence: Synthetic oligonucleotide
  Antisense strand to SEQ ID NO: 786696
uuauaacuuauggacugag

SEQ ID NO: 786698 - RNA, 19 nt, Artificial Sequence
  Description of Artificial Sequence: Synthetic oligonucleotide
  Sense strand starting at position 789 of SEQ ID NO: 587361
ggaccacaugcucgaaacu

SEQ ID NO: 786699 - RNA, 19 nt, Artificial Sequence
  Description of Artificial Sequence: Synthetic oligonucleotide
  Antisense strand to SEQ ID NO: 786698
aguuucgagcauguggucc

SEQ ID NO: 786700 - RNA, 19 nt, Artificial Sequence
  Description of Artificial Sequence: Synthetic oligonucleotide
  Sense strand starting at position 1001 of SEQ ID NO: 587361
uuugauggauccuugaagu

SEQ ID NO: 786701 - RNA, 19 nt, Artificial Sequence
  Description of Artificial Sequence: Synthetic oligonucleotide
  Antisense strand to SEQ ID NO: 786700
acuucaaggauccaucaaa

SEQ ID NO: 786702 - RNA, 19 nt, Artificial Sequence
  Description of Artificial Sequence: Synthetic oligonucleotide
  Sense strand starting at position 1020 of SEQ ID NO: 587361
cgcuuaaugggugguggua

SEQ ID NO: 786703 - RNA, 19 nt, Artificial Sequence
  Description of Artificial Sequence: Synthetic oligonucleotide
  Antisense strand to SEQ ID NO: 786702
uaccaccacccauuaagcg

SEQ ID NO: 786704 - RNA, 19 nt, Artificial Sequence
  Description of Artificial Sequence: Synthetic oligonucleotide
  Sense strand starting at position 1032 of SEQ ID NO: 587361
ggugguacaaauugggaaa

SEQ ID NO: 786705 - RNA, 19 nt, Artificial Sequence
  Description of Artificial Sequence: Synthetic oligonucleotide
  Antisense strand to SEQ ID NO: 786704
uuucccaauuuguaccacc

SEQ ID NO: 786706 - RNA, 19 nt, Artificial Sequence
  Description of Artificial Sequence: Synthetic oligonucleotide
  Sense strand starting at position 1103 of SEQ ID NO: 587361
gccagaaucucagaugaaa

SEQ ID NO: 786707 - RNA, 19 nt, Artificial Sequence
  Description of Artificial Sequence: Synthetic oligonucleotide
  Antisense strand to SEQ ID NO: 786706
uuucaucugagauucuggc

SEQ ID NO: 786708 - RNA, 19 nt, Artificial Sequence
  Description of Artificial Sequence: Synthetic oligonucleotide
  Sense strand starting at position 2004 of SEQ ID NO: 587361
gagaguuucgaguguccgu

SEQ ID NO: 786709 - RNA, 19 nt, Artificial Sequence
  Description of Artificial Sequence: Synthetic oligonucleotide
  Antisense strand to SEQ ID NO: 786708
acggacacucgaaacucuc

SEQ ID NO: 786710 - RNA, 19 nt, Artificial Sequence
  Description of Artificial Sequence: Synthetic oligonucleotide
  Sense strand starting at position 2037 of SEQ ID NO: 587361
cgagaucaguuucuaguau

SEQ ID NO: 786711 - RNA, 19 nt, Artificial Sequence
  Description of Artificial Sequence: Synthetic oligonucleotide
  Antisense strand to SEQ ID NO: 786710
auacuagaaacugaucucg

SEQ ID NO: 786712 - RNA, 19 nt, Artificial Sequence
  Description of Artificial Sequence: Synthetic oligonucleotide
  Sense strand starting at position 2048 of SEQ ID NO: 587361
ucuaguauccgugacggca

SEQ ID NO: 786713 - RNA, 19 nt, Artificial Sequence
  Description of Artificial Sequence: Synthetic oligonucleotide
  Antisense strand to SEQ ID NO: 786712
ugccgucacggauacuaga

SEQ ID NO: 786714 - RNA, 19 nt, Artificial Sequence
  Description of Artificial Sequence: Synthetic oligonucleotide
  Sense strand starting at position 2143 of SEQ ID NO: 587361
ucggaaugauccucgggau

SEQ ID NO: 786715 - RNA, 19 nt, Artificial Sequence
  Description of Artificial Sequence: Synthetic oligonucleotide
  Antisense strand to SEQ ID NO: 786714
aucccgaggaucauuccga

SEQ ID NO: 786716 - RNA, 19 nt, Artificial Sequence
  Description of Artificial Sequence: Synthetic oligonucleotide
  Sense strand starting at position 2144 of SEQ ID NO: 587361
cggaaugauccucgggaua

SEQ ID NO: 786717 - RNA, 19 nt, Artificial Sequence
  Description of Artificial Sequence: Synthetic oligonucleotide
  Antisense strand to SEQ ID NO: 786716
uaucccgaggaucauuccg

SEQ ID NO: 786718 - RNA, 19 nt, Artificial Sequence
  Description of Artificial Sequence: Synthetic oligonucleotide
  Sense strand starting at position 2351 of SEQ ID NO: 587361
ccgugcauuuauuaugauu

SEQ ID NO: 786719 - RNA, 19 nt, Artificial Sequence
  Description of Artificial Sequence: Synthetic oligonucleotide
  Antisense strand to SEQ ID NO: 786718
aaucauaauaaaugcacgg

SEQ ID NO: 786720 - RNA, 19 nt, Artificial Sequence
  Description of Artificial Sequence: Synthetic oligonucleotide
  Sense strand starting at position 2535 of SEQ ID NO: 587361
cugcgacacuagucucuaa

SEQ ID NO: 786721 - RNA, 19 nt, Artificial Sequence
  Description of Artificial Sequence: Synthetic oligonucleotide
  Antisense strand to SEQ ID NO: 786720
uuagagacuagugucgcag

SEQ ID NO: 786722 - RNA, 19 nt, Artificial Sequence
  Description of Artificial Sequence: Synthetic oligonucleotide
  Sense strand starting at position 2538 of SEQ ID NO: 587361
cgacacuagucucuaaaca

SEQ ID NO: 786723 - RNA, 19 nt, Artificial Sequence
  Description of Artificial Sequence: Synthetic oligonucleotide
  Antisense strand to SEQ ID NO: 786722
uguuuagagacuagugucg

SEQ ID NO: 786724 - RNA, 19 nt, Artificial Sequence
  Description of Artificial Sequence: Synthetic oligonucleotide
  Sense strand starting at position 2643 of SEQ ID NO: 587361
agauacugcuguccaaaca

SEQ ID NO: 786725 - RNA, 19 nt, Artificial Sequence
  Description of Artificial Sequence: Synthetic oligonucleotide
  Antisense strand to SEQ ID NO: 786724
uguuuggacagcaguaucu

SEQ ID NO: 786726 - RNA, 19 nt, Artificial Sequence
  Description of Artificial Sequence: Synthetic oligonucleotide
  Sense strand starting at position 2665 of SEQ ID NO: 587361
agacauaacugaggugaaa

SEQ ID NO: 786727 - RNA, 19 nt, Artificial Sequence
  Description of Artificial Sequence: Synthetic oligonucleotide
  Antisense strand to SEQ ID NO: 786726
uuucaccucaguuaugucu

SEQ ID NO: 786728 - RNA, 19 nt, Artificial Sequence
  Description of Artificial Sequence: Synthetic oligonucleotide
  Sense strand starting at position 2967 of SEQ ID NO: 587361
agagaaauuucccgcaguc

SEQ ID NO: 786729 - RNA, 19 nt, Artificial Sequence
  Description of Artificial Sequence: Synthetic oligonucleotide
  Antisense strand to SEQ ID NO: 786728
gacugcgggaaauuucucu

SEQ ID NO: 786730 - RNA, 19 nt, Artificial Sequence
  Description of Artificial Sequence: Synthetic oligonucleotide
  Sense strand starting at position 2982 of SEQ ID NO: 587361
agucaugaggucgaguaca

SEQ ID NO: 786731 - RNA, 19 nt, Artificial Sequence
  Description of Artificial Sequence: Synthetic oligonucleotide
  Antisense strand to SEQ ID NO: 786730
uguacucgaccucaugacu

SEQ ID NO: 786732 - RNA, 19 nt, Artificial Sequence
  Description of Artificial Sequence: Synthetic oligonucleotide
  Sense strand starting at position 3007 of SEQ ID NO: 587361
gcccgacucuccuuaguau

SEQ ID NO: 786733 - RNA, 19 nt, Artificial Sequence
  Description of Artificial Sequence: Synthetic oligonucleotide
  Antisense strand to SEQ ID NO: 786732
auacuaaggagagucgggc

SEQ ID NO: 786734 - RNA, 19 nt, Artificial Sequence
  Description of Artificial Sequence: Synthetic oligonucleotide
  Sense strand starting at position 3008 of SEQ ID NO: 587361
cccgacucuccuuaguauu

SEQ ID NO: 786735 - RNA, 19 nt, Artificial Sequence
  Description of Artificial Sequence: Synthetic oligonucleotide
  Antisense strand to SEQ ID NO: 786734
aauacuaaggagagucggg

SEQ ID NO: 786736 - RNA, 19 nt, Artificial Sequence
  Description of Artificial Sequence: Synthetic oligonucleotide
  Sense strand starting at position 3075 of SEQ ID NO: 587361
acuagauuauagggcauuu

SEQ ID NO: 786737 - RNA, 19 nt, Artificial Sequence
  Description of Artificial Sequence: Synthetic oligonucleotide
  Antisense strand to SEQ ID NO: 786736
aaaugcccuauaaucuagu

SEQ ID NO: 786738 - RNA, 19 nt, Artificial Sequence
  Description of Artificial Sequence: Synthetic oligonucleotide
  Sense strand starting at position 129 of SEQ ID NO: 587362
acaugauguucccuggaac

SEQ ID NO: 786739 - RNA, 19 nt, Artificial Sequence
  Description of Artificial Sequence: Synthetic oligonucleotide
  Antisense strand to SEQ ID NO: 786738
guuccagggaacaucaugu

SEQ ID NO: 786740 - RNA, 19 nt, Artificial Sequence
  Description of Artificial Sequence: Synthetic oligonucleotide
  Sense strand starting at position 130 of SEQ ID NO: 587362
caugauguucccuggaaca

SEQ ID NO: 786741 - RNA, 19 nt, Artificial Sequence
  Description of Artificial Sequence: Synthetic oligonucleotide
  Antisense strand to SEQ ID NO: 786740
uguuccagggaacaucaug

SEQ ID NO: 786742 - RNA, 19 nt, Artificial Sequence
  Description of Artificial Sequence: Synthetic oligonucleotide
  Sense strand starting at position 360 of SEQ ID NO: 587362
aacuguauugucuaauggu

SEQ ID NO: 786743 - RNA, 19 nt, Artificial Sequence
  Description of Artificial Sequence: Synthetic oligonucleotide
  Antisense strand to SEQ ID NO: 786742
accauuagacaauacaguu

SEQ ID NO: 786744 - RNA, 19 nt, Artificial Sequence
  Description of Artificial Sequence: Synthetic oligonucleotide
  Sense strand starting at position 390 of SEQ ID NO: 587362
uuggauaaggucuguauga

SEQ ID NO: 786745 - RNA, 19 nt, Artificial Sequence
  Description of Artificial Sequence: Synthetic oligonucleotide
  Antisense strand to SEQ ID NO: 786744
ucauacagaccuuauccaa

SEQ ID NO: 786746 - RNA, 19 nt, Artificial Sequence
  Description of Artificial Sequence: Synthetic oligonucleotide
  Sense strand starting at position 391 of SEQ ID NO: 587362
uggauaaggucuguaugac

SEQ ID NO: 786747 - RNA, 19 nt, Artificial Sequence
  Description of Artificial Sequence: Synthetic oligonucleotide
  Antisense strand to SEQ ID NO: 786746
gucauacagaccuuaucca

SEQ ID NO: 786748 - RNA, 19 nt, Artificial Sequence
  Description of Artificial Sequence: Synthetic oligonucleotide
  Sense strand starting at position 392 of SEQ ID NO: 587362
ggauaaggucuguaugacc

SEQ ID NO: 786749 - RNA, 19 nt, Artificial Sequence
  Description of Artificial Sequence: Synthetic oligonucleotide
  Antisense strand to SEQ ID NO: 786748
ggucauacagaccuuaucc

SEQ ID NO: 786750 - RNA, 19 nt, Artificial Sequence
  Description of Artificial Sequence: Synthetic oligonucleotide
  Sense strand starting at position 397 of SEQ ID NO: 587362
aggucuguaugaccuuauu

SEQ ID NO: 786751 - RNA, 19 nt, Artificial Sequence
  Description of Artificial Sequence: Synthetic oligonucleotide
  Antisense strand to SEQ ID NO: 786750
aauaaggucauacagaccu

SEQ ID NO: 786752 - RNA, 19 nt, Artificial Sequence
  Description of Artificial Sequence: Synthetic oligonucleotide
  Sense strand starting at position 423 of SEQ ID NO: 587362
uccuaaugauguguguuaa

SEQ ID NO: 786753 - RNA, 19 nt, Artificial Sequence
  Description of Artificial Sequence: Synthetic oligonucleotide
  Antisense strand to SEQ ID NO: 786752
uuaacacacaucauuagga

SEQ ID NO: 786754 - RNA, 19 nt, Artificial Sequence
  Description of Artificial Sequence: Synthetic oligonucleotide
  Sense strand starting at position 424 of SEQ ID NO: 587362
ccuaaugauguguguuaaa

SEQ ID NO: 786755 - RNA, 19 nt, Artificial Sequence
  Description of Artificial Sequence: Synthetic oligonucleotide
  Antisense strand to SEQ ID NO: 786754
uuuaacacacaucauuagg

SEQ ID NO: 786756 - RNA, 19 nt, Artificial Sequence
  Description of Artificial Sequence: Synthetic oligonucleotide
  Sense strand starting at position 519 of SEQ ID NO: 587362
augggcuuccuuuauaaug

SEQ ID NO: 786757 - RNA, 19 nt, Artificial Sequence
  Description of Artificial Sequence: Synthetic oligonucleotide
  Antisense strand to SEQ ID NO: 786756
cauuauaaaggaagcccau

SEQ ID NO: 786758 - RNA, 19 nt, Artificial Sequence
  Description of Artificial Sequence: Synthetic oligonucleotide
  Sense strand starting at position 762 of SEQ ID NO: 587362
uuucuaccuggcuaaagaa

SEQ ID NO: 786759 - RNA, 19 nt, Artificial Sequence
  Description of Artificial Sequence: Synthetic oligonucleotide
  Antisense strand to SEQ ID NO: 786758
uucuuuagccagguagaaa

SEQ ID NO: 786760 - RNA, 19 nt, Artificial Sequence
  Description of Artificial Sequence: Synthetic oligonucleotide
  Sense strand starting at position 830 of SEQ ID NO: 587362
agggcuugucuuggauauu

SEQ ID NO: 786761 - RNA, 19 nt, Artificial Sequence
  Description of Artificial Sequence: Synthetic oligonucleotide
  Antisense strand to SEQ ID NO: 786760
aauauccaagacaagcccu

SEQ ID NO: 786762 - RNA, 19 nt, Artificial Sequence
  Description of Artificial Sequence: Synthetic oligonucleotide
  Sense strand starting at position 833 of SEQ ID NO: 587362
gcuugucuuggauauuauu

SEQ ID NO: 786763 - RNA, 19 nt, Artificial Sequence
  Description of Artificial Sequence: Synthetic oligonucleotide
  Antisense strand to SEQ ID NO: 786762
aauaauauccaagacaagc

SEQ ID NO: 786764 - RNA, 19 nt, Artificial Sequence
  Description of Artificial Sequence: Synthetic oligonucleotide
  Sense strand starting at position 841 of SEQ ID NO: 587362
uggauauuauugcuucuuu

SEQ ID NO: 786765 - RNA, 19 nt, Artificial Sequence
  Description of Artificial Sequence: Synthetic oligonucleotide
  Antisense strand to SEQ ID NO: 786764
aaagaagcaauaauaucca

SEQ ID NO: 786766 - RNA, 19 nt, Artificial Sequence
  Description of Artificial Sequence: Synthetic oligonucleotide
  Sense strand starting at position 1519 of SEQ ID NO: 587362
gcucucuuagcgcuccaga

SEQ ID NO: 786767 - RNA, 19 nt, Artificial Sequence
  Description of Artificial Sequence: Synthetic oligonucleotide
  Antisense strand to SEQ ID NO: 786766
ucuggagcgcuaagagagc

SEQ ID NO: 786768 - RNA, 19 nt, Artificial Sequence
  Description of Artificial Sequence: Synthetic oligonucleotide
  Sense strand starting at position 1735 of SEQ ID NO: 587362
cucucuuugcgcgucgaga

SEQ ID NO: 786769 - RNA, 19 nt, Artificial Sequence
  Description of Artificial Sequence: Synthetic oligonucleotide
  Antisense strand to SEQ ID NO: 786768
ucucgacgcgcaaagagag

SEQ ID NO: 786770 - RNA, 19 nt, Artificial Sequence
  Description of Artificial Sequence: Synthetic oligonucleotide
  Sense strand starting at position 2096 of SEQ ID NO: 587362
cuuuguauggcagagaaug

SEQ ID NO: 786771 - RNA, 19 nt, Artificial Sequence
  Description of Artificial Sequence: Synthetic oligonucleotide
  Antisense strand to SEQ ID NO: 786770
cauucucugccauacaaag

SEQ ID NO: 786772 - RNA, 19 nt, Artificial Sequence
  Description of Artificial Sequence: Synthetic oligonucleotide
  Sense strand starting at position 2250 of SEQ ID NO: 587362
gcguguuuaagugcagagu

SEQ ID NO: 786773 - RNA, 19 nt, Artificial Sequence
  Description of Artificial Sequence: Synthetic oligonucleotide
  Antisense strand to SEQ ID NO: 786772
acucugcacuuaaacacgc

SEQ ID NO: 786774 - RNA, 19 nt, Artificial Sequence
  Description of Artificial Sequence: Synthetic oligonucleotide
  Sense strand starting at position 2325 of SEQ ID NO: 587362
ggccucacuuucccuaaga

SEQ ID NO: 786775 - RNA, 19 nt, Artificial Sequence
  Description of Artificial Sequence: Synthetic oligonucleotide
  Antisense strand to SEQ ID NO: 786774
ucuuagggaaagugaggcc

SEQ ID NO: 786776 - RNA, 19 nt, Artificial Sequence
  Description of Artificial Sequence: Synthetic oligonucleotide
  Sense strand starting at position 2460 of SEQ ID NO: 587362
cgaaguuaaacacacguua

SEQ ID NO: 786777 - RNA, 19 nt, Artificial Sequence
  Description of Artificial Sequence: Synthetic oligonucleotide
  Antisense strand to SEQ ID NO: 786776
uaacguguguuuaacuucg

SEQ ID NO: 786778 - RNA, 19 nt, Artificial Sequence
  Description of Artificial Sequence: Synthetic oligonucleotide
  Sense strand starting at position 2508 of SEQ ID NO: 587362
uccaucuuaguguaauaua

SEQ ID NO: 786779 - RNA, 19 nt, Artificial Sequence
  Description of Artificial Sequence: Synthetic oligonucleotide
  Antisense strand to SEQ ID NO: 786778
uauauuacacuaagaugga

SEQ ID NO: 786780 - RNA, 19 nt, Artificial Sequence
  Description of Artificial Sequence: Synthetic oligonucleotide
  Sense strand starting at position 2516 of SEQ ID NO: 587362
aguguaauauaccuguuga

SEQ ID NO: 786781 - RNA, 19 nt, Artificial Sequence
  Description of Artificial Sequence: Synthetic oligonucleotide
  Antisense strand to SEQ ID NO: 786780
ucaacagguauauuacacu

SEQ ID NO: 786782 - RNA, 19 nt, Artificial Sequence
  Description of Artificial Sequence: Synthetic oligonucleotide
  Sense strand starting at position 2646 of SEQ ID NO: 587362
gcugaugguagaugauauu

SEQ ID NO: 786783 - RNA, 19 nt, Artificial Sequence
  Description of Artificial Sequence: Synthetic oligonucleotide
  Antisense strand to SEQ ID NO: 786782
aauaucaucuaccaucagc

SEQ ID NO: 786784 - RNA, 19 nt, Artificial Sequence
  Description of Artificial Sequence: Synthetic oligonucleotide
  Sense strand starting at position 2653 of SEQ ID NO: 587362
guagaugauauugaguguu

SEQ ID NO: 786785 - RNA, 19 nt, Artificial Sequence
  Description of Artificial Sequence: Synthetic oligonucleotide
  Antisense strand to SEQ ID NO: 786784
aacacucaauaucaucuac

SEQ ID NO: 786786 - RNA, 19 nt, Artificial Sequence
  Description of Artificial Sequence: Synthetic oligonucleotide
  Sense strand starting at position 2655 of SEQ ID NO: 587362
agaugauauugaguguuua

SEQ ID NO: 786787 - RNA, 19 nt, Artificial Sequence
  Description of Artificial Sequence: Synthetic oligonucleotide
  Antisense strand to SEQ ID NO: 786786
uaaacacucaauaucaucu

SEQ ID NO: 786788 - RNA, 19 nt, Artificial Sequence
  Description of Artificial Sequence: Synthetic oligonucleotide
  Sense strand starting at position 2656 of SEQ ID NO: 587362
gaugauauugaguguuuac

SEQ ID NO: 786789 - RNA, 19 nt, Artificial Sequence
  Description of Artificial Sequence: Synthetic oligonucleotide
  Antisense strand to SEQ ID NO: 786788
guaaacacucaauaucauc

SEQ ID NO: 786790 - RNA, 19 nt, Artificial Sequence
  Description of Artificial Sequence: Synthetic oligonucleotide
  Sense strand starting at position 2659 of SEQ ID NO: 587362
gauauugaguguuuacuau

SEQ ID NO: 786791 - RNA, 19 nt, Artificial Sequence
  Description of Artificial Sequence: Synthetic oligonucleotide
  Antisense strand to SEQ ID NO: 786790
auaguaaacacucaauauc

SEQ ID NO: 786792 - RNA, 19 nt, Artificial Sequence
  Description of Artificial Sequence: Synthetic oligonucleotide
  Sense strand starting at position 2671 of SEQ ID NO: 587362
uuacuauuugccuggcaug

SEQ ID NO: 786793 - RNA, 19 nt, Artificial Sequence
  Description of Artificial Sequence: Synthetic oligonucleotide
  Antisense strand to SEQ ID NO: 786792
caugccaggcaaauaguaa

SEQ ID NO: 786794 - RNA, 19 nt, Artificial Sequence
  Description of Artificial Sequence: Synthetic oligonucleotide
  Sense strand starting at position 2689 of SEQ ID NO: 587362
guuccaaaugcugauaaag

SEQ ID NO: 786795 - RNA, 19 nt, Artificial Sequence
  Description of Artificial Sequence: Synthetic oligonucleotide
  Antisense strand to SEQ ID NO: 786794
cuuuaucagcauuuggaac

SEQ ID NO: 786796 - RNA, 19 nt, Artificial Sequence
  Description of Artificial Sequence: Synthetic oligonucleotide
  Sense strand starting at position 2755 of SEQ ID NO: 587362
gcuuauaagguauauaaac

SEQ ID NO: 786797 - RNA, 19 nt, Artificial Sequence
  Description of Artificial Sequence: Synthetic oligonucleotide
  Antisense strand to SEQ ID NO: 786796
guuuauauaccuuauaagc

SEQ ID NO: 786798 - RNA, 19 nt, Artificial Sequence
  Description of Artificial Sequence: Synthetic oligonucleotide
  Sense strand starting at position 2879 of SEQ ID NO: 587362
aucucauuauuggcagcaa

SEQ ID NO: 786799 - RNA, 19 nt, Artificial Sequence
  Description of Artificial Sequence: Synthetic oligonucleotide
  Antisense strand to SEQ ID NO: 786798
uugcugccaauaaugagau

SEQ ID NO: 786800 - RNA, 19 nt, Artificial Sequence
  Description of Artificial Sequence: Synthetic oligonucleotide
  Sense strand starting at position 2951 of SEQ ID NO: 587362
gguggcuuaaauggaaauu

SEQ ID NO: 786801 - RNA, 19 nt, Artificial Sequence
  Description of Artificial Sequence: Synthetic oligonucleotide
  Antisense strand to SEQ ID NO: 786800
aauuuccauuuaagccacc

SEQ ID NO: 786802 - RNA, 19 nt, Artificial Sequence
  Description of Artificial Sequence: Synthetic oligonucleotide
  Sense strand starting at position 2991 of SEQ ID NO: 587362
gccacaagucagcagaguu

SEQ ID NO: 786803 - RNA, 19 nt, Artificial Sequence
  Description of Artificial Sequence: Synthetic oligonucleotide
  Antisense strand to SEQ ID NO: 786802
aacucugcugacuuguggc

SEQ ID NO: 786804 - RNA, 19 nt, Artificial Sequence
  Description of Artificial Sequence: Synthetic oligonucleotide
  Sense strand starting at position 3004 of SEQ ID NO: 587362
agaguugguuucuugugga

SEQ ID NO: 786805 - RNA, 19 nt, Artificial Sequence
  Description of Artificial Sequence: Synthetic oligonucleotide
  Antisense strand to SEQ ID NO: 786804
uccacaagaaaccaacucu

SEQ ID NO: 786806 - RNA, 19 nt, Artificial Sequence
  Description of Artificial Sequence: Synthetic oligonucleotide
  Sense strand starting at position 3213 of SEQ ID NO: 587362
ggguuaagaguucaaugua

SEQ ID NO: 786807 - RNA, 19 nt, Artificial Sequence
  Description of Artificial Sequence: Synthetic oligonucleotide
  Antisense strand to SEQ ID NO: 786806
uacauugaacucuuaaccc

SEQ ID NO: 786808 - RNA, 19 nt, Artificial Sequence
  Description of Artificial Sequence: Synthetic oligonucleotide
  Sense strand starting at position 3233 of SEQ ID NO: 587362
auauuuggcugggagaaga

SEQ ID NO: 786809 - RNA, 19 nt, Artificial Sequence
  Description of Artificial Sequence: Synthetic oligonucleotide
  Antisense strand to SEQ ID NO: 786808
ucuucucccagccaaauau

SEQ ID NO: 786810 - RNA, 19 nt, Artificial Sequence
  Description of Artificial Sequence: Synthetic oligonucleotide
  Sense strand starting at position 3379 of SEQ ID NO: 587362
uugauauauguauggcacu

SEQ ID NO: 786811 - RNA, 19 nt, Artificial Sequence
  Description of Artificial Sequence: Synthetic oligonucleotide
  Antisense strand to SEQ ID NO: 786810
agugccauacauauaucaa

SEQ ID NO: 786812 - RNA, 19 nt, Artificial Sequence
  Description of Artificial Sequence: Synthetic oligonucleotide
  Sense strand starting at position 3416 of SEQ ID NO: 587362
accaaauuguaagugggau

SEQ ID NO: 786813 - RNA, 19 nt, Artificial Sequence
  Description of Artificial Sequence: Synthetic oligonucleotide
  Antisense strand to SEQ ID NO: 786812
aucccacuuacaauuuggu

SEQ ID NO: 786814 - RNA, 19 nt, Artificial Sequence
  Description of Artificial Sequence: Synthetic oligonucleotide
  Sense strand starting at position 3417 of SEQ ID NO: 587362
ccaaauuguaagugggauu

SEQ ID NO: 786815 - RNA, 19 nt, Artificial Sequence
  Description of Artificial Sequence: Synthetic oligonucleotide
  Antisense strand to SEQ ID NO: 786814
aaucccacuuacaauuugg

SEQ ID NO: 786816 - RNA, 19 nt, Artificial Sequence
  Description of Artificial Sequence: Synthetic oligonucleotide
  Sense strand starting at position 3796 of SEQ ID NO: 587362
aauuacucaguaugaggua

SEQ ID NO: 786817 - RNA, 19 nt, Artificial Sequence
  Description of Artificial Sequence: Synthetic oligonucleotide
  Antisense strand to SEQ ID NO: 786816
uaccucauacugaguaauu

SEQ ID NO: 786818 - RNA, 19 nt, Artificial Sequence
  Description of Artificial Sequence: Synthetic oligonucleotide
  Sense strand starting at position 1700 of SEQ ID NO: 587363
ggacaugugacaugugugu

SEQ ID NO: 786819 - RNA, 19 nt, Artificial Sequence
  Description of Artificial Sequence: Synthetic oligonucleotide
  Antisense strand to SEQ ID NO: 786818
acacacaugucacaugucc

SEQ ID NO: 786820 - RNA, 19 nt, Artificial Sequence
  Description of Artificial Sequence: Synthetic oligonucleotide
  Sense strand starting at position 1702 of SEQ ID NO: 587363
acaugugacauguguguuu

SEQ ID NO: 786821 - RNA, 19 nt, Artificial Sequence
  Description of Artificial Sequence: Synthetic oligonucleotide
  Antisense strand to SEQ ID NO: 786820
aaacacacaugucacaugu

SEQ ID NO: 786822 - RNA, 19 nt, Artificial Sequence
  Description of Artificial Sequence: Synthetic oligonucleotide
  Sense strand starting at position 1704 of SEQ ID NO: 587363
augugacauguguguuuag

SEQ ID NO: 786823 - RNA, 19 nt, Artificial Sequence
  Description of Artificial Sequence: Synthetic oligonucleotide
  Antisense strand to SEQ ID NO: 786822
cuaaacacacaugucacau

SEQ ID NO: 786824 - RNA, 19 nt, Artificial Sequence
  Description of Artificial Sequence: Synthetic oligonucleotide
  Sense strand starting at position 1705 of SEQ ID NO: 587363
ugugacauguguguuuaga

SEQ ID NO: 786825 - RNA, 19 nt, Artificial Sequence
  Description of Artificial Sequence: Synthetic oligonucleotide
  Antisense strand to SEQ ID NO: 786824
ucuaaacacacaugucaca

SEQ ID NO: 786826 - RNA, 19 nt, Artificial Sequence
  Description of Artificial Sequence: Synthetic oligonucleotide
  Sense strand starting at position 1707 of SEQ ID NO: 587363
ugacauguguguuuagaag

SEQ ID NO: 786827 - RNA, 19 nt, Artificial Sequence
  Description of Artificial Sequence: Synthetic oligonucleotide
  Antisense strand to SEQ ID NO: 786826
cuucuaaacacacauguca

SEQ ID NO: 786828 - RNA, 19 nt, Artificial Sequence
  Description of Artificial Sequence: Synthetic oligonucleotide
  Sense strand starting at position 2313 of SEQ ID NO: 587363
ggcugcguaucacaguaua

SEQ ID NO: 786829 - RNA, 19 nt, Artificial Sequence
  Description of Artificial Sequence: Synthetic oligonucleotide
  Antisense strand to SEQ ID NO: 786828
uauacugugauacgcagcc

SEQ ID NO: 786830 - RNA, 19 nt, Artificial Sequence
  Description of Artificial Sequence: Synthetic oligonucleotide
  Sense strand starting at position 1700 of SEQ ID NO: 587365
ggacaugugacaugugugu

SEQ ID NO: 786831 - RNA, 19 nt, Artificial Sequence
  Description of Artificial Sequence: Synthetic oligonucleotide
  Antisense strand to SEQ ID NO: 786830
acacacaugucacaugucc

SEQ ID NO: 786832 - RNA, 19 nt, Artificial Sequence
  Description of Artificial Sequence: Synthetic oligonucleotide
  Sense strand starting at position 1702 of SEQ ID NO: 587365
acaugugacauguguguuu

SEQ ID NO: 786833 - RNA, 19 nt, Artificial Sequence
  Description of Artificial Sequence: Synthetic oligonucleotide
  Antisense strand to SEQ ID NO: 786832
aaacacacaugucacaugu

SEQ ID NO: 786834 - RNA, 19 nt, Artificial Sequence
  Description of Artificial Sequence: Synthetic oligonucleotide
  Sense strand starting at position 1704 of SEQ ID NO: 587365
augugacauguguguuuag

SEQ ID NO: 786835 - RNA, 19 nt, Artificial Sequence
  Description of Artificial Sequence: Synthetic oligonucleotide
  Antisense strand to SEQ ID NO: 786834
cuaaacacacaugucacau

SEQ ID NO: 786836 - RNA, 19 nt, Artificial Sequence
  Description of Artificial Sequence: Synthetic oligonucleotide
  Sense strand starting at position 1705 of SEQ ID NO: 587365
ugugacauguguguuuaga

SEQ ID NO: 786837 - RNA, 19 nt, Artificial Sequence
  Description of Artificial Sequence: Synthetic oligonucleotide
  Antisense strand to SEQ ID NO: 786836
ucuaaacacacaugucaca

SEQ ID NO: 786838 - RNA, 19 nt, Artificial Sequence
  Description of Artificial Sequence: Synthetic oligonucleotide
  Sense strand starting at position 1707 of SEQ ID NO: 587365
ugacauguguguuuagaag

SEQ ID NO: 786839 - RNA, 19 nt, Artificial Sequence
  Description of Artificial Sequence: Synthetic oligonucleotide
  Antisense strand to SEQ ID NO: 786838
cuucuaaacacacauguca

SEQ ID NO: 786840 - RNA, 19 nt, Artificial Sequence
  Description of Artificial Sequence: Synthetic oligonucleotide
  Sense strand starting at position 2313 of SEQ ID NO: 587365
ggcugcguaucacaguaua

SEQ ID NO: 786841 - RNA, 19 nt, Artificial Sequence
  Description of Artificial Sequence: Synthetic oligonucleotide
  Antisense strand to SEQ ID NO: 786840
uauacugugauacgcagcc

SEQ ID NO: 786842 - RNA, 19 nt, Artificial Sequence
  Description of Artificial Sequence: Synthetic oligonucleotide
  Sense strand starting at position 71 of SEQ ID NO: 587367
aaagcucuucuguagagua

SEQ ID NO: 786843 - RNA, 19 nt, Artificial Sequence
  Description of Artificial Sequence: Synthetic oligonucleotide
  Antisense strand to SEQ ID NO: 786842
uacucuacagaagagcuuu

SEQ ID NO: 786844 - RNA, 19 nt, Artificial Sequence
  Description of Artificial Sequence: Synthetic oligonucleotide
  Sense strand starting at position 73 of SEQ ID NO: 587367
agcucuucuguagaguaaa

SEQ ID NO: 786845 - RNA, 19 nt, Artificial Sequence
  Description of Artificial Sequence: Synthetic oligonucleotide
  Antisense strand to SEQ ID NO: 786844
uuuacucuacagaagagcu

SEQ ID NO: 786846 - RNA, 19 nt, Artificial Sequence
  Description of Artificial Sequence: Synthetic oligonucleotide
  Sense strand starting at position 174 of SEQ ID NO: 587367
cacagauguuucuuggaau

SEQ ID NO: 786847 - RNA, 19 nt, Artificial Sequence
  Description of Artificial Sequence: Synthetic oligonucleotide
  Antisense strand to SEQ ID NO: 786846
auuccaagaaacaucugug

SEQ ID NO: 786848 - RNA, 19 nt, Artificial Sequence
  Description of Artificial Sequence: Synthetic oligonucleotide
  Sense strand starting at position 175 of SEQ ID NO: 587367
acagauguuucuuggaauc

SEQ ID NO: 786849 - RNA, 19 nt, Artificial Sequence
  Description of Artificial Sequence: Synthetic oligonucleotide
  Antisense strand to SEQ ID NO: 786848
gauuccaagaaacaucugu

SEQ ID NO: 786850 - RNA, 19 nt, Artificial Sequence
  Description of Artificial Sequence: Synthetic oligonucleotide
  Sense strand starting at position 177 of SEQ ID NO: 587367
agauguuucuuggaaucaa

SEQ ID NO: 786851 - RNA, 19 nt, Artificial Sequence
  Description of Artificial Sequence: Synthetic oligonucleotide
  Antisense strand to SEQ ID NO: 786850
uugauuccaagaaacaucu

SEQ ID NO: 786852 - RNA, 19 nt, Artificial Sequence
  Description of Artificial Sequence: Synthetic oligonucleotide
  Sense strand starting at position 205 of SEQ ID NO: 587367
gaaauaaaguuucucaggu

SEQ ID NO: 786853 - RNA, 19 nt, Artificial Sequence
  Description of Artificial Sequence: Synthetic oligonucleotide
  Antisense strand to SEQ ID NO: 786852
accugagaaacuuuauuuc

SEQ ID NO: 786854 - RNA, 19 nt, Artificial Sequence
  Description of Artificial Sequence: Synthetic oligonucleotide
  Sense strand starting at position 2298 of SEQ ID NO: 587367
uuuaaagccucugggacaa

SEQ ID NO: 786855 - RNA, 19 nt, Artificial Sequence
  Description of Artificial Sequence: Synthetic oligonucleotide
  Antisense strand to SEQ ID NO: 786854
uugucccagaggcuuuaaa

SEQ ID NO: 786856 - RNA, 19 nt, Artificial Sequence
  Description of Artificial Sequence: Synthetic oligonucleotide
  Sense strand starting at position 2617 of SEQ ID NO: 587367
ugaacaguuuaagguuaaa

SEQ ID NO: 786857 - RNA, 19 nt, Artificial Sequence
  Description of Artificial Sequence: Synthetic oligonucleotide
  Antisense strand to SEQ ID NO: 786856
uuuaaccuuaaacuguuca

SEQ ID NO: 786858 - RNA, 19 nt, Artificial Sequence
  Description of Artificial Sequence: Synthetic oligonucleotide
  Sense strand starting at position 2630 of SEQ ID NO: 587367
guuaaacaauugucuagga

SEQ ID NO: 786859 - RNA, 19 nt, Artificial Sequence
  Description of Artificial Sequence: Synthetic oligonucleotide
  Antisense strand to SEQ ID NO: 786858
uccuagacaauuguuuaac

SEQ ID NO: 786860 - RNA, 19 nt, Artificial Sequence
  Description of Artificial Sequence: Synthetic oligonucleotide
  Sense strand starting at position 2779 of SEQ ID NO: 587367
ccuugugggucuucagaga

SEQ ID NO: 786861 - RNA, 19 nt, Artificial Sequence
  Description of Artificial Sequence: Synthetic oligonucleotide
  Antisense strand to SEQ ID NO: 786860
ucucugaagacccacaagg

SEQ ID NO: 786862 - RNA, 19 nt, Artificial Sequence
  Description of Artificial Sequence: Synthetic oligonucleotide
  Sense strand starting at position 2856 of SEQ ID NO: 587367
acugguacccaucggagaa

SEQ ID NO: 786863 - RNA, 19 nt, Artificial Sequence
  Description of Artificial Sequence: Synthetic oligonucleotide
  Antisense strand to SEQ ID NO: 786862
uucuccgauggguaccagu

SEQ ID NO: 786864 - RNA, 19 nt, Artificial Sequence
  Description of Artificial Sequence: Synthetic oligonucleotide
  Sense strand starting at position 2892 of SEQ ID NO: 587367
ccaugauccugucuggaug

SEQ ID NO: 786865 - RNA, 19 nt, Artificial Sequence
  Description of Artificial Sequence: Synthetic oligonucleotide
  Antisense strand to SEQ ID NO: 786864
cauccagacaggaucaugg

SEQ ID NO: 786866 - RNA, 19 nt, Artificial Sequence
  Description of Artificial Sequence: Synthetic oligonucleotide
  Sense strand starting at position 2904 of SEQ ID NO: 587367
cuggaugcuuuaugugaau

SEQ ID NO: 786867 - RNA, 19 nt, Artificial Sequence
  Description of Artificial Sequence: Synthetic oligonucleotide
  Antisense strand to SEQ ID NO: 786866
auucacauaaagcauccag

SEQ ID NO: 786868 - RNA, 19 nt, Artificial Sequence
  Description of Artificial Sequence: Synthetic oligonucleotide
  Sense strand starting at position 2907 of SEQ ID NO: 587367
gaugcuuuaugugaaugca

SEQ ID NO: 786869 - RNA, 19 nt, Artificial Sequence
  Description of Artificial Sequence: Synthetic oligonucleotide
  Antisense strand to SEQ ID NO: 786868
ugcauucacauaaagcauc

SEQ ID NO: 786870 - RNA, 19 nt, Artificial Sequence
  Description of Artificial Sequence: Synthetic oligonucleotide
  Sense strand starting at position 2964 of SEQ ID NO: 587367
gcggcauuguuagcccauu

SEQ ID NO: 786871 - RNA, 19 nt, Artificial Sequence
  Description of Artificial Sequence: Synthetic oligonucleotide
  Antisense strand to SEQ ID NO: 786870
aaugggcuaacaaugccgc

SEQ ID NO: 786872 - RNA, 19 nt, Artificial Sequence
  Description of Artificial Sequence: Synthetic oligonucleotide
  Sense strand starting at position 2983 of SEQ ID NO: 587367
uggauugaagccuaugcau

SEQ ID NO: 786873 - RNA, 19 nt, Artificial Sequence
  Description of Artificial Sequence: Synthetic oligonucleotide
  Antisense strand to SEQ ID NO: 786872
augcauaggcuucaaucca

SEQ ID NO: 786874 - RNA, 19 nt, Artificial Sequence
  Description of Artificial Sequence: Synthetic oligonucleotide
  Sense strand starting at position 3562 of SEQ ID NO: 587367
aggaguaagugggaaauau

SEQ ID NO: 786875 - RNA, 19 nt, Artificial Sequence
  Description of Artificial Sequence: Synthetic oligonucleotide
  Antisense strand to SEQ ID NO: 786874
auauuucccacuuacuccu

SEQ ID NO: 786876 - RNA, 19 nt, Artificial Sequence
  Description of Artificial Sequence: Synthetic oligonucleotide
  Sense strand starting at position 3641 of SEQ ID NO: 587367
agaggugugguguagcaaa

SEQ ID NO: 786877 - RNA, 19 nt, Artificial Sequence
  Description of Artificial Sequence: Synthetic oligonucleotide
  Antisense strand to SEQ ID NO: 786876
uuugcuacaccacaccucu

SEQ ID NO: 786878 - RNA, 19 nt, Artificial Sequence
  Description of Artificial Sequence: Synthetic oligonucleotide
  Sense strand starting at position 3745 of SEQ ID NO: 587367
ucaguacauguuugauguu

SEQ ID NO: 786879 - RNA, 19 nt, Artificial Sequence
  Description of Artificial Sequence: Synthetic oligonucleotide
  Antisense strand to SEQ ID NO: 786878
aacaucaaacauguacuga

SEQ ID NO: 786880 - RNA, 19 nt, Artificial Sequence
  Description of Artificial Sequence: Synthetic oligonucleotide
  Sense strand starting at position 3748 of SEQ ID NO: 587367
guacauguuugauguugag

SEQ ID NO: 786881 - RNA, 19 nt, Artificial Sequence
  Description of Artificial Sequence: Synthetic oligonucleotide
  Antisense strand to SEQ ID NO: 786880
cucaacaucaaacauguac

SEQ ID NO: 786882 - RNA, 19 nt, Artificial Sequence
  Description of Artificial Sequence: Synthetic oligonucleotide
  Sense strand starting at position 3751 of SEQ ID NO: 587367
cauguuugauguugagaug

SEQ ID NO: 786883 - RNA, 19 nt, Artificial Sequence
  Description of Artificial Sequence: Synthetic oligonucleotide
  Antisense strand to SEQ ID NO: 786882
caucucaacaucaaacaug

SEQ ID NO: 786884 - RNA, 19 nt, Artificial Sequence
  Description of Artificial Sequence: Synthetic oligonucleotide
  Sense strand starting at position 3770 of SEQ ID NO: 587367
guggaugucuugugaugau

SEQ ID NO: 786885 - RNA, 19 nt, Artificial Sequence
  Description of Artificial Sequence: Synthetic oligonucleotide
  Antisense strand to SEQ ID NO: 786884
aucaucacaagacauccac

SEQ ID NO: 786886 - RNA, 19 nt, Artificial Sequence
  Description of Artificial Sequence: Synthetic oligonucleotide
  Sense strand starting at position 3773 of SEQ ID NO: 587367
gaugucuugugaugauaug

SEQ ID NO: 786887 - RNA, 19 nt, Artificial Sequence
  Description of Artificial Sequence: Synthetic oligonucleotide
  Antisense strand to SEQ ID NO: 786886
cauaucaucacaagacauc

SEQ ID NO: 786888 - RNA, 19 nt, Artificial Sequence
  Description of Artificial Sequence: Synthetic oligonucleotide
  Sense strand starting at position 112 of SEQ ID NO: 587368
auaucuacuuguuuagauc

SEQ ID NO: 786889 - RNA, 19 nt, Artificial Sequence
  Description of Artificial Sequence: Synthetic oligonucleotide
  Antisense strand to SEQ ID NO: 786888
gaucuaaacaaguagauau

SEQ ID NO: 786890 - RNA, 19 nt, Artificial Sequence
  Description of Artificial Sequence: Synthetic oligonucleotide
  Sense strand starting at position 159 of SEQ ID NO: 587368
guaucuuaacccuagcgaa

SEQ ID NO: 786891 - RNA, 19 nt, Artificial Sequence
  Description of Artificial Sequence: Synthetic oligonucleotide
  Antisense strand to SEQ ID NO: 786890
uucgcuaggguuaagauac

SEQ ID NO: 786892 - RNA, 19 nt, Artificial Sequence
  Description of Artificial Sequence: Synthetic oligonucleotide
  Sense strand starting at position 227 of SEQ ID NO: 587368
acauuuguuugucucucua

SEQ ID NO: 786893 - RNA, 19 nt, Artificial Sequence
  Description of Artificial Sequence: Synthetic oligonucleotide
  Antisense strand to SEQ ID NO: 786892
uagagagacaaacaaaugu

SEQ ID NO: 786894 - RNA, 19 nt, Artificial Sequence
  Description of Artificial Sequence: Synthetic oligonucleotide
  Sense strand starting at position 229 of SEQ ID NO: 587368
auuuguuugucucucuauu

SEQ ID NO: 786895 - RNA, 19 nt, Artificial Sequence
  Description of Artificial Sequence: Synthetic oligonucleotide
  Antisense strand to SEQ ID NO: 786894
aauagagagacaaacaaau

SEQ ID NO: 786896 - RNA, 19 nt, Artificial Sequence
  Description of Artificial Sequence: Synthetic oligonucleotide
  Sense strand starting at position 630 of SEQ ID NO: 587368
auagcuuugcugggagaag

SEQ ID NO: 786897 - RNA, 19 nt, Artificial Sequence
  Description of Artificial Sequence: Synthetic oligonucleotide
  Antisense strand to SEQ ID NO: 786896
cuucucccagcaaagcuau

SEQ ID NO: 786898 - RNA, 19 nt, Artificial Sequence
  Description of Artificial Sequence: Synthetic oligonucleotide
  Sense strand starting at position 657 of SEQ ID NO: 587368
auaagaaaccuuuggccuu

SEQ ID NO: 786899 - RNA, 19 nt, Artificial Sequence
  Description of Artificial Sequence: Synthetic oligonucleotide
  Antisense strand to SEQ ID NO: 786898
aaggccaaagguuucuuau

SEQ ID NO: 786900 - RNA, 19 nt, Artificial Sequence
  Description of Artificial Sequence: Synthetic oligonucleotide
  Sense strand starting at position 670 of SEQ ID NO: 587368
ggccuucugagugagagga

SEQ ID NO: 786901 - RNA, 19 nt, Artificial Sequence
  Description of Artificial Sequence: Synthetic oligonucleotide
  Antisense strand to SEQ ID NO: 786900
uccucucacucagaaggcc

SEQ ID NO: 786902 - RNA, 19 nt, Artificial Sequence
  Description of Artificial Sequence: Synthetic oligonucleotide
  Sense strand starting at position 728 of SEQ ID NO: 587368
ccuugacaucccuggaaug

SEQ ID NO: 786903 - RNA, 19 nt, Artificial Sequence
  Description of Artificial Sequence: Synthetic oligonucleotide
  Antisense strand to SEQ ID NO: 786902
cauuccagggaugucaagg

SEQ ID NO: 786904 - RNA, 19 nt, Artificial Sequence
  Description of Artificial Sequence: Synthetic oligonucleotide
  Sense strand starting at position 730 of SEQ ID NO: 587368
uugacaucccuggaaugcu

SEQ ID NO: 786905 - RNA, 19 nt, Artificial Sequence
  Description of Artificial Sequence: Synthetic oligonucleotide
  Antisense strand to SEQ ID NO: 786904
agcauuccagggaugucaa

SEQ ID NO: 786906 - RNA, 19 nt, Artificial Sequence
  Description of Artificial Sequence: Synthetic oligonucleotide
  Sense strand starting at position 821 of SEQ ID NO: 587368
ugaugaggacccuggcauu

SEQ ID NO: 786907 - RNA, 19 nt, Artificial Sequence
  Description of Artificial Sequence: Synthetic oligonucleotide
  Antisense strand to SEQ ID NO: 786906
aaugccaggguccucauca

SEQ ID NO: 786908 - RNA, 19 nt, Artificial Sequence
  Description of Artificial Sequence: Synthetic oligonucleotide
  Sense strand starting at position 920 of SEQ ID NO: 587368
ucaauaauuuaagagagca

SEQ ID NO: 786909 - RNA, 19 nt, Artificial Sequence
  Description of Artificial Sequence: Synthetic oligonucleotide
  Antisense strand to SEQ ID NO: 786908
ugcucucuuaaauuauuga

SEQ ID NO: 786910 - RNA, 19 nt, Artificial Sequence
  Description of Artificial Sequence: Synthetic oligonucleotide
  Sense strand starting at position 1022 of SEQ ID NO: 587368
gagaguaacucauugcagg

SEQ ID NO: 786911 - RNA, 19 nt, Artificial Sequence
  Description of Artificial Sequence: Synthetic oligonucleotide
  Antisense strand to SEQ ID NO: 786910
ccugcaaugaguuacucuc

SEQ ID NO: 786912 - RNA, 19 nt, Artificial Sequence
  Description of Artificial Sequence: Synthetic oligonucleotide
  Sense strand starting at position 1038 of SEQ ID NO: 587368
aggcuucuaggucauuaua

SEQ ID NO: 786913 - RNA, 19 nt, Artificial Sequence
  Description of Artificial Sequence: Synthetic oligonucleotide
  Antisense strand to SEQ ID NO: 786912
uauaaugaccuagaagccu

SEQ ID NO: 786914 - RNA, 19 nt, Artificial Sequence
  Description of Artificial Sequence: Synthetic oligonucleotide
  Sense strand starting at position 1145 of SEQ ID NO: 587368
gugaaaugagcucagugag

SEQ ID NO: 786915 - RNA, 19 nt, Artificial Sequence
  Description of Artificial Sequence: Synthetic oligonucleotide
  Antisense strand to SEQ ID NO: 786914
cucacugagcucauuucac

SEQ ID NO: 786916 - RNA, 19 nt, Artificial Sequence
  Description of Artificial Sequence: Synthetic oligonucleotide
  Sense strand starting at position 1148 of SEQ ID NO: 587368
aaaugagcucagugagaga

SEQ ID NO: 786917 - RNA, 19 nt, Artificial Sequence
  Description of Artificial Sequence: Synthetic oligonucleotide
  Antisense strand to SEQ ID NO: 786916
ucucucacugagcucauuu

SEQ ID NO: 786918 - RNA, 19 nt, Artificial Sequence
  Description of Artificial Sequence: Synthetic oligonucleotide
  Sense strand starting at position 1165 of SEQ ID NO: 587368
gagauaaagaguuguguaa

SEQ ID NO: 786919 - RNA, 19 nt, Artificial Sequence
  Description of Artificial Sequence: Synthetic oligonucleotide
  Antisense strand to SEQ ID NO: 786918
uuacacaacucuuuaucuc

SEQ ID NO: 786920 - RNA, 19 nt, Artificial Sequence
  Description of Artificial Sequence: Synthetic oligonucleotide
  Sense strand starting at position 1169 of SEQ ID NO: 587368
uaaagaguuguguaagguu

SEQ ID NO: 786921 - RNA, 19 nt, Artificial Sequence
  Description of Artificial Sequence: Synthetic oligonucleotide
  Antisense strand to SEQ ID NO: 786920
aaccuuacacaacucuuua

SEQ ID NO: 786922 - RNA, 19 nt, Artificial Sequence
  Description of Artificial Sequence: Synthetic oligonucleotide
  Sense strand starting at position 1329 of SEQ ID NO: 587368
uggacauugacgugaguaa

SEQ ID NO: 786923 - RNA, 19 nt, Artificial Sequence
  Description of Artificial Sequence: Synthetic oligonucleotide
  Antisense strand to SEQ ID NO: 786922
uuacucacgucaaugucca

SEQ ID NO: 786924 - RNA, 19 nt, Artificial Sequence
  Description of Artificial Sequence: Synthetic oligonucleotide
  Sense strand starting at position 1330 of SEQ ID NO: 587368
ggacauugacgugaguaau

SEQ ID NO: 786925 - RNA, 19 nt, Artificial Sequence
  Description of Artificial Sequence: Synthetic oligonucleotide
  Antisense strand to SEQ ID NO: 786924
auuacucacgucaaugucc

SEQ ID NO: 786926 - RNA, 19 nt, Artificial Sequence
  Description of Artificial Sequence: Synthetic oligonucleotide
  Sense strand starting at position 1333 of SEQ ID NO: 587368
cauugacgugaguaaugau

SEQ ID NO: 786927 - RNA, 19 nt, Artificial Sequence
  Description of Artificial Sequence: Synthetic oligonucleotide
  Antisense strand to SEQ ID NO: 786926
aucauuacucacgucaaug

SEQ ID NO: 786928 - RNA, 19 nt, Artificial Sequence
  Description of Artificial Sequence: Synthetic oligonucleotide
  Sense strand starting at position 1649 of SEQ ID NO: 587368
gucuuuauuggacauguca

SEQ ID NO: 786929 - RNA, 19 nt, Artificial Sequence
  Description of Artificial Sequence: Synthetic oligonucleotide
  Antisense strand to SEQ ID NO: 786928
ugacauguccaauaaagac

SEQ ID NO: 786930 - RNA, 19 nt, Artificial Sequence
  Description of Artificial Sequence: Synthetic oligonucleotide
  Sense strand starting at position 2038 of SEQ ID NO: 587368
cuuucuauuggguacuuua

SEQ ID NO: 786931 - RNA, 19 nt, Artificial Sequence
  Description of Artificial Sequence: Synthetic oligonucleotide
  Antisense strand to SEQ ID NO: 786930
uaaaguacccaauagaaag

SEQ ID NO: 786932 - RNA, 19 nt, Artificial Sequence
  Description of Artificial Sequence: Synthetic oligonucleotide
  Sense strand starting at position 2041 of SEQ ID NO: 587368
ucuauuggguacuuuaaau

SEQ ID NO: 786933 - RNA, 19 nt, Artificial Sequence
  Description of Artificial Sequence: Synthetic oligonucleotide
  Antisense strand to SEQ ID NO: 786932
auuuaaaguacccaauaga

SEQ ID NO: 786934 - RNA, 19 nt, Artificial Sequence
  Description of Artificial Sequence: Synthetic oligonucleotide
  Sense strand starting at position 2079 of SEQ ID NO: 587368
ugagaaauuuggcagaaag

SEQ ID NO: 786935 - RNA, 19 nt, Artificial Sequence
  Description of Artificial Sequence: Synthetic oligonucleotide
  Antisense strand to SEQ ID NO: 786934
cuuucugccaaauuucuca

SEQ ID NO: 786936 - RNA, 19 nt, Artificial Sequence
  Description of Artificial Sequence: Synthetic oligonucleotide
  Sense strand starting at position 2089 of SEQ ID NO: 587368
ggcagaaagcuggaguuca

SEQ ID NO: 786937 - RNA, 19 nt, Artificial Sequence
  Description of Artificial Sequence: Synthetic oligonucleotide
  Antisense strand to SEQ ID NO: 786936
ugaacuccagcuuucugcc

SEQ ID NO: 786938 - RNA, 19 nt, Artificial Sequence
  Description of Artificial Sequence: Synthetic oligonucleotide
  Sense strand starting at position 2350 of SEQ ID NO: 587368
agaugaggauuuggaaugu

SEQ ID NO: 786939 - RNA, 19 nt, Artificial Sequence
  Description of Artificial Sequence: Synthetic oligonucleotide
  Antisense strand to SEQ ID NO: 786938
acauuccaaauccucaucu

SEQ ID NO: 786940 - RNA, 19 nt, Artificial Sequence
  Description of Artificial Sequence: Synthetic oligonucleotide
  Sense strand starting at position 2359 of SEQ ID NO: 587368
uuuggaauguggucugaac

SEQ ID NO: 786941 - RNA, 19 nt, Artificial Sequence
  Description of Artificial Sequence: Synthetic oligonucleotide
  Antisense strand to SEQ ID NO: 786940
guucagaccacauuccaaa

SEQ ID NO: 786942 - RNA, 19 nt, Artificial Sequence
  Description of Artificial Sequence: Synthetic oligonucleotide
  Sense strand starting at position 2513 of SEQ ID NO: 587368
gaguaaaggaugugcauau

SEQ ID NO: 786943 - RNA, 19 nt, Artificial Sequence
  Description of Artificial Sequence: Synthetic oligonucleotide
  Antisense strand to SEQ ID NO: 786942
auaugcacauccuuuacuc

SEQ ID NO: 786944 - RNA, 19 nt, Artificial Sequence
  Description of Artificial Sequence: Synthetic oligonucleotide
  Sense strand starting at position 2514 of SEQ ID NO: 587368
aguaaaggaugugcauaua

SEQ ID NO: 786945 - RNA, 19 nt, Artificial Sequence
  Description of Artificial Sequence: Synthetic oligonucleotide
  Antisense strand to SEQ ID NO: 786944
uauaugcacauccuuuacu

SEQ ID NO: 786946 - RNA, 19 nt, Artificial Sequence
  Description of Artificial Sequence: Synthetic oligonucleotide
  Sense strand starting at position 2517 of SEQ ID NO: 587368
aaaggaugugcauauagca

SEQ ID NO: 786947 - RNA, 19 nt, Artificial Sequence
  Description of Artificial Sequence: Synthetic oligonucleotide
  Antisense strand to SEQ ID NO: 786946
ugcuauaugcacauccuuu

SEQ ID NO: 786948 - RNA, 19 nt, Artificial Sequence
  Description of Artificial Sequence: Synthetic oligonucleotide
  Sense strand starting at position 2630 of SEQ ID NO: 587368
aaaugauugcgugacaccu

SEQ ID NO: 786949 - RNA, 19 nt, Artificial Sequence
  Description of Artificial Sequence: Synthetic oligonucleotide
  Antisense strand to SEQ ID NO: 786948
aggugucacgcaaucauuu

SEQ ID NO: 786950 - RNA, 19 nt, Artificial Sequence
  Description of Artificial Sequence: Synthetic oligonucleotide
  Sense strand starting at position 2643 of SEQ ID NO: 587368
acaccuaaugucugucaga

SEQ ID NO: 786951 - RNA, 19 nt, Artificial Sequence
  Description of Artificial Sequence: Synthetic oligonucleotide
  Antisense strand to SEQ ID NO: 786950
ucugacagacauuaggugu

SEQ ID NO: 786952 - RNA, 19 nt, Artificial Sequence
  Description of Artificial Sequence: Synthetic oligonucleotide
  Sense strand starting at position 2748 of SEQ ID NO: 587368
aaaccaaucccguaggcuu

SEQ ID NO: 786953 - RNA, 19 nt, Artificial Sequence
  Description of Artificial Sequence: Synthetic oligonucleotide
  Antisense strand to SEQ ID NO: 786952
aagccuacgggauugguuu

SEQ ID NO: 786954 - RNA, 19 nt, Artificial Sequence
  Description of Artificial Sequence: Synthetic oligonucleotide
  Sense strand starting at position 2917 of SEQ ID NO: 587368
ccuccuuguagugagguaa

SEQ ID NO: 786955 - RNA, 19 nt, Artificial Sequence
  Description of Artificial Sequence: Synthetic oligonucleotide
  Antisense strand to SEQ ID NO: 786954
uuaccucacuacaaggagg

SEQ ID NO: 786956 - RNA, 19 nt, Artificial Sequence
  Description of Artificial Sequence: Synthetic oligonucleotide
  Sense strand starting at position 2969 of SEQ ID NO: 587368
gcaguuguuccugagggaa

SEQ ID NO: 786957 - RNA, 19 nt, Artificial Sequence
  Description of Artificial Sequence: Synthetic oligonucleotide
  Antisense strand to SEQ ID NO: 786956
uucccucaggaacaacugc

SEQ ID NO: 786958 - RNA, 19 nt, Artificial Sequence
  Description of Artificial Sequence: Synthetic oligonucleotide
  Sense strand starting at position 2972 of SEQ ID NO: 587368
guuguuccugagggaauga

SEQ ID NO: 786959 - RNA, 19 nt, Artificial Sequence
  Description of Artificial Sequence: Synthetic oligonucleotide
  Antisense strand to SEQ ID NO: 786958
ucauucccucaggaacaac

SEQ ID NO: 786960 - RNA, 19 nt, Artificial Sequence
  Description of Artificial Sequence: Synthetic oligonucleotide
  Sense strand starting at position 3566 of SEQ ID NO: 587368
auaggagagagcuguuauu

SEQ ID NO: 786961 - RNA, 19 nt, Artificial Sequence
  Description of Artificial Sequence: Synthetic oligonucleotide
  Antisense strand to SEQ ID NO: 786960
aauaacagcucucuccuau

SEQ ID NO: 786962 - RNA, 19 nt, Artificial Sequence
  Description of Artificial Sequence: Synthetic oligonucleotide
  Sense strand starting at position 3619 of SEQ ID NO: 587368
acagacaggucuuccaagu

SEQ ID NO: 786963 - RNA, 19 nt, Artificial Sequence
  Description of Artificial Sequence: Synthetic oligonucleotide
  Antisense strand to SEQ ID NO: 786962
acuuggaagaccugucugu

SEQ ID NO: 786964 - RNA, 19 nt, Artificial Sequence
  Description of Artificial Sequence: Synthetic oligonucleotide
  Sense strand starting at position 3856 of SEQ ID NO: 587368
gguggugagauccauaccu

SEQ ID NO: 786965 - RNA, 19 nt, Artificial Sequence
  Description of Artificial Sequence: Synthetic oligonucleotide
  Antisense strand to SEQ ID NO: 786964
agguauggaucucaccacc

SEQ ID NO: 786966 - RNA, 19 nt, Artificial Sequence
  Description of Artificial Sequence: Synthetic oligonucleotide
  Sense strand starting at position 3928 of SEQ ID NO: 587368
agaugagauuccuuggugu

SEQ ID NO: 786967 - RNA, 19 nt, Artificial Sequence
  Description of Artificial Sequence: Synthetic oligonucleotide
  Antisense strand to SEQ ID NO: 786966
acaccaaggaaucucaucu

SEQ ID NO: 786968 - RNA, 19 nt, Artificial Sequence
  Description of Artificial Sequence: Synthetic oligonucleotide
  Sense strand starting at position 395 of SEQ ID NO: 587369
uuguuauugcucuaugaug

SEQ ID NO: 786969 - RNA, 19 nt, Artificial Sequence
  Description of Artificial Sequence: Synthetic oligonucleotide
  Antisense strand to SEQ ID NO: 786968
caucauagagcaauaacaa

SEQ ID NO: 786970 - RNA, 19 nt, Artificial Sequence
  Description of Artificial Sequence: Synthetic oligonucleotide
  Sense strand starting at position 416 of SEQ ID NO: 587369
caaauugugcaucauugga

SEQ ID NO: 786971 - RNA, 19 nt, Artificial Sequence
  Description of Artificial Sequence: Synthetic oligonucleotide
  Antisense strand to SEQ ID NO: 786970
uccaaugaugcacaauuug

SEQ ID NO: 786972 - RNA, 19 nt, Artificial Sequence
  Description of Artificial Sequence: Synthetic oligonucleotide
  Sense strand starting at position 418 of SEQ ID NO: 587369
aauugugcaucauuggaau

SEQ ID NO: 786973 - RNA, 19 nt, Artificial Sequence
  Description of Artificial Sequence: Synthetic oligonucleotide
  Antisense strand to SEQ ID NO: 786972
auuccaaugaugcacaauu

SEQ ID NO: 786974 - RNA, 19 nt, Artificial Sequence
  Description of Artificial Sequence: Synthetic oligonucleotide
  Sense strand starting at position 424 of SEQ ID NO: 587369
gcaucauuggaaugcaaag

SEQ ID NO: 786975 - RNA, 19 nt, Artificial Sequence
  Description of Artificial Sequence: Synthetic oligonucleotide
  Antisense strand to SEQ ID NO: 786974
cuuugcauuccaaugaugc

SEQ ID NO: 786976 - RNA, 19 nt, Artificial Sequence
  Description of Artificial Sequence: Synthetic oligonucleotide
  Sense strand starting at position 549 of SEQ ID NO: 587369
ggucaaacacacuaaguuu

SEQ ID NO: 786977 - RNA, 19 nt, Artificial Sequence
  Description of Artificial Sequence: Synthetic oligonucleotide
  Antisense strand to SEQ ID NO: 786976
aaacuuaguguguuugacc

SEQ ID NO: 786978 - RNA, 19 nt, Artificial Sequence
  Description of Artificial Sequence: Synthetic oligonucleotide
  Sense strand starting at position 563 of SEQ ID NO: 587369
aguuuaaugcuugaacuuu

SEQ ID NO: 786979 - RNA, 19 nt, Artificial Sequence
  Description of Artificial Sequence: Synthetic oligonucleotide
  Antisense strand to SEQ ID NO: 786978
aaaguucaagcauuaaacu

SEQ ID NO: 786980 - RNA, 19 nt, Artificial Sequence
  Description of Artificial Sequence: Synthetic oligonucleotide
  Sense strand starting at position 671 of SEQ ID NO: 587369
uuugguuucuaucuaggaa

SEQ ID NO: 786981 - RNA, 19 nt, Artificial Sequence
  Description of Artificial Sequence: Synthetic oligonucleotide
  Antisense strand to SEQ ID NO: 786980
uuccuagauagaaaccaaa

SEQ ID NO: 786982 - RNA, 19 nt, Artificial Sequence
  Description of Artificial Sequence: Synthetic oligonucleotide
  Sense strand starting at position 971 of SEQ ID NO: 587369
uuagucaugcaagaucaua

SEQ ID NO: 786983 - RNA, 19 nt, Artificial Sequence
  Description of Artificial Sequence: Synthetic oligonucleotide
  Antisense strand to SEQ ID NO: 786982
uaugaucuugcaugacuaa

SEQ ID NO: 786984 - RNA, 19 nt, Artificial Sequence
  Description of Artificial Sequence: Synthetic oligonucleotide
  Sense strand starting at position 1002 of SEQ ID NO: 587369
augugagucuauccaggau

SEQ ID NO: 786985 - RNA, 19 nt, Artificial Sequence
  Description of Artificial Sequence: Synthetic oligonucleotide
  Antisense strand to SEQ ID NO: 786984
auccuggauagacucacau

SEQ ID NO: 786986 - RNA, 19 nt, Artificial Sequence
  Description of Artificial Sequence: Synthetic oligonucleotide
  Sense strand starting at position 1005 of SEQ ID NO: 587369
ugagucuauccaggaugua

SEQ ID NO: 786987 - RNA, 19 nt, Artificial Sequence
  Description of Artificial Sequence: Synthetic oligonucleotide
  Antisense strand to SEQ ID NO: 786986
uacauccuggauagacuca

SEQ ID NO: 786988 - RNA, 19 nt, Artificial Sequence
  Description of Artificial Sequence: Synthetic oligonucleotide
  Sense strand starting at position 1006 of SEQ ID NO: 587369
gagucuauccaggauguau

SEQ ID NO: 786989 - RNA, 19 nt, Artificial Sequence
  Description of Artificial Sequence: Synthetic oligonucleotide
  Antisense strand to SEQ ID NO: 786988
auacauccuggauagacuc

SEQ ID NO: 786990 - RNA, 19 nt, Artificial Sequence
  Description of Artificial Sequence: Synthetic oligonucleotide
  Sense strand starting at position 1121 of SEQ ID NO: 587369
gugugauuuccagguccua

SEQ ID NO: 786991 - RNA, 19 nt, Artificial Sequence
  Description of Artificial Sequence: Synthetic oligonucleotide
  Antisense strand to SEQ ID NO: 786990
uaggaccuggaaaucacac

SEQ ID NO: 786992 - RNA, 19 nt, Artificial Sequence
  Description of Artificial Sequence: Synthetic oligonucleotide
  Sense strand starting at position 1159 of SEQ ID NO: 587369
cugaaucaguuucugaaau

SEQ ID NO: 786993 - RNA, 19 nt, Artificial Sequence
  Description of Artificial Sequence: Synthetic oligonucleotide
  Antisense strand to SEQ ID NO: 786992
auuucagaaacugauucag

SEQ ID NO: 786994 - RNA, 19 nt, Artificial Sequence
  Description of Artificial Sequence: Synthetic oligonucleotide
  Sense strand starting at position 1191 of SEQ ID NO: 587369
ugcuaaugucauggaccaa

SEQ ID NO: 786995 - RNA, 19 nt, Artificial Sequence
  Description of Artificial Sequence: Synthetic oligonucleotide
  Antisense strand to SEQ ID NO: 786994
uugguccaugacauuagca

SEQ ID NO: 786996 - RNA, 19 nt, Artificial Sequence
  Description of Artificial Sequence: Synthetic oligonucleotide
  Sense strand starting at position 1210 of SEQ ID NO: 587369
auacuuuggugcucaagga

SEQ ID NO: 786997 - RNA, 19 nt, Artificial Sequence
  Description of Artificial Sequence: Synthetic oligonucleotide
  Antisense strand to SEQ ID NO: 786996
uccuugagcaccaaaguau

SEQ ID NO: 786998 - RNA, 19 nt, Artificial Sequence
  Description of Artificial Sequence: Synthetic oligonucleotide
  Sense strand starting at position 1627 of SEQ ID NO: 587369
uuugguucucacugauuaa

SEQ ID NO: 786999 - RNA, 19 nt, Artificial Sequence
  Description of Artificial Sequence: Synthetic oligonucleotide
  Antisense strand to SEQ ID NO: 786998
uuaaucagugagaaccaaa

SEQ ID NO: 787000 - RNA, 19 nt, Artificial Sequence
  Description of Artificial Sequence: Synthetic oligonucleotide
  Sense strand starting at position 1756 of SEQ ID NO: 587369
uuugcagaugugcaagauu

SEQ ID NO: 787001 - RNA, 19 nt, Artificial Sequence
  Description of Artificial Sequence: Synthetic oligonucleotide
  Antisense strand to SEQ ID NO: 787000
aaucuugcacaucugcaaa

SEQ ID NO: 787002 - RNA, 19 nt, Artificial Sequence
  Description of Artificial Sequence: Synthetic oligonucleotide
  Sense strand starting at position 1759 of SEQ ID NO: 587369
gcagaugugcaagauugau

SEQ ID NO: 787003 - RNA, 19 nt, Artificial Sequence
  Description of Artificial Sequence: Synthetic oligonucleotide
  Antisense strand to SEQ ID NO: 787002
aucaaucuugcacaucugc

SEQ ID NO: 787004 - RNA, 19 nt, Artificial Sequence
  Description of Artificial Sequence: Synthetic oligonucleotide
  Sense strand starting at position 2238 of SEQ ID NO: 587369
ccaucugcuugaguauuua

SEQ ID NO: 787005 - RNA, 19 nt, Artificial Sequence
  Description of Artificial Sequence: Synthetic oligonucleotide
  Antisense strand to SEQ ID NO: 787004
uaaauacucaagcagaugg

SEQ ID NO: 787006 - RNA, 19 nt, Artificial Sequence
  Description of Artificial Sequence: Synthetic oligonucleotide
  Sense strand starting at position 2242 of SEQ ID NO: 587369
cugcuugaguauuuacuuu

SEQ ID NO: 787007 - RNA, 19 nt, Artificial Sequence
  Description of Artificial Sequence: Synthetic oligonucleotide
  Antisense strand to SEQ ID NO: 787006
aaaguaaauacucaagcag

SEQ ID NO: 787008 - RNA, 19 nt, Artificial Sequence
  Description of Artificial Sequence: Synthetic oligonucleotide
  Sense strand starting at position 2333 of SEQ ID NO: 587369
gaagauggucccugguacu

SEQ ID NO: 787009 - RNA, 19 nt, Artificial Sequence
  Description of Artificial Sequence: Synthetic oligonucleotide
  Antisense strand to SEQ ID NO: 787008
aguaccagggaccaucuuc

SEQ ID NO: 787010 - RNA, 19 nt, Artificial Sequence
  Description of Artificial Sequence: Synthetic oligonucleotide
  Sense strand starting at position 2343 of SEQ ID NO: 587369
ccugguacucucuggauga

SEQ ID NO: 787011 - RNA, 19 nt, Artificial Sequence
  Description of Artificial Sequence: Synthetic oligonucleotide
  Antisense strand to SEQ ID NO: 787010
ucauccagagaguaccagg

SEQ ID NO: 787012 - RNA, 19 nt, Artificial Sequence
  Description of Artificial Sequence: Synthetic oligonucleotide
  Sense strand starting at position 2345 of SEQ ID NO: 587369
ugguacucucuggaugacu

SEQ ID NO: 787013 - RNA, 19 nt, Artificial Sequence
  Description of Artificial Sequence: Synthetic oligonucleotide
  Antisense strand to SEQ ID NO: 787012
agucauccagagaguacca

SEQ ID NO: 787014 - RNA, 19 nt, Artificial Sequence
  Description of Artificial Sequence: Synthetic oligonucleotide
  Sense strand starting at position 2485 of SEQ ID NO: 587369
ccaguauggagaggucaau

SEQ ID NO: 787015 - RNA, 19 nt, Artificial Sequence
  Description of Artificial Sequence: Synthetic oligonucleotide
  Antisense strand to SEQ ID NO: 787014
auugaccucuccauacugg

SEQ ID NO: 787016 - RNA, 19 nt, Artificial Sequence
  Description of Artificial Sequence: Synthetic oligonucleotide
  Sense strand starting at position 2491 of SEQ ID NO: 587369
uggagaggucaaugaccuu

SEQ ID NO: 787017 - RNA, 19 nt, Artificial Sequence
  Description of Artificial Sequence: Synthetic oligonucleotide
  Antisense strand to SEQ ID NO: 787016
aaggucauugaccucucca

SEQ ID NO: 787018 - RNA, 19 nt, Artificial Sequence
  Description of Artificial Sequence: Synthetic oligonucleotide
  Sense strand starting at position 2546 of SEQ ID NO: 587369
aggccaaguuuaucagauu

SEQ ID NO: 787019 - RNA, 19 nt, Artificial Sequence
  Description of Artificial Sequence: Synthetic oligonucleotide
  Antisense strand to SEQ ID NO: 787018
aaucugauaaacuuggccu

SEQ ID NO: 787020 - RNA, 19 nt, Artificial Sequence
  Description of Artificial Sequence: Synthetic oligonucleotide
  Sense strand starting at position 2661 of SEQ ID NO: 587369
aaaguaauuuaggugcgua

SEQ ID NO: 787021 - RNA, 19 nt, Artificial Sequence
  Description of Artificial Sequence: Synthetic oligonucleotide
  Antisense strand to SEQ ID NO: 787020
uacgcaccuaaauuacuuu

SEQ ID NO: 787022 - RNA, 19 nt, Artificial Sequence
  Description of Artificial Sequence: Synthetic oligonucleotide
  Sense strand starting at position 2662 of SEQ ID NO: 587369
aaguaauuuaggugcguac

SEQ ID NO: 787023 - RNA, 19 nt, Artificial Sequence
  Description of Artificial Sequence: Synthetic oligonucleotide
  Antisense strand to SEQ ID NO: 787022
guacgcaccuaaauuacuu

SEQ ID NO: 787024 - RNA, 19 nt, Artificial Sequence
  Description of Artificial Sequence: Synthetic oligonucleotide
  Sense strand starting at position 2751 of SEQ ID NO: 587369
gguagaagucaugagcucu

SEQ ID NO: 787025 - RNA, 19 nt, Artificial Sequence
  Description of Artificial Sequence: Synthetic oligonucleotide
  Antisense strand to SEQ ID NO: 787024
agagcucaugacuucuacc

SEQ ID NO: 787026 - RNA, 19 nt, Artificial Sequence
  Description of Artificial Sequence: Synthetic oligonucleotide
  Sense strand starting at position 2867 of SEQ ID NO: 587369
uggcacuuuguauaucaaa

SEQ ID NO: 787027 - RNA, 19 nt, Artificial Sequence
  Description of Artificial Sequence: Synthetic oligonucleotide
  Antisense strand to SEQ ID NO: 787026
uuugauauacaaagugcca

SEQ ID NO: 787028 - RNA, 19 nt, Artificial Sequence
  Description of Artificial Sequence: Synthetic oligonucleotide
  Sense strand starting at position 2936 of SEQ ID NO: 587369
uguauaugccaucacuuau

SEQ ID NO: 787029 - RNA, 19 nt, Artificial Sequence
  Description of Artificial Sequence: Synthetic oligonucleotide
  Antisense strand to SEQ ID NO: 787028
auaagugauggcauauaca

SEQ ID NO: 787030 - RNA, 19 nt, Artificial Sequence
  Description of Artificial Sequence: Synthetic oligonucleotide
  Sense strand starting at position 3335 of SEQ ID NO: 587369
cuuggagagucucuauauu

SEQ ID NO: 787031 - RNA, 19 nt, Artificial Sequence
  Description of Artificial Sequence: Synthetic oligonucleotide
  Antisense strand to SEQ ID NO: 787030
aauauagagacucuccaag

SEQ ID NO: 787032 - RNA, 19 nt, Artificial Sequence
  Description of Artificial Sequence: Synthetic oligonucleotide
  Sense strand starting at position 3441 of SEQ ID NO: 587369
uuggauugauauccacaug

SEQ ID NO: 787033 - RNA, 19 nt, Artificial Sequence
  Description of Artificial Sequence: Synthetic oligonucleotide
  Antisense strand to SEQ ID NO: 787032
cauguggauaucaauccaa

SEQ ID NO: 787034 - RNA, 19 nt, Artificial Sequence
  Description of Artificial Sequence: Synthetic oligonucleotide
  Sense strand starting at position 3535 of SEQ ID NO: 587369
ccuuuagcaguuugaaaga

SEQ ID NO: 787035 - RNA, 19 nt, Artificial Sequence
  Description of Artificial Sequence: Synthetic oligonucleotide
  Antisense strand to SEQ ID NO: 787034
ucuuucaaacugcuaaagg

SEQ ID NO: 787036 - RNA, 19 nt, Artificial Sequence
  Description of Artificial Sequence: Synthetic oligonucleotide
  Sense strand starting at position 3631 of SEQ ID NO: 587369
guacucuuggcucaacauc

SEQ ID NO: 787037 - RNA, 19 nt, Artificial Sequence
  Description of Artificial Sequence: Synthetic oligonucleotide
  Antisense strand to SEQ ID NO: 787036
gauguugagccaagaguac

SEQ ID NO: 787038 - RNA, 19 nt, Artificial Sequence
  Description of Artificial Sequence: Synthetic oligonucleotide
  Sense strand starting at position 3732 of SEQ ID NO: 587369
ccauguguaagugauauca

SEQ ID NO: 787039 - RNA, 19 nt, Artificial Sequence
  Description of Artificial Sequence: Synthetic oligonucleotide
  Antisense strand to SEQ ID NO: 787038
ugauaucacuuacacaugg

SEQ ID NO: 787040 - RNA, 19 nt, Artificial Sequence
  Description of Artificial Sequence: Synthetic oligonucleotide
  Sense strand starting at position 3774 of SEQ ID NO: 587369
ugguuuauuucguuuagca

SEQ ID NO: 787041 - RNA, 19 nt, Artificial Sequence
  Description of Artificial Sequence: Synthetic oligonucleotide
  Antisense strand to SEQ ID NO: 787040
ugcuaaacgaaauaaacca

SEQ ID NO: 787042 - RNA, 19 nt, Artificial Sequence
  Description of Artificial Sequence: Synthetic oligonucleotide
  Sense strand starting at position 3776 of SEQ ID NO: 587369
guuuauuucguuuagcaca

SEQ ID NO: 787043 - RNA, 19 nt, Artificial Sequence
  Description of Artificial Sequence: Synthetic oligonucleotide
  Antisense strand to SEQ ID NO: 787042
ugugcuaaacgaaauaaac

SEQ ID NO: 787044 - RNA, 19 nt, Artificial Sequence
  Description of Artificial Sequence: Synthetic oligonucleotide
  Sense strand starting at position 3812 of SEQ ID NO: 587369
ccauguugucaugaaugaa

SEQ ID NO: 787045 - RNA, 19 nt, Artificial Sequence
  Description of Artificial Sequence: Synthetic oligonucleotide
  Antisense strand to SEQ ID NO: 787044
uucauucaugacaacaugg

SEQ ID NO: 787046 - RNA, 19 nt, Artificial Sequence
  Description of Artificial Sequence: Synthetic oligonucleotide
  Sense strand starting at position 3815 of SEQ ID NO: 587369
uguugucaugaaugaagaa

SEQ ID NO: 787047 - RNA, 19 nt, Artificial Sequence
  Description of Artificial Sequence: Synthetic oligonucleotide
  Antisense strand to SEQ ID NO: 787046
uucuucauucaugacaaca

SEQ ID NO: 787048 - RNA, 19 nt, Artificial Sequence
  Description of Artificial Sequence: Synthetic oligonucleotide
  Sense strand starting at position 489 of SEQ ID NO: 587370
cuaccacuucucuggucua

SEQ ID NO: 787049 - RNA, 19 nt, Artificial Sequence
  Description of Artificial Sequence: Synthetic oligonucleotide
  Antisense strand to SEQ ID NO: 787048
uagaccagagaagugguag

SEQ ID NO: 787050 - RNA, 19 nt, Artificial Sequence
  Description of Artificial Sequence: Synthetic oligonucleotide
  Sense strand starting at position 492 of SEQ ID NO: 587370
ccacuucucuggucuacau

SEQ ID NO: 787051 - RNA, 19 nt, Artificial Sequence
  Description of Artificial Sequence: Synthetic oligonucleotide
  Antisense strand to SEQ ID NO: 787050
auguagaccagagaagugg

SEQ ID NO: 787052 - RNA, 19 nt, Artificial Sequence
  Description of Artificial Sequence: Synthetic oligonucleotide
  Sense strand starting at position 496 of SEQ ID NO: 587370
uucucuggucuacauagaa

SEQ ID NO: 787053 - RNA, 19 nt, Artificial Sequence
  Description of Artificial Sequence: Synthetic oligonucleotide
  Antisense strand to SEQ ID NO: 787052
uucuauguagaccagagaa

SEQ ID NO: 787054 - RNA, 19 nt, Artificial Sequence
  Description of Artificial Sequence: Synthetic oligonucleotide
  Sense strand starting at position 525 of SEQ ID NO: 587370
aagagcuaguguucugaga

SEQ ID NO: 787055 - RNA, 19 nt, Artificial Sequence
  Description of Artificial Sequence: Synthetic oligonucleotide
  Antisense strand to SEQ ID NO: 787054
ucucagaacacuagcucuu

SEQ ID NO: 787056 - RNA, 19 nt, Artificial Sequence
  Description of Artificial Sequence: Synthetic oligonucleotide
  Sense strand starting at position 532 of SEQ ID NO: 587370
aguguucugagauacgacu

SEQ ID NO: 787057 - RNA, 19 nt, Artificial Sequence
  Description of Artificial Sequence: Synthetic oligonucleotide
  Antisense strand to SEQ ID NO: 787056
agucguaucucagaacacu

SEQ ID NO: 787058 - RNA, 19 nt, Artificial Sequence
  Description of Artificial Sequence: Synthetic oligonucleotide
  Sense strand starting at position 539 of SEQ ID NO: 587370
ugagauacgacuuggguuu

SEQ ID NO: 787059 - RNA, 19 nt, Artificial Sequence
  Description of Artificial Sequence: Synthetic oligonucleotide
  Antisense strand to SEQ ID NO: 787058
aaacccaagucguaucuca

SEQ ID NO: 787060 - RNA, 19 nt, Artificial Sequence
  Description of Artificial Sequence: Synthetic oligonucleotide
  Sense strand starting at position 629 of SEQ ID NO: 587370
aggacuuuauuugagauga

SEQ ID NO: 787061 - RNA, 19 nt, Artificial Sequence
  Description of Artificial Sequence: Synthetic oligonucleotide
  Antisense strand to SEQ ID NO: 787060
ucaucucaaauaaaguccu

SEQ ID NO: 787062 - RNA, 19 nt, Artificial Sequence
  Description of Artificial Sequence: Synthetic oligonucleotide
  Sense strand starting at position 631 of SEQ ID NO: 587370
gacuuuauuugagaugagg

SEQ ID NO: 787063 - RNA, 19 nt, Artificial Sequence
  Description of Artificial Sequence: Synthetic oligonucleotide
  Antisense strand to SEQ ID NO: 787062
ccucaucucaaauaaaguc

SEQ ID NO: 787064 - RNA, 19 nt, Artificial Sequence
  Description of Artificial Sequence: Synthetic oligonucleotide
  Sense strand starting at position 656 of SEQ ID NO: 587370
aguugauggcaauguauag

SEQ ID NO: 787065 - RNA, 19 nt, Artificial Sequence
  Description of Artificial Sequence: Synthetic oligonucleotide
  Antisense strand to SEQ ID NO: 787064
cuauacauugccaucaacu

SEQ ID NO: 787066 - RNA, 19 nt, Artificial Sequence
  Description of Artificial Sequence: Synthetic oligonucleotide
  Sense strand starting at position 678 of SEQ ID NO: 587370
acacgacaguuuccuucua

SEQ ID NO: 787067 - RNA, 19 nt, Artificial Sequence
  Description of Artificial Sequence: Synthetic oligonucleotide
  Antisense strand to SEQ ID NO: 787066
uagaaggaaacugucgugu

SEQ ID NO: 787068 - RNA, 19 nt, Artificial Sequence
  Description of Artificial Sequence: Synthetic oligonucleotide
  Sense strand starting at position 686 of SEQ ID NO: 587370
guuuccuucuaggucauaa

SEQ ID NO: 787069 - RNA, 19 nt, Artificial Sequence
  Description of Artificial Sequence: Synthetic oligonucleotide
  Antisense strand to SEQ ID NO: 787068
uuaugaccuagaaggaaac

SEQ ID NO: 787070 - RNA, 19 nt, Artificial Sequence
  Description of Artificial Sequence: Synthetic oligonucleotide
  Sense strand starting at position 752 of SEQ ID NO: 587370
cagaaucugugguuaauac

SEQ ID NO: 787071 - RNA, 19 nt, Artificial Sequence
  Description of Artificial Sequence: Synthetic oligonucleotide
  Antisense strand to SEQ ID NO: 787070
guauuaaccacagauucug

SEQ ID NO: 787072 - RNA, 19 nt, Artificial Sequence
  Description of Artificial Sequence: Synthetic oligonucleotide
  Sense strand starting at position 762 of SEQ ID NO: 587370
gguuaauacccaugacagu

SEQ ID NO: 787073 - RNA, 19 nt, Artificial Sequence
  Description of Artificial Sequence: Synthetic oligonucleotide
  Antisense strand to SEQ ID NO: 787072
acugucauggguauuaacc

SEQ ID NO: 787074 - RNA, 19 nt, Artificial Sequence
  Description of Artificial Sequence: Synthetic oligonucleotide
  Sense strand starting at position 781 of SEQ ID NO: 587370
gcaggucccauaggaauau

SEQ ID NO: 787075 - RNA, 19 nt, Artificial Sequence
  Description of Artificial Sequence: Synthetic oligonucleotide
  Antisense strand to SEQ ID NO: 787074
auauuccuaugggaccugc

SEQ ID NO: 787076 - RNA, 19 nt, Artificial Sequence
  Description of Artificial Sequence: Synthetic oligonucleotide
  Sense strand starting at position 791 of SEQ ID NO: 587370
uaggaauauucuguugaau

SEQ ID NO: 787077 - RNA, 19 nt, Artificial Sequence
  Description of Artificial Sequence: Synthetic oligonucleotide
  Antisense strand to SEQ ID NO: 787076
auucaacagaauauuccua

SEQ ID NO: 787078 - RNA, 19 nt, Artificial Sequence
  Description of Artificial Sequence: Synthetic oligonucleotide
  Sense strand starting at position 832 of SEQ ID NO: 587370
agugaaagcccuuguugag

SEQ ID NO: 787079 - RNA, 19 nt, Artificial Sequence
  Description of Artificial Sequence: Synthetic oligonucleotide
  Antisense strand to SEQ ID NO: 787078
cucaacaagggcuuucacu

SEQ ID NO: 787080 - RNA, 19 nt, Artificial Sequence
  Description of Artificial Sequence: Synthetic oligonucleotide
  Sense strand starting at position 965 of SEQ ID NO: 587370
agccaauagcaugaucaca

SEQ ID NO: 787081 - RNA, 19 nt, Artificial Sequence
  Description of Artificial Sequence: Synthetic oligonucleotide
  Antisense strand to SEQ ID NO: 787080
ugugaucaugcuauuggcu

SEQ ID NO: 787082 - RNA, 19 nt, Artificial Sequence
  Description of Artificial Sequence: Synthetic oligonucleotide
  Sense strand starting at position 993 of SEQ ID NO: 587370
ggaauaaauacgcagagca

SEQ ID NO: 787083 - RNA, 19 nt, Artificial Sequence
  Description of Artificial Sequence: Synthetic oligonucleotide
  Antisense strand to SEQ ID NO: 787082
ugcucugcguauuuauucc

SEQ ID NO: 787084 - RNA, 19 nt, Artificial Sequence
  Description of Artificial Sequence: Synthetic oligonucleotide
  Sense strand starting at position 1043 of SEQ ID NO: 587370
ucugauaugcuguacuuau

SEQ ID NO: 787085 - RNA, 19 nt, Artificial Sequence
  Description of Artificial Sequence: Synthetic oligonucleotide
  Antisense strand to SEQ ID NO: 787084
auaaguacagcauaucaga

SEQ ID NO: 787086 - RNA, 19 nt, Artificial Sequence
  Description of Artificial Sequence: Synthetic oligonucleotide
  Sense strand starting at position 1100 of SEQ ID NO: 587370
auaugacugucuccaguuu

SEQ ID NO: 787087 - RNA, 19 nt, Artificial Sequence
  Description of Artificial Sequence: Synthetic oligonucleotide
  Antisense strand to SEQ ID NO: 787086
aaacuggagacagucauau

SEQ ID NO: 787088 - RNA, 19 nt, Artificial Sequence
  Description of Artificial Sequence: Synthetic oligonucleotide
  Sense strand starting at position 1513 of SEQ ID NO: 587370
aguagagacuccucaauac

SEQ ID NO: 787089 - RNA, 19 nt, Artificial Sequence
  Description of Artificial Sequence: Synthetic oligonucleotide
  Antisense strand to SEQ ID NO: 787088
guauugaggagucucuacu

SEQ ID NO: 787090 - RNA, 19 nt, Artificial Sequence
  Description of Artificial Sequence: Synthetic oligonucleotide
  Sense strand starting at position 1874 of SEQ ID NO: 587370
aguggaucauccucagcuu

SEQ ID NO: 787091 - RNA, 19 nt, Artificial Sequence
  Description of Artificial Sequence: Synthetic oligonucleotide
  Antisense strand to SEQ ID NO: 787090
aagcugaggaugauccacu

SEQ ID NO: 787092 - RNA, 19 nt, Artificial Sequence
  Description of Artificial Sequence: Synthetic oligonucleotide
  Sense strand starting at position 1877 of SEQ ID NO: 587370
ggaucauccucagcuugga

SEQ ID NO: 787093 - RNA, 19 nt, Artificial Sequence
  Description of Artificial Sequence: Synthetic oligonucleotide
  Antisense strand to SEQ ID NO: 787092
uccaagcugaggaugaucc

SEQ ID NO: 787094 - RNA, 19 nt, Artificial Sequence
  Description of Artificial Sequence: Synthetic oligonucleotide
  Sense strand starting at position 2194 of SEQ ID NO: 587370
ccagcugauagugaugaua

SEQ ID NO: 787095 - RNA, 19 nt, Artificial Sequence
  Description of Artificial Sequence: Synthetic oligonucleotide
  Antisense strand to SEQ ID NO: 787094
uaucaucacuaucagcugg

SEQ ID NO: 787096 - RNA, 19 nt, Artificial Sequence
  Description of Artificial Sequence: Synthetic oligonucleotide
  Sense strand starting at position 2208 of SEQ ID NO: 587370
ugauaagaacaguguuaca

SEQ ID NO: 787097 - RNA, 19 nt, Artificial Sequence
  Description of Artificial Sequence: Synthetic oligonucleotide
  Antisense strand to SEQ ID NO: 787096
uguaacacuguucuuauca

SEQ ID NO: 787098 - RNA, 19 nt, Artificial Sequence
  Description of Artificial Sequence: Synthetic oligonucleotide
  Sense strand starting at position 2236 of SEQ ID NO: 587370
uuuccaucugcuggaauau

SEQ ID NO: 787099 - RNA, 19 nt, Artificial Sequence
  Description of Artificial Sequence: Synthetic oligonucleotide
  Antisense strand to SEQ ID NO: 787098
auauuccagcagauggaaa

SEQ ID NO: 787100 - RNA, 19 nt, Artificial Sequence
  Description of Artificial Sequence: Synthetic oligonucleotide
  Sense strand starting at position 2237 of SEQ ID NO: 587370
uuccaucugcuggaauauu

SEQ ID NO: 787101 - RNA, 19 nt, Artificial Sequence
  Description of Artificial Sequence: Synthetic oligonucleotide
  Antisense strand to SEQ ID NO: 787100
aauauuccagcagauggaa

SEQ ID NO: 787102 - RNA, 19 nt, Artificial Sequence
  Description of Artificial Sequence: Synthetic oligonucleotide
  Sense strand starting at position 2309 of SEQ ID NO: 587370
ggaaucaaaugccucuuau

SEQ ID NO: 787103 - RNA, 19 nt, Artificial Sequence
  Description of Artificial Sequence: Synthetic oligonucleotide
  Antisense strand to SEQ ID NO: 787102
auaagaggcauuugauucc

SEQ ID NO: 787104 - RNA, 19 nt, Artificial Sequence
  Description of Artificial Sequence: Synthetic oligonucleotide
  Sense strand starting at position 2426 of SEQ ID NO: 587370
gggcauuucugcccucaug

SEQ ID NO: 787105 - RNA, 19 nt, Artificial Sequence
  Description of Artificial Sequence: Synthetic oligonucleotide
  Antisense strand to SEQ ID NO: 787104
caugagggcagaaaugccc

SEQ ID NO: 787106 - RNA, 19 nt, Artificial Sequence
  Description of Artificial Sequence: Synthetic oligonucleotide
  Sense strand starting at position 2588 of SEQ ID NO: 587370
ucaagaaacccaugugauc

SEQ ID NO: 787107 - RNA, 19 nt, Artificial Sequence
  Description of Artificial Sequence: Synthetic oligonucleotide
  Antisense strand to SEQ ID NO: 787106
gaucacauggguuucuuga

SEQ ID NO: 787108 - RNA, 19 nt, Artificial Sequence
  Description of Artificial Sequence: Synthetic oligonucleotide
  Sense strand starting at position 2599 of SEQ ID NO: 587370
augugaucugaauguauca

SEQ ID NO: 787109 - RNA, 19 nt, Artificial Sequence
  Description of Artificial Sequence: Synthetic oligonucleotide
  Antisense strand to SEQ ID NO: 787108
ugauacauucagaucacau

SEQ ID NO: 787110 - RNA, 19 nt, Artificial Sequence
  Description of Artificial Sequence: Synthetic oligonucleotide
  Sense strand starting at position 3098 of SEQ ID NO: 587370
guuacuugaccauaugugu

SEQ ID NO: 787111 - RNA, 19 nt, Artificial Sequence
  Description of Artificial Sequence: Synthetic oligonucleotide
  Antisense strand to SEQ ID NO: 787110
acacauauggucaaguaac

SEQ ID NO: 787112 - RNA, 19 nt, Artificial Sequence
  Description of Artificial Sequence: Synthetic oligonucleotide
  Sense strand starting at position 3550 of SEQ ID NO: 587370
gaugcuauuguacauggaa

SEQ ID NO: 787113 - RNA, 19 nt, Artificial Sequence
  Description of Artificial Sequence: Synthetic oligonucleotide
  Antisense strand to SEQ ID NO: 787112
uuccauguacaauagcauc

SEQ ID NO: 787114 - RNA, 19 nt, Artificial Sequence
  Description of Artificial Sequence: Synthetic oligonucleotide
  Sense strand starting at position 3738 of SEQ ID NO: 587370
uguccauugugacuuauag

SEQ ID NO: 787115 - RNA, 19 nt, Artificial Sequence
  Description of Artificial Sequence: Synthetic oligonucleotide
  Antisense strand to SEQ ID NO: 787114
cuauaagucacaauggaca

SEQ ID NO: 787116 - RNA, 19 nt, Artificial Sequence
  Description of Artificial Sequence: Synthetic oligonucleotide
  Sense strand starting at position 3828 of SEQ ID NO: 587370
uggagcuguuacucagaua

SEQ ID NO: 787117 - RNA, 19 nt, Artificial Sequence
  Description of Artificial Sequence: Synthetic oligonucleotide
  Antisense strand to SEQ ID NO: 787116
uaucugaguaacagcucca

SEQ ID NO: 787118 - RNA, 19 nt, Artificial Sequence
  Description of Artificial Sequence: Synthetic oligonucleotide
  Sense strand starting at position 3829 of SEQ ID NO: 587370
ggagcuguuacucagauac

SEQ ID NO: 787119 - RNA, 19 nt, Artificial Sequence
  Description of Artificial Sequence: Synthetic oligonucleotide
  Antisense strand to SEQ ID NO: 787118
guaucugaguaacagcucc

SEQ ID NO: 787120 - RNA, 19 nt, Artificial Sequence
  Description of Artificial Sequence: Synthetic oligonucleotide
  Sense strand starting at position 3863 of SEQ ID NO: 587370
aggacaagauacuucugua

SEQ ID NO: 787121 - RNA, 19 nt, Artificial Sequence
  Description of Artificial Sequence: Synthetic oligonucleotide
  Antisense strand to SEQ ID NO: 787120
uacagaaguaucuuguccu

SEQ ID NO: 787122 - RNA, 19 nt, Artificial Sequence
  Description of Artificial Sequence: Synthetic oligonucleotide
  Sense strand starting at position 3920 of SEQ ID NO: 587370
uuggaauuguaugcucuau

SEQ ID NO: 787123 - RNA, 19 nt, Artificial Sequence
  Description of Artificial Sequence: Synthetic oligonucleotide
  Antisense strand to SEQ ID NO: 787122
auagagcauacaauuccaa

SEQ ID NO: 787124 - RNA, 19 nt, Artificial Sequence
  Description of Artificial Sequence: Synthetic oligonucleotide
  Sense strand starting at position 3922 of SEQ ID NO: 587370
ggaauuguaugcucuaucu

SEQ ID NO: 787125 - RNA, 19 nt, Artificial Sequence
  Description of Artificial Sequence: Synthetic oligonucleotide
  Antisense strand to SEQ ID NO: 787124
agauagagcauacaauucc

SEQ ID NO: 787126 - RNA, 19 nt, Artificial Sequence
  Description of Artificial Sequence: Synthetic oligonucleotide
  Sense strand starting at position 3930 of SEQ ID NO: 587370
augcucuaucuuuggaaac

SEQ ID NO: 787127 - RNA, 19 nt, Artificial Sequence
  Description of Artificial Sequence: Synthetic oligonucleotide
  Antisense strand to SEQ ID NO: 787126
guuuccaaagauagagcau

SEQ ID NO: 787128 - RNA, 19 nt, Artificial Sequence
  Description of Artificial Sequence: Synthetic oligonucleotide
  Sense strand starting at position 30 of SEQ ID NO: 587371
uugaguuuggacugaacca

SEQ ID NO: 787129 - RNA, 19 nt, Artificial Sequence
  Description of Artificial Sequence: Synthetic oligonucleotide
  Antisense strand to SEQ ID NO: 787128
ugguucaguccaaacucaa

SEQ ID NO: 787130 - RNA, 19 nt, Artificial Sequence
  Description of Artificial Sequence: Synthetic oligonucleotide
  Sense strand starting at position 105 of SEQ ID NO: 587371
acugaaauauggguguaau

SEQ ID NO: 787131 - RNA, 19 nt, Artificial Sequence
  Description of Artificial Sequence: Synthetic oligonucleotide
  Antisense strand to SEQ ID NO: 787130
auuacacccauauuucagu

SEQ ID NO: 787132 - RNA, 19 nt, Artificial Sequence
  Description of Artificial Sequence: Synthetic oligonucleotide
  Sense strand starting at position 106 of SEQ ID NO: 587371
cugaaauauggguguaauu

SEQ ID NO: 787133 - RNA, 19 nt, Artificial Sequence
  Description of Artificial Sequence: Synthetic oligonucleotide
  Antisense strand to SEQ ID NO: 787132
aauuacacccauauuucag

SEQ ID NO: 787134 - RNA, 19 nt, Artificial Sequence
  Description of Artificial Sequence: Synthetic oligonucleotide
  Sense strand starting at position 141 of SEQ ID NO: 587371
uacuacauggcaugaagua

SEQ ID NO: 787135 - RNA, 19 nt, Artificial Sequence
  Description of Artificial Sequence: Synthetic oligonucleotide
  Antisense strand to SEQ ID NO: 787134
uacuucaugccauguagua

SEQ ID NO: 787136 - RNA, 19 nt, Artificial Sequence
  Description of Artificial Sequence: Synthetic oligonucleotide
  Sense strand starting at position 961 of SEQ ID NO: 587371
agccuaucugcuggauaca

SEQ ID NO: 787137 - RNA, 19 nt, Artificial Sequence
  Description of Artificial Sequence: Synthetic oligonucleotide
  Antisense strand to SEQ ID NO: 787136
uguauccagcagauaggcu

SEQ ID NO: 787138 - RNA, 19 nt, Artificial Sequence
  Description of Artificial Sequence: Synthetic oligonucleotide
  Sense strand starting at position 1000 of SEQ ID NO: 587371
acaauaggaucuuacagag

SEQ ID NO: 787139 - RNA, 19 nt, Artificial Sequence
  Description of Artificial Sequence: Synthetic oligonucleotide
  Antisense strand to SEQ ID NO: 787138
cucuguaagauccuauugu

SEQ ID NO: 787140 - RNA, 19 nt, Artificial Sequence
  Description of Artificial Sequence: Synthetic oligonucleotide
  Sense strand starting at position 1169 of SEQ ID NO: 587371
ccaucaugucagggucaug

SEQ ID NO: 787141 - RNA, 19 nt, Artificial Sequence
  Description of Artificial Sequence: Synthetic oligonucleotide
  Antisense strand to SEQ ID NO: 787140
caugacccugacaugaugg

SEQ ID NO: 787142 - RNA, 19 nt, Artificial Sequence
  Description of Artificial Sequence: Synthetic oligonucleotide
  Sense strand starting at position 1188 of SEQ ID NO: 587371
gcugcuuuggcccagagaa

SEQ ID NO: 787143 - RNA, 19 nt, Artificial Sequence
  Description of Artificial Sequence: Synthetic oligonucleotide
  Antisense strand to SEQ ID NO: 787142
uucucugggccaaagcagc

SEQ ID NO: 787144 - RNA, 19 nt, Artificial Sequence
  Description of Artificial Sequence: Synthetic oligonucleotide
  Sense strand starting at position 1255 of SEQ ID NO: 587371
gacugcuaaccuggagaau

SEQ ID NO: 787145 - RNA, 19 nt, Artificial Sequence
  Description of Artificial Sequence: Synthetic oligonucleotide
  Antisense strand to SEQ ID NO: 787144
auucuccagguuagcaguc

SEQ ID NO: 787146 - RNA, 19 nt, Artificial Sequence
  Description of Artificial Sequence: Synthetic oligonucleotide
  Sense strand starting at position 1276 of SEQ ID NO: 587371
ggaugcauuucucaggaga

SEQ ID NO: 787147 - RNA, 19 nt, Artificial Sequence
  Description of Artificial Sequence: Synthetic oligonucleotide
  Antisense strand to SEQ ID NO: 787146
ucuccugagaaaugcaucc

SEQ ID NO: 787148 - RNA, 19 nt, Artificial Sequence
  Description of Artificial Sequence: Synthetic oligonucleotide
  Sense strand starting at position 1511 of SEQ ID NO: 587371
auaggauacugucuacaug

SEQ ID NO: 787149 - RNA, 19 nt, Artificial Sequence
  Description of Artificial Sequence: Synthetic oligonucleotide
  Antisense strand to SEQ ID NO: 787148
cauguagacaguauccuau

SEQ ID NO: 787150 - RNA, 19 nt, Artificial Sequence
  Description of Artificial Sequence: Synthetic oligonucleotide
  Sense strand starting at position 1512 of SEQ ID NO: 587371
uaggauacugucuacaugu

SEQ ID NO: 787151 - RNA, 19 nt, Artificial Sequence
  Description of Artificial Sequence: Synthetic oligonucleotide
  Antisense strand to SEQ ID NO: 787150
acauguagacaguauccua

SEQ ID NO: 787152 - RNA, 19 nt, Artificial Sequence
  Description of Artificial Sequence: Synthetic oligonucleotide
  Sense strand starting at position 1942 of SEQ ID NO: 587371
gcgucacuguauuuauaag

SEQ ID NO: 787153 - RNA, 19 nt, Artificial Sequence
  Description of Artificial Sequence: Synthetic oligonucleotide
  Antisense strand to SEQ ID NO: 787152
cuuauaaauacagugacgc

SEQ ID NO: 787154 - RNA, 19 nt, Artificial Sequence
  Description of Artificial Sequence: Synthetic oligonucleotide
  Sense strand starting at position 2043 of SEQ ID NO: 587371
ugucauuugcccugagcag

SEQ ID NO: 787155 - RNA, 19 nt, Artificial Sequence
  Description of Artificial Sequence: Synthetic oligonucleotide
  Antisense strand to SEQ ID NO: 787154
cugcucagggcaaaugaca

SEQ ID NO: 787156 - RNA, 19 nt, Artificial Sequence
  Description of Artificial Sequence: Synthetic oligonucleotide
  Sense strand starting at position 2044 of SEQ ID NO: 587371
gucauuugcccugagcagu

SEQ ID NO: 787157 - RNA, 19 nt, Artificial Sequence
  Description of Artificial Sequence: Synthetic oligonucleotide
  Antisense strand to SEQ ID NO: 787156
acugcucagggcaaaugac

SEQ ID NO: 787158 - RNA, 19 nt, Artificial Sequence
  Description of Artificial Sequence: Synthetic oligonucleotide
  Sense strand starting at position 2275 of SEQ ID NO: 587371
gcugguguuggccucuuua

SEQ ID NO: 787159 - RNA, 19 nt, Artificial Sequence
  Description of Artificial Sequence: Synthetic oligonucleotide
  Antisense strand to SEQ ID NO: 787158
uaaagaggccaacaccagc

SEQ ID NO: 787160 - RNA, 19 nt, Artificial Sequence
  Description of Artificial Sequence: Synthetic oligonucleotide
  Sense strand starting at position 2299 of SEQ ID NO: 587371
auugucuuccugcaagaca

SEQ ID NO: 787161 - RNA, 19 nt, Artificial Sequence
  Description of Artificial Sequence: Synthetic oligonucleotide
  Antisense strand to SEQ ID NO: 787160
ugucuugcaggaagacaau

SEQ ID NO: 787162 - RNA, 19 nt, Artificial Sequence
  Description of Artificial Sequence: Synthetic oligonucleotide
  Sense strand starting at position 2348 of SEQ ID NO: 587371
aggagagcugguuguaaug

SEQ ID NO: 787163 - RNA, 19 nt, Artificial Sequence
  Description of Artificial Sequence: Synthetic oligonucleotide
  Antisense strand to SEQ ID NO: 787162
cauuacaaccagcucuccu

SEQ ID NO: 787164 - RNA, 19 nt, Artificial Sequence
  Description of Artificial Sequence: Synthetic oligonucleotide
  Sense strand starting at position 2354 of SEQ ID NO: 587371
gcugguuguaaugaaguuu

SEQ ID NO: 787165 - RNA, 19 nt, Artificial Sequence
  Description of Artificial Sequence: Synthetic oligonucleotide
  Antisense strand to SEQ ID NO: 787164
aaacuucauuacaaccagc

SEQ ID NO: 787166 - RNA, 19 nt, Artificial Sequence
  Description of Artificial Sequence: Synthetic oligonucleotide
  Sense strand starting at position 2413 of SEQ ID NO: 587371
gcagaacacucuccucgau

SEQ ID NO: 787167 - RNA, 19 nt, Artificial Sequence
  Description of Artificial Sequence: Synthetic oligonucleotide
  Antisense strand to SEQ ID NO: 787166
aucgaggagaguguucugc

SEQ ID NO: 787168 - RNA, 19 nt, Artificial Sequence
  Description of Artificial Sequence: Synthetic oligonucleotide
  Sense strand starting at position 2416 of SEQ ID NO: 587371
gaacacucuccucgaugga

SEQ ID NO: 787169 - RNA, 19 nt, Artificial Sequence
  Description of Artificial Sequence: Synthetic oligonucleotide
  Antisense strand to SEQ ID NO: 787168
uccaucgaggagaguguuc

SEQ ID NO: 787170 - RNA, 19 nt, Artificial Sequence
  Description of Artificial Sequence: Synthetic oligonucleotide
  Sense strand starting at position 2599 of SEQ ID NO: 587371
ccaaguaucccucagguuu

SEQ ID NO: 787171 - RNA, 19 nt, Artificial Sequence
  Description of Artificial Sequence: Synthetic oligonucleotide
  Antisense strand to SEQ ID NO: 787170
aaaccugagggauacuugg

SEQ ID NO: 787172 - RNA, 19 nt, Artificial Sequence
  Description of Artificial Sequence: Synthetic oligonucleotide
  Sense strand starting at position 2697 of SEQ ID NO: 587371
cucaguggcuuauuugcaa

SEQ ID NO: 787173 - RNA, 19 nt, Artificial Sequence
  Description of Artificial Sequence: Synthetic oligonucleotide
  Antisense strand to SEQ ID NO: 787172
uugcaaauaagccacugag

SEQ ID NO: 787174 - RNA, 19 nt, Artificial Sequence
  Description of Artificial Sequence: Synthetic oligonucleotide
  Sense strand starting at position 2749 of SEQ ID NO: 587371
ggaagaguuuauucggagg

SEQ ID NO: 787175 - RNA, 19 nt, Artificial Sequence
  Description of Artificial Sequence: Synthetic oligonucleotide
  Antisense strand to SEQ ID NO: 787174
ccuccgaauaaacucuucc

SEQ ID NO: 787176 - RNA, 19 nt, Artificial Sequence
  Description of Artificial Sequence: Synthetic oligonucleotide
  Sense strand starting at position 2754 of SEQ ID NO: 587371
aguuuauucggaggauauc

SEQ ID NO: 787177 - RNA, 19 nt, Artificial Sequence
  Description of Artificial Sequence: Synthetic oligonucleotide
  Antisense strand to SEQ ID NO: 787176
gauauccuccgaauaaacu

SEQ ID NO: 787178 - RNA, 19 nt, Artificial Sequence
  Description of Artificial Sequence: Synthetic oligonucleotide
  Sense strand starting at position 2755 of SEQ ID NO: 587371
guuuauucggaggauauca

SEQ ID NO: 787179 - RNA, 19 nt, Artificial Sequence
  Description of Artificial Sequence: Synthetic oligonucleotide
  Antisense strand to SEQ ID NO: 787178
ugauauccuccgaauaaac

SEQ ID NO: 787180 - RNA, 19 nt, Artificial Sequence
  Description of Artificial Sequence: Synthetic oligonucleotide
  Sense strand starting at position 2763 of SEQ ID NO: 587371
ggaggauaucaggguuggu

SEQ ID NO: 787181 - RNA, 19 nt, Artificial Sequence
  Description of Artificial Sequence: Synthetic oligonucleotide
  Antisense strand to SEQ ID NO: 787180
accaacccugauauccucc

SEQ ID NO: 787182 - RNA, 19 nt, Artificial Sequence
  Description of Artificial Sequence: Synthetic oligonucleotide
  Sense strand starting at position 3293 of SEQ ID NO: 587371
gugagauuguggaaagaga

SEQ ID NO: 787183 - RNA, 19 nt, Artificial Sequence
  Description of Artificial Sequence: Synthetic oligonucleotide
  Antisense strand to SEQ ID NO: 787182
ucucuuuccacaaucucac

SEQ ID NO: 787184 - RNA, 19 nt, Artificial Sequence
  Description of Artificial Sequence: Synthetic oligonucleotide
  Sense strand starting at position 3348 of SEQ ID NO: 587371
cuggguaagacauggcuca

SEQ ID NO: 787185 - RNA, 19 nt, Artificial Sequence
  Description of Artificial Sequence: Synthetic oligonucleotide
  Antisense strand to SEQ ID NO: 787184
ugagccaugucuuacccag

SEQ ID NO: 787186 - RNA, 19 nt, Artificial Sequence
  Description of Artificial Sequence: Synthetic oligonucleotide
  Sense strand starting at position 3397 of SEQ ID NO: 587371
ugugaacugccucaaugag

SEQ ID NO: 787187 - RNA, 19 nt, Artificial Sequence
  Description of Artificial Sequence: Synthetic oligonucleotide
  Antisense strand to SEQ ID NO: 787186
cucauugaggcaguucaca

SEQ ID NO: 787188 - RNA, 19 nt, Artificial Sequence
  Description of Artificial Sequence: Synthetic oligonucleotide
  Sense strand starting at position 3411 of SEQ ID NO: 587371
augagcuagcuacaguauu

SEQ ID NO: 787189 - RNA, 19 nt, Artificial Sequence
  Description of Artificial Sequence: Synthetic oligonucleotide
  Antisense strand to SEQ ID NO: 787188
aauacuguagcuagcucau

SEQ ID NO: 787190 - RNA, 19 nt, Artificial Sequence
  Description of Artificial Sequence: Synthetic oligonucleotide
  Sense strand starting at position 3480 of SEQ ID NO: 587371
augauucuuugaccaggca

SEQ ID NO: 787191 - RNA, 19 nt, Artificial Sequence
  Description of Artificial Sequence: Synthetic oligonucleotide
  Antisense strand to SEQ ID NO: 787190
ugccuggucaaagaaucau

SEQ ID NO: 787192 - RNA, 19 nt, Artificial Sequence
  Description of Artificial Sequence: Synthetic oligonucleotide
  Sense strand starting at position 3481 of SEQ ID NO: 587371
ugauucuuugaccaggcaa

SEQ ID NO: 787193 - RNA, 19 nt, Artificial Sequence
  Description of Artificial Sequence: Synthetic oligonucleotide
  Antisense strand to SEQ ID NO: 787192
uugccuggucaaagaauca

SEQ ID NO: 787194 - RNA, 19 nt, Artificial Sequence
  Description of Artificial Sequence: Synthetic oligonucleotide
  Sense strand starting at position 3483 of SEQ ID NO: 587371
auucuuugaccaggcaaua

SEQ ID NO: 787195 - RNA, 19 nt, Artificial Sequence
  Description of Artificial Sequence: Synthetic oligonucleotide
  Antisense strand to SEQ ID NO: 787194
uauugccuggucaaagaau

SEQ ID NO: 787196 - RNA, 19 nt, Artificial Sequence
  Description of Artificial Sequence: Synthetic oligonucleotide
  Sense strand starting at position 3589 of SEQ ID NO: 587371
gguguaauggccuggaaag

SEQ ID NO: 787197 - RNA, 19 nt, Artificial Sequence
  Description of Artificial Sequence: Synthetic oligonucleotide
  Antisense strand to SEQ ID NO: 787196
cuuuccaggccauuacacc

SEQ ID NO: 787198 - RNA, 19 nt, Artificial Sequence
  Description of Artificial Sequence: Synthetic oligonucleotide
  Sense strand starting at position 3601 of SEQ ID NO: 587371
uggaaagccucauucccua

SEQ ID NO: 787199 - RNA, 19 nt, Artificial Sequence
  Description of Artificial Sequence: Synthetic oligonucleotide
  Antisense strand to SEQ ID NO: 787198
uagggaaugaggcuuucca

SEQ ID NO: 787200 - RNA, 19 nt, Artificial Sequence
  Description of Artificial Sequence: Synthetic oligonucleotide
  Sense strand starting at position 3646 of SEQ ID NO: 587371
aggcuuccagguuauuaca

SEQ ID NO: 787201 - RNA, 19 nt, Artificial Sequence
  Description of Artificial Sequence: Synthetic oligonucleotide
  Antisense strand to SEQ ID NO: 787200
uguaauaaccuggaagccu

SEQ ID NO: 787202 - RNA, 19 nt, Artificial Sequence
  Description of Artificial Sequence: Synthetic oligonucleotide
  Sense strand starting at position 3775 of SEQ ID NO: 587371
cccagagauacaugcguau

SEQ ID NO: 787203 - RNA, 19 nt, Artificial Sequence
  Description of Artificial Sequence: Synthetic oligonucleotide
  Antisense strand to SEQ ID NO: 787202
auacgcauguaucucuggg

SEQ ID NO: 787204 - RNA, 19 nt, Artificial Sequence
  Description of Artificial Sequence: Synthetic oligonucleotide
  Sense strand starting at position 3782 of SEQ ID NO: 587371
auacaugcguauuucgauu

SEQ ID NO: 787205 - RNA, 19 nt, Artificial Sequence
  Description of Artificial Sequence: Synthetic oligonucleotide
  Antisense strand to SEQ ID NO: 787204
aaucgaaauacgcauguau

SEQ ID NO: 787206 - RNA, 19 nt, Artificial Sequence
  Description of Artificial Sequence: Synthetic oligonucleotide
  Sense strand starting at position 3788 of SEQ ID NO: 587371
gcguauuucgauuaacuuu

SEQ ID NO: 787207 - RNA, 19 nt, Artificial Sequence
  Description of Artificial Sequence: Synthetic oligonucleotide
  Antisense strand to SEQ ID NO: 787206
aaaguuaaucgaaauacgc

SEQ ID NO: 787208 - RNA, 19 nt, Artificial Sequence
  Description of Artificial Sequence: Synthetic oligonucleotide
  Sense strand starting at position 137 of SEQ ID NO: 587372
aagugaauaucugaggaag

SEQ ID NO: 787209 - RNA, 19 nt, Artificial Sequence
  Description of Artificial Sequence: Synthetic oligonucleotide
  Antisense strand to SEQ ID NO: 787208
cuuccucagauauucacuu

SEQ ID NO: 787210 - RNA, 19 nt, Artificial Sequence
  Description of Artificial Sequence: Synthetic oligonucleotide
  Sense strand starting at position 154 of SEQ ID NO: 587372
agagccaguuuccuuauuu

SEQ ID NO: 787211 - RNA, 19 nt, Artificial Sequence
  Description of Artificial Sequence: Synthetic oligonucleotide
  Antisense strand to SEQ ID NO: 787210
aaauaaggaaacuggcucu

SEQ ID NO: 787212 - RNA, 19 nt, Artificial Sequence
  Description of Artificial Sequence: Synthetic oligonucleotide
  Sense strand starting at position 381 of SEQ ID NO: 587372
ccugauaacccuuggauaa

SEQ ID NO: 787213 - RNA, 19 nt, Artificial Sequence
  Description of Artificial Sequence: Synthetic oligonucleotide
  Antisense strand to SEQ ID NO: 787212
uuauccaaggguuaucagg

SEQ ID NO: 787214 - RNA, 19 nt, Artificial Sequence
  Description of Artificial Sequence: Synthetic oligonucleotide
  Sense strand starting at position 382 of SEQ ID NO: 587372
cugauaacccuuggauaau

SEQ ID NO: 787215 - RNA, 19 nt, Artificial Sequence
  Description of Artificial Sequence: Synthetic oligonucleotide
  Antisense strand to SEQ ID NO: 787214
auuauccaaggguuaucag

SEQ ID NO: 787216 - RNA, 19 nt, Artificial Sequence
  Description of Artificial Sequence: Synthetic oligonucleotide
  Sense strand starting at position 434 of SEQ ID NO: 587372
uucuacuuucuuugaacga

SEQ ID NO: 787217 - RNA, 19 nt, Artificial Sequence
  Description of Artificial Sequence: Synthetic oligonucleotide
  Antisense strand to SEQ ID NO: 787216
ucguucaaagaaaguagaa

SEQ ID NO: 787218 - RNA, 19 nt, Artificial Sequence
  Description of Artificial Sequence: Synthetic oligonucleotide
  Sense strand starting at position 439 of SEQ ID NO: 587372
cuuucuuugaacgaaaggu

SEQ ID NO: 787219 - RNA, 19 nt, Artificial Sequence
  Description of Artificial Sequence: Synthetic oligonucleotide
  Antisense strand to SEQ ID NO: 787218
accuuucguucaaagaaag

SEQ ID NO: 787220 - RNA, 19 nt, Artificial Sequence
  Description of Artificial Sequence: Synthetic oligonucleotide
  Sense strand starting at position 448 of SEQ ID NO: 587372
aacgaaaggugaguccuua

SEQ ID NO: 787221 - RNA, 19 nt, Artificial Sequence
  Description of Artificial Sequence: Synthetic oligonucleotide
  Antisense strand to SEQ ID NO: 787220
uaaggacucaccuuucguu

SEQ ID NO: 787222 - RNA, 19 nt, Artificial Sequence
  Description of Artificial Sequence: Synthetic oligonucleotide
  Sense strand starting at position 452 of SEQ ID NO: 587372
aaaggugaguccuuaagau

SEQ ID NO: 787223 - RNA, 19 nt, Artificial Sequence
  Description of Artificial Sequence: Synthetic oligonucleotide
  Antisense strand to SEQ ID NO: 787222
aucuuaaggacucaccuuu

SEQ ID NO: 787224 - RNA, 19 nt, Artificial Sequence
  Description of Artificial Sequence: Synthetic oligonucleotide
  Sense strand starting at position 475 of SEQ ID NO: 587372
ugaguugucuguuuggaaa

SEQ ID NO: 787225 - RNA, 19 nt, Artificial Sequence
  Description of Artificial Sequence: Synthetic oligonucleotide
  Antisense strand to SEQ ID NO: 787224
uuuccaaacagacaacuca

SEQ ID NO: 787226 - RNA, 19 nt, Artificial Sequence
  Description of Artificial Sequence: Synthetic oligonucleotide
  Sense strand starting at position 685 of SEQ ID NO: 587372
aucuguuccuccuuuggaa

SEQ ID NO: 787227 - RNA, 19 nt, Artificial Sequence
  Description of Artificial Sequence: Synthetic oligonucleotide
  Antisense strand to SEQ ID NO: 787226
uuccaaaggaggaacagau

SEQ ID NO: 787228 - RNA, 19 nt, Artificial Sequence
  Description of Artificial Sequence: Synthetic oligonucleotide
  Sense strand starting at position 729 of SEQ ID NO: 587372
gccucugacucugcaauaa

SEQ ID NO: 787229 - RNA, 19 nt, Artificial Sequence
  Description of Artificial Sequence: Synthetic oligonucleotide
  Antisense strand to SEQ ID NO: 787228
uuauugcagagucagaggc

SEQ ID NO: 787230 - RNA, 19 nt, Artificial Sequence
  Description of Artificial Sequence: Synthetic oligonucleotide
  Sense strand starting at position 753 of SEQ ID NO: 587372
cuguaauguguuuaugauu

SEQ ID NO: 787231 - RNA, 19 nt, Artificial Sequence
  Description of Artificial Sequence: Synthetic oligonucleotide
  Antisense strand to SEQ ID NO: 787230
aaucauaaacacauuacag

SEQ ID NO: 787232 - RNA, 19 nt, Artificial Sequence
  Description of Artificial Sequence: Synthetic oligonucleotide
  Sense strand starting at position 761 of SEQ ID NO: 587372
uguuuaugauuccuccaug

SEQ ID NO: 787233 - RNA, 19 nt, Artificial Sequence
  Description of Artificial Sequence: Synthetic oligonucleotide
  Antisense strand to SEQ ID NO: 787232
cauggaggaaucauaaaca

SEQ ID NO: 787234 - RNA, 19 nt, Artificial Sequence
  Description of Artificial Sequence: Synthetic oligonucleotide
  Sense strand starting at position 762 of SEQ ID NO: 587372
guuuaugauuccuccauga

SEQ ID NO: 787235 - RNA, 19 nt, Artificial Sequence
  Description of Artificial Sequence: Synthetic oligonucleotide
  Antisense strand to SEQ ID NO: 787234
ucauggaggaaucauaaac

SEQ ID NO: 787236 - RNA, 19 nt, Artificial Sequence
  Description of Artificial Sequence: Synthetic oligonucleotide
  Sense strand starting at position 1057 of SEQ ID NO: 587372
ugugguguccucagaggua

SEQ ID NO: 787237 - RNA, 19 nt, Artificial Sequence
  Description of Artificial Sequence: Synthetic oligonucleotide
  Antisense strand to SEQ ID NO: 787236
uaccucugaggacaccaca

SEQ ID NO: 787238 - RNA, 19 nt, Artificial Sequence
  Description of Artificial Sequence: Synthetic oligonucleotide
  Sense strand starting at position 1205 of SEQ ID NO: 587372
auaaucuucccuugaagag

SEQ ID NO: 787239 - RNA, 19 nt, Artificial Sequence
  Description of Artificial Sequence: Synthetic oligonucleotide
  Antisense strand to SEQ ID NO: 787238
cucuucaagggaagauuau

SEQ ID NO: 787240 - RNA, 19 nt, Artificial Sequence
  Description of Artificial Sequence: Synthetic oligonucleotide
  Sense strand starting at position 1249 of SEQ ID NO: 587372
gcuauuuaguuucuuaaug

SEQ ID NO: 787241 - RNA, 19 nt, Artificial Sequence
  Description of Artificial Sequence: Synthetic oligonucleotide
  Antisense strand to SEQ ID NO: 787240
cauuaagaaacuaaauagc

SEQ ID NO: 787242 - RNA, 19 nt, Artificial Sequence
  Description of Artificial Sequence: Synthetic oligonucleotide
  Sense strand starting at position 1870 of SEQ ID NO: 587372
gucauauuacagugaugac

SEQ ID NO: 787243 - RNA, 19 nt, Artificial Sequence
  Description of Artificial Sequence: Synthetic oligonucleotide
  Antisense strand to SEQ ID NO: 787242
gucaucacuguaauaugac

SEQ ID NO: 787244 - RNA, 19 nt, Artificial Sequence
  Description of Artificial Sequence: Synthetic oligonucleotide
  Sense strand starting at position 1949 of SEQ ID NO: 587372
ucacucaguuaauuaggaa

SEQ ID NO: 787245 - RNA, 19 nt, Artificial Sequence
  Description of Artificial Sequence: Synthetic oligonucleotide
  Antisense strand to SEQ ID NO: 787244
uuccuaauuaacugaguga

SEQ ID NO: 787246 - RNA, 19 nt, Artificial Sequence
  Description of Artificial Sequence: Synthetic oligonucleotide
  Sense strand starting at position 2054 of SEQ ID NO: 587372
uuggguuguggguacagau

SEQ ID NO: 787247 - RNA, 19 nt, Artificial Sequence
  Description of Artificial Sequence: Synthetic oligonucleotide
  Antisense strand to SEQ ID NO: 787246
aucuguacccacaacccaa

SEQ ID NO: 787248 - RNA, 19 nt, Artificial Sequence
  Description of Artificial Sequence: Synthetic oligonucleotide
  Sense strand starting at position 2355 of SEQ ID NO: 587372
agugaaacaugucucauuc

SEQ ID NO: 787249 - RNA, 19 nt, Artificial Sequence
  Description of Artificial Sequence: Synthetic oligonucleotide
  Antisense strand to SEQ ID NO: 787248
gaaugagacauguuucacu

SEQ ID NO: 787250 - RNA, 19 nt, Artificial Sequence
  Description of Artificial Sequence: Synthetic oligonucleotide
  Sense strand starting at position 2741 of SEQ ID NO: 587372
gaguaaagaagguguuuaa

SEQ ID NO: 787251 - RNA, 19 nt, Artificial Sequence
  Description of Artificial Sequence: Synthetic oligonucleotide
  Antisense strand to SEQ ID NO: 787250
uuaaacaccuucuuuacuc

SEQ ID NO: 787252 - RNA, 19 nt, Artificial Sequence
  Description of Artificial Sequence: Synthetic oligonucleotide
  Sense strand starting at position 3025 of SEQ ID NO: 587372
gguuguauuugguugacua

SEQ ID NO: 787253 - RNA, 19 nt, Artificial Sequence
  Description of Artificial Sequence: Synthetic oligonucleotide
  Antisense strand to SEQ ID NO: 787252
uagucaaccaaauacaacc

SEQ ID NO: 787254 - RNA, 19 nt, Artificial Sequence
  Description of Artificial Sequence: Synthetic oligonucleotide
  Sense strand starting at position 3026 of SEQ ID NO: 587372
guuguauuugguugacuau

SEQ ID NO: 787255 - RNA, 19 nt, Artificial Sequence
  Description of Artificial Sequence: Synthetic oligonucleotide
  Antisense strand to SEQ ID NO: 787254
auagucaaccaaauacaac

SEQ ID NO: 787256 - RNA, 19 nt, Artificial Sequence
  Description of Artificial Sequence: Synthetic oligonucleotide
  Sense strand starting at position 3040 of SEQ ID NO: 587372
acuaucaauugggaacuaa

SEQ ID NO: 787257 - RNA, 19 nt, Artificial Sequence
  Description of Artificial Sequence: Synthetic oligonucleotide
  Antisense strand to SEQ ID NO: 787256
uuaguucccaauugauagu

SEQ ID NO: 787258 - RNA, 19 nt, Artificial Sequence
  Description of Artificial Sequence: Synthetic oligonucleotide
  Sense strand starting at position 3087 of SEQ ID NO: 587372
ugaagucaccgugaugucu

SEQ ID NO: 787259 - RNA, 19 nt, Artificial Sequence
  Description of Artificial Sequence: Synthetic oligonucleotide
  Antisense strand to SEQ ID NO: 787258
agacaucacggugacuuca

SEQ ID NO: 787260 - RNA, 19 nt, Artificial Sequence
  Description of Artificial Sequence: Synthetic oligonucleotide
  Sense strand starting at position 3149 of SEQ ID NO: 587372
aaggaucaaggguguguua

SEQ ID NO: 787261 - RNA, 19 nt, Artificial Sequence
  Description of Artificial Sequence: Synthetic oligonucleotide
  Antisense strand to SEQ ID NO: 787260
uaacacacccuugauccuu

SEQ ID NO: 787262 - RNA, 19 nt, Artificial Sequence
  Description of Artificial Sequence: Synthetic oligonucleotide
  Sense strand starting at position 3152 of SEQ ID NO: 587372
gaucaaggguguguuaguu

SEQ ID NO: 787263 - RNA, 19 nt, Artificial Sequence
  Description of Artificial Sequence: Synthetic oligonucleotide
  Antisense strand to SEQ ID NO: 787262
aacuaacacacccuugauc

SEQ ID NO: 787264 - RNA, 19 nt, Artificial Sequence
  Description of Artificial Sequence: Synthetic oligonucleotide
  Sense strand starting at position 3164 of SEQ ID NO: 587372
guuaguucugggagugugu

SEQ ID NO: 787265 - RNA, 19 nt, Artificial Sequence
  Description of Artificial Sequence: Synthetic oligonucleotide
  Antisense strand to SEQ ID NO: 787264
acacacucccagaacuaac

SEQ ID NO: 787266 - RNA, 19 nt, Artificial Sequence
  Description of Artificial Sequence: Synthetic oligonucleotide
  Sense strand starting at position 3307 of SEQ ID NO: 587372
ggaccagucuugguucuuu

SEQ ID NO: 787267 - RNA, 19 nt, Artificial Sequence
  Description of Artificial Sequence: Synthetic oligonucleotide
  Antisense strand to SEQ ID NO: 787266
aaagaaccaagacuggucc

SEQ ID NO: 787268 - RNA, 19 nt, Artificial Sequence
  Description of Artificial Sequence: Synthetic oligonucleotide
  Sense strand starting at position 3316 of SEQ ID NO: 587372
uugguucuuucucuccaga

SEQ ID NO: 787269 - RNA, 19 nt, Artificial Sequence
  Description of Artificial Sequence: Synthetic oligonucleotide
  Antisense strand to SEQ ID NO: 787268
ucuggagagaaagaaccaa

SEQ ID NO: 787270 - RNA, 19 nt, Artificial Sequence
  Description of Artificial Sequence: Synthetic oligonucleotide
  Sense strand starting at position 3471 of SEQ ID NO: 587372
auaacucuuugagccaaga

SEQ ID NO: 787271 - RNA, 19 nt, Artificial Sequence
  Description of Artificial Sequence: Synthetic oligonucleotide
  Antisense strand to SEQ ID NO: 787270
ucuuggcucaaagaguuau

SEQ ID NO: 787272 - RNA, 19 nt, Artificial Sequence
  Description of Artificial Sequence: Synthetic oligonucleotide
  Sense strand starting at position 3492 of SEQ ID NO: 587372
ggagcucaaucagcagauu

SEQ ID NO: 787273 - RNA, 19 nt, Artificial Sequence
  Description of Artificial Sequence: Synthetic oligonucleotide
  Antisense strand to SEQ ID NO: 787272
aaucugcugauugagcucc

SEQ ID NO: 787274 - RNA, 19 nt, Artificial Sequence
  Description of Artificial Sequence: Synthetic oligonucleotide
  Sense strand starting at position 3517 of SEQ ID NO: 587372
uuuagauagguagaugcua

SEQ ID NO: 787275 - RNA, 19 nt, Artificial Sequence
  Description of Artificial Sequence: Synthetic oligonucleotide
  Antisense strand to SEQ ID NO: 787274
uagcaucuaccuaucuaaa

SEQ ID NO: 787276 - RNA, 19 nt, Artificial Sequence
  Description of Artificial Sequence: Synthetic oligonucleotide
  Sense strand starting at position 3645 of SEQ ID NO: 587372
acagucuuacuaugucaga

SEQ ID NO: 787277 - RNA, 19 nt, Artificial Sequence
  Description of Artificial Sequence: Synthetic oligonucleotide
  Antisense strand to SEQ ID NO: 787276
ucugacauaguaagacugu

SEQ ID NO: 787278 - RNA, 19 nt, Artificial Sequence
  Description of Artificial Sequence: Synthetic oligonucleotide
  Sense strand starting at position 3660 of SEQ ID NO: 587372
cagacauaacgauggcauu

SEQ ID NO: 787279 - RNA, 19 nt, Artificial Sequence
  Description of Artificial Sequence: Synthetic oligonucleotide
  Antisense strand to SEQ ID NO: 787278
aaugccaucguuaugucug

SEQ ID NO: 787280 - RNA, 19 nt, Artificial Sequence
  Description of Artificial Sequence: Synthetic oligonucleotide
  Sense strand starting at position 3881 of SEQ ID NO: 587372
cuugucaacuaguuuggga

SEQ ID NO: 787281 - RNA, 19 nt, Artificial Sequence
  Description of Artificial Sequence: Synthetic oligonucleotide
  Antisense strand to SEQ ID NO: 787280
ucccaaacuaguugacaag

SEQ ID NO: 787282 - RNA, 19 nt, Artificial Sequence
  Description of Artificial Sequence: Synthetic oligonucleotide
  Sense strand starting at position 3890 of SEQ ID NO: 587372
uaguuugggagcugggaau

SEQ ID NO: 787283 - RNA, 19 nt, Artificial Sequence
  Description of Artificial Sequence: Synthetic oligonucleotide
  Antisense strand to SEQ ID NO: 787282
auucccagcucccaaacua

SEQ ID NO: 787284 - RNA, 19 nt, Artificial Sequence
  Description of Artificial Sequence: Synthetic oligonucleotide
  Sense strand starting at position 3909 of SEQ ID NO: 587372
uggagauugggcugugaca

SEQ ID NO: 787285 - RNA, 19 nt, Artificial Sequence
  Description of Artificial Sequence: Synthetic oligonucleotide
  Antisense strand to SEQ ID NO: 787284
ugucacagcccaaucucca

SEQ ID NO: 787286 - RNA, 19 nt, Artificial Sequence
  Description of Artificial Sequence: Synthetic oligonucleotide
  Sense strand starting at position 3911 of SEQ ID NO: 587372
gagauugggcugugacaau

SEQ ID NO: 787287 - RNA, 19 nt, Artificial Sequence
  Description of Artificial Sequence: Synthetic oligonucleotide
  Antisense strand to SEQ ID NO: 787286
auugucacagcccaaucuc

SEQ ID NO: 787288 - RNA, 19 nt, Artificial Sequence
  Description of Artificial Sequence: Synthetic oligonucleotide
  Sense strand starting at position 138 of SEQ ID NO: 587373
aagugaauaucugaggaag

SEQ ID NO: 787289 - RNA, 19 nt, Artificial Sequence
  Description of Artificial Sequence: Synthetic oligonucleotide
  Antisense strand to SEQ ID NO: 787288
cuuccucagauauucacuu

SEQ ID NO: 787290 - RNA, 19 nt, Artificial Sequence
  Description of Artificial Sequence: Synthetic oligonucleotide
  Sense strand starting at position 382 of SEQ ID NO: 587373
ccugauaacccuuggauaa

SEQ ID NO: 787291 - RNA, 19 nt, Artificial Sequence
  Description of Artificial Sequence: Synthetic oligonucleotide
  Antisense strand to SEQ ID NO: 787290
uuauccaaggguuaucagg

SEQ ID NO: 787292 - RNA, 19 nt, Artificial Sequence
  Description of Artificial Sequence: Synthetic oligonucleotide
  Sense strand starting at position 383 of SEQ ID NO: 587373
cugauaacccuuggauaau

SEQ ID NO: 787293 - RNA, 19 nt, Artificial Sequence
  Description of Artificial Sequence: Synthetic oligonucleotide
  Antisense strand to SEQ ID NO: 787292
auuauccaaggguuaucag

SEQ ID NO: 787294 - RNA, 19 nt, Artificial Sequence
  Description of Artificial Sequence: Synthetic oligonucleotide
  Sense strand starting at position 384 of SEQ ID NO: 587373
ugauaacccuuggauaaua

SEQ ID NO: 787295 - RNA, 19 nt, Artificial Sequence
  Description of Artificial Sequence: Synthetic oligonucleotide
  Antisense strand to SEQ ID NO: 787294
uauuauccaaggguuauca

SEQ ID NO: 787296 - RNA, 19 nt, Artificial Sequence
  Description of Artificial Sequence: Synthetic oligonucleotide
  Sense strand starting at position 407 of SEQ ID NO: 587373
ugggcucccuuauagauuu

SEQ ID NO: 787297 - RNA, 19 nt, Artificial Sequence
  Description of Artificial Sequence: Synthetic oligonucleotide
  Antisense strand to SEQ ID NO: 787296
aaaucuauaagggagccca

SEQ ID NO: 787298 - RNA, 19 nt, Artificial Sequence
  Description of Artificial Sequence: Synthetic oligonucleotide
  Sense strand starting at position 435 of SEQ ID NO: 587373
uucuacuuucuuugaacga

SEQ ID NO: 787299 - RNA, 19 nt, Artificial Sequence
  Description of Artificial Sequence: Synthetic oligonucleotide
  Antisense strand to SEQ ID NO: 787298
ucguucaaagaaaguagaa

SEQ ID NO: 787300 - RNA, 19 nt, Artificial Sequence
  Description of Artificial Sequence: Synthetic oligonucleotide
  Sense strand starting at position 440 of SEQ ID NO: 587373
cuuucuuugaacgaaaggu

SEQ ID NO: 787301 - RNA, 19 nt, Artificial Sequence
  Description of Artificial Sequence: Synthetic oligonucleotide
  Antisense strand to SEQ ID NO: 787300
accuuucguucaaagaaag

SEQ ID NO: 787302 - RNA, 19 nt, Artificial Sequence
  Description of Artificial Sequence: Synthetic oligonucleotide
  Sense strand starting at position 449 of SEQ ID NO: 587373
aacgaaaggugaguccuua

SEQ ID NO: 787303 - RNA, 19 nt, Artificial Sequence
  Description of Artificial Sequence: Synthetic oligonucleotide
  Antisense strand to SEQ ID NO: 787302
uaaggacucaccuuucguu

SEQ ID NO: 787304 - RNA, 19 nt, Artificial Sequence
  Description of Artificial Sequence: Synthetic oligonucleotide
  Sense strand starting at position 453 of SEQ ID NO: 587373
aaaggugaguccuuaagau

SEQ ID NO: 787305 - RNA, 19 nt, Artificial Sequence
  Description of Artificial Sequence: Synthetic oligonucleotide
  Antisense strand to SEQ ID NO: 787304
aucuuaaggacucaccuuu

SEQ ID NO: 787306 - RNA, 19 nt, Artificial Sequence
  Description of Artificial Sequence: Synthetic oligonucleotide
  Sense strand starting at position 476 of SEQ ID NO: 587373
ugaguugucuguuuggaaa

SEQ ID NO: 787307 - RNA, 19 nt, Artificial Sequence
  Description of Artificial Sequence: Synthetic oligonucleotide
  Antisense strand to SEQ ID NO: 787306
uuuccaaacagacaacuca

SEQ ID NO: 787308 - RNA, 19 nt, Artificial Sequence
  Description of Artificial Sequence: Synthetic oligonucleotide
  Sense strand starting at position 1058 of SEQ ID NO: 587373
ugugguguccucagaggua

SEQ ID NO: 787309 - RNA, 19 nt, Artificial Sequence
  Description of Artificial Sequence: Synthetic oligonucleotide
  Antisense strand to SEQ ID NO: 787308
uaccucugaggacaccaca

SEQ ID NO: 787310 - RNA, 19 nt, Artificial Sequence
  Description of Artificial Sequence: Synthetic oligonucleotide
  Sense strand starting at position 1123 of SEQ ID NO: 587373
cugugcuucuauucucaga

SEQ ID NO: 787311 - RNA, 19 nt, Artificial Sequence
  Description of Artificial Sequence: Synthetic oligonucleotide
  Antisense strand to SEQ ID NO: 787310
ucugagaauagaagcacag

SEQ ID NO: 787312 - RNA, 19 nt, Artificial Sequence
  Description of Artificial Sequence: Synthetic oligonucleotide
  Sense strand starting at position 1188 of SEQ ID NO: 587373
gucucaucagcugguauaa

SEQ ID NO: 787313 - RNA, 19 nt, Artificial Sequence
  Description of Artificial Sequence: Synthetic oligonucleotide
  Antisense strand to SEQ ID NO: 787312
uuauaccagcugaugagac

SEQ ID NO: 787314 - RNA, 19 nt, Artificial Sequence
  Description of Artificial Sequence: Synthetic oligonucleotide
  Sense strand starting at position 1206 of SEQ ID NO: 587373
auaaucuucccuugaagag

SEQ ID NO: 787315 - RNA, 19 nt, Artificial Sequence
  Description of Artificial Sequence: Synthetic oligonucleotide
  Antisense strand to SEQ ID NO: 787314
cucuucaagggaagauuau

SEQ ID NO: 787316 - RNA, 19 nt, Artificial Sequence
  Description of Artificial Sequence: Synthetic oligonucleotide
  Sense strand starting at position 2055 of SEQ ID NO: 587373
uuggguuguggguacagau

SEQ ID NO: 787317 - RNA, 19 nt, Artificial Sequence
  Description of Artificial Sequence: Synthetic oligonucleotide
  Antisense strand to SEQ ID NO: 787316
aucuguacccacaacccaa

SEQ ID NO: 787318 - RNA, 19 nt, Artificial Sequence
  Description of Artificial Sequence: Synthetic oligonucleotide
  Sense strand starting at position 2343 of SEQ ID NO: 587373
gugcuauaauuugagugaa

SEQ ID NO: 787319 - RNA, 19 nt, Artificial Sequence
  Description of Artificial Sequence: Synthetic oligonucleotide
  Antisense strand to SEQ ID NO: 787318
uucacucaaauuauagcac

SEQ ID NO: 787320 - RNA, 19 nt, Artificial Sequence
  Description of Artificial Sequence: Synthetic oligonucleotide
  Sense strand starting at position 2356 of SEQ ID NO: 587373
agugaaacaugucucauuc

SEQ ID NO: 787321 - RNA, 19 nt, Artificial Sequence
  Description of Artificial Sequence: Synthetic oligonucleotide
  Antisense strand to SEQ ID NO: 787320
gaaugagacauguuucacu

SEQ ID NO: 787322 - RNA, 19 nt, Artificial Sequence
  Description of Artificial Sequence: Synthetic oligonucleotide
  Sense strand starting at position 2742 of SEQ ID NO: 587373
gaguaaagaagguguuuaa

SEQ ID NO: 787323 - RNA, 19 nt, Artificial Sequence
  Description of Artificial Sequence: Synthetic oligonucleotide
  Antisense strand to SEQ ID NO: 787322
uuaaacaccuucuuuacuc

SEQ ID NO: 787324 - RNA, 19 nt, Artificial Sequence
  Description of Artificial Sequence: Synthetic oligonucleotide
  Sense strand starting at position 2828 of SEQ ID NO: 587373
aaugacugucccugugcaa

SEQ ID NO: 787325 - RNA, 19 nt, Artificial Sequence
  Description of Artificial Sequence: Synthetic oligonucleotide
  Antisense strand to SEQ ID NO: 787324
uugcacagggacagucauu

SEQ ID NO: 787326 - RNA, 19 nt, Artificial Sequence
  Description of Artificial Sequence: Synthetic oligonucleotide
  Sense strand starting at position 3026 of SEQ ID NO: 587373
gguuguauuugguugacua

SEQ ID NO: 787327 - RNA, 19 nt, Artificial Sequence
  Description of Artificial Sequence: Synthetic oligonucleotide
  Antisense strand to SEQ ID NO: 787326
uagucaaccaaauacaacc

SEQ ID NO: 787328 - RNA, 19 nt, Artificial Sequence
  Description of Artificial Sequence: Synthetic oligonucleotide
  Sense strand starting at position 3027 of SEQ ID NO: 587373
guuguauuugguugacuau

SEQ ID NO: 787329 - RNA, 19 nt, Artificial Sequence
  Description of Artificial Sequence: Synthetic oligonucleotide
  Antisense strand to SEQ ID NO: 787328
auagucaaccaaauacaac

SEQ ID NO: 787330 - RNA, 19 nt, Artificial Sequence
  Description of Artificial Sequence: Synthetic oligonucleotide
  Sense strand starting at position 3041 of SEQ ID NO: 587373
acuaucaauugggaacuaa

SEQ ID NO: 787331 - RNA, 19 nt, Artificial Sequence
  Description of Artificial Sequence: Synthetic oligonucleotide
  Antisense strand to SEQ ID NO: 787330
uuaguucccaauugauagu

SEQ ID NO: 787332 - RNA, 19 nt, Artificial Sequence
  Description of Artificial Sequence: Synthetic oligonucleotide
  Sense strand starting at position 3088 of SEQ ID NO: 587373
ugaagucaccgugaugucu

SEQ ID NO: 787333 - RNA, 19 nt, Artificial Sequence
  Description of Artificial Sequence: Synthetic oligonucleotide
  Antisense strand to SEQ ID NO: 787332
agacaucacggugacuuca

SEQ ID NO: 787334 - RNA, 19 nt, Artificial Sequence
  Description of Artificial Sequence: Synthetic oligonucleotide
  Sense strand starting at position 3150 of SEQ ID NO: 587373
aaggaucaaggguguguua

SEQ ID NO: 787335 - RNA, 19 nt, Artificial Sequence
  Description of Artificial Sequence: Synthetic oligonucleotide
  Antisense strand to SEQ ID NO: 787334
uaacacacccuugauccuu

SEQ ID NO: 787336 - RNA, 19 nt, Artificial Sequence
  Description of Artificial Sequence: Synthetic oligonucleotide
  Sense strand starting at position 3152 of SEQ ID NO: 587373
ggaucaaggguguguuagu

SEQ ID NO: 787337 - RNA, 19 nt, Artificial Sequence
  Description of Artificial Sequence: Synthetic oligonucleotide
  Antisense strand to SEQ ID NO: 787336
acuaacacacccuugaucc

SEQ ID NO: 787338 - RNA, 19 nt, Artificial Sequence
  Description of Artificial Sequence: Synthetic oligonucleotide
  Sense strand starting at position 3153 of SEQ ID NO: 587373
gaucaaggguguguuaguu

SEQ ID NO: 787339 - RNA, 19 nt, Artificial Sequence
  Description of Artificial Sequence: Synthetic oligonucleotide
  Antisense strand to SEQ ID NO: 787338
aacuaacacacccuugauc

SEQ ID NO: 787340 - RNA, 19 nt, Artificial Sequence
  Description of Artificial Sequence: Synthetic oligonucleotide
  Sense strand starting at position 3165 of SEQ ID NO: 587373
guuaguucugggagugugu

SEQ ID NO: 787341 - RNA, 19 nt, Artificial Sequence
  Description of Artificial Sequence: Synthetic oligonucleotide
  Antisense strand to SEQ ID NO: 787340
acacacucccagaacuaac

SEQ ID NO: 787342 - RNA, 19 nt, Artificial Sequence
  Description of Artificial Sequence: Synthetic oligonucleotide
  Sense strand starting at position 3308 of SEQ ID NO: 587373
ggaccagucuugguucuuu

SEQ ID NO: 787343 - RNA, 19 nt, Artificial Sequence
  Description of Artificial Sequence: Synthetic oligonucleotide
  Antisense strand to SEQ ID NO: 787342
aaagaaccaagacuggucc

SEQ ID NO: 787344 - RNA, 19 nt, Artificial Sequence
  Description of Artificial Sequence: Synthetic oligonucleotide
  Sense strand starting at position 3317 of SEQ ID NO: 587373
uugguucuuucucuccaga

SEQ ID NO: 787345 - RNA, 19 nt, Artificial Sequence
  Description of Artificial Sequence: Synthetic oligonucleotide
  Antisense strand to SEQ ID NO: 787344
ucuggagagaaagaaccaa

SEQ ID NO: 787346 - RNA, 19 nt, Artificial Sequence
  Description of Artificial Sequence: Synthetic oligonucleotide
  Sense strand starting at position 3319 of SEQ ID NO: 587373
gguucuuucucuccagaag

SEQ ID NO: 787347 - RNA, 19 nt, Artificial Sequence
  Description of Artificial Sequence: Synthetic oligonucleotide
  Antisense strand to SEQ ID NO: 787346
cuucuggagagaaagaacc

SEQ ID NO: 787348 - RNA, 19 nt, Artificial Sequence
  Description of Artificial Sequence: Synthetic oligonucleotide
  Sense strand starting at position 3389 of SEQ ID NO: 587373
ugaauucuaaugggaguca

SEQ ID NO: 787349 - RNA, 19 nt, Artificial Sequence
  Description of Artificial Sequence: Synthetic oligonucleotide
  Antisense strand to SEQ ID NO: 787348
ugacucccauuagaauuca

SEQ ID NO: 787350 - RNA, 19 nt, Artificial Sequence
  Description of Artificial Sequence: Synthetic oligonucleotide
  Sense strand starting at position 3472 of SEQ ID NO: 587373
auaacucuuugagccaaga

SEQ ID NO: 787351 - RNA, 19 nt, Artificial Sequence
  Description of Artificial Sequence: Synthetic oligonucleotide
  Antisense strand to SEQ ID NO: 787350
ucuuggcucaaagaguuau

SEQ ID NO: 787352 - RNA, 19 nt, Artificial Sequence
  Description of Artificial Sequence: Synthetic oligonucleotide
  Sense strand starting at position 3493 of SEQ ID NO: 587373
ggagcucaaucagcagauu

SEQ ID NO: 787353 - RNA, 19 nt, Artificial Sequence
  Description of Artificial Sequence: Synthetic oligonucleotide
  Antisense strand to SEQ ID NO: 787352
aaucugcugauugagcucc

SEQ ID NO: 787354 - RNA, 19 nt, Artificial Sequence
  Description of Artificial Sequence: Synthetic oligonucleotide
  Sense strand starting at position 3518 of SEQ ID NO: 587373
uuuagauagguagaugcua

SEQ ID NO: 787355 - RNA, 19 nt, Artificial Sequence
  Description of Artificial Sequence: Synthetic oligonucleotide
  Antisense strand to SEQ ID NO: 787354
uagcaucuaccuaucuaaa

SEQ ID NO: 787356 - RNA, 19 nt, Artificial Sequence
  Description of Artificial Sequence: Synthetic oligonucleotide
  Sense strand starting at position 3646 of SEQ ID NO: 587373
acagucuuacuaugucaga

SEQ ID NO: 787357 - RNA, 19 nt, Artificial Sequence
  Description of Artificial Sequence: Synthetic oligonucleotide
  Antisense strand to SEQ ID NO: 787356
ucugacauaguaagacugu

SEQ ID NO: 787358 - RNA, 19 nt, Artificial Sequence
  Description of Artificial Sequence: Synthetic oligonucleotide
  Sense strand starting at position 3661 of SEQ ID NO: 587373
cagacauaacgauggcauu

SEQ ID NO: 787359 - RNA, 19 nt, Artificial Sequence
  Description of Artificial Sequence: Synthetic oligonucleotide
  Antisense strand to SEQ ID NO: 787358
aaugccaucguuaugucug

SEQ ID NO: 787360 - RNA, 19 nt, Artificial Sequence
  Description of Artificial Sequence: Synthetic oligonucleotide
  Sense strand starting at position 3882 of SEQ ID NO: 587373
cuugucaacuaguuuggga

SEQ ID NO: 787361 - RNA, 19 nt, Artificial Sequence
  Description of Artificial Sequence: Synthetic oligonucleotide
  Antisense strand to SEQ ID NO: 787360
ucccaaacuaguugacaag

SEQ ID NO: 787362 - RNA, 19 nt, Artificial Sequence
  Description of Artificial Sequence: Synthetic oligonucleotide
  Sense strand starting at position 3891 of SEQ ID NO: 587373
uaguuugggagcugggaau

SEQ ID NO: 787363 - RNA, 19 nt, Artificial Sequence
  Description of Artificial Sequence: Synthetic oligonucleotide
  Antisense strand to SEQ ID NO: 787362
auucccagcucccaaacua

SEQ ID NO: 787364 - RNA, 19 nt, Artificial Sequence
  Description of Artificial Sequence: Synthetic oligonucleotide
  Sense strand starting at position 3910 of SEQ ID NO: 587373
uggagauugggcugugaca

SEQ ID NO: 787365 - RNA, 19 nt, Artificial Sequence
  Description of Artificial Sequence: Synthetic oligonucleotide
  Antisense strand to SEQ ID NO: 787364
ugucacagcccaaucucca

SEQ ID NO: 787366 - RNA, 19 nt, Artificial Sequence
  Description of Artificial Sequence: Synthetic oligonucleotide
  Sense strand starting at position 3912 of SEQ ID NO: 587373
gagauugggcugugacaau

SEQ ID NO: 787367 - RNA, 19 nt, Artificial Sequence
  Description of Artificial Sequence: Synthetic oligonucleotide
  Antisense strand to SEQ ID NO: 787366
auugucacagcccaaucuc

SEQ ID NO: 787368 - RNA, 19 nt, Artificial Sequence
  Description of Artificial Sequence: Synthetic oligonucleotide
  Sense strand starting at position 137 of SEQ ID NO: 587374
aagugaauaucugaggaag

SEQ ID NO: 787369 - RNA, 19 nt, Artificial Sequence
  Description of Artificial Sequence: Synthetic oligonucleotide
  Antisense strand to SEQ ID NO: 787368
cuuccucagauauucacuu

SEQ ID NO: 787370 - RNA, 19 nt, Artificial Sequence
  Description of Artificial Sequence: Synthetic oligonucleotide
  Sense strand starting at position 154 of SEQ ID NO: 587374
agagccaguuuccuuauuu

SEQ ID NO: 787371 - RNA, 19 nt, Artificial Sequence
  Description of Artificial Sequence: Synthetic oligonucleotide
  Antisense strand to SEQ ID NO: 787370
aaauaaggaaacuggcucu

SEQ ID NO: 787372 - RNA, 19 nt, Artificial Sequence
  Description of Artificial Sequence: Synthetic oligonucleotide
  Sense strand starting at position 381 of SEQ ID NO: 587374
ccugauaacccuuggauaa

SEQ ID NO: 787373 - RNA, 19 nt, Artificial Sequence
  Description of Artificial Sequence: Synthetic oligonucleotide
  Antisense strand to SEQ ID NO: 787372
uuauccaaggguuaucagg

SEQ ID NO: 787374 - RNA, 19 nt, Artificial Sequence
  Description of Artificial Sequence: Synthetic oligonucleotide
  Sense strand starting at position 382 of SEQ ID NO: 587374
cugauaacccuuggauaau

SEQ ID NO: 787375 - RNA, 19 nt, Artificial Sequence
  Description of Artificial Sequence: Synthetic oligonucleotide
  Antisense strand to SEQ ID NO: 787374
auuauccaaggguuaucag

SEQ ID NO: 787376 - RNA, 19 nt, Artificial Sequence
  Description of Artificial Sequence: Synthetic oligonucleotide
  Sense strand starting at position 434 of SEQ ID NO: 587374
uucuacuuucuuugaacga

SEQ ID NO: 787377 - RNA, 19 nt, Artificial Sequence
  Description of Artificial Sequence: Synthetic oligonucleotide
  Antisense strand to SEQ ID NO: 787376
ucguucaaagaaaguagaa

SEQ ID NO: 787378 - RNA, 19 nt, Artificial Sequence
  Description of Artificial Sequence: Synthetic oligonucleotide
  Sense strand starting at position 439 of SEQ ID NO: 587374
cuuucuuugaacgaaaggu

SEQ ID NO: 787379 - RNA, 19 nt, Artificial Sequence
  Description of Artificial Sequence: Synthetic oligonucleotide
  Antisense strand to SEQ ID NO: 787378
accuuucguucaaagaaag

SEQ ID NO: 787380 - RNA, 19 nt, Artificial Sequence
  Description of Artificial Sequence: Synthetic oligonucleotide
  Sense strand starting at position 448 of SEQ ID NO: 587374
aacgaaaggugaguccuua

SEQ ID NO: 787381 - RNA, 19 nt, Artificial Sequence
  Description of Artificial Sequence: Synthetic oligonucleotide
  Antisense strand to SEQ ID NO: 787380
uaaggacucaccuuucguu

SEQ ID NO: 787382 - RNA, 19 nt, Artificial Sequence
  Description of Artificial Sequence: Synthetic oligonucleotide
  Sense strand starting at position 452 of SEQ ID NO: 587374
aaaggugaguccuuaagau

SEQ ID NO: 787383 - RNA, 19 nt, Artificial Sequence
  Description of Artificial Sequence: Synthetic oligonucleotide
  Antisense strand to SEQ ID NO: 787382
aucuuaaggacucaccuuu

SEQ ID NO: 787384 - RNA, 19 nt, Artificial Sequence
  Description of Artificial Sequence: Synthetic oligonucleotide
  Sense strand starting at position 475 of SEQ ID NO: 587374
ugaguugucuguuuggaaa

SEQ ID NO: 787385 - RNA, 19 nt, Artificial Sequence
  Description of Artificial Sequence: Synthetic oligonucleotide
  Antisense strand to SEQ ID NO: 787384
uuuccaaacagacaacuca

SEQ ID NO: 787386 - RNA, 19 nt, Artificial Sequence
  Description of Artificial Sequence: Synthetic oligonucleotide
  Sense strand starting at position 685 of SEQ ID NO: 587374
aucuguuccuccuuuggaa

SEQ ID NO: 787387 - RNA, 19 nt, Artificial Sequence
  Description of Artificial Sequence: Synthetic oligonucleotide
  Antisense strand to SEQ ID NO: 787386
uuccaaaggaggaacagau

SEQ ID NO: 787388 - RNA, 19 nt, Artificial Sequence
  Description of Artificial Sequence: Synthetic oligonucleotide
  Sense strand starting at position 729 of SEQ ID NO: 587374
gccucugacucugcaauaa

SEQ ID NO: 787389 - RNA, 19 nt, Artificial Sequence
  Description of Artificial Sequence: Synthetic oligonucleotide
  Antisense strand to SEQ ID NO: 787388
uuauugcagagucagaggc

SEQ ID NO: 787390 - RNA, 19 nt, Artificial Sequence
  Description of Artificial Sequence: Synthetic oligonucleotide
  Sense strand starting at position 753 of SEQ ID NO: 587374
cuguaauguguuuaugauu

SEQ ID NO: 787391 - RNA, 19 nt, Artificial Sequence
  Description of Artificial Sequence: Synthetic oligonucleotide
  Antisense strand to SEQ ID NO: 787390
aaucauaaacacauuacag

SEQ ID NO: 787392 - RNA, 19 nt, Artificial Sequence
  Description of Artificial Sequence: Synthetic oligonucleotide
  Sense strand starting at position 761 of SEQ ID NO: 587374
uguuuaugauuccuccaug

SEQ ID NO: 787393 - RNA, 19 nt, Artificial Sequence
  Description of Artificial Sequence: Synthetic oligonucleotide
  Antisense strand to SEQ ID NO: 787392
cauggaggaaucauaaaca

SEQ ID NO: 787394 - RNA, 19 nt, Artificial Sequence
  Description of Artificial Sequence: Synthetic oligonucleotide
  Sense strand starting at position 762 of SEQ ID NO: 587374
guuuaugauuccuccauga

SEQ ID NO: 787395 - RNA, 19 nt, Artificial Sequence
  Description of Artificial Sequence: Synthetic oligonucleotide
  Antisense strand to SEQ ID NO: 787394
ucauggaggaaucauaaac

SEQ ID NO: 787396 - RNA, 19 nt, Artificial Sequence
  Description of Artificial Sequence: Synthetic oligonucleotide
  Sense strand starting at position 1057 of SEQ ID NO: 587374
ugugguguccucagaggua

SEQ ID NO: 787397 - RNA, 19 nt, Artificial Sequence
  Description of Artificial Sequence: Synthetic oligonucleotide
  Antisense strand to SEQ ID NO: 787396
uaccucugaggacaccaca

SEQ ID NO: 787398 - RNA, 19 nt, Artificial Sequence
  Description of Artificial Sequence: Synthetic oligonucleotide
  Sense strand starting at position 1205 of SEQ ID NO: 587374
auaaucuucccuugaagag

SEQ ID NO: 787399 - RNA, 19 nt, Artificial Sequence
  Description of Artificial Sequence: Synthetic oligonucleotide
  Antisense strand to SEQ ID NO: 787398
cucuucaagggaagauuau

SEQ ID NO: 787400 - RNA, 19 nt, Artificial Sequence
  Description of Artificial Sequence: Synthetic oligonucleotide
  Sense strand starting at position 1249 of SEQ ID NO: 587374
gcuauuuaguuucuuaaug

SEQ ID NO: 787401 - RNA, 19 nt, Artificial Sequence
  Description of Artificial Sequence: Synthetic oligonucleotide
  Antisense strand to SEQ ID NO: 787400
cauuaagaaacuaaauagc

SEQ ID NO: 787402 - RNA, 19 nt, Artificial Sequence
  Description of Artificial Sequence: Synthetic oligonucleotide
  Sense strand starting at position 1870 of SEQ ID NO: 587374
gucauauuacagugaugac

SEQ ID NO: 787403 - RNA, 19 nt, Artificial Sequence
  Description of Artificial Sequence: Synthetic oligonucleotide
  Antisense strand to SEQ ID NO: 787402
gucaucacuguaauaugac

SEQ ID NO: 787404 - RNA, 19 nt, Artificial Sequence
  Description of Artificial Sequence: Synthetic oligonucleotide
  Sense strand starting at position 1949 of SEQ ID NO: 587374
ucacucaguuaauuaggaa

SEQ ID NO: 787405 - RNA, 19 nt, Artificial Sequence
  Description of Artificial Sequence: Synthetic oligonucleotide
  Antisense strand to SEQ ID NO: 787404
uuccuaauuaacugaguga

SEQ ID NO: 787406 - RNA, 19 nt, Artificial Sequence
  Description of Artificial Sequence: Synthetic oligonucleotide
  Sense strand starting at position 2054 of SEQ ID NO: 587374
uuggguuguggguacagau

SEQ ID NO: 787407 - RNA, 19 nt, Artificial Sequence
  Description of Artificial Sequence: Synthetic oligonucleotide
  Antisense strand to SEQ ID NO: 787406
aucuguacccacaacccaa

SEQ ID NO: 787408 - RNA, 19 nt, Artificial Sequence
  Description of Artificial Sequence: Synthetic oligonucleotide
  Sense strand starting at position 2355 of SEQ ID NO: 587374
agugaaacaugucucauuc

SEQ ID NO: 787409 - RNA, 19 nt, Artificial Sequence
  Description of Artificial Sequence: Synthetic oligonucleotide
  Antisense strand to SEQ ID NO: 787408
gaaugagacauguuucacu

SEQ ID NO: 787410 - RNA, 19 nt, Artificial Sequence
  Description of Artificial Sequence: Synthetic oligonucleotide
  Sense strand starting at position 2741 of SEQ ID NO: 587374
gaguaaagaagguguuuaa

SEQ ID NO: 787411 - RNA, 19 nt, Artificial Sequence
  Description of Artificial Sequence: Synthetic oligonucleotide
  Antisense strand to SEQ ID NO: 787410
uuaaacaccuucuuuacuc

SEQ ID NO: 787412 - RNA, 19 nt, Artificial Sequence
  Description of Artificial Sequence: Synthetic oligonucleotide
  Sense strand starting at position 3025 of SEQ ID NO: 587374
gguuguauuugguugacua

SEQ ID NO: 787413 - RNA, 19 nt, Artificial Sequence
  Description of Artificial Sequence: Synthetic oligonucleotide
  Antisense strand to SEQ ID NO: 787412
uagucaaccaaauacaacc

SEQ ID NO: 787414 - RNA, 19 nt, Artificial Sequence
  Description of Artificial Sequence: Synthetic oligonucleotide
  Sense strand starting at position 3026 of SEQ ID NO: 587374
guuguauuugguugacuau

SEQ ID NO: 787415 - RNA, 19 nt, Artificial Sequence
  Description of Artificial Sequence: Synthetic oligonucleotide
  Antisense strand to SEQ ID NO: 787414
auagucaaccaaauacaac

SEQ ID NO: 787416 - RNA, 19 nt, Artificial Sequence
  Description of Artificial Sequence: Synthetic oligonucleotide
  Sense strand starting at position 3040 of SEQ ID NO: 587374
acuaucaauugggaacuaa

SEQ ID NO: 787417 - RNA, 19 nt, Artificial Sequence
  Description of Artificial Sequence: Synthetic oligonucleotide
  Antisense strand to SEQ ID NO: 787416
uuaguucccaauugauagu

SEQ ID NO: 787418 - RNA, 19 nt, Artificial Sequence
  Description of Artificial Sequence: Synthetic oligonucleotide
  Sense strand starting at position 3087 of SEQ ID NO: 587374
ugaagucaccgugaugucu

SEQ ID NO: 787419 - RNA, 19 nt, Artificial Sequence
  Description of Artificial Sequence: Synthetic oligonucleotide
  Antisense strand to SEQ ID NO: 787418
agacaucacggugacuuca

SEQ ID NO: 787420 - RNA, 19 nt, Artificial Sequence
  Description of Artificial Sequence: Synthetic oligonucleotide
  Sense strand starting at position 3149 of SEQ ID NO: 587374
aaggaucaaggguguguua

SEQ ID NO: 787421 - RNA, 19 nt, Artificial Sequence
  Description of Artificial Sequence: Synthetic oligonucleotide
  Antisense strand to SEQ ID NO: 787420
uaacacacccuugauccuu

SEQ ID NO: 787422 - RNA, 19 nt, Artificial Sequence
  Description of Artificial Sequence: Synthetic oligonucleotide
  Sense strand starting at position 3152 of SEQ ID NO: 587374
gaucaaggguguguuaguu

SEQ ID NO: 787423 - RNA, 19 nt, Artificial Sequence
  Description of Artificial Sequence: Synthetic oligonucleotide
  Antisense strand to SEQ ID NO: 787422
aacuaacacacccuugauc

SEQ ID NO: 787424 - RNA, 19 nt, Artificial Sequence
  Description of Artificial Sequence: Synthetic oligonucleotide
  Sense strand starting at position 3164 of SEQ ID NO: 587374
guuaguucugggagugugu

SEQ ID NO: 787425 - RNA, 19 nt, Artificial Sequence
  Description of Artificial Sequence: Synthetic oligonucleotide
  Antisense strand to SEQ ID NO: 787424
acacacucccagaacuaac

SEQ ID NO: 787426 - RNA, 19 nt, Artificial Sequence
  Description of Artificial Sequence: Synthetic oligonucleotide
  Sense strand starting at position 3307 of SEQ ID NO: 587374
ggaccagucuugguucuuu

SEQ ID NO: 787427 - RNA, 19 nt, Artificial Sequence
  Description of Artificial Sequence: Synthetic oligonucleotide
  Antisense strand to SEQ ID NO: 787426
aaagaaccaagacuggucc

SEQ ID NO: 787428 - RNA, 19 nt, Artificial Sequence
  Description of Artificial Sequence: Synthetic oligonucleotide
  Sense strand starting at position 3316 of SEQ ID NO: 587374
uugguucuuucucuccaga

SEQ ID NO: 787429 - RNA, 19 nt, Artificial Sequence
  Description of Artificial Sequence: Synthetic oligonucleotide
  Antisense strand to SEQ ID NO: 787428
ucuggagagaaagaaccaa

SEQ ID NO: 787430 - RNA, 19 nt, Artificial Sequence
  Description of Artificial Sequence: Synthetic oligonucleotide
  Sense strand starting at position 3471 of SEQ ID NO: 587374
auaacucuuugagccaaga

SEQ ID NO: 787431 - RNA, 19 nt, Artificial Sequence
  Description of Artificial Sequence: Synthetic oligonucleotide
  Antisense strand to SEQ ID NO: 787430
ucuuggcucaaagaguuau

SEQ ID NO: 787432 - RNA, 19 nt, Artificial Sequence
  Description of Artificial Sequence: Synthetic oligonucleotide
  Sense strand starting at position 3492 of SEQ ID NO: 587374
ggagcucaaucagcagauu

SEQ ID NO: 787433 - RNA, 19 nt, Artificial Sequence
  Description of Artificial Sequence: Synthetic oligonucleotide
  Antisense strand to SEQ ID NO: 787432
aaucugcugauugagcucc

SEQ ID NO: 787434 - RNA, 19 nt, Artificial Sequence
  Description of Artificial Sequence: Synthetic oligonucleotide
  Sense strand starting at position 3517 of SEQ ID NO: 587374
uuuagauagguagaugcua

SEQ ID NO: 787435 - RNA, 19 nt, Artificial Sequence
  Description of Artificial Sequence: Synthetic oligonucleotide
  Antisense strand to SEQ ID NO: 787434
uagcaucuaccuaucuaaa

SEQ ID NO: 787436 - RNA, 19 nt, Artificial Sequence
  Description of Artificial Sequence: Synthetic oligonucleotide
  Sense strand starting at position 3645 of SEQ ID NO: 587374
acagucuuacuaugucaga

SEQ ID NO: 787437 - RNA, 19 nt, Artificial Sequence
  Description of Artificial Sequence: Synthetic oligonucleotide
  Antisense strand to SEQ ID NO: 787436
ucugacauaguaagacugu

SEQ ID NO: 787438 - RNA, 19 nt, Artificial Sequence
  Description of Artificial Sequence: Synthetic oligonucleotide
  Sense strand starting at position 3660 of SEQ ID NO: 587374
cagacauaacgauggcauu

SEQ ID NO: 787439 - RNA, 19 nt, Artificial Sequence
  Description of Artificial Sequence: Synthetic oligonucleotide
  Antisense strand to SEQ ID NO: 787438
aaugccaucguuaugucug

SEQ ID NO: 787440 - RNA, 19 nt, Artificial Sequence
  Description of Artificial Sequence: Synthetic oligonucleotide
  Sense strand starting at position 3881 of SEQ ID NO: 587374
cuugucaacuaguuuggga

SEQ ID NO: 787441 - RNA, 19 nt, Artificial Sequence
  Description of Artificial Sequence: Synthetic oligonucleotide
  Antisense strand to SEQ ID NO: 787440
ucccaaacuaguugacaag

SEQ ID NO: 787442 - RNA, 19 nt, Artificial Sequence
  Description of Artificial Sequence: Synthetic oligonucleotide
  Sense strand starting at position 3890 of SEQ ID NO: 587374
uaguuugggagcugggaau

SEQ ID NO: 787443 - RNA, 19 nt, Artificial Sequence
  Description of Artificial Sequence: Synthetic oligonucleotide
  Antisense strand to SEQ ID NO: 787442
auucccagcucccaaacua

SEQ ID NO: 787444 - RNA, 19 nt, Artificial Sequence
  Description of Artificial Sequence: Synthetic oligonucleotide
  Sense strand starting at position 3909 of SEQ ID NO: 587374
uggagauugggcugugaca

SEQ ID NO: 787445 - RNA, 19 nt, Artificial Sequence
  Description of Artificial Sequence: Synthetic oligonucleotide
  Antisense strand to SEQ ID NO: 787444
ugucacagcccaaucucca

SEQ ID NO: 787446 - RNA, 19 nt, Artificial Sequence
  Description of Artificial Sequence: Synthetic oligonucleotide
  Sense strand starting at position 3911 of SEQ ID NO: 587374
gagauugggcugugacaau

SEQ ID NO: 787447 - RNA, 19 nt, Artificial Sequence
  Description of Artificial Sequence: Synthetic oligonucleotide
  Antisense strand to SEQ ID NO: 787446
auugucacagcccaaucuc

SEQ ID NO: 787448 - RNA, 19 nt, Artificial Sequence
  Description of Artificial Sequence: Synthetic oligonucleotide
  Sense strand starting at position 138 of SEQ ID NO: 587375
aagugaauaucugaggaag

SEQ ID NO: 787449 - RNA, 19 nt, Artificial Sequence
  Description of Artificial Sequence: Synthetic oligonucleotide
  Antisense strand to SEQ ID NO: 787448
cuuccucagauauucacuu

SEQ ID NO: 787450 - RNA, 19 nt, Artificial Sequence
  Description of Artificial Sequence: Synthetic oligonucleotide
  Sense strand starting at position 382 of SEQ ID NO: 587375
ccugauaacccuuggauaa

SEQ ID NO: 787451 - RNA, 19 nt, Artificial Sequence
  Description of Artificial Sequence: Synthetic oligonucleotide
  Antisense strand to SEQ ID NO: 787450
uuauccaaggguuaucagg

SEQ ID NO: 787452 - RNA, 19 nt, Artificial Sequence
  Description of Artificial Sequence: Synthetic oligonucleotide
  Sense strand starting at position 383 of SEQ ID NO: 587375
cugauaacccuuggauaau

SEQ ID NO: 787453 - RNA, 19 nt, Artificial Sequence
  Description of Artificial Sequence: Synthetic oligonucleotide
  Antisense strand to SEQ ID NO: 787452
auuauccaaggguuaucag

SEQ ID NO: 787454 - RNA, 19 nt, Artificial Sequence
  Description of Artificial Sequence: Synthetic oligonucleotide
  Sense strand starting at position 384 of SEQ ID NO: 587375
ugauaacccuuggauaaua

SEQ ID NO: 787455 - RNA, 19 nt, Artificial Sequence
  Description of Artificial Sequence: Synthetic oligonucleotide
  Antisense strand to SEQ ID NO: 787454
uauuauccaaggguuauca

SEQ ID NO: 787456 - RNA, 19 nt, Artificial Sequence
  Description of Artificial Sequence: Synthetic oligonucleotide
  Sense strand starting at position 407 of SEQ ID NO: 587375
ugggcucccuuauagauuu

SEQ ID NO: 787457 - RNA, 19 nt, Artificial Sequence
  Description of Artificial Sequence: Synthetic oligonucleotide
  Antisense strand to SEQ ID NO: 787456
aaaucuauaagggagccca

SEQ ID NO: 787458 - RNA, 19 nt, Artificial Sequence
  Description of Artificial Sequence: Synthetic oligonucleotide
  Sense strand starting at position 435 of SEQ ID NO: 587375
uucuacuuucuuugaacga

SEQ ID NO: 787459 - RNA, 19 nt, Artificial Sequence
  Description of Artificial Sequence: Synthetic oligonucleotide
  Antisense strand to SEQ ID NO: 787458
ucguucaaagaaaguagaa

SEQ ID NO: 787460 - RNA, 19 nt, Artificial Sequence
  Description of Artificial Sequence: Synthetic oligonucleotide
  Sense strand starting at position 440 of SEQ ID NO: 587375
cuuucuuugaacgaaaggu

SEQ ID NO: 787461 - RNA, 19 nt, Artificial Sequence
  Description of Artificial Sequence: Synthetic oligonucleotide
  Antisense strand to SEQ ID NO: 787460
accuuucguucaaagaaag

SEQ ID NO: 787462 - RNA, 19 nt, Artificial Sequence
  Description of Artificial Sequence: Synthetic oligonucleotide
  Sense strand starting at position 449 of SEQ ID NO: 587375
aacgaaaggugaguccuua

SEQ ID NO: 787463 - RNA, 19 nt, Artificial Sequence
  Description of Artificial Sequence: Synthetic oligonucleotide
  Antisense strand to SEQ ID NO: 787462
uaaggacucaccuuucguu

SEQ ID NO: 787464 - RNA, 19 nt, Artificial Sequence
  Description of Artificial Sequence: Synthetic oligonucleotide
  Sense strand starting at position 453 of SEQ ID NO: 587375
aaaggugaguccuuaagau

SEQ ID NO: 787465 - RNA, 19 nt, Artificial Sequence
  Description of Artificial Sequence: Synthetic oligonucleotide
  Antisense strand to SEQ ID NO: 787464
aucuuaaggacucaccuuu

SEQ ID NO: 787466 - RNA, 19 nt, Artificial Sequence
  Description of Artificial Sequence: Synthetic oligonucleotide
  Sense strand starting at position 476 of SEQ ID NO: 587375
ugaguugucuguuuggaaa

SEQ ID NO: 787467 - RNA, 19 nt, Artificial Sequence
  Description of Artificial Sequence: Synthetic oligonucleotide
  Antisense strand to SEQ ID NO: 787466
uuuccaaacagacaacuca

SEQ ID NO: 787468 - RNA, 19 nt, Artificial Sequence
  Description of Artificial Sequence: Synthetic oligonucleotide
  Sense strand starting at position 1058 of SEQ ID NO: 587375
ugugguguccucagaggua

SEQ ID NO: 787469 - RNA, 19 nt, Artificial Sequence
  Description of Artificial Sequence: Synthetic oligonucleotide
  Antisense strand to SEQ ID NO: 787468
uaccucugaggacaccaca

SEQ ID NO: 787470 - RNA, 19 nt, Artificial Sequence
  Description of Artificial Sequence: Synthetic oligonucleotide
  Sense strand starting at position 1123 of SEQ ID NO: 587375
cugugcuucuauucucaga

SEQ ID NO: 787471 - RNA, 19 nt, Artificial Sequence
  Description of Artificial Sequence: Synthetic oligonucleotide
  Antisense strand to SEQ ID NO: 787470
ucugagaauagaagcacag

SEQ ID NO: 787472 - RNA, 19 nt, Artificial Sequence
  Description of Artificial Sequence: Synthetic oligonucleotide
  Sense strand starting at position 1188 of SEQ ID NO: 587375
gucucaucagcugguauaa

SEQ ID NO: 787473 - RNA, 19 nt, Artificial Sequence
  Description of Artificial Sequence: Synthetic oligonucleotide
  Antisense strand to SEQ ID NO: 787472
uuauaccagcugaugagac

SEQ ID NO: 787474 - RNA, 19 nt, Artificial Sequence
  Description of Artificial Sequence: Synthetic oligonucleotide
  Sense strand starting at position 1206 of SEQ ID NO: 587375
auaaucuucccuugaagag

SEQ ID NO: 787475 - RNA, 19 nt, Artificial Sequence
  Description of Artificial Sequence: Synthetic oligonucleotide
  Antisense strand to SEQ ID NO: 787474
cucuucaagggaagauuau

SEQ ID NO: 787476 - RNA, 19 nt, Artificial Sequence
  Description of Artificial Sequence: Synthetic oligonucleotide
  Sense strand starting at position 2055 of SEQ ID NO: 587375
uuggguuguggguacagau

SEQ ID NO: 787477 - RNA, 19 nt, Artificial Sequence
  Description of Artificial Sequence: Synthetic oligonucleotide
  Antisense strand to SEQ ID NO: 787476
aucuguacccacaacccaa

SEQ ID NO: 787478 - RNA, 19 nt, Artificial Sequence
  Description of Artificial Sequence: Synthetic oligonucleotide
  Sense strand starting at position 2343 of SEQ ID NO: 587375
gugcuauaauuugagugaa

SEQ ID NO: 787479 - RNA, 19 nt, Artificial Sequence
  Description of Artificial Sequence: Synthetic oligonucleotide
  Antisense strand to SEQ ID NO: 787478
uucacucaaauuauagcac

SEQ ID NO: 787480 - RNA, 19 nt, Artificial Sequence
  Description of Artificial Sequence: Synthetic oligonucleotide
  Sense strand starting at position 2356 of SEQ ID NO: 587375
agugaaacaugucucauuc

SEQ ID NO: 787481 - RNA, 19 nt, Artificial Sequence
  Description of Artificial Sequence: Synthetic oligonucleotide
  Antisense strand to SEQ ID NO: 787480
gaaugagacauguuucacu

SEQ ID NO: 787482 - RNA, 19 nt, Artificial Sequence
  Description of Artificial Sequence: Synthetic oligonucleotide
  Sense strand starting at position 2742 of SEQ ID NO: 587375
gaguaaagaagguguuuaa

SEQ ID NO: 787483 - RNA, 19 nt, Artificial Sequence
  Description of Artificial Sequence: Synthetic oligonucleotide
  Antisense strand to SEQ ID NO: 787482
uuaaacaccuucuuuacuc

SEQ ID NO: 787484 - RNA, 19 nt, Artificial Sequence
  Description of Artificial Sequence: Synthetic oligonucleotide
  Sense strand starting at position 2828 of SEQ ID NO: 587375
aaugacugucccugugcaa

SEQ ID NO: 787485 - RNA, 19 nt, Artificial Sequence
  Description of Artificial Sequence: Synthetic oligonucleotide
  Antisense strand to SEQ ID NO: 787484
uugcacagggacagucauu

SEQ ID NO: 787486 - RNA, 19 nt, Artificial Sequence
  Description of Artificial Sequence: Synthetic oligonucleotide
  Sense strand starting at position 3026 of SEQ ID NO: 587375
gguuguauuugguugacua

SEQ ID NO: 787487 - RNA, 19 nt, Artificial Sequence
  Description of Artificial Sequence: Synthetic oligonucleotide
  Antisense strand to SEQ ID NO: 787486
uagucaaccaaauacaacc

SEQ ID NO: 787488 - RNA, 19 nt, Artificial Sequence
  Description of Artificial Sequence: Synthetic oligonucleotide
  Sense strand starting at position 3027 of SEQ ID NO: 587375
guuguauuugguugacuau

SEQ ID NO: 787489 - RNA, 19 nt, Artificial Sequence
  Description of Artificial Sequence: Synthetic oligonucleotide
  Antisense strand to SEQ ID NO: 787488
auagucaaccaaauacaac

SEQ ID NO: 787490 - RNA, 19 nt, Artificial Sequence
  Description of Artificial Sequence: Synthetic oligonucleotide
  Sense strand starting at position 3041 of SEQ ID NO: 587375
acuaucaauugggaacuaa

SEQ ID NO: 787491 - RNA, 19 nt, Artificial Sequence
  Description of Artificial Sequence: Synthetic oligonucleotide
  Antisense strand to SEQ ID NO: 787490
uuaguucccaauugauagu

SEQ ID NO: 787492 - RNA, 19 nt, Artificial Sequence
  Description of Artificial Sequence: Synthetic oligonucleotide
  Sense strand starting at position 3088 of SEQ ID NO: 587375
ugaagucaccgugaugucu

SEQ ID NO: 787493 - RNA, 19 nt, Artificial Sequence
  Description of Artificial Sequence: Synthetic oligonucleotide
  Antisense strand to SEQ ID NO: 787492
agacaucacggugacuuca

SEQ ID NO: 787494 - RNA, 19 nt, Artificial Sequence
  Description of Artificial Sequence: Synthetic oligonucleotide
  Sense strand starting at position 3150 of SEQ ID NO: 587375
aaggaucaaggguguguua

SEQ ID NO: 787495 - RNA, 19 nt, Artificial Sequence
  Description of Artificial Sequence: Synthetic oligonucleotide
  Antisense strand to SEQ ID NO: 787494
uaacacacccuugauccuu

SEQ ID NO: 787496 - RNA, 19 nt, Artificial Sequence
  Description of Artificial Sequence: Synthetic oligonucleotide
  Sense strand starting at position 3152 of SEQ ID NO: 587375
ggaucaaggguguguuagu

SEQ ID NO: 787497 - RNA, 19 nt, Artificial Sequence
  Description of Artificial Sequence: Synthetic oligonucleotide
  Antisense strand to SEQ ID NO: 787496
acuaacacacccuugaucc

SEQ ID NO: 787498 - RNA, 19 nt, Artificial Sequence
  Description of Artificial Sequence: Synthetic oligonucleotide
  Sense strand starting at position 3153 of SEQ ID NO: 587375
gaucaaggguguguuaguu

SEQ ID NO: 787499 - RNA, 19 nt, Artificial Sequence
  Description of Artificial Sequence: Synthetic oligonucleotide
  Antisense strand to SEQ ID NO: 787498
aacuaacacacccuugauc

SEQ ID NO: 787500 - RNA, 19 nt, Artificial Sequence
  Description of Artificial Sequence: Synthetic oligonucleotide
  Sense strand starting at position 3165 of SEQ ID NO: 587375
guuaguucugggagugugu

SEQ ID NO: 787501 - RNA, 19 nt, Artificial Sequence
  Description of Artificial Sequence: Synthetic oligonucleotide
  Antisense strand to SEQ ID NO: 787500
acacacucccagaacuaac

SEQ ID NO: 787502 - RNA, 19 nt, Artificial Sequence
  Description of Artificial Sequence: Synthetic oligonucleotide
  Sense strand starting at position 3308 of SEQ ID NO: 587375
ggaccagucuugguucuuu

SEQ ID NO: 787503 - RNA, 19 nt, Artificial Sequence
  Description of Artificial Sequence: Synthetic oligonucleotide
  Antisense strand to SEQ ID NO: 787502
aaagaaccaagacuggucc

SEQ ID NO: 787504 - RNA, 19 nt, Artificial Sequence
  Description of Artificial Sequence: Synthetic oligonucleotide
  Sense strand starting at position 3317 of SEQ ID NO: 587375
uugguucuuucucuccaga

SEQ ID NO: 787505 - RNA, 19 nt, Artificial Sequence
  Description of Artificial Sequence: Synthetic oligonucleotide
  Antisense strand to SEQ ID NO: 787504
ucuggagagaaagaaccaa

SEQ ID NO: 787506 - RNA, 19 nt, Artificial Sequence
  Description of Artificial Sequence: Synthetic oligonucleotide
  Sense strand starting at position 3319 of SEQ ID NO: 587375
gguucuuucucuccagaag

SEQ ID NO: 787507 - RNA, 19 nt, Artificial Sequence
  Description of Artificial Sequence: Synthetic oligonucleotide
  Antisense strand to SEQ ID NO: 787506
cuucuggagagaaagaacc

SEQ ID NO: 787508 - RNA, 19 nt, Artificial Sequence
  Description of Artificial Sequence: Synthetic oligonucleotide
  Sense strand starting at position 3389 of SEQ ID NO: 587375
ugaauucuaaugggaguca

SEQ ID NO: 787509 - RNA, 19 nt, Artificial Sequence
  Description of Artificial Sequence: Synthetic oligonucleotide
  Antisense strand to SEQ ID NO: 787508
ugacucccauuagaauuca

SEQ ID NO: 787510 - RNA, 19 nt, Artificial Sequence
  Description of Artificial Sequence: Synthetic oligonucleotide
  Sense strand starting at position 3472 of SEQ ID NO: 587375
auaacucuuugagccaaga

SEQ ID NO: 787511 - RNA, 19 nt, Artificial Sequence
  Description of Artificial Sequence: Synthetic oligonucleotide
  Antisense strand to SEQ ID NO: 787510
ucuuggcucaaagaguuau

SEQ ID NO: 787512 - RNA, 19 nt, Artificial Sequence
  Description of Artificial Sequence: Synthetic oligonucleotide
  Sense strand starting at position 3493 of SEQ ID NO: 587375
ggagcucaaucagcagauu

SEQ ID NO: 787513 - RNA, 19 nt, Artificial Sequence
  Description of Artificial Sequence: Synthetic oligonucleotide
  Antisense strand to SEQ ID NO: 787512
aaucugcugauugagcucc

SEQ ID NO: 787514 - RNA, 19 nt, Artificial Sequence
  Description of Artificial Sequence: Synthetic oligonucleotide
  Sense strand starting at position 3518 of SEQ ID NO: 587375
uuuagauagguagaugcua

SEQ ID NO: 787515 - RNA, 19 nt, Artificial Sequence
  Description of Artificial Sequence: Synthetic oligonucleotide
  Antisense strand to SEQ ID NO: 787514
uagcaucuaccuaucuaaa

SEQ ID NO: 787516 - RNA, 19 nt, Artificial Sequence
  Description of Artificial Sequence: Synthetic oligonucleotide
  Sense strand starting at position 3646 of SEQ ID NO: 587375
acagucuuacuaugucaga

SEQ ID NO: 787517 - RNA, 19 nt, Artificial Sequence
  Description of Artificial Sequence: Synthetic oligonucleotide
  Antisense strand to SEQ ID NO: 787516
ucugacauaguaagacugu

SEQ ID NO: 787518 - RNA, 19 nt, Artificial Sequence
  Description of Artificial Sequence: Synthetic oligonucleotide
  Sense strand starting at position 3661 of SEQ ID NO: 587375
cagacauaacgauggcauu

SEQ ID NO: 787519 - RNA, 19 nt, Artificial Sequence
  Description of Artificial Sequence: Synthetic oligonucleotide
  Antisense strand to SEQ ID NO: 787518
aaugccaucguuaugucug

SEQ ID NO: 787520 - RNA, 19 nt, Artificial Sequence
  Description of Artificial Sequence: Synthetic oligonucleotide
  Sense strand starting at position 3882 of SEQ ID NO: 587375
cuugucaacuaguuuggga

SEQ ID NO: 787521 - RNA, 19 nt, Artificial Sequence
  Description of Artificial Sequence: Synthetic oligonucleotide
  Antisense strand to SEQ ID NO: 787520
ucccaaacuaguugacaag

SEQ ID NO: 787522 - RNA, 19 nt, Artificial Sequence
  Description of Artificial Sequence: Synthetic oligonucleotide
  Sense strand starting at position 3891 of SEQ ID NO: 587375
uaguuugggagcugggaau

SEQ ID NO: 787523 - RNA, 19 nt, Artificial Sequence
  Description of Artificial Sequence: Synthetic oligonucleotide
  Antisense strand to SEQ ID NO: 787522
auucccagcucccaaacua

SEQ ID NO: 787524 - RNA, 19 nt, Artificial Sequence
  Description of Artificial Sequence: Synthetic oligonucleotide
  Sense strand starting at position 3910 of SEQ ID NO: 587375
uggagauugggcugugaca

SEQ ID NO: 787525 - RNA, 19 nt, Artificial Sequence
  Description of Artificial Sequence: Synthetic oligonucleotide
  Antisense strand to SEQ ID NO: 787524
ugucacagcccaaucucca

SEQ ID NO: 787526 - RNA, 19 nt, Artificial Sequence
  Description of Artificial Sequence: Synthetic oligonucleotide
  Sense strand starting at position 3912 of SEQ ID NO: 587375
gagauugggcugugacaau

SEQ ID NO: 787527 - RNA, 19 nt, Artificial Sequence
  Description of Artificial Sequence: Synthetic oligonucleotide
  Antisense strand to SEQ ID NO: 787526
auugucacagcccaaucuc

SEQ ID NO: 787528 - RNA, 19 nt, Artificial Sequence
  Description of Artificial Sequence: Synthetic oligonucleotide
  Sense strand starting at position 274 of SEQ ID NO: 587376
uuguauuguggaggccaaa

SEQ ID NO: 787529 - RNA, 19 nt, Artificial Sequence
  Description of Artificial Sequence: Synthetic oligonucleotide
  Antisense strand to SEQ ID NO: 787528
uuuggccuccacaauacaa

SEQ ID NO: 787530 - RNA, 19 nt, Artificial Sequence
  Description of Artificial Sequence: Synthetic oligonucleotide
  Sense strand starting at position 292 of SEQ ID NO: 587376
aguuguaucaugcaguuga

SEQ ID NO: 787531 - RNA, 19 nt, Artificial Sequence
  Description of Artificial Sequence: Synthetic oligonucleotide
  Antisense strand to SEQ ID NO: 787530
ucaacugcaugauacaacu

SEQ ID NO: 787532 - RNA, 19 nt, Artificial Sequence
  Description of Artificial Sequence: Synthetic oligonucleotide
  Sense strand starting at position 378 of SEQ ID NO: 587376
guugauguucaugauggaa

SEQ ID NO: 787533 - RNA, 19 nt, Artificial Sequence
  Description of Artificial Sequence: Synthetic oligonucleotide
  Antisense strand to SEQ ID NO: 787532
uuccaucaugaacaucaac

SEQ ID NO: 787534 - RNA, 19 nt, Artificial Sequence
  Description of Artificial Sequence: Synthetic oligonucleotide
  Sense strand starting at position 579 of SEQ ID NO: 587376
gugugugacagccaaacuu

SEQ ID NO: 787535 - RNA, 19 nt, Artificial Sequence
  Description of Artificial Sequence: Synthetic oligonucleotide
  Antisense strand to SEQ ID NO: 787534
aaguuuggcugucacacac

SEQ ID NO: 787536 - RNA, 19 nt, Artificial Sequence
  Description of Artificial Sequence: Synthetic oligonucleotide
  Sense strand starting at position 826 of SEQ ID NO: 587376
caaguucuuugucuuggga

SEQ ID NO: 787537 - RNA, 19 nt, Artificial Sequence
  Description of Artificial Sequence: Synthetic oligonucleotide
  Antisense strand to SEQ ID NO: 787536
ucccaagacaaagaacuug

SEQ ID NO: 787538 - RNA, 19 nt, Artificial Sequence
  Description of Artificial Sequence: Synthetic oligonucleotide
  Sense strand starting at position 834 of SEQ ID NO: 587376
uugucuugggaucaaaggu

SEQ ID NO: 787539 - RNA, 19 nt, Artificial Sequence
  Description of Artificial Sequence: Synthetic oligonucleotide
  Antisense strand to SEQ ID NO: 787538
accuuugaucccaagacaa

SEQ ID NO: 787540 - RNA, 19 nt, Artificial Sequence
  Description of Artificial Sequence: Synthetic oligonucleotide
  Sense strand starting at position 926 of SEQ ID NO: 587376
acagaagugucuuugggaa

SEQ ID NO: 787541 - RNA, 19 nt, Artificial Sequence
  Description of Artificial Sequence: Synthetic oligonucleotide
  Antisense strand to SEQ ID NO: 787540
uucccaaagacacuucugu

SEQ ID NO: 787542 - RNA, 19 nt, Artificial Sequence
  Description of Artificial Sequence: Synthetic oligonucleotide
  Sense strand starting at position 1243 of SEQ ID NO: 587376
gaauuagauuaggugcuca

SEQ ID NO: 787543 - RNA, 19 nt, Artificial Sequence
  Description of Artificial Sequence: Synthetic oligonucleotide
  Antisense strand to SEQ ID NO: 787542
ugagcaccuaaucuaauuc

SEQ ID NO: 787544 - RNA, 19 nt, Artificial Sequence
  Description of Artificial Sequence: Synthetic oligonucleotide
  Sense strand starting at position 1247 of SEQ ID NO: 587376
uagauuaggugcucacuca

SEQ ID NO: 787545 - RNA, 19 nt, Artificial Sequence
  Description of Artificial Sequence: Synthetic oligonucleotide
  Antisense strand to SEQ ID NO: 787544
ugagugagcaccuaaucua

SEQ ID NO: 787546 - RNA, 19 nt, Artificial Sequence
  Description of Artificial Sequence: Synthetic oligonucleotide
  Sense strand starting at position 1248 of SEQ ID NO: 587376
agauuaggugcucacucau

SEQ ID NO: 787547 - RNA, 19 nt, Artificial Sequence
  Description of Artificial Sequence: Synthetic oligonucleotide
  Antisense strand to SEQ ID NO: 787546
augagugagcaccuaaucu

SEQ ID NO: 787548 - RNA, 19 nt, Artificial Sequence
  Description of Artificial Sequence: Synthetic oligonucleotide
  Sense strand starting at position 1307 of SEQ ID NO: 587376
cauagauuaacguaggagu

SEQ ID NO: 787549 - RNA, 19 nt, Artificial Sequence
  Description of Artificial Sequence: Synthetic oligonucleotide
  Antisense strand to SEQ ID NO: 787548
acuccuacguuaaucuaug

SEQ ID NO: 787550 - RNA, 19 nt, Artificial Sequence
  Description of Artificial Sequence: Synthetic oligonucleotide
  Sense strand starting at position 1309 of SEQ ID NO: 587376
uagauuaacguaggaguca

SEQ ID NO: 787551 - RNA, 19 nt, Artificial Sequence
  Description of Artificial Sequence: Synthetic oligonucleotide
  Antisense strand to SEQ ID NO: 787550
ugacuccuacguuaaucua

SEQ ID NO: 787552 - RNA, 19 nt, Artificial Sequence
  Description of Artificial Sequence: Synthetic oligonucleotide
  Sense strand starting at position 1324 of SEQ ID NO: 587376
gucagaagauugcugacau

SEQ ID NO: 787553 - RNA, 19 nt, Artificial Sequence
  Description of Artificial Sequence: Synthetic oligonucleotide
  Antisense strand to SEQ ID NO: 787552
augucagcaaucuucugac

SEQ ID NO: 787554 - RNA, 19 nt, Artificial Sequence
  Description of Artificial Sequence: Synthetic oligonucleotide
  Sense strand starting at position 1335 of SEQ ID NO: 587376
gcugacaucucagucuaaa

SEQ ID NO: 787555 - RNA, 19 nt, Artificial Sequence
  Description of Artificial Sequence: Synthetic oligonucleotide
  Antisense strand to SEQ ID NO: 787554
uuuagacugagaugucagc

SEQ ID NO: 787556 - RNA, 19 nt, Artificial Sequence
  Description of Artificial Sequence: Synthetic oligonucleotide
  Sense strand starting at position 1379 of SEQ ID NO: 587376
ccugcuauuuguguuguca

SEQ ID NO: 787557 - RNA, 19 nt, Artificial Sequence
  Description of Artificial Sequence: Synthetic oligonucleotide
  Antisense strand to SEQ ID NO: 787556
ugacaacacaaauagcagg

SEQ ID NO: 787558 - RNA, 19 nt, Artificial Sequence
  Description of Artificial Sequence: Synthetic oligonucleotide
  Sense strand starting at position 1383 of SEQ ID NO: 587376
cuauuuguguugucaguaa

SEQ ID NO: 787559 - RNA, 19 nt, Artificial Sequence
  Description of Artificial Sequence: Synthetic oligonucleotide
  Antisense strand to SEQ ID NO: 787558
uuacugacaacacaaauag

SEQ ID NO: 787560 - RNA, 19 nt, Artificial Sequence
  Description of Artificial Sequence: Synthetic oligonucleotide
  Sense strand starting at position 1387 of SEQ ID NO: 587376
uuguguugucaguaaauua

SEQ ID NO: 787561 - RNA, 19 nt, Artificial Sequence
  Description of Artificial Sequence: Synthetic oligonucleotide
  Antisense strand to SEQ ID NO: 787560
uaauuuacugacaacacaa

SEQ ID NO: 787562 - RNA, 19 nt, Artificial Sequence
  Description of Artificial Sequence: Synthetic oligonucleotide
  Sense strand starting at position 1404 of SEQ ID NO: 587376
uacguucuugccuacugaa

SEQ ID NO: 787563 - RNA, 19 nt, Artificial Sequence
  Description of Artificial Sequence: Synthetic oligonucleotide
  Antisense strand to SEQ ID NO: 787562
uucaguaggcaagaacgua

SEQ ID NO: 787564 - RNA, 19 nt, Artificial Sequence
  Description of Artificial Sequence: Synthetic oligonucleotide
  Sense strand starting at position 1499 of SEQ ID NO: 587376
ccuuucugugcagaguaaa

SEQ ID NO: 787565 - RNA, 19 nt, Artificial Sequence
  Description of Artificial Sequence: Synthetic oligonucleotide
  Antisense strand to SEQ ID NO: 787564
uuuacucugcacagaaagg

SEQ ID NO: 787566 - RNA, 19 nt, Artificial Sequence
  Description of Artificial Sequence: Synthetic oligonucleotide
  Sense strand starting at position 1617 of SEQ ID NO: 587376
guccucacugcugaggauu

SEQ ID NO: 787567 - RNA, 19 nt, Artificial Sequence
  Description of Artificial Sequence: Synthetic oligonucleotide
  Antisense strand to SEQ ID NO: 787566
aauccucagcagugaggac

SEQ ID NO: 787568 - RNA, 19 nt, Artificial Sequence
  Description of Artificial Sequence: Synthetic oligonucleotide
  Sense strand starting at position 1685 of SEQ ID NO: 587376
acuccugaucccuacguuu

SEQ ID NO: 787569 - RNA, 19 nt, Artificial Sequence
  Description of Artificial Sequence: Synthetic oligonucleotide
  Antisense strand to SEQ ID NO: 787568
aaacguagggaucaggagu

SEQ ID NO: 787570 - RNA, 19 nt, Artificial Sequence
  Description of Artificial Sequence: Synthetic oligonucleotide
  Sense strand starting at position 1735 of SEQ ID NO: 587376
ggcuguaaggugcauacaa

SEQ ID NO: 787571 - RNA, 19 nt, Artificial Sequence
  Description of Artificial Sequence: Synthetic oligonucleotide
  Antisense strand to SEQ ID NO: 787570
uuguaugcaccuuacagcc

SEQ ID NO: 787572 - RNA, 19 nt, Artificial Sequence
  Description of Artificial Sequence: Synthetic oligonucleotide
  Sense strand starting at position 1748 of SEQ ID NO: 587376
auacaaggauugccacaua

SEQ ID NO: 787573 - RNA, 19 nt, Artificial Sequence
  Description of Artificial Sequence: Synthetic oligonucleotide
  Antisense strand to SEQ ID NO: 787572
uauguggcaauccuuguau

SEQ ID NO: 787574 - RNA, 19 nt, Artificial Sequence
  Description of Artificial Sequence: Synthetic oligonucleotide
  Sense strand starting at position 2070 of SEQ ID NO: 587376
gaggcugcucuugauuacu

SEQ ID NO: 787575 - RNA, 19 nt, Artificial Sequence
  Description of Artificial Sequence: Synthetic oligonucleotide
  Antisense strand to SEQ ID NO: 787574
aguaaucaagagcagccuc

SEQ ID NO: 787576 - RNA, 19 nt, Artificial Sequence
  Description of Artificial Sequence: Synthetic oligonucleotide
  Sense strand starting at position 2200 of SEQ ID NO: 587376
guauuaccauagguaaagu

SEQ ID NO: 787577 - RNA, 19 nt, Artificial Sequence
  Description of Artificial Sequence: Synthetic oligonucleotide
  Antisense strand to SEQ ID NO: 787576
acuuuaccuaugguaauac

SEQ ID NO: 787578 - RNA, 19 nt, Artificial Sequence
  Description of Artificial Sequence: Synthetic oligonucleotide
  Sense strand starting at position 2320 of SEQ ID NO: 587376
agaggacuuucucuuccau

SEQ ID NO: 787579 - RNA, 19 nt, Artificial Sequence
  Description of Artificial Sequence: Synthetic oligonucleotide
  Antisense strand to SEQ ID NO: 787578
auggaagagaaaguccucu

SEQ ID NO: 787580 - RNA, 19 nt, Artificial Sequence
  Description of Artificial Sequence: Synthetic oligonucleotide
  Sense strand starting at position 2375 of SEQ ID NO: 587376
cugugauguggcuaaugga

SEQ ID NO: 787581 - RNA, 19 nt, Artificial Sequence
  Description of Artificial Sequence: Synthetic oligonucleotide
  Antisense strand to SEQ ID NO: 787580
uccauuagccacaucacag

SEQ ID NO: 787582 - RNA, 19 nt, Artificial Sequence
  Description of Artificial Sequence: Synthetic oligonucleotide
  Sense strand starting at position 2411 of SEQ ID NO: 587376
ccaagaccucucugaagua

SEQ ID NO: 787583 - RNA, 19 nt, Artificial Sequence
  Description of Artificial Sequence: Synthetic oligonucleotide
  Antisense strand to SEQ ID NO: 787582
uacuucagagaggucuugg

SEQ ID NO: 787584 - RNA, 19 nt, Artificial Sequence
  Description of Artificial Sequence: Synthetic oligonucleotide
  Sense strand starting at position 2481 of SEQ ID NO: 587376
ggaggucauaaaugcguga

SEQ ID NO: 787585 - RNA, 19 nt, Artificial Sequence
  Description of Artificial Sequence: Synthetic oligonucleotide
  Antisense strand to SEQ ID NO: 787584
ucacgcauuuaugaccucc

SEQ ID NO: 787586 - RNA, 19 nt, Artificial Sequence
  Description of Artificial Sequence: Synthetic oligonucleotide
  Sense strand starting at position 2483 of SEQ ID NO: 587376
aggucauaaaugcgugaaa

SEQ ID NO: 787587 - RNA, 19 nt, Artificial Sequence
  Description of Artificial Sequence: Synthetic oligonucleotide
  Antisense strand to SEQ ID NO: 787586
uuucacgcauuuaugaccu

SEQ ID NO: 787588 - RNA, 19 nt, Artificial Sequence
  Description of Artificial Sequence: Synthetic oligonucleotide
  Sense strand starting at position 2591 of SEQ ID NO: 587376
gugggauuguaaccacaga

SEQ ID NO: 787589 - RNA, 19 nt, Artificial Sequence
  Description of Artificial Sequence: Synthetic oligonucleotide
  Antisense strand to SEQ ID NO: 787588
ucugugguuacaaucccac

SEQ ID NO: 787590 - RNA, 19 nt, Artificial Sequence
  Description of Artificial Sequence: Synthetic oligonucleotide
  Sense strand starting at position 2761 of SEQ ID NO: 587376
gguauaugcucccuggauu

SEQ ID NO: 787591 - RNA, 19 nt, Artificial Sequence
  Description of Artificial Sequence: Synthetic oligonucleotide
  Antisense strand to SEQ ID NO: 787590
aauccagggagcauauacc

SEQ ID NO: 787592 - RNA, 19 nt, Artificial Sequence
  Description of Artificial Sequence: Synthetic oligonucleotide
  Sense strand starting at position 2762 of SEQ ID NO: 587376
guauaugcucccuggauuu

SEQ ID NO: 787593 - RNA, 19 nt, Artificial Sequence
  Description of Artificial Sequence: Synthetic oligonucleotide
  Antisense strand to SEQ ID NO: 787592
aaauccagggagcauauac

SEQ ID NO: 787594 - RNA, 19 nt, Artificial Sequence
  Description of Artificial Sequence: Synthetic oligonucleotide
  Sense strand starting at position 2814 of SEQ ID NO: 587376
gcauaugcuccuggcauuu

SEQ ID NO: 787595 - RNA, 19 nt, Artificial Sequence
  Description of Artificial Sequence: Synthetic oligonucleotide
  Antisense strand to SEQ ID NO: 787594
aaaugccaggagcauaugc

SEQ ID NO: 787596 - RNA, 19 nt, Artificial Sequence
  Description of Artificial Sequence: Synthetic oligonucleotide
  Sense strand starting at position 2922 of SEQ ID NO: 587376
acguccaaucuuggaaguu

SEQ ID NO: 787597 - RNA, 19 nt, Artificial Sequence
  Description of Artificial Sequence: Synthetic oligonucleotide
  Antisense strand to SEQ ID NO: 787596
aacuuccaagauuggacgu

SEQ ID NO: 787598 - RNA, 19 nt, Artificial Sequence
  Description of Artificial Sequence: Synthetic oligonucleotide
  Sense strand starting at position 2938 of SEQ ID NO: 587376
guugacauucucgaauaag

SEQ ID NO: 787599 - RNA, 19 nt, Artificial Sequence
  Description of Artificial Sequence: Synthetic oligonucleotide
  Antisense strand to SEQ ID NO: 787598
cuuauucgagaaugucaac

SEQ ID NO: 787600 - RNA, 19 nt, Artificial Sequence
  Description of Artificial Sequence: Synthetic oligonucleotide
  Sense strand starting at position 3201 of SEQ ID NO: 587376
uugggaaaugccugugaaa

SEQ ID NO: 787601 - RNA, 19 nt, Artificial Sequence
  Description of Artificial Sequence: Synthetic oligonucleotide
  Antisense strand to SEQ ID NO: 787600
uuucacaggcauuucccaa

SEQ ID NO: 787602 - RNA, 19 nt, Artificial Sequence
  Description of Artificial Sequence: Synthetic oligonucleotide
  Sense strand starting at position 3837 of SEQ ID NO: 587376
gucggauacucuccucaca

SEQ ID NO: 787603 - RNA, 19 nt, Artificial Sequence
  Description of Artificial Sequence: Synthetic oligonucleotide
  Antisense strand to SEQ ID NO: 787602
ugugaggagaguauccgac

SEQ ID NO: 787604 - RNA, 19 nt, Artificial Sequence
  Description of Artificial Sequence: Synthetic oligonucleotide
  Sense strand starting at position 3912 of SEQ ID NO: 587376
caugucaggcuuuaguaau

SEQ ID NO: 787605 - RNA, 19 nt, Artificial Sequence
  Description of Artificial Sequence: Synthetic oligonucleotide
  Antisense strand to SEQ ID NO: 787604
auuacuaaagccugacaug

SEQ ID NO: 787606 - RNA, 19 nt, Artificial Sequence
  Description of Artificial Sequence: Synthetic oligonucleotide
  Sense strand starting at position 3977 of SEQ ID NO: 587376
ucaucuaugugaccaggau

SEQ ID NO: 787607 - RNA, 19 nt, Artificial Sequence
  Description of Artificial Sequence: Synthetic oligonucleotide
  Antisense strand to SEQ ID NO: 787606
auccuggucacauagauga

SEQ ID NO: 787608 - RNA, 19 nt, Artificial Sequence
  Description of Artificial Sequence: Synthetic oligonucleotide
  Sense strand starting at position 62 of SEQ ID NO: 587377
gcuacaccuggcugauuua

SEQ ID NO: 787609 - RNA, 19 nt, Artificial Sequence
  Description of Artificial Sequence: Synthetic oligonucleotide
  Antisense strand to SEQ ID NO: 787608
uaaaucagccagguguagc

SEQ ID NO: 787610 - RNA, 19 nt, Artificial Sequence
  Description of Artificial Sequence: Synthetic oligonucleotide
  Sense strand starting at position 274 of SEQ ID NO: 587377
uuguauuguggaggccaaa

SEQ ID NO: 787611 - RNA, 19 nt, Artificial Sequence
  Description of Artificial Sequence: Synthetic oligonucleotide
  Antisense strand to SEQ ID NO: 787610
uuuggccuccacaauacaa

SEQ ID NO: 787612 - RNA, 19 nt, Artificial Sequence
  Description of Artificial Sequence: Synthetic oligonucleotide
  Sense strand starting at position 292 of SEQ ID NO: 587377
aguuguaucaugcaguuga

SEQ ID NO: 787613 - RNA, 19 nt, Artificial Sequence
  Description of Artificial Sequence: Synthetic oligonucleotide
  Antisense strand to SEQ ID NO: 787612
ucaacugcaugauacaacu

SEQ ID NO: 787614 - RNA, 19 nt, Artificial Sequence
  Description of Artificial Sequence: Synthetic oligonucleotide
  Sense strand starting at position 378 of SEQ ID NO: 587377
guugauguucaugauggaa

SEQ ID NO: 787615 - RNA, 19 nt, Artificial Sequence
  Description of Artificial Sequence: Synthetic oligonucleotide
  Antisense strand to SEQ ID NO: 787614
uuccaucaugaacaucaac

SEQ ID NO: 787616 - RNA, 19 nt, Artificial Sequence
  Description of Artificial Sequence: Synthetic oligonucleotide
  Sense strand starting at position 579 of SEQ ID NO: 587377
gugugugacagccaaacuu

SEQ ID NO: 787617 - RNA, 19 nt, Artificial Sequence
  Description of Artificial Sequence: Synthetic oligonucleotide
  Antisense strand to SEQ ID NO: 787616
aaguuuggcugucacacac

SEQ ID NO: 787618 - RNA, 19 nt, Artificial Sequence
  Description of Artificial Sequence: Synthetic oligonucleotide
  Sense strand starting at position 826 of SEQ ID NO: 587377
caaguucuuugucuuggga

SEQ ID NO: 787619 - RNA, 19 nt, Artificial Sequence
  Description of Artificial Sequence: Synthetic oligonucleotide
  Antisense strand to SEQ ID NO: 787618
ucccaagacaaagaacuug

SEQ ID NO: 787620 - RNA, 19 nt, Artificial Sequence
  Description of Artificial Sequence: Synthetic oligonucleotide
  Sense strand starting at position 834 of SEQ ID NO: 587377
uugucuugggaucaaaggu

SEQ ID NO: 787621 - RNA, 19 nt, Artificial Sequence
  Description of Artificial Sequence: Synthetic oligonucleotide
  Antisense strand to SEQ ID NO: 787620
accuuugaucccaagacaa

SEQ ID NO: 787622 - RNA, 19 nt, Artificial Sequence
  Description of Artificial Sequence: Synthetic oligonucleotide
  Sense strand starting at position 926 of SEQ ID NO: 587377
acagaagugucuuugggaa

SEQ ID NO: 787623 - RNA, 19 nt, Artificial Sequence
  Description of Artificial Sequence: Synthetic oligonucleotide
  Antisense strand to SEQ ID NO: 787622
uucccaaagacacuucugu

SEQ ID NO: 787624 - RNA, 19 nt, Artificial Sequence
  Description of Artificial Sequence: Synthetic oligonucleotide
  Sense strand starting at position 1247 of SEQ ID NO: 587377
uagauuaggugcucucuca

SEQ ID NO: 787625 - RNA, 19 nt, Artificial Sequence
  Description of Artificial Sequence: Synthetic oligonucleotide
  Antisense strand to SEQ ID NO: 787624
ugagagagcaccuaaucua

SEQ ID NO: 787626 - RNA, 19 nt, Artificial Sequence
  Description of Artificial Sequence: Synthetic oligonucleotide
  Sense strand starting at position 1307 of SEQ ID NO: 587377
cauagauuaacguaggagu

SEQ ID NO: 787627 - RNA, 19 nt, Artificial Sequence
  Description of Artificial Sequence: Synthetic oligonucleotide
  Antisense strand to SEQ ID NO: 787626
acuccuacguuaaucuaug

SEQ ID NO: 787628 - RNA, 19 nt, Artificial Sequence
  Description of Artificial Sequence: Synthetic oligonucleotide
  Sense strand starting at position 1309 of SEQ ID NO: 587377
uagauuaacguaggaguca

SEQ ID NO: 787629 - RNA, 19 nt, Artificial Sequence
  Description of Artificial Sequence: Synthetic oligonucleotide
  Antisense strand to SEQ ID NO: 787628
ugacuccuacguuaaucua

SEQ ID NO: 787630 - RNA, 19 nt, Artificial Sequence
  Description of Artificial Sequence: Synthetic oligonucleotide
  Sense strand starting at position 1324 of SEQ ID NO: 587377
gucagaagauugcugacau

SEQ ID NO: 787631 - RNA, 19 nt, Artificial Sequence
  Description of Artificial Sequence: Synthetic oligonucleotide
  Antisense strand to SEQ ID NO: 787630
augucagcaaucuucugac

SEQ ID NO: 787632 - RNA, 19 nt, Artificial Sequence
  Description of Artificial Sequence: Synthetic oligonucleotide
  Sense strand starting at position 1335 of SEQ ID NO: 587377
gcugacaucucagucuaaa

SEQ ID NO: 787633 - RNA, 19 nt, Artificial Sequence
  Description of Artificial Sequence: Synthetic oligonucleotide
  Antisense strand to SEQ ID NO: 787632
uuuagacugagaugucagc

SEQ ID NO: 787634 - RNA, 19 nt, Artificial Sequence
  Description of Artificial Sequence: Synthetic oligonucleotide
  Sense strand starting at position 1379 of SEQ ID NO: 587377
ccugcuauuuguguuguca

SEQ ID NO: 787635 - RNA, 19 nt, Artificial Sequence
  Description of Artificial Sequence: Synthetic oligonucleotide
  Antisense strand to SEQ ID NO: 787634
ugacaacacaaauagcagg

SEQ ID NO: 787636 - RNA, 19 nt, Artificial Sequence
  Description of Artificial Sequence: Synthetic oligonucleotide
  Sense strand starting at position 1383 of SEQ ID NO: 587377
cuauuuguguugucaguaa

SEQ ID NO: 787637 - RNA, 19 nt, Artificial Sequence
  Description of Artificial Sequence: Synthetic oligonucleotide
  Antisense strand to SEQ ID NO: 787636
uuacugacaacacaaauag

SEQ ID NO: 787638 - RNA, 19 nt, Artificial Sequence
  Description of Artificial Sequence: Synthetic oligonucleotide
  Sense strand starting at position 1618 of SEQ ID NO: 587377
guccucauugcugaggauu

SEQ ID NO: 787639 - RNA, 19 nt, Artificial Sequence
  Description of Artificial Sequence: Synthetic oligonucleotide
  Antisense strand to SEQ ID NO: 787638
aauccucagcaaugaggac

SEQ ID NO: 787640 - RNA, 19 nt, Artificial Sequence
  Description of Artificial Sequence: Synthetic oligonucleotide
  Sense strand starting at position 1686 of SEQ ID NO: 587377
acuccugaucccuacguuu

SEQ ID NO: 787641 - RNA, 19 nt, Artificial Sequence
  Description of Artificial Sequence: Synthetic oligonucleotide
  Antisense strand to SEQ ID NO: 787640
aaacguagggaucaggagu

SEQ ID NO: 787642 - RNA, 19 nt, Artificial Sequence
  Description of Artificial Sequence: Synthetic oligonucleotide
  Sense strand starting at position 1736 of SEQ ID NO: 587377
ggcuguaaggugcauacaa

SEQ ID NO: 787643 - RNA, 19 nt, Artificial Sequence
  Description of Artificial Sequence: Synthetic oligonucleotide
  Antisense strand to SEQ ID NO: 787642
uuguaugcaccuuacagcc

SEQ ID NO: 787644 - RNA, 19 nt, Artificial Sequence
  Description of Artificial Sequence: Synthetic oligonucleotide
  Sense strand starting at position 2071 of SEQ ID NO: 587377
gaggcugcucuugauuacu

SEQ ID NO: 787645 - RNA, 19 nt, Artificial Sequence
  Description of Artificial Sequence: Synthetic oligonucleotide
  Antisense strand to SEQ ID NO: 787644
aguaaucaagagcagccuc

SEQ ID NO: 787646 - RNA, 19 nt, Artificial Sequence
  Description of Artificial Sequence: Synthetic oligonucleotide
  Sense strand starting at position 2201 of SEQ ID NO: 587377
guauuaccauagguaaagu

SEQ ID NO: 787647 - RNA, 19 nt, Artificial Sequence
  Description of Artificial Sequence: Synthetic oligonucleotide
  Antisense strand to SEQ ID NO: 787646
acuuuaccuaugguaauac

SEQ ID NO: 787648 - RNA, 19 nt, Artificial Sequence
  Description of Artificial Sequence: Synthetic oligonucleotide
  Sense strand starting at position 2376 of SEQ ID NO: 587377
uugugauguggcuaaugga

SEQ ID NO: 787649 - RNA, 19 nt, Artificial Sequence
  Description of Artificial Sequence: Synthetic oligonucleotide
  Antisense strand to SEQ ID NO: 787648
uccauuagccacaucacaa

SEQ ID NO: 787650 - RNA, 19 nt, Artificial Sequence
  Description of Artificial Sequence: Synthetic oligonucleotide
  Sense strand starting at position 2412 of SEQ ID NO: 587377
ccaagaccucucugaagua

SEQ ID NO: 787651 - RNA, 19 nt, Artificial Sequence
  Description of Artificial Sequence: Synthetic oligonucleotide
  Antisense strand to SEQ ID NO: 787650
uacuucagagaggucuugg

SEQ ID NO: 787652 - RNA, 19 nt, Artificial Sequence
  Description of Artificial Sequence: Synthetic oligonucleotide
  Sense strand starting at position 2482 of SEQ ID NO: 587377
ggaggucauaaaugcguga

SEQ ID NO: 787653 - RNA, 19 nt, Artificial Sequence
  Description of Artificial Sequence: Synthetic oligonucleotide
  Antisense strand to SEQ ID NO: 787652
ucacgcauuuaugaccucc

SEQ ID NO: 787654 - RNA, 19 nt, Artificial Sequence
  Description of Artificial Sequence: Synthetic oligonucleotide
  Sense strand starting at position 2484 of SEQ ID NO: 587377
aggucauaaaugcgugaaa

SEQ ID NO: 787655 - RNA, 19 nt, Artificial Sequence
  Description of Artificial Sequence: Synthetic oligonucleotide
  Antisense strand to SEQ ID NO: 787654
uuucacgcauuuaugaccu

SEQ ID NO: 787656 - RNA, 19 nt, Artificial Sequence
  Description of Artificial Sequence: Synthetic oligonucleotide
  Sense strand starting at position 2485 of SEQ ID NO: 587377
ggucauaaaugcgugaaag

SEQ ID NO: 787657 - RNA, 19 nt, Artificial Sequence
  Description of Artificial Sequence: Synthetic oligonucleotide
  Antisense strand to SEQ ID NO: 787656
cuuucacgcauuuaugacc

SEQ ID NO: 787658 - RNA, 19 nt, Artificial Sequence
  Description of Artificial Sequence: Synthetic oligonucleotide
  Sense strand starting at position 2486 of SEQ ID NO: 587377
gucauaaaugcgugaaagg

SEQ ID NO: 787659 - RNA, 19 nt, Artificial Sequence
  Description of Artificial Sequence: Synthetic oligonucleotide
  Antisense strand to SEQ ID NO: 787658
ccuuucacgcauuuaugac

SEQ ID NO: 787660 - RNA, 19 nt, Artificial Sequence
  Description of Artificial Sequence: Synthetic oligonucleotide
  Sense strand starting at position 2487 of SEQ ID NO: 587377
ucauaaaugcgugaaaggu

SEQ ID NO: 787661 - RNA, 19 nt, Artificial Sequence
  Description of Artificial Sequence: Synthetic oligonucleotide
  Antisense strand to SEQ ID NO: 787660
accuuucacgcauuuauga

SEQ ID NO: 787662 - RNA, 19 nt, Artificial Sequence
  Description of Artificial Sequence: Synthetic oligonucleotide
  Sense strand starting at position 2510 of SEQ ID NO: 587377
ggacauuucugugauagaa

SEQ ID NO: 787663 - RNA, 19 nt, Artificial Sequence
  Description of Artificial Sequence: Synthetic oligonucleotide
  Antisense strand to SEQ ID NO: 787662
uucuaucacagaaaugucc

SEQ ID NO: 787664 - RNA, 19 nt, Artificial Sequence
  Description of Artificial Sequence: Synthetic oligonucleotide
  Sense strand starting at position 2512 of SEQ ID NO: 587377
acauuucugugauagaaag

SEQ ID NO: 787665 - RNA, 19 nt, Artificial Sequence
  Description of Artificial Sequence: Synthetic oligonucleotide
  Antisense strand to SEQ ID NO: 787664
cuuucuaucacagaaaugu

SEQ ID NO: 787666 - RNA, 19 nt, Artificial Sequence
  Description of Artificial Sequence: Synthetic oligonucleotide
  Sense strand starting at position 2518 of SEQ ID NO: 587377
cugugauagaaagagugua

SEQ ID NO: 787667 - RNA, 19 nt, Artificial Sequence
  Description of Artificial Sequence: Synthetic oligonucleotide
  Antisense strand to SEQ ID NO: 787666
uacacucuuucuaucacag

SEQ ID NO: 787668 - RNA, 19 nt, Artificial Sequence
  Description of Artificial Sequence: Synthetic oligonucleotide
  Sense strand starting at position 2592 of SEQ ID NO: 587377
gugggauuguaaccacaga

SEQ ID NO: 787669 - RNA, 19 nt, Artificial Sequence
  Description of Artificial Sequence: Synthetic oligonucleotide
  Antisense strand to SEQ ID NO: 787668
ucugugguuacaaucccac

SEQ ID NO: 787670 - RNA, 19 nt, Artificial Sequence
  Description of Artificial Sequence: Synthetic oligonucleotide
  Sense strand starting at position 2763 of SEQ ID NO: 587377
guguaugcucccuggauuu

SEQ ID NO: 787671 - RNA, 19 nt, Artificial Sequence
  Description of Artificial Sequence: Synthetic oligonucleotide
  Antisense strand to SEQ ID NO: 787670
aaauccagggagcauacac

SEQ ID NO: 787672 - RNA, 19 nt, Artificial Sequence
  Description of Artificial Sequence: Synthetic oligonucleotide
  Sense strand starting at position 2815 of SEQ ID NO: 587377
gcauaugcuccuggcauuu

SEQ ID NO: 787673 - RNA, 19 nt, Artificial Sequence
  Description of Artificial Sequence: Synthetic oligonucleotide
  Antisense strand to SEQ ID NO: 787672
aaaugccaggagcauaugc

SEQ ID NO: 787674 - RNA, 19 nt, Artificial Sequence
  Description of Artificial Sequence: Synthetic oligonucleotide
  Sense strand starting at position 2922 of SEQ ID NO: 587377
acguccaaucuugaaaguu

SEQ ID NO: 787675 - RNA, 19 nt, Artificial Sequence
  Description of Artificial Sequence: Synthetic oligonucleotide
  Antisense strand to SEQ ID NO: 787674
aacuuucaagauuggacgu

SEQ ID NO: 787676 - RNA, 19 nt, Artificial Sequence
  Description of Artificial Sequence: Synthetic oligonucleotide
  Sense strand starting at position 2938 of SEQ ID NO: 587377
guugacauucucgaauaag

SEQ ID NO: 787677 - RNA, 19 nt, Artificial Sequence
  Description of Artificial Sequence: Synthetic oligonucleotide
  Antisense strand to SEQ ID NO: 787676
cuuauucgagaaugucaac

SEQ ID NO: 787678 - RNA, 19 nt, Artificial Sequence
  Description of Artificial Sequence: Synthetic oligonucleotide
  Sense strand starting at position 3201 of SEQ ID NO: 587377
uugggaaaugccugugaaa

SEQ ID NO: 787679 - RNA, 19 nt, Artificial Sequence
  Description of Artificial Sequence: Synthetic oligonucleotide
  Antisense strand to SEQ ID NO: 787678
uuucacaggcauuucccaa

SEQ ID NO: 787680 - RNA, 19 nt, Artificial Sequence
  Description of Artificial Sequence: Synthetic oligonucleotide
  Sense strand starting at position 3311 of SEQ ID NO: 587377
guuugaguccaucauggac

SEQ ID NO: 787681 - RNA, 19 nt, Artificial Sequence
  Description of Artificial Sequence: Synthetic oligonucleotide
  Antisense strand to SEQ ID NO: 787680
guccaugauggacucaaac

SEQ ID NO: 787682 - RNA, 19 nt, Artificial Sequence
  Description of Artificial Sequence: Synthetic oligonucleotide
  Sense strand starting at position 3837 of SEQ ID NO: 587377
gucggauacucuccucaca

SEQ ID NO: 787683 - RNA, 19 nt, Artificial Sequence
  Description of Artificial Sequence: Synthetic oligonucleotide
  Antisense strand to SEQ ID NO: 787682
ugugaggagaguauccgac

SEQ ID NO: 787684 - RNA, 19 nt, Artificial Sequence
  Description of Artificial Sequence: Synthetic oligonucleotide
  Sense strand starting at position 3912 of SEQ ID NO: 587377
caugucaggcuuuaguaau

SEQ ID NO: 787685 - RNA, 19 nt, Artificial Sequence
  Description of Artificial Sequence: Synthetic oligonucleotide
  Antisense strand to SEQ ID NO: 787684
auuacuaaagccugacaug

SEQ ID NO: 787686 - RNA, 19 nt, Artificial Sequence
  Description of Artificial Sequence: Synthetic oligonucleotide
  Sense strand starting at position 3977 of SEQ ID NO: 587377
ucaucuaugugaccaggau

SEQ ID NO: 787687 - RNA, 19 nt, Artificial Sequence
  Description of Artificial Sequence: Synthetic oligonucleotide
  Antisense strand to SEQ ID NO: 787686
auccuggucacauagauga

SEQ ID NO: 787688 - RNA, 19 nt, Artificial Sequence
  Description of Artificial Sequence: Synthetic oligonucleotide
  Sense strand starting at position 274 of SEQ ID NO: 587378
uuguauuguggaggccaaa

SEQ ID NO: 787689 - RNA, 19 nt, Artificial Sequence
  Description of Artificial Sequence: Synthetic oligonucleotide
  Antisense strand to SEQ ID NO: 787688
uuuggccuccacaauacaa

SEQ ID NO: 787690 - RNA, 19 nt, Artificial Sequence
  Description of Artificial Sequence: Synthetic oligonucleotide
  Sense strand starting at position 292 of SEQ ID NO: 587378
aguuguaucaugcaguuga

SEQ ID NO: 787691 - RNA, 19 nt, Artificial Sequence
  Description of Artificial Sequence: Synthetic oligonucleotide
  Antisense strand to SEQ ID NO: 787690
ucaacugcaugauacaacu

SEQ ID NO: 787692 - RNA, 19 nt, Artificial Sequence
  Description of Artificial Sequence: Synthetic oligonucleotide
  Sense strand starting at position 378 of SEQ ID NO: 587378
guugauguucaugauggaa

SEQ ID NO: 787693 - RNA, 19 nt, Artificial Sequence
  Description of Artificial Sequence: Synthetic oligonucleotide
  Antisense strand to SEQ ID NO: 787692
uuccaucaugaacaucaac

SEQ ID NO: 787694 - RNA, 19 nt, Artificial Sequence
  Description of Artificial Sequence: Synthetic oligonucleotide
  Sense strand starting at position 579 of SEQ ID NO: 587378
gugugugacagccaaacuu

SEQ ID NO: 787695 - RNA, 19 nt, Artificial Sequence
  Description of Artificial Sequence: Synthetic oligonucleotide
  Antisense strand to SEQ ID NO: 787694
aaguuuggcugucacacac

SEQ ID NO: 787696 - RNA, 19 nt, Artificial Sequence
  Description of Artificial Sequence: Synthetic oligonucleotide
  Sense strand starting at position 826 of SEQ ID NO: 587378
caaguucuuugucuuggga

SEQ ID NO: 787697 - RNA, 19 nt, Artificial Sequence
  Description of Artificial Sequence: Synthetic oligonucleotide
  Antisense strand to SEQ ID NO: 787696
ucccaagacaaagaacuug

SEQ ID NO: 787698 - RNA, 19 nt, Artificial Sequence
  Description of Artificial Sequence: Synthetic oligonucleotide
  Sense strand starting at position 834 of SEQ ID NO: 587378
uugucuugggaucaaaggu

SEQ ID NO: 787699 - RNA, 19 nt, Artificial Sequence
  Description of Artificial Sequence: Synthetic oligonucleotide
  Antisense strand to SEQ ID NO: 787698
accuuugaucccaagacaa

SEQ ID NO: 787700 - RNA, 19 nt, Artificial Sequence
  Description of Artificial Sequence: Synthetic oligonucleotide
  Sense strand starting at position 926 of SEQ ID NO: 587378
acagaagugucuuugggaa

SEQ ID NO: 787701 - RNA, 19 nt, Artificial Sequence
  Description of Artificial Sequence: Synthetic oligonucleotide
  Antisense strand to SEQ ID NO: 787700
uucccaaagacacuucugu

SEQ ID NO: 787702 - RNA, 19 nt, Artificial Sequence
  Description of Artificial Sequence: Synthetic oligonucleotide
  Sense strand starting at position 1243 of SEQ ID NO: 587378
gaauuagauuaggugcuca

SEQ ID NO: 787703 - RNA, 19 nt, Artificial Sequence
  Description of Artificial Sequence: Synthetic oligonucleotide
  Antisense strand to SEQ ID NO: 787702
ugagcaccuaaucuaauuc

SEQ ID NO: 787704 - RNA, 19 nt, Artificial Sequence
  Description of Artificial Sequence: Synthetic oligonucleotide
  Sense strand starting at position 1247 of SEQ ID NO: 587378
uagauuaggugcucacuca

SEQ ID NO: 787705 - RNA, 19 nt, Artificial Sequence
  Description of Artificial Sequence: Synthetic oligonucleotide
  Antisense strand to SEQ ID NO: 787704
ugagugagcaccuaaucua

SEQ ID NO: 787706 - RNA, 19 nt, Artificial Sequence
  Description of Artificial Sequence: Synthetic oligonucleotide
  Sense strand starting at position 1248 of SEQ ID NO: 587378
agauuaggugcucacucau

SEQ ID NO: 787707 - RNA, 19 nt, Artificial Sequence
  Description of Artificial Sequence: Synthetic oligonucleotide
  Antisense strand to SEQ ID NO: 787706
augagugagcaccuaaucu

SEQ ID NO: 787708 - RNA, 19 nt, Artificial Sequence
  Description of Artificial Sequence: Synthetic oligonucleotide
  Sense strand starting at position 1307 of SEQ ID NO: 587378
cauagauuaacguaggagu

SEQ ID NO: 787709 - RNA, 19 nt, Artificial Sequence
  Description of Artificial Sequence: Synthetic oligonucleotide
  Antisense strand to SEQ ID NO: 787708
acuccuacguuaaucuaug

SEQ ID NO: 787710 - RNA, 19 nt, Artificial Sequence
  Description of Artificial Sequence: Synthetic oligonucleotide
  Sense strand starting at position 1309 of SEQ ID NO: 587378
uagauuaacguaggaguca

SEQ ID NO: 787711 - RNA, 19 nt, Artificial Sequence
  Description of Artificial Sequence: Synthetic oligonucleotide
  Antisense strand to SEQ ID NO: 787710
ugacuccuacguuaaucua

SEQ ID NO: 787712 - RNA, 19 nt, Artificial Sequence
  Description of Artificial Sequence: Synthetic oligonucleotide
  Sense strand starting at position 1324 of SEQ ID NO: 587378
gucagaagauugcugacau

SEQ ID NO: 787713 - RNA, 19 nt, Artificial Sequence
  Description of Artificial Sequence: Synthetic oligonucleotide
  Antisense strand to SEQ ID NO: 787712
augucagcaaucuucugac

SEQ ID NO: 787714 - RNA, 19 nt, Artificial Sequence
  Description of Artificial Sequence: Synthetic oligonucleotide
  Sense strand starting at position 1335 of SEQ ID NO: 587378
gcugacaucucagucuaaa

SEQ ID NO: 787715 - RNA, 19 nt, Artificial Sequence
  Description of Artificial Sequence: Synthetic oligonucleotide
  Antisense strand to SEQ ID NO: 787714
uuuagacugagaugucagc

SEQ ID NO: 787716 - RNA, 19 nt, Artificial Sequence
  Description of Artificial Sequence: Synthetic oligonucleotide
  Sense strand starting at position 1379 of SEQ ID NO: 587378
ccugcuauuuguguuguca

SEQ ID NO: 787717 - RNA, 19 nt, Artificial Sequence
  Description of Artificial Sequence: Synthetic oligonucleotide
  Antisense strand to SEQ ID NO: 787716
ugacaacacaaauagcagg

SEQ ID NO: 787718 - RNA, 19 nt, Artificial Sequence
  Description of Artificial Sequence: Synthetic oligonucleotide
  Sense strand starting at position 1383 of SEQ ID NO: 587378
cuauuuguguugucaguaa

SEQ ID NO: 787719 - RNA, 19 nt, Artificial Sequence
  Description of Artificial Sequence: Synthetic oligonucleotide
  Antisense strand to SEQ ID NO: 787718
uuacugacaacacaaauag

SEQ ID NO: 787720 - RNA, 19 nt, Artificial Sequence
  Description of Artificial Sequence: Synthetic oligonucleotide
  Sense strand starting at position 1387 of SEQ ID NO: 587378
uuguguugucaguaaauua

SEQ ID NO: 787721 - RNA, 19 nt, Artificial Sequence
  Description of Artificial Sequence: Synthetic oligonucleotide
  Antisense strand to SEQ ID NO: 787720
uaauuuacugacaacacaa

SEQ ID NO: 787722 - RNA, 19 nt, Artificial Sequence
  Description of Artificial Sequence: Synthetic oligonucleotide
  Sense strand starting at position 1404 of SEQ ID NO: 587378
uacguucuugccuacugaa

SEQ ID NO: 787723 - RNA, 19 nt, Artificial Sequence
  Description of Artificial Sequence: Synthetic oligonucleotide
  Antisense strand to SEQ ID NO: 787722
uucaguaggcaagaacgua

SEQ ID NO: 787724 - RNA, 19 nt, Artificial Sequence
  Description of Artificial Sequence: Synthetic oligonucleotide
  Sense strand starting at position 1499 of SEQ ID NO: 587378
ccuuucugugcagaguaaa

SEQ ID NO: 787725 - RNA, 19 nt, Artificial Sequence
  Description of Artificial Sequence: Synthetic oligonucleotide
  Antisense strand to SEQ ID NO: 787724
uuuacucugcacagaaagg

SEQ ID NO: 787726 - RNA, 19 nt, Artificial Sequence
  Description of Artificial Sequence: Synthetic oligonucleotide
  Sense strand starting at position 1617 of SEQ ID NO: 587378
guccucacugcugaggauu

SEQ ID NO: 787727 - RNA, 19 nt, Artificial Sequence
  Description of Artificial Sequence: Synthetic oligonucleotide
  Antisense strand to SEQ ID NO: 787726
aauccucagcagugaggac

SEQ ID NO: 787728 - RNA, 19 nt, Artificial Sequence
  Description of Artificial Sequence: Synthetic oligonucleotide
  Sense strand starting at position 1685 of SEQ ID NO: 587378
acuccugaucccuacguuu

SEQ ID NO: 787729 - RNA, 19 nt, Artificial Sequence
  Description of Artificial Sequence: Synthetic oligonucleotide
  Antisense strand to SEQ ID NO: 787728
aaacguagggaucaggagu

SEQ ID NO: 787730 - RNA, 19 nt, Artificial Sequence
  Description of Artificial Sequence: Synthetic oligonucleotide
  Sense strand starting at position 1735 of SEQ ID NO: 587378
ggcuguaaggugcauacaa

SEQ ID NO: 787731 - RNA, 19 nt, Artificial Sequence
  Description of Artificial Sequence: Synthetic oligonucleotide
  Antisense strand to SEQ ID NO: 787730
uuguaugcaccuuacagcc

SEQ ID NO: 787732 - RNA, 19 nt, Artificial Sequence
  Description of Artificial Sequence: Synthetic oligonucleotide
  Sense strand starting at position 1748 of SEQ ID NO: 587378
auacaaggauugccacaua

SEQ ID NO: 787733 - RNA, 19 nt, Artificial Sequence
  Description of Artificial Sequence: Synthetic oligonucleotide
  Antisense strand to SEQ ID NO: 787732
uauguggcaauccuuguau

SEQ ID NO: 787734 - RNA, 19 nt, Artificial Sequence
  Description of Artificial Sequence: Synthetic oligonucleotide
  Sense strand starting at position 2070 of SEQ ID NO: 587378
gaggcugcucuugauuacu

SEQ ID NO: 787735 - RNA, 19 nt, Artificial Sequence
  Description of Artificial Sequence: Synthetic oligonucleotide
  Antisense strand to SEQ ID NO: 787734
aguaaucaagagcagccuc

SEQ ID NO: 787736 - RNA, 19 nt, Artificial Sequence
  Description of Artificial Sequence: Synthetic oligonucleotide
  Sense strand starting at position 2200 of SEQ ID NO: 587378
guauuaccauagguaaagu

SEQ ID NO: 787737 - RNA, 19 nt, Artificial Sequence
  Description of Artificial Sequence: Synthetic oligonucleotide
  Antisense strand to SEQ ID NO: 787736
acuuuaccuaugguaauac

SEQ ID NO: 787738 - RNA, 19 nt, Artificial Sequence
  Description of Artificial Sequence: Synthetic oligonucleotide
  Sense strand starting at position 2320 of SEQ ID NO: 587378
agaggacuuucucuuccau

SEQ ID NO: 787739 - RNA, 19 nt, Artificial Sequence
  Description of Artificial Sequence: Synthetic oligonucleotide
  Antisense strand to SEQ ID NO: 787738
auggaagagaaaguccucu

SEQ ID NO: 787740 - RNA, 19 nt, Artificial Sequence
  Description of Artificial Sequence: Synthetic oligonucleotide
  Sense strand starting at position 2375 of SEQ ID NO: 587378
cugugauguggcuaaugga

SEQ ID NO: 787741 - RNA, 19 nt, Artificial Sequence
  Description of Artificial Sequence: Synthetic oligonucleotide
  Antisense strand to SEQ ID NO: 787740
uccauuagccacaucacag

SEQ ID NO: 787742 - RNA, 19 nt, Artificial Sequence
  Description of Artificial Sequence: Synthetic oligonucleotide
  Sense strand starting at position 2411 of SEQ ID NO: 587378
ccaagaccucucugaagua

SEQ ID NO: 787743 - RNA, 19 nt, Artificial Sequence
  Description of Artificial Sequence: Synthetic oligonucleotide
  Antisense strand to SEQ ID NO: 787742
uacuucagagaggucuugg

SEQ ID NO: 787744 - RNA, 19 nt, Artificial Sequence
  Description of Artificial Sequence: Synthetic oligonucleotide
  Sense strand starting at position 2481 of SEQ ID NO: 587378
ggaggucauaaaugcguga

SEQ ID NO: 787745 - RNA, 19 nt, Artificial Sequence
  Description of Artificial Sequence: Synthetic oligonucleotide
  Antisense strand to SEQ ID NO: 787744
ucacgcauuuaugaccucc

SEQ ID NO: 787746 - RNA, 19 nt, Artificial Sequence
  Description of Artificial Sequence: Synthetic oligonucleotide
  Sense strand starting at position 2483 of SEQ ID NO: 587378
aggucauaaaugcgugaaa

SEQ ID NO: 787747 - RNA, 19 nt, Artificial Sequence
  Description of Artificial Sequence: Synthetic oligonucleotide
  Antisense strand to SEQ ID NO: 787746
uuucacgcauuuaugaccu

SEQ ID NO: 787748 - RNA, 19 nt, Artificial Sequence
  Description of Artificial Sequence: Synthetic oligonucleotide
  Sense strand starting at position 2591 of SEQ ID NO: 587378
gugggauuguaaccacaga

SEQ ID NO: 787749 - RNA, 19 nt, Artificial Sequence
  Description of Artificial Sequence: Synthetic oligonucleotide
  Antisense strand to SEQ ID NO: 787748
ucugugguuacaaucccac

SEQ ID NO: 787750 - RNA, 19 nt, Artificial Sequence
  Description of Artificial Sequence: Synthetic oligonucleotide
  Sense strand starting at position 2761 of SEQ ID NO: 587378
gguauaugcucccuggauu

SEQ ID NO: 787751 - RNA, 19 nt, Artificial Sequence
  Description of Artificial Sequence: Synthetic oligonucleotide
  Antisense strand to SEQ ID NO: 787750
aauccagggagcauauacc

SEQ ID NO: 787752 - RNA, 19 nt, Artificial Sequence
  Description of Artificial Sequence: Synthetic oligonucleotide
  Sense strand starting at position 2762 of SEQ ID NO: 587378
guauaugcucccuggauuu

SEQ ID NO: 787753 - RNA, 19 nt, Artificial Sequence
  Description of Artificial Sequence: Synthetic oligonucleotide
  Antisense strand to SEQ ID NO: 787752
aaauccagggagcauauac

SEQ ID NO: 787754 - RNA, 19 nt, Artificial Sequence
  Description of Artificial Sequence: Synthetic oligonucleotide
  Sense strand starting at position 2814 of SEQ ID NO: 587378
gcauaugcuccuggcauuu

SEQ ID NO: 787755 - RNA, 19 nt, Artificial Sequence
  Description of Artificial Sequence: Synthetic oligonucleotide
  Antisense strand to SEQ ID NO: 787754
aaaugccaggagcauaugc

SEQ ID NO: 787756 - RNA, 19 nt, Artificial Sequence
  Description of Artificial Sequence: Synthetic oligonucleotide
  Sense strand starting at position 2922 of SEQ ID NO: 587378
acguccaaucuuggaaguu

SEQ ID NO: 787757 - RNA, 19 nt, Artificial Sequence
  Description of Artificial Sequence: Synthetic oligonucleotide
  Antisense strand to SEQ ID NO: 787756
aacuuccaagauuggacgu

SEQ ID NO: 787758 - RNA, 19 nt, Artificial Sequence
  Description of Artificial Sequence: Synthetic oligonucleotide
  Sense strand starting at position 2938 of SEQ ID NO: 587378
guugacauucucgaauaag

SEQ ID NO: 787759 - RNA, 19 nt, Artificial Sequence
  Description of Artificial Sequence: Synthetic oligonucleotide
  Antisense strand to SEQ ID NO: 787758
cuuauucgagaaugucaac

SEQ ID NO: 787760 - RNA, 19 nt, Artificial Sequence
  Description of Artificial Sequence: Synthetic oligonucleotide
  Sense strand starting at position 3201 of SEQ ID NO: 587378
uugggaaaugccugugaaa

SEQ ID NO: 787761 - RNA, 19 nt, Artificial Sequence
  Description of Artificial Sequence: Synthetic oligonucleotide
  Antisense strand to SEQ ID NO: 787760
uuucacaggcauuucccaa

SEQ ID NO: 787762 - RNA, 19 nt, Artificial Sequence
  Description of Artificial Sequence: Synthetic oligonucleotide
  Sense strand starting at position 3837 of SEQ ID NO: 587378
gucggauacucuccucaca

SEQ ID NO: 787763 - RNA, 19 nt, Artificial Sequence
  Description of Artificial Sequence: Synthetic oligonucleotide
  Antisense strand to SEQ ID NO: 787762
ugugaggagaguauccgac

SEQ ID NO: 787764 - RNA, 19 nt, Artificial Sequence
  Description of Artificial Sequence: Synthetic oligonucleotide
  Sense strand starting at position 3912 of SEQ ID NO: 587378
caugucaggcuuuaguaau

SEQ ID NO: 787765 - RNA, 19 nt, Artificial Sequence
  Description of Artificial Sequence: Synthetic oligonucleotide
  Antisense strand to SEQ ID NO: 787764
auuacuaaagccugacaug

SEQ ID NO: 787766 - RNA, 19 nt, Artificial Sequence
  Description of Artificial Sequence: Synthetic oligonucleotide
  Sense strand starting at position 3977 of SEQ ID NO: 587378
ucaucuaugugaccaggau

SEQ ID NO: 787767 - RNA, 19 nt, Artificial Sequence
  Description of Artificial Sequence: Synthetic oligonucleotide
  Antisense strand to SEQ ID NO: 787766
auccuggucacauagauga

SEQ ID NO: 787768 - RNA, 19 nt, Artificial Sequence
  Description of Artificial Sequence: Synthetic oligonucleotide
  Sense strand starting at position 62 of SEQ ID NO: 587379
gcuacaccuggcugauuua

SEQ ID NO: 787769 - RNA, 19 nt, Artificial Sequence
  Description of Artificial Sequence: Synthetic oligonucleotide
  Antisense strand to SEQ ID NO: 787768
uaaaucagccagguguagc

SEQ ID NO: 787770 - RNA, 19 nt, Artificial Sequence
  Description of Artificial Sequence: Synthetic oligonucleotide
  Sense strand starting at position 274 of SEQ ID NO: 587379
uuguauuguggaggccaaa

SEQ ID NO: 787771 - RNA, 19 nt, Artificial Sequence
  Description of Artificial Sequence: Synthetic oligonucleotide
  Antisense strand to SEQ ID NO: 787770
uuuggccuccacaauacaa

SEQ ID NO: 787772 - RNA, 19 nt, Artificial Sequence
  Description of Artificial Sequence: Synthetic oligonucleotide
  Sense strand starting at position 292 of SEQ ID NO: 587379
aguuguaucaugcaguuga

SEQ ID NO: 787773 - RNA, 19 nt, Artificial Sequence
  Description of Artificial Sequence: Synthetic oligonucleotide
  Antisense strand to SEQ ID NO: 787772
ucaacugcaugauacaacu

SEQ ID NO: 787774 - RNA, 19 nt, Artificial Sequence
  Description of Artificial Sequence: Synthetic oligonucleotide
  Sense strand starting at position 378 of SEQ ID NO: 587379
guugauguucaugauggaa

SEQ ID NO: 787775 - RNA, 19 nt, Artificial Sequence
  Description of Artificial Sequence: Synthetic oligonucleotide
  Antisense strand to SEQ ID NO: 787774
uuccaucaugaacaucaac

SEQ ID NO: 787776 - RNA, 19 nt, Artificial Sequence
  Description of Artificial Sequence: Synthetic oligonucleotide
  Sense strand starting at position 579 of SEQ ID NO: 587379
gugugugacagccaaacuu

SEQ ID NO: 787777 - RNA, 19 nt, Artificial Sequence
  Description of Artificial Sequence: Synthetic oligonucleotide
  Antisense strand to SEQ ID NO: 787776
aaguuuggcugucacacac

SEQ ID NO: 787778 - RNA, 19 nt, Artificial Sequence
  Description of Artificial Sequence: Synthetic oligonucleotide
  Sense strand starting at position 826 of SEQ ID NO: 587379
caaguucuuugucuuggga

SEQ ID NO: 787779 - RNA, 19 nt, Artificial Sequence
  Description of Artificial Sequence: Synthetic oligonucleotide
  Antisense strand to SEQ ID NO: 787778
ucccaagacaaagaacuug

SEQ ID NO: 787780 - RNA, 19 nt, Artificial Sequence
  Description of Artificial Sequence: Synthetic oligonucleotide
  Sense strand starting at position 834 of SEQ ID NO: 587379
uugucuugggaucaaaggu

SEQ ID NO: 787781 - RNA, 19 nt, Artificial Sequence
  Description of Artificial Sequence: Synthetic oligonucleotide
  Antisense strand to SEQ ID NO: 787780
accuuugaucccaagacaa

SEQ ID NO: 787782 - RNA, 19 nt, Artificial Sequence
  Description of Artificial Sequence: Synthetic oligonucleotide
  Sense strand starting at position 926 of SEQ ID NO: 587379
acagaagugucuuugggaa

SEQ ID NO: 787783 - RNA, 19 nt, Artificial Sequence
  Description of Artificial Sequence: Synthetic oligonucleotide
  Antisense strand to SEQ ID NO: 787782
uucccaaagacacuucugu

SEQ ID NO: 787784 - RNA, 19 nt, Artificial Sequence
  Description of Artificial Sequence: Synthetic oligonucleotide
  Sense strand starting at position 1247 of SEQ ID NO: 587379
uagauuaggugcucucuca

SEQ ID NO: 787785 - RNA, 19 nt, Artificial Sequence
  Description of Artificial Sequence: Synthetic oligonucleotide
  Antisense strand to SEQ ID NO: 787784
ugagagagcaccuaaucua

SEQ ID NO: 787786 - RNA, 19 nt, Artificial Sequence
  Description of Artificial Sequence: Synthetic oligonucleotide
  Sense strand starting at position 1307 of SEQ ID NO: 587379
cauagauuaacguaggagu

SEQ ID NO: 787787 - RNA, 19 nt, Artificial Sequence
  Description of Artificial Sequence: Synthetic oligonucleotide
  Antisense strand to SEQ ID NO: 787786
acuccuacguuaaucuaug

SEQ ID NO: 787788 - RNA, 19 nt, Artificial Sequence
  Description of Artificial Sequence: Synthetic oligonucleotide
  Sense strand starting at position 1309 of SEQ ID NO: 587379
uagauuaacguaggaguca

SEQ ID NO: 787789 - RNA, 19 nt, Artificial Sequence
  Description of Artificial Sequence: Synthetic oligonucleotide
  Antisense strand to SEQ ID NO: 787788
ugacuccuacguuaaucua

SEQ ID NO: 787790 - RNA, 19 nt, Artificial Sequence
  Description of Artificial Sequence: Synthetic oligonucleotide
  Sense strand starting at position 1324 of SEQ ID NO: 587379
gucagaagauugcugacau

SEQ ID NO: 787791 - RNA, 19 nt, Artificial Sequence
  Description of Artificial Sequence: Synthetic oligonucleotide
  Antisense strand to SEQ ID NO: 787790
augucagcaaucuucugac

SEQ ID NO: 787792 - RNA, 19 nt, Artificial Sequence
  Description of Artificial Sequence: Synthetic oligonucleotide
  Sense strand starting at position 1335 of SEQ ID NO: 587379
gcugacaucucagucuaaa

SEQ ID NO: 787793 - RNA, 19 nt, Artificial Sequence
  Description of Artificial Sequence: Synthetic oligonucleotide
  Antisense strand to SEQ ID NO: 787792
uuuagacugagaugucagc

SEQ ID NO: 787794 - RNA, 19 nt, Artificial Sequence
  Description of Artificial Sequence: Synthetic oligonucleotide
  Sense strand starting at position 1379 of SEQ ID NO: 587379
ccugcuauuuguguuguca

SEQ ID NO: 787795 - RNA, 19 nt, Artificial Sequence
  Description of Artificial Sequence: Synthetic oligonucleotide
  Antisense strand to SEQ ID NO: 787794
ugacaacacaaauagcagg

SEQ ID NO: 787796 - RNA, 19 nt, Artificial Sequence
  Description of Artificial Sequence: Synthetic oligonucleotide
  Sense strand starting at position 1383 of SEQ ID NO: 587379
cuauuuguguugucaguaa

SEQ ID NO: 787797 - RNA, 19 nt, Artificial Sequence
  Description of Artificial Sequence: Synthetic oligonucleotide
  Antisense strand to SEQ ID NO: 787796
uuacugacaacacaaauag

SEQ ID NO: 787798 - RNA, 19 nt, Artificial Sequence
  Description of Artificial Sequence: Synthetic oligonucleotide
  Sense strand starting at position 1618 of SEQ ID NO: 587379
guccucauugcugaggauu

SEQ ID NO: 787799 - RNA, 19 nt, Artificial Sequence
  Description of Artificial Sequence: Synthetic oligonucleotide
  Antisense strand to SEQ ID NO: 787798
aauccucagcaaugaggac

SEQ ID NO: 787800 - RNA, 19 nt, Artificial Sequence
  Description of Artificial Sequence: Synthetic oligonucleotide
  Sense strand starting at position 1686 of SEQ ID NO: 587379
acuccugaucccuacguuu

SEQ ID NO: 787801 - RNA, 19 nt, Artificial Sequence
  Description of Artificial Sequence: Synthetic oligonucleotide
  Antisense strand to SEQ ID NO: 787800
aaacguagggaucaggagu

SEQ ID NO: 787802 - RNA, 19 nt, Artificial Sequence
  Description of Artificial Sequence: Synthetic oligonucleotide
  Sense strand starting at position 1736 of SEQ ID NO: 587379
ggcuguaaggugcauacaa

SEQ ID NO: 787803 - RNA, 19 nt, Artificial Sequence
  Description of Artificial Sequence: Synthetic oligonucleotide
  Antisense strand to SEQ ID NO: 787802
uuguaugcaccuuacagcc

SEQ ID NO: 787804 - RNA, 19 nt, Artificial Sequence
  Description of Artificial Sequence: Synthetic oligonucleotide
  Sense strand starting at position 2071 of SEQ ID NO: 587379
gaggcugcucuugauuacu

SEQ ID NO: 787805 - RNA, 19 nt, Artificial Sequence
  Description of Artificial Sequence: Synthetic oligonucleotide
  Antisense strand to SEQ ID NO: 787804
aguaaucaagagcagccuc

SEQ ID NO: 787806 - RNA, 19 nt, Artificial Sequence
  Description of Artificial Sequence: Synthetic oligonucleotide
  Sense strand starting at position 2201 of SEQ ID NO: 587379
guauuaccauagguaaagu

SEQ ID NO: 787807 - RNA, 19 nt, Artificial Sequence
  Description of Artificial Sequence: Synthetic oligonucleotide
  Antisense strand to SEQ ID NO: 787806
acuuuaccuaugguaauac

SEQ ID NO: 787808 - RNA, 19 nt, Artificial Sequence
  Description of Artificial Sequence: Synthetic oligonucleotide
  Sense strand starting at position 2376 of SEQ ID NO: 587379
uugugauguggcuaaugga

SEQ ID NO: 787809 - RNA, 19 nt, Artificial Sequence
  Description of Artificial Sequence: Synthetic oligonucleotide
  Antisense strand to SEQ ID NO: 787808
uccauuagccacaucacaa

SEQ ID NO: 787810 - RNA, 19 nt, Artificial Sequence
  Description of Artificial Sequence: Synthetic oligonucleotide
  Sense strand starting at position 2412 of SEQ ID NO: 587379
ccaagaccucucugaagua

SEQ ID NO: 787811 - RNA, 19 nt, Artificial Sequence
  Description of Artificial Sequence: Synthetic oligonucleotide
  Antisense strand to SEQ ID NO: 787810
uacuucagagaggucuugg

SEQ ID NO: 787812 - RNA, 19 nt, Artificial Sequence
  Description of Artificial Sequence: Synthetic oligonucleotide
  Sense strand starting at position 2482 of SEQ ID NO: 587379
ggaggucauaaaugcguga

SEQ ID NO: 787813 - RNA, 19 nt, Artificial Sequence
  Description of Artificial Sequence: Synthetic oligonucleotide
  Antisense strand to SEQ ID NO: 787812
ucacgcauuuaugaccucc

SEQ ID NO: 787814 - RNA, 19 nt, Artificial Sequence
  Description of Artificial Sequence: Synthetic oligonucleotide
  Sense strand starting at position 2484 of SEQ ID NO: 587379
aggucauaaaugcgugaaa

SEQ ID NO: 787815 - RNA, 19 nt, Artificial Sequence
  Description of Artificial Sequence: Synthetic oligonucleotide
  Antisense strand to SEQ ID NO: 787814
uuucacgcauuuaugaccu

SEQ ID NO: 787816 - RNA, 19 nt, Artificial Sequence
  Description of Artificial Sequence: Synthetic oligonucleotide
  Sense strand starting at position 2485 of SEQ ID NO: 587379
ggucauaaaugcgugaaag

SEQ ID NO: 787817 - RNA, 19 nt, Artificial Sequence
  Description of Artificial Sequence: Synthetic oligonucleotide
  Antisense strand to SEQ ID NO: 787816
cuuucacgcauuuaugacc

SEQ ID NO: 787818 - RNA, 19 nt, Artificial Sequence
  Description of Artificial Sequence: Synthetic oligonucleotide
  Sense strand starting at position 2486 of SEQ ID NO: 587379
gucauaaaugcgugaaagg

SEQ ID NO: 787819 - RNA, 19 nt, Artificial Sequence
  Description of Artificial Sequence: Synthetic oligonucleotide
  Antisense strand to SEQ ID NO: 787818
ccuuucacgcauuuaugac

SEQ ID NO: 787820 - RNA, 19 nt, Artificial Sequence
  Description of Artificial Sequence: Synthetic oligonucleotide
  Sense strand starting at position 2487 of SEQ ID NO: 587379
ucauaaaugcgugaaaggu

SEQ ID NO: 787821 - RNA, 19 nt, Artificial Sequence
  Description of Artificial Sequence: Synthetic oligonucleotide
  Antisense strand to SEQ ID NO: 787820
accuuucacgcauuuauga

SEQ ID NO: 787822 - RNA, 19 nt, Artificial Sequence
  Description of Artificial Sequence: Synthetic oligonucleotide
  Sense strand starting at position 2510 of SEQ ID NO: 587379
ggacauuucugugauagaa

SEQ ID NO: 787823 - RNA, 19 nt, Artificial Sequence
  Description of Artificial Sequence: Synthetic oligonucleotide
  Antisense strand to SEQ ID NO: 787822
uucuaucacagaaaugucc

SEQ ID NO: 787824 - RNA, 19 nt, Artificial Sequence
  Description of Artificial Sequence: Synthetic oligonucleotide
  Sense strand starting at position 2512 of SEQ ID NO: 587379
acauuucugugauagaaag

SEQ ID NO: 787825 - RNA, 19 nt, Artificial Sequence
  Description of Artificial Sequence: Synthetic oligonucleotide
  Antisense strand to SEQ ID NO: 787824
cuuucuaucacagaaaugu

SEQ ID NO: 787826 - RNA, 19 nt, Artificial Sequence
  Description of Artificial Sequence: Synthetic oligonucleotide
  Sense strand starting at position 2518 of SEQ ID NO: 587379
cugugauagaaagagugua

SEQ ID NO: 787827 - RNA, 19 nt, Artificial Sequence
  Description of Artificial Sequence: Synthetic oligonucleotide
  Antisense strand to SEQ ID NO: 787826
uacacucuuucuaucacag

SEQ ID NO: 787828 - RNA, 19 nt, Artificial Sequence
  Description of Artificial Sequence: Synthetic oligonucleotide
  Sense strand starting at position 2592 of SEQ ID NO: 587379
gugggauuguaaccacaga

SEQ ID NO: 787829 - RNA, 19 nt, Artificial Sequence
  Description of Artificial Sequence: Synthetic oligonucleotide
  Antisense strand to SEQ ID NO: 787828
ucugugguuacaaucccac

SEQ ID NO: 787830 - RNA, 19 nt, Artificial Sequence
  Description of Artificial Sequence: Synthetic oligonucleotide
  Sense strand starting at position 2763 of SEQ ID NO: 587379
guguaugcucccuggauuu

SEQ ID NO: 787831 - RNA, 19 nt, Artificial Sequence
  Description of Artificial Sequence: Synthetic oligonucleotide
  Antisense strand to SEQ ID NO: 787830
aaauccagggagcauacac

SEQ ID NO: 787832 - RNA, 19 nt, Artificial Sequence
  Description of Artificial Sequence: Synthetic oligonucleotide
  Sense strand starting at position 2815 of SEQ ID NO: 587379
gcauaugcuccuggcauuu

SEQ ID NO: 787833 - RNA, 19 nt, Artificial Sequence
  Description of Artificial Sequence: Synthetic oligonucleotide
  Antisense strand to SEQ ID NO: 787832
aaaugccaggagcauaugc

SEQ ID NO: 787834 - RNA, 19 nt, Artificial Sequence
  Description of Artificial Sequence: Synthetic oligonucleotide
  Sense strand starting at position 2922 of SEQ ID NO: 587379
acguccaaucuugaaaguu

SEQ ID NO: 787835 - RNA, 19 nt, Artificial Sequence
  Description of Artificial Sequence: Synthetic oligonucleotide
  Antisense strand to SEQ ID NO: 787834
aacuuucaagauuggacgu

SEQ ID NO: 787836 - RNA, 19 nt, Artificial Sequence
  Description of Artificial Sequence: Synthetic oligonucleotide
  Sense strand starting at position 2938 of SEQ ID NO: 587379
guugacauucucgaauaag

SEQ ID NO: 787837 - RNA, 19 nt, Artificial Sequence
  Description of Artificial Sequence: Synthetic oligonucleotide
  Antisense strand to SEQ ID NO: 787836
cuuauucgagaaugucaac

SEQ ID NO: 787838 - RNA, 19 nt, Artificial Sequence
  Description of Artificial Sequence: Synthetic oligonucleotide
  Sense strand starting at position 3201 of SEQ ID NO: 587379
uugggaaaugccugugaaa

SEQ ID NO: 787839 - RNA, 19 nt, Artificial Sequence
  Description of Artificial Sequence: Synthetic oligonucleotide
  Antisense strand to SEQ ID NO: 787838
uuucacaggcauuucccaa

SEQ ID NO: 787840 - RNA, 19 nt, Artificial Sequence
  Description of Artificial Sequence: Synthetic oligonucleotide
  Sense strand starting at position 3311 of SEQ ID NO: 587379
guuugaguccaucauggac

SEQ ID NO: 787841 - RNA, 19 nt, Artificial Sequence
  Description of Artificial Sequence: Synthetic oligonucleotide
  Antisense strand to SEQ ID NO: 787840
guccaugauggacucaaac

SEQ ID NO: 787842 - RNA, 19 nt, Artificial Sequence
  Description of Artificial Sequence: Synthetic oligonucleotide
  Sense strand starting at position 3837 of SEQ ID NO: 587379
gucggauacucuccucaca

SEQ ID NO: 787843 - RNA, 19 nt, Artificial Sequence
  Description of Artificial Sequence: Synthetic oligonucleotide
  Antisense strand to SEQ ID NO: 787842
ugugaggagaguauccgac

SEQ ID NO: 787844 - RNA, 19 nt, Artificial Sequence
  Description of Artificial Sequence: Synthetic oligonucleotide
  Sense strand starting at position 3912 of SEQ ID NO: 587379
caugucaggcuuuaguaau

SEQ ID NO: 787845 - RNA, 19 nt, Artificial Sequence
  Description of Artificial Sequence: Synthetic oligonucleotide
  Antisense strand to SEQ ID NO: 787844
auuacuaaagccugacaug

SEQ ID NO: 787846 - RNA, 19 nt, Artificial Sequence
  Description of Artificial Sequence: Synthetic oligonucleotide
  Sense strand starting at position 3977 of SEQ ID NO: 587379
ucaucuaugugaccaggau

SEQ ID NO: 787847 - RNA, 19 nt, Artificial Sequence
  Description of Artificial Sequence: Synthetic oligonucleotide
  Antisense strand to SEQ ID NO: 787846
auccuggucacauagauga

SEQ ID NO: 787848 - RNA, 19 nt, Artificial Sequence
  Description of Artificial Sequence: Synthetic oligonucleotide
  Sense strand starting at position 19 of SEQ ID NO: 587380
cucacucacugugugauuu

SEQ ID NO: 787849 - RNA, 19 nt, Artificial Sequence
  Description of Artificial Sequence: Synthetic oligonucleotide
  Antisense strand to SEQ ID NO: 787848
aaaucacacagugagugag

SEQ ID NO: 787850 - RNA, 19 nt, Artificial Sequence
  Description of Artificial Sequence: Synthetic oligonucleotide
  Sense strand starting at position 267 of SEQ ID NO: 587380
gggagcuuuccaggaaaug

SEQ ID NO: 787851 - RNA, 19 nt, Artificial Sequence
  Description of Artificial Sequence: Synthetic oligonucleotide
  Antisense strand to SEQ ID NO: 787850
cauuuccuggaaagcuccc

SEQ ID NO: 787852 - RNA, 19 nt, Artificial Sequence
  Description of Artificial Sequence: Synthetic oligonucleotide
  Sense strand starting at position 268 of SEQ ID NO: 587380
ggagcuuuccaggaaaugu

SEQ ID NO: 787853 - RNA, 19 nt, Artificial Sequence
  Description of Artificial Sequence: Synthetic oligonucleotide
  Antisense strand to SEQ ID NO: 787852
acauuuccuggaaagcucc

SEQ ID NO: 787854 - RNA, 19 nt, Artificial Sequence
  Description of Artificial Sequence: Synthetic oligonucleotide
  Sense strand starting at position 459 of SEQ ID NO: 587380
cucuccaaguguuuauaau

SEQ ID NO: 787855 - RNA, 19 nt, Artificial Sequence
  Description of Artificial Sequence: Synthetic oligonucleotide
  Antisense strand to SEQ ID NO: 787854
auuauaaacacuuggagag

SEQ ID NO: 787856 - RNA, 19 nt, Artificial Sequence
  Description of Artificial Sequence: Synthetic oligonucleotide
  Sense strand starting at position 460 of SEQ ID NO: 587380
ucuccaaguguuuauaauc

SEQ ID NO: 787857 - RNA, 19 nt, Artificial Sequence
  Description of Artificial Sequence: Synthetic oligonucleotide
  Antisense strand to SEQ ID NO: 787856
gauuauaaacacuuggaga

SEQ ID NO: 787858 - RNA, 19 nt, Artificial Sequence
  Description of Artificial Sequence: Synthetic oligonucleotide
  Sense strand starting at position 473 of SEQ ID NO: 587380
auaaucuggcagggaucaa

SEQ ID NO: 787859 - RNA, 19 nt, Artificial Sequence
  Description of Artificial Sequence: Synthetic oligonucleotide
  Antisense strand to SEQ ID NO: 787858
uugaucccugccagauuau

SEQ ID NO: 787860 - RNA, 19 nt, Artificial Sequence
  Description of Artificial Sequence: Synthetic oligonucleotide
  Sense strand starting at position 548 of SEQ ID NO: 587380
accugauaugacugugaag

SEQ ID NO: 787861 - RNA, 19 nt, Artificial Sequence
  Description of Artificial Sequence: Synthetic oligonucleotide
  Antisense strand to SEQ ID NO: 787860
cuucacagucauaucaggu

SEQ ID NO: 787862 - RNA, 19 nt, Artificial Sequence
  Description of Artificial Sequence: Synthetic oligonucleotide
  Sense strand starting at position 550 of SEQ ID NO: 587380
cugauaugacugugaaguu

SEQ ID NO: 787863 - RNA, 19 nt, Artificial Sequence
  Description of Artificial Sequence: Synthetic oligonucleotide
  Antisense strand to SEQ ID NO: 787862
aacuucacagucauaucag

SEQ ID NO: 787864 - RNA, 19 nt, Artificial Sequence
  Description of Artificial Sequence: Synthetic oligonucleotide
  Sense strand starting at position 559 of SEQ ID NO: 587380
cugugaaguuuacuagaca

SEQ ID NO: 787865 - RNA, 19 nt, Artificial Sequence
  Description of Artificial Sequence: Synthetic oligonucleotide
  Antisense strand to SEQ ID NO: 787864
ugucuaguaaacuucacag

SEQ ID NO: 787866 - RNA, 19 nt, Artificial Sequence
  Description of Artificial Sequence: Synthetic oligonucleotide
  Sense strand starting at position 653 of SEQ ID NO: 587380
gguuaagguccauauucuc

SEQ ID NO: 787867 - RNA, 19 nt, Artificial Sequence
  Description of Artificial Sequence: Synthetic oligonucleotide
  Antisense strand to SEQ ID NO: 787866
gagaauauggaccuuaacc

SEQ ID NO: 787868 - RNA, 19 nt, Artificial Sequence
  Description of Artificial Sequence: Synthetic oligonucleotide
  Sense strand starting at position 670 of SEQ ID NO: 587380
ucauuuguccaguggccau

SEQ ID NO: 787869 - RNA, 19 nt, Artificial Sequence
  Description of Artificial Sequence: Synthetic oligonucleotide
  Antisense strand to SEQ ID NO: 787868
auggccacuggacaaauga

SEQ ID NO: 787870 - RNA, 19 nt, Artificial Sequence
  Description of Artificial Sequence: Synthetic oligonucleotide
  Sense strand starting at position 803 of SEQ ID NO: 587380
ugacaaaguccauguaaag

SEQ ID NO: 787871 - RNA, 19 nt, Artificial Sequence
  Description of Artificial Sequence: Synthetic oligonucleotide
  Antisense strand to SEQ ID NO: 787870
cuuuacauggacuuuguca

SEQ ID NO: 787872 - RNA, 19 nt, Artificial Sequence
  Description of Artificial Sequence: Synthetic oligonucleotide
  Sense strand starting at position 957 of SEQ ID NO: 587380
uuucuuucuguauaagaug

SEQ ID NO: 787873 - RNA, 19 nt, Artificial Sequence
  Description of Artificial Sequence: Synthetic oligonucleotide
  Antisense strand to SEQ ID NO: 787872
caucuuauacagaaagaaa

SEQ ID NO: 787874 - RNA, 19 nt, Artificial Sequence
  Description of Artificial Sequence: Synthetic oligonucleotide
  Sense strand starting at position 1091 of SEQ ID NO: 587380
ccucaugcauuugugacau

SEQ ID NO: 787875 - RNA, 19 nt, Artificial Sequence
  Description of Artificial Sequence: Synthetic oligonucleotide
  Antisense strand to SEQ ID NO: 787874
augucacaaaugcaugagg

SEQ ID NO: 787876 - RNA, 19 nt, Artificial Sequence
  Description of Artificial Sequence: Synthetic oligonucleotide
  Sense strand starting at position 1199 of SEQ ID NO: 587380
cuaagaacuugguuuagug

SEQ ID NO: 787877 - RNA, 19 nt, Artificial Sequence
  Description of Artificial Sequence: Synthetic oligonucleotide
  Antisense strand to SEQ ID NO: 787876
cacuaaaccaaguucuuag

SEQ ID NO: 787878 - RNA, 19 nt, Artificial Sequence
  Description of Artificial Sequence: Synthetic oligonucleotide
  Sense strand starting at position 1203 of SEQ ID NO: 587380
gaacuugguuuagugagca

SEQ ID NO: 787879 - RNA, 19 nt, Artificial Sequence
  Description of Artificial Sequence: Synthetic oligonucleotide
  Antisense strand to SEQ ID NO: 787878
ugcucacuaaaccaaguuc

SEQ ID NO: 787880 - RNA, 19 nt, Artificial Sequence
  Description of Artificial Sequence: Synthetic oligonucleotide
  Sense strand starting at position 1735 of SEQ ID NO: 587380
ugcuguuugcucuuaguaa

SEQ ID NO: 787881 - RNA, 19 nt, Artificial Sequence
  Description of Artificial Sequence: Synthetic oligonucleotide
  Antisense strand to SEQ ID NO: 787880
uuacuaagagcaaacagca

SEQ ID NO: 787882 - RNA, 19 nt, Artificial Sequence
  Description of Artificial Sequence: Synthetic oligonucleotide
  Sense strand starting at position 1791 of SEQ ID NO: 587380
ccaugagagcuugaccauu

SEQ ID NO: 787883 - RNA, 19 nt, Artificial Sequence
  Description of Artificial Sequence: Synthetic oligonucleotide
  Antisense strand to SEQ ID NO: 787882
aauggucaagcucucaugg

SEQ ID NO: 787884 - RNA, 19 nt, Artificial Sequence
  Description of Artificial Sequence: Synthetic oligonucleotide
  Sense strand starting at position 1793 of SEQ ID NO: 587380
augagagcuugaccauuaa

SEQ ID NO: 787885 - RNA, 19 nt, Artificial Sequence
  Description of Artificial Sequence: Synthetic oligonucleotide
  Antisense strand to SEQ ID NO: 787884
uuaauggucaagcucucau

SEQ ID NO: 787886 - RNA, 19 nt, Artificial Sequence
  Description of Artificial Sequence: Synthetic oligonucleotide
  Sense strand starting at position 1797 of SEQ ID NO: 587380
gagcuugaccauuaagguc

SEQ ID NO: 787887 - RNA, 19 nt, Artificial Sequence
  Description of Artificial Sequence: Synthetic oligonucleotide
  Antisense strand to SEQ ID NO: 787886
gaccuuaauggucaagcuc

SEQ ID NO: 787888 - RNA, 19 nt, Artificial Sequence
  Description of Artificial Sequence: Synthetic oligonucleotide
  Sense strand starting at position 2186 of SEQ ID NO: 587380
caggcuagagguugaaaga

SEQ ID NO: 787889 - RNA, 19 nt, Artificial Sequence
  Description of Artificial Sequence: Synthetic oligonucleotide
  Antisense strand to SEQ ID NO: 787888
ucuuucaaccucuagccug

SEQ ID NO: 787890 - RNA, 19 nt, Artificial Sequence
  Description of Artificial Sequence: Synthetic oligonucleotide
  Sense strand starting at position 2216 of SEQ ID NO: 587380
gugaguuuccaccauacua

SEQ ID NO: 787891 - RNA, 19 nt, Artificial Sequence
  Description of Artificial Sequence: Synthetic oligonucleotide
  Antisense strand to SEQ ID NO: 787890
uaguaugguggaaacucac

SEQ ID NO: 787892 - RNA, 19 nt, Artificial Sequence
  Description of Artificial Sequence: Synthetic oligonucleotide
  Sense strand starting at position 2336 of SEQ ID NO: 587380
guuguaagaaucuaguaug

SEQ ID NO: 787893 - RNA, 19 nt, Artificial Sequence
  Description of Artificial Sequence: Synthetic oligonucleotide
  Antisense strand to SEQ ID NO: 787892
cauacuagauucuuacaac

SEQ ID NO: 787894 - RNA, 19 nt, Artificial Sequence
  Description of Artificial Sequence: Synthetic oligonucleotide
  Sense strand starting at position 2381 of SEQ ID NO: 587380
uguggaaugcuuggaagga

SEQ ID NO: 787895 - RNA, 19 nt, Artificial Sequence
  Description of Artificial Sequence: Synthetic oligonucleotide
  Antisense strand to SEQ ID NO: 787894
uccuuccaagcauuccaca

SEQ ID NO: 787896 - RNA, 19 nt, Artificial Sequence
  Description of Artificial Sequence: Synthetic oligonucleotide
  Sense strand starting at position 2596 of SEQ ID NO: 587380
acaugaauauuggcccaga

SEQ ID NO: 787897 - RNA, 19 nt, Artificial Sequence
  Description of Artificial Sequence: Synthetic oligonucleotide
  Antisense strand to SEQ ID NO: 787896
ucugggccaauauucaugu

SEQ ID NO: 787898 - RNA, 19 nt, Artificial Sequence
  Description of Artificial Sequence: Synthetic oligonucleotide
  Sense strand starting at position 2776 of SEQ ID NO: 587380
ugcagcauacagcaagauu

SEQ ID NO: 787899 - RNA, 19 nt, Artificial Sequence
  Description of Artificial Sequence: Synthetic oligonucleotide
  Antisense strand to SEQ ID NO: 787898
aaucuugcuguaugcugca

SEQ ID NO: 787900 - RNA, 19 nt, Artificial Sequence
  Description of Artificial Sequence: Synthetic oligonucleotide
  Sense strand starting at position 3092 of SEQ ID NO: 587380
gaaauaugaugagcuguag

SEQ ID NO: 787901 - RNA, 19 nt, Artificial Sequence
  Description of Artificial Sequence: Synthetic oligonucleotide
  Antisense strand to SEQ ID NO: 787900
cuacagcucaucauauuuc

SEQ ID NO: 787902 - RNA, 19 nt, Artificial Sequence
  Description of Artificial Sequence: Synthetic oligonucleotide
  Sense strand starting at position 3101 of SEQ ID NO: 587380
ugagcuguagacugaguga

SEQ ID NO: 787903 - RNA, 19 nt, Artificial Sequence
  Description of Artificial Sequence: Synthetic oligonucleotide
  Antisense strand to SEQ ID NO: 787902
ucacucagucuacagcuca

SEQ ID NO: 787904 - RNA, 19 nt, Artificial Sequence
  Description of Artificial Sequence: Synthetic oligonucleotide
  Sense strand starting at position 3174 of SEQ ID NO: 587380
ucugcuaagccucacugau

SEQ ID NO: 787905 - RNA, 19 nt, Artificial Sequence
  Description of Artificial Sequence: Synthetic oligonucleotide
  Antisense strand to SEQ ID NO: 787904
aucagugaggcuuagcaga

SEQ ID NO: 787906 - RNA, 19 nt, Artificial Sequence
  Description of Artificial Sequence: Synthetic oligonucleotide
  Sense strand starting at position 3192 of SEQ ID NO: 587380
ucaagauguuacuuggucu

SEQ ID NO: 787907 - RNA, 19 nt, Artificial Sequence
  Description of Artificial Sequence: Synthetic oligonucleotide
  Antisense strand to SEQ ID NO: 787906
agaccaaguaacaucuuga

SEQ ID NO: 787908 - RNA, 19 nt, Artificial Sequence
  Description of Artificial Sequence: Synthetic oligonucleotide
  Sense strand starting at position 3195 of SEQ ID NO: 587380
agauguuacuuggucugga

SEQ ID NO: 787909 - RNA, 19 nt, Artificial Sequence
  Description of Artificial Sequence: Synthetic oligonucleotide
  Antisense strand to SEQ ID NO: 787908
uccagaccaaguaacaucu

SEQ ID NO: 787910 - RNA, 19 nt, Artificial Sequence
  Description of Artificial Sequence: Synthetic oligonucleotide
  Sense strand starting at position 3198 of SEQ ID NO: 587380
uguuacuuggucuggagaa

SEQ ID NO: 787911 - RNA, 19 nt, Artificial Sequence
  Description of Artificial Sequence: Synthetic oligonucleotide
  Antisense strand to SEQ ID NO: 787910
uucuccagaccaaguaaca

SEQ ID NO: 787912 - RNA, 19 nt, Artificial Sequence
  Description of Artificial Sequence: Synthetic oligonucleotide
  Sense strand starting at position 3346 of SEQ ID NO: 587380
gcaucuuuacagggaaggu

SEQ ID NO: 787913 - RNA, 19 nt, Artificial Sequence
  Description of Artificial Sequence: Synthetic oligonucleotide
  Antisense strand to SEQ ID NO: 787912
accuucccuguaaagaugc

SEQ ID NO: 787914 - RNA, 19 nt, Artificial Sequence
  Description of Artificial Sequence: Synthetic oligonucleotide
  Sense strand starting at position 3480 of SEQ ID NO: 587380
uuuacauuguuaucuagga

SEQ ID NO: 787915 - RNA, 19 nt, Artificial Sequence
  Description of Artificial Sequence: Synthetic oligonucleotide
  Antisense strand to SEQ ID NO: 787914
uccuagauaacaauguaaa

SEQ ID NO: 787916 - RNA, 19 nt, Artificial Sequence
  Description of Artificial Sequence: Synthetic oligonucleotide
  Sense strand starting at position 3503 of SEQ ID NO: 587380
cugucacagguuugaaaga

SEQ ID NO: 787917 - RNA, 19 nt, Artificial Sequence
  Description of Artificial Sequence: Synthetic oligonucleotide
  Antisense strand to SEQ ID NO: 787916
ucuuucaaaccugugacag

SEQ ID NO: 787918 - RNA, 19 nt, Artificial Sequence
  Description of Artificial Sequence: Synthetic oligonucleotide
  Sense strand starting at position 3609 of SEQ ID NO: 587380
gauagcagucuaugaaccu

SEQ ID NO: 787919 - RNA, 19 nt, Artificial Sequence
  Description of Artificial Sequence: Synthetic oligonucleotide
  Antisense strand to SEQ ID NO: 787918
agguucauagacugcuauc

SEQ ID NO: 787920 - RNA, 19 nt, Artificial Sequence
  Description of Artificial Sequence: Synthetic oligonucleotide
  Sense strand starting at position 3636 of SEQ ID NO: 587380
guaguuaugguagagauug

SEQ ID NO: 787921 - RNA, 19 nt, Artificial Sequence
  Description of Artificial Sequence: Synthetic oligonucleotide
  Antisense strand to SEQ ID NO: 787920
caaucucuaccauaacuac

SEQ ID NO: 787922 - RNA, 19 nt, Artificial Sequence
  Description of Artificial Sequence: Synthetic oligonucleotide
  Sense strand starting at position 3716 of SEQ ID NO: 587380
cagucauggcaacagguaa

SEQ ID NO: 787923 - RNA, 19 nt, Artificial Sequence
  Description of Artificial Sequence: Synthetic oligonucleotide
  Antisense strand to SEQ ID NO: 787922
uuaccuguugccaugacug

SEQ ID NO: 787924 - RNA, 19 nt, Artificial Sequence
  Description of Artificial Sequence: Synthetic oligonucleotide
  Sense strand starting at position 3778 of SEQ ID NO: 587380
agccaaguacugugaugag

SEQ ID NO: 787925 - RNA, 19 nt, Artificial Sequence
  Description of Artificial Sequence: Synthetic oligonucleotide
  Antisense strand to SEQ ID NO: 787924
cucaucacaguacuuggcu

SEQ ID NO: 787926 - RNA, 19 nt, Artificial Sequence
  Description of Artificial Sequence: Synthetic oligonucleotide
  Sense strand starting at position 3932 of SEQ ID NO: 587380
cagaaauugugccucagau

SEQ ID NO: 787927 - RNA, 19 nt, Artificial Sequence
  Description of Artificial Sequence: Synthetic oligonucleotide
  Antisense strand to SEQ ID NO: 787926
aucugaggcacaauuucug

SEQ ID NO: 787928 - RNA, 19 nt, Artificial Sequence
  Description of Artificial Sequence: Synthetic oligonucleotide
  Sense strand starting at position 18 of SEQ ID NO: 587381
cucacucacugugugauuu

SEQ ID NO: 787929 - RNA, 19 nt, Artificial Sequence
  Description of Artificial Sequence: Synthetic oligonucleotide
  Antisense strand to SEQ ID NO: 787928
aaaucacacagugagugag

SEQ ID NO: 787930 - RNA, 19 nt, Artificial Sequence
  Description of Artificial Sequence: Synthetic oligonucleotide
  Sense strand starting at position 85 of SEQ ID NO: 587381
cuucuaaggccagaagugu

SEQ ID NO: 787931 - RNA, 19 nt, Artificial Sequence
  Description of Artificial Sequence: Synthetic oligonucleotide
  Antisense strand to SEQ ID NO: 787930
acacuucuggccuuagaag

SEQ ID NO: 787932 - RNA, 19 nt, Artificial Sequence
  Description of Artificial Sequence: Synthetic oligonucleotide
  Sense strand starting at position 125 of SEQ ID NO: 587381
cucugucugcagcagagaa

SEQ ID NO: 787933 - RNA, 19 nt, Artificial Sequence
  Description of Artificial Sequence: Synthetic oligonucleotide
  Antisense strand to SEQ ID NO: 787932
uucucugcugcagacagag

SEQ ID NO: 787934 - RNA, 19 nt, Artificial Sequence
  Description of Artificial Sequence: Synthetic oligonucleotide
  Sense strand starting at position 266 of SEQ ID NO: 587381
gggagcuuuccaggaaaug

SEQ ID NO: 787935 - RNA, 19 nt, Artificial Sequence
  Description of Artificial Sequence: Synthetic oligonucleotide
  Antisense strand to SEQ ID NO: 787934
cauuuccuggaaagcuccc

SEQ ID NO: 787936 - RNA, 19 nt, Artificial Sequence
  Description of Artificial Sequence: Synthetic oligonucleotide
  Sense strand starting at position 459 of SEQ ID NO: 587381
ucuccaaguguuuauaauc

SEQ ID NO: 787937 - RNA, 19 nt, Artificial Sequence
  Description of Artificial Sequence: Synthetic oligonucleotide
  Antisense strand to SEQ ID NO: 787936
gauuauaaacacuuggaga

SEQ ID NO: 787938 - RNA, 19 nt, Artificial Sequence
  Description of Artificial Sequence: Synthetic oligonucleotide
  Sense strand starting at position 472 of SEQ ID NO: 587381
auaaucuggcagggaucaa

SEQ ID NO: 787939 - RNA, 19 nt, Artificial Sequence
  Description of Artificial Sequence: Synthetic oligonucleotide
  Antisense strand to SEQ ID NO: 787938
uugaucccugccagauuau

SEQ ID NO: 787940 - RNA, 19 nt, Artificial Sequence
  Description of Artificial Sequence: Synthetic oligonucleotide
  Sense strand starting at position 547 of SEQ ID NO: 587381
accugauaugacugugaag

SEQ ID NO: 787941 - RNA, 19 nt, Artificial Sequence
  Description of Artificial Sequence: Synthetic oligonucleotide
  Antisense strand to SEQ ID NO: 787940
cuucacagucauaucaggu

SEQ ID NO: 787942 - RNA, 19 nt, Artificial Sequence
  Description of Artificial Sequence: Synthetic oligonucleotide
  Sense strand starting at position 549 of SEQ ID NO: 587381
cugauaugacugugaaguu

SEQ ID NO: 787943 - RNA, 19 nt, Artificial Sequence
  Description of Artificial Sequence: Synthetic oligonucleotide
  Antisense strand to SEQ ID NO: 787942
aacuucacagucauaucag

SEQ ID NO: 787944 - RNA, 19 nt, Artificial Sequence
  Description of Artificial Sequence: Synthetic oligonucleotide
  Sense strand starting at position 558 of SEQ ID NO: 587381
cugugaaguuuacuagaca

SEQ ID NO: 787945 - RNA, 19 nt, Artificial Sequence
  Description of Artificial Sequence: Synthetic oligonucleotide
  Antisense strand to SEQ ID NO: 787944
ugucuaguaaacuucacag

SEQ ID NO: 787946 - RNA, 19 nt, Artificial Sequence
  Description of Artificial Sequence: Synthetic oligonucleotide
  Sense strand starting at position 652 of SEQ ID NO: 587381
gguuaagguccauauucuc

SEQ ID NO: 787947 - RNA, 19 nt, Artificial Sequence
  Description of Artificial Sequence: Synthetic oligonucleotide
  Antisense strand to SEQ ID NO: 787946
gagaauauggaccuuaacc

SEQ ID NO: 787948 - RNA, 19 nt, Artificial Sequence
  Description of Artificial Sequence: Synthetic oligonucleotide
  Sense strand starting at position 669 of SEQ ID NO: 587381
ucauuuguccaguggccau

SEQ ID NO: 787949 - RNA, 19 nt, Artificial Sequence
  Description of Artificial Sequence: Synthetic oligonucleotide
  Antisense strand to SEQ ID NO: 787948
auggccacuggacaaauga

SEQ ID NO: 787950 - RNA, 19 nt, Artificial Sequence
  Description of Artificial Sequence: Synthetic oligonucleotide
  Sense strand starting at position 802 of SEQ ID NO: 587381
ugacaaaguccauguaaag

SEQ ID NO: 787951 - RNA, 19 nt, Artificial Sequence
  Description of Artificial Sequence: Synthetic oligonucleotide
  Antisense strand to SEQ ID NO: 787950
cuuuacauggacuuuguca

SEQ ID NO: 787952 - RNA, 19 nt, Artificial Sequence
  Description of Artificial Sequence: Synthetic oligonucleotide
  Sense strand starting at position 956 of SEQ ID NO: 587381
uuucuuucuguauaagaug

SEQ ID NO: 787953 - RNA, 19 nt, Artificial Sequence
  Description of Artificial Sequence: Synthetic oligonucleotide
  Antisense strand to SEQ ID NO: 787952
caucuuauacagaaagaaa

SEQ ID NO: 787954 - RNA, 19 nt, Artificial Sequence
  Description of Artificial Sequence: Synthetic oligonucleotide
  Sense strand starting at position 1006 of SEQ ID NO: 587381
auucguuaugaauagcuuu

SEQ ID NO: 787955 - RNA, 19 nt, Artificial Sequence
  Description of Artificial Sequence: Synthetic oligonucleotide
  Antisense strand to SEQ ID NO: 787954
aaagcuauucauaacgaau

SEQ ID NO: 787956 - RNA, 19 nt, Artificial Sequence
  Description of Artificial Sequence: Synthetic oligonucleotide
  Sense strand starting at position 1090 of SEQ ID NO: 587381
ccucaugcauuugugacau

SEQ ID NO: 787957 - RNA, 19 nt, Artificial Sequence
  Description of Artificial Sequence: Synthetic oligonucleotide
  Antisense strand to SEQ ID NO: 787956
augucacaaaugcaugagg

SEQ ID NO: 787958 - RNA, 19 nt, Artificial Sequence
  Description of Artificial Sequence: Synthetic oligonucleotide
  Sense strand starting at position 1198 of SEQ ID NO: 587381
cuaagaacuugguuuagug

SEQ ID NO: 787959 - RNA, 19 nt, Artificial Sequence
  Description of Artificial Sequence: Synthetic oligonucleotide
  Antisense strand to SEQ ID NO: 787958
cacuaaaccaaguucuuag

SEQ ID NO: 787960 - RNA, 19 nt, Artificial Sequence
  Description of Artificial Sequence: Synthetic oligonucleotide
  Sense strand starting at position 1347 of SEQ ID NO: 587381
ggagauaaguuagugaacu

SEQ ID NO: 787961 - RNA, 19 nt, Artificial Sequence
  Description of Artificial Sequence: Synthetic oligonucleotide
  Antisense strand to SEQ ID NO: 787960
aguucacuaacuuaucucc

SEQ ID NO: 787962 - RNA, 19 nt, Artificial Sequence
  Description of Artificial Sequence: Synthetic oligonucleotide
  Sense strand starting at position 1734 of SEQ ID NO: 587381
ugcuguuugcucuuaguaa

SEQ ID NO: 787963 - RNA, 19 nt, Artificial Sequence
  Description of Artificial Sequence: Synthetic oligonucleotide
  Antisense strand to SEQ ID NO: 787962
uuacuaagagcaaacagca

SEQ ID NO: 787964 - RNA, 19 nt, Artificial Sequence
  Description of Artificial Sequence: Synthetic oligonucleotide
  Sense strand starting at position 1790 of SEQ ID NO: 587381
ccaugagagcuugaccauu

SEQ ID NO: 787965 - RNA, 19 nt, Artificial Sequence
  Description of Artificial Sequence: Synthetic oligonucleotide
  Antisense strand to SEQ ID NO: 787964
aauggucaagcucucaugg

SEQ ID NO: 787966 - RNA, 19 nt, Artificial Sequence
  Description of Artificial Sequence: Synthetic oligonucleotide
  Sense strand starting at position 1792 of SEQ ID NO: 587381
augagagcuugaccauuaa

SEQ ID NO: 787967 - RNA, 19 nt, Artificial Sequence
  Description of Artificial Sequence: Synthetic oligonucleotide
  Antisense strand to SEQ ID NO: 787966
uuaauggucaagcucucau

SEQ ID NO: 787968 - RNA, 19 nt, Artificial Sequence
  Description of Artificial Sequence: Synthetic oligonucleotide
  Sense strand starting at position 1796 of SEQ ID NO: 587381
gagcuugaccauuaagguc

SEQ ID NO: 787969 - RNA, 19 nt, Artificial Sequence
  Description of Artificial Sequence: Synthetic oligonucleotide
  Antisense strand to SEQ ID NO: 787968
gaccuuaauggucaagcuc

SEQ ID NO: 787970 - RNA, 19 nt, Artificial Sequence
  Description of Artificial Sequence: Synthetic oligonucleotide
  Sense strand starting at position 2185 of SEQ ID NO: 587381
caggcuagagguugaaaga

SEQ ID NO: 787971 - RNA, 19 nt, Artificial Sequence
  Description of Artificial Sequence: Synthetic oligonucleotide
  Antisense strand to SEQ ID NO: 787970
ucuuucaaccucuagccug

SEQ ID NO: 787972 - RNA, 19 nt, Artificial Sequence
  Description of Artificial Sequence: Synthetic oligonucleotide
  Sense strand starting at position 2215 of SEQ ID NO: 587381
gugaguuuccaccauacua

SEQ ID NO: 787973 - RNA, 19 nt, Artificial Sequence
  Description of Artificial Sequence: Synthetic oligonucleotide
  Antisense strand to SEQ ID NO: 787972
uaguaugguggaaacucac

SEQ ID NO: 787974 - RNA, 19 nt, Artificial Sequence
  Description of Artificial Sequence: Synthetic oligonucleotide
  Sense strand starting at position 2335 of SEQ ID NO: 587381
guuguaagaaucuaguaug

SEQ ID NO: 787975 - RNA, 19 nt, Artificial Sequence
  Description of Artificial Sequence: Synthetic oligonucleotide
  Antisense strand to SEQ ID NO: 787974
cauacuagauucuuacaac

SEQ ID NO: 787976 - RNA, 19 nt, Artificial Sequence
  Description of Artificial Sequence: Synthetic oligonucleotide
  Sense strand starting at position 2380 of SEQ ID NO: 587381
uguggaaugcuuggaagga

SEQ ID NO: 787977 - RNA, 19 nt, Artificial Sequence
  Description of Artificial Sequence: Synthetic oligonucleotide
  Antisense strand to SEQ ID NO: 787976
uccuuccaagcauuccaca

SEQ ID NO: 787978 - RNA, 19 nt, Artificial Sequence
  Description of Artificial Sequence: Synthetic oligonucleotide
  Sense strand starting at position 2595 of SEQ ID NO: 587381
acaugaauauuggcccaga

SEQ ID NO: 787979 - RNA, 19 nt, Artificial Sequence
  Description of Artificial Sequence: Synthetic oligonucleotide
  Antisense strand to SEQ ID NO: 787978
ucugggccaauauucaugu

SEQ ID NO: 787980 - RNA, 19 nt, Artificial Sequence
  Description of Artificial Sequence: Synthetic oligonucleotide
  Sense strand starting at position 2775 of SEQ ID NO: 587381
ugcagcauacagcaagauu

SEQ ID NO: 787981 - RNA, 19 nt, Artificial Sequence
  Description of Artificial Sequence: Synthetic oligonucleotide
  Antisense strand to SEQ ID NO: 787980
aaucuugcuguaugcugca

SEQ ID NO: 787982 - RNA, 19 nt, Artificial Sequence
  Description of Artificial Sequence: Synthetic oligonucleotide
  Sense strand starting at position 3091 of SEQ ID NO: 587381
gaaauaugaugagcuguag

SEQ ID NO: 787983 - RNA, 19 nt, Artificial Sequence
  Description of Artificial Sequence: Synthetic oligonucleotide
  Antisense strand to SEQ ID NO: 787982
cuacagcucaucauauuuc

SEQ ID NO: 787984 - RNA, 19 nt, Artificial Sequence
  Description of Artificial Sequence: Synthetic oligonucleotide
  Sense strand starting at position 3100 of SEQ ID NO: 587381
ugagcuguagacugaguga

SEQ ID NO: 787985 - RNA, 19 nt, Artificial Sequence
  Description of Artificial Sequence: Synthetic oligonucleotide
  Antisense strand to SEQ ID NO: 787984
ucacucagucuacagcuca

SEQ ID NO: 787986 - RNA, 19 nt, Artificial Sequence
  Description of Artificial Sequence: Synthetic oligonucleotide
  Sense strand starting at position 3173 of SEQ ID NO: 587381
ucugcuaagccucacugau

SEQ ID NO: 787987 - RNA, 19 nt, Artificial Sequence
  Description of Artificial Sequence: Synthetic oligonucleotide
  Antisense strand to SEQ ID NO: 787986
aucagugaggcuuagcaga

SEQ ID NO: 787988 - RNA, 19 nt, Artificial Sequence
  Description of Artificial Sequence: Synthetic oligonucleotide
  Sense strand starting at position 3194 of SEQ ID NO: 587381
agauguuacuuggucugga

SEQ ID NO: 787989 - RNA, 19 nt, Artificial Sequence
  Description of Artificial Sequence: Synthetic oligonucleotide
  Antisense strand to SEQ ID NO: 787988
uccagaccaaguaacaucu

SEQ ID NO: 787990 - RNA, 19 nt, Artificial Sequence
  Description of Artificial Sequence: Synthetic oligonucleotide
  Sense strand starting at position 3197 of SEQ ID NO: 587381
uguuacuuggucuggagaa

SEQ ID NO: 787991 - RNA, 19 nt, Artificial Sequence
  Description of Artificial Sequence: Synthetic oligonucleotide
  Antisense strand to SEQ ID NO: 787990
uucuccagaccaaguaaca

SEQ ID NO: 787992 - RNA, 19 nt, Artificial Sequence
  Description of Artificial Sequence: Synthetic oligonucleotide
  Sense strand starting at position 3345 of SEQ ID NO: 587381
gcaucuuuacagggaaggu

SEQ ID NO: 787993 - RNA, 19 nt, Artificial Sequence
  Description of Artificial Sequence: Synthetic oligonucleotide
  Antisense strand to SEQ ID NO: 787992
accuucccuguaaagaugc

SEQ ID NO: 787994 - RNA, 19 nt, Artificial Sequence
  Description of Artificial Sequence: Synthetic oligonucleotide
  Sense strand starting at position 3479 of SEQ ID NO: 587381
uuuacauuguuaucuagga

SEQ ID NO: 787995 - RNA, 19 nt, Artificial Sequence
  Description of Artificial Sequence: Synthetic oligonucleotide
  Antisense strand to SEQ ID NO: 787994
uccuagauaacaauguaaa

SEQ ID NO: 787996 - RNA, 19 nt, Artificial Sequence
  Description of Artificial Sequence: Synthetic oligonucleotide
  Sense strand starting at position 3502 of SEQ ID NO: 587381
cugucacagguuugaaaga

SEQ ID NO: 787997 - RNA, 19 nt, Artificial Sequence
  Description of Artificial Sequence: Synthetic oligonucleotide
  Antisense strand to SEQ ID NO: 787996
ucuuucaaaccugugacag

SEQ ID NO: 787998 - RNA, 19 nt, Artificial Sequence
  Description of Artificial Sequence: Synthetic oligonucleotide
  Sense strand starting at position 3608 of SEQ ID NO: 587381
gauagcagucuaugaaccu

SEQ ID NO: 787999 - RNA, 19 nt, Artificial Sequence
  Description of Artificial Sequence: Synthetic oligonucleotide
  Antisense strand to SEQ ID NO: 787998
agguucauagacugcuauc

SEQ ID NO: 788000 - RNA, 19 nt, Artificial Sequence
  Description of Artificial Sequence: Synthetic oligonucleotide
  Sense strand starting at position 3635 of SEQ ID NO: 587381
guaguuaugguagagauug

SEQ ID NO: 788001 - RNA, 19 nt, Artificial Sequence
  Description of Artificial Sequence: Synthetic oligonucleotide
  Antisense strand to SEQ ID NO: 788000
caaucucuaccauaacuac

SEQ ID NO: 788002 - RNA, 19 nt, Artificial Sequence
  Description of Artificial Sequence: Synthetic oligonucleotide
  Sense strand starting at position 3715 of SEQ ID NO: 587381
cagucauggcaacagguaa

SEQ ID NO: 788003 - RNA, 19 nt, Artificial Sequence
  Description of Artificial Sequence: Synthetic oligonucleotide
  Antisense strand to SEQ ID NO: 788002
uuaccuguugccaugacug

SEQ ID NO: 788004 - RNA, 19 nt, Artificial Sequence
  Description of Artificial Sequence: Synthetic oligonucleotide
  Sense strand starting at position 3777 of SEQ ID NO: 587381
agccaaguacugugaugag

SEQ ID NO: 788005 - RNA, 19 nt, Artificial Sequence
  Description of Artificial Sequence: Synthetic oligonucleotide
  Antisense strand to SEQ ID NO: 788004
cucaucacaguacuuggcu

SEQ ID NO: 788006 - RNA, 19 nt, Artificial Sequence
  Description of Artificial Sequence: Synthetic oligonucleotide
  Sense strand starting at position 3931 of SEQ ID NO: 587381
cagaaauugugccucagau

SEQ ID NO: 788007 - RNA, 19 nt, Artificial Sequence
  Description of Artificial Sequence: Synthetic oligonucleotide
  Antisense strand to SEQ ID NO: 788006
aucugaggcacaauuucug

SEQ ID NO: 788008 - RNA, 19 nt, Artificial Sequence
  Description of Artificial Sequence: Synthetic oligonucleotide
  Sense strand starting at position 19 of SEQ ID NO: 587382
cucacucacugugugauuu

SEQ ID NO: 788009 - RNA, 19 nt, Artificial Sequence
  Description of Artificial Sequence: Synthetic oligonucleotide
  Antisense strand to SEQ ID NO: 788008
aaaucacacagugagugag

SEQ ID NO: 788010 - RNA, 19 nt, Artificial Sequence
  Description of Artificial Sequence: Synthetic oligonucleotide
  Sense strand starting at position 267 of SEQ ID NO: 587382
gggagcuuuccaggaaaug

SEQ ID NO: 788011 - RNA, 19 nt, Artificial Sequence
  Description of Artificial Sequence: Synthetic oligonucleotide
  Antisense strand to SEQ ID NO: 788010
cauuuccuggaaagcuccc

SEQ ID NO: 788012 - RNA, 19 nt, Artificial Sequence
  Description of Artificial Sequence: Synthetic oligonucleotide
  Sense strand starting at position 268 of SEQ ID NO: 587382
ggagcuuuccaggaaaugu

SEQ ID NO: 788013 - RNA, 19 nt, Artificial Sequence
  Description of Artificial Sequence: Synthetic oligonucleotide
  Antisense strand to SEQ ID NO: 788012
acauuuccuggaaagcucc

SEQ ID NO: 788014 - RNA, 19 nt, Artificial Sequence
  Description of Artificial Sequence: Synthetic oligonucleotide
  Sense strand starting at position 459 of SEQ ID NO: 587382
cucuccaaguguuuauaau

SEQ ID NO: 788015 - RNA, 19 nt, Artificial Sequence
  Description of Artificial Sequence: Synthetic oligonucleotide
  Antisense strand to SEQ ID NO: 788014
auuauaaacacuuggagag

SEQ ID NO: 788016 - RNA, 19 nt, Artificial Sequence
  Description of Artificial Sequence: Synthetic oligonucleotide
  Sense strand starting at position 460 of SEQ ID NO: 587382
ucuccaaguguuuauaauc

SEQ ID NO: 788017 - RNA, 19 nt, Artificial Sequence
  Description of Artificial Sequence: Synthetic oligonucleotide
  Antisense strand to SEQ ID NO: 788016
gauuauaaacacuuggaga

SEQ ID NO: 788018 - RNA, 19 nt, Artificial Sequence
  Description of Artificial Sequence: Synthetic oligonucleotide
  Sense strand starting at position 473 of SEQ ID NO: 587382
auaaucuggcagggaucaa

SEQ ID NO: 788019 - RNA, 19 nt, Artificial Sequence
  Description of Artificial Sequence: Synthetic oligonucleotide
  Antisense strand to SEQ ID NO: 788018
uugaucccugccagauuau

SEQ ID NO: 788020 - RNA, 19 nt, Artificial Sequence
  Description of Artificial Sequence: Synthetic oligonucleotide
  Sense strand starting at position 548 of SEQ ID NO: 587382
accugauaugacugugaag

SEQ ID NO: 788021 - RNA, 19 nt, Artificial Sequence
  Description of Artificial Sequence: Synthetic oligonucleotide
  Antisense strand to SEQ ID NO: 788020
cuucacagucauaucaggu

SEQ ID NO: 788022 - RNA, 19 nt, Artificial Sequence
  Description of Artificial Sequence: Synthetic oligonucleotide
  Sense strand starting at position 550 of SEQ ID NO: 587382
cugauaugacugugaaguu

SEQ ID NO: 788023 - RNA, 19 nt, Artificial Sequence
  Description of Artificial Sequence: Synthetic oligonucleotide
  Antisense strand to SEQ ID NO: 788022
aacuucacagucauaucag

SEQ ID NO: 788024 - RNA, 19 nt, Artificial Sequence
  Description of Artificial Sequence: Synthetic oligonucleotide
  Sense strand starting at position 559 of SEQ ID NO: 587382
cugugaaguuuacuagaca

SEQ ID NO: 788025 - RNA, 19 nt, Artificial Sequence
  Description of Artificial Sequence: Synthetic oligonucleotide
  Antisense strand to SEQ ID NO: 788024
ugucuaguaaacuucacag

SEQ ID NO: 788026 - RNA, 19 nt, Artificial Sequence
  Description of Artificial Sequence: Synthetic oligonucleotide
  Sense strand starting at position 653 of SEQ ID NO: 587382
gguuaagguccauauucuc

SEQ ID NO: 788027 - RNA, 19 nt, Artificial Sequence
  Description of Artificial Sequence: Synthetic oligonucleotide
  Antisense strand to SEQ ID NO: 788026
gagaauauggaccuuaacc

SEQ ID NO: 788028 - RNA, 19 nt, Artificial Sequence
  Description of Artificial Sequence: Synthetic oligonucleotide
  Sense strand starting at position 670 of SEQ ID NO: 587382
ucauuuguccaguggccau

SEQ ID NO: 788029 - RNA, 19 nt, Artificial Sequence
  Description of Artificial Sequence: Synthetic oligonucleotide
  Antisense strand to SEQ ID NO: 788028
auggccacuggacaaauga

SEQ ID NO: 788030 - RNA, 19 nt, Artificial Sequence
  Description of Artificial Sequence: Synthetic oligonucleotide
  Sense strand starting at position 803 of SEQ ID NO: 587382
ugacaaaguccauguaaag

SEQ ID NO: 788031 - RNA, 19 nt, Artificial Sequence
  Description of Artificial Sequence: Synthetic oligonucleotide
  Antisense strand to SEQ ID NO: 788030
cuuuacauggacuuuguca

SEQ ID NO: 788032 - RNA, 19 nt, Artificial Sequence
  Description of Artificial Sequence: Synthetic oligonucleotide
  Sense strand starting at position 957 of SEQ ID NO: 587382
uuucuuucuguauaagaug

SEQ ID NO: 788033 - RNA, 19 nt, Artificial Sequence
  Description of Artificial Sequence: Synthetic oligonucleotide
  Antisense strand to SEQ ID NO: 788032
caucuuauacagaaagaaa

SEQ ID NO: 788034 - RNA, 19 nt, Artificial Sequence
  Description of Artificial Sequence: Synthetic oligonucleotide
  Sense strand starting at position 1091 of SEQ ID NO: 587382
ccucaugcauuugugacau

SEQ ID NO: 788035 - RNA, 19 nt, Artificial Sequence
  Description of Artificial Sequence: Synthetic oligonucleotide
  Antisense strand to SEQ ID NO: 788034
augucacaaaugcaugagg

SEQ ID NO: 788036 - RNA, 19 nt, Artificial Sequence
  Description of Artificial Sequence: Synthetic oligonucleotide
  Sense strand starting at position 1199 of SEQ ID NO: 587382
cuaagaacuugguuuagug

SEQ ID NO: 788037 - RNA, 19 nt, Artificial Sequence
  Description of Artificial Sequence: Synthetic oligonucleotide
  Antisense strand to SEQ ID NO: 788036
cacuaaaccaaguucuuag

SEQ ID NO: 788038 - RNA, 19 nt, Artificial Sequence
  Description of Artificial Sequence: Synthetic oligonucleotide
  Sense strand starting at position 1203 of SEQ ID NO: 587382
gaacuugguuuagugagca

SEQ ID NO: 788039 - RNA, 19 nt, Artificial Sequence
  Description of Artificial Sequence: Synthetic oligonucleotide
  Antisense strand to SEQ ID NO: 788038
ugcucacuaaaccaaguuc

SEQ ID NO: 788040 - RNA, 19 nt, Artificial Sequence
  Description of Artificial Sequence: Synthetic oligonucleotide
  Sense strand starting at position 1735 of SEQ ID NO: 587382
ugcuguuugcucuuaguaa

SEQ ID NO: 788041 - RNA, 19 nt, Artificial Sequence
  Description of Artificial Sequence: Synthetic oligonucleotide
  Antisense strand to SEQ ID NO: 788040
uuacuaagagcaaacagca

SEQ ID NO: 788042 - RNA, 19 nt, Artificial Sequence
  Description of Artificial Sequence: Synthetic oligonucleotide
  Sense strand starting at position 1791 of SEQ ID NO: 587382
ccaugagagcuugaccauu

SEQ ID NO: 788043 - RNA, 19 nt, Artificial Sequence
  Description of Artificial Sequence: Synthetic oligonucleotide
  Antisense strand to SEQ ID NO: 788042
aauggucaagcucucaugg

SEQ ID NO: 788044 - RNA, 19 nt, Artificial Sequence
  Description of Artificial Sequence: Synthetic oligonucleotide
  Sense strand starting at position 1793 of SEQ ID NO: 587382
augagagcuugaccauuaa

SEQ ID NO: 788045 - RNA, 19 nt, Artificial Sequence
  Description of Artificial Sequence: Synthetic oligonucleotide
  Antisense strand to SEQ ID NO: 788044
uuaauggucaagcucucau

SEQ ID NO: 788046 - RNA, 19 nt, Artificial Sequence
  Description of Artificial Sequence: Synthetic oligonucleotide
  Sense strand starting at position 1797 of SEQ ID NO: 587382
gagcuugaccauuaagguc

SEQ ID NO: 788047 - RNA, 19 nt, Artificial Sequence
  Description of Artificial Sequence: Synthetic oligonucleotide
  Antisense strand to SEQ ID NO: 788046
gaccuuaauggucaagcuc

SEQ ID NO: 788048 - RNA, 19 nt, Artificial Sequence
  Description of Artificial Sequence: Synthetic oligonucleotide
  Sense strand starting at position 2186 of SEQ ID NO: 587382
caggcuagagguugaaaga

SEQ ID NO: 788049 - RNA, 19 nt, Artificial Sequence
  Description of Artificial Sequence: Synthetic oligonucleotide
  Antisense strand to SEQ ID NO: 788048
ucuuucaaccucuagccug

SEQ ID NO: 788050 - RNA, 19 nt, Artificial Sequence
  Description of Artificial Sequence: Synthetic oligonucleotide
  Sense strand starting at position 2216 of SEQ ID NO: 587382
gugaguuuccaccauacua

SEQ ID NO: 788051 - RNA, 19 nt, Artificial Sequence
  Description of Artificial Sequence: Synthetic oligonucleotide
  Antisense strand to SEQ ID NO: 788050
uaguaugguggaaacucac

SEQ ID NO: 788052 - RNA, 19 nt, Artificial Sequence
  Description of Artificial Sequence: Synthetic oligonucleotide
  Sense strand starting at position 2336 of SEQ ID NO: 587382
guuguaagaaucuaguaug

SEQ ID NO: 788053 - RNA, 19 nt, Artificial Sequence
  Description of Artificial Sequence: Synthetic oligonucleotide
  Antisense strand to SEQ ID NO: 788052
cauacuagauucuuacaac

SEQ ID NO: 788054 - RNA, 19 nt, Artificial Sequence
  Description of Artificial Sequence: Synthetic oligonucleotide
  Sense strand starting at position 2381 of SEQ ID NO: 587382
uguggaaugcuuggaagga

SEQ ID NO: 788055 - RNA, 19 nt, Artificial Sequence
  Description of Artificial Sequence: Synthetic oligonucleotide
  Antisense strand to SEQ ID NO: 788054
uccuuccaagcauuccaca

SEQ ID NO: 788056 - RNA, 19 nt, Artificial Sequence
  Description of Artificial Sequence: Synthetic oligonucleotide
  Sense strand starting at position 2596 of SEQ ID NO: 587382
acaugaauauuggcccaga

SEQ ID NO: 788057 - RNA, 19 nt, Artificial Sequence
  Description of Artificial Sequence: Synthetic oligonucleotide
  Antisense strand to SEQ ID NO: 788056
ucugggccaauauucaugu

SEQ ID NO: 788058 - RNA, 19 nt, Artificial Sequence
  Description of Artificial Sequence: Synthetic oligonucleotide
  Sense strand starting at position 2776 of SEQ ID NO: 587382
ugcagcauacagcaagauu

SEQ ID NO: 788059 - RNA, 19 nt, Artificial Sequence
  Description of Artificial Sequence: Synthetic oligonucleotide
  Antisense strand to SEQ ID NO: 788058
aaucuugcuguaugcugca

SEQ ID NO: 788060 - RNA, 19 nt, Artificial Sequence
  Description of Artificial Sequence: Synthetic oligonucleotide
  Sense strand starting at position 3092 of SEQ ID NO: 587382
gaaauaugaugagcuguag

SEQ ID NO: 788061 - RNA, 19 nt, Artificial Sequence
  Description of Artificial Sequence: Synthetic oligonucleotide
  Antisense strand to SEQ ID NO: 788060
cuacagcucaucauauuuc

SEQ ID NO: 788062 - RNA, 19 nt, Artificial Sequence
  Description of Artificial Sequence: Synthetic oligonucleotide
  Sense strand starting at position 3101 of SEQ ID NO: 587382
ugagcuguagacugaguga

SEQ ID NO: 788063 - RNA, 19 nt, Artificial Sequence
  Description of Artificial Sequence: Synthetic oligonucleotide
  Antisense strand to SEQ ID NO: 788062
ucacucagucuacagcuca

SEQ ID NO: 788064 - RNA, 19 nt, Artificial Sequence
  Description of Artificial Sequence: Synthetic oligonucleotide
  Sense strand starting at position 3174 of SEQ ID NO: 587382
ucugcuaagccucacugau

SEQ ID NO: 788065 - RNA, 19 nt, Artificial Sequence
  Description of Artificial Sequence: Synthetic oligonucleotide
  Antisense strand to SEQ ID NO: 788064
aucagugaggcuuagcaga

SEQ ID NO: 788066 - RNA, 19 nt, Artificial Sequence
  Description of Artificial Sequence: Synthetic oligonucleotide
  Sense strand starting at position 3192 of SEQ ID NO: 587382
ucaagauguuacuuggucu

SEQ ID NO: 788067 - RNA, 19 nt, Artificial Sequence
  Description of Artificial Sequence: Synthetic oligonucleotide
  Antisense strand to SEQ ID NO: 788066
agaccaaguaacaucuuga

SEQ ID NO: 788068 - RNA, 19 nt, Artificial Sequence
  Description of Artificial Sequence: Synthetic oligonucleotide
  Sense strand starting at position 3195 of SEQ ID NO: 587382
agauguuacuuggucugga

SEQ ID NO: 788069 - RNA, 19 nt, Artificial Sequence
  Description of Artificial Sequence: Synthetic oligonucleotide
  Antisense strand to SEQ ID NO: 788068
uccagaccaaguaacaucu

SEQ ID NO: 788070 - RNA, 19 nt, Artificial Sequence
  Description of Artificial Sequence: Synthetic oligonucleotide
  Sense strand starting at position 3198 of SEQ ID NO: 587382
uguuacuuggucuggagaa

SEQ ID NO: 788071 - RNA, 19 nt, Artificial Sequence
  Description of Artificial Sequence: Synthetic oligonucleotide
  Antisense strand to SEQ ID NO: 788070
uucuccagaccaaguaaca

SEQ ID NO: 788072 - RNA, 19 nt, Artificial Sequence
  Description of Artificial Sequence: Synthetic oligonucleotide
  Sense strand starting at position 3346 of SEQ ID NO: 587382
gcaucuuuacagggaaggu

SEQ ID NO: 788073 - RNA, 19 nt, Artificial Sequence
  Description of Artificial Sequence: Synthetic oligonucleotide
  Antisense strand to SEQ ID NO: 788072
accuucccuguaaagaugc

SEQ ID NO: 788074 - RNA, 19 nt, Artificial Sequence
  Description of Artificial Sequence: Synthetic oligonucleotide
  Sense strand starting at position 3480 of SEQ ID NO: 587382
uuuacauuguuaucuagga

SEQ ID NO: 788075 - RNA, 19 nt, Artificial Sequence
  Description of Artificial Sequence: Synthetic oligonucleotide
  Antisense strand to SEQ ID NO: 788074
uccuagauaacaauguaaa

SEQ ID NO: 788076 - RNA, 19 nt, Artificial Sequence
  Description of Artificial Sequence: Synthetic oligonucleotide
  Sense strand starting at position 3503 of SEQ ID NO: 587382
cugucacagguuugaaaga

SEQ ID NO: 788077 - RNA, 19 nt, Artificial Sequence
  Description of Artificial Sequence: Synthetic oligonucleotide
  Antisense strand to SEQ ID NO: 788076
ucuuucaaaccugugacag

SEQ ID NO: 788078 - RNA, 19 nt, Artificial Sequence
  Description of Artificial Sequence: Synthetic oligonucleotide
  Sense strand starting at position 3609 of SEQ ID NO: 587382
gauagcagucuaugaaccu

SEQ ID NO: 788079 - RNA, 19 nt, Artificial Sequence
  Description of Artificial Sequence: Synthetic oligonucleotide
  Antisense strand to SEQ ID NO: 788078
agguucauagacugcuauc

SEQ ID NO: 788080 - RNA, 19 nt, Artificial Sequence
  Description of Artificial Sequence: Synthetic oligonucleotide
  Sense strand starting at position 3636 of SEQ ID NO: 587382
guaguuaugguagagauug

SEQ ID NO: 788081 - RNA, 19 nt, Artificial Sequence
  Description of Artificial Sequence: Synthetic oligonucleotide
  Antisense strand to SEQ ID NO: 788080
caaucucuaccauaacuac

SEQ ID NO: 788082 - RNA, 19 nt, Artificial Sequence
  Description of Artificial Sequence: Synthetic oligonucleotide
  Sense strand starting at position 3716 of SEQ ID NO: 587382
cagucauggcaacagguaa

SEQ ID NO: 788083 - RNA, 19 nt, Artificial Sequence
  Description of Artificial Sequence: Synthetic oligonucleotide
  Antisense strand to SEQ ID NO: 788082
uuaccuguugccaugacug

SEQ ID NO: 788084 - RNA, 19 nt, Artificial Sequence
  Description of Artificial Sequence: Synthetic oligonucleotide
  Sense strand starting at position 3778 of SEQ ID NO: 587382
agccaaguacugugaugag

SEQ ID NO: 788085 - RNA, 19 nt, Artificial Sequence
  Description of Artificial Sequence: Synthetic oligonucleotide
  Antisense strand to SEQ ID NO: 788084
cucaucacaguacuuggcu

SEQ ID NO: 788086 - RNA, 19 nt, Artificial Sequence
  Description of Artificial Sequence: Synthetic oligonucleotide
  Sense strand starting at position 3932 of SEQ ID NO: 587382
cagaaauugugccucagau

SEQ ID NO: 788087 - RNA, 19 nt, Artificial Sequence
  Description of Artificial Sequence: Synthetic oligonucleotide
  Antisense strand to SEQ ID NO: 788086
aucugaggcacaauuucug

SEQ ID NO: 788088 - RNA, 19 nt, Artificial Sequence
  Description of Artificial Sequence: Synthetic oligonucleotide
  Sense strand starting at position 18 of SEQ ID NO: 587383
cucacucacugugugauuu

SEQ ID NO: 788089 - RNA, 19 nt, Artificial Sequence
  Description of Artificial Sequence: Synthetic oligonucleotide
  Antisense strand to SEQ ID NO: 788088
aaaucacacagugagugag

SEQ ID NO: 788090 - RNA, 19 nt, Artificial Sequence
  Description of Artificial Sequence: Synthetic oligonucleotide
  Sense strand starting at position 85 of SEQ ID NO: 587383
cuucuaaggccagaagugu

SEQ ID NO: 788091 - RNA, 19 nt, Artificial Sequence
  Description of Artificial Sequence: Synthetic oligonucleotide
  Antisense strand to SEQ ID NO: 788090
acacuucuggccuuagaag

SEQ ID NO: 788092 - RNA, 19 nt, Artificial Sequence
  Description of Artificial Sequence: Synthetic oligonucleotide
  Sense strand starting at position 125 of SEQ ID NO: 587383
cucugucugcagcagagaa

SEQ ID NO: 788093 - RNA, 19 nt, Artificial Sequence
  Description of Artificial Sequence: Synthetic oligonucleotide
  Antisense strand to SEQ ID NO: 788092
uucucugcugcagacagag

SEQ ID NO: 788094 - RNA, 19 nt, Artificial Sequence
  Description of Artificial Sequence: Synthetic oligonucleotide
  Sense strand starting at position 266 of SEQ ID NO: 587383
gggagcuuuccaggaaaug

SEQ ID NO: 788095 - RNA, 19 nt, Artificial Sequence
  Description of Artificial Sequence: Synthetic oligonucleotide
  Antisense strand to SEQ ID NO: 788094
cauuuccuggaaagcuccc

SEQ ID NO: 788096 - RNA, 19 nt, Artificial Sequence
  Description of Artificial Sequence: Synthetic oligonucleotide
  Sense strand starting at position 459 of SEQ ID NO: 587383
ucuccaaguguuuauaauc

SEQ ID NO: 788097 - RNA, 19 nt, Artificial Sequence
  Description of Artificial Sequence: Synthetic oligonucleotide
  Antisense strand to SEQ ID NO: 788096
gauuauaaacacuuggaga

SEQ ID NO: 788098 - RNA, 19 nt, Artificial Sequence
  Description of Artificial Sequence: Synthetic oligonucleotide
  Sense strand starting at position 472 of SEQ ID NO: 587383
auaaucuggcagggaucaa

SEQ ID NO: 788099 - RNA, 19 nt, Artificial Sequence
  Description of Artificial Sequence: Synthetic oligonucleotide
  Antisense strand to SEQ ID NO: 788098
uugaucccugccagauuau

SEQ ID NO: 788100 - RNA, 19 nt, Artificial Sequence
  Description of Artificial Sequence: Synthetic oligonucleotide
  Sense strand starting at position 547 of SEQ ID NO: 587383
accugauaugacugugaag

SEQ ID NO: 788101 - RNA, 19 nt, Artificial Sequence
  Description of Artificial Sequence: Synthetic oligonucleotide
  Antisense strand to SEQ ID NO: 788100
cuucacagucauaucaggu

SEQ ID NO: 788102 - RNA, 19 nt, Artificial Sequence
  Description of Artificial Sequence: Synthetic oligonucleotide
  Sense strand starting at position 549 of SEQ ID NO: 587383
cugauaugacugugaaguu

SEQ ID NO: 788103 - RNA, 19 nt, Artificial Sequence
  Description of Artificial Sequence: Synthetic oligonucleotide
  Antisense strand to SEQ ID NO: 788102
aacuucacagucauaucag

SEQ ID NO: 788104 - RNA, 19 nt, Artificial Sequence
  Description of Artificial Sequence: Synthetic oligonucleotide
  Sense strand starting at position 558 of SEQ ID NO: 587383
cugugaaguuuacuagaca

SEQ ID NO: 788105 - RNA, 19 nt, Artificial Sequence
  Description of Artificial Sequence: Synthetic oligonucleotide
  Antisense strand to SEQ ID NO: 788104
ugucuaguaaacuucacag

SEQ ID NO: 788106 - RNA, 19 nt, Artificial Sequence
  Description of Artificial Sequence: Synthetic oligonucleotide
  Sense strand starting at position 652 of SEQ ID NO: 587383
gguuaagguccauauucuc

SEQ ID NO: 788107 - RNA, 19 nt, Artificial Sequence
  Description of Artificial Sequence: Synthetic oligonucleotide
  Antisense strand to SEQ ID NO: 788106
gagaauauggaccuuaacc

SEQ ID NO: 788108 - RNA, 19 nt, Artificial Sequence
  Description of Artificial Sequence: Synthetic oligonucleotide
  Sense strand starting at position 669 of SEQ ID NO: 587383
ucauuuguccaguggccau

SEQ ID NO: 788109 - RNA, 19 nt, Artificial Sequence
  Description of Artificial Sequence: Synthetic oligonucleotide
  Antisense strand to SEQ ID NO: 788108
auggccacuggacaaauga

SEQ ID NO: 788110 - RNA, 19 nt, Artificial Sequence
  Description of Artificial Sequence: Synthetic oligonucleotide
  Sense strand starting at position 802 of SEQ ID NO: 587383
ugacaaaguccauguaaag

SEQ ID NO: 788111 - RNA, 19 nt, Artificial Sequence
  Description of Artificial Sequence: Synthetic oligonucleotide
  Antisense strand to SEQ ID NO: 788110
cuuuacauggacuuuguca

SEQ ID NO: 788112 - RNA, 19 nt, Artificial Sequence
  Description of Artificial Sequence: Synthetic oligonucleotide
  Sense strand starting at position 956 of SEQ ID NO: 587383
uuucuuucuguauaagaug

SEQ ID NO: 788113 - RNA, 19 nt, Artificial Sequence
  Description of Artificial Sequence: Synthetic oligonucleotide
  Antisense strand to SEQ ID NO: 788112
caucuuauacagaaagaaa

SEQ ID NO: 788114 - RNA, 19 nt, Artificial Sequence
  Description of Artificial Sequence: Synthetic oligonucleotide
  Sense strand starting at position 1006 of SEQ ID NO: 587383
auucguuaugaauagcuuu

SEQ ID NO: 788115 - RNA, 19 nt, Artificial Sequence
  Description of Artificial Sequence: Synthetic oligonucleotide
  Antisense strand to SEQ ID NO: 788114
aaagcuauucauaacgaau

SEQ ID NO: 788116 - RNA, 19 nt, Artificial Sequence
  Description of Artificial Sequence: Synthetic oligonucleotide
  Sense strand starting at position 1090 of SEQ ID NO: 587383
ccucaugcauuugugacau

SEQ ID NO: 788117 - RNA, 19 nt, Artificial Sequence
  Description of Artificial Sequence: Synthetic oligonucleotide
  Antisense strand to SEQ ID NO: 788116
augucacaaaugcaugagg

SEQ ID NO: 788118 - RNA, 19 nt, Artificial Sequence
  Description of Artificial Sequence: Synthetic oligonucleotide
  Sense strand starting at position 1198 of SEQ ID NO: 587383
cuaagaacuugguuuagug

SEQ ID NO: 788119 - RNA, 19 nt, Artificial Sequence
  Description of Artificial Sequence: Synthetic oligonucleotide
  Antisense strand to SEQ ID NO: 788118
cacuaaaccaaguucuuag

SEQ ID NO: 788120 - RNA, 19 nt, Artificial Sequence
  Description of Artificial Sequence: Synthetic oligonucleotide
  Sense strand starting at position 1347 of SEQ ID NO: 587383
ggagauaaguuagugaacu

SEQ ID NO: 788121 - RNA, 19 nt, Artificial Sequence
  Description of Artificial Sequence: Synthetic oligonucleotide
  Antisense strand to SEQ ID NO: 788120
aguucacuaacuuaucucc

SEQ ID NO: 788122 - RNA, 19 nt, Artificial Sequence
  Description of Artificial Sequence: Synthetic oligonucleotide
  Sense strand starting at position 1734 of SEQ ID NO: 587383
ugcuguuugcucuuaguaa

SEQ ID NO: 788123 - RNA, 19 nt, Artificial Sequence
  Description of Artificial Sequence: Synthetic oligonucleotide
  Antisense strand to SEQ ID NO: 788122
uuacuaagagcaaacagca

SEQ ID NO: 788124 - RNA, 19 nt, Artificial Sequence
  Description of Artificial Sequence: Synthetic oligonucleotide
  Sense strand starting at position 1790 of SEQ ID NO: 587383
ccaugagagcuugaccauu

SEQ ID NO: 788125 - RNA, 19 nt, Artificial Sequence
  Description of Artificial Sequence: Synthetic oligonucleotide
  Antisense strand to SEQ ID NO: 788124
aauggucaagcucucaugg

SEQ ID NO: 788126 - RNA, 19 nt, Artificial Sequence
  Description of Artificial Sequence: Synthetic oligonucleotide
  Sense strand starting at position 1792 of SEQ ID NO: 587383
augagagcuugaccauuaa

SEQ ID NO: 788127 - RNA, 19 nt, Artificial Sequence
  Description of Artificial Sequence: Synthetic oligonucleotide
  Antisense strand to SEQ ID NO: 788126
uuaauggucaagcucucau

SEQ ID NO: 788128 - RNA, 19 nt, Artificial Sequence
  Description of Artificial Sequence: Synthetic oligonucleotide
  Sense strand starting at position 1796 of SEQ ID NO: 587383
gagcuugaccauuaagguc

SEQ ID NO: 788129 - RNA, 19 nt, Artificial Sequence
  Description of Artificial Sequence: Synthetic oligonucleotide
  Antisense strand to SEQ ID NO: 788128
gaccuuaauggucaagcuc

SEQ ID NO: 788130 - RNA, 19 nt, Artificial Sequence
  Description of Artificial Sequence: Synthetic oligonucleotide
  Sense strand starting at position 2185 of SEQ ID NO: 587383
caggcuagagguugaaaga

SEQ ID NO: 788131 - RNA, 19 nt, Artificial Sequence
  Description of Artificial Sequence: Synthetic oligonucleotide
  Antisense strand to SEQ ID NO: 788130
ucuuucaaccucuagccug

SEQ ID NO: 788132 - RNA, 19 nt, Artificial Sequence
  Description of Artificial Sequence: Synthetic oligonucleotide
  Sense strand starting at position 2215 of SEQ ID NO: 587383
gugaguuuccaccauacua

SEQ ID NO: 788133 - RNA, 19 nt, Artificial Sequence
  Description of Artificial Sequence: Synthetic oligonucleotide
  Antisense strand to SEQ ID NO: 788132
uaguaugguggaaacucac

SEQ ID NO: 788134 - RNA, 19 nt, Artificial Sequence
  Description of Artificial Sequence: Synthetic oligonucleotide
  Sense strand starting at position 2335 of SEQ ID NO: 587383
guuguaagaaucuaguaug

SEQ ID NO: 788135 - RNA, 19 nt, Artificial Sequence
  Description of Artificial Sequence: Synthetic oligonucleotide
  Antisense strand to SEQ ID NO: 788134
cauacuagauucuuacaac

SEQ ID NO: 788136 - RNA, 19 nt, Artificial Sequence
  Description of Artificial Sequence: Synthetic oligonucleotide
  Sense strand starting at position 2380 of SEQ ID NO: 587383
uguggaaugcuuggaagga

SEQ ID NO: 788137 - RNA, 19 nt, Artificial Sequence
  Description of Artificial Sequence: Synthetic oligonucleotide
  Antisense strand to SEQ ID NO: 788136
uccuuccaagcauuccaca

SEQ ID NO: 788138 - RNA, 19 nt, Artificial Sequence
  Description of Artificial Sequence: Synthetic oligonucleotide
  Sense strand starting at position 2595 of SEQ ID NO: 587383
acaugaauauuggcccaga

SEQ ID NO: 788139 - RNA, 19 nt, Artificial Sequence
  Description of Artificial Sequence: Synthetic oligonucleotide
  Antisense strand to SEQ ID NO: 788138
ucugggccaauauucaugu

SEQ ID NO: 788140 - RNA, 19 nt, Artificial Sequence
  Description of Artificial Sequence: Synthetic oligonucleotide
  Sense strand starting at position 2775 of SEQ ID NO: 587383
ugcagcauacagcaagauu

SEQ ID NO: 788141 - RNA, 19 nt, Artificial Sequence
  Description of Artificial Sequence: Synthetic oligonucleotide
  Antisense strand to SEQ ID NO: 788140
aaucuugcuguaugcugca

SEQ ID NO: 788142 - RNA, 19 nt, Artificial Sequence
  Description of Artificial Sequence: Synthetic oligonucleotide
  Sense strand starting at position 3091 of SEQ ID NO: 587383
gaaauaugaugagcuguag

SEQ ID NO: 788143 - RNA, 19 nt, Artificial Sequence
  Description of Artificial Sequence: Synthetic oligonucleotide
  Antisense strand to SEQ ID NO: 788142
cuacagcucaucauauuuc

SEQ ID NO: 788144 - RNA, 19 nt, Artificial Sequence
  Description of Artificial Sequence: Synthetic oligonucleotide
  Sense strand starting at position 3100 of SEQ ID NO: 587383
ugagcuguagacugaguga

SEQ ID NO: 788145 - RNA, 19 nt, Artificial Sequence
  Description of Artificial Sequence: Synthetic oligonucleotide
  Antisense strand to SEQ ID NO: 788144
ucacucagucuacagcuca

SEQ ID NO: 788146 - RNA, 19 nt, Artificial Sequence
  Description of Artificial Sequence: Synthetic oligonucleotide
  Sense strand starting at position 3173 of SEQ ID NO: 587383
ucugcuaagccucacugau

SEQ ID NO: 788147 - RNA, 19 nt, Artificial Sequence
  Description of Artificial Sequence: Synthetic oligonucleotide
  Antisense strand to SEQ ID NO: 788146
aucagugaggcuuagcaga

SEQ ID NO: 788148 - RNA, 19 nt, Artificial Sequence
  Description of Artificial Sequence: Synthetic oligonucleotide
  Sense strand starting at position 3194 of SEQ ID NO: 587383
agauguuacuuggucugga

SEQ ID NO: 788149 - RNA, 19 nt, Artificial Sequence
  Description of Artificial Sequence: Synthetic oligonucleotide
  Antisense strand to SEQ ID NO: 788148
uccagaccaaguaacaucu

SEQ ID NO: 788150 - RNA, 19 nt, Artificial Sequence
  Description of Artificial Sequence: Synthetic oligonucleotide
  Sense strand starting at position 3197 of SEQ ID NO: 587383
uguuacuuggucuggagaa

SEQ ID NO: 788151 - RNA, 19 nt, Artificial Sequence
  Description of Artificial Sequence: Synthetic oligonucleotide
  Antisense strand to SEQ ID NO: 788150
uucuccagaccaaguaaca

SEQ ID NO: 788152 - RNA, 19 nt, Artificial Sequence
  Description of Artificial Sequence: Synthetic oligonucleotide
  Sense strand starting at position 3345 of SEQ ID NO: 587383
gcaucuuuacagggaaggu

SEQ ID NO: 788153 - RNA, 19 nt, Artificial Sequence
  Description of Artificial Sequence: Synthetic oligonucleotide
  Antisense strand to SEQ ID NO: 788152
accuucccuguaaagaugc

SEQ ID NO: 788154 - RNA, 19 nt, Artificial Sequence
  Description of Artificial Sequence: Synthetic oligonucleotide
  Sense strand starting at position 3479 of SEQ ID NO: 587383
uuuacauuguuaucuagga

SEQ ID NO: 788155 - RNA, 19 nt, Artificial Sequence
  Description of Artificial Sequence: Synthetic oligonucleotide
  Antisense strand to SEQ ID NO: 788154
uccuagauaacaauguaaa

SEQ ID NO: 788156 - RNA, 19 nt, Artificial Sequence
  Description of Artificial Sequence: Synthetic oligonucleotide
  Sense strand starting at position 3502 of SEQ ID NO: 587383
cugucacagguuugaaaga

SEQ ID NO: 788157 - RNA, 19 nt, Artificial Sequence
  Description of Artificial Sequence: Synthetic oligonucleotide
  Antisense strand to SEQ ID NO: 788156
ucuuucaaaccugugacag

SEQ ID NO: 788158 - RNA, 19 nt, Artificial Sequence
  Description of Artificial Sequence: Synthetic oligonucleotide
  Sense strand starting at position 3608 of SEQ ID NO: 587383
gauagcagucuaugaaccu

SEQ ID NO: 788159 - RNA, 19 nt, Artificial Sequence
  Description of Artificial Sequence: Synthetic oligonucleotide
  Antisense strand to SEQ ID NO: 788158
agguucauagacugcuauc

SEQ ID NO: 788160 - RNA, 19 nt, Artificial Sequence
  Description of Artificial Sequence: Synthetic oligonucleotide
  Sense strand starting at position 3635 of SEQ ID NO: 587383
guaguuaugguagagauug

SEQ ID NO: 788161 - RNA, 19 nt, Artificial Sequence
  Description of Artificial Sequence: Synthetic oligonucleotide
  Antisense strand to SEQ ID NO: 788160
caaucucuaccauaacuac

SEQ ID NO: 788162 - RNA, 19 nt, Artificial Sequence
  Description of Artificial Sequence: Synthetic oligonucleotide
  Sense strand starting at position 3715 of SEQ ID NO: 587383
cagucauggcaacagguaa

SEQ ID NO: 788163 - RNA, 19 nt, Artificial Sequence
  Description of Artificial Sequence: Synthetic oligonucleotide
  Antisense strand to SEQ ID NO: 788162
uuaccuguugccaugacug

SEQ ID NO: 788164 - RNA, 19 nt, Artificial Sequence
  Description of Artificial Sequence: Synthetic oligonucleotide
  Sense strand starting at position 3777 of SEQ ID NO: 587383
agccaaguacugugaugag

SEQ ID NO: 788165 - RNA, 19 nt, Artificial Sequence
  Description of Artificial Sequence: Synthetic oligonucleotide
  Antisense strand to SEQ ID NO: 788164
cucaucacaguacuuggcu

SEQ ID NO: 788166 - RNA, 19 nt, Artificial Sequence
  Description of Artificial Sequence: Synthetic oligonucleotide
  Sense strand starting at position 3931 of SEQ ID NO: 587383
cagaaauugugccucagau

SEQ ID NO: 788167 - RNA, 19 nt, Artificial Sequence
  Description of Artificial Sequence: Synthetic oligonucleotide
  Antisense strand to SEQ ID NO: 788166
aucugaggcacaauuucug

SEQ ID NO: 788168 - RNA, 19 nt, Artificial Sequence
  Description of Artificial Sequence: Synthetic oligonucleotide
  Sense strand starting at position 109 of SEQ ID NO: 587384
ugcuauauacuagaguauu

SEQ ID NO: 788169 - RNA, 19 nt, Artificial Sequence
  Description of Artificial Sequence: Synthetic oligonucleotide
  Antisense strand to SEQ ID NO: 788168
aauacucuaguauauagca

SEQ ID NO: 788170 - RNA, 19 nt, Artificial Sequence
  Description of Artificial Sequence: Synthetic oligonucleotide
  Sense strand starting at position 572 of SEQ ID NO: 587384
acuguaacaucaguaaaua

SEQ ID NO: 788171 - RNA, 19 nt, Artificial Sequence
  Description of Artificial Sequence: Synthetic oligonucleotide
  Antisense strand to SEQ ID NO: 788170
uauuuacugauguuacagu

SEQ ID NO: 788172 - RNA, 19 nt, Artificial Sequence
  Description of Artificial Sequence: Synthetic oligonucleotide
  Sense strand starting at position 856 of SEQ ID NO: 587384
uaauaaguaugagugaucu

SEQ ID NO: 788173 - RNA, 19 nt, Artificial Sequence
  Description of Artificial Sequence: Synthetic oligonucleotide
  Antisense strand to SEQ ID NO: 788172
agaucacucauacuuauua

SEQ ID NO: 788174 - RNA, 19 nt, Artificial Sequence
  Description of Artificial Sequence: Synthetic oligonucleotide
  Sense strand starting at position 860 of SEQ ID NO: 587384
aaguaugagugaucugaaa

SEQ ID NO: 788175 - RNA, 19 nt, Artificial Sequence
  Description of Artificial Sequence: Synthetic oligonucleotide
  Antisense strand to SEQ ID NO: 788174
uuucagaucacucauacuu

SEQ ID NO: 788176 - RNA, 19 nt, Artificial Sequence
  Description of Artificial Sequence: Synthetic oligonucleotide
  Sense strand starting at position 950 of SEQ ID NO: 587384
guccuagauccucauguuu

SEQ ID NO: 788177 - RNA, 19 nt, Artificial Sequence
  Description of Artificial Sequence: Synthetic oligonucleotide
  Antisense strand to SEQ ID NO: 788176
aaacaugaggaucuaggac

SEQ ID NO: 788178 - RNA, 19 nt, Artificial Sequence
  Description of Artificial Sequence: Synthetic oligonucleotide
  Sense strand starting at position 985 of SEQ ID NO: 587384
cucacaggcuugucacaaa

SEQ ID NO: 788179 - RNA, 19 nt, Artificial Sequence
  Description of Artificial Sequence: Synthetic oligonucleotide
  Antisense strand to SEQ ID NO: 788178
uuugugacaagccugugag

SEQ ID NO: 788180 - RNA, 19 nt, Artificial Sequence
  Description of Artificial Sequence: Synthetic oligonucleotide
  Sense strand starting at position 1046 of SEQ ID NO: 587384
cauaccugggaucguauau

SEQ ID NO: 788181 - RNA, 19 nt, Artificial Sequence
  Description of Artificial Sequence: Synthetic oligonucleotide
  Antisense strand to SEQ ID NO: 788180
auauacgaucccagguaug

SEQ ID NO: 788182 - RNA, 19 nt, Artificial Sequence
  Description of Artificial Sequence: Synthetic oligonucleotide
  Sense strand starting at position 1137 of SEQ ID NO: 587384
acaugagccuggucuuaag

SEQ ID NO: 788183 - RNA, 19 nt, Artificial Sequence
  Description of Artificial Sequence: Synthetic oligonucleotide
  Antisense strand to SEQ ID NO: 788182
cuuaagaccaggcucaugu

SEQ ID NO: 788184 - RNA, 19 nt, Artificial Sequence
  Description of Artificial Sequence: Synthetic oligonucleotide
  Sense strand starting at position 1232 of SEQ ID NO: 587384
ugggaagggugucuuuaau

SEQ ID NO: 788185 - RNA, 19 nt, Artificial Sequence
  Description of Artificial Sequence: Synthetic oligonucleotide
  Antisense strand to SEQ ID NO: 788184
auuaaagacacccuuccca

SEQ ID NO: 788186 - RNA, 19 nt, Artificial Sequence
  Description of Artificial Sequence: Synthetic oligonucleotide
  Sense strand starting at position 1296 of SEQ ID NO: 587384
uuugguuaucuauaagacu

SEQ ID NO: 788187 - RNA, 19 nt, Artificial Sequence
  Description of Artificial Sequence: Synthetic oligonucleotide
  Antisense strand to SEQ ID NO: 788186
agucuuauagauaaccaaa

SEQ ID NO: 788188 - RNA, 19 nt, Artificial Sequence
  Description of Artificial Sequence: Synthetic oligonucleotide
  Sense strand starting at position 1340 of SEQ ID NO: 587384
gcacaauuucugcaucugu

SEQ ID NO: 788189 - RNA, 19 nt, Artificial Sequence
  Description of Artificial Sequence: Synthetic oligonucleotide
  Antisense strand to SEQ ID NO: 788188
acagaugcagaaauugugc

SEQ ID NO: 788190 - RNA, 19 nt, Artificial Sequence
  Description of Artificial Sequence: Synthetic oligonucleotide
  Sense strand starting at position 1480 of SEQ ID NO: 587384
ugaagcucucaucacagua

SEQ ID NO: 788191 - RNA, 19 nt, Artificial Sequence
  Description of Artificial Sequence: Synthetic oligonucleotide
  Antisense strand to SEQ ID NO: 788190
uacugugaugagagcuuca

SEQ ID NO: 788192 - RNA, 19 nt, Artificial Sequence
  Description of Artificial Sequence: Synthetic oligonucleotide
  Sense strand starting at position 1495 of SEQ ID NO: 587384
aguacuuggcuugaugaua

SEQ ID NO: 788193 - RNA, 19 nt, Artificial Sequence
  Description of Artificial Sequence: Synthetic oligonucleotide
  Antisense strand to SEQ ID NO: 788192
uaucaucaagccaaguacu

SEQ ID NO: 788194 - RNA, 19 nt, Artificial Sequence
  Description of Artificial Sequence: Synthetic oligonucleotide
  Sense strand starting at position 1503 of SEQ ID NO: 587384
gcuugaugauaugugauca

SEQ ID NO: 788195 - RNA, 19 nt, Artificial Sequence
  Description of Artificial Sequence: Synthetic oligonucleotide
  Antisense strand to SEQ ID NO: 788194
ugaucacauaucaucaagc

SEQ ID NO: 788196 - RNA, 19 nt, Artificial Sequence
  Description of Artificial Sequence: Synthetic oligonucleotide
  Sense strand starting at position 1705 of SEQ ID NO: 587384
uuuguuagugagcaugaga

SEQ ID NO: 788197 - RNA, 19 nt, Artificial Sequence
  Description of Artificial Sequence: Synthetic oligonucleotide
  Antisense strand to SEQ ID NO: 788196
ucucaugcucacuaacaaa

SEQ ID NO: 788198 - RNA, 19 nt, Artificial Sequence
  Description of Artificial Sequence: Synthetic oligonucleotide
  Sense strand starting at position 1999 of SEQ ID NO: 587384
ugggugggucuugagagau

SEQ ID NO: 788199 - RNA, 19 nt, Artificial Sequence
  Description of Artificial Sequence: Synthetic oligonucleotide
  Antisense strand to SEQ ID NO: 788198
aucucucaagacccaccca

SEQ ID NO: 788200 - RNA, 19 nt, Artificial Sequence
  Description of Artificial Sequence: Synthetic oligonucleotide
  Sense strand starting at position 2021 of SEQ ID NO: 587384
caccguguccaugaggaaa

SEQ ID NO: 788201 - RNA, 19 nt, Artificial Sequence
  Description of Artificial Sequence: Synthetic oligonucleotide
  Antisense strand to SEQ ID NO: 788200
uuuccucauggacacggug

SEQ ID NO: 788202 - RNA, 19 nt, Artificial Sequence
  Description of Artificial Sequence: Synthetic oligonucleotide
  Sense strand starting at position 2080 of SEQ ID NO: 587384
guaacaucuugaucaguga

SEQ ID NO: 788203 - RNA, 19 nt, Artificial Sequence
  Description of Artificial Sequence: Synthetic oligonucleotide
  Antisense strand to SEQ ID NO: 788202
ucacugaucaagauguuac

SEQ ID NO: 788204 - RNA, 19 nt, Artificial Sequence
  Description of Artificial Sequence: Synthetic oligonucleotide
  Sense strand starting at position 2091 of SEQ ID NO: 587384
aucagugaggcuuagcaga

SEQ ID NO: 788205 - RNA, 19 nt, Artificial Sequence
  Description of Artificial Sequence: Synthetic oligonucleotide
  Antisense strand to SEQ ID NO: 788204
ucugcuaagccucacugau

SEQ ID NO: 788206 - RNA, 19 nt, Artificial Sequence
  Description of Artificial Sequence: Synthetic oligonucleotide
  Sense strand starting at position 2093 of SEQ ID NO: 587384
cagugaggcuuagcagaaa

SEQ ID NO: 788207 - RNA, 19 nt, Artificial Sequence
  Description of Artificial Sequence: Synthetic oligonucleotide
  Antisense strand to SEQ ID NO: 788206
uuucugcuaagccucacug

SEQ ID NO: 788208 - RNA, 19 nt, Artificial Sequence
  Description of Artificial Sequence: Synthetic oligonucleotide
  Sense strand starting at position 2316 of SEQ ID NO: 587384
acagcuuugguuuacucau

SEQ ID NO: 788209 - RNA, 19 nt, Artificial Sequence
  Description of Artificial Sequence: Synthetic oligonucleotide
  Antisense strand to SEQ ID NO: 788208
augaguaaaccaaagcugu

SEQ ID NO: 788210 - RNA, 19 nt, Artificial Sequence
  Description of Artificial Sequence: Synthetic oligonucleotide
  Sense strand starting at position 2372 of SEQ ID NO: 587384
ucaguuaagagcugaggaa

SEQ ID NO: 788211 - RNA, 19 nt, Artificial Sequence
  Description of Artificial Sequence: Synthetic oligonucleotide
  Antisense strand to SEQ ID NO: 788210
uuccucagcucuuaacuga

SEQ ID NO: 788212 - RNA, 19 nt, Artificial Sequence
  Description of Artificial Sequence: Synthetic oligonucleotide
  Sense strand starting at position 2397 of SEQ ID NO: 587384
ugagguggaaucugaauuc

SEQ ID NO: 788213 - RNA, 19 nt, Artificial Sequence
  Description of Artificial Sequence: Synthetic oligonucleotide
  Antisense strand to SEQ ID NO: 788212
gaauucagauuccaccuca

SEQ ID NO: 788214 - RNA, 19 nt, Artificial Sequence
  Description of Artificial Sequence: Synthetic oligonucleotide
  Sense strand starting at position 2446 of SEQ ID NO: 587384
uggcaaagggcuugaccua

SEQ ID NO: 788215 - RNA, 19 nt, Artificial Sequence
  Description of Artificial Sequence: Synthetic oligonucleotide
  Antisense strand to SEQ ID NO: 788214
uaggucaagcccuuugcca

SEQ ID NO: 788216 - RNA, 19 nt, Artificial Sequence
  Description of Artificial Sequence: Synthetic oligonucleotide
  Sense strand starting at position 2664 of SEQ ID NO: 587384
acccaucugggccaauauu

SEQ ID NO: 788217 - RNA, 19 nt, Artificial Sequence
  Description of Artificial Sequence: Synthetic oligonucleotide
  Antisense strand to SEQ ID NO: 788216
aauauuggcccagaugggu

SEQ ID NO: 788218 - RNA, 19 nt, Artificial Sequence
  Description of Artificial Sequence: Synthetic oligonucleotide
  Sense strand starting at position 2801 of SEQ ID NO: 587384
cccugugauacuuguagag

SEQ ID NO: 788219 - RNA, 19 nt, Artificial Sequence
  Description of Artificial Sequence: Synthetic oligonucleotide
  Antisense strand to SEQ ID NO: 788218
cucuacaaguaucacaggg

SEQ ID NO: 788220 - RNA, 19 nt, Artificial Sequence
  Description of Artificial Sequence: Synthetic oligonucleotide
  Sense strand starting at position 2861 of SEQ ID NO: 587384
gaguucuuacaugguacca

SEQ ID NO: 788221 - RNA, 19 nt, Artificial Sequence
  Description of Artificial Sequence: Synthetic oligonucleotide
  Antisense strand to SEQ ID NO: 788220
ugguaccauguaagaacuc

SEQ ID NO: 788222 - RNA, 19 nt, Artificial Sequence
  Description of Artificial Sequence: Synthetic oligonucleotide
  Sense strand starting at position 2951 of SEQ ID NO: 587384
uuuagaggcaggcagaauu

SEQ ID NO: 788223 - RNA, 19 nt, Artificial Sequence
  Description of Artificial Sequence: Synthetic oligonucleotide
  Antisense strand to SEQ ID NO: 788222
aauucugccugccucuaaa

SEQ ID NO: 788224 - RNA, 19 nt, Artificial Sequence
  Description of Artificial Sequence: Synthetic oligonucleotide
  Sense strand starting at position 3154 of SEQ ID NO: 587384
aaggguuauuauccaugau

SEQ ID NO: 788225 - RNA, 19 nt, Artificial Sequence
  Description of Artificial Sequence: Synthetic oligonucleotide
  Antisense strand to SEQ ID NO: 788224
aucauggauaauaacccuu

SEQ ID NO: 788226 - RNA, 19 nt, Artificial Sequence
  Description of Artificial Sequence: Synthetic oligonucleotide
  Sense strand starting at position 3157 of SEQ ID NO: 587384
gguuauuauccaugauauc

SEQ ID NO: 788227 - RNA, 19 nt, Artificial Sequence
  Description of Artificial Sequence: Synthetic oligonucleotide
  Antisense strand to SEQ ID NO: 788226
gauaucauggauaauaacc

SEQ ID NO: 788228 - RNA, 19 nt, Artificial Sequence
  Description of Artificial Sequence: Synthetic oligonucleotide
  Sense strand starting at position 3177 of SEQ ID NO: 587384
ucccuuuauccugggaaau

SEQ ID NO: 788229 - RNA, 19 nt, Artificial Sequence
  Description of Artificial Sequence: Synthetic oligonucleotide
  Antisense strand to SEQ ID NO: 788228
auuucccaggauaaaggga

SEQ ID NO: 788230 - RNA, 19 nt, Artificial Sequence
  Description of Artificial Sequence: Synthetic oligonucleotide
  Sense strand starting at position 3178 of SEQ ID NO: 587384
cccuuuauccugggaaaug

SEQ ID NO: 788231 - RNA, 19 nt, Artificial Sequence
  Description of Artificial Sequence: Synthetic oligonucleotide
  Antisense strand to SEQ ID NO: 788230
cauuucccaggauaaaggg

SEQ ID NO: 788232 - RNA, 19 nt, Artificial Sequence
  Description of Artificial Sequence: Synthetic oligonucleotide
  Sense strand starting at position 3437 of SEQ ID NO: 587384
gauuauaaagccuguugau

SEQ ID NO: 788233 - RNA, 19 nt, Artificial Sequence
  Description of Artificial Sequence: Synthetic oligonucleotide
  Antisense strand to SEQ ID NO: 788232
aucaacaggcuuuauaauc

SEQ ID NO: 788234 - RNA, 19 nt, Artificial Sequence
  Description of Artificial Sequence: Synthetic oligonucleotide
  Sense strand starting at position 3461 of SEQ ID NO: 587384
cauguuugaccuuaauggu

SEQ ID NO: 788235 - RNA, 19 nt, Artificial Sequence
  Description of Artificial Sequence: Synthetic oligonucleotide
  Antisense strand to SEQ ID NO: 788234
accauuaaggucaaacaug

SEQ ID NO: 788236 - RNA, 19 nt, Artificial Sequence
  Description of Artificial Sequence: Synthetic oligonucleotide
  Sense strand starting at position 3501 of SEQ ID NO: 587384
augggaauuucuuagaccu

SEQ ID NO: 788237 - RNA, 19 nt, Artificial Sequence
  Description of Artificial Sequence: Synthetic oligonucleotide
  Antisense strand to SEQ ID NO: 788236
aggucuaagaaauucccau

SEQ ID NO: 788238 - RNA, 19 nt, Artificial Sequence
  Description of Artificial Sequence: Synthetic oligonucleotide
  Sense strand starting at position 3503 of SEQ ID NO: 587384
gggaauuucuuagaccuac

SEQ ID NO: 788239 - RNA, 19 nt, Artificial Sequence
  Description of Artificial Sequence: Synthetic oligonucleotide
  Antisense strand to SEQ ID NO: 788238
guaggucuaagaaauuccc

SEQ ID NO: 788240 - RNA, 19 nt, Artificial Sequence
  Description of Artificial Sequence: Synthetic oligonucleotide
  Sense strand starting at position 3512 of SEQ ID NO: 587384
uuagaccuacagugacauu

SEQ ID NO: 788241 - RNA, 19 nt, Artificial Sequence
  Description of Artificial Sequence: Synthetic oligonucleotide
  Antisense strand to SEQ ID NO: 788240
aaugucacuguaggucuaa

SEQ ID NO: 788242 - RNA, 19 nt, Artificial Sequence
  Description of Artificial Sequence: Synthetic oligonucleotide
  Sense strand starting at position 3596 of SEQ ID NO: 587384
gaaugcuggccuugagaaa

SEQ ID NO: 788243 - RNA, 19 nt, Artificial Sequence
  Description of Artificial Sequence: Synthetic oligonucleotide
  Antisense strand to SEQ ID NO: 788242
uuucucaaggccagcauuc

SEQ ID NO: 788244 - RNA, 19 nt, Artificial Sequence
  Description of Artificial Sequence: Synthetic oligonucleotide
  Sense strand starting at position 3783 of SEQ ID NO: 587384
uccaucagguaaguuaaau

SEQ ID NO: 788245 - RNA, 19 nt, Artificial Sequence
  Description of Artificial Sequence: Synthetic oligonucleotide
  Antisense strand to SEQ ID NO: 788244
auuuaacuuaccugaugga

SEQ ID NO: 788246 - RNA, 19 nt, Artificial Sequence
  Description of Artificial Sequence: Synthetic oligonucleotide
  Sense strand starting at position 3853 of SEQ ID NO: 587384
cucugaugucuggaggcaa

SEQ ID NO: 788247 - RNA, 19 nt, Artificial Sequence
  Description of Artificial Sequence: Synthetic oligonucleotide
  Antisense strand to SEQ ID NO: 788246
uugccuccagacaucagag

SEQ ID NO: 788248 - RNA, 19 nt, Artificial Sequence
  Description of Artificial Sequence: Synthetic oligonucleotide
  Sense strand starting at position 74 of SEQ ID NO: 587385
ugcuauauacuagaguauu

SEQ ID NO: 788249 - RNA, 19 nt, Artificial Sequence
  Description of Artificial Sequence: Synthetic oligonucleotide
  Antisense strand to SEQ ID NO: 788248
aauacucuaguauauagca

SEQ ID NO: 788250 - RNA, 19 nt, Artificial Sequence
  Description of Artificial Sequence: Synthetic oligonucleotide
  Sense strand starting at position 573 of SEQ ID NO: 587385
acuguaacaucaguaaaua

SEQ ID NO: 788251 - RNA, 19 nt, Artificial Sequence
  Description of Artificial Sequence: Synthetic oligonucleotide
  Antisense strand to SEQ ID NO: 788250
uauuuacugauguuacagu

SEQ ID NO: 788252 - RNA, 19 nt, Artificial Sequence
  Description of Artificial Sequence: Synthetic oligonucleotide
  Sense strand starting at position 857 of SEQ ID NO: 587385
uaauaaguaugagugaucu

SEQ ID NO: 788253 - RNA, 19 nt, Artificial Sequence
  Description of Artificial Sequence: Synthetic oligonucleotide
  Antisense strand to SEQ ID NO: 788252
agaucacucauacuuauua

SEQ ID NO: 788254 - RNA, 19 nt, Artificial Sequence
  Description of Artificial Sequence: Synthetic oligonucleotide
  Sense strand starting at position 861 of SEQ ID NO: 587385
aaguaugagugaucugaaa

SEQ ID NO: 788255 - RNA, 19 nt, Artificial Sequence
  Description of Artificial Sequence: Synthetic oligonucleotide
  Antisense strand to SEQ ID NO: 788254
uuucagaucacucauacuu

SEQ ID NO: 788256 - RNA, 19 nt, Artificial Sequence
  Description of Artificial Sequence: Synthetic oligonucleotide
  Sense strand starting at position 951 of SEQ ID NO: 587385
guccuagauccucauguuu

SEQ ID NO: 788257 - RNA, 19 nt, Artificial Sequence
  Description of Artificial Sequence: Synthetic oligonucleotide
  Antisense strand to SEQ ID NO: 788256
aaacaugaggaucuaggac

SEQ ID NO: 788258 - RNA, 19 nt, Artificial Sequence
  Description of Artificial Sequence: Synthetic oligonucleotide
  Sense strand starting at position 986 of SEQ ID NO: 587385
cucacaggcuugucacaaa

SEQ ID NO: 788259 - RNA, 19 nt, Artificial Sequence
  Description of Artificial Sequence: Synthetic oligonucleotide
  Antisense strand to SEQ ID NO: 788258
uuugugacaagccugugag

SEQ ID NO: 788260 - RNA, 19 nt, Artificial Sequence
  Description of Artificial Sequence: Synthetic oligonucleotide
  Sense strand starting at position 1047 of SEQ ID NO: 587385
cauaccugggaucguauau

SEQ ID NO: 788261 - RNA, 19 nt, Artificial Sequence
  Description of Artificial Sequence: Synthetic oligonucleotide
  Antisense strand to SEQ ID NO: 788260
auauacgaucccagguaug

SEQ ID NO: 788262 - RNA, 19 nt, Artificial Sequence
  Description of Artificial Sequence: Synthetic oligonucleotide
  Sense strand starting at position 1064 of SEQ ID NO: 587385
aucacugguaucuggcaga

SEQ ID NO: 788263 - RNA, 19 nt, Artificial Sequence
  Description of Artificial Sequence: Synthetic oligonucleotide
  Antisense strand to SEQ ID NO: 788262
ucugccagauaccagugau

SEQ ID NO: 788264 - RNA, 19 nt, Artificial Sequence
  Description of Artificial Sequence: Synthetic oligonucleotide
  Sense strand starting at position 1138 of SEQ ID NO: 587385
acaugagccuggucuuaag

SEQ ID NO: 788265 - RNA, 19 nt, Artificial Sequence
  Description of Artificial Sequence: Synthetic oligonucleotide
  Antisense strand to SEQ ID NO: 788264
cuuaagaccaggcucaugu

SEQ ID NO: 788266 - RNA, 19 nt, Artificial Sequence
  Description of Artificial Sequence: Synthetic oligonucleotide
  Sense strand starting at position 1233 of SEQ ID NO: 587385
ugggaagggugucuuuaau

SEQ ID NO: 788267 - RNA, 19 nt, Artificial Sequence
  Description of Artificial Sequence: Synthetic oligonucleotide
  Antisense strand to SEQ ID NO: 788266
auuaaagacacccuuccca

SEQ ID NO: 788268 - RNA, 19 nt, Artificial Sequence
  Description of Artificial Sequence: Synthetic oligonucleotide
  Sense strand starting at position 1297 of SEQ ID NO: 587385
uuugguuaucuauaagacu

SEQ ID NO: 788269 - RNA, 19 nt, Artificial Sequence
  Description of Artificial Sequence: Synthetic oligonucleotide
  Antisense strand to SEQ ID NO: 788268
agucuuauagauaaccaaa

SEQ ID NO: 788270 - RNA, 19 nt, Artificial Sequence
  Description of Artificial Sequence: Synthetic oligonucleotide
  Sense strand starting at position 1481 of SEQ ID NO: 587385
ugaagcucucaucacagua

SEQ ID NO: 788271 - RNA, 19 nt, Artificial Sequence
  Description of Artificial Sequence: Synthetic oligonucleotide
  Antisense strand to SEQ ID NO: 788270
uacugugaugagagcuuca

SEQ ID NO: 788272 - RNA, 19 nt, Artificial Sequence
  Description of Artificial Sequence: Synthetic oligonucleotide
  Sense strand starting at position 1496 of SEQ ID NO: 587385
aguacuuggcuugaugaua

SEQ ID NO: 788273 - RNA, 19 nt, Artificial Sequence
  Description of Artificial Sequence: Synthetic oligonucleotide
  Antisense strand to SEQ ID NO: 788272
uaucaucaagccaaguacu

SEQ ID NO: 788274 - RNA, 19 nt, Artificial Sequence
  Description of Artificial Sequence: Synthetic oligonucleotide
  Sense strand starting at position 1504 of SEQ ID NO: 587385
gcuugaugauaugugauca

SEQ ID NO: 788275 - RNA, 19 nt, Artificial Sequence
  Description of Artificial Sequence: Synthetic oligonucleotide
  Antisense strand to SEQ ID NO: 788274
ugaucacauaucaucaagc

SEQ ID NO: 788276 - RNA, 19 nt, Artificial Sequence
  Description of Artificial Sequence: Synthetic oligonucleotide
  Sense strand starting at position 1706 of SEQ ID NO: 587385
uuuguuagugagcaugaga

SEQ ID NO: 788277 - RNA, 19 nt, Artificial Sequence
  Description of Artificial Sequence: Synthetic oligonucleotide
  Antisense strand to SEQ ID NO: 788276
ucucaugcucacuaacaaa

SEQ ID NO: 788278 - RNA, 19 nt, Artificial Sequence
  Description of Artificial Sequence: Synthetic oligonucleotide
  Sense strand starting at position 2000 of SEQ ID NO: 587385
ugggugggucuugagagau

SEQ ID NO: 788279 - RNA, 19 nt, Artificial Sequence
  Description of Artificial Sequence: Synthetic oligonucleotide
  Antisense strand to SEQ ID NO: 788278
aucucucaagacccaccca

SEQ ID NO: 788280 - RNA, 19 nt, Artificial Sequence
  Description of Artificial Sequence: Synthetic oligonucleotide
  Sense strand starting at position 2022 of SEQ ID NO: 587385
caccguguccaugaggaaa

SEQ ID NO: 788281 - RNA, 19 nt, Artificial Sequence
  Description of Artificial Sequence: Synthetic oligonucleotide
  Antisense strand to SEQ ID NO: 788280
uuuccucauggacacggug

SEQ ID NO: 788282 - RNA, 19 nt, Artificial Sequence
  Description of Artificial Sequence: Synthetic oligonucleotide
  Sense strand starting at position 2092 of SEQ ID NO: 587385
aucagugaggcuuagcaga

SEQ ID NO: 788283 - RNA, 19 nt, Artificial Sequence
  Description of Artificial Sequence: Synthetic oligonucleotide
  Antisense strand to SEQ ID NO: 788282
ucugcuaagccucacugau

SEQ ID NO: 788284 - RNA, 19 nt, Artificial Sequence
  Description of Artificial Sequence: Synthetic oligonucleotide
  Sense strand starting at position 2094 of SEQ ID NO: 587385
cagugaggcuuagcagaaa

SEQ ID NO: 788285 - RNA, 19 nt, Artificial Sequence
  Description of Artificial Sequence: Synthetic oligonucleotide
  Antisense strand to SEQ ID NO: 788284
uuucugcuaagccucacug

SEQ ID NO: 788286 - RNA, 19 nt, Artificial Sequence
  Description of Artificial Sequence: Synthetic oligonucleotide
  Sense strand starting at position 2317 of SEQ ID NO: 587385
acagcuuugguuuacucau

SEQ ID NO: 788287 - RNA, 19 nt, Artificial Sequence
  Description of Artificial Sequence: Synthetic oligonucleotide
  Antisense strand to SEQ ID NO: 788286
augaguaaaccaaagcugu

SEQ ID NO: 788288 - RNA, 19 nt, Artificial Sequence
  Description of Artificial Sequence: Synthetic oligonucleotide
  Sense strand starting at position 2373 of SEQ ID NO: 587385
ucaguuaagagcugaggaa

SEQ ID NO: 788289 - RNA, 19 nt, Artificial Sequence
  Description of Artificial Sequence: Synthetic oligonucleotide
  Antisense strand to SEQ ID NO: 788288
uuccucagcucuuaacuga

SEQ ID NO: 788290 - RNA, 19 nt, Artificial Sequence
  Description of Artificial Sequence: Synthetic oligonucleotide
  Sense strand starting at position 2398 of SEQ ID NO: 587385
ugagguggaaucugaauuc

SEQ ID NO: 788291 - RNA, 19 nt, Artificial Sequence
  Description of Artificial Sequence: Synthetic oligonucleotide
  Antisense strand to SEQ ID NO: 788290
gaauucagauuccaccuca

SEQ ID NO: 788292 - RNA, 19 nt, Artificial Sequence
  Description of Artificial Sequence: Synthetic oligonucleotide
  Sense strand starting at position 2665 of SEQ ID NO: 587385
acccaucugggccaauauu

SEQ ID NO: 788293 - RNA, 19 nt, Artificial Sequence
  Description of Artificial Sequence: Synthetic oligonucleotide
  Antisense strand to SEQ ID NO: 788292
aauauuggcccagaugggu

SEQ ID NO: 788294 - RNA, 19 nt, Artificial Sequence
  Description of Artificial Sequence: Synthetic oligonucleotide
  Sense strand starting at position 2856 of SEQ ID NO: 587385
uuuauugaguucuuacaug

SEQ ID NO: 788295 - RNA, 19 nt, Artificial Sequence
  Description of Artificial Sequence: Synthetic oligonucleotide
  Antisense strand to SEQ ID NO: 788294
cauguaagaacucaauaaa

SEQ ID NO: 788296 - RNA, 19 nt, Artificial Sequence
  Description of Artificial Sequence: Synthetic oligonucleotide
  Sense strand starting at position 2862 of SEQ ID NO: 587385
gaguucuuacaugguacca

SEQ ID NO: 788297 - RNA, 19 nt, Artificial Sequence
  Description of Artificial Sequence: Synthetic oligonucleotide
  Antisense strand to SEQ ID NO: 788296
ugguaccauguaagaacuc

SEQ ID NO: 788298 - RNA, 19 nt, Artificial Sequence
  Description of Artificial Sequence: Synthetic oligonucleotide
  Sense strand starting at position 2952 of SEQ ID NO: 587385
uuuagaggcaggcagaauu

SEQ ID NO: 788299 - RNA, 19 nt, Artificial Sequence
  Description of Artificial Sequence: Synthetic oligonucleotide
  Antisense strand to SEQ ID NO: 788298
aauucugccugccucuaaa

SEQ ID NO: 788300 - RNA, 19 nt, Artificial Sequence
  Description of Artificial Sequence: Synthetic oligonucleotide
  Sense strand starting at position 3155 of SEQ ID NO: 587385
aaggguuauuauccaugau

SEQ ID NO: 788301 - RNA, 19 nt, Artificial Sequence
  Description of Artificial Sequence: Synthetic oligonucleotide
  Antisense strand to SEQ ID NO: 788300
aucauggauaauaacccuu

SEQ ID NO: 788302 - RNA, 19 nt, Artificial Sequence
  Description of Artificial Sequence: Synthetic oligonucleotide
  Sense strand starting at position 3158 of SEQ ID NO: 587385
gguuauuauccaugauauc

SEQ ID NO: 788303 - RNA, 19 nt, Artificial Sequence
  Description of Artificial Sequence: Synthetic oligonucleotide
  Antisense strand to SEQ ID NO: 788302
gauaucauggauaauaacc

SEQ ID NO: 788304 - RNA, 19 nt, Artificial Sequence
  Description of Artificial Sequence: Synthetic oligonucleotide
  Sense strand starting at position 3178 of SEQ ID NO: 587385
ucccuuuauccugggaaau

SEQ ID NO: 788305 - RNA, 19 nt, Artificial Sequence
  Description of Artificial Sequence: Synthetic oligonucleotide
  Antisense strand to SEQ ID NO: 788304
auuucccaggauaaaggga

SEQ ID NO: 788306 - RNA, 19 nt, Artificial Sequence
  Description of Artificial Sequence: Synthetic oligonucleotide
  Sense strand starting at position 3179 of SEQ ID NO: 587385
cccuuuauccugggaaaug

SEQ ID NO: 788307 - RNA, 19 nt, Artificial Sequence
  Description of Artificial Sequence: Synthetic oligonucleotide
  Antisense strand to SEQ ID NO: 788306
cauuucccaggauaaaggg

SEQ ID NO: 788308 - RNA, 19 nt, Artificial Sequence
  Description of Artificial Sequence: Synthetic oligonucleotide
  Sense strand starting at position 3283 of SEQ ID NO: 587385
gggucuucucaaggaaauc

SEQ ID NO: 788309 - RNA, 19 nt, Artificial Sequence
  Description of Artificial Sequence: Synthetic oligonucleotide
  Antisense strand to SEQ ID NO: 788308
gauuuccuugagaagaccc

SEQ ID NO: 788310 - RNA, 19 nt, Artificial Sequence
  Description of Artificial Sequence: Synthetic oligonucleotide
  Sense strand starting at position 3307 of SEQ ID NO: 587385
cucuauuccgaagagucuu

SEQ ID NO: 788311 - RNA, 19 nt, Artificial Sequence
  Description of Artificial Sequence: Synthetic oligonucleotide
  Antisense strand to SEQ ID NO: 788310
aagacucuucggaauagag

SEQ ID NO: 788312 - RNA, 19 nt, Artificial Sequence
  Description of Artificial Sequence: Synthetic oligonucleotide
  Sense strand starting at position 3438 of SEQ ID NO: 587385
gauuauaaagccuguugau

SEQ ID NO: 788313 - RNA, 19 nt, Artificial Sequence
  Description of Artificial Sequence: Synthetic oligonucleotide
  Antisense strand to SEQ ID NO: 788312
aucaacaggcuuuauaauc

SEQ ID NO: 788314 - RNA, 19 nt, Artificial Sequence
  Description of Artificial Sequence: Synthetic oligonucleotide
  Sense strand starting at position 3462 of SEQ ID NO: 587385
cauguuugaccuuaauggu

SEQ ID NO: 788315 - RNA, 19 nt, Artificial Sequence
  Description of Artificial Sequence: Synthetic oligonucleotide
  Antisense strand to SEQ ID NO: 788314
accauuaaggucaaacaug

SEQ ID NO: 788316 - RNA, 19 nt, Artificial Sequence
  Description of Artificial Sequence: Synthetic oligonucleotide
  Sense strand starting at position 3502 of SEQ ID NO: 587385
augggaauuucuuagaccu

SEQ ID NO: 788317 - RNA, 19 nt, Artificial Sequence
  Description of Artificial Sequence: Synthetic oligonucleotide
  Antisense strand to SEQ ID NO: 788316
aggucuaagaaauucccau

SEQ ID NO: 788318 - RNA, 19 nt, Artificial Sequence
  Description of Artificial Sequence: Synthetic oligonucleotide
  Sense strand starting at position 3504 of SEQ ID NO: 587385
gggaauuucuuagaccuac

SEQ ID NO: 788319 - RNA, 19 nt, Artificial Sequence
  Description of Artificial Sequence: Synthetic oligonucleotide
  Antisense strand to SEQ ID NO: 788318
guaggucuaagaaauuccc

SEQ ID NO: 788320 - RNA, 19 nt, Artificial Sequence
  Description of Artificial Sequence: Synthetic oligonucleotide
  Sense strand starting at position 3513 of SEQ ID NO: 587385
uuagaccuacagugacauu

SEQ ID NO: 788321 - RNA, 19 nt, Artificial Sequence
  Description of Artificial Sequence: Synthetic oligonucleotide
  Antisense strand to SEQ ID NO: 788320
aaugucacuguaggucuaa

SEQ ID NO: 788322 - RNA, 19 nt, Artificial Sequence
  Description of Artificial Sequence: Synthetic oligonucleotide
  Sense strand starting at position 3597 of SEQ ID NO: 587385
gaaugcuggccuugagaaa

SEQ ID NO: 788323 - RNA, 19 nt, Artificial Sequence
  Description of Artificial Sequence: Synthetic oligonucleotide
  Antisense strand to SEQ ID NO: 788322
uuucucaaggccagcauuc

SEQ ID NO: 788324 - RNA, 19 nt, Artificial Sequence
  Description of Artificial Sequence: Synthetic oligonucleotide
  Sense strand starting at position 3784 of SEQ ID NO: 587385
uccaucagguaaguuaaau

SEQ ID NO: 788325 - RNA, 19 nt, Artificial Sequence
  Description of Artificial Sequence: Synthetic oligonucleotide
  Antisense strand to SEQ ID NO: 788324
auuuaacuuaccugaugga

SEQ ID NO: 788326 - RNA, 19 nt, Artificial Sequence
  Description of Artificial Sequence: Synthetic oligonucleotide
  Sense strand starting at position 3854 of SEQ ID NO: 587385
cucugaugucuggaggcaa

SEQ ID NO: 788327 - RNA, 19 nt, Artificial Sequence
  Description of Artificial Sequence: Synthetic oligonucleotide
  Antisense strand to SEQ ID NO: 788326
uugccuccagacaucagag

SEQ ID NO: 788328 - RNA, 19 nt, Artificial Sequence
  Description of Artificial Sequence: Synthetic oligonucleotide
  Sense strand starting at position 109 of SEQ ID NO: 587386
ugcuauauacuagaguauu

SEQ ID NO: 788329 - RNA, 19 nt, Artificial Sequence
  Description of Artificial Sequence: Synthetic oligonucleotide
  Antisense strand to SEQ ID NO: 788328
aauacucuaguauauagca

SEQ ID NO: 788330 - RNA, 19 nt, Artificial Sequence
  Description of Artificial Sequence: Synthetic oligonucleotide
  Sense strand starting at position 572 of SEQ ID NO: 587386
acuguaacaucaguaaaua

SEQ ID NO: 788331 - RNA, 19 nt, Artificial Sequence
  Description of Artificial Sequence: Synthetic oligonucleotide
  Antisense strand to SEQ ID NO: 788330
uauuuacugauguuacagu

SEQ ID NO: 788332 - RNA, 19 nt, Artificial Sequence
  Description of Artificial Sequence: Synthetic oligonucleotide
  Sense strand starting at position 856 of SEQ ID NO: 587386
uaauaaguaugagugaucu

SEQ ID NO: 788333 - RNA, 19 nt, Artificial Sequence
  Description of Artificial Sequence: Synthetic oligonucleotide
  Antisense strand to SEQ ID NO: 788332
agaucacucauacuuauua

SEQ ID NO: 788334 - RNA, 19 nt, Artificial Sequence
  Description of Artificial Sequence: Synthetic oligonucleotide
  Sense strand starting at position 860 of SEQ ID NO: 587386
aaguaugagugaucugaaa

SEQ ID NO: 788335 - RNA, 19 nt, Artificial Sequence
  Description of Artificial Sequence: Synthetic oligonucleotide
  Antisense strand to SEQ ID NO: 788334
uuucagaucacucauacuu

SEQ ID NO: 788336 - RNA, 19 nt, Artificial Sequence
  Description of Artificial Sequence: Synthetic oligonucleotide
  Sense strand starting at position 950 of SEQ ID NO: 587386
guccuagauccucauguuu

SEQ ID NO: 788337 - RNA, 19 nt, Artificial Sequence
  Description of Artificial Sequence: Synthetic oligonucleotide
  Antisense strand to SEQ ID NO: 788336
aaacaugaggaucuaggac

SEQ ID NO: 788338 - RNA, 19 nt, Artificial Sequence
  Description of Artificial Sequence: Synthetic oligonucleotide
  Sense strand starting at position 985 of SEQ ID NO: 587386
cucacaggcuugucacaaa

SEQ ID NO: 788339 - RNA, 19 nt, Artificial Sequence
  Description of Artificial Sequence: Synthetic oligonucleotide
  Antisense strand to SEQ ID NO: 788338
uuugugacaagccugugag

SEQ ID NO: 788340 - RNA, 19 nt, Artificial Sequence
  Description of Artificial Sequence: Synthetic oligonucleotide
  Sense strand starting at position 1046 of SEQ ID NO: 587386
cauaccugggaucguauau

SEQ ID NO: 788341 - RNA, 19 nt, Artificial Sequence
  Description of Artificial Sequence: Synthetic oligonucleotide
  Antisense strand to SEQ ID NO: 788340
auauacgaucccagguaug

SEQ ID NO: 788342 - RNA, 19 nt, Artificial Sequence
  Description of Artificial Sequence: Synthetic oligonucleotide
  Sense strand starting at position 1137 of SEQ ID NO: 587386
acaugagccuggucuuaag

SEQ ID NO: 788343 - RNA, 19 nt, Artificial Sequence
  Description of Artificial Sequence: Synthetic oligonucleotide
  Antisense strand to SEQ ID NO: 788342
cuuaagaccaggcucaugu

SEQ ID NO: 788344 - RNA, 19 nt, Artificial Sequence
  Description of Artificial Sequence: Synthetic oligonucleotide
  Sense strand starting at position 1232 of SEQ ID NO: 587386
ugggaagggugucuuuaau

SEQ ID NO: 788345 - RNA, 19 nt, Artificial Sequence
  Description of Artificial Sequence: Synthetic oligonucleotide
  Antisense strand to SEQ ID NO: 788344
auuaaagacacccuuccca

SEQ ID NO: 788346 - RNA, 19 nt, Artificial Sequence
  Description of Artificial Sequence: Synthetic oligonucleotide
  Sense strand starting at position 1296 of SEQ ID NO: 587386
uuugguuaucuauaagacu

SEQ ID NO: 788347 - RNA, 19 nt, Artificial Sequence
  Description of Artificial Sequence: Synthetic oligonucleotide
  Antisense strand to SEQ ID NO: 788346
agucuuauagauaaccaaa

SEQ ID NO: 788348 - RNA, 19 nt, Artificial Sequence
  Description of Artificial Sequence: Synthetic oligonucleotide
  Sense strand starting at position 1340 of SEQ ID NO: 587386
gcacaauuucugcaucugu

SEQ ID NO: 788349 - RNA, 19 nt, Artificial Sequence
  Description of Artificial Sequence: Synthetic oligonucleotide
  Antisense strand to SEQ ID NO: 788348
acagaugcagaaauugugc

SEQ ID NO: 788350 - RNA, 19 nt, Artificial Sequence
  Description of Artificial Sequence: Synthetic oligonucleotide
  Sense strand starting at position 1480 of SEQ ID NO: 587386
ugaagcucucaucacagua

SEQ ID NO: 788351 - RNA, 19 nt, Artificial Sequence
  Description of Artificial Sequence: Synthetic oligonucleotide
  Antisense strand to SEQ ID NO: 788350
uacugugaugagagcuuca

SEQ ID NO: 788352 - RNA, 19 nt, Artificial Sequence
  Description of Artificial Sequence: Synthetic oligonucleotide
  Sense strand starting at position 1495 of SEQ ID NO: 587386
aguacuuggcuugaugaua

SEQ ID NO: 788353 - RNA, 19 nt, Artificial Sequence
  Description of Artificial Sequence: Synthetic oligonucleotide
  Antisense strand to SEQ ID NO: 788352
uaucaucaagccaaguacu

SEQ ID NO: 788354 - RNA, 19 nt, Artificial Sequence
  Description of Artificial Sequence: Synthetic oligonucleotide
  Sense strand starting at position 1503 of SEQ ID NO: 587386
gcuugaugauaugugauca

SEQ ID NO: 788355 - RNA, 19 nt, Artificial Sequence
  Description of Artificial Sequence: Synthetic oligonucleotide
  Antisense strand to SEQ ID NO: 788354
ugaucacauaucaucaagc

SEQ ID NO: 788356 - RNA, 19 nt, Artificial Sequence
  Description of Artificial Sequence: Synthetic oligonucleotide
  Sense strand starting at position 1705 of SEQ ID NO: 587386
uuuguuagugagcaugaga

SEQ ID NO: 788357 - RNA, 19 nt, Artificial Sequence
  Description of Artificial Sequence: Synthetic oligonucleotide
  Antisense strand to SEQ ID NO: 788356
ucucaugcucacuaacaaa

SEQ ID NO: 788358 - RNA, 19 nt, Artificial Sequence
  Description of Artificial Sequence: Synthetic oligonucleotide
  Sense strand starting at position 1999 of SEQ ID NO: 587386
ugggugggucuugagagau

SEQ ID NO: 788359 - RNA, 19 nt, Artificial Sequence
  Description of Artificial Sequence: Synthetic oligonucleotide
  Antisense strand to SEQ ID NO: 788358
aucucucaagacccaccca

SEQ ID NO: 788360 - RNA, 19 nt, Artificial Sequence
  Description of Artificial Sequence: Synthetic oligonucleotide
  Sense strand starting at position 2021 of SEQ ID NO: 587386
caccguguccaugaggaaa

SEQ ID NO: 788361 - RNA, 19 nt, Artificial Sequence
  Description of Artificial Sequence: Synthetic oligonucleotide
  Antisense strand to SEQ ID NO: 788360
uuuccucauggacacggug

SEQ ID NO: 788362 - RNA, 19 nt, Artificial Sequence
  Description of Artificial Sequence: Synthetic oligonucleotide
  Sense strand starting at position 2080 of SEQ ID NO: 587386
guaacaucuugaucaguga

SEQ ID NO: 788363 - RNA, 19 nt, Artificial Sequence
  Description of Artificial Sequence: Synthetic oligonucleotide
  Antisense strand to SEQ ID NO: 788362
ucacugaucaagauguuac

SEQ ID NO: 788364 - RNA, 19 nt, Artificial Sequence
  Description of Artificial Sequence: Synthetic oligonucleotide
  Sense strand starting at position 2091 of SEQ ID NO: 587386
aucagugaggcuuagcaga

SEQ ID NO: 788365 - RNA, 19 nt, Artificial Sequence
  Description of Artificial Sequence: Synthetic oligonucleotide
  Antisense strand to SEQ ID NO: 788364
ucugcuaagccucacugau

SEQ ID NO: 788366 - RNA, 19 nt, Artificial Sequence
  Description of Artificial Sequence: Synthetic oligonucleotide
  Sense strand starting at position 2093 of SEQ ID NO: 587386
cagugaggcuuagcagaaa

SEQ ID NO: 788367 - RNA, 19 nt, Artificial Sequence
  Description of Artificial Sequence: Synthetic oligonucleotide
  Antisense strand to SEQ ID NO: 788366
uuucugcuaagccucacug

SEQ ID NO: 788368 - RNA, 19 nt, Artificial Sequence
  Description of Artificial Sequence: Synthetic oligonucleotide
  Sense strand starting at position 2316 of SEQ ID NO: 587386
acagcuuugguuuacucau

SEQ ID NO: 788369 - RNA, 19 nt, Artificial Sequence
  Description of Artificial Sequence: Synthetic oligonucleotide
  Antisense strand to SEQ ID NO: 788368
augaguaaaccaaagcugu

SEQ ID NO: 788370 - RNA, 19 nt, Artificial Sequence
  Description of Artificial Sequence: Synthetic oligonucleotide
  Sense strand starting at position 2372 of SEQ ID NO: 587386
ucaguuaagagcugaggaa

SEQ ID NO: 788371 - RNA, 19 nt, Artificial Sequence
  Description of Artificial Sequence: Synthetic oligonucleotide
  Antisense strand to SEQ ID NO: 788370
uuccucagcucuuaacuga

SEQ ID NO: 788372 - RNA, 19 nt, Artificial Sequence
  Description of Artificial Sequence: Synthetic oligonucleotide
  Sense strand starting at position 2397 of SEQ ID NO: 587386
ugagguggaaucugaauuc

SEQ ID NO: 788373 - RNA, 19 nt, Artificial Sequence
  Description of Artificial Sequence: Synthetic oligonucleotide
  Antisense strand to SEQ ID NO: 788372
gaauucagauuccaccuca

SEQ ID NO: 788374 - RNA, 19 nt, Artificial Sequence
  Description of Artificial Sequence: Synthetic oligonucleotide
  Sense strand starting at position 2446 of SEQ ID NO: 587386
uggcaaagggcuugaccua

SEQ ID NO: 788375 - RNA, 19 nt, Artificial Sequence
  Description of Artificial Sequence: Synthetic oligonucleotide
  Antisense strand to SEQ ID NO: 788374
uaggucaagcccuuugcca

SEQ ID NO: 788376 - RNA, 19 nt, Artificial Sequence
  Description of Artificial Sequence: Synthetic oligonucleotide
  Sense strand starting at position 2664 of SEQ ID NO: 587386
acccaucugggccaauauu

SEQ ID NO: 788377 - RNA, 19 nt, Artificial Sequence
  Description of Artificial Sequence: Synthetic oligonucleotide
  Antisense strand to SEQ ID NO: 788376
aauauuggcccagaugggu

SEQ ID NO: 788378 - RNA, 19 nt, Artificial Sequence
  Description of Artificial Sequence: Synthetic oligonucleotide
  Sense strand starting at position 2801 of SEQ ID NO: 587386
cccugugauacuuguagag

SEQ ID NO: 788379 - RNA, 19 nt, Artificial Sequence
  Description of Artificial Sequence: Synthetic oligonucleotide
  Antisense strand to SEQ ID NO: 788378
cucuacaaguaucacaggg

SEQ ID NO: 788380 - RNA, 19 nt, Artificial Sequence
  Description of Artificial Sequence: Synthetic oligonucleotide
  Sense strand starting at position 2861 of SEQ ID NO: 587386
gaguucuuacaugguacca

SEQ ID NO: 788381 - RNA, 19 nt, Artificial Sequence
  Description of Artificial Sequence: Synthetic oligonucleotide
  Antisense strand to SEQ ID NO: 788380
ugguaccauguaagaacuc

SEQ ID NO: 788382 - RNA, 19 nt, Artificial Sequence
  Description of Artificial Sequence: Synthetic oligonucleotide
  Sense strand starting at position 2951 of SEQ ID NO: 587386
uuuagaggcaggcagaauu

SEQ ID NO: 788383 - RNA, 19 nt, Artificial Sequence
  Description of Artificial Sequence: Synthetic oligonucleotide
  Antisense strand to SEQ ID NO: 788382
aauucugccugccucuaaa

SEQ ID NO: 788384 - RNA, 19 nt, Artificial Sequence
  Description of Artificial Sequence: Synthetic oligonucleotide
  Sense strand starting at position 3154 of SEQ ID NO: 587386
aaggguuauuauccaugau

SEQ ID NO: 788385 - RNA, 19 nt, Artificial Sequence
  Description of Artificial Sequence: Synthetic oligonucleotide
  Antisense strand to SEQ ID NO: 788384
aucauggauaauaacccuu

SEQ ID NO: 788386 - RNA, 19 nt, Artificial Sequence
  Description of Artificial Sequence: Synthetic oligonucleotide
  Sense strand starting at position 3157 of SEQ ID NO: 587386
gguuauuauccaugauauc

SEQ ID NO: 788387 - RNA, 19 nt, Artificial Sequence
  Description of Artificial Sequence: Synthetic oligonucleotide
  Antisense strand to SEQ ID NO: 788386
gauaucauggauaauaacc

SEQ ID NO: 788388 - RNA, 19 nt, Artificial Sequence
  Description of Artificial Sequence: Synthetic oligonucleotide
  Sense strand starting at position 3177 of SEQ ID NO: 587386
ucccuuuauccugggaaau

SEQ ID NO: 788389 - RNA, 19 nt, Artificial Sequence
  Description of Artificial Sequence: Synthetic oligonucleotide
  Antisense strand to SEQ ID NO: 788388
auuucccaggauaaaggga

SEQ ID NO: 788390 - RNA, 19 nt, Artificial Sequence
  Description of Artificial Sequence: Synthetic oligonucleotide
  Sense strand starting at position 3178 of SEQ ID NO: 587386
cccuuuauccugggaaaug

SEQ ID NO: 788391 - RNA, 19 nt, Artificial Sequence
  Description of Artificial Sequence: Synthetic oligonucleotide
  Antisense strand to SEQ ID NO: 788390
cauuucccaggauaaaggg

SEQ ID NO: 788392 - RNA, 19 nt, Artificial Sequence
  Description of Artificial Sequence: Synthetic oligonucleotide
  Sense strand starting at position 3437 of SEQ ID NO: 587386
gauuauaaagccuguugau

SEQ ID NO: 788393 - RNA, 19 nt, Artificial Sequence
  Description of Artificial Sequence: Synthetic oligonucleotide
  Antisense strand to SEQ ID NO: 788392
aucaacaggcuuuauaauc

SEQ ID NO: 788394 - RNA, 19 nt, Artificial Sequence
  Description of Artificial Sequence: Synthetic oligonucleotide
  Sense strand starting at position 3461 of SEQ ID NO: 587386
cauguuugaccuuaauggu

SEQ ID NO: 788395 - RNA, 19 nt, Artificial Sequence
  Description of Artificial Sequence: Synthetic oligonucleotide
  Antisense strand to SEQ ID NO: 788394
accauuaaggucaaacaug

SEQ ID NO: 788396 - RNA, 19 nt, Artificial Sequence
  Description of Artificial Sequence: Synthetic oligonucleotide
  Sense strand starting at position 3501 of SEQ ID NO: 587386
augggaauuucuuagaccu

SEQ ID NO: 788397 - RNA, 19 nt, Artificial Sequence
  Description of Artificial Sequence: Synthetic oligonucleotide
  Antisense strand to SEQ ID NO: 788396
aggucuaagaaauucccau

SEQ ID NO: 788398 - RNA, 19 nt, Artificial Sequence
  Description of Artificial Sequence: Synthetic oligonucleotide
  Sense strand starting at position 3503 of SEQ ID NO: 587386
gggaauuucuuagaccuac

SEQ ID NO: 788399 - RNA, 19 nt, Artificial Sequence
  Description of Artificial Sequence: Synthetic oligonucleotide
  Antisense strand to SEQ ID NO: 788398
guaggucuaagaaauuccc

SEQ ID NO: 788400 - RNA, 19 nt, Artificial Sequence
  Description of Artificial Sequence: Synthetic oligonucleotide
  Sense strand starting at position 3512 of SEQ ID NO: 587386
uuagaccuacagugacauu

SEQ ID NO: 788401 - RNA, 19 nt, Artificial Sequence
  Description of Artificial Sequence: Synthetic oligonucleotide
  Antisense strand to SEQ ID NO: 788400
aaugucacuguaggucuaa

SEQ ID NO: 788402 - RNA, 19 nt, Artificial Sequence
  Description of Artificial Sequence: Synthetic oligonucleotide
  Sense strand starting at position 3596 of SEQ ID NO: 587386
gaaugcuggccuugagaaa

SEQ ID NO: 788403 - RNA, 19 nt, Artificial Sequence
  Description of Artificial Sequence: Synthetic oligonucleotide
  Antisense strand to SEQ ID NO: 788402
uuucucaaggccagcauuc

SEQ ID NO: 788404 - RNA, 19 nt, Artificial Sequence
  Description of Artificial Sequence: Synthetic oligonucleotide
  Sense strand starting at position 3783 of SEQ ID NO: 587386
uccaucagguaaguuaaau

SEQ ID NO: 788405 - RNA, 19 nt, Artificial Sequence
  Description of Artificial Sequence: Synthetic oligonucleotide
  Antisense strand to SEQ ID NO: 788404
auuuaacuuaccugaugga

SEQ ID NO: 788406 - RNA, 19 nt, Artificial Sequence
  Description of Artificial Sequence: Synthetic oligonucleotide
  Sense strand starting at position 3853 of SEQ ID NO: 587386
cucugaugucuggaggcaa

SEQ ID NO: 788407 - RNA, 19 nt, Artificial Sequence
  Description of Artificial Sequence: Synthetic oligonucleotide
  Antisense strand to SEQ ID NO: 788406
uugccuccagacaucagag

SEQ ID NO: 788408 - RNA, 19 nt, Artificial Sequence
  Description of Artificial Sequence: Synthetic oligonucleotide
  Sense strand starting at position 74 of SEQ ID NO: 587387
ugcuauauacuagaguauu

SEQ ID NO: 788409 - RNA, 19 nt, Artificial Sequence
  Description of Artificial Sequence: Synthetic oligonucleotide
  Antisense strand to SEQ ID NO: 788408
aauacucuaguauauagca

SEQ ID NO: 788410 - RNA, 19 nt, Artificial Sequence
  Description of Artificial Sequence: Synthetic oligonucleotide
  Sense strand starting at position 573 of SEQ ID NO: 587387
acuguaacaucaguaaaua

SEQ ID NO: 788411 - RNA, 19 nt, Artificial Sequence
  Description of Artificial Sequence: Synthetic oligonucleotide
  Antisense strand to SEQ ID NO: 788410
uauuuacugauguuacagu

SEQ ID NO: 788412 - RNA, 19 nt, Artificial Sequence
  Description of Artificial Sequence: Synthetic oligonucleotide
  Sense strand starting at position 857 of SEQ ID NO: 587387
uaauaaguaugagugaucu

SEQ ID NO: 788413 - RNA, 19 nt, Artificial Sequence
  Description of Artificial Sequence: Synthetic oligonucleotide
  Antisense strand to SEQ ID NO: 788412
agaucacucauacuuauua

SEQ ID NO: 788414 - RNA, 19 nt, Artificial Sequence
  Description of Artificial Sequence: Synthetic oligonucleotide
  Sense strand starting at position 861 of SEQ ID NO: 587387
aaguaugagugaucugaaa

SEQ ID NO: 788415 - RNA, 19 nt, Artificial Sequence
  Description of Artificial Sequence: Synthetic oligonucleotide
  Antisense strand to SEQ ID NO: 788414
uuucagaucacucauacuu

SEQ ID NO: 788416 - RNA, 19 nt, Artificial Sequence
  Description of Artificial Sequence: Synthetic oligonucleotide
  Sense strand starting at position 951 of SEQ ID NO: 587387
guccuagauccucauguuu

SEQ ID NO: 788417 - RNA, 19 nt, Artificial Sequence
  Description of Artificial Sequence: Synthetic oligonucleotide
  Antisense strand to SEQ ID NO: 788416
aaacaugaggaucuaggac

SEQ ID NO: 788418 - RNA, 19 nt, Artificial Sequence
  Description of Artificial Sequence: Synthetic oligonucleotide
  Sense strand starting at position 986 of SEQ ID NO: 587387
cucacaggcuugucacaaa

SEQ ID NO: 788419 - RNA, 19 nt, Artificial Sequence
  Description of Artificial Sequence: Synthetic oligonucleotide
  Antisense strand to SEQ ID NO: 788418
uuugugacaagccugugag

SEQ ID NO: 788420 - RNA, 19 nt, Artificial Sequence
  Description of Artificial Sequence: Synthetic oligonucleotide
  Sense strand starting at position 1047 of SEQ ID NO: 587387
cauaccugggaucguauau

SEQ ID NO: 788421 - RNA, 19 nt, Artificial Sequence
  Description of Artificial Sequence: Synthetic oligonucleotide
  Antisense strand to SEQ ID NO: 788420
auauacgaucccagguaug

SEQ ID NO: 788422 - RNA, 19 nt, Artificial Sequence
  Description of Artificial Sequence: Synthetic oligonucleotide
  Sense strand starting at position 1064 of SEQ ID NO: 587387
aucacugguaucuggcaga

SEQ ID NO: 788423 - RNA, 19 nt, Artificial Sequence
  Description of Artificial Sequence: Synthetic oligonucleotide
  Antisense strand to SEQ ID NO: 788422
ucugccagauaccagugau

SEQ ID NO: 788424 - RNA, 19 nt, Artificial Sequence
  Description of Artificial Sequence: Synthetic oligonucleotide
  Sense strand starting at position 1138 of SEQ ID NO: 587387
acaugagccuggucuuaag

SEQ ID NO: 788425 - RNA, 19 nt, Artificial Sequence
  Description of Artificial Sequence: Synthetic oligonucleotide
  Antisense strand to SEQ ID NO: 788424
cuuaagaccaggcucaugu

SEQ ID NO: 788426 - RNA, 19 nt, Artificial Sequence
  Description of Artificial Sequence: Synthetic oligonucleotide
  Sense strand starting at position 1233 of SEQ ID NO: 587387
ugggaagggugucuuuaau

SEQ ID NO: 788427 - RNA, 19 nt, Artificial Sequence
  Description of Artificial Sequence: Synthetic oligonucleotide
  Antisense strand to SEQ ID NO: 788426
auuaaagacacccuuccca

SEQ ID NO: 788428 - RNA, 19 nt, Artificial Sequence
  Description of Artificial Sequence: Synthetic oligonucleotide
  Sense strand starting at position 1297 of SEQ ID NO: 587387
uuugguuaucuauaagacu

SEQ ID NO: 788429 - RNA, 19 nt, Artificial Sequence
  Description of Artificial Sequence: Synthetic oligonucleotide
  Antisense strand to SEQ ID NO: 788428
agucuuauagauaaccaaa

SEQ ID NO: 788430 - RNA, 19 nt, Artificial Sequence
  Description of Artificial Sequence: Synthetic oligonucleotide
  Sense strand starting at position 1481 of SEQ ID NO: 587387
ugaagcucucaucacagua

SEQ ID NO: 788431 - RNA, 19 nt, Artificial Sequence
  Description of Artificial Sequence: Synthetic oligonucleotide
  Antisense strand to SEQ ID NO: 788430
uacugugaugagagcuuca

SEQ ID NO: 788432 - RNA, 19 nt, Artificial Sequence
  Description of Artificial Sequence: Synthetic oligonucleotide
  Sense strand starting at position 1496 of SEQ ID NO: 587387
aguacuuggcuugaugaua

SEQ ID NO: 788433 - RNA, 19 nt, Artificial Sequence
  Description of Artificial Sequence: Synthetic oligonucleotide
  Antisense strand to SEQ ID NO: 788432
uaucaucaagccaaguacu

SEQ ID NO: 788434 - RNA, 19 nt, Artificial Sequence
  Description of Artificial Sequence: Synthetic oligonucleotide
  Sense strand starting at position 1504 of SEQ ID NO: 587387
gcuugaugauaugugauca

SEQ ID NO: 788435 - RNA, 19 nt, Artificial Sequence
  Description of Artificial Sequence: Synthetic oligonucleotide
  Antisense strand to SEQ ID NO: 788434
ugaucacauaucaucaagc

SEQ ID NO: 788436 - RNA, 19 nt, Artificial Sequence
  Description of Artificial Sequence: Synthetic oligonucleotide
  Sense strand starting at position 1706 of SEQ ID NO: 587387
uuuguuagugagcaugaga

SEQ ID NO: 788437 - RNA, 19 nt, Artificial Sequence
  Description of Artificial Sequence: Synthetic oligonucleotide
  Antisense strand to SEQ ID NO: 788436
ucucaugcucacuaacaaa

SEQ ID NO: 788438 - RNA, 19 nt, Artificial Sequence
  Description of Artificial Sequence: Synthetic oligonucleotide
  Sense strand starting at position 2000 of SEQ ID NO: 587387
ugggugggucuugagagau

SEQ ID NO: 788439 - RNA, 19 nt, Artificial Sequence
  Description of Artificial Sequence: Synthetic oligonucleotide
  Antisense strand to SEQ ID NO: 788438
aucucucaagacccaccca

SEQ ID NO: 788440 - RNA, 19 nt, Artificial Sequence
  Description of Artificial Sequence: Synthetic oligonucleotide
  Sense strand starting at position 2022 of SEQ ID NO: 587387
caccguguccaugaggaaa

SEQ ID NO: 788441 - RNA, 19 nt, Artificial Sequence
  Description of Artificial Sequence: Synthetic oligonucleotide
  Antisense strand to SEQ ID NO: 788440
uuuccucauggacacggug

SEQ ID NO: 788442 - RNA, 19 nt, Artificial Sequence
  Description of Artificial Sequence: Synthetic oligonucleotide
  Sense strand starting at position 2092 of SEQ ID NO: 587387
aucagugaggcuuagcaga

SEQ ID NO: 788443 - RNA, 19 nt, Artificial Sequence
  Description of Artificial Sequence: Synthetic oligonucleotide
  Antisense strand to SEQ ID NO: 788442
ucugcuaagccucacugau

SEQ ID NO: 788444 - RNA, 19 nt, Artificial Sequence
  Description of Artificial Sequence: Synthetic oligonucleotide
  Sense strand starting at position 2094 of SEQ ID NO: 587387
cagugaggcuuagcagaaa

SEQ ID NO: 788445 - RNA, 19 nt, Artificial Sequence
  Description of Artificial Sequence: Synthetic oligonucleotide
  Antisense strand to SEQ ID NO: 788444
uuucugcuaagccucacug

SEQ ID NO: 788446 - RNA, 19 nt, Artificial Sequence
  Description of Artificial Sequence: Synthetic oligonucleotide
  Sense strand starting at position 2317 of SEQ ID NO: 587387
acagcuuugguuuacucau

SEQ ID NO: 788447 - RNA, 19 nt, Artificial Sequence
  Description of Artificial Sequence: Synthetic oligonucleotide
  Antisense strand to SEQ ID NO: 788446
augaguaaaccaaagcugu

SEQ ID NO: 788448 - RNA, 19 nt, Artificial Sequence
  Description of Artificial Sequence: Synthetic oligonucleotide
  Sense strand starting at position 2373 of SEQ ID NO: 587387
ucaguuaagagcugaggaa

SEQ ID NO: 788449 - RNA, 19 nt, Artificial Sequence
  Description of Artificial Sequence: Synthetic oligonucleotide
  Antisense strand to SEQ ID NO: 788448
uuccucagcucuuaacuga

SEQ ID NO: 788450 - RNA, 19 nt, Artificial Sequence
  Description of Artificial Sequence: Synthetic oligonucleotide
  Sense strand starting at position 2398 of SEQ ID NO: 587387
ugagguggaaucugaauuc

SEQ ID NO: 788451 - RNA, 19 nt, Artificial Sequence
  Description of Artificial Sequence: Synthetic oligonucleotide
  Antisense strand to SEQ ID NO: 788450
gaauucagauuccaccuca

SEQ ID NO: 788452 - RNA, 19 nt, Artificial Sequence
  Description of Artificial Sequence: Synthetic oligonucleotide
  Sense strand starting at position 2665 of SEQ ID NO: 587387
acccaucugggccaauauu

SEQ ID NO: 788453 - RNA, 19 nt, Artificial Sequence
  Description of Artificial Sequence: Synthetic oligonucleotide
  Antisense strand to SEQ ID NO: 788452
aauauuggcccagaugggu

SEQ ID NO: 788454 - RNA, 19 nt, Artificial Sequence
  Description of Artificial Sequence: Synthetic oligonucleotide
  Sense strand starting at position 2856 of SEQ ID NO: 587387
uuuauugaguucuuacaug

SEQ ID NO: 788455 - RNA, 19 nt, Artificial Sequence
  Description of Artificial Sequence: Synthetic oligonucleotide
  Antisense strand to SEQ ID NO: 788454
cauguaagaacucaauaaa

SEQ ID NO: 788456 - RNA, 19 nt, Artificial Sequence
  Description of Artificial Sequence: Synthetic oligonucleotide
  Sense strand starting at position 2862 of SEQ ID NO: 587387
gaguucuuacaugguacca

SEQ ID NO: 788457 - RNA, 19 nt, Artificial Sequence
  Description of Artificial Sequence: Synthetic oligonucleotide
  Antisense strand to SEQ ID NO: 788456
ugguaccauguaagaacuc

SEQ ID NO: 788458 - RNA, 19 nt, Artificial Sequence
  Description of Artificial Sequence: Synthetic oligonucleotide
  Sense strand starting at position 2952 of SEQ ID NO: 587387
uuuagaggcaggcagaauu

SEQ ID NO: 788459 - RNA, 19 nt, Artificial Sequence
  Description of Artificial Sequence: Synthetic oligonucleotide
  Antisense strand to SEQ ID NO: 788458
aauucugccugccucuaaa

SEQ ID NO: 788460 - RNA, 19 nt, Artificial Sequence
  Description of Artificial Sequence: Synthetic oligonucleotide
  Sense strand starting at position 3155 of SEQ ID NO: 587387
aaggguuauuauccaugau

SEQ ID NO: 788461 - RNA, 19 nt, Artificial Sequence
  Description of Artificial Sequence: Synthetic oligonucleotide
  Antisense strand to SEQ ID NO: 788460
aucauggauaauaacccuu

SEQ ID NO: 788462 - RNA, 19 nt, Artificial Sequence
  Description of Artificial Sequence: Synthetic oligonucleotide
  Sense strand starting at position 3158 of SEQ ID NO: 587387
gguuauuauccaugauauc

SEQ ID NO: 788463 - RNA, 19 nt, Artificial Sequence
  Description of Artificial Sequence: Synthetic oligonucleotide
  Antisense strand to SEQ ID NO: 788462
gauaucauggauaauaacc

SEQ ID NO: 788464 - RNA, 19 nt, Artificial Sequence
  Description of Artificial Sequence: Synthetic oligonucleotide
  Sense strand starting at position 3178 of SEQ ID NO: 587387
ucccuuuauccugggaaau

SEQ ID NO: 788465 - RNA, 19 nt, Artificial Sequence
  Description of Artificial Sequence: Synthetic oligonucleotide
  Antisense strand to SEQ ID NO: 788464
auuucccaggauaaaggga

SEQ ID NO: 788466 - RNA, 19 nt, Artificial Sequence
  Description of Artificial Sequence: Synthetic oligonucleotide
  Sense strand starting at position 3179 of SEQ ID NO: 587387
cccuuuauccugggaaaug

SEQ ID NO: 788467 - RNA, 19 nt, Artificial Sequence
  Description of Artificial Sequence: Synthetic oligonucleotide
  Antisense strand to SEQ ID NO: 788466
cauuucccaggauaaaggg

SEQ ID NO: 788468 - RNA, 19 nt, Artificial Sequence
  Description of Artificial Sequence: Synthetic oligonucleotide
  Sense strand starting at position 3283 of SEQ ID NO: 587387
gggucuucucaaggaaauc

SEQ ID NO: 788469 - RNA, 19 nt, Artificial Sequence
  Description of Artificial Sequence: Synthetic oligonucleotide
  Antisense strand to SEQ ID NO: 788468
gauuuccuugagaagaccc

SEQ ID NO: 788470 - RNA, 19 nt, Artificial Sequence
  Description of Artificial Sequence: Synthetic oligonucleotide
  Sense strand starting at position 3307 of SEQ ID NO: 587387
cucuauuccgaagagucuu

SEQ ID NO: 788471 - RNA, 19 nt, Artificial Sequence
  Description of Artificial Sequence: Synthetic oligonucleotide
  Antisense strand to SEQ ID NO: 788470
aagacucuucggaauagag

SEQ ID NO: 788472 - RNA, 19 nt, Artificial Sequence
  Description of Artificial Sequence: Synthetic oligonucleotide
  Sense strand starting at position 3438 of SEQ ID NO: 587387
gauuauaaagccuguugau

SEQ ID NO: 788473 - RNA, 19 nt, Artificial Sequence
  Description of Artificial Sequence: Synthetic oligonucleotide
  Antisense strand to SEQ ID NO: 788472
aucaacaggcuuuauaauc

SEQ ID NO: 788474 - RNA, 19 nt, Artificial Sequence
  Description of Artificial Sequence: Synthetic oligonucleotide
  Sense strand starting at position 3462 of SEQ ID NO: 587387
cauguuugaccuuaauggu

SEQ ID NO: 788475 - RNA, 19 nt, Artificial Sequence
  Description of Artificial Sequence: Synthetic oligonucleotide
  Antisense strand to SEQ ID NO: 788474
accauuaaggucaaacaug

SEQ ID NO: 788476 - RNA, 19 nt, Artificial Sequence
  Description of Artificial Sequence: Synthetic oligonucleotide
  Sense strand starting at position 3502 of SEQ ID NO: 587387
augggaauuucuuagaccu

SEQ ID NO: 788477 - RNA, 19 nt, Artificial Sequence
  Description of Artificial Sequence: Synthetic oligonucleotide
  Antisense strand to SEQ ID NO: 788476
aggucuaagaaauucccau

SEQ ID NO: 788478 - RNA, 19 nt, Artificial Sequence
  Description of Artificial Sequence: Synthetic oligonucleotide
  Sense strand starting at position 3504 of SEQ ID NO: 587387
gggaauuucuuagaccuac

SEQ ID NO: 788479 - RNA, 19 nt, Artificial Sequence
  Description of Artificial Sequence: Synthetic oligonucleotide
  Antisense strand to SEQ ID NO: 788478
guaggucuaagaaauuccc

SEQ ID NO: 788480 - RNA, 19 nt, Artificial Sequence
  Description of Artificial Sequence: Synthetic oligonucleotide
  Sense strand starting at position 3513 of SEQ ID NO: 587387
uuagaccuacagugacauu

SEQ ID NO: 788481 - RNA, 19 nt, Artificial Sequence
  Description of Artificial Sequence: Synthetic oligonucleotide
  Antisense strand to SEQ ID NO: 788480
aaugucacuguaggucuaa

SEQ ID NO: 788482 - RNA, 19 nt, Artificial Sequence
  Description of Artificial Sequence: Synthetic oligonucleotide
  Sense strand starting at position 3597 of SEQ ID NO: 587387
gaaugcuggccuugagaaa

SEQ ID NO: 788483 - RNA, 19 nt, Artificial Sequence
  Description of Artificial Sequence: Synthetic oligonucleotide
  Antisense strand to SEQ ID NO: 788482
uuucucaaggccagcauuc

SEQ ID NO: 788484 - RNA, 19 nt, Artificial Sequence
  Description of Artificial Sequence: Synthetic oligonucleotide
  Sense strand starting at position 3784 of SEQ ID NO: 587387
uccaucagguaaguuaaau

SEQ ID NO: 788485 - RNA, 19 nt, Artificial Sequence
  Description of Artificial Sequence: Synthetic oligonucleotide
  Antisense strand to SEQ ID NO: 788484
auuuaacuuaccugaugga

SEQ ID NO: 788486 - RNA, 19 nt, Artificial Sequence
  Description of Artificial Sequence: Synthetic oligonucleotide
  Sense strand starting at position 3854 of SEQ ID NO: 587387
cucugaugucuggaggcaa

SEQ ID NO: 788487 - RNA, 19 nt, Artificial Sequence
  Description of Artificial Sequence: Synthetic oligonucleotide
  Antisense strand to SEQ ID NO: 788486
uugccuccagacaucagag

SEQ ID NO: 788488 - RNA, 19 nt, Artificial Sequence
  Description of Artificial Sequence: Synthetic oligonucleotide
  Sense strand starting at position 7 of SEQ ID NO: 587388
cugagauucuaugugauua

SEQ ID NO: 788489 - RNA, 19 nt, Artificial Sequence
  Description of Artificial Sequence: Synthetic oligonucleotide
  Antisense strand to SEQ ID NO: 788488
uaaucacauagaaucucag

SEQ ID NO: 788490 - RNA, 19 nt, Artificial Sequence
  Description of Artificial Sequence: Synthetic oligonucleotide
  Sense strand starting at position 11 of SEQ ID NO: 587388
gauucuaugugauuauggu

SEQ ID NO: 788491 - RNA, 19 nt, Artificial Sequence
  Description of Artificial Sequence: Synthetic oligonucleotide
  Antisense strand to SEQ ID NO: 788490
accauaaucacauagaauc

SEQ ID NO: 788492 - RNA, 19 nt, Artificial Sequence
  Description of Artificial Sequence: Synthetic oligonucleotide
  Sense strand starting at position 40 of SEQ ID NO: 587388
guucuaauuugugcccaaa

SEQ ID NO: 788493 - RNA, 19 nt, Artificial Sequence
  Description of Artificial Sequence: Synthetic oligonucleotide
  Antisense strand to SEQ ID NO: 788492
uuugggcacaaauuagaac

SEQ ID NO: 788494 - RNA, 19 nt, Artificial Sequence
  Description of Artificial Sequence: Synthetic oligonucleotide
  Sense strand starting at position 133 of SEQ ID NO: 587388
auagacugaucugaauaaa

SEQ ID NO: 788495 - RNA, 19 nt, Artificial Sequence
  Description of Artificial Sequence: Synthetic oligonucleotide
  Antisense strand to SEQ ID NO: 788494
uuuauucagaucagucuau

SEQ ID NO: 788496 - RNA, 19 nt, Artificial Sequence
  Description of Artificial Sequence: Synthetic oligonucleotide
  Sense strand starting at position 194 of SEQ ID NO: 587388
gaguuuaucuauucuggag

SEQ ID NO: 788497 - RNA, 19 nt, Artificial Sequence
  Description of Artificial Sequence: Synthetic oligonucleotide
  Antisense strand to SEQ ID NO: 788496
cuccagaauagauaaacuc

SEQ ID NO: 788498 - RNA, 19 nt, Artificial Sequence
  Description of Artificial Sequence: Synthetic oligonucleotide
  Sense strand starting at position 198 of SEQ ID NO: 587388
uuaucuauucuggagcauu

SEQ ID NO: 788499 - RNA, 19 nt, Artificial Sequence
  Description of Artificial Sequence: Synthetic oligonucleotide
  Antisense strand to SEQ ID NO: 788498
aaugcuccagaauagauaa

SEQ ID NO: 788500 - RNA, 19 nt, Artificial Sequence
  Description of Artificial Sequence: Synthetic oligonucleotide
  Sense strand starting at position 206 of SEQ ID NO: 587388
ucuggagcauugucugaca

SEQ ID NO: 788501 - RNA, 19 nt, Artificial Sequence
  Description of Artificial Sequence: Synthetic oligonucleotide
  Antisense strand to SEQ ID NO: 788500
ugucagacaaugcuccaga

SEQ ID NO: 788502 - RNA, 19 nt, Artificial Sequence
  Description of Artificial Sequence: Synthetic oligonucleotide
  Sense strand starting at position 208 of SEQ ID NO: 587388
uggagcauugucugacauc

SEQ ID NO: 788503 - RNA, 19 nt, Artificial Sequence
  Description of Artificial Sequence: Synthetic oligonucleotide
  Antisense strand to SEQ ID NO: 788502
gaugucagacaaugcucca

SEQ ID NO: 788504 - RNA, 19 nt, Artificial Sequence
  Description of Artificial Sequence: Synthetic oligonucleotide
  Sense strand starting at position 335 of SEQ ID NO: 587388
guucuagucuugccuauuu

SEQ ID NO: 788505 - RNA, 19 nt, Artificial Sequence
  Description of Artificial Sequence: Synthetic oligonucleotide
  Antisense strand to SEQ ID NO: 788504
aaauaggcaagacuagaac

SEQ ID NO: 788506 - RNA, 19 nt, Artificial Sequence
  Description of Artificial Sequence: Synthetic oligonucleotide
  Sense strand starting at position 756 of SEQ ID NO: 587388
auguguaauaaaggaaugu

SEQ ID NO: 788507 - RNA, 19 nt, Artificial Sequence
  Description of Artificial Sequence: Synthetic oligonucleotide
  Antisense strand to SEQ ID NO: 788506
acauuccuuuauuacacau

SEQ ID NO: 788508 - RNA, 19 nt, Artificial Sequence
  Description of Artificial Sequence: Synthetic oligonucleotide
  Sense strand starting at position 961 of SEQ ID NO: 587388
aauaguaagcaagauguua

SEQ ID NO: 788509 - RNA, 19 nt, Artificial Sequence
  Description of Artificial Sequence: Synthetic oligonucleotide
  Antisense strand to SEQ ID NO: 788508
uaacaucuugcuuacuauu

SEQ ID NO: 788510 - RNA, 19 nt, Artificial Sequence
  Description of Artificial Sequence: Synthetic oligonucleotide
  Sense strand starting at position 1004 of SEQ ID NO: 587388
uuccaaccagugugugaaa

SEQ ID NO: 788511 - RNA, 19 nt, Artificial Sequence
  Description of Artificial Sequence: Synthetic oligonucleotide
  Antisense strand to SEQ ID NO: 788510
uuucacacacugguuggaa

SEQ ID NO: 788512 - RNA, 19 nt, Artificial Sequence
  Description of Artificial Sequence: Synthetic oligonucleotide
  Sense strand starting at position 1041 of SEQ ID NO: 587388
auguauggauaagagauuu

SEQ ID NO: 788513 - RNA, 19 nt, Artificial Sequence
  Description of Artificial Sequence: Synthetic oligonucleotide
  Antisense strand to SEQ ID NO: 788512
aaaucucuuauccauacau

SEQ ID NO: 788514 - RNA, 19 nt, Artificial Sequence
  Description of Artificial Sequence: Synthetic oligonucleotide
  Sense strand starting at position 1618 of SEQ ID NO: 587388
gucugaauuccuuggcaga

SEQ ID NO: 788515 - RNA, 19 nt, Artificial Sequence
  Description of Artificial Sequence: Synthetic oligonucleotide
  Antisense strand to SEQ ID NO: 788514
ucugccaaggaauucagac

SEQ ID NO: 788516 - RNA, 19 nt, Artificial Sequence
  Description of Artificial Sequence: Synthetic oligonucleotide
  Sense strand starting at position 1619 of SEQ ID NO: 587388
ucugaauuccuuggcagag

SEQ ID NO: 788517 - RNA, 19 nt, Artificial Sequence
  Description of Artificial Sequence: Synthetic oligonucleotide
  Antisense strand to SEQ ID NO: 788516
cucugccaaggaauucaga

SEQ ID NO: 788518 - RNA, 19 nt, Artificial Sequence
  Description of Artificial Sequence: Synthetic oligonucleotide
  Sense strand starting at position 1672 of SEQ ID NO: 587388
ggagauggucccggucaau

SEQ ID NO: 788519 - RNA, 19 nt, Artificial Sequence
  Description of Artificial Sequence: Synthetic oligonucleotide
  Antisense strand to SEQ ID NO: 788518
auugaccgggaccaucucc

SEQ ID NO: 788520 - RNA, 19 nt, Artificial Sequence
  Description of Artificial Sequence: Synthetic oligonucleotide
  Sense strand starting at position 1791 of SEQ ID NO: 587388
gacagauccugagcagacu

SEQ ID NO: 788521 - RNA, 19 nt, Artificial Sequence
  Description of Artificial Sequence: Synthetic oligonucleotide
  Antisense strand to SEQ ID NO: 788520
agucugcucaggaucuguc

SEQ ID NO: 788522 - RNA, 19 nt, Artificial Sequence
  Description of Artificial Sequence: Synthetic oligonucleotide
  Sense strand starting at position 1809 of SEQ ID NO: 587388
ugucaucucuacuucuaga

SEQ ID NO: 788523 - RNA, 19 nt, Artificial Sequence
  Description of Artificial Sequence: Synthetic oligonucleotide
  Antisense strand to SEQ ID NO: 788522
ucuagaaguagagaugaca

SEQ ID NO: 788524 - RNA, 19 nt, Artificial Sequence
  Description of Artificial Sequence: Synthetic oligonucleotide
  Sense strand starting at position 2102 of SEQ ID NO: 587388
aaaccacauuugugggaga

SEQ ID NO: 788525 - RNA, 19 nt, Artificial Sequence
  Description of Artificial Sequence: Synthetic oligonucleotide
  Antisense strand to SEQ ID NO: 788524
ucucccacaaaugugguuu

SEQ ID NO: 788526 - RNA, 19 nt, Artificial Sequence
  Description of Artificial Sequence: Synthetic oligonucleotide
  Sense strand starting at position 2105 of SEQ ID NO: 587388
ccacauuugugggagacaa

SEQ ID NO: 788527 - RNA, 19 nt, Artificial Sequence
  Description of Artificial Sequence: Synthetic oligonucleotide
  Antisense strand to SEQ ID NO: 788526
uugucucccacaaaugugg

SEQ ID NO: 788528 - RNA, 19 nt, Artificial Sequence
  Description of Artificial Sequence: Synthetic oligonucleotide
  Sense strand starting at position 2139 of SEQ ID NO: 587388
ccuuucugccuggaauauu

SEQ ID NO: 788529 - RNA, 19 nt, Artificial Sequence
  Description of Artificial Sequence: Synthetic oligonucleotide
  Antisense strand to SEQ ID NO: 788528
aauauuccaggcagaaagg

SEQ ID NO: 788530 - RNA, 19 nt, Artificial Sequence
  Description of Artificial Sequence: Synthetic oligonucleotide
  Sense strand starting at position 2150 of SEQ ID NO: 587388
ggaauauucuauucugugu

SEQ ID NO: 788531 - RNA, 19 nt, Artificial Sequence
  Description of Artificial Sequence: Synthetic oligonucleotide
  Antisense strand to SEQ ID NO: 788530
acacagaauagaauauucc

SEQ ID NO: 788532 - RNA, 19 nt, Artificial Sequence
  Description of Artificial Sequence: Synthetic oligonucleotide
  Sense strand starting at position 2213 of SEQ ID NO: 587388
guauuaccaugucuauaag

SEQ ID NO: 788533 - RNA, 19 nt, Artificial Sequence
  Description of Artificial Sequence: Synthetic oligonucleotide
  Antisense strand to SEQ ID NO: 788532
cuuauagacaugguaauac

SEQ ID NO: 788534 - RNA, 19 nt, Artificial Sequence
  Description of Artificial Sequence: Synthetic oligonucleotide
  Sense strand starting at position 2572 of SEQ ID NO: 587388
aaagucaugcaugaucuga

SEQ ID NO: 788535 - RNA, 19 nt, Artificial Sequence
  Description of Artificial Sequence: Synthetic oligonucleotide
  Antisense strand to SEQ ID NO: 788534
ucagaucaugcaugacuuu

SEQ ID NO: 788536 - RNA, 19 nt, Artificial Sequence
  Description of Artificial Sequence: Synthetic oligonucleotide
  Sense strand starting at position 2723 of SEQ ID NO: 587388
uauugauguguuuaagcac

SEQ ID NO: 788537 - RNA, 19 nt, Artificial Sequence
  Description of Artificial Sequence: Synthetic oligonucleotide
  Antisense strand to SEQ ID NO: 788536
gugcuuaaacacaucaaua

SEQ ID NO: 788538 - RNA, 19 nt, Artificial Sequence
  Description of Artificial Sequence: Synthetic oligonucleotide
  Sense strand starting at position 2777 of SEQ ID NO: 587388
gggauuaaauuggcaaucu

SEQ ID NO: 788539 - RNA, 19 nt, Artificial Sequence
  Description of Artificial Sequence: Synthetic oligonucleotide
  Antisense strand to SEQ ID NO: 788538
agauugccaauuuaauccc

SEQ ID NO: 788540 - RNA, 19 nt, Artificial Sequence
  Description of Artificial Sequence: Synthetic oligonucleotide
  Sense strand starting at position 2845 of SEQ ID NO: 587388
aucauucuagauuguguuu

SEQ ID NO: 788541 - RNA, 19 nt, Artificial Sequence
  Description of Artificial Sequence: Synthetic oligonucleotide
  Antisense strand to SEQ ID NO: 788540
aaacacaaucuagaaugau

SEQ ID NO: 788542 - RNA, 19 nt, Artificial Sequence
  Description of Artificial Sequence: Synthetic oligonucleotide
  Sense strand starting at position 2852 of SEQ ID NO: 587388
uagauuguguuuguaucaa

SEQ ID NO: 788543 - RNA, 19 nt, Artificial Sequence
  Description of Artificial Sequence: Synthetic oligonucleotide
  Antisense strand to SEQ ID NO: 788542
uugauacaaacacaaucua

SEQ ID NO: 788544 - RNA, 19 nt, Artificial Sequence
  Description of Artificial Sequence: Synthetic oligonucleotide
  Sense strand starting at position 3117 of SEQ ID NO: 587388
aaauguugucaacagguau

SEQ ID NO: 788545 - RNA, 19 nt, Artificial Sequence
  Description of Artificial Sequence: Synthetic oligonucleotide
  Antisense strand to SEQ ID NO: 788544
auaccuguugacaacauuu

SEQ ID NO: 788546 - RNA, 19 nt, Artificial Sequence
  Description of Artificial Sequence: Synthetic oligonucleotide
  Sense strand starting at position 3204 of SEQ ID NO: 587388
gcacaagaauuagcagaaa

SEQ ID NO: 788547 - RNA, 19 nt, Artificial Sequence
  Description of Artificial Sequence: Synthetic oligonucleotide
  Antisense strand to SEQ ID NO: 788546
uuucugcuaauucuugugc

SEQ ID NO: 788548 - RNA, 19 nt, Artificial Sequence
  Description of Artificial Sequence: Synthetic oligonucleotide
  Sense strand starting at position 3228 of SEQ ID NO: 587388
aguauuucuguaugucuua

SEQ ID NO: 788549 - RNA, 19 nt, Artificial Sequence
  Description of Artificial Sequence: Synthetic oligonucleotide
  Antisense strand to SEQ ID NO: 788548
uaagacauacagaaauacu

SEQ ID NO: 788550 - RNA, 19 nt, Artificial Sequence
  Description of Artificial Sequence: Synthetic oligonucleotide
  Sense strand starting at position 3229 of SEQ ID NO: 587388
guauuucuguaugucuuaa

SEQ ID NO: 788551 - RNA, 19 nt, Artificial Sequence
  Description of Artificial Sequence: Synthetic oligonucleotide
  Antisense strand to SEQ ID NO: 788550
uuaagacauacagaaauac

SEQ ID NO: 788552 - RNA, 19 nt, Artificial Sequence
  Description of Artificial Sequence: Synthetic oligonucleotide
  Sense strand starting at position 3249 of SEQ ID NO: 587388
gaaaguaaguguguuauua

SEQ ID NO: 788553 - RNA, 19 nt, Artificial Sequence
  Description of Artificial Sequence: Synthetic oligonucleotide
  Antisense strand to SEQ ID NO: 788552
uaauaacacacuuacuuuc

SEQ ID NO: 788554 - RNA, 19 nt, Artificial Sequence
  Description of Artificial Sequence: Synthetic oligonucleotide
  Sense strand starting at position 3276 of SEQ ID NO: 587388
auggcuucugcuuaagaug

SEQ ID NO: 788555 - RNA, 19 nt, Artificial Sequence
  Description of Artificial Sequence: Synthetic oligonucleotide
  Antisense strand to SEQ ID NO: 788554
caucuuaagcagaagccau

SEQ ID NO: 788556 - RNA, 19 nt, Artificial Sequence
  Description of Artificial Sequence: Synthetic oligonucleotide
  Sense strand starting at position 3515 of SEQ ID NO: 587388
cagguaaagucuguagaga

SEQ ID NO: 788557 - RNA, 19 nt, Artificial Sequence
  Description of Artificial Sequence: Synthetic oligonucleotide
  Antisense strand to SEQ ID NO: 788556
ucucuacagacuuuaccug

SEQ ID NO: 788558 - RNA, 19 nt, Artificial Sequence
  Description of Artificial Sequence: Synthetic oligonucleotide
  Sense strand starting at position 3524 of SEQ ID NO: 587388
ucuguagagaauugcuaag

SEQ ID NO: 788559 - RNA, 19 nt, Artificial Sequence
  Description of Artificial Sequence: Synthetic oligonucleotide
  Antisense strand to SEQ ID NO: 788558
cuuagcaauucucuacaga

SEQ ID NO: 788560 - RNA, 19 nt, Artificial Sequence
  Description of Artificial Sequence: Synthetic oligonucleotide
  Sense strand starting at position 3616 of SEQ ID NO: 587388
augucuucuccauagacuc

SEQ ID NO: 788561 - RNA, 19 nt, Artificial Sequence
  Description of Artificial Sequence: Synthetic oligonucleotide
  Antisense strand to SEQ ID NO: 788560
gagucuauggagaagacau

SEQ ID NO: 788562 - RNA, 19 nt, Artificial Sequence
  Description of Artificial Sequence: Synthetic oligonucleotide
  Sense strand starting at position 3690 of SEQ ID NO: 587388
aacaguagccacugugaga

SEQ ID NO: 788563 - RNA, 19 nt, Artificial Sequence
  Description of Artificial Sequence: Synthetic oligonucleotide
  Antisense strand to SEQ ID NO: 788562
ucucacaguggcuacuguu

SEQ ID NO: 788564 - RNA, 19 nt, Artificial Sequence
  Description of Artificial Sequence: Synthetic oligonucleotide
  Sense strand starting at position 3805 of SEQ ID NO: 587388
ggcacuggugaaugaacaa

SEQ ID NO: 788565 - RNA, 19 nt, Artificial Sequence
  Description of Artificial Sequence: Synthetic oligonucleotide
  Antisense strand to SEQ ID NO: 788564
uuguucauucaccagugcc

SEQ ID NO: 788566 - RNA, 19 nt, Artificial Sequence
  Description of Artificial Sequence: Synthetic oligonucleotide
  Sense strand starting at position 3948 of SEQ ID NO: 587388
guagaaagaugacagaaua

SEQ ID NO: 788567 - RNA, 19 nt, Artificial Sequence
  Description of Artificial Sequence: Synthetic oligonucleotide
  Antisense strand to SEQ ID NO: 788566
uauucugucaucuuucuac

SEQ ID NO: 788568 - RNA, 19 nt, Artificial Sequence
  Description of Artificial Sequence: Synthetic oligonucleotide
  Sense strand starting at position 12 of SEQ ID NO: 587389
cugagauucuaugugauua

SEQ ID NO: 788569 - RNA, 19 nt, Artificial Sequence
  Description of Artificial Sequence: Synthetic oligonucleotide
  Antisense strand to SEQ ID NO: 788568
uaaucacauagaaucucag

SEQ ID NO: 788570 - RNA, 19 nt, Artificial Sequence
  Description of Artificial Sequence: Synthetic oligonucleotide
  Sense strand starting at position 16 of SEQ ID NO: 587389
gauucuaugugauuauggu

SEQ ID NO: 788571 - RNA, 19 nt, Artificial Sequence
  Description of Artificial Sequence: Synthetic oligonucleotide
  Antisense strand to SEQ ID NO: 788570
accauaaucacauagaauc

SEQ ID NO: 788572 - RNA, 19 nt, Artificial Sequence
  Description of Artificial Sequence: Synthetic oligonucleotide
  Sense strand starting at position 38 of SEQ ID NO: 587389
gguggugguucuaauuugu

SEQ ID NO: 788573 - RNA, 19 nt, Artificial Sequence
  Description of Artificial Sequence: Synthetic oligonucleotide
  Antisense strand to SEQ ID NO: 788572
acaaauuagaaccaccacc

SEQ ID NO: 788574 - RNA, 19 nt, Artificial Sequence
  Description of Artificial Sequence: Synthetic oligonucleotide
  Sense strand starting at position 45 of SEQ ID NO: 587389
guucuaauuugugcccaaa

SEQ ID NO: 788575 - RNA, 19 nt, Artificial Sequence
  Description of Artificial Sequence: Synthetic oligonucleotide
  Antisense strand to SEQ ID NO: 788574
uuugggcacaaauuagaac

SEQ ID NO: 788576 - RNA, 19 nt, Artificial Sequence
  Description of Artificial Sequence: Synthetic oligonucleotide
  Sense strand starting at position 199 of SEQ ID NO: 587389
gaguuuaucuauucuggag

SEQ ID NO: 788577 - RNA, 19 nt, Artificial Sequence
  Description of Artificial Sequence: Synthetic oligonucleotide
  Antisense strand to SEQ ID NO: 788576
cuccagaauagauaaacuc

SEQ ID NO: 788578 - RNA, 19 nt, Artificial Sequence
  Description of Artificial Sequence: Synthetic oligonucleotide
  Sense strand starting at position 203 of SEQ ID NO: 587389
uuaucuauucuggagcauu

SEQ ID NO: 788579 - RNA, 19 nt, Artificial Sequence
  Description of Artificial Sequence: Synthetic oligonucleotide
  Antisense strand to SEQ ID NO: 788578
aaugcuccagaauagauaa

SEQ ID NO: 788580 - RNA, 19 nt, Artificial Sequence
  Description of Artificial Sequence: Synthetic oligonucleotide
  Sense strand starting at position 211 of SEQ ID NO: 587389
ucuggagcauugucugaca

SEQ ID NO: 788581 - RNA, 19 nt, Artificial Sequence
  Description of Artificial Sequence: Synthetic oligonucleotide
  Antisense strand to SEQ ID NO: 788580
ugucagacaaugcuccaga

SEQ ID NO: 788582 - RNA, 19 nt, Artificial Sequence
  Description of Artificial Sequence: Synthetic oligonucleotide
  Sense strand starting at position 213 of SEQ ID NO: 587389
uggagcauugucugacauc

SEQ ID NO: 788583 - RNA, 19 nt, Artificial Sequence
  Description of Artificial Sequence: Synthetic oligonucleotide
  Antisense strand to SEQ ID NO: 788582
gaugucagacaaugcucca

SEQ ID NO: 788584 - RNA, 19 nt, Artificial Sequence
  Description of Artificial Sequence: Synthetic oligonucleotide
  Sense strand starting at position 340 of SEQ ID NO: 587389
guucuagucuugccuauuu

SEQ ID NO: 788585 - RNA, 19 nt, Artificial Sequence
  Description of Artificial Sequence: Synthetic oligonucleotide
  Antisense strand to SEQ ID NO: 788584
aaauaggcaagacuagaac

SEQ ID NO: 788586 - RNA, 19 nt, Artificial Sequence
  Description of Artificial Sequence: Synthetic oligonucleotide
  Sense strand starting at position 507 of SEQ ID NO: 587389
uuuccugucucauugauac

SEQ ID NO: 788587 - RNA, 19 nt, Artificial Sequence
  Description of Artificial Sequence: Synthetic oligonucleotide
  Antisense strand to SEQ ID NO: 788586
guaucaaugagacaggaaa

SEQ ID NO: 788588 - RNA, 19 nt, Artificial Sequence
  Description of Artificial Sequence: Synthetic oligonucleotide
  Sense strand starting at position 759 of SEQ ID NO: 587389
auguguaauaaaggaaugu

SEQ ID NO: 788589 - RNA, 19 nt, Artificial Sequence
  Description of Artificial Sequence: Synthetic oligonucleotide
  Antisense strand to SEQ ID NO: 788588
acauuccuuuauuacacau

SEQ ID NO: 788590 - RNA, 19 nt, Artificial Sequence
  Description of Artificial Sequence: Synthetic oligonucleotide
  Sense strand starting at position 964 of SEQ ID NO: 587389
aauaguaagcaagauguua

SEQ ID NO: 788591 - RNA, 19 nt, Artificial Sequence
  Description of Artificial Sequence: Synthetic oligonucleotide
  Antisense strand to SEQ ID NO: 788590
uaacaucuugcuuacuauu

SEQ ID NO: 788592 - RNA, 19 nt, Artificial Sequence
  Description of Artificial Sequence: Synthetic oligonucleotide
  Sense strand starting at position 1007 of SEQ ID NO: 587389
uuccaaccagugugugaaa

SEQ ID NO: 788593 - RNA, 19 nt, Artificial Sequence
  Description of Artificial Sequence: Synthetic oligonucleotide
  Antisense strand to SEQ ID NO: 788592
uuucacacacugguuggaa

SEQ ID NO: 788594 - RNA, 19 nt, Artificial Sequence
  Description of Artificial Sequence: Synthetic oligonucleotide
  Sense strand starting at position 1044 of SEQ ID NO: 587389
auguauggauaagagauuu

SEQ ID NO: 788595 - RNA, 19 nt, Artificial Sequence
  Description of Artificial Sequence: Synthetic oligonucleotide
  Antisense strand to SEQ ID NO: 788594
aaaucucuuauccauacau

SEQ ID NO: 788596 - RNA, 19 nt, Artificial Sequence
  Description of Artificial Sequence: Synthetic oligonucleotide
  Sense strand starting at position 1617 of SEQ ID NO: 587389
gucugaauuccuuggcaga

SEQ ID NO: 788597 - RNA, 19 nt, Artificial Sequence
  Description of Artificial Sequence: Synthetic oligonucleotide
  Antisense strand to SEQ ID NO: 788596
ucugccaaggaauucagac

SEQ ID NO: 788598 - RNA, 19 nt, Artificial Sequence
  Description of Artificial Sequence: Synthetic oligonucleotide
  Sense strand starting at position 1618 of SEQ ID NO: 587389
ucugaauuccuuggcagag

SEQ ID NO: 788599 - RNA, 19 nt, Artificial Sequence
  Description of Artificial Sequence: Synthetic oligonucleotide
  Antisense strand to SEQ ID NO: 788598
cucugccaaggaauucaga

SEQ ID NO: 788600 - RNA, 19 nt, Artificial Sequence
  Description of Artificial Sequence: Synthetic oligonucleotide
  Sense strand starting at position 1671 of SEQ ID NO: 587389
ggagauggucccggucaau

SEQ ID NO: 788601 - RNA, 19 nt, Artificial Sequence
  Description of Artificial Sequence: Synthetic oligonucleotide
  Antisense strand to SEQ ID NO: 788600
auugaccgggaccaucucc

SEQ ID NO: 788602 - RNA, 19 nt, Artificial Sequence
  Description of Artificial Sequence: Synthetic oligonucleotide
  Sense strand starting at position 1790 of SEQ ID NO: 587389
gacagauccugagcagacu

SEQ ID NO: 788603 - RNA, 19 nt, Artificial Sequence
  Description of Artificial Sequence: Synthetic oligonucleotide
  Antisense strand to SEQ ID NO: 788602
agucugcucaggaucuguc

SEQ ID NO: 788604 - RNA, 19 nt, Artificial Sequence
  Description of Artificial Sequence: Synthetic oligonucleotide
  Sense strand starting at position 1808 of SEQ ID NO: 587389
ugucaucucuacuucuaga

SEQ ID NO: 788605 - RNA, 19 nt, Artificial Sequence
  Description of Artificial Sequence: Synthetic oligonucleotide
  Antisense strand to SEQ ID NO: 788604
ucuagaaguagagaugaca

SEQ ID NO: 788606 - RNA, 19 nt, Artificial Sequence
  Description of Artificial Sequence: Synthetic oligonucleotide
  Sense strand starting at position 2101 of SEQ ID NO: 587389
aaaccacauuugugggaga

SEQ ID NO: 788607 - RNA, 19 nt, Artificial Sequence
  Description of Artificial Sequence: Synthetic oligonucleotide
  Antisense strand to SEQ ID NO: 788606
ucucccacaaaugugguuu

SEQ ID NO: 788608 - RNA, 19 nt, Artificial Sequence
  Description of Artificial Sequence: Synthetic oligonucleotide
  Sense strand starting at position 2104 of SEQ ID NO: 587389
ccacauuugugggagacaa

SEQ ID NO: 788609 - RNA, 19 nt, Artificial Sequence
  Description of Artificial Sequence: Synthetic oligonucleotide
  Antisense strand to SEQ ID NO: 788608
uugucucccacaaaugugg

SEQ ID NO: 788610 - RNA, 19 nt, Artificial Sequence
  Description of Artificial Sequence: Synthetic oligonucleotide
  Sense strand starting at position 2138 of SEQ ID NO: 587389
ccuuucugccuggaauauu

SEQ ID NO: 788611 - RNA, 19 nt, Artificial Sequence
  Description of Artificial Sequence: Synthetic oligonucleotide
  Antisense strand to SEQ ID NO: 788610
aauauuccaggcagaaagg

SEQ ID NO: 788612 - RNA, 19 nt, Artificial Sequence
  Description of Artificial Sequence: Synthetic oligonucleotide
  Sense strand starting at position 2149 of SEQ ID NO: 587389
ggaauauucuauucugugu

SEQ ID NO: 788613 - RNA, 19 nt, Artificial Sequence
  Description of Artificial Sequence: Synthetic oligonucleotide
  Antisense strand to SEQ ID NO: 788612
acacagaauagaauauucc

SEQ ID NO: 788614 - RNA, 19 nt, Artificial Sequence
  Description of Artificial Sequence: Synthetic oligonucleotide
  Sense strand starting at position 2212 of SEQ ID NO: 587389
guauuaccaugucuauaag

SEQ ID NO: 788615 - RNA, 19 nt, Artificial Sequence
  Description of Artificial Sequence: Synthetic oligonucleotide
  Antisense strand to SEQ ID NO: 788614
cuuauagacaugguaauac

SEQ ID NO: 788616 - RNA, 19 nt, Artificial Sequence
  Description of Artificial Sequence: Synthetic oligonucleotide
  Sense strand starting at position 2567 of SEQ ID NO: 587389
aaagucaugcaugaucuga

SEQ ID NO: 788617 - RNA, 19 nt, Artificial Sequence
  Description of Artificial Sequence: Synthetic oligonucleotide
  Antisense strand to SEQ ID NO: 788616
ucagaucaugcaugacuuu

SEQ ID NO: 788618 - RNA, 19 nt, Artificial Sequence
  Description of Artificial Sequence: Synthetic oligonucleotide
  Sense strand starting at position 2718 of SEQ ID NO: 587389
uauugauguguuuaagcac

SEQ ID NO: 788619 - RNA, 19 nt, Artificial Sequence
  Description of Artificial Sequence: Synthetic oligonucleotide
  Antisense strand to SEQ ID NO: 788618
gugcuuaaacacaucaaua

SEQ ID NO: 788620 - RNA, 19 nt, Artificial Sequence
  Description of Artificial Sequence: Synthetic oligonucleotide
  Sense strand starting at position 2772 of SEQ ID NO: 587389
gggauuaaauuggcaaucu

SEQ ID NO: 788621 - RNA, 19 nt, Artificial Sequence
  Description of Artificial Sequence: Synthetic oligonucleotide
  Antisense strand to SEQ ID NO: 788620
agauugccaauuuaauccc

SEQ ID NO: 788622 - RNA, 19 nt, Artificial Sequence
  Description of Artificial Sequence: Synthetic oligonucleotide
  Sense strand starting at position 3112 of SEQ ID NO: 587389
aaauguugucaacagguau

SEQ ID NO: 788623 - RNA, 19 nt, Artificial Sequence
  Description of Artificial Sequence: Synthetic oligonucleotide
  Antisense strand to SEQ ID NO: 788622
auaccuguugacaacauuu

SEQ ID NO: 788624 - RNA, 19 nt, Artificial Sequence
  Description of Artificial Sequence: Synthetic oligonucleotide
  Sense strand starting at position 3199 of SEQ ID NO: 587389
gcacaagaauuagcagaaa

SEQ ID NO: 788625 - RNA, 19 nt, Artificial Sequence
  Description of Artificial Sequence: Synthetic oligonucleotide
  Antisense strand to SEQ ID NO: 788624
uuucugcuaauucuugugc

SEQ ID NO: 788626 - RNA, 19 nt, Artificial Sequence
  Description of Artificial Sequence: Synthetic oligonucleotide
  Sense strand starting at position 3220 of SEQ ID NO: 587389
auaaguauuucuguauguc

SEQ ID NO: 788627 - RNA, 19 nt, Artificial Sequence
  Description of Artificial Sequence: Synthetic oligonucleotide
  Antisense strand to SEQ ID NO: 788626
gacauacagaaauacuuau

SEQ ID NO: 788628 - RNA, 19 nt, Artificial Sequence
  Description of Artificial Sequence: Synthetic oligonucleotide
  Sense strand starting at position 3224 of SEQ ID NO: 587389
guauuucuguaugucuuaa

SEQ ID NO: 788629 - RNA, 19 nt, Artificial Sequence
  Description of Artificial Sequence: Synthetic oligonucleotide
  Antisense strand to SEQ ID NO: 788628
uuaagacauacagaaauac

SEQ ID NO: 788630 - RNA, 19 nt, Artificial Sequence
  Description of Artificial Sequence: Synthetic oligonucleotide
  Sense strand starting at position 3244 of SEQ ID NO: 587389
gaaaguaaguguguuauua

SEQ ID NO: 788631 - RNA, 19 nt, Artificial Sequence
  Description of Artificial Sequence: Synthetic oligonucleotide
  Antisense strand to SEQ ID NO: 788630
uaauaacacacuuacuuuc

SEQ ID NO: 788632 - RNA, 19 nt, Artificial Sequence
  Description of Artificial Sequence: Synthetic oligonucleotide
  Sense strand starting at position 3271 of SEQ ID NO: 587389
auggcuucugcuuaagaug

SEQ ID NO: 788633 - RNA, 19 nt, Artificial Sequence
  Description of Artificial Sequence: Synthetic oligonucleotide
  Antisense strand to SEQ ID NO: 788632
caucuuaagcagaagccau

SEQ ID NO: 788634 - RNA, 19 nt, Artificial Sequence
  Description of Artificial Sequence: Synthetic oligonucleotide
  Sense strand starting at position 3367 of SEQ ID NO: 587389
ucuuuaacucauuggaaag

SEQ ID NO: 788635 - RNA, 19 nt, Artificial Sequence
  Description of Artificial Sequence: Synthetic oligonucleotide
  Antisense strand to SEQ ID NO: 788634
cuuuccaaugaguuaaaga

SEQ ID NO: 788636 - RNA, 19 nt, Artificial Sequence
  Description of Artificial Sequence: Synthetic oligonucleotide
  Sense strand starting at position 3510 of SEQ ID NO: 587389
cagguaaagucuguagaga

SEQ ID NO: 788637 - RNA, 19 nt, Artificial Sequence
  Description of Artificial Sequence: Synthetic oligonucleotide
  Antisense strand to SEQ ID NO: 788636
ucucuacagacuuuaccug

SEQ ID NO: 788638 - RNA, 19 nt, Artificial Sequence
  Description of Artificial Sequence: Synthetic oligonucleotide
  Sense strand starting at position 3519 of SEQ ID NO: 587389
ucuguagagaauugcuaag

SEQ ID NO: 788639 - RNA, 19 nt, Artificial Sequence
  Description of Artificial Sequence: Synthetic oligonucleotide
  Antisense strand to SEQ ID NO: 788638
cuuagcaauucucuacaga

SEQ ID NO: 788640 - RNA, 19 nt, Artificial Sequence
  Description of Artificial Sequence: Synthetic oligonucleotide
  Sense strand starting at position 3611 of SEQ ID NO: 587389
augucuucuccauagacuc

SEQ ID NO: 788641 - RNA, 19 nt, Artificial Sequence
  Description of Artificial Sequence: Synthetic oligonucleotide
  Antisense strand to SEQ ID NO: 788640
gagucuauggagaagacau

SEQ ID NO: 788642 - RNA, 19 nt, Artificial Sequence
  Description of Artificial Sequence: Synthetic oligonucleotide
  Sense strand starting at position 3685 of SEQ ID NO: 587389
aacaguagccacugugaga

SEQ ID NO: 788643 - RNA, 19 nt, Artificial Sequence
  Description of Artificial Sequence: Synthetic oligonucleotide
  Antisense strand to SEQ ID NO: 788642
ucucacaguggcuacuguu

SEQ ID NO: 788644 - RNA, 19 nt, Artificial Sequence
  Description of Artificial Sequence: Synthetic oligonucleotide
  Sense strand starting at position 3800 of SEQ ID NO: 587389
ggcacuggugaaugaacaa

SEQ ID NO: 788645 - RNA, 19 nt, Artificial Sequence
  Description of Artificial Sequence: Synthetic oligonucleotide
  Antisense strand to SEQ ID NO: 788644
uuguucauucaccagugcc

SEQ ID NO: 788646 - RNA, 19 nt, Artificial Sequence
  Description of Artificial Sequence: Synthetic oligonucleotide
  Sense strand starting at position 3943 of SEQ ID NO: 587389
guagaaagaugacagaaua

SEQ ID NO: 788647 - RNA, 19 nt, Artificial Sequence
  Description of Artificial Sequence: Synthetic oligonucleotide
  Antisense strand to SEQ ID NO: 788646
uauucugucaucuuucuac

SEQ ID NO: 788648 - RNA, 19 nt, Artificial Sequence
  Description of Artificial Sequence: Synthetic oligonucleotide
  Sense strand starting at position 7 of SEQ ID NO: 587390
cugagauucuaugugauua

SEQ ID NO: 788649 - RNA, 19 nt, Artificial Sequence
  Description of Artificial Sequence: Synthetic oligonucleotide
  Antisense strand to SEQ ID NO: 788648
uaaucacauagaaucucag

SEQ ID NO: 788650 - RNA, 19 nt, Artificial Sequence
  Description of Artificial Sequence: Synthetic oligonucleotide
  Sense strand starting at position 11 of SEQ ID NO: 587390
gauucuaugugauuauggu

SEQ ID NO: 788651 - RNA, 19 nt, Artificial Sequence
  Description of Artificial Sequence: Synthetic oligonucleotide
  Antisense strand to SEQ ID NO: 788650
accauaaucacauagaauc

SEQ ID NO: 788652 - RNA, 19 nt, Artificial Sequence
  Description of Artificial Sequence: Synthetic oligonucleotide
  Sense strand starting at position 40 of SEQ ID NO: 587390
guucuaauuugugcccaaa

SEQ ID NO: 788653 - RNA, 19 nt, Artificial Sequence
  Description of Artificial Sequence: Synthetic oligonucleotide
  Antisense strand to SEQ ID NO: 788652
uuugggcacaaauuagaac

SEQ ID NO: 788654 - RNA, 19 nt, Artificial Sequence
  Description of Artificial Sequence: Synthetic oligonucleotide
  Sense strand starting at position 133 of SEQ ID NO: 587390
auagacugaucugaauaaa

SEQ ID NO: 788655 - RNA, 19 nt, Artificial Sequence
  Description of Artificial Sequence: Synthetic oligonucleotide
  Antisense strand to SEQ ID NO: 788654
uuuauucagaucagucuau

SEQ ID NO: 788656 - RNA, 19 nt, Artificial Sequence
  Description of Artificial Sequence: Synthetic oligonucleotide
  Sense strand starting at position 194 of SEQ ID NO: 587390
gaguuuaucuauucuggag

SEQ ID NO: 788657 - RNA, 19 nt, Artificial Sequence
  Description of Artificial Sequence: Synthetic oligonucleotide
  Antisense strand to SEQ ID NO: 788656
cuccagaauagauaaacuc

SEQ ID NO: 788658 - RNA, 19 nt, Artificial Sequence
  Description of Artificial Sequence: Synthetic oligonucleotide
  Sense strand starting at position 198 of SEQ ID NO: 587390
uuaucuauucuggagcauu

SEQ ID NO: 788659 - RNA, 19 nt, Artificial Sequence
  Description of Artificial Sequence: Synthetic oligonucleotide
  Antisense strand to SEQ ID NO: 788658
aaugcuccagaauagauaa

SEQ ID NO: 788660 - RNA, 19 nt, Artificial Sequence
  Description of Artificial Sequence: Synthetic oligonucleotide
  Sense strand starting at position 206 of SEQ ID NO: 587390
ucuggagcauugucugaca

SEQ ID NO: 788661 - RNA, 19 nt, Artificial Sequence
  Description of Artificial Sequence: Synthetic oligonucleotide
  Antisense strand to SEQ ID NO: 788660
ugucagacaaugcuccaga

SEQ ID NO: 788662 - RNA, 19 nt, Artificial Sequence
  Description of Artificial Sequence: Synthetic oligonucleotide
  Sense strand starting at position 208 of SEQ ID NO: 587390
uggagcauugucugacauc

SEQ ID NO: 788663 - RNA, 19 nt, Artificial Sequence
  Description of Artificial Sequence: Synthetic oligonucleotide
  Antisense strand to SEQ ID NO: 788662
gaugucagacaaugcucca

SEQ ID NO: 788664 - RNA, 19 nt, Artificial Sequence
  Description of Artificial Sequence: Synthetic oligonucleotide
  Sense strand starting at position 335 of SEQ ID NO: 587390
guucuagucuugccuauuu

SEQ ID NO: 788665 - RNA, 19 nt, Artificial Sequence
  Description of Artificial Sequence: Synthetic oligonucleotide
  Antisense strand to SEQ ID NO: 788664
aaauaggcaagacuagaac

SEQ ID NO: 788666 - RNA, 19 nt, Artificial Sequence
  Description of Artificial Sequence: Synthetic oligonucleotide
  Sense strand starting at position 756 of SEQ ID NO: 587390
auguguaauaaaggaaugu

SEQ ID NO: 788667 - RNA, 19 nt, Artificial Sequence
  Description of Artificial Sequence: Synthetic oligonucleotide
  Antisense strand to SEQ ID NO: 788666
acauuccuuuauuacacau

SEQ ID NO: 788668 - RNA, 19 nt, Artificial Sequence
  Description of Artificial Sequence: Synthetic oligonucleotide
  Sense strand starting at position 961 of SEQ ID NO: 587390
aauaguaagcaagauguua

SEQ ID NO: 788669 - RNA, 19 nt, Artificial Sequence
  Description of Artificial Sequence: Synthetic oligonucleotide
  Antisense strand to SEQ ID NO: 788668
uaacaucuugcuuacuauu

SEQ ID NO: 788670 - RNA, 19 nt, Artificial Sequence
  Description of Artificial Sequence: Synthetic oligonucleotide
  Sense strand starting at position 1004 of SEQ ID NO: 587390
uuccaaccagugugugaaa

SEQ ID NO: 788671 - RNA, 19 nt, Artificial Sequence
  Description of Artificial Sequence: Synthetic oligonucleotide
  Antisense strand to SEQ ID NO: 788670
uuucacacacugguuggaa

SEQ ID NO: 788672 - RNA, 19 nt, Artificial Sequence
  Description of Artificial Sequence: Synthetic oligonucleotide
  Sense strand starting at position 1041 of SEQ ID NO: 587390
auguauggauaagagauuu

SEQ ID NO: 788673 - RNA, 19 nt, Artificial Sequence
  Description of Artificial Sequence: Synthetic oligonucleotide
  Antisense strand to SEQ ID NO: 788672
aaaucucuuauccauacau

SEQ ID NO: 788674 - RNA, 19 nt, Artificial Sequence
  Description of Artificial Sequence: Synthetic oligonucleotide
  Sense strand starting at position 1618 of SEQ ID NO: 587390
gucugaauuccuuggcaga

SEQ ID NO: 788675 - RNA, 19 nt, Artificial Sequence
  Description of Artificial Sequence: Synthetic oligonucleotide
  Antisense strand to SEQ ID NO: 788674
ucugccaaggaauucagac

SEQ ID NO: 788676 - RNA, 19 nt, Artificial Sequence
  Description of Artificial Sequence: Synthetic oligonucleotide
  Sense strand starting at position 1619 of SEQ ID NO: 587390
ucugaauuccuuggcagag

SEQ ID NO: 788677 - RNA, 19 nt, Artificial Sequence
  Description of Artificial Sequence: Synthetic oligonucleotide
  Antisense strand to SEQ ID NO: 788676
cucugccaaggaauucaga

SEQ ID NO: 788678 - RNA, 19 nt, Artificial Sequence
  Description of Artificial Sequence: Synthetic oligonucleotide
  Sense strand starting at position 1672 of SEQ ID NO: 587390
ggagauggucccggucaau

SEQ ID NO: 788679 - RNA, 19 nt, Artificial Sequence
  Description of Artificial Sequence: Synthetic oligonucleotide
  Antisense strand to SEQ ID NO: 788678
auugaccgggaccaucucc

SEQ ID NO: 788680 - RNA, 19 nt, Artificial Sequence
  Description of Artificial Sequence: Synthetic oligonucleotide
  Sense strand starting at position 1791 of SEQ ID NO: 587390
gacagauccugagcagacu

SEQ ID NO: 788681 - RNA, 19 nt, Artificial Sequence
  Description of Artificial Sequence: Synthetic oligonucleotide
  Antisense strand to SEQ ID NO: 788680
agucugcucaggaucuguc

SEQ ID NO: 788682 - RNA, 19 nt, Artificial Sequence
  Description of Artificial Sequence: Synthetic oligonucleotide
  Sense strand starting at position 1809 of SEQ ID NO: 587390
ugucaucucuacuucuaga

SEQ ID NO: 788683 - RNA, 19 nt, Artificial Sequence
  Description of Artificial Sequence: Synthetic oligonucleotide
  Antisense strand to SEQ ID NO: 788682
ucuagaaguagagaugaca

SEQ ID NO: 788684 - RNA, 19 nt, Artificial Sequence
  Description of Artificial Sequence: Synthetic oligonucleotide
  Sense strand starting at position 2102 of SEQ ID NO: 587390
aaaccacauuugugggaga

SEQ ID NO: 788685 - RNA, 19 nt, Artificial Sequence
  Description of Artificial Sequence: Synthetic oligonucleotide
  Antisense strand to SEQ ID NO: 788684
ucucccacaaaugugguuu

SEQ ID NO: 788686 - RNA, 19 nt, Artificial Sequence
  Description of Artificial Sequence: Synthetic oligonucleotide
  Sense strand starting at position 2105 of SEQ ID NO: 587390
ccacauuugugggagacaa

SEQ ID NO: 788687 - RNA, 19 nt, Artificial Sequence
  Description of Artificial Sequence: Synthetic oligonucleotide
  Antisense strand to SEQ ID NO: 788686
uugucucccacaaaugugg

SEQ ID NO: 788688 - RNA, 19 nt, Artificial Sequence
  Description of Artificial Sequence: Synthetic oligonucleotide
  Sense strand starting at position 2139 of SEQ ID NO: 587390
ccuuucugccuggaauauu

SEQ ID NO: 788689 - RNA, 19 nt, Artificial Sequence
  Description of Artificial Sequence: Synthetic oligonucleotide
  Antisense strand to SEQ ID NO: 788688
aauauuccaggcagaaagg

SEQ ID NO: 788690 - RNA, 19 nt, Artificial Sequence
  Description of Artificial Sequence: Synthetic oligonucleotide
  Sense strand starting at position 2150 of SEQ ID NO: 587390
ggaauauucuauucugugu

SEQ ID NO: 788691 - RNA, 19 nt, Artificial Sequence
  Description of Artificial Sequence: Synthetic oligonucleotide
  Antisense strand to SEQ ID NO: 788690
acacagaauagaauauucc

SEQ ID NO: 788692 - RNA, 19 nt, Artificial Sequence
  Description of Artificial Sequence: Synthetic oligonucleotide
  Sense strand starting at position 2213 of SEQ ID NO: 587390
guauuaccaugucuauaag

SEQ ID NO: 788693 - RNA, 19 nt, Artificial Sequence
  Description of Artificial Sequence: Synthetic oligonucleotide
  Antisense strand to SEQ ID NO: 788692
cuuauagacaugguaauac

SEQ ID NO: 788694 - RNA, 19 nt, Artificial Sequence
  Description of Artificial Sequence: Synthetic oligonucleotide
  Sense strand starting at position 2572 of SEQ ID NO: 587390
aaagucaugcaugaucuga

SEQ ID NO: 788695 - RNA, 19 nt, Artificial Sequence
  Description of Artificial Sequence: Synthetic oligonucleotide
  Antisense strand to SEQ ID NO: 788694
ucagaucaugcaugacuuu

SEQ ID NO: 788696 - RNA, 19 nt, Artificial Sequence
  Description of Artificial Sequence: Synthetic oligonucleotide
  Sense strand starting at position 2723 of SEQ ID NO: 587390
uauugauguguuuaagcac

SEQ ID NO: 788697 - RNA, 19 nt, Artificial Sequence
  Description of Artificial Sequence: Synthetic oligonucleotide
  Antisense strand to SEQ ID NO: 788696
gugcuuaaacacaucaaua

SEQ ID NO: 788698 - RNA, 19 nt, Artificial Sequence
  Description of Artificial Sequence: Synthetic oligonucleotide
  Sense strand starting at position 2777 of SEQ ID NO: 587390
gggauuaaauuggcaaucu

SEQ ID NO: 788699 - RNA, 19 nt, Artificial Sequence
  Description of Artificial Sequence: Synthetic oligonucleotide
  Antisense strand to SEQ ID NO: 788698
agauugccaauuuaauccc

SEQ ID NO: 788700 - RNA, 19 nt, Artificial Sequence
  Description of Artificial Sequence: Synthetic oligonucleotide
  Sense strand starting at position 2845 of SEQ ID NO: 587390
aucauucuagauuguguuu

SEQ ID NO: 788701 - RNA, 19 nt, Artificial Sequence
  Description of Artificial Sequence: Synthetic oligonucleotide
  Antisense strand to SEQ ID NO: 788700
aaacacaaucuagaaugau

SEQ ID NO: 788702 - RNA, 19 nt, Artificial Sequence
  Description of Artificial Sequence: Synthetic oligonucleotide
  Sense strand starting at position 2852 of SEQ ID NO: 587390
uagauuguguuuguaucaa

SEQ ID NO: 788703 - RNA, 19 nt, Artificial Sequence
  Description of Artificial Sequence: Synthetic oligonucleotide
  Antisense strand to SEQ ID NO: 788702
uugauacaaacacaaucua

SEQ ID NO: 788704 - RNA, 19 nt, Artificial Sequence
  Description of Artificial Sequence: Synthetic oligonucleotide
  Sense strand starting at position 3117 of SEQ ID NO: 587390
aaauguugucaacagguau

SEQ ID NO: 788705 - RNA, 19 nt, Artificial Sequence
  Description of Artificial Sequence: Synthetic oligonucleotide
  Antisense strand to SEQ ID NO: 788704
auaccuguugacaacauuu

SEQ ID NO: 788706 - RNA, 19 nt, Artificial Sequence
  Description of Artificial Sequence: Synthetic oligonucleotide
  Sense strand starting at position 3204 of SEQ ID NO: 587390
gcacaagaauuagcagaaa

SEQ ID NO: 788707 - RNA, 19 nt, Artificial Sequence
  Description of Artificial Sequence: Synthetic oligonucleotide
  Antisense strand to SEQ ID NO: 788706
uuucugcuaauucuugugc

SEQ ID NO: 788708 - RNA, 19 nt, Artificial Sequence
  Description of Artificial Sequence: Synthetic oligonucleotide
  Sense strand starting at position 3228 of SEQ ID NO: 587390
aguauuucuguaugucuua

SEQ ID NO: 788709 - RNA, 19 nt, Artificial Sequence
  Description of Artificial Sequence: Synthetic oligonucleotide
  Antisense strand to SEQ ID NO: 788708
uaagacauacagaaauacu

SEQ ID NO: 788710 - RNA, 19 nt, Artificial Sequence
  Description of Artificial Sequence: Synthetic oligonucleotide
  Sense strand starting at position 3229 of SEQ ID NO: 587390
guauuucuguaugucuuaa

SEQ ID NO: 788711 - RNA, 19 nt, Artificial Sequence
  Description of Artificial Sequence: Synthetic oligonucleotide
  Antisense strand to SEQ ID NO: 788710
uuaagacauacagaaauac

SEQ ID NO: 788712 - RNA, 19 nt, Artificial Sequence
  Description of Artificial Sequence: Synthetic oligonucleotide
  Sense strand starting at position 3249 of SEQ ID NO: 587390
gaaaguaaguguguuauua

SEQ ID NO: 788713 - RNA, 19 nt, Artificial Sequence
  Description of Artificial Sequence: Synthetic oligonucleotide
  Antisense strand to SEQ ID NO: 788712
uaauaacacacuuacuuuc

SEQ ID NO: 788714 - RNA, 19 nt, Artificial Sequence
  Description of Artificial Sequence: Synthetic oligonucleotide
  Sense strand starting at position 3276 of SEQ ID NO: 587390
auggcuucugcuuaagaug

SEQ ID NO: 788715 - RNA, 19 nt, Artificial Sequence
  Description of Artificial Sequence: Synthetic oligonucleotide
  Antisense strand to SEQ ID NO: 788714
caucuuaagcagaagccau

SEQ ID NO: 788716 - RNA, 19 nt, Artificial Sequence
  Description of Artificial Sequence: Synthetic oligonucleotide
  Sense strand starting at position 3515 of SEQ ID NO: 587390
cagguaaagucuguagaga

SEQ ID NO: 788717 - RNA, 19 nt, Artificial Sequence
  Description of Artificial Sequence: Synthetic oligonucleotide
  Antisense strand to SEQ ID NO: 788716
ucucuacagacuuuaccug

SEQ ID NO: 788718 - RNA, 19 nt, Artificial Sequence
  Description of Artificial Sequence: Synthetic oligonucleotide
  Sense strand starting at position 3524 of SEQ ID NO: 587390
ucuguagagaauugcuaag

SEQ ID NO: 788719 - RNA, 19 nt, Artificial Sequence
  Description of Artificial Sequence: Synthetic oligonucleotide
  Antisense strand to SEQ ID NO: 788718
cuuagcaauucucuacaga

SEQ ID NO: 788720 - RNA, 19 nt, Artificial Sequence
  Description of Artificial Sequence: Synthetic oligonucleotide
  Sense strand starting at position 3616 of SEQ ID NO: 587390
augucuucuccauagacuc

SEQ ID NO: 788721 - RNA, 19 nt, Artificial Sequence
  Description of Artificial Sequence: Synthetic oligonucleotide
  Antisense strand to SEQ ID NO: 788720
gagucuauggagaagacau

SEQ ID NO: 788722 - RNA, 19 nt, Artificial Sequence
  Description of Artificial Sequence: Synthetic oligonucleotide
  Sense strand starting at position 3690 of SEQ ID NO: 587390
aacaguagccacugugaga

SEQ ID NO: 788723 - RNA, 19 nt, Artificial Sequence
  Description of Artificial Sequence: Synthetic oligonucleotide
  Antisense strand to SEQ ID NO: 788722
ucucacaguggcuacuguu

SEQ ID NO: 788724 - RNA, 19 nt, Artificial Sequence
  Description of Artificial Sequence: Synthetic oligonucleotide
  Sense strand starting at position 3805 of SEQ ID NO: 587390
ggcacuggugaaugaacaa

SEQ ID NO: 788725 - RNA, 19 nt, Artificial Sequence
  Description of Artificial Sequence: Synthetic oligonucleotide
  Antisense strand to SEQ ID NO: 788724
uuguucauucaccagugcc

SEQ ID NO: 788726 - RNA, 19 nt, Artificial Sequence
  Description of Artificial Sequence: Synthetic oligonucleotide
  Sense strand starting at position 3948 of SEQ ID NO: 587390
guagaaagaugacagaaua

SEQ ID NO: 788727 - RNA, 19 nt, Artificial Sequence
  Description of Artificial Sequence: Synthetic oligonucleotide
  Antisense strand to SEQ ID NO: 788726
uauucugucaucuuucuac

SEQ ID NO: 788728 - RNA, 19 nt, Artificial Sequence
  Description of Artificial Sequence: Synthetic oligonucleotide
  Sense strand starting at position 12 of SEQ ID NO: 587391
cugagauucuaugugauua

SEQ ID NO: 788729 - RNA, 19 nt, Artificial Sequence
  Description of Artificial Sequence: Synthetic oligonucleotide
  Antisense strand to SEQ ID NO: 788728
uaaucacauagaaucucag

SEQ ID NO: 788730 - RNA, 19 nt, Artificial Sequence
  Description of Artificial Sequence: Synthetic oligonucleotide
  Sense strand starting at position 16 of SEQ ID NO: 587391
gauucuaugugauuauggu

SEQ ID NO: 788731 - RNA, 19 nt, Artificial Sequence
  Description of Artificial Sequence: Synthetic oligonucleotide
  Antisense strand to SEQ ID NO: 788730
accauaaucacauagaauc

SEQ ID NO: 788732 - RNA, 19 nt, Artificial Sequence
  Description of Artificial Sequence: Synthetic oligonucleotide
  Sense strand starting at position 38 of SEQ ID NO: 587391
gguggugguucuaauuugu

SEQ ID NO: 788733 - RNA, 19 nt, Artificial Sequence
  Description of Artificial Sequence: Synthetic oligonucleotide
  Antisense strand to SEQ ID NO: 788732
acaaauuagaaccaccacc

SEQ ID NO: 788734 - RNA, 19 nt, Artificial Sequence
  Description of Artificial Sequence: Synthetic oligonucleotide
  Sense strand starting at position 45 of SEQ ID NO: 587391
guucuaauuugugcccaaa

SEQ ID NO: 788735 - RNA, 19 nt, Artificial Sequence
  Description of Artificial Sequence: Synthetic oligonucleotide
  Antisense strand to SEQ ID NO: 788734
uuugggcacaaauuagaac

SEQ ID NO: 788736 - RNA, 19 nt, Artificial Sequence
  Description of Artificial Sequence: Synthetic oligonucleotide
  Sense strand starting at position 199 of SEQ ID NO: 587391
gaguuuaucuauucuggag

SEQ ID NO: 788737 - RNA, 19 nt, Artificial Sequence
  Description of Artificial Sequence: Synthetic oligonucleotide
  Antisense strand to SEQ ID NO: 788736
cuccagaauagauaaacuc

SEQ ID NO: 788738 - RNA, 19 nt, Artificial Sequence
  Description of Artificial Sequence: Synthetic oligonucleotide
  Sense strand starting at position 203 of SEQ ID NO: 587391
uuaucuauucuggagcauu

SEQ ID NO: 788739 - RNA, 19 nt, Artificial Sequence
  Description of Artificial Sequence: Synthetic oligonucleotide
  Antisense strand to SEQ ID NO: 788738
aaugcuccagaauagauaa

SEQ ID NO: 788740 - RNA, 19 nt, Artificial Sequence
  Description of Artificial Sequence: Synthetic oligonucleotide
  Sense strand starting at position 211 of SEQ ID NO: 587391
ucuggagcauugucugaca

SEQ ID NO: 788741 - RNA, 19 nt, Artificial Sequence
  Description of Artificial Sequence: Synthetic oligonucleotide
  Antisense strand to SEQ ID NO: 788740
ugucagacaaugcuccaga

SEQ ID NO: 788742 - RNA, 19 nt, Artificial Sequence
  Description of Artificial Sequence: Synthetic oligonucleotide
  Sense strand starting at position 213 of SEQ ID NO: 587391
uggagcauugucugacauc

SEQ ID NO: 788743 - RNA, 19 nt, Artificial Sequence
  Description of Artificial Sequence: Synthetic oligonucleotide
  Antisense strand to SEQ ID NO: 788742
gaugucagacaaugcucca

SEQ ID NO: 788744 - RNA, 19 nt, Artificial Sequence
  Description of Artificial Sequence: Synthetic oligonucleotide
  Sense strand starting at position 340 of SEQ ID NO: 587391
guucuagucuugccuauuu

SEQ ID NO: 788745 - RNA, 19 nt, Artificial Sequence
  Description of Artificial Sequence: Synthetic oligonucleotide
  Antisense strand to SEQ ID NO: 788744
aaauaggcaagacuagaac

SEQ ID NO: 788746 - RNA, 19 nt, Artificial Sequence
  Description of Artificial Sequence: Synthetic oligonucleotide
  Sense strand starting at position 507 of SEQ ID NO: 587391
uuuccugucucauugauac

SEQ ID NO: 788747 - RNA, 19 nt, Artificial Sequence
  Description of Artificial Sequence: Synthetic oligonucleotide
  Antisense strand to SEQ ID NO: 788746
guaucaaugagacaggaaa

SEQ ID NO: 788748 - RNA, 19 nt, Artificial Sequence
  Description of Artificial Sequence: Synthetic oligonucleotide
  Sense strand starting at position 759 of SEQ ID NO: 587391
auguguaauaaaggaaugu

SEQ ID NO: 788749 - RNA, 19 nt, Artificial Sequence
  Description of Artificial Sequence: Synthetic oligonucleotide
  Antisense strand to SEQ ID NO: 788748
acauuccuuuauuacacau

SEQ ID NO: 788750 - RNA, 19 nt, Artificial Sequence
  Description of Artificial Sequence: Synthetic oligonucleotide
  Sense strand starting at position 964 of SEQ ID NO: 587391
aauaguaagcaagauguua

SEQ ID NO: 788751 - RNA, 19 nt, Artificial Sequence
  Description of Artificial Sequence: Synthetic oligonucleotide
  Antisense strand to SEQ ID NO: 788750
uaacaucuugcuuacuauu

SEQ ID NO: 788752 - RNA, 19 nt, Artificial Sequence
  Description of Artificial Sequence: Synthetic oligonucleotide
  Sense strand starting at position 1007 of SEQ ID NO: 587391
uuccaaccagugugugaaa

SEQ ID NO: 788753 - RNA, 19 nt, Artificial Sequence
  Description of Artificial Sequence: Synthetic oligonucleotide
  Antisense strand to SEQ ID NO: 788752
uuucacacacugguuggaa

SEQ ID NO: 788754 - RNA, 19 nt, Artificial Sequence
  Description of Artificial Sequence: Synthetic oligonucleotide
  Sense strand starting at position 1044 of SEQ ID NO: 587391
auguauggauaagagauuu

SEQ ID NO: 788755 - RNA, 19 nt, Artificial Sequence
  Description of Artificial Sequence: Synthetic oligonucleotide
  Antisense strand to SEQ ID NO: 788754
aaaucucuuauccauacau

SEQ ID NO: 788756 - RNA, 19 nt, Artificial Sequence
  Description of Artificial Sequence: Synthetic oligonucleotide
  Sense strand starting at position 1617 of SEQ ID NO: 587391
gucugaauuccuuggcaga

SEQ ID NO: 788757 - RNA, 19 nt, Artificial Sequence
  Description of Artificial Sequence: Synthetic oligonucleotide
  Antisense strand to SEQ ID NO: 788756
ucugccaaggaauucagac

SEQ ID NO: 788758 - RNA, 19 nt, Artificial Sequence
  Description of Artificial Sequence: Synthetic oligonucleotide
  Sense strand starting at position 1618 of SEQ ID NO: 587391
ucugaauuccuuggcagag

SEQ ID NO: 788759 - RNA, 19 nt, Artificial Sequence
  Description of Artificial Sequence: Synthetic oligonucleotide
  Antisense strand to SEQ ID NO: 788758
cucugccaaggaauucaga

SEQ ID NO: 788760 - RNA, 19 nt, Artificial Sequence
  Description of Artificial Sequence: Synthetic oligonucleotide
  Sense strand starting at position 1671 of SEQ ID NO: 587391
ggagauggucccggucaau

SEQ ID NO: 788761 - RNA, 19 nt, Artificial Sequence
  Description of Artificial Sequence: Synthetic oligonucleotide
  Antisense strand to SEQ ID NO: 788760
auugaccgggaccaucucc

SEQ ID NO: 788762 - RNA, 19 nt, Artificial Sequence
  Description of Artificial Sequence: Synthetic oligonucleotide
  Sense strand starting at position 1790 of SEQ ID NO: 587391
gacagauccugagcagacu

SEQ ID NO: 788763 - RNA, 19 nt, Artificial Sequence
  Description of Artificial Sequence: Synthetic oligonucleotide
  Antisense strand to SEQ ID NO: 788762
agucugcucaggaucuguc

SEQ ID NO: 788764 - RNA, 19 nt, Artificial Sequence
  Description of Artificial Sequence: Synthetic oligonucleotide
  Sense strand starting at position 1808 of SEQ ID NO: 587391
ugucaucucuacuucuaga

SEQ ID NO: 788765 - RNA, 19 nt, Artificial Sequence
  Description of Artificial Sequence: Synthetic oligonucleotide
  Antisense strand to SEQ ID NO: 788764
ucuagaaguagagaugaca

SEQ ID NO: 788766 - RNA, 19 nt, Artificial Sequence
  Description of Artificial Sequence: Synthetic oligonucleotide
  Sense strand starting at position 2101 of SEQ ID NO: 587391
aaaccacauuugugggaga

SEQ ID NO: 788767 - RNA, 19 nt, Artificial Sequence
  Description of Artificial Sequence: Synthetic oligonucleotide
  Antisense strand to SEQ ID NO: 788766
ucucccacaaaugugguuu

SEQ ID NO: 788768 - RNA, 19 nt, Artificial Sequence
  Description of Artificial Sequence: Synthetic oligonucleotide
  Sense strand starting at position 2104 of SEQ ID NO: 587391
ccacauuugugggagacaa

SEQ ID NO: 788769 - RNA, 19 nt, Artificial Sequence
  Description of Artificial Sequence: Synthetic oligonucleotide
  Antisense strand to SEQ ID NO: 788768
uugucucccacaaaugugg

SEQ ID NO: 788770 - RNA, 19 nt, Artificial Sequence
  Description of Artificial Sequence: Synthetic oligonucleotide
  Sense strand starting at position 2138 of SEQ ID NO: 587391
ccuuucugccuggaauauu

SEQ ID NO: 788771 - RNA, 19 nt, Artificial Sequence
  Description of Artificial Sequence: Synthetic oligonucleotide
  Antisense strand to SEQ ID NO: 788770
aauauuccaggcagaaagg

SEQ ID NO: 788772 - RNA, 19 nt, Artificial Sequence
  Description of Artificial Sequence: Synthetic oligonucleotide
  Sense strand starting at position 2149 of SEQ ID NO: 587391
ggaauauucuauucugugu

SEQ ID NO: 788773 - RNA, 19 nt, Artificial Sequence
  Description of Artificial Sequence: Synthetic oligonucleotide
  Antisense strand to SEQ ID NO: 788772
acacagaauagaauauucc

SEQ ID NO: 788774 - RNA, 19 nt, Artificial Sequence
  Description of Artificial Sequence: Synthetic oligonucleotide
  Sense strand starting at position 2212 of SEQ ID NO: 587391
guauuaccaugucuauaag

SEQ ID NO: 788775 - RNA, 19 nt, Artificial Sequence
  Description of Artificial Sequence: Synthetic oligonucleotide
  Antisense strand to SEQ ID NO: 788774
cuuauagacaugguaauac

SEQ ID NO: 788776 - RNA, 19 nt, Artificial Sequence
  Description of Artificial Sequence: Synthetic oligonucleotide
  Sense strand starting at position 2567 of SEQ ID NO: 587391
aaagucaugcaugaucuga

SEQ ID NO: 788777 - RNA, 19 nt, Artificial Sequence
  Description of Artificial Sequence: Synthetic oligonucleotide
  Antisense strand to SEQ ID NO: 788776
ucagaucaugcaugacuuu

SEQ ID NO: 788778 - RNA, 19 nt, Artificial Sequence
  Description of Artificial Sequence: Synthetic oligonucleotide
  Sense strand starting at position 2718 of SEQ ID NO: 587391
uauugauguguuuaagcac

SEQ ID NO: 788779 - RNA, 19 nt, Artificial Sequence
  Description of Artificial Sequence: Synthetic oligonucleotide
  Antisense strand to SEQ ID NO: 788778
gugcuuaaacacaucaaua

SEQ ID NO: 788780 - RNA, 19 nt, Artificial Sequence
  Description of Artificial Sequence: Synthetic oligonucleotide
  Sense strand starting at position 2772 of SEQ ID NO: 587391
gggauuaaauuggcaaucu

SEQ ID NO: 788781 - RNA, 19 nt, Artificial Sequence
  Description of Artificial Sequence: Synthetic oligonucleotide
  Antisense strand to SEQ ID NO: 788780
agauugccaauuuaauccc

SEQ ID NO: 788782 - RNA, 19 nt, Artificial Sequence
  Description of Artificial Sequence: Synthetic oligonucleotide
  Sense strand starting at position 3112 of SEQ ID NO: 587391
aaauguugucaacagguau

SEQ ID NO: 788783 - RNA, 19 nt, Artificial Sequence
  Description of Artificial Sequence: Synthetic oligonucleotide
  Antisense strand to SEQ ID NO: 788782
auaccuguugacaacauuu

SEQ ID NO: 788784 - RNA, 19 nt, Artificial Sequence
  Description of Artificial Sequence: Synthetic oligonucleotide
  Sense strand starting at position 3199 of SEQ ID NO: 587391
gcacaagaauuagcagaaa

SEQ ID NO: 788785 - RNA, 19 nt, Artificial Sequence
  Description of Artificial Sequence: Synthetic oligonucleotide
  Antisense strand to SEQ ID NO: 788784
uuucugcuaauucuugugc

SEQ ID NO: 788786 - RNA, 19 nt, Artificial Sequence
  Description of Artificial Sequence: Synthetic oligonucleotide
  Sense strand starting at position 3220 of SEQ ID NO: 587391
auaaguauuucuguauguc

SEQ ID NO: 788787 - RNA, 19 nt, Artificial Sequence
  Description of Artificial Sequence: Synthetic oligonucleotide
  Antisense strand to SEQ ID NO: 788786
gacauacagaaauacuuau

SEQ ID NO: 788788 - RNA, 19 nt, Artificial Sequence
  Description of Artificial Sequence: Synthetic oligonucleotide
  Sense strand starting at position 3224 of SEQ ID NO: 587391
guauuucuguaugucuuaa

SEQ ID NO: 788789 - RNA, 19 nt, Artificial Sequence
  Description of Artificial Sequence: Synthetic oligonucleotide
  Antisense strand to SEQ ID NO: 788788
uuaagacauacagaaauac

SEQ ID NO: 788790 - RNA, 19 nt, Artificial Sequence
  Description of Artificial Sequence: Synthetic oligonucleotide
  Sense strand starting at position 3244 of SEQ ID NO: 587391
gaaaguaaguguguuauua

SEQ ID NO: 788791 - RNA, 19 nt, Artificial Sequence
  Description of Artificial Sequence: Synthetic oligonucleotide
  Antisense strand to SEQ ID NO: 788790
uaauaacacacuuacuuuc

SEQ ID NO: 788792 - RNA, 19 nt, Artificial Sequence
  Description of Artificial Sequence: Synthetic oligonucleotide
  Sense strand starting at position 3271 of SEQ ID NO: 587391
auggcuucugcuuaagaug

SEQ ID NO: 788793 - RNA, 19 nt, Artificial Sequence
  Description of Artificial Sequence: Synthetic oligonucleotide
  Antisense strand to SEQ ID NO: 788792
caucuuaagcagaagccau

SEQ ID NO: 788794 - RNA, 19 nt, Artificial Sequence
  Description of Artificial Sequence: Synthetic oligonucleotide
  Sense strand starting at position 3367 of SEQ ID NO: 587391
ucuuuaacucauuggaaag

SEQ ID NO: 788795 - RNA, 19 nt, Artificial Sequence
  Description of Artificial Sequence: Synthetic oligonucleotide
  Antisense strand to SEQ ID NO: 788794
cuuuccaaugaguuaaaga

SEQ ID NO: 788796 - RNA, 19 nt, Artificial Sequence
  Description of Artificial Sequence: Synthetic oligonucleotide
  Sense strand starting at position 3510 of SEQ ID NO: 587391
cagguaaagucuguagaga

SEQ ID NO: 788797 - RNA, 19 nt, Artificial Sequence
  Description of Artificial Sequence: Synthetic oligonucleotide
  Antisense strand to SEQ ID NO: 788796
ucucuacagacuuuaccug

SEQ ID NO: 788798 - RNA, 19 nt, Artificial Sequence
  Description of Artificial Sequence: Synthetic oligonucleotide
  Sense strand starting at position 3519 of SEQ ID NO: 587391
ucuguagagaauugcuaag

SEQ ID NO: 788799 - RNA, 19 nt, Artificial Sequence
  Description of Artificial Sequence: Synthetic oligonucleotide
  Antisense strand to SEQ ID NO: 788798
cuuagcaauucucuacaga

SEQ ID NO: 788800 - RNA, 19 nt, Artificial Sequence
  Description of Artificial Sequence: Synthetic oligonucleotide
  Sense strand starting at position 3611 of SEQ ID NO: 587391
augucuucuccauagacuc

SEQ ID NO: 788801 - RNA, 19 nt, Artificial Sequence
  Description of Artificial Sequence: Synthetic oligonucleotide
  Antisense strand to SEQ ID NO: 788800
gagucuauggagaagacau

SEQ ID NO: 788802 - RNA, 19 nt, Artificial Sequence
  Description of Artificial Sequence: Synthetic oligonucleotide
  Sense strand starting at position 3685 of SEQ ID NO: 587391
aacaguagccacugugaga

SEQ ID NO: 788803 - RNA, 19 nt, Artificial Sequence
  Description of Artificial Sequence: Synthetic oligonucleotide
  Antisense strand to SEQ ID NO: 788802
ucucacaguggcuacuguu

SEQ ID NO: 788804 - RNA, 19 nt, Artificial Sequence
  Description of Artificial Sequence: Synthetic oligonucleotide
  Sense strand starting at position 3800 of SEQ ID NO: 587391
ggcacuggugaaugaacaa

SEQ ID NO: 788805 - RNA, 19 nt, Artificial Sequence
  Description of Artificial Sequence: Synthetic oligonucleotide
  Antisense strand to SEQ ID NO: 788804
uuguucauucaccagugcc

SEQ ID NO: 788806 - RNA, 19 nt, Artificial Sequence
  Description of Artificial Sequence: Synthetic oligonucleotide
  Sense strand starting at position 3943 of SEQ ID NO: 587391
guagaaagaugacagaaua

SEQ ID NO: 788807 - RNA, 19 nt, Artificial Sequence
  Description of Artificial Sequence: Synthetic oligonucleotide
  Antisense strand to SEQ ID NO: 788806
uauucugucaucuuucuac

SEQ ID NO: 788808 - RNA, 19 nt, Artificial Sequence
  Description of Artificial Sequence: Synthetic oligonucleotide
  Sense strand starting at position 2172 of SEQ ID NO: 587392
uuaaccuaauuguaggaaa

SEQ ID NO: 788809 - RNA, 19 nt, Artificial Sequence
  Description of Artificial Sequence: Synthetic oligonucleotide
  Antisense strand to SEQ ID NO: 788808
uuuccuacaauuagguuaa

SEQ ID NO: 788810 - RNA, 19 nt, Artificial Sequence
  Description of Artificial Sequence: Synthetic oligonucleotide
  Sense strand starting at position 2175 of SEQ ID NO: 587392
accuaauuguaggaaacca

SEQ ID NO: 788811 - RNA, 19 nt, Artificial Sequence
  Description of Artificial Sequence: Synthetic oligonucleotide
  Antisense strand to SEQ ID NO: 788810
ugguuuccuacaauuaggu

SEQ ID NO: 788812 - RNA, 19 nt, Artificial Sequence
  Description of Artificial Sequence: Synthetic oligonucleotide
  Sense strand starting at position 2240 of SEQ ID NO: 587392
gugaauuaauaccuguagu

SEQ ID NO: 788813 - RNA, 19 nt, Artificial Sequence
  Description of Artificial Sequence: Synthetic oligonucleotide
  Antisense strand to SEQ ID NO: 788812
acuacagguauuaauucac

SEQ ID NO: 788814 - RNA, 19 nt, Artificial Sequence
  Description of Artificial Sequence: Synthetic oligonucleotide
  Sense strand starting at position 2425 of SEQ ID NO: 587392
ggacaagaguauucucuaa

SEQ ID NO: 788815 - RNA, 19 nt, Artificial Sequence
  Description of Artificial Sequence: Synthetic oligonucleotide
  Antisense strand to SEQ ID NO: 788814
uuagagaauacucuugucc

SEQ ID NO: 788816 - RNA, 19 nt, Artificial Sequence
  Description of Artificial Sequence: Synthetic oligonucleotide
  Sense strand starting at position 2427 of SEQ ID NO: 587392
acaagaguauucucuaagg

SEQ ID NO: 788817 - RNA, 19 nt, Artificial Sequence
  Description of Artificial Sequence: Synthetic oligonucleotide
  Antisense strand to SEQ ID NO: 788816
ccuuagagaauacucuugu

SEQ ID NO: 788818 - RNA, 19 nt, Artificial Sequence
  Description of Artificial Sequence: Synthetic oligonucleotide
  Sense strand starting at position 2429 of SEQ ID NO: 587392
aagaguauucucuaagguc

SEQ ID NO: 788819 - RNA, 19 nt, Artificial Sequence
  Description of Artificial Sequence: Synthetic oligonucleotide
  Antisense strand to SEQ ID NO: 788818
gaccuuagagaauacucuu

SEQ ID NO: 788820 - RNA, 19 nt, Artificial Sequence
  Description of Artificial Sequence: Synthetic oligonucleotide
  Sense strand starting at position 2432 of SEQ ID NO: 587392
aguauucucuaagguccau

SEQ ID NO: 788821 - RNA, 19 nt, Artificial Sequence
  Description of Artificial Sequence: Synthetic oligonucleotide
  Antisense strand to SEQ ID NO: 788820
auggaccuuagagaauacu

SEQ ID NO: 788822 - RNA, 19 nt, Artificial Sequence
  Description of Artificial Sequence: Synthetic oligonucleotide
  Sense strand starting at position 2947 of SEQ ID NO: 587392
caaguaagaucaggagagu

SEQ ID NO: 788823 - RNA, 19 nt, Artificial Sequence
  Description of Artificial Sequence: Synthetic oligonucleotide
  Antisense strand to SEQ ID NO: 788822
acucuccugaucuuacuug

SEQ ID NO: 788824 - RNA, 19 nt, Artificial Sequence
  Description of Artificial Sequence: Synthetic oligonucleotide
  Sense strand starting at position 2240 of SEQ ID NO: 587393
guuaauuaauaccuguagu

SEQ ID NO: 788825 - RNA, 19 nt, Artificial Sequence
  Description of Artificial Sequence: Synthetic oligonucleotide
  Antisense strand to SEQ ID NO: 788824
acuacagguauuaauuaac

SEQ ID NO: 788826 - RNA, 19 nt, Artificial Sequence
  Description of Artificial Sequence: Synthetic oligonucleotide
  Sense strand starting at position 2420 of SEQ ID NO: 587393
ggacaagaguauugucuaa

SEQ ID NO: 788827 - RNA, 19 nt, Artificial Sequence
  Description of Artificial Sequence: Synthetic oligonucleotide
  Antisense strand to SEQ ID NO: 788826
uuagacaauacucuugucc

SEQ ID NO: 788828 - RNA, 19 nt, Artificial Sequence
  Description of Artificial Sequence: Synthetic oligonucleotide
  Sense strand starting at position 2422 of SEQ ID NO: 587393
acaagaguauugucuaagg

SEQ ID NO: 788829 - RNA, 19 nt, Artificial Sequence
  Description of Artificial Sequence: Synthetic oligonucleotide
  Antisense strand to SEQ ID NO: 788828
ccuuagacaauacucuugu

SEQ ID NO: 788830 - RNA, 19 nt, Artificial Sequence
  Description of Artificial Sequence: Synthetic oligonucleotide
  Sense strand starting at position 2424 of SEQ ID NO: 587393
aagaguauugucuaaggug

SEQ ID NO: 788831 - RNA, 19 nt, Artificial Sequence
  Description of Artificial Sequence: Synthetic oligonucleotide
  Antisense strand to SEQ ID NO: 788830
caccuuagacaauacucuu

SEQ ID NO: 788832 - RNA, 19 nt, Artificial Sequence
  Description of Artificial Sequence: Synthetic oligonucleotide
  Sense strand starting at position 2427 of SEQ ID NO: 587393
aguauugucuaaggugcau

SEQ ID NO: 788833 - RNA, 19 nt, Artificial Sequence
  Description of Artificial Sequence: Synthetic oligonucleotide
  Antisense strand to SEQ ID NO: 788832
augcaccuuagacaauacu

SEQ ID NO: 788834 - RNA, 19 nt, Artificial Sequence
  Description of Artificial Sequence: Synthetic oligonucleotide
  Sense strand starting at position 3698 of SEQ ID NO: 587393
agguuuguuacacggauaa

SEQ ID NO: 788835 - RNA, 19 nt, Artificial Sequence
  Description of Artificial Sequence: Synthetic oligonucleotide
  Antisense strand to SEQ ID NO: 788834
uuauccguguaacaaaccu

SEQ ID NO: 788836 - RNA, 19 nt, Artificial Sequence
  Description of Artificial Sequence: Synthetic oligonucleotide
  Sense strand starting at position 3710 of SEQ ID NO: 587393
cggauaaauuguguguccu

SEQ ID NO: 788837 - RNA, 19 nt, Artificial Sequence
  Description of Artificial Sequence: Synthetic oligonucleotide
  Antisense strand to SEQ ID NO: 788836
aggacacacaauuuauccg

SEQ ID NO: 788838 - RNA, 19 nt, Artificial Sequence
  Description of Artificial Sequence: Synthetic oligonucleotide
  Sense strand starting at position 69 of SEQ ID NO: 587394
augugacugucuuuagaga

SEQ ID NO: 788839 - RNA, 19 nt, Artificial Sequence
  Description of Artificial Sequence: Synthetic oligonucleotide
  Antisense strand to SEQ ID NO: 788838
ucucuaaagacagucacau

SEQ ID NO: 788840 - RNA, 19 nt, Artificial Sequence
  Description of Artificial Sequence: Synthetic oligonucleotide
  Sense strand starting at position 70 of SEQ ID NO: 587394
ugugacugucuuuagagau

SEQ ID NO: 788841 - RNA, 19 nt, Artificial Sequence
  Description of Artificial Sequence: Synthetic oligonucleotide
  Antisense strand to SEQ ID NO: 788840
aucucuaaagacagucaca

SEQ ID NO: 788842 - RNA, 19 nt, Artificial Sequence
  Description of Artificial Sequence: Synthetic oligonucleotide
  Sense strand starting at position 153 of SEQ ID NO: 587394
uugauaggcuaauccaaua

SEQ ID NO: 788843 - RNA, 19 nt, Artificial Sequence
  Description of Artificial Sequence: Synthetic oligonucleotide
  Antisense strand to SEQ ID NO: 788842
uauuggauuagccuaucaa

SEQ ID NO: 788844 - RNA, 19 nt, Artificial Sequence
  Description of Artificial Sequence: Synthetic oligonucleotide
  Sense strand starting at position 170 of SEQ ID NO: 587394
uaggauugauggucuuauu

SEQ ID NO: 788845 - RNA, 19 nt, Artificial Sequence
  Description of Artificial Sequence: Synthetic oligonucleotide
  Antisense strand to SEQ ID NO: 788844
aauaagaccaucaauccua

SEQ ID NO: 788846 - RNA, 19 nt, Artificial Sequence
  Description of Artificial Sequence: Synthetic oligonucleotide
  Sense strand starting at position 180 of SEQ ID NO: 587394
ggucuuauuagugaagguc

SEQ ID NO: 788847 - RNA, 19 nt, Artificial Sequence
  Description of Artificial Sequence: Synthetic oligonucleotide
  Antisense strand to SEQ ID NO: 788846
gaccuucacuaauaagacc

SEQ ID NO: 788848 - RNA, 19 nt, Artificial Sequence
  Description of Artificial Sequence: Synthetic oligonucleotide
  Sense strand starting at position 232 of SEQ ID NO: 587394
gcaagcucucaucagaaau

SEQ ID NO: 788849 - RNA, 19 nt, Artificial Sequence
  Description of Artificial Sequence: Synthetic oligonucleotide
  Antisense strand to SEQ ID NO: 788848
auuucugaugagagcuugc

SEQ ID NO: 788850 - RNA, 19 nt, Artificial Sequence
  Description of Artificial Sequence: Synthetic oligonucleotide
  Sense strand starting at position 376 of SEQ ID NO: 587394
uuuggaaguuucccugaau

SEQ ID NO: 788851 - RNA, 19 nt, Artificial Sequence
  Description of Artificial Sequence: Synthetic oligonucleotide
  Antisense strand to SEQ ID NO: 788850
auucagggaaacuuccaaa

SEQ ID NO: 788852 - RNA, 19 nt, Artificial Sequence
  Description of Artificial Sequence: Synthetic oligonucleotide
  Sense strand starting at position 377 of SEQ ID NO: 587394
uuggaaguuucccugaauu

SEQ ID NO: 788853 - RNA, 19 nt, Artificial Sequence
  Description of Artificial Sequence: Synthetic oligonucleotide
  Antisense strand to SEQ ID NO: 788852
aauucagggaaacuuccaa

SEQ ID NO: 788854 - RNA, 19 nt, Artificial Sequence
  Description of Artificial Sequence: Synthetic oligonucleotide
  Sense strand starting at position 508 of SEQ ID NO: 587394
cugugaaucaaggacuguu

SEQ ID NO: 788855 - RNA, 19 nt, Artificial Sequence
  Description of Artificial Sequence: Synthetic oligonucleotide
  Antisense strand to SEQ ID NO: 788854
aacaguccuugauucacag

SEQ ID NO: 788856 - RNA, 19 nt, Artificial Sequence
  Description of Artificial Sequence: Synthetic oligonucleotide
  Sense strand starting at position 534 of SEQ ID NO: 587394
agauuugaguaugauauag

SEQ ID NO: 788857 - RNA, 19 nt, Artificial Sequence
  Description of Artificial Sequence: Synthetic oligonucleotide
  Antisense strand to SEQ ID NO: 788856
cuauaucauacucaaaucu

SEQ ID NO: 788858 - RNA, 19 nt, Artificial Sequence
  Description of Artificial Sequence: Synthetic oligonucleotide
  Sense strand starting at position 536 of SEQ ID NO: 587394
auuugaguaugauauagac

SEQ ID NO: 788859 - RNA, 19 nt, Artificial Sequence
  Description of Artificial Sequence: Synthetic oligonucleotide
  Antisense strand to SEQ ID NO: 788858
gucuauaucauacucaaau

SEQ ID NO: 788860 - RNA, 19 nt, Artificial Sequence
  Description of Artificial Sequence: Synthetic oligonucleotide
  Sense strand starting at position 694 of SEQ ID NO: 587394
uucugaagauuugagaagu

SEQ ID NO: 788861 - RNA, 19 nt, Artificial Sequence
  Description of Artificial Sequence: Synthetic oligonucleotide
  Antisense strand to SEQ ID NO: 788860
acuucucaaaucuucagaa

SEQ ID NO: 788862 - RNA, 19 nt, Artificial Sequence
  Description of Artificial Sequence: Synthetic oligonucleotide
  Sense strand starting at position 705 of SEQ ID NO: 587394
ugagaagucuuauugaagc

SEQ ID NO: 788863 - RNA, 19 nt, Artificial Sequence
  Description of Artificial Sequence: Synthetic oligonucleotide
  Antisense strand to SEQ ID NO: 788862
gcuucaauaagacuucuca

SEQ ID NO: 788864 - RNA, 19 nt, Artificial Sequence
  Description of Artificial Sequence: Synthetic oligonucleotide
  Sense strand starting at position 722 of SEQ ID NO: 587394
gcucaaggaaucuguagaa

SEQ ID NO: 788865 - RNA, 19 nt, Artificial Sequence
  Description of Artificial Sequence: Synthetic oligonucleotide
  Antisense strand to SEQ ID NO: 788864
uucuacagauuccuugagc

SEQ ID NO: 788866 - RNA, 19 nt, Artificial Sequence
  Description of Artificial Sequence: Synthetic oligonucleotide
  Sense strand starting at position 770 of SEQ ID NO: 587394
ucauaaugcccuggaggau

SEQ ID NO: 788867 - RNA, 19 nt, Artificial Sequence
  Description of Artificial Sequence: Synthetic oligonucleotide
  Antisense strand to SEQ ID NO: 788866
auccuccagggcauuauga

SEQ ID NO: 788868 - RNA, 19 nt, Artificial Sequence
  Description of Artificial Sequence: Synthetic oligonucleotide
  Sense strand starting at position 782 of SEQ ID NO: 587394
ggaggauaauuguccuaca

SEQ ID NO: 788869 - RNA, 19 nt, Artificial Sequence
  Description of Artificial Sequence: Synthetic oligonucleotide
  Antisense strand to SEQ ID NO: 788868
uguaggacaauuauccucc

SEQ ID NO: 788870 - RNA, 19 nt, Artificial Sequence
  Description of Artificial Sequence: Synthetic oligonucleotide
  Sense strand starting at position 783 of SEQ ID NO: 587394
gaggauaauuguccuacau

SEQ ID NO: 788871 - RNA, 19 nt, Artificial Sequence
  Description of Artificial Sequence: Synthetic oligonucleotide
  Antisense strand to SEQ ID NO: 788870
auguaggacaauuauccuc

SEQ ID NO: 788872 - RNA, 19 nt, Artificial Sequence
  Description of Artificial Sequence: Synthetic oligonucleotide
  Sense strand starting at position 824 of SEQ ID NO: 587394
cuuaguuugcaagacagaa

SEQ ID NO: 788873 - RNA, 19 nt, Artificial Sequence
  Description of Artificial Sequence: Synthetic oligonucleotide
  Antisense strand to SEQ ID NO: 788872
uucugucuugcaaacuaag

SEQ ID NO: 788874 - RNA, 19 nt, Artificial Sequence
  Description of Artificial Sequence: Synthetic oligonucleotide
  Sense strand starting at position 1007 of SEQ ID NO: 587394
ugccauaaaccguaaugga

SEQ ID NO: 788875 - RNA, 19 nt, Artificial Sequence
  Description of Artificial Sequence: Synthetic oligonucleotide
  Antisense strand to SEQ ID NO: 788874
uccauuacgguuuauggca

SEQ ID NO: 788876 - RNA, 19 nt, Artificial Sequence
  Description of Artificial Sequence: Synthetic oligonucleotide
  Sense strand starting at position 1083 of SEQ ID NO: 587394
uggugagucacauaaucug

SEQ ID NO: 788877 - RNA, 19 nt, Artificial Sequence
  Description of Artificial Sequence: Synthetic oligonucleotide
  Antisense strand to SEQ ID NO: 788876
cagauuaugugacucacca

SEQ ID NO: 788878 - RNA, 19 nt, Artificial Sequence
  Description of Artificial Sequence: Synthetic oligonucleotide
  Sense strand starting at position 1212 of SEQ ID NO: 587394
uccagaugagauugcuaaa

SEQ ID NO: 788879 - RNA, 19 nt, Artificial Sequence
  Description of Artificial Sequence: Synthetic oligonucleotide
  Antisense strand to SEQ ID NO: 788878
uuuagcaaucucaucugga

SEQ ID NO: 788880 - RNA, 19 nt, Artificial Sequence
  Description of Artificial Sequence: Synthetic oligonucleotide
  Sense strand starting at position 1327 of SEQ ID NO: 587394
ucacauaaagcucagugau

SEQ ID NO: 788881 - RNA, 19 nt, Artificial Sequence
  Description of Artificial Sequence: Synthetic oligonucleotide
  Antisense strand to SEQ ID NO: 788880
aucacugagcuuuauguga

SEQ ID NO: 788882 - RNA, 19 nt, Artificial Sequence
  Description of Artificial Sequence: Synthetic oligonucleotide
  Sense strand starting at position 1337 of SEQ ID NO: 587394
cucagugauucucuugaaa

SEQ ID NO: 788883 - RNA, 19 nt, Artificial Sequence
  Description of Artificial Sequence: Synthetic oligonucleotide
  Antisense strand to SEQ ID NO: 788882
uuucaagagaaucacugag

SEQ ID NO: 788884 - RNA, 19 nt, Artificial Sequence
  Description of Artificial Sequence: Synthetic oligonucleotide
  Sense strand starting at position 1586 of SEQ ID NO: 587394
ucauauuauguauggacau

SEQ ID NO: 788885 - RNA, 19 nt, Artificial Sequence
  Description of Artificial Sequence: Synthetic oligonucleotide
  Antisense strand to SEQ ID NO: 788884
auguccauacauaauauga

SEQ ID NO: 788886 - RNA, 19 nt, Artificial Sequence
  Description of Artificial Sequence: Synthetic oligonucleotide
  Sense strand starting at position 1795 of SEQ ID NO: 587394
ccaggucuugcugacauca

SEQ ID NO: 788887 - RNA, 19 nt, Artificial Sequence
  Description of Artificial Sequence: Synthetic oligonucleotide
  Antisense strand to SEQ ID NO: 788886
ugaugucagcaagaccugg

SEQ ID NO: 788888 - RNA, 19 nt, Artificial Sequence
  Description of Artificial Sequence: Synthetic oligonucleotide
  Sense strand starting at position 1892 of SEQ ID NO: 587394
auuguucuucuauaugaag

SEQ ID NO: 788889 - RNA, 19 nt, Artificial Sequence
  Description of Artificial Sequence: Synthetic oligonucleotide
  Antisense strand to SEQ ID NO: 788888
cuucauauagaagaacaau

SEQ ID NO: 788890 - RNA, 19 nt, Artificial Sequence
  Description of Artificial Sequence: Synthetic oligonucleotide
  Sense strand starting at position 2110 of SEQ ID NO: 587394
guaugccucgcuucaggua

SEQ ID NO: 788891 - RNA, 19 nt, Artificial Sequence
  Description of Artificial Sequence: Synthetic oligonucleotide
  Antisense strand to SEQ ID NO: 788890
uaccugaagcgaggcauac

SEQ ID NO: 788892 - RNA, 19 nt, Artificial Sequence
  Description of Artificial Sequence: Synthetic oligonucleotide
  Sense strand starting at position 2126 of SEQ ID NO: 587394
guagauaugcuacacugaa

SEQ ID NO: 788893 - RNA, 19 nt, Artificial Sequence
  Description of Artificial Sequence: Synthetic oligonucleotide
  Antisense strand to SEQ ID NO: 788892
uucaguguagcauaucuac

SEQ ID NO: 788894 - RNA, 19 nt, Artificial Sequence
  Description of Artificial Sequence: Synthetic oligonucleotide
  Sense strand starting at position 2557 of SEQ ID NO: 587394
auaucagugucacuauaaa

SEQ ID NO: 788895 - RNA, 19 nt, Artificial Sequence
  Description of Artificial Sequence: Synthetic oligonucleotide
  Antisense strand to SEQ ID NO: 788894
uuuauagugacacugauau

SEQ ID NO: 788896 - RNA, 19 nt, Artificial Sequence
  Description of Artificial Sequence: Synthetic oligonucleotide
  Sense strand starting at position 2703 of SEQ ID NO: 587394
uguacaaucggauaaguuu

SEQ ID NO: 788897 - RNA, 19 nt, Artificial Sequence
  Description of Artificial Sequence: Synthetic oligonucleotide
  Antisense strand to SEQ ID NO: 788896
aaacuuauccgauuguaca

SEQ ID NO: 788898 - RNA, 19 nt, Artificial Sequence
  Description of Artificial Sequence: Synthetic oligonucleotide
  Sense strand starting at position 2860 of SEQ ID NO: 587394
uucugcugacacuauagau

SEQ ID NO: 788899 - RNA, 19 nt, Artificial Sequence
  Description of Artificial Sequence: Synthetic oligonucleotide
  Antisense strand to SEQ ID NO: 788898
aucuauagugucagcagaa

SEQ ID NO: 788900 - RNA, 19 nt, Artificial Sequence
  Description of Artificial Sequence: Synthetic oligonucleotide
  Sense strand starting at position 3048 of SEQ ID NO: 587394
uguguuuauccagucacgu

SEQ ID NO: 788901 - RNA, 19 nt, Artificial Sequence
  Description of Artificial Sequence: Synthetic oligonucleotide
  Antisense strand to SEQ ID NO: 788900
acgugacuggauaaacaca

SEQ ID NO: 788902 - RNA, 19 nt, Artificial Sequence
  Description of Artificial Sequence: Synthetic oligonucleotide
  Sense strand starting at position 3077 of SEQ ID NO: 587394
guuugauuauuuccaguuu

SEQ ID NO: 788903 - RNA, 19 nt, Artificial Sequence
  Description of Artificial Sequence: Synthetic oligonucleotide
  Antisense strand to SEQ ID NO: 788902
aaacuggaaauaaucaaac

SEQ ID NO: 788904 - RNA, 19 nt, Artificial Sequence
  Description of Artificial Sequence: Synthetic oligonucleotide
  Sense strand starting at position 3128 of SEQ ID NO: 587394
ucauguacaagucauggua

SEQ ID NO: 788905 - RNA, 19 nt, Artificial Sequence
  Description of Artificial Sequence: Synthetic oligonucleotide
  Antisense strand to SEQ ID NO: 788904
uaccaugacuuguacauga

SEQ ID NO: 788906 - RNA, 19 nt, Artificial Sequence
  Description of Artificial Sequence: Synthetic oligonucleotide
  Sense strand starting at position 3135 of SEQ ID NO: 587394
caagucaugguauggauau

SEQ ID NO: 788907 - RNA, 19 nt, Artificial Sequence
  Description of Artificial Sequence: Synthetic oligonucleotide
  Antisense strand to SEQ ID NO: 788906
auauccauaccaugacuug

SEQ ID NO: 788908 - RNA, 19 nt, Artificial Sequence
  Description of Artificial Sequence: Synthetic oligonucleotide
  Sense strand starting at position 3209 of SEQ ID NO: 587394
guauguugucaucaagaga

SEQ ID NO: 788909 - RNA, 19 nt, Artificial Sequence
  Description of Artificial Sequence: Synthetic oligonucleotide
  Antisense strand to SEQ ID NO: 788908
ucucuugaugacaacauac

SEQ ID NO: 788910 - RNA, 19 nt, Artificial Sequence
  Description of Artificial Sequence: Synthetic oligonucleotide
  Sense strand starting at position 3212 of SEQ ID NO: 587394
uguugucaucaagagaucu

SEQ ID NO: 788911 - RNA, 19 nt, Artificial Sequence
  Description of Artificial Sequence: Synthetic oligonucleotide
  Antisense strand to SEQ ID NO: 788910
agaucucuugaugacaaca

SEQ ID NO: 788912 - RNA, 19 nt, Artificial Sequence
  Description of Artificial Sequence: Synthetic oligonucleotide
  Sense strand starting at position 3223 of SEQ ID NO: 587394
agagaucucacacgcaaug

SEQ ID NO: 788913 - RNA, 19 nt, Artificial Sequence
  Description of Artificial Sequence: Synthetic oligonucleotide
  Antisense strand to SEQ ID NO: 788912
cauugcgugugagaucucu

SEQ ID NO: 788914 - RNA, 19 nt, Artificial Sequence
  Description of Artificial Sequence: Synthetic oligonucleotide
  Sense strand starting at position 3543 of SEQ ID NO: 587394
caguguuaagcagauacuu

SEQ ID NO: 788915 - RNA, 19 nt, Artificial Sequence
  Description of Artificial Sequence: Synthetic oligonucleotide
  Antisense strand to SEQ ID NO: 788914
aaguaucugcuuaacacug

SEQ ID NO: 788916 - RNA, 19 nt, Artificial Sequence
  Description of Artificial Sequence: Synthetic oligonucleotide
  Sense strand starting at position 3545 of SEQ ID NO: 587394
guguuaagcagauacuuga

SEQ ID NO: 788917 - RNA, 19 nt, Artificial Sequence
  Description of Artificial Sequence: Synthetic oligonucleotide
  Antisense strand to SEQ ID NO: 788916
ucaaguaucugcuuaacac

SEQ ID NO: 788918 - RNA, 19 nt, Artificial Sequence
  Description of Artificial Sequence: Synthetic oligonucleotide
  Sense strand starting at position 17 of SEQ ID NO: 587395
augaauaagucugcuuauu

SEQ ID NO: 788919 - RNA, 19 nt, Artificial Sequence
  Description of Artificial Sequence: Synthetic oligonucleotide
  Antisense strand to SEQ ID NO: 788918
aauaagcagacuuauucau

SEQ ID NO: 788920 - RNA, 19 nt, Artificial Sequence
  Description of Artificial Sequence: Synthetic oligonucleotide
  Sense strand starting at position 583 of SEQ ID NO: 587395
aggacaugcucagugggau

SEQ ID NO: 788921 - RNA, 19 nt, Artificial Sequence
  Description of Artificial Sequence: Synthetic oligonucleotide
  Antisense strand to SEQ ID NO: 788920
aucccacugagcauguccu

SEQ ID NO: 788922 - RNA, 19 nt, Artificial Sequence
  Description of Artificial Sequence: Synthetic oligonucleotide
  Sense strand starting at position 584 of SEQ ID NO: 587395
ggacaugcucagugggaua

SEQ ID NO: 788923 - RNA, 19 nt, Artificial Sequence
  Description of Artificial Sequence: Synthetic oligonucleotide
  Antisense strand to SEQ ID NO: 788922
uaucccacugagcaugucc

SEQ ID NO: 788924 - RNA, 19 nt, Artificial Sequence
  Description of Artificial Sequence: Synthetic oligonucleotide
  Sense strand starting at position 615 of SEQ ID NO: 587395
augcaaagaaaguguugaa

SEQ ID NO: 788925 - RNA, 19 nt, Artificial Sequence
  Description of Artificial Sequence: Synthetic oligonucleotide
  Antisense strand to SEQ ID NO: 788924
uucaacacuuucuuugcau

SEQ ID NO: 788926 - RNA, 19 nt, Artificial Sequence
  Description of Artificial Sequence: Synthetic oligonucleotide
  Sense strand starting at position 753 of SEQ ID NO: 587395
agaccauuacagugccaaa

SEQ ID NO: 788927 - RNA, 19 nt, Artificial Sequence
  Description of Artificial Sequence: Synthetic oligonucleotide
  Antisense strand to SEQ ID NO: 788926
uuuggcacuguaauggucu

SEQ ID NO: 788928 - RNA, 19 nt, Artificial Sequence
  Description of Artificial Sequence: Synthetic oligonucleotide
  Sense strand starting at position 885 of SEQ ID NO: 587395
caggacagccucugaguuu

SEQ ID NO: 788929 - RNA, 19 nt, Artificial Sequence
  Description of Artificial Sequence: Synthetic oligonucleotide
  Antisense strand to SEQ ID NO: 788928
aaacucagaggcuguccug

SEQ ID NO: 788930 - RNA, 19 nt, Artificial Sequence
  Description of Artificial Sequence: Synthetic oligonucleotide
  Sense strand starting at position 1051 of SEQ ID NO: 587395
augugcgcaucauuugaaa

SEQ ID NO: 788931 - RNA, 19 nt, Artificial Sequence
  Description of Artificial Sequence: Synthetic oligonucleotide
  Antisense strand to SEQ ID NO: 788930
uuucaaaugaugcgcacau

SEQ ID NO: 788932 - RNA, 19 nt, Artificial Sequence
  Description of Artificial Sequence: Synthetic oligonucleotide
  Sense strand starting at position 1301 of SEQ ID NO: 587395
uugaaaugucccugucuga

SEQ ID NO: 788933 - RNA, 19 nt, Artificial Sequence
  Description of Artificial Sequence: Synthetic oligonucleotide
  Antisense strand to SEQ ID NO: 788932
ucagacagggacauuucaa

SEQ ID NO: 788934 - RNA, 19 nt, Artificial Sequence
  Description of Artificial Sequence: Synthetic oligonucleotide
  Sense strand starting at position 1421 of SEQ ID NO: 587395
ucuguauccucugugaaga

SEQ ID NO: 788935 - RNA, 19 nt, Artificial Sequence
  Description of Artificial Sequence: Synthetic oligonucleotide
  Antisense strand to SEQ ID NO: 788934
ucuucacagaggauacaga

SEQ ID NO: 788936 - RNA, 19 nt, Artificial Sequence
  Description of Artificial Sequence: Synthetic oligonucleotide
  Sense strand starting at position 1422 of SEQ ID NO: 587395
cuguauccucugugaagag

SEQ ID NO: 788937 - RNA, 19 nt, Artificial Sequence
  Description of Artificial Sequence: Synthetic oligonucleotide
  Antisense strand to SEQ ID NO: 788936
cucuucacagaggauacag

SEQ ID NO: 788938 - RNA, 19 nt, Artificial Sequence
  Description of Artificial Sequence: Synthetic oligonucleotide
  Sense strand starting at position 1499 of SEQ ID NO: 587395
uugucacaauuguuacuau

SEQ ID NO: 788939 - RNA, 19 nt, Artificial Sequence
  Description of Artificial Sequence: Synthetic oligonucleotide
  Antisense strand to SEQ ID NO: 788938
auaguaacaauugugacaa

SEQ ID NO: 788940 - RNA, 19 nt, Artificial Sequence
  Description of Artificial Sequence: Synthetic oligonucleotide
  Sense strand starting at position 1533 of SEQ ID NO: 587395
cucugauuagacugugaaa

SEQ ID NO: 788941 - RNA, 19 nt, Artificial Sequence
  Description of Artificial Sequence: Synthetic oligonucleotide
  Antisense strand to SEQ ID NO: 788940
uuucacagucuaaucagag

SEQ ID NO: 788942 - RNA, 19 nt, Artificial Sequence
  Description of Artificial Sequence: Synthetic oligonucleotide
  Sense strand starting at position 1535 of SEQ ID NO: 587395
cugauuagacugugaaauc

SEQ ID NO: 788943 - RNA, 19 nt, Artificial Sequence
  Description of Artificial Sequence: Synthetic oligonucleotide
  Antisense strand to SEQ ID NO: 788942
gauuucacagucuaaucag

SEQ ID NO: 788944 - RNA, 19 nt, Artificial Sequence
  Description of Artificial Sequence: Synthetic oligonucleotide
  Sense strand starting at position 1546 of SEQ ID NO: 587395
gugaaauccgaguagauuc

SEQ ID NO: 788945 - RNA, 19 nt, Artificial Sequence
  Description of Artificial Sequence: Synthetic oligonucleotide
  Antisense strand to SEQ ID NO: 788944
gaaucuacucggauuucac

SEQ ID NO: 788946 - RNA, 19 nt, Artificial Sequence
  Description of Artificial Sequence: Synthetic oligonucleotide
  Sense strand starting at position 1559 of SEQ ID NO: 587395
agauuccaugacugucuua

SEQ ID NO: 788947 - RNA, 19 nt, Artificial Sequence
  Description of Artificial Sequence: Synthetic oligonucleotide
  Antisense strand to SEQ ID NO: 788946
uaagacagucauggaaucu

SEQ ID NO: 788948 - RNA, 19 nt, Artificial Sequence
  Description of Artificial Sequence: Synthetic oligonucleotide
  Sense strand starting at position 1592 of SEQ ID NO: 587395
ccaguauugggcugaaagu

SEQ ID NO: 788949 - RNA, 19 nt, Artificial Sequence
  Description of Artificial Sequence: Synthetic oligonucleotide
  Antisense strand to SEQ ID NO: 788948
acuuucagcccaauacugg

SEQ ID NO: 788950 - RNA, 19 nt, Artificial Sequence
  Description of Artificial Sequence: Synthetic oligonucleotide
  Sense strand starting at position 1593 of SEQ ID NO: 587395
caguauugggcugaaaguc

SEQ ID NO: 788951 - RNA, 19 nt, Artificial Sequence
  Description of Artificial Sequence: Synthetic oligonucleotide
  Antisense strand to SEQ ID NO: 788950
gacuuucagcccaauacug

SEQ ID NO: 788952 - RNA, 19 nt, Artificial Sequence
  Description of Artificial Sequence: Synthetic oligonucleotide
  Sense strand starting at position 1739 of SEQ ID NO: 587395
ccaguagaugcuugaaaca

SEQ ID NO: 788953 - RNA, 19 nt, Artificial Sequence
  Description of Artificial Sequence: Synthetic oligonucleotide
  Antisense strand to SEQ ID NO: 788952
uguuucaagcaucuacugg

SEQ ID NO: 788954 - RNA, 19 nt, Artificial Sequence
  Description of Artificial Sequence: Synthetic oligonucleotide
  Sense strand starting at position 1748 of SEQ ID NO: 587395
gcuugaaacagucgauaau

SEQ ID NO: 788955 - RNA, 19 nt, Artificial Sequence
  Description of Artificial Sequence: Synthetic oligonucleotide
  Antisense strand to SEQ ID NO: 788954
auuaucgacuguuucaagc

SEQ ID NO: 788956 - RNA, 19 nt, Artificial Sequence
  Description of Artificial Sequence: Synthetic oligonucleotide
  Sense strand starting at position 1982 of SEQ ID NO: 587395
gcugauguaagaugauaua

SEQ ID NO: 788957 - RNA, 19 nt, Artificial Sequence
  Description of Artificial Sequence: Synthetic oligonucleotide
  Antisense strand to SEQ ID NO: 788956
uauaucaucuuacaucagc

SEQ ID NO: 788958 - RNA, 19 nt, Artificial Sequence
  Description of Artificial Sequence: Synthetic oligonucleotide
  Sense strand starting at position 2002 of SEQ ID NO: 587395
ugccuaugugaugagagga

SEQ ID NO: 788959 - RNA, 19 nt, Artificial Sequence
  Description of Artificial Sequence: Synthetic oligonucleotide
  Antisense strand to SEQ ID NO: 788958
uccucucaucacauaggca

SEQ ID NO: 788960 - RNA, 19 nt, Artificial Sequence
  Description of Artificial Sequence: Synthetic oligonucleotide
  Sense strand starting at position 2649 of SEQ ID NO: 587395
ugugguugacuguaaguaa

SEQ ID NO: 788961 - RNA, 19 nt, Artificial Sequence
  Description of Artificial Sequence: Synthetic oligonucleotide
  Antisense strand to SEQ ID NO: 788960
uuacuuacagucaaccaca

SEQ ID NO: 788962 - RNA, 19 nt, Artificial Sequence
  Description of Artificial Sequence: Synthetic oligonucleotide
  Sense strand starting at position 2652 of SEQ ID NO: 587395
gguugacuguaaguaacua

SEQ ID NO: 788963 - RNA, 19 nt, Artificial Sequence
  Description of Artificial Sequence: Synthetic oligonucleotide
  Antisense strand to SEQ ID NO: 788962
uaguuacuuacagucaacc

SEQ ID NO: 788964 - RNA, 19 nt, Artificial Sequence
  Description of Artificial Sequence: Synthetic oligonucleotide
  Sense strand starting at position 2697 of SEQ ID NO: 587395
gcagauauauuccuaacag

SEQ ID NO: 788965 - RNA, 19 nt, Artificial Sequence
  Description of Artificial Sequence: Synthetic oligonucleotide
  Antisense strand to SEQ ID NO: 788964
cuguuaggaauauaucugc

SEQ ID NO: 788966 - RNA, 19 nt, Artificial Sequence
  Description of Artificial Sequence: Synthetic oligonucleotide
  Sense strand starting at position 2734 of SEQ ID NO: 587395
uuaggcaucaaggauugua

SEQ ID NO: 788967 - RNA, 19 nt, Artificial Sequence
  Description of Artificial Sequence: Synthetic oligonucleotide
  Antisense strand to SEQ ID NO: 788966
uacaauccuugaugccuaa

SEQ ID NO: 788968 - RNA, 19 nt, Artificial Sequence
  Description of Artificial Sequence: Synthetic oligonucleotide
  Sense strand starting at position 2737 of SEQ ID NO: 587395
ggcaucaaggauuguagua

SEQ ID NO: 788969 - RNA, 19 nt, Artificial Sequence
  Description of Artificial Sequence: Synthetic oligonucleotide
  Antisense strand to SEQ ID NO: 788968
uacuacaauccuugaugcc

SEQ ID NO: 788970 - RNA, 19 nt, Artificial Sequence
  Description of Artificial Sequence: Synthetic oligonucleotide
  Sense strand starting at position 2932 of SEQ ID NO: 587395
ucuauauugucuccuggga

SEQ ID NO: 788971 - RNA, 19 nt, Artificial Sequence
  Description of Artificial Sequence: Synthetic oligonucleotide
  Antisense strand to SEQ ID NO: 788970
ucccaggagacaauauaga

SEQ ID NO: 788972 - RNA, 19 nt, Artificial Sequence
  Description of Artificial Sequence: Synthetic oligonucleotide
  Sense strand starting at position 2936 of SEQ ID NO: 587395
uauugucuccugggacaaa

SEQ ID NO: 788973 - RNA, 19 nt, Artificial Sequence
  Description of Artificial Sequence: Synthetic oligonucleotide
  Antisense strand to SEQ ID NO: 788972
uuugucccaggagacaaua

SEQ ID NO: 788974 - RNA, 19 nt, Artificial Sequence
  Description of Artificial Sequence: Synthetic oligonucleotide
  Sense strand starting at position 3407 of SEQ ID NO: 587395
uuaggacucgucugagaca

SEQ ID NO: 788975 - RNA, 19 nt, Artificial Sequence
  Description of Artificial Sequence: Synthetic oligonucleotide
  Antisense strand to SEQ ID NO: 788974
ugucucagacgaguccuaa

SEQ ID NO: 788976 - RNA, 19 nt, Artificial Sequence
  Description of Artificial Sequence: Synthetic oligonucleotide
  Sense strand starting at position 3412 of SEQ ID NO: 587395
acucgucugagacaugaug

SEQ ID NO: 788977 - RNA, 19 nt, Artificial Sequence
  Description of Artificial Sequence: Synthetic oligonucleotide
  Antisense strand to SEQ ID NO: 788976
caucaugucucagacgagu

SEQ ID NO: 788978 - RNA, 19 nt, Artificial Sequence
  Description of Artificial Sequence: Synthetic oligonucleotide
  Sense strand starting at position 3443 of SEQ ID NO: 587395
gaaagaauuugaggugaga

SEQ ID NO: 788979 - RNA, 19 nt, Artificial Sequence
  Description of Artificial Sequence: Synthetic oligonucleotide
  Antisense strand to SEQ ID NO: 788978
ucucaccucaaauucuuuc

SEQ ID NO: 788980 - RNA, 19 nt, Artificial Sequence
  Description of Artificial Sequence: Synthetic oligonucleotide
  Sense strand starting at position 3541 of SEQ ID NO: 587395
cuaggaugaugcuugagua

SEQ ID NO: 788981 - RNA, 19 nt, Artificial Sequence
  Description of Artificial Sequence: Synthetic oligonucleotide
  Antisense strand to SEQ ID NO: 788980
uacucaagcaucauccuag

SEQ ID NO: 788982 - RNA, 19 nt, Artificial Sequence
  Description of Artificial Sequence: Synthetic oligonucleotide
  Sense strand starting at position 3542 of SEQ ID NO: 587395
uaggaugaugcuugaguag

SEQ ID NO: 788983 - RNA, 19 nt, Artificial Sequence
  Description of Artificial Sequence: Synthetic oligonucleotide
  Antisense strand to SEQ ID NO: 788982
cuacucaagcaucauccua

SEQ ID NO: 788984 - RNA, 19 nt, Artificial Sequence
  Description of Artificial Sequence: Synthetic oligonucleotide
  Sense strand starting at position 3634 of SEQ ID NO: 587395
gacagaacucagcaguugu

SEQ ID NO: 788985 - RNA, 19 nt, Artificial Sequence
  Description of Artificial Sequence: Synthetic oligonucleotide
  Antisense strand to SEQ ID NO: 788984
acaacugcugaguucuguc

SEQ ID NO: 788986 - RNA, 19 nt, Artificial Sequence
  Description of Artificial Sequence: Synthetic oligonucleotide
  Sense strand starting at position 3665 of SEQ ID NO: 587395
gacagaagaucagaugaga

SEQ ID NO: 788987 - RNA, 19 nt, Artificial Sequence
  Description of Artificial Sequence: Synthetic oligonucleotide
  Antisense strand to SEQ ID NO: 788986
ucucaucugaucuucuguc

SEQ ID NO: 788988 - RNA, 19 nt, Artificial Sequence
  Description of Artificial Sequence: Synthetic oligonucleotide
  Sense strand starting at position 3710 of SEQ ID NO: 587395
aauaaacgcucuccgagau

SEQ ID NO: 788989 - RNA, 19 nt, Artificial Sequence
  Description of Artificial Sequence: Synthetic oligonucleotide
  Antisense strand to SEQ ID NO: 788988
aucucggagagcguuuauu

SEQ ID NO: 788990 - RNA, 19 nt, Artificial Sequence
  Description of Artificial Sequence: Synthetic oligonucleotide
  Sense strand starting at position 3711 of SEQ ID NO: 587395
auaaacgcucuccgagaua

SEQ ID NO: 788991 - RNA, 19 nt, Artificial Sequence
  Description of Artificial Sequence: Synthetic oligonucleotide
  Antisense strand to SEQ ID NO: 788990
uaucucggagagcguuuau

SEQ ID NO: 788992 - RNA, 19 nt, Artificial Sequence
  Description of Artificial Sequence: Synthetic oligonucleotide
  Sense strand starting at position 3770 of SEQ ID NO: 587395
uggagaagauaugaucaac

SEQ ID NO: 788993 - RNA, 19 nt, Artificial Sequence
  Description of Artificial Sequence: Synthetic oligonucleotide
  Antisense strand to SEQ ID NO: 788992
guugaucauaucuucucca

SEQ ID NO: 788994 - RNA, 19 nt, Artificial Sequence
  Description of Artificial Sequence: Synthetic oligonucleotide
  Sense strand starting at position 3882 of SEQ ID NO: 587395
uguaaauaugccuaguaga

SEQ ID NO: 788995 - RNA, 19 nt, Artificial Sequence
  Description of Artificial Sequence: Synthetic oligonucleotide
  Antisense strand to SEQ ID NO: 788994
ucuacuaggcauauuuaca

SEQ ID NO: 788996 - RNA, 19 nt, Artificial Sequence
  Description of Artificial Sequence: Synthetic oligonucleotide
  Sense strand starting at position 3890 of SEQ ID NO: 587395
ugccuaguagacugacaua

SEQ ID NO: 788997 - RNA, 19 nt, Artificial Sequence
  Description of Artificial Sequence: Synthetic oligonucleotide
  Antisense strand to SEQ ID NO: 788996
uaugucagucuacuaggca

SEQ ID NO: 788998 - RNA, 19 nt, Artificial Sequence
  Description of Artificial Sequence: Synthetic oligonucleotide
  Sense strand starting at position 2 of SEQ ID NO: 587396
augaauuagacgcgaucaa

SEQ ID NO: 788999 - RNA, 19 nt, Artificial Sequence
  Description of Artificial Sequence: Synthetic oligonucleotide
  Antisense strand to SEQ ID NO: 788998
uugaucgcgucuaauucau

SEQ ID NO: 789000 - RNA, 19 nt, Artificial Sequence
  Description of Artificial Sequence: Synthetic oligonucleotide
  Sense strand starting at position 3 of SEQ ID NO: 587396
ugaauuagacgcgaucaaa

SEQ ID NO: 789001 - RNA, 19 nt, Artificial Sequence
  Description of Artificial Sequence: Synthetic oligonucleotide
  Antisense strand to SEQ ID NO: 789000
uuugaucgcgucuaauuca

SEQ ID NO: 789002 - RNA, 19 nt, Artificial Sequence
  Description of Artificial Sequence: Synthetic oligonucleotide
  Sense strand starting at position 6 of SEQ ID NO: 587396
auuagacgcgaucaaagau

SEQ ID NO: 789003 - RNA, 19 nt, Artificial Sequence
  Description of Artificial Sequence: Synthetic oligonucleotide
  Antisense strand to SEQ ID NO: 789002
aucuuugaucgcgucuaau

SEQ ID NO: 789004 - RNA, 19 nt, Artificial Sequence
  Description of Artificial Sequence: Synthetic oligonucleotide
  Sense strand starting at position 265 of SEQ ID NO: 587396
ggaauagcuaccugaggca

SEQ ID NO: 789005 - RNA, 19 nt, Artificial Sequence
  Description of Artificial Sequence: Synthetic oligonucleotide
  Antisense strand to SEQ ID NO: 789004
ugccucagguagcuauucc

SEQ ID NO: 789006 - RNA, 19 nt, Artificial Sequence
  Description of Artificial Sequence: Synthetic oligonucleotide
  Sense strand starting at position 281 of SEQ ID NO: 587396
gcaguuugugauuaucaaa

SEQ ID NO: 789007 - RNA, 19 nt, Artificial Sequence
  Description of Artificial Sequence: Synthetic oligonucleotide
  Antisense strand to SEQ ID NO: 789006
uuugauaaucacaaacugc

SEQ ID NO: 789008 - RNA, 19 nt, Artificial Sequence
  Description of Artificial Sequence: Synthetic oligonucleotide
  Sense strand starting at position 294 of SEQ ID NO: 587396
aucaaagugucagcauaaa

SEQ ID NO: 789009 - RNA, 19 nt, Artificial Sequence
  Description of Artificial Sequence: Synthetic oligonucleotide
  Antisense strand to SEQ ID NO: 789008
uuuaugcugacacuuugau

SEQ ID NO: 789010 - RNA, 19 nt, Artificial Sequence
  Description of Artificial Sequence: Synthetic oligonucleotide
  Sense strand starting at position 393 of SEQ ID NO: 587396
uugucaagugcuuaaucac

SEQ ID NO: 789011 - RNA, 19 nt, Artificial Sequence
  Description of Artificial Sequence: Synthetic oligonucleotide
  Antisense strand to SEQ ID NO: 789010
gugauuaagcacuugacaa

SEQ ID NO: 789012 - RNA, 19 nt, Artificial Sequence
  Description of Artificial Sequence: Synthetic oligonucleotide
  Sense strand starting at position 402 of SEQ ID NO: 587396
gcuuaaucacaagguacuu

SEQ ID NO: 789013 - RNA, 19 nt, Artificial Sequence
  Description of Artificial Sequence: Synthetic oligonucleotide
  Antisense strand to SEQ ID NO: 789012
aaguaccuugugauuaagc

SEQ ID NO: 789014 - RNA, 19 nt, Artificial Sequence
  Description of Artificial Sequence: Synthetic oligonucleotide
  Sense strand starting at position 444 of SEQ ID NO: 587396
guacuuugcacccauggga

SEQ ID NO: 789015 - RNA, 19 nt, Artificial Sequence
  Description of Artificial Sequence: Synthetic oligonucleotide
  Antisense strand to SEQ ID NO: 789014
ucccaugggugcaaaguac

SEQ ID NO: 789016 - RNA, 19 nt, Artificial Sequence
  Description of Artificial Sequence: Synthetic oligonucleotide
  Sense strand starting at position 470 of SEQ ID NO: 587396
ugugaaaugguuugaaaua

SEQ ID NO: 789017 - RNA, 19 nt, Artificial Sequence
  Description of Artificial Sequence: Synthetic oligonucleotide
  Antisense strand to SEQ ID NO: 789016
uauuucaaaccauuucaca

SEQ ID NO: 789018 - RNA, 19 nt, Artificial Sequence
  Description of Artificial Sequence: Synthetic oligonucleotide
  Sense strand starting at position 482 of SEQ ID NO: 587396
ugaaauaccugagacaaau

SEQ ID NO: 789019 - RNA, 19 nt, Artificial Sequence
  Description of Artificial Sequence: Synthetic oligonucleotide
  Antisense strand to SEQ ID NO: 789018
auuugucucagguauuuca

SEQ ID NO: 789020 - RNA, 19 nt, Artificial Sequence
  Description of Artificial Sequence: Synthetic oligonucleotide
  Sense strand starting at position 681 of SEQ ID NO: 587396
ccaugaguccauggauuga

SEQ ID NO: 789021 - RNA, 19 nt, Artificial Sequence
  Description of Artificial Sequence: Synthetic oligonucleotide
  Antisense strand to SEQ ID NO: 789020
ucaauccauggacucaugg

SEQ ID NO: 789022 - RNA, 19 nt, Artificial Sequence
  Description of Artificial Sequence: Synthetic oligonucleotide
  Sense strand starting at position 720 of SEQ ID NO: 587396
aucaaugugguauggucaa

SEQ ID NO: 789023 - RNA, 19 nt, Artificial Sequence
  Description of Artificial Sequence: Synthetic oligonucleotide
  Antisense strand to SEQ ID NO: 789022
uugaccauaccacauugau

SEQ ID NO: 789024 - RNA, 19 nt, Artificial Sequence
  Description of Artificial Sequence: Synthetic oligonucleotide
  Sense strand starting at position 886 of SEQ ID NO: 587396
uucguaucugucuucguuu

SEQ ID NO: 789025 - RNA, 19 nt, Artificial Sequence
  Description of Artificial Sequence: Synthetic oligonucleotide
  Antisense strand to SEQ ID NO: 789024
aaacgaagacagauacgaa

SEQ ID NO: 789026 - RNA, 19 nt, Artificial Sequence
  Description of Artificial Sequence: Synthetic oligonucleotide
  Sense strand starting at position 1235 of SEQ ID NO: 587396
acacuugguccuugaguga

SEQ ID NO: 789027 - RNA, 19 nt, Artificial Sequence
  Description of Artificial Sequence: Synthetic oligonucleotide
  Antisense strand to SEQ ID NO: 789026
ucacucaaggaccaagugu

SEQ ID NO: 789028 - RNA, 19 nt, Artificial Sequence
  Description of Artificial Sequence: Synthetic oligonucleotide
  Sense strand starting at position 1249 of SEQ ID NO: 587396
agugauacgcuuuauauau

SEQ ID NO: 789029 - RNA, 19 nt, Artificial Sequence
  Description of Artificial Sequence: Synthetic oligonucleotide
  Antisense strand to SEQ ID NO: 789028
auauauaaagcguaucacu

SEQ ID NO: 789030 - RNA, 19 nt, Artificial Sequence
  Description of Artificial Sequence: Synthetic oligonucleotide
  Sense strand starting at position 1341 of SEQ ID NO: 587396
ccacuuuagugacugaagu

SEQ ID NO: 789031 - RNA, 19 nt, Artificial Sequence
  Description of Artificial Sequence: Synthetic oligonucleotide
  Antisense strand to SEQ ID NO: 789030
acuucagucacuaaagugg

SEQ ID NO: 789032 - RNA, 19 nt, Artificial Sequence
  Description of Artificial Sequence: Synthetic oligonucleotide
  Sense strand starting at position 1342 of SEQ ID NO: 587396
cacuuuagugacugaagua

SEQ ID NO: 789033 - RNA, 19 nt, Artificial Sequence
  Description of Artificial Sequence: Synthetic oligonucleotide
  Antisense strand to SEQ ID NO: 789032
uacuucagucacuaaagug

SEQ ID NO: 789034 - RNA, 19 nt, Artificial Sequence
  Description of Artificial Sequence: Synthetic oligonucleotide
  Sense strand starting at position 1357 of SEQ ID NO: 587396
aguagacucuucucauuau

SEQ ID NO: 789035 - RNA, 19 nt, Artificial Sequence
  Description of Artificial Sequence: Synthetic oligonucleotide
  Antisense strand to SEQ ID NO: 789034
auaaugagaagagucuacu

SEQ ID NO: 789036 - RNA, 19 nt, Artificial Sequence
  Description of Artificial Sequence: Synthetic oligonucleotide
  Sense strand starting at position 1386 of SEQ ID NO: 587396
cuggcuucuguccacagaa

SEQ ID NO: 789037 - RNA, 19 nt, Artificial Sequence
  Description of Artificial Sequence: Synthetic oligonucleotide
  Antisense strand to SEQ ID NO: 789036
uucuguggacagaagccag

SEQ ID NO: 789038 - RNA, 19 nt, Artificial Sequence
  Description of Artificial Sequence: Synthetic oligonucleotide
  Sense strand starting at position 1388 of SEQ ID NO: 587396
ggcuucuguccacagaaug

SEQ ID NO: 789039 - RNA, 19 nt, Artificial Sequence
  Description of Artificial Sequence: Synthetic oligonucleotide
  Antisense strand to SEQ ID NO: 789038
cauucuguggacagaagcc

SEQ ID NO: 789040 - RNA, 19 nt, Artificial Sequence
  Description of Artificial Sequence: Synthetic oligonucleotide
  Sense strand starting at position 1393 of SEQ ID NO: 587396
cuguccacagaauguaaau

SEQ ID NO: 789041 - RNA, 19 nt, Artificial Sequence
  Description of Artificial Sequence: Synthetic oligonucleotide
  Antisense strand to SEQ ID NO: 789040
auuuacauucuguggacag

SEQ ID NO: 789042 - RNA, 19 nt, Artificial Sequence
  Description of Artificial Sequence: Synthetic oligonucleotide
  Sense strand starting at position 1490 of SEQ ID NO: 587396
guggauucugcucagcaua

SEQ ID NO: 789043 - RNA, 19 nt, Artificial Sequence
  Description of Artificial Sequence: Synthetic oligonucleotide
  Antisense strand to SEQ ID NO: 789042
uaugcugagcagaauccac

SEQ ID NO: 789044 - RNA, 19 nt, Artificial Sequence
  Description of Artificial Sequence: Synthetic oligonucleotide
  Sense strand starting at position 1492 of SEQ ID NO: 587396
ggauucugcucagcauaaa

SEQ ID NO: 789045 - RNA, 19 nt, Artificial Sequence
  Description of Artificial Sequence: Synthetic oligonucleotide
  Antisense strand to SEQ ID NO: 789044
uuuaugcugagcagaaucc

SEQ ID NO: 789046 - RNA, 19 nt, Artificial Sequence
  Description of Artificial Sequence: Synthetic oligonucleotide
  Sense strand starting at position 1518 of SEQ ID NO: 587396
uuggcuucuaaaugaguga

SEQ ID NO: 789047 - RNA, 19 nt, Artificial Sequence
  Description of Artificial Sequence: Synthetic oligonucleotide
  Antisense strand to SEQ ID NO: 789046
ucacucauuuagaagccaa

SEQ ID NO: 789048 - RNA, 19 nt, Artificial Sequence
  Description of Artificial Sequence: Synthetic oligonucleotide
  Sense strand starting at position 1519 of SEQ ID NO: 587396
uggcuucuaaaugagugaa

SEQ ID NO: 789049 - RNA, 19 nt, Artificial Sequence
  Description of Artificial Sequence: Synthetic oligonucleotide
  Antisense strand to SEQ ID NO: 789048
uucacucauuuagaagcca

SEQ ID NO: 789050 - RNA, 19 nt, Artificial Sequence
  Description of Artificial Sequence: Synthetic oligonucleotide
  Sense strand starting at position 2020 of SEQ ID NO: 587396
agcugugacucaucggaga

SEQ ID NO: 789051 - RNA, 19 nt, Artificial Sequence
  Description of Artificial Sequence: Synthetic oligonucleotide
  Antisense strand to SEQ ID NO: 789050
ucuccgaugagucacagcu

SEQ ID NO: 789052 - RNA, 19 nt, Artificial Sequence
  Description of Artificial Sequence: Synthetic oligonucleotide
  Sense strand starting at position 2299 of SEQ ID NO: 587396
gccuauagugugcagagaa

SEQ ID NO: 789053 - RNA, 19 nt, Artificial Sequence
  Description of Artificial Sequence: Synthetic oligonucleotide
  Antisense strand to SEQ ID NO: 789052
uucucugcacacuauaggc

SEQ ID NO: 789054 - RNA, 19 nt, Artificial Sequence
  Description of Artificial Sequence: Synthetic oligonucleotide
  Sense strand starting at position 2327 of SEQ ID NO: 587396
ugccuuacauaguugacaa

SEQ ID NO: 789055 - RNA, 19 nt, Artificial Sequence
  Description of Artificial Sequence: Synthetic oligonucleotide
  Antisense strand to SEQ ID NO: 789054
uugucaacuauguaaggca

SEQ ID NO: 789056 - RNA, 19 nt, Artificial Sequence
  Description of Artificial Sequence: Synthetic oligonucleotide
  Sense strand starting at position 2392 of SEQ ID NO: 587396
aggcaugauucucuccauu

SEQ ID NO: 789057 - RNA, 19 nt, Artificial Sequence
  Description of Artificial Sequence: Synthetic oligonucleotide
  Antisense strand to SEQ ID NO: 789056
aauggagagaaucaugccu

SEQ ID NO: 789058 - RNA, 19 nt, Artificial Sequence
  Description of Artificial Sequence: Synthetic oligonucleotide
  Sense strand starting at position 2562 of SEQ ID NO: 587396
cuguaaugucuuuaggaaa

SEQ ID NO: 789059 - RNA, 19 nt, Artificial Sequence
  Description of Artificial Sequence: Synthetic oligonucleotide
  Antisense strand to SEQ ID NO: 789058
uuuccuaaagacauuacag

SEQ ID NO: 789060 - RNA, 19 nt, Artificial Sequence
  Description of Artificial Sequence: Synthetic oligonucleotide
  Sense strand starting at position 2744 of SEQ ID NO: 587396
gacuaaagucgacaguguu

SEQ ID NO: 789061 - RNA, 19 nt, Artificial Sequence
  Description of Artificial Sequence: Synthetic oligonucleotide
  Antisense strand to SEQ ID NO: 789060
aacacugucgacuuuaguc

SEQ ID NO: 789062 - RNA, 19 nt, Artificial Sequence
  Description of Artificial Sequence: Synthetic oligonucleotide
  Sense strand starting at position 2803 of SEQ ID NO: 587396
ucugauacuguaugaagaa

SEQ ID NO: 789063 - RNA, 19 nt, Artificial Sequence
  Description of Artificial Sequence: Synthetic oligonucleotide
  Antisense strand to SEQ ID NO: 789062
uucuucauacaguaucaga

SEQ ID NO: 789064 - RNA, 19 nt, Artificial Sequence
  Description of Artificial Sequence: Synthetic oligonucleotide
  Sense strand starting at position 2835 of SEQ ID NO: 587396
aucagaaagucuuucuggu

SEQ ID NO: 789065 - RNA, 19 nt, Artificial Sequence
  Description of Artificial Sequence: Synthetic oligonucleotide
  Antisense strand to SEQ ID NO: 789064
accagaaagacuuucugau

SEQ ID NO: 789066 - RNA, 19 nt, Artificial Sequence
  Description of Artificial Sequence: Synthetic oligonucleotide
  Sense strand starting at position 2837 of SEQ ID NO: 587396
cagaaagucuuucuggucu

SEQ ID NO: 789067 - RNA, 19 nt, Artificial Sequence
  Description of Artificial Sequence: Synthetic oligonucleotide
  Antisense strand to SEQ ID NO: 789066
agaccagaaagacuuucug

SEQ ID NO: 789068 - RNA, 19 nt, Artificial Sequence
  Description of Artificial Sequence: Synthetic oligonucleotide
  Sense strand starting at position 3324 of SEQ ID NO: 587396
aggccaguccuuuauagaa

SEQ ID NO: 789069 - RNA, 19 nt, Artificial Sequence
  Description of Artificial Sequence: Synthetic oligonucleotide
  Antisense strand to SEQ ID NO: 789068
uucuauaaaggacuggccu

SEQ ID NO: 789070 - RNA, 19 nt, Artificial Sequence
  Description of Artificial Sequence: Synthetic oligonucleotide
  Sense strand starting at position 3565 of SEQ ID NO: 587396
ccagcuagagagugaaaua

SEQ ID NO: 789071 - RNA, 19 nt, Artificial Sequence
  Description of Artificial Sequence: Synthetic oligonucleotide
  Antisense strand to SEQ ID NO: 789070
uauuucacucucuagcugg

SEQ ID NO: 789072 - RNA, 19 nt, Artificial Sequence
  Description of Artificial Sequence: Synthetic oligonucleotide
  Sense strand starting at position 3576 of SEQ ID NO: 587396
gugaaauagccaggacuag

SEQ ID NO: 789073 - RNA, 19 nt, Artificial Sequence
  Description of Artificial Sequence: Synthetic oligonucleotide
  Antisense strand to SEQ ID NO: 789072
cuaguccuggcuauuucac

SEQ ID NO: 789074 - RNA, 19 nt, Artificial Sequence
  Description of Artificial Sequence: Synthetic oligonucleotide
  Sense strand starting at position 3707 of SEQ ID NO: 587396
gauugcacaucugugaaag

SEQ ID NO: 789075 - RNA, 19 nt, Artificial Sequence
  Description of Artificial Sequence: Synthetic oligonucleotide
  Antisense strand to SEQ ID NO: 789074
cuuucacagaugugcaauc

SEQ ID NO: 789076 - RNA, 19 nt, Artificial Sequence
  Description of Artificial Sequence: Synthetic oligonucleotide
  Sense strand starting at position 3708 of SEQ ID NO: 587396
auugcacaucugugaaaga

SEQ ID NO: 789077 - RNA, 19 nt, Artificial Sequence
  Description of Artificial Sequence: Synthetic oligonucleotide
  Antisense strand to SEQ ID NO: 789076
ucuuucacagaugugcaau

SEQ ID NO: 789078 - RNA, 19 nt, Artificial Sequence
  Description of Artificial Sequence: Synthetic oligonucleotide
  Sense strand starting at position 16 of SEQ ID NO: 587397
uucuucuuugcuggaauuu

SEQ ID NO: 789079 - RNA, 19 nt, Artificial Sequence
  Description of Artificial Sequence: Synthetic oligonucleotide
  Antisense strand to SEQ ID NO: 789078
aaauuccagcaaagaagaa

SEQ ID NO: 789080 - RNA, 19 nt, Artificial Sequence
  Description of Artificial Sequence: Synthetic oligonucleotide
  Sense strand starting at position 33 of SEQ ID NO: 587397
uugggugaucgauguugag

SEQ ID NO: 789081 - RNA, 19 nt, Artificial Sequence
  Description of Artificial Sequence: Synthetic oligonucleotide
  Antisense strand to SEQ ID NO: 789080
cucaacaucgaucacccaa

SEQ ID NO: 789082 - RNA, 19 nt, Artificial Sequence
  Description of Artificial Sequence: Synthetic oligonucleotide
  Sense strand starting at position 117 of SEQ ID NO: 587397
cuaggcauguuuguggaga

SEQ ID NO: 789083 - RNA, 19 nt, Artificial Sequence
  Description of Artificial Sequence: Synthetic oligonucleotide
  Antisense strand to SEQ ID NO: 789082
ucuccacaaacaugccuag

SEQ ID NO: 789084 - RNA, 19 nt, Artificial Sequence
  Description of Artificial Sequence: Synthetic oligonucleotide
  Sense strand starting at position 426 of SEQ ID NO: 587397
gaagcaugauggcuuuaaa

SEQ ID NO: 789085 - RNA, 19 nt, Artificial Sequence
  Description of Artificial Sequence: Synthetic oligonucleotide
  Antisense strand to SEQ ID NO: 789084
uuuaaagccaucaugcuuc

SEQ ID NO: 789086 - RNA, 19 nt, Artificial Sequence
  Description of Artificial Sequence: Synthetic oligonucleotide
  Sense strand starting at position 743 of SEQ ID NO: 587397
uuguuucuauggccagaau

SEQ ID NO: 789087 - RNA, 19 nt, Artificial Sequence
  Description of Artificial Sequence: Synthetic oligonucleotide
  Antisense strand to SEQ ID NO: 789086
auucuggccauagaaacaa

SEQ ID NO: 789088 - RNA, 19 nt, Artificial Sequence
  Description of Artificial Sequence: Synthetic oligonucleotide
  Sense strand starting at position 744 of SEQ ID NO: 587397
uguuucuauggccagaaua

SEQ ID NO: 789089 - RNA, 19 nt, Artificial Sequence
  Description of Artificial Sequence: Synthetic oligonucleotide
  Antisense strand to SEQ ID NO: 789088
uauucuggccauagaaaca

SEQ ID NO: 789090 - RNA, 19 nt, Artificial Sequence
  Description of Artificial Sequence: Synthetic oligonucleotide
  Sense strand starting at position 746 of SEQ ID NO: 587397
uuucuauggccagaauaua

SEQ ID NO: 789091 - RNA, 19 nt, Artificial Sequence
  Description of Artificial Sequence: Synthetic oligonucleotide
  Antisense strand to SEQ ID NO: 789090
uauauucuggccauagaaa

SEQ ID NO: 789092 - RNA, 19 nt, Artificial Sequence
  Description of Artificial Sequence: Synthetic oligonucleotide
  Sense strand starting at position 1225 of SEQ ID NO: 587397
gccaguaaauugucagaau

SEQ ID NO: 789093 - RNA, 19 nt, Artificial Sequence
  Description of Artificial Sequence: Synthetic oligonucleotide
  Antisense strand to SEQ ID NO: 789092
auucugacaauuuacuggc

SEQ ID NO: 789094 - RNA, 19 nt, Artificial Sequence
  Description of Artificial Sequence: Synthetic oligonucleotide
  Sense strand starting at position 1270 of SEQ ID NO: 587397
acuuacgagcucuaagauc

SEQ ID NO: 789095 - RNA, 19 nt, Artificial Sequence
  Description of Artificial Sequence: Synthetic oligonucleotide
  Antisense strand to SEQ ID NO: 789094
gaucuuagagcucguaagu

SEQ ID NO: 789096 - RNA, 19 nt, Artificial Sequence
  Description of Artificial Sequence: Synthetic oligonucleotide
  Sense strand starting at position 1296 of SEQ ID NO: 587397
acagauuaggaguguagua

SEQ ID NO: 789097 - RNA, 19 nt, Artificial Sequence
  Description of Artificial Sequence: Synthetic oligonucleotide
  Antisense strand to SEQ ID NO: 789096
uacuacacuccuaaucugu

SEQ ID NO: 789098 - RNA, 19 nt, Artificial Sequence
  Description of Artificial Sequence: Synthetic oligonucleotide
  Sense strand starting at position 1298 of SEQ ID NO: 587397
agauuaggaguguaguacu

SEQ ID NO: 789099 - RNA, 19 nt, Artificial Sequence
  Description of Artificial Sequence: Synthetic oligonucleotide
  Antisense strand to SEQ ID NO: 789098
aguacuacacuccuaaucu

SEQ ID NO: 789100 - RNA, 19 nt, Artificial Sequence
  Description of Artificial Sequence: Synthetic oligonucleotide
  Sense strand starting at position 1448 of SEQ ID NO: 587397
cgaagaaacauacggcuuu

SEQ ID NO: 789101 - RNA, 19 nt, Artificial Sequence
  Description of Artificial Sequence: Synthetic oligonucleotide
  Antisense strand to SEQ ID NO: 789100
aaagccguauguuucuucg

SEQ ID NO: 789102 - RNA, 19 nt, Artificial Sequence
  Description of Artificial Sequence: Synthetic oligonucleotide
  Sense strand starting at position 1588 of SEQ ID NO: 587397
ccaucaccuccugguugau

SEQ ID NO: 789103 - RNA, 19 nt, Artificial Sequence
  Description of Artificial Sequence: Synthetic oligonucleotide
  Antisense strand to SEQ ID NO: 789102
aucaaccaggaggugaugg

SEQ ID NO: 789104 - RNA, 19 nt, Artificial Sequence
  Description of Artificial Sequence: Synthetic oligonucleotide
  Sense strand starting at position 1654 of SEQ ID NO: 587397
gcagauaaagcucagggua

SEQ ID NO: 789105 - RNA, 19 nt, Artificial Sequence
  Description of Artificial Sequence: Synthetic oligonucleotide
  Antisense strand to SEQ ID NO: 789104
uacccugagcuuuaucugc

SEQ ID NO: 789106 - RNA, 19 nt, Artificial Sequence
  Description of Artificial Sequence: Synthetic oligonucleotide
  Sense strand starting at position 1952 of SEQ ID NO: 587397
gcaguaagaucaccaggaa

SEQ ID NO: 789107 - RNA, 19 nt, Artificial Sequence
  Description of Artificial Sequence: Synthetic oligonucleotide
  Antisense strand to SEQ ID NO: 789106
uuccuggugaucuuacugc

SEQ ID NO: 789108 - RNA, 19 nt, Artificial Sequence
  Description of Artificial Sequence: Synthetic oligonucleotide
  Sense strand starting at position 1991 of SEQ ID NO: 587397
agagguucauggccgaaga

SEQ ID NO: 789109 - RNA, 19 nt, Artificial Sequence
  Description of Artificial Sequence: Synthetic oligonucleotide
  Antisense strand to SEQ ID NO: 789108
ucuucggccaugaaccucu

SEQ ID NO: 789110 - RNA, 19 nt, Artificial Sequence
  Description of Artificial Sequence: Synthetic oligonucleotide
  Sense strand starting at position 2043 of SEQ ID NO: 587397
cugggaggcuccuuuauag

SEQ ID NO: 789111 - RNA, 19 nt, Artificial Sequence
  Description of Artificial Sequence: Synthetic oligonucleotide
  Antisense strand to SEQ ID NO: 789110
cuauaaaggagccucccag

SEQ ID NO: 789112 - RNA, 19 nt, Artificial Sequence
  Description of Artificial Sequence: Synthetic oligonucleotide
  Sense strand starting at position 2144 of SEQ ID NO: 587397
ugcagaauucgaggaagaa

SEQ ID NO: 789113 - RNA, 19 nt, Artificial Sequence
  Description of Artificial Sequence: Synthetic oligonucleotide
  Antisense strand to SEQ ID NO: 789112
uucuuccucgaauucugca

SEQ ID NO: 789114 - RNA, 19 nt, Artificial Sequence
  Description of Artificial Sequence: Synthetic oligonucleotide
  Sense strand starting at position 2620 of SEQ ID NO: 587397
gauggacuuuguucuccaa

SEQ ID NO: 789115 - RNA, 19 nt, Artificial Sequence
  Description of Artificial Sequence: Synthetic oligonucleotide
  Antisense strand to SEQ ID NO: 789114
uuggagaacaaaguccauc

SEQ ID NO: 789116 - RNA, 19 nt, Artificial Sequence
  Description of Artificial Sequence: Synthetic oligonucleotide
  Sense strand starting at position 2633 of SEQ ID NO: 587397
cuccaaauggcugguauga

SEQ ID NO: 789117 - RNA, 19 nt, Artificial Sequence
  Description of Artificial Sequence: Synthetic oligonucleotide
  Antisense strand to SEQ ID NO: 789116
ucauaccagccauuuggag

SEQ ID NO: 789118 - RNA, 19 nt, Artificial Sequence
  Description of Artificial Sequence: Synthetic oligonucleotide
  Sense strand starting at position 2648 of SEQ ID NO: 587397
augaaacguuggcuaggau

SEQ ID NO: 789119 - RNA, 19 nt, Artificial Sequence
  Description of Artificial Sequence: Synthetic oligonucleotide
  Antisense strand to SEQ ID NO: 789118
auccuagccaacguuucau

SEQ ID NO: 789120 - RNA, 19 nt, Artificial Sequence
  Description of Artificial Sequence: Synthetic oligonucleotide
  Sense strand starting at position 2797 of SEQ ID NO: 587397
gcuucucuggagugacaga

SEQ ID NO: 789121 - RNA, 19 nt, Artificial Sequence
  Description of Artificial Sequence: Synthetic oligonucleotide
  Antisense strand to SEQ ID NO: 789120
ucugucacuccagagaagc

SEQ ID NO: 789122 - RNA, 19 nt, Artificial Sequence
  Description of Artificial Sequence: Synthetic oligonucleotide
  Sense strand starting at position 2814 of SEQ ID NO: 587397
gagacucagcccuggagaa

SEQ ID NO: 789123 - RNA, 19 nt, Artificial Sequence
  Description of Artificial Sequence: Synthetic oligonucleotide
  Antisense strand to SEQ ID NO: 789122
uucuccagggcugagucuc

SEQ ID NO: 789124 - RNA, 19 nt, Artificial Sequence
  Description of Artificial Sequence: Synthetic oligonucleotide
  Sense strand starting at position 2858 of SEQ ID NO: 587397
ggugaugagggaugucuga

SEQ ID NO: 789125 - RNA, 19 nt, Artificial Sequence
  Description of Artificial Sequence: Synthetic oligonucleotide
  Antisense strand to SEQ ID NO: 789124
ucagacaucccucaucacc

SEQ ID NO: 789126 - RNA, 19 nt, Artificial Sequence
  Description of Artificial Sequence: Synthetic oligonucleotide
  Sense strand starting at position 2868 of SEQ ID NO: 587397
gaugucugagggugaagau

SEQ ID NO: 789127 - RNA, 19 nt, Artificial Sequence
  Description of Artificial Sequence: Synthetic oligonucleotide
  Antisense strand to SEQ ID NO: 789126
aucuucacccucagacauc

SEQ ID NO: 789128 - RNA, 19 nt, Artificial Sequence
  Description of Artificial Sequence: Synthetic oligonucleotide
  Sense strand starting at position 2904 of SEQ ID NO: 587397
uguucugacccuuaaggca

SEQ ID NO: 789129 - RNA, 19 nt, Artificial Sequence
  Description of Artificial Sequence: Synthetic oligonucleotide
  Antisense strand to SEQ ID NO: 789128
ugccuuaagggucagaaca

SEQ ID NO: 789130 - RNA, 19 nt, Artificial Sequence
  Description of Artificial Sequence: Synthetic oligonucleotide
  Sense strand starting at position 2978 of SEQ ID NO: 587397
caugguauuccuggguaca

SEQ ID NO: 789131 - RNA, 19 nt, Artificial Sequence
  Description of Artificial Sequence: Synthetic oligonucleotide
  Antisense strand to SEQ ID NO: 789130
uguacccaggaauaccaug

SEQ ID NO: 789132 - RNA, 19 nt, Artificial Sequence
  Description of Artificial Sequence: Synthetic oligonucleotide
  Sense strand starting at position 2979 of SEQ ID NO: 587397
augguauuccuggguacac

SEQ ID NO: 789133 - RNA, 19 nt, Artificial Sequence
  Description of Artificial Sequence: Synthetic oligonucleotide
  Antisense strand to SEQ ID NO: 789132
guguacccaggaauaccau

SEQ ID NO: 789134 - RNA, 19 nt, Artificial Sequence
  Description of Artificial Sequence: Synthetic oligonucleotide
  Sense strand starting at position 2980 of SEQ ID NO: 587397
ugguauuccuggguacacu

SEQ ID NO: 789135 - RNA, 19 nt, Artificial Sequence
  Description of Artificial Sequence: Synthetic oligonucleotide
  Antisense strand to SEQ ID NO: 789134
aguguacccaggaauacca

SEQ ID NO: 789136 - RNA, 19 nt, Artificial Sequence
  Description of Artificial Sequence: Synthetic oligonucleotide
  Sense strand starting at position 3150 of SEQ ID NO: 587397
guagguacucaauauuauu

SEQ ID NO: 789137 - RNA, 19 nt, Artificial Sequence
  Description of Artificial Sequence: Synthetic oligonucleotide
  Antisense strand to SEQ ID NO: 789136
aauaauauugaguaccuac

SEQ ID NO: 789138 - RNA, 19 nt, Artificial Sequence
  Description of Artificial Sequence: Synthetic oligonucleotide
  Sense strand starting at position 3185 of SEQ ID NO: 587397
gagacagucuugcucauca

SEQ ID NO: 789139 - RNA, 19 nt, Artificial Sequence
  Description of Artificial Sequence: Synthetic oligonucleotide
  Antisense strand to SEQ ID NO: 789138
ugaugagcaagacugucuc

SEQ ID NO: 789140 - RNA, 19 nt, Artificial Sequence
  Description of Artificial Sequence: Synthetic oligonucleotide
  Sense strand starting at position 3494 of SEQ ID NO: 587397
cugguucuugcuuacuaau

SEQ ID NO: 789141 - RNA, 19 nt, Artificial Sequence
  Description of Artificial Sequence: Synthetic oligonucleotide
  Antisense strand to SEQ ID NO: 789140
auuaguaagcaagaaccag

SEQ ID NO: 789142 - RNA, 19 nt, Artificial Sequence
  Description of Artificial Sequence: Synthetic oligonucleotide
  Sense strand starting at position 3516 of SEQ ID NO: 587397
ucccuacucccaggucaua

SEQ ID NO: 789143 - RNA, 19 nt, Artificial Sequence
  Description of Artificial Sequence: Synthetic oligonucleotide
  Antisense strand to SEQ ID NO: 789142
uaugaccugggaguaggga

SEQ ID NO: 789144 - RNA, 19 nt, Artificial Sequence
  Description of Artificial Sequence: Synthetic oligonucleotide
  Sense strand starting at position 3603 of SEQ ID NO: 587397
cugugaugauuucugugua

SEQ ID NO: 789145 - RNA, 19 nt, Artificial Sequence
  Description of Artificial Sequence: Synthetic oligonucleotide
  Antisense strand to SEQ ID NO: 789144
uacacagaaaucaucacag

SEQ ID NO: 789146 - RNA, 19 nt, Artificial Sequence
  Description of Artificial Sequence: Synthetic oligonucleotide
  Sense strand starting at position 3607 of SEQ ID NO: 587397
gaugauuucuguguauggu

SEQ ID NO: 789147 - RNA, 19 nt, Artificial Sequence
  Description of Artificial Sequence: Synthetic oligonucleotide
  Antisense strand to SEQ ID NO: 789146
accauacacagaaaucauc

SEQ ID NO: 789148 - RNA, 19 nt, Artificial Sequence
  Description of Artificial Sequence: Synthetic oligonucleotide
  Sense strand starting at position 3615 of SEQ ID NO: 587397
cuguguaugguauaaauua

SEQ ID NO: 789149 - RNA, 19 nt, Artificial Sequence
  Description of Artificial Sequence: Synthetic oligonucleotide
  Antisense strand to SEQ ID NO: 789148
uaauuuauaccauacacag

SEQ ID NO: 789150 - RNA, 19 nt, Artificial Sequence
  Description of Artificial Sequence: Synthetic oligonucleotide
  Sense strand starting at position 3799 of SEQ ID NO: 587397
uguucuauuugucuauacu

SEQ ID NO: 789151 - RNA, 19 nt, Artificial Sequence
  Description of Artificial Sequence: Synthetic oligonucleotide
  Antisense strand to SEQ ID NO: 789150
aguauagacaaauagaaca

SEQ ID NO: 789152 - RNA, 19 nt, Artificial Sequence
  Description of Artificial Sequence: Synthetic oligonucleotide
  Sense strand starting at position 3934 of SEQ ID NO: 587397
ucuaucuaucuaugagucu

SEQ ID NO: 789153 - RNA, 19 nt, Artificial Sequence
  Description of Artificial Sequence: Synthetic oligonucleotide
  Antisense strand to SEQ ID NO: 789152
agacucauagauagauaga

SEQ ID NO: 789154 - RNA, 19 nt, Artificial Sequence
  Description of Artificial Sequence: Synthetic oligonucleotide
  Sense strand starting at position 3943 of SEQ ID NO: 587397
cuaugagucugucuccaac

SEQ ID NO: 789155 - RNA, 19 nt, Artificial Sequence
  Description of Artificial Sequence: Synthetic oligonucleotide
  Antisense strand to SEQ ID NO: 789154
guuggagacagacucauag

SEQ ID NO: 789156 - RNA, 19 nt, Artificial Sequence
  Description of Artificial Sequence: Synthetic oligonucleotide
  Sense strand starting at position 3946 of SEQ ID NO: 587397
ugagucugucuccaacaga

SEQ ID NO: 789157 - RNA, 19 nt, Artificial Sequence
  Description of Artificial Sequence: Synthetic oligonucleotide
  Antisense strand to SEQ ID NO: 789156
ucuguuggagacagacuca

SEQ ID NO: 789158 - RNA, 19 nt, Artificial Sequence
  Description of Artificial Sequence: Synthetic oligonucleotide
  Sense strand starting at position 159 of SEQ ID NO: 587398
acacaaacccugugucagu

SEQ ID NO: 789159 - RNA, 19 nt, Artificial Sequence
  Description of Artificial Sequence: Synthetic oligonucleotide
  Antisense strand to SEQ ID NO: 789158
acugacacaggguuugugu

SEQ ID NO: 789160 - RNA, 19 nt, Artificial Sequence
  Description of Artificial Sequence: Synthetic oligonucleotide
  Sense strand starting at position 174 of SEQ ID NO: 587398
caguaucgccuugaguaaa

SEQ ID NO: 789161 - RNA, 19 nt, Artificial Sequence
  Description of Artificial Sequence: Synthetic oligonucleotide
  Antisense strand to SEQ ID NO: 789160
uuuacucaaggcgauacug

SEQ ID NO: 789162 - RNA, 19 nt, Artificial Sequence
  Description of Artificial Sequence: Synthetic oligonucleotide
  Sense strand starting at position 242 of SEQ ID NO: 587398
agacgcgagucagucauuu

SEQ ID NO: 789163 - RNA, 19 nt, Artificial Sequence
  Description of Artificial Sequence: Synthetic oligonucleotide
  Antisense strand to SEQ ID NO: 789162
aaaugacugacucgcgucu

SEQ ID NO: 789164 - RNA, 19 nt, Artificial Sequence
  Description of Artificial Sequence: Synthetic oligonucleotide
  Sense strand starting at position 246 of SEQ ID NO: 587398
gcgagucagucauuuggau

SEQ ID NO: 789165 - RNA, 19 nt, Artificial Sequence
  Description of Artificial Sequence: Synthetic oligonucleotide
  Antisense strand to SEQ ID NO: 789164
auccaaaugacugacucgc

SEQ ID NO: 789166 - RNA, 19 nt, Artificial Sequence
  Description of Artificial Sequence: Synthetic oligonucleotide
  Sense strand starting at position 250 of SEQ ID NO: 587398
gucagucauuuggaucuaa

SEQ ID NO: 789167 - RNA, 19 nt, Artificial Sequence
  Description of Artificial Sequence: Synthetic oligonucleotide
  Antisense strand to SEQ ID NO: 789166
uuagauccaaaugacugac

SEQ ID NO: 789168 - RNA, 19 nt, Artificial Sequence
  Description of Artificial Sequence: Synthetic oligonucleotide
  Sense strand starting at position 261 of SEQ ID NO: 587398
ggaucuaaguuucugacau

SEQ ID NO: 789169 - RNA, 19 nt, Artificial Sequence
  Description of Artificial Sequence: Synthetic oligonucleotide
  Antisense strand to SEQ ID NO: 789168
augucagaaacuuagaucc

SEQ ID NO: 789170 - RNA, 19 nt, Artificial Sequence
  Description of Artificial Sequence: Synthetic oligonucleotide
  Sense strand starting at position 268 of SEQ ID NO: 587398
aguuucugacauggaaacu

SEQ ID NO: 789171 - RNA, 19 nt, Artificial Sequence
  Description of Artificial Sequence: Synthetic oligonucleotide
  Antisense strand to SEQ ID NO: 789170
aguuuccaugucagaaacu

SEQ ID NO: 789172 - RNA, 19 nt, Artificial Sequence
  Description of Artificial Sequence: Synthetic oligonucleotide
  Sense strand starting at position 319 of SEQ ID NO: 587398
uguagaaccugauugugaa

SEQ ID NO: 789173 - RNA, 19 nt, Artificial Sequence
  Description of Artificial Sequence: Synthetic oligonucleotide
  Antisense strand to SEQ ID NO: 789172
uucacaaucagguucuaca

SEQ ID NO: 789174 - RNA, 19 nt, Artificial Sequence
  Description of Artificial Sequence: Synthetic oligonucleotide
  Sense strand starting at position 320 of SEQ ID NO: 587398
guagaaccugauugugaaa

SEQ ID NO: 789175 - RNA, 19 nt, Artificial Sequence
  Description of Artificial Sequence: Synthetic oligonucleotide
  Antisense strand to SEQ ID NO: 789174
uuucacaaucagguucuac

SEQ ID NO: 789176 - RNA, 19 nt, Artificial Sequence
  Description of Artificial Sequence: Synthetic oligonucleotide
  Sense strand starting at position 498 of SEQ ID NO: 587398
aucauuuagucuguuaagu

SEQ ID NO: 789177 - RNA, 19 nt, Artificial Sequence
  Description of Artificial Sequence: Synthetic oligonucleotide
  Antisense strand to SEQ ID NO: 789176
acuuaacagacuaaaugau

SEQ ID NO: 789178 - RNA, 19 nt, Artificial Sequence
  Description of Artificial Sequence: Synthetic oligonucleotide
  Sense strand starting at position 509 of SEQ ID NO: 587398
uguuaaguauuugaucuga

SEQ ID NO: 789179 - RNA, 19 nt, Artificial Sequence
  Description of Artificial Sequence: Synthetic oligonucleotide
  Antisense strand to SEQ ID NO: 789178
ucagaucaaauacuuaaca

SEQ ID NO: 789180 - RNA, 19 nt, Artificial Sequence
  Description of Artificial Sequence: Synthetic oligonucleotide
  Sense strand starting at position 541 of SEQ ID NO: 587398
agaugcaacuuacugaaau

SEQ ID NO: 789181 - RNA, 19 nt, Artificial Sequence
  Description of Artificial Sequence: Synthetic oligonucleotide
  Antisense strand to SEQ ID NO: 789180
auuucaguaaguugcaucu

SEQ ID NO: 789182 - RNA, 19 nt, Artificial Sequence
  Description of Artificial Sequence: Synthetic oligonucleotide
  Sense strand starting at position 808 of SEQ ID NO: 587398
ucauuauacuguucuaggu

SEQ ID NO: 789183 - RNA, 19 nt, Artificial Sequence
  Description of Artificial Sequence: Synthetic oligonucleotide
  Antisense strand to SEQ ID NO: 789182
accuagaacaguauaauga

SEQ ID NO: 789184 - RNA, 19 nt, Artificial Sequence
  Description of Artificial Sequence: Synthetic oligonucleotide
  Sense strand starting at position 1063 of SEQ ID NO: 587398
agguuaggcauccagguuu

SEQ ID NO: 789185 - RNA, 19 nt, Artificial Sequence
  Description of Artificial Sequence: Synthetic oligonucleotide
  Antisense strand to SEQ ID NO: 789184
aaaccuggaugccuaaccu

SEQ ID NO: 789186 - RNA, 19 nt, Artificial Sequence
  Description of Artificial Sequence: Synthetic oligonucleotide
  Sense strand starting at position 1150 of SEQ ID NO: 587398
cagggccucugaucagaaa

SEQ ID NO: 789187 - RNA, 19 nt, Artificial Sequence
  Description of Artificial Sequence: Synthetic oligonucleotide
  Antisense strand to SEQ ID NO: 789186
uuucugaucagaggcccug

SEQ ID NO: 789188 - RNA, 19 nt, Artificial Sequence
  Description of Artificial Sequence: Synthetic oligonucleotide
  Sense strand starting at position 1211 of SEQ ID NO: 587398
uaggcugggccuuaagauu

SEQ ID NO: 789189 - RNA, 19 nt, Artificial Sequence
  Description of Artificial Sequence: Synthetic oligonucleotide
  Antisense strand to SEQ ID NO: 789188
aaucuuaaggcccagccua

SEQ ID NO: 789190 - RNA, 19 nt, Artificial Sequence
  Description of Artificial Sequence: Synthetic oligonucleotide
  Sense strand starting at position 1219 of SEQ ID NO: 587398
gccuuaagauuaucuggaa

SEQ ID NO: 789191 - RNA, 19 nt, Artificial Sequence
  Description of Artificial Sequence: Synthetic oligonucleotide
  Antisense strand to SEQ ID NO: 789190
uuccagauaaucuuaaggc

SEQ ID NO: 789192 - RNA, 19 nt, Artificial Sequence
  Description of Artificial Sequence: Synthetic oligonucleotide
  Sense strand starting at position 1233 of SEQ ID NO: 587398
uggaauucucuagguugca

SEQ ID NO: 789193 - RNA, 19 nt, Artificial Sequence
  Description of Artificial Sequence: Synthetic oligonucleotide
  Antisense strand to SEQ ID NO: 789192
ugcaaccuagagaauucca

SEQ ID NO: 789194 - RNA, 19 nt, Artificial Sequence
  Description of Artificial Sequence: Synthetic oligonucleotide
  Sense strand starting at position 1373 of SEQ ID NO: 587398
gcaguuguagcauggaaag

SEQ ID NO: 789195 - RNA, 19 nt, Artificial Sequence
  Description of Artificial Sequence: Synthetic oligonucleotide
  Antisense strand to SEQ ID NO: 789194
cuuuccaugcuacaacugc

SEQ ID NO: 789196 - RNA, 19 nt, Artificial Sequence
  Description of Artificial Sequence: Synthetic oligonucleotide
  Sense strand starting at position 1375 of SEQ ID NO: 587398
aguuguagcauggaaagca

SEQ ID NO: 789197 - RNA, 19 nt, Artificial Sequence
  Description of Artificial Sequence: Synthetic oligonucleotide
  Antisense strand to SEQ ID NO: 789196
ugcuuuccaugcuacaacu

SEQ ID NO: 789198 - RNA, 19 nt, Artificial Sequence
  Description of Artificial Sequence: Synthetic oligonucleotide
  Sense strand starting at position 1445 of SEQ ID NO: 587398
gaacgagugaguuguccau

SEQ ID NO: 789199 - RNA, 19 nt, Artificial Sequence
  Description of Artificial Sequence: Synthetic oligonucleotide
  Antisense strand to SEQ ID NO: 789198
auggacaacucacucguuc

SEQ ID NO: 789200 - RNA, 19 nt, Artificial Sequence
  Description of Artificial Sequence: Synthetic oligonucleotide
  Sense strand starting at position 1459 of SEQ ID NO: 587398
uccauuggguucucaaacu

SEQ ID NO: 789201 - RNA, 19 nt, Artificial Sequence
  Description of Artificial Sequence: Synthetic oligonucleotide
  Antisense strand to SEQ ID NO: 789200
aguuugagaacccaaugga

SEQ ID NO: 789202 - RNA, 19 nt, Artificial Sequence
  Description of Artificial Sequence: Synthetic oligonucleotide
  Sense strand starting at position 1525 of SEQ ID NO: 587398
ucagucuacucagucuaaa

SEQ ID NO: 789203 - RNA, 19 nt, Artificial Sequence
  Description of Artificial Sequence: Synthetic oligonucleotide
  Antisense strand to SEQ ID NO: 789202
uuuagacugaguagacuga

SEQ ID NO: 789204 - RNA, 19 nt, Artificial Sequence
  Description of Artificial Sequence: Synthetic oligonucleotide
  Sense strand starting at position 1735 of SEQ ID NO: 587398
agagaacuucuacgccauu

SEQ ID NO: 789205 - RNA, 19 nt, Artificial Sequence
  Description of Artificial Sequence: Synthetic oligonucleotide
  Antisense strand to SEQ ID NO: 789204
aauggcguagaaguucucu

SEQ ID NO: 789206 - RNA, 19 nt, Artificial Sequence
  Description of Artificial Sequence: Synthetic oligonucleotide
  Sense strand starting at position 2007 of SEQ ID NO: 587398
uggugagucagagaauggu

SEQ ID NO: 789207 - RNA, 19 nt, Artificial Sequence
  Description of Artificial Sequence: Synthetic oligonucleotide
  Antisense strand to SEQ ID NO: 789206
accauucucugacucacca

SEQ ID NO: 789208 - RNA, 19 nt, Artificial Sequence
  Description of Artificial Sequence: Synthetic oligonucleotide
  Sense strand starting at position 2013 of SEQ ID NO: 587398
gucagagaaugguccucaa

SEQ ID NO: 789209 - RNA, 19 nt, Artificial Sequence
  Description of Artificial Sequence: Synthetic oligonucleotide
  Antisense strand to SEQ ID NO: 789208
uugaggaccauucucugac

SEQ ID NO: 789210 - RNA, 19 nt, Artificial Sequence
  Description of Artificial Sequence: Synthetic oligonucleotide
  Sense strand starting at position 2048 of SEQ ID NO: 587398
aggagaucuuaugcaaauc

SEQ ID NO: 789211 - RNA, 19 nt, Artificial Sequence
  Description of Artificial Sequence: Synthetic oligonucleotide
  Antisense strand to SEQ ID NO: 789210
gauuugcauaagaucuccu

SEQ ID NO: 789212 - RNA, 19 nt, Artificial Sequence
  Description of Artificial Sequence: Synthetic oligonucleotide
  Sense strand starting at position 2176 of SEQ ID NO: 587398
ucugucucacgugagaaca

SEQ ID NO: 789213 - RNA, 19 nt, Artificial Sequence
  Description of Artificial Sequence: Synthetic oligonucleotide
  Antisense strand to SEQ ID NO: 789212
uguucucacgugagacaga

SEQ ID NO: 789214 - RNA, 19 nt, Artificial Sequence
  Description of Artificial Sequence: Synthetic oligonucleotide
  Sense strand starting at position 2316 of SEQ ID NO: 587398
uauccauugcucggacauu

SEQ ID NO: 789215 - RNA, 19 nt, Artificial Sequence
  Description of Artificial Sequence: Synthetic oligonucleotide
  Antisense strand to SEQ ID NO: 789214
aauguccgagcaauggaua

SEQ ID NO: 789216 - RNA, 19 nt, Artificial Sequence
  Description of Artificial Sequence: Synthetic oligonucleotide
  Sense strand starting at position 2435 of SEQ ID NO: 587398
ggagaucugagcuggugaa

SEQ ID NO: 789217 - RNA, 19 nt, Artificial Sequence
  Description of Artificial Sequence: Synthetic oligonucleotide
  Antisense strand to SEQ ID NO: 789216
uucaccagcucagaucucc

SEQ ID NO: 789218 - RNA, 19 nt, Artificial Sequence
  Description of Artificial Sequence: Synthetic oligonucleotide
  Sense strand starting at position 2436 of SEQ ID NO: 587398
gagaucugagcuggugaaa

SEQ ID NO: 789219 - RNA, 19 nt, Artificial Sequence
  Description of Artificial Sequence: Synthetic oligonucleotide
  Antisense strand to SEQ ID NO: 789218
uuucaccagcucagaucuc

SEQ ID NO: 789220 - RNA, 19 nt, Artificial Sequence
  Description of Artificial Sequence: Synthetic oligonucleotide
  Sense strand starting at position 2447 of SEQ ID NO: 587398
uggugaaauuuaugugaaa

SEQ ID NO: 789221 - RNA, 19 nt, Artificial Sequence
  Description of Artificial Sequence: Synthetic oligonucleotide
  Antisense strand to SEQ ID NO: 789220
uuucacauaaauuucacca

SEQ ID NO: 789222 - RNA, 19 nt, Artificial Sequence
  Description of Artificial Sequence: Synthetic oligonucleotide
  Sense strand starting at position 2554 of SEQ ID NO: 587398
augggauugugacuacaug

SEQ ID NO: 789223 - RNA, 19 nt, Artificial Sequence
  Description of Artificial Sequence: Synthetic oligonucleotide
  Antisense strand to SEQ ID NO: 789222
cauguagucacaaucccau

SEQ ID NO: 789224 - RNA, 19 nt, Artificial Sequence
  Description of Artificial Sequence: Synthetic oligonucleotide
  Sense strand starting at position 3064 of SEQ ID NO: 587398
gcagcagugacagagacau

SEQ ID NO: 789225 - RNA, 19 nt, Artificial Sequence
  Description of Artificial Sequence: Synthetic oligonucleotide
  Antisense strand to SEQ ID NO: 789224
augucucugucacugcugc

SEQ ID NO: 789226 - RNA, 19 nt, Artificial Sequence
  Description of Artificial Sequence: Synthetic oligonucleotide
  Sense strand starting at position 3193 of SEQ ID NO: 587398
aacgauauugugcagccaa

SEQ ID NO: 789227 - RNA, 19 nt, Artificial Sequence
  Description of Artificial Sequence: Synthetic oligonucleotide
  Antisense strand to SEQ ID NO: 789226
uuggcugcacaauaucguu

SEQ ID NO: 789228 - RNA, 19 nt, Artificial Sequence
  Description of Artificial Sequence: Synthetic oligonucleotide
  Sense strand starting at position 3570 of SEQ ID NO: 587398
ggagcuuagucaccaggga

SEQ ID NO: 789229 - RNA, 19 nt, Artificial Sequence
  Description of Artificial Sequence: Synthetic oligonucleotide
  Antisense strand to SEQ ID NO: 789228
ucccuggugacuaagcucc

SEQ ID NO: 789230 - RNA, 19 nt, Artificial Sequence
  Description of Artificial Sequence: Synthetic oligonucleotide
  Sense strand starting at position 3732 of SEQ ID NO: 587398
augugcucugccuaaauua

SEQ ID NO: 789231 - RNA, 19 nt, Artificial Sequence
  Description of Artificial Sequence: Synthetic oligonucleotide
  Antisense strand to SEQ ID NO: 789230
uaauuuaggcagagcacau

SEQ ID NO: 789232 - RNA, 19 nt, Artificial Sequence
  Description of Artificial Sequence: Synthetic oligonucleotide
  Sense strand starting at position 3931 of SEQ ID NO: 587398
cucacuugaagugauggua

SEQ ID NO: 789233 - RNA, 19 nt, Artificial Sequence
  Description of Artificial Sequence: Synthetic oligonucleotide
  Antisense strand to SEQ ID NO: 789232
uaccaucacuucaagugag

SEQ ID NO: 789234 - RNA, 19 nt, Artificial Sequence
  Description of Artificial Sequence: Synthetic oligonucleotide
  Sense strand starting at position 3934 of SEQ ID NO: 587398
acuugaagugaugguaaag

SEQ ID NO: 789235 - RNA, 19 nt, Artificial Sequence
  Description of Artificial Sequence: Synthetic oligonucleotide
  Antisense strand to SEQ ID NO: 789234
cuuuaccaucacuucaagu

SEQ ID NO: 789236 - RNA, 19 nt, Artificial Sequence
  Description of Artificial Sequence: Synthetic oligonucleotide
  Sense strand starting at position 3971 of SEQ ID NO: 587398
augucugagccuuaaugcu

SEQ ID NO: 789237 - RNA, 19 nt, Artificial Sequence
  Description of Artificial Sequence: Synthetic oligonucleotide
  Antisense strand to SEQ ID NO: 789236
agcauuaaggcucagacau

SEQ ID NO: 789238 - RNA, 19 nt, Artificial Sequence
  Description of Artificial Sequence: Synthetic oligonucleotide
  Sense strand starting at position 12 of SEQ ID NO: 587399
uaggauaaagauugcguau

SEQ ID NO: 789239 - RNA, 19 nt, Artificial Sequence
  Description of Artificial Sequence: Synthetic oligonucleotide
  Antisense strand to SEQ ID NO: 789238
auacgcaaucuuuauccua

SEQ ID NO: 789240 - RNA, 19 nt, Artificial Sequence
  Description of Artificial Sequence: Synthetic oligonucleotide
  Sense strand starting at position 15 of SEQ ID NO: 587399
gauaaagauugcguaucuu

SEQ ID NO: 789241 - RNA, 19 nt, Artificial Sequence
  Description of Artificial Sequence: Synthetic oligonucleotide
  Antisense strand to SEQ ID NO: 789240
aagauacgcaaucuuuauc

SEQ ID NO: 789242 - RNA, 19 nt, Artificial Sequence
  Description of Artificial Sequence: Synthetic oligonucleotide
  Sense strand starting at position 26 of SEQ ID NO: 587399
cguaucuuuggacaccaua

SEQ ID NO: 789243 - RNA, 19 nt, Artificial Sequence
  Description of Artificial Sequence: Synthetic oligonucleotide
  Antisense strand to SEQ ID NO: 789242
uaugguguccaaagauacg

SEQ ID NO: 789244 - RNA, 19 nt, Artificial Sequence
  Description of Artificial Sequence: Synthetic oligonucleotide
  Sense strand starting at position 34 of SEQ ID NO: 587399
uggacaccauaguuuaauu

SEQ ID NO: 789245 - RNA, 19 nt, Artificial Sequence
  Description of Artificial Sequence: Synthetic oligonucleotide
  Antisense strand to SEQ ID NO: 789244
aauuaaacuauggugucca

SEQ ID NO: 789246 - RNA, 19 nt, Artificial Sequence
  Description of Artificial Sequence: Synthetic oligonucleotide
  Sense strand starting at position 167 of SEQ ID NO: 587399
aggugccaauuuguuuaua

SEQ ID NO: 789247 - RNA, 19 nt, Artificial Sequence
  Description of Artificial Sequence: Synthetic oligonucleotide
  Antisense strand to SEQ ID NO: 789246
uauaaacaaauuggcaccu

SEQ ID NO: 789248 - RNA, 19 nt, Artificial Sequence
  Description of Artificial Sequence: Synthetic oligonucleotide
  Sense strand starting at position 222 of SEQ ID NO: 587399
acucuuaaggcagguaaca

SEQ ID NO: 789249 - RNA, 19 nt, Artificial Sequence
  Description of Artificial Sequence: Synthetic oligonucleotide
  Antisense strand to SEQ ID NO: 789248
uguuaccugccuuaagagu

SEQ ID NO: 789250 - RNA, 19 nt, Artificial Sequence
  Description of Artificial Sequence: Synthetic oligonucleotide
  Sense strand starting at position 347 of SEQ ID NO: 587399
caguaucgccuugaguaaa

SEQ ID NO: 789251 - RNA, 19 nt, Artificial Sequence
  Description of Artificial Sequence: Synthetic oligonucleotide
  Antisense strand to SEQ ID NO: 789250
uuuacucaaggcgauacug

SEQ ID NO: 789252 - RNA, 19 nt, Artificial Sequence
  Description of Artificial Sequence: Synthetic oligonucleotide
  Sense strand starting at position 415 of SEQ ID NO: 587399
agacgcgagucagucauuu

SEQ ID NO: 789253 - RNA, 19 nt, Artificial Sequence
  Description of Artificial Sequence: Synthetic oligonucleotide
  Antisense strand to SEQ ID NO: 789252
aaaugacugacucgcgucu

SEQ ID NO: 789254 - RNA, 19 nt, Artificial Sequence
  Description of Artificial Sequence: Synthetic oligonucleotide
  Sense strand starting at position 419 of SEQ ID NO: 587399
gcgagucagucauuuggau

SEQ ID NO: 789255 - RNA, 19 nt, Artificial Sequence
  Description of Artificial Sequence: Synthetic oligonucleotide
  Antisense strand to SEQ ID NO: 789254
auccaaaugacugacucgc

SEQ ID NO: 789256 - RNA, 19 nt, Artificial Sequence
  Description of Artificial Sequence: Synthetic oligonucleotide
  Sense strand starting at position 434 of SEQ ID NO: 587399
ggaucuaaguuucugacau

SEQ ID NO: 789257 - RNA, 19 nt, Artificial Sequence
  Description of Artificial Sequence: Synthetic oligonucleotide
  Antisense strand to SEQ ID NO: 789256
augucagaaacuuagaucc

SEQ ID NO: 789258 - RNA, 19 nt, Artificial Sequence
  Description of Artificial Sequence: Synthetic oligonucleotide
  Sense strand starting at position 441 of SEQ ID NO: 587399
aguuucugacauggaaacu

SEQ ID NO: 789259 - RNA, 19 nt, Artificial Sequence
  Description of Artificial Sequence: Synthetic oligonucleotide
  Antisense strand to SEQ ID NO: 789258
aguuuccaugucagaaacu

SEQ ID NO: 789260 - RNA, 19 nt, Artificial Sequence
  Description of Artificial Sequence: Synthetic oligonucleotide
  Sense strand starting at position 492 of SEQ ID NO: 587399
uguagaaccugauugugaa

SEQ ID NO: 789261 - RNA, 19 nt, Artificial Sequence
  Description of Artificial Sequence: Synthetic oligonucleotide
  Antisense strand to SEQ ID NO: 789260
uucacaaucagguucuaca

SEQ ID NO: 789262 - RNA, 19 nt, Artificial Sequence
  Description of Artificial Sequence: Synthetic oligonucleotide
  Sense strand starting at position 493 of SEQ ID NO: 587399
guagaaccugauugugaaa

SEQ ID NO: 789263 - RNA, 19 nt, Artificial Sequence
  Description of Artificial Sequence: Synthetic oligonucleotide
  Antisense strand to SEQ ID NO: 789262
uuucacaaucagguucuac

SEQ ID NO: 789264 - RNA, 19 nt, Artificial Sequence
  Description of Artificial Sequence: Synthetic oligonucleotide
  Sense strand starting at position 505 of SEQ ID NO: 587399
ugugaaagacccugaucuc

SEQ ID NO: 789265 - RNA, 19 nt, Artificial Sequence
  Description of Artificial Sequence: Synthetic oligonucleotide
  Antisense strand to SEQ ID NO: 789264
gagaucagggucuuucaca

SEQ ID NO: 789266 - RNA, 19 nt, Artificial Sequence
  Description of Artificial Sequence: Synthetic oligonucleotide
  Sense strand starting at position 557 of SEQ ID NO: 587399
guaggagcucagcaacgau

SEQ ID NO: 789267 - RNA, 19 nt, Artificial Sequence
  Description of Artificial Sequence: Synthetic oligonucleotide
  Antisense strand to SEQ ID NO: 789266
aucguugcugagcuccuac

SEQ ID NO: 789268 - RNA, 19 nt, Artificial Sequence
  Description of Artificial Sequence: Synthetic oligonucleotide
  Sense strand starting at position 671 of SEQ ID NO: 587399
aucauuuagucuguuaagu

SEQ ID NO: 789269 - RNA, 19 nt, Artificial Sequence
  Description of Artificial Sequence: Synthetic oligonucleotide
  Antisense strand to SEQ ID NO: 789268
acuuaacagacuaaaugau

SEQ ID NO: 789270 - RNA, 19 nt, Artificial Sequence
  Description of Artificial Sequence: Synthetic oligonucleotide
  Sense strand starting at position 713 of SEQ ID NO: 587399
agaugcaacuuacugaaau

SEQ ID NO: 789271 - RNA, 19 nt, Artificial Sequence
  Description of Artificial Sequence: Synthetic oligonucleotide
  Antisense strand to SEQ ID NO: 789270
auuucaguaaguugcaucu

SEQ ID NO: 789272 - RNA, 19 nt, Artificial Sequence
  Description of Artificial Sequence: Synthetic oligonucleotide
  Sense strand starting at position 959 of SEQ ID NO: 587399
ucauuauacuguucuaggu

SEQ ID NO: 789273 - RNA, 19 nt, Artificial Sequence
  Description of Artificial Sequence: Synthetic oligonucleotide
  Antisense strand to SEQ ID NO: 789272
accuagaacaguauaauga

SEQ ID NO: 789274 - RNA, 19 nt, Artificial Sequence
  Description of Artificial Sequence: Synthetic oligonucleotide
  Sense strand starting at position 1214 of SEQ ID NO: 587399
agguuaggcauccagguuu

SEQ ID NO: 789275 - RNA, 19 nt, Artificial Sequence
  Description of Artificial Sequence: Synthetic oligonucleotide
  Antisense strand to SEQ ID NO: 789274
aaaccuggaugccuaaccu

SEQ ID NO: 789276 - RNA, 19 nt, Artificial Sequence
  Description of Artificial Sequence: Synthetic oligonucleotide
  Sense strand starting at position 1301 of SEQ ID NO: 587399
cagggccucugaucagaaa

SEQ ID NO: 789277 - RNA, 19 nt, Artificial Sequence
  Description of Artificial Sequence: Synthetic oligonucleotide
  Antisense strand to SEQ ID NO: 789276
uuucugaucagaggcccug

SEQ ID NO: 789278 - RNA, 19 nt, Artificial Sequence
  Description of Artificial Sequence: Synthetic oligonucleotide
  Sense strand starting at position 1362 of SEQ ID NO: 587399
uaggcugggccuuaagauu

SEQ ID NO: 789279 - RNA, 19 nt, Artificial Sequence
  Description of Artificial Sequence: Synthetic oligonucleotide
  Antisense strand to SEQ ID NO: 789278
aaucuuaaggcccagccua

SEQ ID NO: 789280 - RNA, 19 nt, Artificial Sequence
  Description of Artificial Sequence: Synthetic oligonucleotide
  Sense strand starting at position 1370 of SEQ ID NO: 587399
gccuuaagauuaucuggaa

SEQ ID NO: 789281 - RNA, 19 nt, Artificial Sequence
  Description of Artificial Sequence: Synthetic oligonucleotide
  Antisense strand to SEQ ID NO: 789280
uuccagauaaucuuaaggc

SEQ ID NO: 789282 - RNA, 19 nt, Artificial Sequence
  Description of Artificial Sequence: Synthetic oligonucleotide
  Sense strand starting at position 1382 of SEQ ID NO: 587399
ucuggaauucucuagguug

SEQ ID NO: 789283 - RNA, 19 nt, Artificial Sequence
  Description of Artificial Sequence: Synthetic oligonucleotide
  Antisense strand to SEQ ID NO: 789282
caaccuagagaauuccaga

SEQ ID NO: 789284 - RNA, 19 nt, Artificial Sequence
  Description of Artificial Sequence: Synthetic oligonucleotide
  Sense strand starting at position 1384 of SEQ ID NO: 587399
uggaauucucuagguugca

SEQ ID NO: 789285 - RNA, 19 nt, Artificial Sequence
  Description of Artificial Sequence: Synthetic oligonucleotide
  Antisense strand to SEQ ID NO: 789284
ugcaaccuagagaauucca

SEQ ID NO: 789286 - RNA, 19 nt, Artificial Sequence
  Description of Artificial Sequence: Synthetic oligonucleotide
  Sense strand starting at position 1526 of SEQ ID NO: 587399
aguuguagcauggaaagca

SEQ ID NO: 789287 - RNA, 19 nt, Artificial Sequence
  Description of Artificial Sequence: Synthetic oligonucleotide
  Antisense strand to SEQ ID NO: 789286
ugcuuuccaugcuacaacu

SEQ ID NO: 789288 - RNA, 19 nt, Artificial Sequence
  Description of Artificial Sequence: Synthetic oligonucleotide
  Sense strand starting at position 1551 of SEQ ID NO: 587399
agaugauauuuacaagcua

SEQ ID NO: 789289 - RNA, 19 nt, Artificial Sequence
  Description of Artificial Sequence: Synthetic oligonucleotide
  Antisense strand to SEQ ID NO: 789288
uagcuuguaaauaucaucu

SEQ ID NO: 789290 - RNA, 19 nt, Artificial Sequence
  Description of Artificial Sequence: Synthetic oligonucleotide
  Sense strand starting at position 1610 of SEQ ID NO: 587399
uccauuggguucucaaacu

SEQ ID NO: 789291 - RNA, 19 nt, Artificial Sequence
  Description of Artificial Sequence: Synthetic oligonucleotide
  Antisense strand to SEQ ID NO: 789290
aguuugagaacccaaugga

SEQ ID NO: 789292 - RNA, 19 nt, Artificial Sequence
  Description of Artificial Sequence: Synthetic oligonucleotide
  Sense strand starting at position 1877 of SEQ ID NO: 587399
agagaacuucuacgccauu

SEQ ID NO: 789293 - RNA, 19 nt, Artificial Sequence
  Description of Artificial Sequence: Synthetic oligonucleotide
  Antisense strand to SEQ ID NO: 789292
aauggcguagaaguucucu

SEQ ID NO: 789294 - RNA, 19 nt, Artificial Sequence
  Description of Artificial Sequence: Synthetic oligonucleotide
  Sense strand starting at position 2106 of SEQ ID NO: 587399
gggugcaaugcucauuaca

SEQ ID NO: 789295 - RNA, 19 nt, Artificial Sequence
  Description of Artificial Sequence: Synthetic oligonucleotide
  Antisense strand to SEQ ID NO: 789294
uguaaugagcauugcaccc

SEQ ID NO: 789296 - RNA, 19 nt, Artificial Sequence
  Description of Artificial Sequence: Synthetic oligonucleotide
  Sense strand starting at position 2115 of SEQ ID NO: 587399
gcucauuacagagguuaga

SEQ ID NO: 789297 - RNA, 19 nt, Artificial Sequence
  Description of Artificial Sequence: Synthetic oligonucleotide
  Antisense strand to SEQ ID NO: 789296
ucuaaccucuguaaugagc

SEQ ID NO: 789298 - RNA, 19 nt, Artificial Sequence
  Description of Artificial Sequence: Synthetic oligonucleotide
  Sense strand starting at position 2155 of SEQ ID NO: 587399
gucagagaaugguccucaa

SEQ ID NO: 789299 - RNA, 19 nt, Artificial Sequence
  Description of Artificial Sequence: Synthetic oligonucleotide
  Antisense strand to SEQ ID NO: 789298
uugaggaccauucucugac

SEQ ID NO: 789300 - RNA, 19 nt, Artificial Sequence
  Description of Artificial Sequence: Synthetic oligonucleotide
  Sense strand starting at position 2190 of SEQ ID NO: 587399
aggagaucuuaugcaaauc

SEQ ID NO: 789301 - RNA, 19 nt, Artificial Sequence
  Description of Artificial Sequence: Synthetic oligonucleotide
  Antisense strand to SEQ ID NO: 789300
gauuugcauaagaucuccu

SEQ ID NO: 789302 - RNA, 19 nt, Artificial Sequence
  Description of Artificial Sequence: Synthetic oligonucleotide
  Sense strand starting at position 2318 of SEQ ID NO: 587399
ucugucucacgugagaaca

SEQ ID NO: 789303 - RNA, 19 nt, Artificial Sequence
  Description of Artificial Sequence: Synthetic oligonucleotide
  Antisense strand to SEQ ID NO: 789302
uguucucacgugagacaga

SEQ ID NO: 789304 - RNA, 19 nt, Artificial Sequence
  Description of Artificial Sequence: Synthetic oligonucleotide
  Sense strand starting at position 2578 of SEQ ID NO: 587399
ggagaucugagcuggugaa

SEQ ID NO: 789305 - RNA, 19 nt, Artificial Sequence
  Description of Artificial Sequence: Synthetic oligonucleotide
  Antisense strand to SEQ ID NO: 789304
uucaccagcucagaucucc

SEQ ID NO: 789306 - RNA, 19 nt, Artificial Sequence
  Description of Artificial Sequence: Synthetic oligonucleotide
  Sense strand starting at position 2579 of SEQ ID NO: 587399
gagaucugagcuggugaaa

SEQ ID NO: 789307 - RNA, 19 nt, Artificial Sequence
  Description of Artificial Sequence: Synthetic oligonucleotide
  Antisense strand to SEQ ID NO: 789306
uuucaccagcucagaucuc

SEQ ID NO: 789308 - RNA, 19 nt, Artificial Sequence
  Description of Artificial Sequence: Synthetic oligonucleotide
  Sense strand starting at position 2697 of SEQ ID NO: 587399
augggauugugacuacaug

SEQ ID NO: 789309 - RNA, 19 nt, Artificial Sequence
  Description of Artificial Sequence: Synthetic oligonucleotide
  Antisense strand to SEQ ID NO: 789308
cauguagucacaaucccau

SEQ ID NO: 789310 - RNA, 19 nt, Artificial Sequence
  Description of Artificial Sequence: Synthetic oligonucleotide
  Sense strand starting at position 3207 of SEQ ID NO: 587399
gcagcagugacagagacau

SEQ ID NO: 789311 - RNA, 19 nt, Artificial Sequence
  Description of Artificial Sequence: Synthetic oligonucleotide
  Antisense strand to SEQ ID NO: 789310
augucucugucacugcugc

SEQ ID NO: 789312 - RNA, 19 nt, Artificial Sequence
  Description of Artificial Sequence: Synthetic oligonucleotide
  Sense strand starting at position 3336 of SEQ ID NO: 587399
aaugauauugugcagccaa

SEQ ID NO: 789313 - RNA, 19 nt, Artificial Sequence
  Description of Artificial Sequence: Synthetic oligonucleotide
  Antisense strand to SEQ ID NO: 789312
uuggcugcacaauaucauu

SEQ ID NO: 789314 - RNA, 19 nt, Artificial Sequence
  Description of Artificial Sequence: Synthetic oligonucleotide
  Sense strand starting at position 3712 of SEQ ID NO: 587399
ggagcuuagucaccaggga

SEQ ID NO: 789315 - RNA, 19 nt, Artificial Sequence
  Description of Artificial Sequence: Synthetic oligonucleotide
  Antisense strand to SEQ ID NO: 789314
ucccuggugacuaagcucc

SEQ ID NO: 789316 - RNA, 19 nt, Artificial Sequence
  Description of Artificial Sequence: Synthetic oligonucleotide
  Sense strand starting at position 3750 of SEQ ID NO: 587399
cuuuguuuccuuguguguu

SEQ ID NO: 789317 - RNA, 19 nt, Artificial Sequence
  Description of Artificial Sequence: Synthetic oligonucleotide
  Antisense strand to SEQ ID NO: 789316
aacacacaaggaaacaaag

SEQ ID NO: 789318 - RNA, 19 nt, Artificial Sequence
  Description of Artificial Sequence: Synthetic oligonucleotide
  Sense strand starting at position 194 of SEQ ID NO: 587400
cucacuugaccugggaaca

SEQ ID NO: 789319 - RNA, 19 nt, Artificial Sequence
  Description of Artificial Sequence: Synthetic oligonucleotide
  Antisense strand to SEQ ID NO: 789318
uguucccaggucaagugag

SEQ ID NO: 789320 - RNA, 19 nt, Artificial Sequence
  Description of Artificial Sequence: Synthetic oligonucleotide
  Sense strand starting at position 195 of SEQ ID NO: 587400
ucacuugaccugggaacau

SEQ ID NO: 789321 - RNA, 19 nt, Artificial Sequence
  Description of Artificial Sequence: Synthetic oligonucleotide
  Antisense strand to SEQ ID NO: 789320
auguucccaggucaaguga

SEQ ID NO: 789322 - RNA, 19 nt, Artificial Sequence
  Description of Artificial Sequence: Synthetic oligonucleotide
  Sense strand starting at position 216 of SEQ ID NO: 587400
aaauguugcagcguguuua

SEQ ID NO: 789323 - RNA, 19 nt, Artificial Sequence
  Description of Artificial Sequence: Synthetic oligonucleotide
  Antisense strand to SEQ ID NO: 789322
uaaacacgcugcaacauuu

SEQ ID NO: 789324 - RNA, 19 nt, Artificial Sequence
  Description of Artificial Sequence: Synthetic oligonucleotide
  Sense strand starting at position 219 of SEQ ID NO: 587400
uguugcagcguguuuaguu

SEQ ID NO: 789325 - RNA, 19 nt, Artificial Sequence
  Description of Artificial Sequence: Synthetic oligonucleotide
  Antisense strand to SEQ ID NO: 789324
aacuaaacacgcugcaaca

SEQ ID NO: 789326 - RNA, 19 nt, Artificial Sequence
  Description of Artificial Sequence: Synthetic oligonucleotide
  Sense strand starting at position 224 of SEQ ID NO: 587400
cagcguguuuaguucagga

SEQ ID NO: 789327 - RNA, 19 nt, Artificial Sequence
  Description of Artificial Sequence: Synthetic oligonucleotide
  Antisense strand to SEQ ID NO: 789326
uccugaacuaaacacgcug

SEQ ID NO: 789328 - RNA, 19 nt, Artificial Sequence
  Description of Artificial Sequence: Synthetic oligonucleotide
  Sense strand starting at position 226 of SEQ ID NO: 587400
gcguguuuaguucaggaau

SEQ ID NO: 789329 - RNA, 19 nt, Artificial Sequence
  Description of Artificial Sequence: Synthetic oligonucleotide
  Antisense strand to SEQ ID NO: 789328
auuccugaacuaaacacgc

SEQ ID NO: 789330 - RNA, 19 nt, Artificial Sequence
  Description of Artificial Sequence: Synthetic oligonucleotide
  Sense strand starting at position 331 of SEQ ID NO: 587400
uggagaugagucugggcaa

SEQ ID NO: 789331 - RNA, 19 nt, Artificial Sequence
  Description of Artificial Sequence: Synthetic oligonucleotide
  Antisense strand to SEQ ID NO: 789330
uugcccagacucaucucca

SEQ ID NO: 789332 - RNA, 19 nt, Artificial Sequence
  Description of Artificial Sequence: Synthetic oligonucleotide
  Sense strand starting at position 548 of SEQ ID NO: 587400
gucacuuccuauucgaaga

SEQ ID NO: 789333 - RNA, 19 nt, Artificial Sequence
  Description of Artificial Sequence: Synthetic oligonucleotide
  Antisense strand to SEQ ID NO: 789332
ucuucgaauaggaagugac

SEQ ID NO: 789334 - RNA, 19 nt, Artificial Sequence
  Description of Artificial Sequence: Synthetic oligonucleotide
  Sense strand starting at position 574 of SEQ ID NO: 587400
ggagaugccaucuggcaaa

SEQ ID NO: 789335 - RNA, 19 nt, Artificial Sequence
  Description of Artificial Sequence: Synthetic oligonucleotide
  Antisense strand to SEQ ID NO: 789334
uuugccagauggcaucucc

SEQ ID NO: 789336 - RNA, 19 nt, Artificial Sequence
  Description of Artificial Sequence: Synthetic oligonucleotide
  Sense strand starting at position 608 of SEQ ID NO: 587400
caaaucaaucgaugacguu

SEQ ID NO: 789337 - RNA, 19 nt, Artificial Sequence
  Description of Artificial Sequence: Synthetic oligonucleotide
  Antisense strand to SEQ ID NO: 789336
aacgucaucgauugauuug

SEQ ID NO: 789338 - RNA, 19 nt, Artificial Sequence
  Description of Artificial Sequence: Synthetic oligonucleotide
  Sense strand starting at position 648 of SEQ ID NO: 587400
gggaucuacugacaugaca

SEQ ID NO: 789339 - RNA, 19 nt, Artificial Sequence
  Description of Artificial Sequence: Synthetic oligonucleotide
  Antisense strand to SEQ ID NO: 789338
ugucaugucaguagauccc

SEQ ID NO: 789340 - RNA, 19 nt, Artificial Sequence
  Description of Artificial Sequence: Synthetic oligonucleotide
  Sense strand starting at position 702 of SEQ ID NO: 587400
ggaaacuauuuccauagga

SEQ ID NO: 789341 - RNA, 19 nt, Artificial Sequence
  Description of Artificial Sequence: Synthetic oligonucleotide
  Antisense strand to SEQ ID NO: 789340
uccuauggaaauaguuucc

SEQ ID NO: 789342 - RNA, 19 nt, Artificial Sequence
  Description of Artificial Sequence: Synthetic oligonucleotide
  Sense strand starting at position 707 of SEQ ID NO: 587400
cuauuuccauaggagaaug

SEQ ID NO: 789343 - RNA, 19 nt, Artificial Sequence
  Description of Artificial Sequence: Synthetic oligonucleotide
  Antisense strand to SEQ ID NO: 789342
cauucuccuauggaaauag

SEQ ID NO: 789344 - RNA, 19 nt, Artificial Sequence
  Description of Artificial Sequence: Synthetic oligonucleotide
  Sense strand starting at position 738 of SEQ ID NO: 587400
agucgaaacuggcuuggua

SEQ ID NO: 789345 - RNA, 19 nt, Artificial Sequence
  Description of Artificial Sequence: Synthetic oligonucleotide
  Antisense strand to SEQ ID NO: 789344
uaccaagccaguuucgacu

SEQ ID NO: 789346 - RNA, 19 nt, Artificial Sequence
  Description of Artificial Sequence: Synthetic oligonucleotide
  Sense strand starting at position 804 of SEQ ID NO: 587400
ugguuacuugcaggaacau

SEQ ID NO: 789347 - RNA, 19 nt, Artificial Sequence
  Description of Artificial Sequence: Synthetic oligonucleotide
  Antisense strand to SEQ ID NO: 789346
auguuccugcaaguaacca

SEQ ID NO: 789348 - RNA, 19 nt, Artificial Sequence
  Description of Artificial Sequence: Synthetic oligonucleotide
  Sense strand starting at position 869 of SEQ ID NO: 587400
uggauagcccagcgucauu

SEQ ID NO: 789349 - RNA, 19 nt, Artificial Sequence
  Description of Artificial Sequence: Synthetic oligonucleotide
  Antisense strand to SEQ ID NO: 789348
aaugacgcugggcuaucca

SEQ ID NO: 789350 - RNA, 19 nt, Artificial Sequence
  Description of Artificial Sequence: Synthetic oligonucleotide
  Sense strand starting at position 874 of SEQ ID NO: 587400
agcccagcgucauuuaaau

SEQ ID NO: 789351 - RNA, 19 nt, Artificial Sequence
  Description of Artificial Sequence: Synthetic oligonucleotide
  Antisense strand to SEQ ID NO: 789350
auuuaaaugacgcugggcu

SEQ ID NO: 789352 - RNA, 19 nt, Artificial Sequence
  Description of Artificial Sequence: Synthetic oligonucleotide
  Sense strand starting at position 918 of SEQ ID NO: 587400
ugcuguugucugcaaagag

SEQ ID NO: 789353 - RNA, 19 nt, Artificial Sequence
  Description of Artificial Sequence: Synthetic oligonucleotide
  Antisense strand to SEQ ID NO: 789352
cucuuugcagacaacagca

SEQ ID NO: 789354 - RNA, 19 nt, Artificial Sequence
  Description of Artificial Sequence: Synthetic oligonucleotide
  Sense strand starting at position 922 of SEQ ID NO: 587400
guugucugcaaagagauga

SEQ ID NO: 789355 - RNA, 19 nt, Artificial Sequence
  Description of Artificial Sequence: Synthetic oligonucleotide
  Antisense strand to SEQ ID NO: 789354
ucaucucuuugcagacaac

SEQ ID NO: 789356 - RNA, 19 nt, Artificial Sequence
  Description of Artificial Sequence: Synthetic oligonucleotide
  Sense strand starting at position 972 of SEQ ID NO: 587400
ccgggaucucuagguaaca

SEQ ID NO: 789357 - RNA, 19 nt, Artificial Sequence
  Description of Artificial Sequence: Synthetic oligonucleotide
  Antisense strand to SEQ ID NO: 789356
uguuaccuagagaucccgg

SEQ ID NO: 789358 - RNA, 19 nt, Artificial Sequence
  Description of Artificial Sequence: Synthetic oligonucleotide
  Sense strand starting at position 973 of SEQ ID NO: 587400
cgggaucucuagguaacau

SEQ ID NO: 789359 - RNA, 19 nt, Artificial Sequence
  Description of Artificial Sequence: Synthetic oligonucleotide
  Antisense strand to SEQ ID NO: 789358
auguuaccuagagaucccg

SEQ ID NO: 789360 - RNA, 19 nt, Artificial Sequence
  Description of Artificial Sequence: Synthetic oligonucleotide
  Sense strand starting at position 1041 of SEQ ID NO: 587400
acagauggauuccagggaa

SEQ ID NO: 789361 - RNA, 19 nt, Artificial Sequence
  Description of Artificial Sequence: Synthetic oligonucleotide
  Antisense strand to SEQ ID NO: 789360
uucccuggaauccaucugu

SEQ ID NO: 789362 - RNA, 19 nt, Artificial Sequence
  Description of Artificial Sequence: Synthetic oligonucleotide
  Sense strand starting at position 1044 of SEQ ID NO: 587400
gauggauuccagggaaagc

SEQ ID NO: 789363 - RNA, 19 nt, Artificial Sequence
  Description of Artificial Sequence: Synthetic oligonucleotide
  Antisense strand to SEQ ID NO: 789362
gcuuucccuggaauccauc

SEQ ID NO: 789364 - RNA, 19 nt, Artificial Sequence
  Description of Artificial Sequence: Synthetic oligonucleotide
  Sense strand starting at position 1054 of SEQ ID NO: 587400
agggaaagccagcguuaca

SEQ ID NO: 789365 - RNA, 19 nt, Artificial Sequence
  Description of Artificial Sequence: Synthetic oligonucleotide
  Antisense strand to SEQ ID NO: 789364
uguaacgcuggcuuucccu

SEQ ID NO: 789366 - RNA, 19 nt, Artificial Sequence
  Description of Artificial Sequence: Synthetic oligonucleotide
  Sense strand starting at position 1061 of SEQ ID NO: 587400
gccagcguuacagaauuaa

SEQ ID NO: 789367 - RNA, 19 nt, Artificial Sequence
  Description of Artificial Sequence: Synthetic oligonucleotide
  Antisense strand to SEQ ID NO: 789366
uuaauucuguaacgcuggc

SEQ ID NO: 789368 - RNA, 19 nt, Artificial Sequence
  Description of Artificial Sequence: Synthetic oligonucleotide
  Sense strand starting at position 1065 of SEQ ID NO: 587400
gcguuacagaauuaagaaa

SEQ ID NO: 789369 - RNA, 19 nt, Artificial Sequence
  Description of Artificial Sequence: Synthetic oligonucleotide
  Antisense strand to SEQ ID NO: 789368
uuucuuaauucuguaacgc

SEQ ID NO: 789370 - RNA, 19 nt, Artificial Sequence
  Description of Artificial Sequence: Synthetic oligonucleotide
  Sense strand starting at position 1141 of SEQ ID NO: 587400
gggagaugaaguugucacu

SEQ ID NO: 789371 - RNA, 19 nt, Artificial Sequence
  Description of Artificial Sequence: Synthetic oligonucleotide
  Antisense strand to SEQ ID NO: 789370
agugacaacuucaucuccc

SEQ ID NO: 789372 - RNA, 19 nt, Artificial Sequence
  Description of Artificial Sequence: Synthetic oligonucleotide
  Sense strand starting at position 1274 of SEQ ID NO: 587400
ggcggcuaacucuaagauu

SEQ ID NO: 789373 - RNA, 19 nt, Artificial Sequence
  Description of Artificial Sequence: Synthetic oligonucleotide
  Antisense strand to SEQ ID NO: 789372
aaucuuagaguuagccgcc

SEQ ID NO: 789374 - RNA, 19 nt, Artificial Sequence
  Description of Artificial Sequence: Synthetic oligonucleotide
  Sense strand starting at position 1286 of SEQ ID NO: 587400
uaagauugcucucucguua

SEQ ID NO: 789375 - RNA, 19 nt, Artificial Sequence
  Description of Artificial Sequence: Synthetic oligonucleotide
  Antisense strand to SEQ ID NO: 789374
uaacgagagagcaaucuua

SEQ ID NO: 789376 - RNA, 19 nt, Artificial Sequence
  Description of Artificial Sequence: Synthetic oligonucleotide
  Sense strand starting at position 1557 of SEQ ID NO: 587400
agacaugucucacaccaag

SEQ ID NO: 789377 - RNA, 19 nt, Artificial Sequence
  Description of Artificial Sequence: Synthetic oligonucleotide
  Antisense strand to SEQ ID NO: 789376
cuuggugugagacaugucu

SEQ ID NO: 789378 - RNA, 19 nt, Artificial Sequence
  Description of Artificial Sequence: Synthetic oligonucleotide
  Sense strand starting at position 1696 of SEQ ID NO: 587400
gacucagcccucggaaagu

SEQ ID NO: 789379 - RNA, 19 nt, Artificial Sequence
  Description of Artificial Sequence: Synthetic oligonucleotide
  Antisense strand to SEQ ID NO: 789378
acuuuccgagggcugaguc

SEQ ID NO: 789380 - RNA, 19 nt, Artificial Sequence
  Description of Artificial Sequence: Synthetic oligonucleotide
  Sense strand starting at position 2597 of SEQ ID NO: 587400
agagccacuccugguuaau

SEQ ID NO: 789381 - RNA, 19 nt, Artificial Sequence
  Description of Artificial Sequence: Synthetic oligonucleotide
  Antisense strand to SEQ ID NO: 789380
auuaaccaggaguggcucu

SEQ ID NO: 789382 - RNA, 19 nt, Artificial Sequence
  Description of Artificial Sequence: Synthetic oligonucleotide
  Sense strand starting at position 2599 of SEQ ID NO: 587400
agccacuccugguuaauaa

SEQ ID NO: 789383 - RNA, 19 nt, Artificial Sequence
  Description of Artificial Sequence: Synthetic oligonucleotide
  Antisense strand to SEQ ID NO: 789382
uuauuaaccaggaguggcu

SEQ ID NO: 789384 - RNA, 19 nt, Artificial Sequence
  Description of Artificial Sequence: Synthetic oligonucleotide
  Sense strand starting at position 3045 of SEQ ID NO: 587400
ugucaaacaucugucauca

SEQ ID NO: 789385 - RNA, 19 nt, Artificial Sequence
  Description of Artificial Sequence: Synthetic oligonucleotide
  Antisense strand to SEQ ID NO: 789384
ugaugacagauguuugaca

SEQ ID NO: 789386 - RNA, 19 nt, Artificial Sequence
  Description of Artificial Sequence: Synthetic oligonucleotide
  Sense strand starting at position 3201 of SEQ ID NO: 587400
accuaaagauggugaggau

SEQ ID NO: 789387 - RNA, 19 nt, Artificial Sequence
  Description of Artificial Sequence: Synthetic oligonucleotide
  Antisense strand to SEQ ID NO: 789386
auccucaccaucuuuaggu

SEQ ID NO: 789388 - RNA, 19 nt, Artificial Sequence
  Description of Artificial Sequence: Synthetic oligonucleotide
  Sense strand starting at position 3279 of SEQ ID NO: 587400
ugaggccacaguuguuaua

SEQ ID NO: 789389 - RNA, 19 nt, Artificial Sequence
  Description of Artificial Sequence: Synthetic oligonucleotide
  Antisense strand to SEQ ID NO: 789388
uauaacaacuguggccuca

SEQ ID NO: 789390 - RNA, 19 nt, Artificial Sequence
  Description of Artificial Sequence: Synthetic oligonucleotide
  Sense strand starting at position 3290 of SEQ ID NO: 587400
uuguuauagucucugacuu

SEQ ID NO: 789391 - RNA, 19 nt, Artificial Sequence
  Description of Artificial Sequence: Synthetic oligonucleotide
  Antisense strand to SEQ ID NO: 789390
aagucagagacuauaacaa

SEQ ID NO: 789392 - RNA, 19 nt, Artificial Sequence
  Description of Artificial Sequence: Synthetic oligonucleotide
  Sense strand starting at position 3291 of SEQ ID NO: 587400
uguuauagucucugacuuc

SEQ ID NO: 789393 - RNA, 19 nt, Artificial Sequence
  Description of Artificial Sequence: Synthetic oligonucleotide
  Antisense strand to SEQ ID NO: 789392
gaagucagagacuauaaca

SEQ ID NO: 789394 - RNA, 19 nt, Artificial Sequence
  Description of Artificial Sequence: Synthetic oligonucleotide
  Sense strand starting at position 3329 of SEQ ID NO: 587400
ugaacaauugccugucucu

SEQ ID NO: 789395 - RNA, 19 nt, Artificial Sequence
  Description of Artificial Sequence: Synthetic oligonucleotide
  Antisense strand to SEQ ID NO: 789394
agagacaggcaauuguuca

SEQ ID NO: 789396 - RNA, 19 nt, Artificial Sequence
  Description of Artificial Sequence: Synthetic oligonucleotide
  Sense strand starting at position 3880 of SEQ ID NO: 587400
ggcaguggucaagauccaa

SEQ ID NO: 789397 - RNA, 19 nt, Artificial Sequence
  Description of Artificial Sequence: Synthetic oligonucleotide
  Antisense strand to SEQ ID NO: 789396
uuggaucuugaccacugcc

SEQ ID NO: 789398 - RNA, 19 nt, Artificial Sequence
  Description of Artificial Sequence: Synthetic oligonucleotide
  Sense strand starting at position 168 of SEQ ID NO: 587401
ugaaucuucucagcaagac

SEQ ID NO: 789399 - RNA, 19 nt, Artificial Sequence
  Description of Artificial Sequence: Synthetic oligonucleotide
  Antisense strand to SEQ ID NO: 789398
gucuugcugagaagauuca

SEQ ID NO: 789400 - RNA, 19 nt, Artificial Sequence
  Description of Artificial Sequence: Synthetic oligonucleotide
  Sense strand starting at position 225 of SEQ ID NO: 587401
ucaggucucuucuuccuua

SEQ ID NO: 789401 - RNA, 19 nt, Artificial Sequence
  Description of Artificial Sequence: Synthetic oligonucleotide
  Antisense strand to SEQ ID NO: 789400
uaaggaagaagagaccuga

SEQ ID NO: 789402 - RNA, 19 nt, Artificial Sequence
  Description of Artificial Sequence: Synthetic oligonucleotide
  Sense strand starting at position 524 of SEQ ID NO: 587401
cuuuaauucugaccacgua

SEQ ID NO: 789403 - RNA, 19 nt, Artificial Sequence
  Description of Artificial Sequence: Synthetic oligonucleotide
  Antisense strand to SEQ ID NO: 789402
uacguggucagaauuaaag

SEQ ID NO: 789404 - RNA, 19 nt, Artificial Sequence
  Description of Artificial Sequence: Synthetic oligonucleotide
  Sense strand starting at position 525 of SEQ ID NO: 587401
uuuaauucugaccacguau

SEQ ID NO: 789405 - RNA, 19 nt, Artificial Sequence
  Description of Artificial Sequence: Synthetic oligonucleotide
  Antisense strand to SEQ ID NO: 789404
auacguggucagaauuaaa

SEQ ID NO: 789406 - RNA, 19 nt, Artificial Sequence
  Description of Artificial Sequence: Synthetic oligonucleotide
  Sense strand starting at position 560 of SEQ ID NO: 587401
agaaucgauaggugcaauu

SEQ ID NO: 789407 - RNA, 19 nt, Artificial Sequence
  Description of Artificial Sequence: Synthetic oligonucleotide
  Antisense strand to SEQ ID NO: 789406
aauugcaccuaucgauucu

SEQ ID NO: 789408 - RNA, 19 nt, Artificial Sequence
  Description of Artificial Sequence: Synthetic oligonucleotide
  Sense strand starting at position 826 of SEQ ID NO: 587401
ccaguuagaccauaaguac

SEQ ID NO: 789409 - RNA, 19 nt, Artificial Sequence
  Description of Artificial Sequence: Synthetic oligonucleotide
  Antisense strand to SEQ ID NO: 789408
guacuuauggucuaacugg

SEQ ID NO: 789410 - RNA, 19 nt, Artificial Sequence
  Description of Artificial Sequence: Synthetic oligonucleotide
  Sense strand starting at position 829 of SEQ ID NO: 587401
guuagaccauaaguacuau

SEQ ID NO: 789411 - RNA, 19 nt, Artificial Sequence
  Description of Artificial Sequence: Synthetic oligonucleotide
  Antisense strand to SEQ ID NO: 789410
auaguacuuauggucuaac

SEQ ID NO: 789412 - RNA, 19 nt, Artificial Sequence
  Description of Artificial Sequence: Synthetic oligonucleotide
  Sense strand starting at position 1080 of SEQ ID NO: 587401
cgaugugccaauuaacuga

SEQ ID NO: 789413 - RNA, 19 nt, Artificial Sequence
  Description of Artificial Sequence: Synthetic oligonucleotide
  Antisense strand to SEQ ID NO: 789412
ucaguuaauuggcacaucg

SEQ ID NO: 789414 - RNA, 19 nt, Artificial Sequence
  Description of Artificial Sequence: Synthetic oligonucleotide
  Sense strand starting at position 1200 of SEQ ID NO: 587401
aaggaagacuugucagcaa

SEQ ID NO: 789415 - RNA, 19 nt, Artificial Sequence
  Description of Artificial Sequence: Synthetic oligonucleotide
  Antisense strand to SEQ ID NO: 789414
uugcugacaagucuuccuu

SEQ ID NO: 789416 - RNA, 19 nt, Artificial Sequence
  Description of Artificial Sequence: Synthetic oligonucleotide
  Sense strand starting at position 1228 of SEQ ID NO: 587401
ccuagugaagacuaucguu

SEQ ID NO: 789417 - RNA, 19 nt, Artificial Sequence
  Description of Artificial Sequence: Synthetic oligonucleotide
  Antisense strand to SEQ ID NO: 789416
aacgauagucuucacuagg

SEQ ID NO: 789418 - RNA, 19 nt, Artificial Sequence
  Description of Artificial Sequence: Synthetic oligonucleotide
  Sense strand starting at position 1233 of SEQ ID NO: 587401
ugaagacuaucguuggucu

SEQ ID NO: 789419 - RNA, 19 nt, Artificial Sequence
  Description of Artificial Sequence: Synthetic oligonucleotide
  Antisense strand to SEQ ID NO: 789418
agaccaacgauagucuuca

SEQ ID NO: 789420 - RNA, 19 nt, Artificial Sequence
  Description of Artificial Sequence: Synthetic oligonucleotide
  Sense strand starting at position 1234 of SEQ ID NO: 587401
gaagacuaucguuggucuu

SEQ ID NO: 789421 - RNA, 19 nt, Artificial Sequence
  Description of Artificial Sequence: Synthetic oligonucleotide
  Antisense strand to SEQ ID NO: 789420
aagaccaacgauagucuuc

SEQ ID NO: 789422 - RNA, 19 nt, Artificial Sequence
  Description of Artificial Sequence: Synthetic oligonucleotide
  Sense strand starting at position 2178 of SEQ ID NO: 587401
guuauuagugugaaggcgu

SEQ ID NO: 789423 - RNA, 19 nt, Artificial Sequence
  Description of Artificial Sequence: Synthetic oligonucleotide
  Antisense strand to SEQ ID NO: 789422
acgccuucacacuaauaac

SEQ ID NO: 789424 - RNA, 19 nt, Artificial Sequence
  Description of Artificial Sequence: Synthetic oligonucleotide
  Sense strand starting at position 2245 of SEQ ID NO: 587401
ucaacaaucuggccaaaug

SEQ ID NO: 789425 - RNA, 19 nt, Artificial Sequence
  Description of Artificial Sequence: Synthetic oligonucleotide
  Antisense strand to SEQ ID NO: 789424
cauuuggccagauuguuga

SEQ ID NO: 789426 - RNA, 19 nt, Artificial Sequence
  Description of Artificial Sequence: Synthetic oligonucleotide
  Sense strand starting at position 2254 of SEQ ID NO: 587401
uggccaaauggucaacagu

SEQ ID NO: 789427 - RNA, 19 nt, Artificial Sequence
  Description of Artificial Sequence: Synthetic oligonucleotide
  Antisense strand to SEQ ID NO: 789426
acuguugaccauuuggcca

SEQ ID NO: 789428 - RNA, 19 nt, Artificial Sequence
  Description of Artificial Sequence: Synthetic oligonucleotide
  Sense strand starting at position 2264 of SEQ ID NO: 587401
gucaacagugaagguuaua

SEQ ID NO: 789429 - RNA, 19 nt, Artificial Sequence
  Description of Artificial Sequence: Synthetic oligonucleotide
  Antisense strand to SEQ ID NO: 789428
uauaaccuucacuguugac

SEQ ID NO: 789430 - RNA, 19 nt, Artificial Sequence
  Description of Artificial Sequence: Synthetic oligonucleotide
  Sense strand starting at position 2492 of SEQ ID NO: 587401
ugacaucugcugcauuaaa

SEQ ID NO: 789431 - RNA, 19 nt, Artificial Sequence
  Description of Artificial Sequence: Synthetic oligonucleotide
  Antisense strand to SEQ ID NO: 789430
uuuaaugcagcagauguca

SEQ ID NO: 789432 - RNA, 19 nt, Artificial Sequence
  Description of Artificial Sequence: Synthetic oligonucleotide
  Sense strand starting at position 2523 of SEQ ID NO: 587401
augguauuaccucguuuaa

SEQ ID NO: 789433 - RNA, 19 nt, Artificial Sequence
  Description of Artificial Sequence: Synthetic oligonucleotide
  Antisense strand to SEQ ID NO: 789432
uuaaacgagguaauaccau

SEQ ID NO: 789434 - RNA, 19 nt, Artificial Sequence
  Description of Artificial Sequence: Synthetic oligonucleotide
  Sense strand starting at position 2563 of SEQ ID NO: 587401
uagguauugguguucguuu

SEQ ID NO: 789435 - RNA, 19 nt, Artificial Sequence
  Description of Artificial Sequence: Synthetic oligonucleotide
  Antisense strand to SEQ ID NO: 789434
aaacgaacaccaauaccua

SEQ ID NO: 789436 - RNA, 19 nt, Artificial Sequence
  Description of Artificial Sequence: Synthetic oligonucleotide
  Sense strand starting at position 2605 of SEQ ID NO: 587401
aggugaaguuacuugucua

SEQ ID NO: 789437 - RNA, 19 nt, Artificial Sequence
  Description of Artificial Sequence: Synthetic oligonucleotide
  Antisense strand to SEQ ID NO: 789436
uagacaaguaacuucaccu

SEQ ID NO: 789438 - RNA, 19 nt, Artificial Sequence
  Description of Artificial Sequence: Synthetic oligonucleotide
  Sense strand starting at position 2606 of SEQ ID NO: 587401
ggugaaguuacuugucuaa

SEQ ID NO: 789439 - RNA, 19 nt, Artificial Sequence
  Description of Artificial Sequence: Synthetic oligonucleotide
  Antisense strand to SEQ ID NO: 789438
uuagacaaguaacuucacc

SEQ ID NO: 789440 - RNA, 19 nt, Artificial Sequence
  Description of Artificial Sequence: Synthetic oligonucleotide
  Sense strand starting at position 2608 of SEQ ID NO: 587401
ugaaguuacuugucuaagg

SEQ ID NO: 789441 - RNA, 19 nt, Artificial Sequence
  Description of Artificial Sequence: Synthetic oligonucleotide
  Antisense strand to SEQ ID NO: 789440
ccuuagacaaguaacuuca

SEQ ID NO: 789442 - RNA, 19 nt, Artificial Sequence
  Description of Artificial Sequence: Synthetic oligonucleotide
  Sense strand starting at position 2610 of SEQ ID NO: 587401
aaguuacuugucuaaggca

SEQ ID NO: 789443 - RNA, 19 nt, Artificial Sequence
  Description of Artificial Sequence: Synthetic oligonucleotide
  Antisense strand to SEQ ID NO: 789442
ugccuuagacaaguaacuu

SEQ ID NO: 789444 - RNA, 19 nt, Artificial Sequence
  Description of Artificial Sequence: Synthetic oligonucleotide
  Sense strand starting at position 3020 of SEQ ID NO: 587401
cugaaagacugccucuuaa

SEQ ID NO: 789445 - RNA, 19 nt, Artificial Sequence
  Description of Artificial Sequence: Synthetic oligonucleotide
  Antisense strand to SEQ ID NO: 789444
uuaagaggcagucuuucag

SEQ ID NO: 789446 - RNA, 19 nt, Artificial Sequence
  Description of Artificial Sequence: Synthetic oligonucleotide
  Sense strand starting at position 3136 of SEQ ID NO: 587401
cggaguuggucugcaggaa

SEQ ID NO: 789447 - RNA, 19 nt, Artificial Sequence
  Description of Artificial Sequence: Synthetic oligonucleotide
  Antisense strand to SEQ ID NO: 789446
uuccugcagaccaacuccg

SEQ ID NO: 789448 - RNA, 19 nt, Artificial Sequence
  Description of Artificial Sequence: Synthetic oligonucleotide
  Sense strand starting at position 3157 of SEQ ID NO: 587401
cgaaguaauguuuauggca

SEQ ID NO: 789449 - RNA, 19 nt, Artificial Sequence
  Description of Artificial Sequence: Synthetic oligonucleotide
  Antisense strand to SEQ ID NO: 789448
ugccauaaacauuacuucg

SEQ ID NO: 789450 - RNA, 19 nt, Artificial Sequence
  Description of Artificial Sequence: Synthetic oligonucleotide
  Sense strand starting at position 3192 of SEQ ID NO: 587401
agcauuuauucugugcuuu

SEQ ID NO: 789451 - RNA, 19 nt, Artificial Sequence
  Description of Artificial Sequence: Synthetic oligonucleotide
  Antisense strand to SEQ ID NO: 789450
aaagcacagaauaaaugcu

SEQ ID NO: 789452 - RNA, 19 nt, Artificial Sequence
  Description of Artificial Sequence: Synthetic oligonucleotide
  Sense strand starting at position 3193 of SEQ ID NO: 587401
gcauuuauucugugcuuua

SEQ ID NO: 789453 - RNA, 19 nt, Artificial Sequence
  Description of Artificial Sequence: Synthetic oligonucleotide
  Antisense strand to SEQ ID NO: 789452
uaaagcacagaauaaaugc

SEQ ID NO: 789454 - RNA, 19 nt, Artificial Sequence
  Description of Artificial Sequence: Synthetic oligonucleotide
  Sense strand starting at position 3276 of SEQ ID NO: 587401
gagaaagcuuaaguauaga

SEQ ID NO: 789455 - RNA, 19 nt, Artificial Sequence
  Description of Artificial Sequence: Synthetic oligonucleotide
  Antisense strand to SEQ ID NO: 789454
ucuauacuuaagcuuucuc

SEQ ID NO: 789456 - RNA, 19 nt, Artificial Sequence
  Description of Artificial Sequence: Synthetic oligonucleotide
  Sense strand starting at position 3303 of SEQ ID NO: 587401
guaaucugccuagaaaguu

SEQ ID NO: 789457 - RNA, 19 nt, Artificial Sequence
  Description of Artificial Sequence: Synthetic oligonucleotide
  Antisense strand to SEQ ID NO: 789456
aacuuucuaggcagauuac

SEQ ID NO: 789458 - RNA, 19 nt, Artificial Sequence
  Description of Artificial Sequence: Synthetic oligonucleotide
  Sense strand starting at position 3316 of SEQ ID NO: 587401
aaaguuagguagcccuuaa

SEQ ID NO: 789459 - RNA, 19 nt, Artificial Sequence
  Description of Artificial Sequence: Synthetic oligonucleotide
  Antisense strand to SEQ ID NO: 789458
uuaagggcuaccuaacuuu

SEQ ID NO: 789460 - RNA, 19 nt, Artificial Sequence
  Description of Artificial Sequence: Synthetic oligonucleotide
  Sense strand starting at position 3365 of SEQ ID NO: 587401
agagaauaguugcccaacu

SEQ ID NO: 789461 - RNA, 19 nt, Artificial Sequence
  Description of Artificial Sequence: Synthetic oligonucleotide
  Antisense strand to SEQ ID NO: 789460
aguugggcaacuauucucu

SEQ ID NO: 789462 - RNA, 19 nt, Artificial Sequence
  Description of Artificial Sequence: Synthetic oligonucleotide
  Sense strand starting at position 3411 of SEQ ID NO: 587401
ucugaaucugcaugagaca

SEQ ID NO: 789463 - RNA, 19 nt, Artificial Sequence
  Description of Artificial Sequence: Synthetic oligonucleotide
  Antisense strand to SEQ ID NO: 789462
ugucucaugcagauucaga

SEQ ID NO: 789464 - RNA, 19 nt, Artificial Sequence
  Description of Artificial Sequence: Synthetic oligonucleotide
  Sense strand starting at position 3418 of SEQ ID NO: 587401
cugcaugagacagauguua

SEQ ID NO: 789465 - RNA, 19 nt, Artificial Sequence
  Description of Artificial Sequence: Synthetic oligonucleotide
  Antisense strand to SEQ ID NO: 789464
uaacaucugucucaugcag

SEQ ID NO: 789466 - RNA, 19 nt, Artificial Sequence
  Description of Artificial Sequence: Synthetic oligonucleotide
  Sense strand starting at position 3522 of SEQ ID NO: 587401
guucuaggugacugugauu

SEQ ID NO: 789467 - RNA, 19 nt, Artificial Sequence
  Description of Artificial Sequence: Synthetic oligonucleotide
  Antisense strand to SEQ ID NO: 789466
aaucacagucaccuagaac

SEQ ID NO: 789468 - RNA, 19 nt, Artificial Sequence
  Description of Artificial Sequence: Synthetic oligonucleotide
  Sense strand starting at position 3527 of SEQ ID NO: 587401
aggugacugugauucuaag

SEQ ID NO: 789469 - RNA, 19 nt, Artificial Sequence
  Description of Artificial Sequence: Synthetic oligonucleotide
  Antisense strand to SEQ ID NO: 789468
cuuagaaucacagucaccu

SEQ ID NO: 789470 - RNA, 19 nt, Artificial Sequence
  Description of Artificial Sequence: Synthetic oligonucleotide
  Sense strand starting at position 3539 of SEQ ID NO: 587401
uucuaagagccuuauucug

SEQ ID NO: 789471 - RNA, 19 nt, Artificial Sequence
  Description of Artificial Sequence: Synthetic oligonucleotide
  Antisense strand to SEQ ID NO: 789470
cagaauaaggcucuuagaa

SEQ ID NO: 789472 - RNA, 19 nt, Artificial Sequence
  Description of Artificial Sequence: Synthetic oligonucleotide
  Sense strand starting at position 3705 of SEQ ID NO: 587401
uucugucguuugcuaauuu

SEQ ID NO: 789473 - RNA, 19 nt, Artificial Sequence
  Description of Artificial Sequence: Synthetic oligonucleotide
  Antisense strand to SEQ ID NO: 789472
aaauuagcaaacgacagaa

SEQ ID NO: 789474 - RNA, 19 nt, Artificial Sequence
  Description of Artificial Sequence: Synthetic oligonucleotide
  Sense strand starting at position 3728 of SEQ ID NO: 587401
accuuaugcuaguuauuuc

SEQ ID NO: 789475 - RNA, 19 nt, Artificial Sequence
  Description of Artificial Sequence: Synthetic oligonucleotide
  Antisense strand to SEQ ID NO: 789474
gaaauaacuagcauaaggu

SEQ ID NO: 789476 - RNA, 19 nt, Artificial Sequence
  Description of Artificial Sequence: Synthetic oligonucleotide
  Sense strand starting at position 3809 of SEQ ID NO: 587401
cguggcuuaaaugaaauaa

SEQ ID NO: 789477 - RNA, 19 nt, Artificial Sequence
  Description of Artificial Sequence: Synthetic oligonucleotide
  Antisense strand to SEQ ID NO: 789476
uuauuucauuuaagccacg

SEQ ID NO: 789478 - RNA, 19 nt, Artificial Sequence
  Description of Artificial Sequence: Synthetic oligonucleotide
  Sense strand starting at position 7 of SEQ ID NO: 587402
ccagauaagcacugaagua

SEQ ID NO: 789479 - RNA, 19 nt, Artificial Sequence
  Description of Artificial Sequence: Synthetic oligonucleotide
  Antisense strand to SEQ ID NO: 789478
uacuucagugcuuaucugg

SEQ ID NO: 789480 - RNA, 19 nt, Artificial Sequence
  Description of Artificial Sequence: Synthetic oligonucleotide
  Sense strand starting at position 30 of SEQ ID NO: 587402
caaggaucucauuguggag

SEQ ID NO: 789481 - RNA, 19 nt, Artificial Sequence
  Description of Artificial Sequence: Synthetic oligonucleotide
  Antisense strand to SEQ ID NO: 789480
cuccacaaugagauccuug

SEQ ID NO: 789482 - RNA, 19 nt, Artificial Sequence
  Description of Artificial Sequence: Synthetic oligonucleotide
  Sense strand starting at position 55 of SEQ ID NO: 587402
guacaaguuggagaguagu

SEQ ID NO: 789483 - RNA, 19 nt, Artificial Sequence
  Description of Artificial Sequence: Synthetic oligonucleotide
  Antisense strand to SEQ ID NO: 789482
acuacucuccaacuuguac

SEQ ID NO: 789484 - RNA, 19 nt, Artificial Sequence
  Description of Artificial Sequence: Synthetic oligonucleotide
  Sense strand starting at position 204 of SEQ ID NO: 587402
cacucuagcugucuagaga

SEQ ID NO: 789485 - RNA, 19 nt, Artificial Sequence
  Description of Artificial Sequence: Synthetic oligonucleotide
  Antisense strand to SEQ ID NO: 789484
ucucuagacagcuagagug

SEQ ID NO: 789486 - RNA, 19 nt, Artificial Sequence
  Description of Artificial Sequence: Synthetic oligonucleotide
  Sense strand starting at position 205 of SEQ ID NO: 587402
acucuagcugucuagagaa

SEQ ID NO: 789487 - RNA, 19 nt, Artificial Sequence
  Description of Artificial Sequence: Synthetic oligonucleotide
  Antisense strand to SEQ ID NO: 789486
uucucuagacagcuagagu

SEQ ID NO: 789488 - RNA, 19 nt, Artificial Sequence
  Description of Artificial Sequence: Synthetic oligonucleotide
  Sense strand starting at position 237 of SEQ ID NO: 587402
accagauugcagugauaau

SEQ ID NO: 789489 - RNA, 19 nt, Artificial Sequence
  Description of Artificial Sequence: Synthetic oligonucleotide
  Antisense strand to SEQ ID NO: 789488
auuaucacugcaaucuggu

SEQ ID NO: 789490 - RNA, 19 nt, Artificial Sequence
  Description of Artificial Sequence: Synthetic oligonucleotide
  Sense strand starting at position 238 of SEQ ID NO: 587402
ccagauugcagugauaaug

SEQ ID NO: 789491 - RNA, 19 nt, Artificial Sequence
  Description of Artificial Sequence: Synthetic oligonucleotide
  Antisense strand to SEQ ID NO: 789490
cauuaucacugcaaucugg

SEQ ID NO: 789492 - RNA, 19 nt, Artificial Sequence
  Description of Artificial Sequence: Synthetic oligonucleotide
  Sense strand starting at position 253 of SEQ ID NO: 587402
aauggcuugcaauggagaa

SEQ ID NO: 789493 - RNA, 19 nt, Artificial Sequence
  Description of Artificial Sequence: Synthetic oligonucleotide
  Antisense strand to SEQ ID NO: 789492
uucuccauugcaagccauu

SEQ ID NO: 789494 - RNA, 19 nt, Artificial Sequence
  Description of Artificial Sequence: Synthetic oligonucleotide
  Sense strand starting at position 254 of SEQ ID NO: 587402
auggcuugcaauggagaau

SEQ ID NO: 789495 - RNA, 19 nt, Artificial Sequence
  Description of Artificial Sequence: Synthetic oligonucleotide
  Antisense strand to SEQ ID NO: 789494
auucuccauugcaagccau

SEQ ID NO: 789496 - RNA, 19 nt, Artificial Sequence
  Description of Artificial Sequence: Synthetic oligonucleotide
  Sense strand starting at position 276 of SEQ ID NO: 587402
aagggauuguauucuggau

SEQ ID NO: 789497 - RNA, 19 nt, Artificial Sequence
  Description of Artificial Sequence: Synthetic oligonucleotide
  Antisense strand to SEQ ID NO: 789496
auccagaauacaaucccuu

SEQ ID NO: 789498 - RNA, 19 nt, Artificial Sequence
  Description of Artificial Sequence: Synthetic oligonucleotide
  Sense strand starting at position 289 of SEQ ID NO: 587402
cuggauauaugucucaagu

SEQ ID NO: 789499 - RNA, 19 nt, Artificial Sequence
  Description of Artificial Sequence: Synthetic oligonucleotide
  Antisense strand to SEQ ID NO: 789498
acuugagacauauauccag

SEQ ID NO: 789500 - RNA, 19 nt, Artificial Sequence
  Description of Artificial Sequence: Synthetic oligonucleotide
  Sense strand starting at position 295 of SEQ ID NO: 587402
auaugucucaaguagaguc

SEQ ID NO: 789501 - RNA, 19 nt, Artificial Sequence
  Description of Artificial Sequence: Synthetic oligonucleotide
  Antisense strand to SEQ ID NO: 789500
gacucuacuugagacauau

SEQ ID NO: 789502 - RNA, 19 nt, Artificial Sequence
  Description of Artificial Sequence: Synthetic oligonucleotide
  Sense strand starting at position 785 of SEQ ID NO: 587402
caaguaaagggcugaaauu

SEQ ID NO: 789503 - RNA, 19 nt, Artificial Sequence
  Description of Artificial Sequence: Synthetic oligonucleotide
  Antisense strand to SEQ ID NO: 789502
aauuucagcccuuuacuug

SEQ ID NO: 789504 - RNA, 19 nt, Artificial Sequence
  Description of Artificial Sequence: Synthetic oligonucleotide
  Sense strand starting at position 886 of SEQ ID NO: 587402
uggcacucucuugacagaa

SEQ ID NO: 789505 - RNA, 19 nt, Artificial Sequence
  Description of Artificial Sequence: Synthetic oligonucleotide
  Antisense strand to SEQ ID NO: 789504
uucugucaagagagugcca

SEQ ID NO: 789506 - RNA, 19 nt, Artificial Sequence
  Description of Artificial Sequence: Synthetic oligonucleotide
  Sense strand starting at position 899 of SEQ ID NO: 587402
acagaaauguuacucugga

SEQ ID NO: 789507 - RNA, 19 nt, Artificial Sequence
  Description of Artificial Sequence: Synthetic oligonucleotide
  Antisense strand to SEQ ID NO: 789506
uccagaguaacauuucugu

SEQ ID NO: 789508 - RNA, 19 nt, Artificial Sequence
  Description of Artificial Sequence: Synthetic oligonucleotide
  Sense strand starting at position 900 of SEQ ID NO: 587402
cagaaauguuacucuggac

SEQ ID NO: 789509 - RNA, 19 nt, Artificial Sequence
  Description of Artificial Sequence: Synthetic oligonucleotide
  Antisense strand to SEQ ID NO: 789508
guccagaguaacauuucug

SEQ ID NO: 789510 - RNA, 19 nt, Artificial Sequence
  Description of Artificial Sequence: Synthetic oligonucleotide
  Sense strand starting at position 904 of SEQ ID NO: 587402
aauguuacucuggacuguu

SEQ ID NO: 789511 - RNA, 19 nt, Artificial Sequence
  Description of Artificial Sequence: Synthetic oligonucleotide
  Antisense strand to SEQ ID NO: 789510
aacaguccagaguaacauu

SEQ ID NO: 789512 - RNA, 19 nt, Artificial Sequence
  Description of Artificial Sequence: Synthetic oligonucleotide
  Sense strand starting at position 1134 of SEQ ID NO: 587402
cagcuauaaguuggugaag

SEQ ID NO: 789513 - RNA, 19 nt, Artificial Sequence
  Description of Artificial Sequence: Synthetic oligonucleotide
  Antisense strand to SEQ ID NO: 789512
cuucaccaacuuauagcug

SEQ ID NO: 789514 - RNA, 19 nt, Artificial Sequence
  Description of Artificial Sequence: Synthetic oligonucleotide
  Sense strand starting at position 1306 of SEQ ID NO: 587402
ucacuauaccagugaaguc

SEQ ID NO: 789515 - RNA, 19 nt, Artificial Sequence
  Description of Artificial Sequence: Synthetic oligonucleotide
  Antisense strand to SEQ ID NO: 789514
gacuucacugguauaguga

SEQ ID NO: 789516 - RNA, 19 nt, Artificial Sequence
  Description of Artificial Sequence: Synthetic oligonucleotide
  Sense strand starting at position 1542 of SEQ ID NO: 587402
aguaccugaaagcgauaaa

SEQ ID NO: 789517 - RNA, 19 nt, Artificial Sequence
  Description of Artificial Sequence: Synthetic oligonucleotide
  Antisense strand to SEQ ID NO: 789516
uuuaucgcuuucagguacu

SEQ ID NO: 789518 - RNA, 19 nt, Artificial Sequence
  Description of Artificial Sequence: Synthetic oligonucleotide
  Sense strand starting at position 1920 of SEQ ID NO: 587402
ccagaagucccgccgcuua

SEQ ID NO: 789519 - RNA, 19 nt, Artificial Sequence
  Description of Artificial Sequence: Synthetic oligonucleotide
  Antisense strand to SEQ ID NO: 789518
uaagcggcgggacuucugg

SEQ ID NO: 789520 - RNA, 19 nt, Artificial Sequence
  Description of Artificial Sequence: Synthetic oligonucleotide
  Sense strand starting at position 2029 of SEQ ID NO: 587402
agugguugccuggaucaac

SEQ ID NO: 789521 - RNA, 19 nt, Artificial Sequence
  Description of Artificial Sequence: Synthetic oligonucleotide
  Antisense strand to SEQ ID NO: 789520
guugauccaggcaaccacu

SEQ ID NO: 789522 - RNA, 19 nt, Artificial Sequence
  Description of Artificial Sequence: Synthetic oligonucleotide
  Sense strand starting at position 2268 of SEQ ID NO: 587402
uuaacauccucauugggau

SEQ ID NO: 789523 - RNA, 19 nt, Artificial Sequence
  Description of Artificial Sequence: Synthetic oligonucleotide
  Antisense strand to SEQ ID NO: 789522
aucccaaugaggauguuaa

SEQ ID NO: 789524 - RNA, 19 nt, Artificial Sequence
  Description of Artificial Sequence: Synthetic oligonucleotide
  Sense strand starting at position 2408 of SEQ ID NO: 587402
uggcuaccuuagguaugaa

SEQ ID NO: 789525 - RNA, 19 nt, Artificial Sequence
  Description of Artificial Sequence: Synthetic oligonucleotide
  Antisense strand to SEQ ID NO: 789524
uucauaccuaagguagcca

SEQ ID NO: 789526 - RNA, 19 nt, Artificial Sequence
  Description of Artificial Sequence: Synthetic oligonucleotide
  Sense strand starting at position 2548 of SEQ ID NO: 587402
cuuguauaagaaggaaucu

SEQ ID NO: 789527 - RNA, 19 nt, Artificial Sequence
  Description of Artificial Sequence: Synthetic oligonucleotide
  Antisense strand to SEQ ID NO: 789526
agauuccuucuuauacaag

SEQ ID NO: 789528 - RNA, 19 nt, Artificial Sequence
  Description of Artificial Sequence: Synthetic oligonucleotide
  Sense strand starting at position 2920 of SEQ ID NO: 587402
gggccagcaguuuaagauu

SEQ ID NO: 789529 - RNA, 19 nt, Artificial Sequence
  Description of Artificial Sequence: Synthetic oligonucleotide
  Antisense strand to SEQ ID NO: 789528
aaucuuaaacugcuggccc

SEQ ID NO: 789530 - RNA, 19 nt, Artificial Sequence
  Description of Artificial Sequence: Synthetic oligonucleotide
  Sense strand starting at position 2928 of SEQ ID NO: 587402
aguuuaagauugcuaaagu

SEQ ID NO: 789531 - RNA, 19 nt, Artificial Sequence
  Description of Artificial Sequence: Synthetic oligonucleotide
  Antisense strand to SEQ ID NO: 789530
acuuuagcaaucuuaaacu

SEQ ID NO: 789532 - RNA, 19 nt, Artificial Sequence
  Description of Artificial Sequence: Synthetic oligonucleotide
  Sense strand starting at position 3052 of SEQ ID NO: 587402
aucaaacggaagugucauu

SEQ ID NO: 789533 - RNA, 19 nt, Artificial Sequence
  Description of Artificial Sequence: Synthetic oligonucleotide
  Antisense strand to SEQ ID NO: 789532
aaugacacuuccguuugau

SEQ ID NO: 789534 - RNA, 19 nt, Artificial Sequence
  Description of Artificial Sequence: Synthetic oligonucleotide
  Sense strand starting at position 3101 of SEQ ID NO: 587402
guaagaauuaacuggagca

SEQ ID NO: 789535 - RNA, 19 nt, Artificial Sequence
  Description of Artificial Sequence: Synthetic oligonucleotide
  Antisense strand to SEQ ID NO: 789534
ugcuccaguuaauucuuac

SEQ ID NO: 789536 - RNA, 19 nt, Artificial Sequence
  Description of Artificial Sequence: Synthetic oligonucleotide
  Sense strand starting at position 3113 of SEQ ID NO: 587402
uggagcaguguuugauaga

SEQ ID NO: 789537 - RNA, 19 nt, Artificial Sequence
  Description of Artificial Sequence: Synthetic oligonucleotide
  Antisense strand to SEQ ID NO: 789536
ucuaucaaacacugcucca

SEQ ID NO: 789538 - RNA, 19 nt, Artificial Sequence
  Description of Artificial Sequence: Synthetic oligonucleotide
  Sense strand starting at position 3118 of SEQ ID NO: 587402
caguguuugauagacucga

SEQ ID NO: 789539 - RNA, 19 nt, Artificial Sequence
  Description of Artificial Sequence: Synthetic oligonucleotide
  Antisense strand to SEQ ID NO: 789538
ucgagucuaucaaacacug

SEQ ID NO: 789540 - RNA, 19 nt, Artificial Sequence
  Description of Artificial Sequence: Synthetic oligonucleotide
  Sense strand starting at position 3123 of SEQ ID NO: 587402
uuugauagacucgaagcaa

SEQ ID NO: 789541 - RNA, 19 nt, Artificial Sequence
  Description of Artificial Sequence: Synthetic oligonucleotide
  Antisense strand to SEQ ID NO: 789540
uugcuucgagucuaucaaa

SEQ ID NO: 789542 - RNA, 19 nt, Artificial Sequence
  Description of Artificial Sequence: Synthetic oligonucleotide
  Sense strand starting at position 3360 of SEQ ID NO: 587402
acagcagaguuuccaacau

SEQ ID NO: 789543 - RNA, 19 nt, Artificial Sequence
  Description of Artificial Sequence: Synthetic oligonucleotide
  Antisense strand to SEQ ID NO: 789542
auguuggaaacucugcugu

SEQ ID NO: 789544 - RNA, 19 nt, Artificial Sequence
  Description of Artificial Sequence: Synthetic oligonucleotide
  Sense strand starting at position 3460 of SEQ ID NO: 587402
uuaaauauuccacagugua

SEQ ID NO: 789545 - RNA, 19 nt, Artificial Sequence
  Description of Artificial Sequence: Synthetic oligonucleotide
  Antisense strand to SEQ ID NO: 789544
uacacuguggaauauuuaa

SEQ ID NO: 789546 - RNA, 19 nt, Artificial Sequence
  Description of Artificial Sequence: Synthetic oligonucleotide
  Sense strand starting at position 3510 of SEQ ID NO: 587402
auagcaaaucuacgaagaa

SEQ ID NO: 789547 - RNA, 19 nt, Artificial Sequence
  Description of Artificial Sequence: Synthetic oligonucleotide
  Antisense strand to SEQ ID NO: 789546
uucuucguagauuugcuau

SEQ ID NO: 789548 - RNA, 19 nt, Artificial Sequence
  Description of Artificial Sequence: Synthetic oligonucleotide
  Sense strand starting at position 3622 of SEQ ID NO: 587402
acgauauugccugagguuu

SEQ ID NO: 789549 - RNA, 19 nt, Artificial Sequence
  Description of Artificial Sequence: Synthetic oligonucleotide
  Antisense strand to SEQ ID NO: 789548
aaaccucaggcaauaucgu

SEQ ID NO: 789550 - RNA, 19 nt, Artificial Sequence
  Description of Artificial Sequence: Synthetic oligonucleotide
  Sense strand starting at position 3636 of SEQ ID NO: 587402
gguuuauucuguuuauuuc

SEQ ID NO: 789551 - RNA, 19 nt, Artificial Sequence
  Description of Artificial Sequence: Synthetic oligonucleotide
  Antisense strand to SEQ ID NO: 789550
gaaauaaacagaauaaacc

SEQ ID NO: 789552 - RNA, 19 nt, Artificial Sequence
  Description of Artificial Sequence: Synthetic oligonucleotide
  Sense strand starting at position 3746 of SEQ ID NO: 587402
uaaggaaaguuucucugau

SEQ ID NO: 789553 - RNA, 19 nt, Artificial Sequence
  Description of Artificial Sequence: Synthetic oligonucleotide
  Antisense strand to SEQ ID NO: 789552
aucagagaaacuuuccuua

SEQ ID NO: 789554 - RNA, 19 nt, Artificial Sequence
  Description of Artificial Sequence: Synthetic oligonucleotide
  Sense strand starting at position 3747 of SEQ ID NO: 587402
aaggaaaguuucucugaua

SEQ ID NO: 789555 - RNA, 19 nt, Artificial Sequence
  Description of Artificial Sequence: Synthetic oligonucleotide
  Antisense strand to SEQ ID NO: 789554
uaucagagaaacuuuccuu

SEQ ID NO: 789556 - RNA, 19 nt, Artificial Sequence
  Description of Artificial Sequence: Synthetic oligonucleotide
  Sense strand starting at position 3748 of SEQ ID NO: 587402
aggaaaguuucucugauaa

SEQ ID NO: 789557 - RNA, 19 nt, Artificial Sequence
  Description of Artificial Sequence: Synthetic oligonucleotide
  Antisense strand to SEQ ID NO: 789556
uuaucagagaaacuuuccu

SEQ ID NO: 789558 - RNA, 19 nt, Artificial Sequence
  Description of Artificial Sequence: Synthetic oligonucleotide
  Sense strand starting at position 401 of SEQ ID NO: 587403
cugacucucgcugagguua

SEQ ID NO: 789559 - RNA, 19 nt, Artificial Sequence
  Description of Artificial Sequence: Synthetic oligonucleotide
  Antisense strand to SEQ ID NO: 789558
uaaccucagcgagagucag

SEQ ID NO: 789560 - RNA, 19 nt, Artificial Sequence
  Description of Artificial Sequence: Synthetic oligonucleotide
  Sense strand starting at position 406 of SEQ ID NO: 587403
ucucgcugagguuaucuua

SEQ ID NO: 789561 - RNA, 19 nt, Artificial Sequence
  Description of Artificial Sequence: Synthetic oligonucleotide
  Antisense strand to SEQ ID NO: 789560
uaagauaaccucagcgaga

SEQ ID NO: 789562 - RNA, 19 nt, Artificial Sequence
  Description of Artificial Sequence: Synthetic oligonucleotide
  Sense strand starting at position 409 of SEQ ID NO: 587403
cgcugagguuaucuuaucu

SEQ ID NO: 789563 - RNA, 19 nt, Artificial Sequence
  Description of Artificial Sequence: Synthetic oligonucleotide
  Antisense strand to SEQ ID NO: 789562
agauaagauaaccucagcg

SEQ ID NO: 789564 - RNA, 19 nt, Artificial Sequence
  Description of Artificial Sequence: Synthetic oligonucleotide
  Sense strand starting at position 502 of SEQ ID NO: 587403
gaaggaaagcucuguucuu

SEQ ID NO: 789565 - RNA, 19 nt, Artificial Sequence
  Description of Artificial Sequence: Synthetic oligonucleotide
  Antisense strand to SEQ ID NO: 789564
aagaacagagcuuuccuuc

SEQ ID NO: 789566 - RNA, 19 nt, Artificial Sequence
  Description of Artificial Sequence: Synthetic oligonucleotide
  Sense strand starting at position 511 of SEQ ID NO: 587403
cucuguucuugcucacuga

SEQ ID NO: 789567 - RNA, 19 nt, Artificial Sequence
  Description of Artificial Sequence: Synthetic oligonucleotide
  Antisense strand to SEQ ID NO: 789566
ucagugagcaagaacagag

SEQ ID NO: 789568 - RNA, 19 nt, Artificial Sequence
  Description of Artificial Sequence: Synthetic oligonucleotide
  Sense strand starting at position 514 of SEQ ID NO: 587403
uguucuugcucacugagag

SEQ ID NO: 789569 - RNA, 19 nt, Artificial Sequence
  Description of Artificial Sequence: Synthetic oligonucleotide
  Antisense strand to SEQ ID NO: 789568
cucucagugagcaagaaca

SEQ ID NO: 789570 - RNA, 19 nt, Artificial Sequence
  Description of Artificial Sequence: Synthetic oligonucleotide
  Sense strand starting at position 515 of SEQ ID NO: 587403
guucuugcucacugagaga

SEQ ID NO: 789571 - RNA, 19 nt, Artificial Sequence
  Description of Artificial Sequence: Synthetic oligonucleotide
  Antisense strand to SEQ ID NO: 789570
ucucucagugagcaagaac

SEQ ID NO: 789572 - RNA, 19 nt, Artificial Sequence
  Description of Artificial Sequence: Synthetic oligonucleotide
  Sense strand starting at position 566 of SEQ ID NO: 587403
gcccacuucugccuugaua

SEQ ID NO: 789573 - RNA, 19 nt, Artificial Sequence
  Description of Artificial Sequence: Synthetic oligonucleotide
  Antisense strand to SEQ ID NO: 789572
uaucaaggcagaagugggc

SEQ ID NO: 789574 - RNA, 19 nt, Artificial Sequence
  Description of Artificial Sequence: Synthetic oligonucleotide
  Sense strand starting at position 1342 of SEQ ID NO: 587403
gugaccuugucaggugacu

SEQ ID NO: 789575 - RNA, 19 nt, Artificial Sequence
  Description of Artificial Sequence: Synthetic oligonucleotide
  Antisense strand to SEQ ID NO: 789574
agucaccugacaaggucac

SEQ ID NO: 789576 - RNA, 19 nt, Artificial Sequence
  Description of Artificial Sequence: Synthetic oligonucleotide
  Sense strand starting at position 1478 of SEQ ID NO: 587403
gcccuugggucagagguua

SEQ ID NO: 789577 - RNA, 19 nt, Artificial Sequence
  Description of Artificial Sequence: Synthetic oligonucleotide
  Antisense strand to SEQ ID NO: 789576
uaaccucugacccaagggc

SEQ ID NO: 789578 - RNA, 19 nt, Artificial Sequence
  Description of Artificial Sequence: Synthetic oligonucleotide
  Sense strand starting at position 2307 of SEQ ID NO: 587403
gcgagucacuccgggcaau

SEQ ID NO: 789579 - RNA, 19 nt, Artificial Sequence
  Description of Artificial Sequence: Synthetic oligonucleotide
  Antisense strand to SEQ ID NO: 789578
auugcccggagugacucgc

SEQ ID NO: 789580 - RNA, 19 nt, Artificial Sequence
  Description of Artificial Sequence: Synthetic oligonucleotide
  Sense strand starting at position 2808 of SEQ ID NO: 587403
ucaagaggcuucugugcau

SEQ ID NO: 789581 - RNA, 19 nt, Artificial Sequence
  Description of Artificial Sequence: Synthetic oligonucleotide
  Antisense strand to SEQ ID NO: 789580
augcacagaagccucuuga

SEQ ID NO: 789582 - RNA, 19 nt, Artificial Sequence
  Description of Artificial Sequence: Synthetic oligonucleotide
  Sense strand starting at position 3285 of SEQ ID NO: 587403
ccagacaucuuguauguua

SEQ ID NO: 789583 - RNA, 19 nt, Artificial Sequence
  Description of Artificial Sequence: Synthetic oligonucleotide
  Antisense strand to SEQ ID NO: 789582
uaacauacaagaugucugg

SEQ ID NO: 789584 - RNA, 19 nt, Artificial Sequence
  Description of Artificial Sequence: Synthetic oligonucleotide
  Sense strand starting at position 3287 of SEQ ID NO: 587403
agacaucuuguauguuaaa

SEQ ID NO: 789585 - RNA, 19 nt, Artificial Sequence
  Description of Artificial Sequence: Synthetic oligonucleotide
  Antisense strand to SEQ ID NO: 789584
uuuaacauacaagaugucu

SEQ ID NO: 789586 - RNA, 19 nt, Artificial Sequence
  Description of Artificial Sequence: Synthetic oligonucleotide
  Sense strand starting at position 3382 of SEQ ID NO: 587403
gugagaacauccuggaucu

SEQ ID NO: 789587 - RNA, 19 nt, Artificial Sequence
  Description of Artificial Sequence: Synthetic oligonucleotide
  Antisense strand to SEQ ID NO: 789586
agauccaggauguucucac

SEQ ID NO: 789588 - RNA, 19 nt, Artificial Sequence
  Description of Artificial Sequence: Synthetic oligonucleotide
  Sense strand starting at position 3474 of SEQ ID NO: 587403
agcacuucucuggaagcaa

SEQ ID NO: 789589 - RNA, 19 nt, Artificial Sequence
  Description of Artificial Sequence: Synthetic oligonucleotide
  Antisense strand to SEQ ID NO: 789588
uugcuuccagagaagugcu

SEQ ID NO: 789590 - RNA, 19 nt, Artificial Sequence
  Description of Artificial Sequence: Synthetic oligonucleotide
  Sense strand starting at position 3620 of SEQ ID NO: 587403
gugacauauucuugucacc

SEQ ID NO: 789591 - RNA, 19 nt, Artificial Sequence
  Description of Artificial Sequence: Synthetic oligonucleotide
  Antisense strand to SEQ ID NO: 789590
ggugacaagaauaugucac

SEQ ID NO: 789592 - RNA, 19 nt, Artificial Sequence
  Description of Artificial Sequence: Synthetic oligonucleotide
  Sense strand starting at position 3862 of SEQ ID NO: 587403
cccagaccugucugaguau

SEQ ID NO: 789593 - RNA, 19 nt, Artificial Sequence
  Description of Artificial Sequence: Synthetic oligonucleotide
  Antisense strand to SEQ ID NO: 789592
auacucagacaggucuggg

SEQ ID NO: 789594 - RNA, 19 nt, Artificial Sequence
  Description of Artificial Sequence: Synthetic oligonucleotide
  Sense strand starting at position 3865 of SEQ ID NO: 587403
agaccugucugaguaugga

SEQ ID NO: 789595 - RNA, 19 nt, Artificial Sequence
  Description of Artificial Sequence: Synthetic oligonucleotide
  Antisense strand to SEQ ID NO: 789594
uccauacucagacaggucu

SEQ ID NO: 789596 - RNA, 19 nt, Artificial Sequence
  Description of Artificial Sequence: Synthetic oligonucleotide
  Sense strand starting at position 3 of SEQ ID NO: 587404
ugauuacaacuugagucuu

SEQ ID NO: 789597 - RNA, 19 nt, Artificial Sequence
  Description of Artificial Sequence: Synthetic oligonucleotide
  Antisense strand to SEQ ID NO: 789596
aagacucaaguuguaauca

SEQ ID NO: 789598 - RNA, 19 nt, Artificial Sequence
  Description of Artificial Sequence: Synthetic oligonucleotide
  Sense strand starting at position 57 of SEQ ID NO: 587404
agcuguugccaggaaauaa

SEQ ID NO: 789599 - RNA, 19 nt, Artificial Sequence
  Description of Artificial Sequence: Synthetic oligonucleotide
  Antisense strand to SEQ ID NO: 789598
uuauuuccuggcaacagcu

SEQ ID NO: 789600 - RNA, 19 nt, Artificial Sequence
  Description of Artificial Sequence: Synthetic oligonucleotide
  Sense strand starting at position 439 of SEQ ID NO: 587404
gagugccuacccuggaaua

SEQ ID NO: 789601 - RNA, 19 nt, Artificial Sequence
  Description of Artificial Sequence: Synthetic oligonucleotide
  Antisense strand to SEQ ID NO: 789600
uauuccaggguaggcacuc

SEQ ID NO: 789602 - RNA, 19 nt, Artificial Sequence
  Description of Artificial Sequence: Synthetic oligonucleotide
  Sense strand starting at position 440 of SEQ ID NO: 587404
agugccuacccuggaauau

SEQ ID NO: 789603 - RNA, 19 nt, Artificial Sequence
  Description of Artificial Sequence: Synthetic oligonucleotide
  Antisense strand to SEQ ID NO: 789602
auauuccaggguaggcacu

SEQ ID NO: 789604 - RNA, 19 nt, Artificial Sequence
  Description of Artificial Sequence: Synthetic oligonucleotide
  Sense strand starting at position 441 of SEQ ID NO: 587404
gugccuacccuggaauauu

SEQ ID NO: 789605 - RNA, 19 nt, Artificial Sequence
  Description of Artificial Sequence: Synthetic oligonucleotide
  Antisense strand to SEQ ID NO: 789604
aauauuccaggguaggcac

SEQ ID NO: 789606 - RNA, 19 nt, Artificial Sequence
  Description of Artificial Sequence: Synthetic oligonucleotide
  Sense strand starting at position 452 of SEQ ID NO: 587404
ggaauauucuagucuaugg

SEQ ID NO: 789607 - RNA, 19 nt, Artificial Sequence
  Description of Artificial Sequence: Synthetic oligonucleotide
  Antisense strand to SEQ ID NO: 789606
ccauagacuagaauauucc

SEQ ID NO: 789608 - RNA, 19 nt, Artificial Sequence
  Description of Artificial Sequence: Synthetic oligonucleotide
  Sense strand starting at position 478 of SEQ ID NO: 587404
acacuaccuucgguuuaaa

SEQ ID NO: 789609 - RNA, 19 nt, Artificial Sequence
  Description of Artificial Sequence: Synthetic oligonucleotide
  Antisense strand to SEQ ID NO: 789608
uuuaaaccgaagguagugu

SEQ ID NO: 789610 - RNA, 19 nt, Artificial Sequence
  Description of Artificial Sequence: Synthetic oligonucleotide
  Sense strand starting at position 682 of SEQ ID NO: 587404
gggaaucuguuaucacaag

SEQ ID NO: 789611 - RNA, 19 nt, Artificial Sequence
  Description of Artificial Sequence: Synthetic oligonucleotide
  Antisense strand to SEQ ID NO: 789610
cuugugauaacagauuccc

SEQ ID NO: 789612 - RNA, 19 nt, Artificial Sequence
  Description of Artificial Sequence: Synthetic oligonucleotide
  Sense strand starting at position 801 of SEQ ID NO: 587404
cuuacucuccaguggaaau

SEQ ID NO: 789613 - RNA, 19 nt, Artificial Sequence
  Description of Artificial Sequence: Synthetic oligonucleotide
  Antisense strand to SEQ ID NO: 789612
auuuccacuggagaguaag

SEQ ID NO: 789614 - RNA, 19 nt, Artificial Sequence
  Description of Artificial Sequence: Synthetic oligonucleotide
  Sense strand starting at position 870 of SEQ ID NO: 587404
ugcaaaggcuauuugaguu

SEQ ID NO: 789615 - RNA, 19 nt, Artificial Sequence
  Description of Artificial Sequence: Synthetic oligonucleotide
  Antisense strand to SEQ ID NO: 789614
aacucaaauagccuuugca

SEQ ID NO: 789616 - RNA, 19 nt, Artificial Sequence
  Description of Artificial Sequence: Synthetic oligonucleotide
  Sense strand starting at position 971 of SEQ ID NO: 587404
acaggugaguaugagauuu

SEQ ID NO: 789617 - RNA, 19 nt, Artificial Sequence
  Description of Artificial Sequence: Synthetic oligonucleotide
  Antisense strand to SEQ ID NO: 789616
aaaucucauacucaccugu

SEQ ID NO: 789618 - RNA, 19 nt, Artificial Sequence
  Description of Artificial Sequence: Synthetic oligonucleotide
  Sense strand starting at position 1111 of SEQ ID NO: 587404
agugaacuguccuuugauu

SEQ ID NO: 789619 - RNA, 19 nt, Artificial Sequence
  Description of Artificial Sequence: Synthetic oligonucleotide
  Antisense strand to SEQ ID NO: 789618
aaucaaaggacaguucacu

SEQ ID NO: 789620 - RNA, 19 nt, Artificial Sequence
  Description of Artificial Sequence: Synthetic oligonucleotide
  Sense strand starting at position 1218 of SEQ ID NO: 587404
guagguguagcauauauga

SEQ ID NO: 789621 - RNA, 19 nt, Artificial Sequence
  Description of Artificial Sequence: Synthetic oligonucleotide
  Antisense strand to SEQ ID NO: 789620
ucauauaugcuacaccuac

SEQ ID NO: 789622 - RNA, 19 nt, Artificial Sequence
  Description of Artificial Sequence: Synthetic oligonucleotide
  Sense strand starting at position 1220 of SEQ ID NO: 587404
agguguagcauauaugaua

SEQ ID NO: 789623 - RNA, 19 nt, Artificial Sequence
  Description of Artificial Sequence: Synthetic oligonucleotide
  Antisense strand to SEQ ID NO: 789622
uaucauauaugcuacaccu

SEQ ID NO: 789624 - RNA, 19 nt, Artificial Sequence
  Description of Artificial Sequence: Synthetic oligonucleotide
  Sense strand starting at position 1473 of SEQ ID NO: 587404
ggaagaguacaugacguau

SEQ ID NO: 789625 - RNA, 19 nt, Artificial Sequence
  Description of Artificial Sequence: Synthetic oligonucleotide
  Antisense strand to SEQ ID NO: 789624
auacgucauguacucuucc

SEQ ID NO: 789626 - RNA, 19 nt, Artificial Sequence
  Description of Artificial Sequence: Synthetic oligonucleotide
  Sense strand starting at position 1558 of SEQ ID NO: 587404
aaacguauggccgaaugau

SEQ ID NO: 789627 - RNA, 19 nt, Artificial Sequence
  Description of Artificial Sequence: Synthetic oligonucleotide
  Antisense strand to SEQ ID NO: 789626
aucauucggccauacguuu

SEQ ID NO: 789628 - RNA, 19 nt, Artificial Sequence
  Description of Artificial Sequence: Synthetic oligonucleotide
  Sense strand starting at position 2025 of SEQ ID NO: 587404
aguaaaccuuagucugagu

SEQ ID NO: 789629 - RNA, 19 nt, Artificial Sequence
  Description of Artificial Sequence: Synthetic oligonucleotide
  Antisense strand to SEQ ID NO: 789628
acucagacuaagguuuacu

SEQ ID NO: 789630 - RNA, 19 nt, Artificial Sequence
  Description of Artificial Sequence: Synthetic oligonucleotide
  Sense strand starting at position 2030 of SEQ ID NO: 587404
accuuagucugaguaaggu

SEQ ID NO: 789631 - RNA, 19 nt, Artificial Sequence
  Description of Artificial Sequence: Synthetic oligonucleotide
  Antisense strand to SEQ ID NO: 789630
accuuacucagacuaaggu

SEQ ID NO: 789632 - RNA, 19 nt, Artificial Sequence
  Description of Artificial Sequence: Synthetic oligonucleotide
  Sense strand starting at position 2049 of SEQ ID NO: 587404
gcgugaaaucggcugagca

SEQ ID NO: 789633 - RNA, 19 nt, Artificial Sequence
  Description of Artificial Sequence: Synthetic oligonucleotide
  Antisense strand to SEQ ID NO: 789632
ugcucagccgauuucacgc

SEQ ID NO: 789634 - RNA, 19 nt, Artificial Sequence
  Description of Artificial Sequence: Synthetic oligonucleotide
  Sense strand starting at position 2051 of SEQ ID NO: 587404
gugaaaucggcugagcaaa

SEQ ID NO: 789635 - RNA, 19 nt, Artificial Sequence
  Description of Artificial Sequence: Synthetic oligonucleotide
  Antisense strand to SEQ ID NO: 789634
uuugcucagccgauuucac

SEQ ID NO: 789636 - RNA, 19 nt, Artificial Sequence
  Description of Artificial Sequence: Synthetic oligonucleotide
  Sense strand starting at position 2308 of SEQ ID NO: 587404
gcaggaugucuguaucaaa

SEQ ID NO: 789637 - RNA, 19 nt, Artificial Sequence
  Description of Artificial Sequence: Synthetic oligonucleotide
  Antisense strand to SEQ ID NO: 789636
uuugauacagacauccugc

SEQ ID NO: 789638 - RNA, 19 nt, Artificial Sequence
  Description of Artificial Sequence: Synthetic oligonucleotide
  Sense strand starting at position 2385 of SEQ ID NO: 587404
gggagucugcccuaagauc

SEQ ID NO: 789639 - RNA, 19 nt, Artificial Sequence
  Description of Artificial Sequence: Synthetic oligonucleotide
  Antisense strand to SEQ ID NO: 789638
gaucuuagggcagacuccc

SEQ ID NO: 789640 - RNA, 19 nt, Artificial Sequence
  Description of Artificial Sequence: Synthetic oligonucleotide
  Sense strand starting at position 2414 of SEQ ID NO: 587404
gcuaauugugcucaaagaa

SEQ ID NO: 789641 - RNA, 19 nt, Artificial Sequence
  Description of Artificial Sequence: Synthetic oligonucleotide
  Antisense strand to SEQ ID NO: 789640
uucuuugagcacaauuagc

SEQ ID NO: 789642 - RNA, 19 nt, Artificial Sequence
  Description of Artificial Sequence: Synthetic oligonucleotide
  Sense strand starting at position 2449 of SEQ ID NO: 587404
gccaauaugcuauagagga

SEQ ID NO: 789643 - RNA, 19 nt, Artificial Sequence
  Description of Artificial Sequence: Synthetic oligonucleotide
  Antisense strand to SEQ ID NO: 789642
uccucuauagcauauuggc

SEQ ID NO: 789644 - RNA, 19 nt, Artificial Sequence
  Description of Artificial Sequence: Synthetic oligonucleotide
  Sense strand starting at position 2643 of SEQ ID NO: 587404
uugggaaauuacuuuccuu

SEQ ID NO: 789645 - RNA, 19 nt, Artificial Sequence
  Description of Artificial Sequence: Synthetic oligonucleotide
  Antisense strand to SEQ ID NO: 789644
aaggaaaguaauuucccaa

SEQ ID NO: 789646 - RNA, 19 nt, Artificial Sequence
  Description of Artificial Sequence: Synthetic oligonucleotide
  Sense strand starting at position 2670 of SEQ ID NO: 587404
aauugaacuguuugaaguu

SEQ ID NO: 789647 - RNA, 19 nt, Artificial Sequence
  Description of Artificial Sequence: Synthetic oligonucleotide
  Antisense strand to SEQ ID NO: 789646
aacuucaaacaguucaauu

SEQ ID NO: 789648 - RNA, 19 nt, Artificial Sequence
  Description of Artificial Sequence: Synthetic oligonucleotide
  Sense strand starting at position 2684 of SEQ ID NO: 587404
aaguuaggguuauuaggaa

SEQ ID NO: 789649 - RNA, 19 nt, Artificial Sequence
  Description of Artificial Sequence: Synthetic oligonucleotide
  Antisense strand to SEQ ID NO: 789648
uuccuaauaacccuaacuu

SEQ ID NO: 789650 - RNA, 19 nt, Artificial Sequence
  Description of Artificial Sequence: Synthetic oligonucleotide
  Sense strand starting at position 2852 of SEQ ID NO: 587404
gauccaagucucuggcuga

SEQ ID NO: 789651 - RNA, 19 nt, Artificial Sequence
  Description of Artificial Sequence: Synthetic oligonucleotide
  Antisense strand to SEQ ID NO: 789650
ucagccagagacuuggauc

SEQ ID NO: 789652 - RNA, 19 nt, Artificial Sequence
  Description of Artificial Sequence: Synthetic oligonucleotide
  Sense strand starting at position 2855 of SEQ ID NO: 587404
ccaagucucuggcugauuu

SEQ ID NO: 789653 - RNA, 19 nt, Artificial Sequence
  Description of Artificial Sequence: Synthetic oligonucleotide
  Antisense strand to SEQ ID NO: 789652
aaaucagccagagacuugg

SEQ ID NO: 789654 - RNA, 19 nt, Artificial Sequence
  Description of Artificial Sequence: Synthetic oligonucleotide
  Sense strand starting at position 2935 of SEQ ID NO: 587404
ucccuuuccugucugauuu

SEQ ID NO: 789655 - RNA, 19 nt, Artificial Sequence
  Description of Artificial Sequence: Synthetic oligonucleotide
  Antisense strand to SEQ ID NO: 789654
aaaucagacaggaaaggga

SEQ ID NO: 789656 - RNA, 19 nt, Artificial Sequence
  Description of Artificial Sequence: Synthetic oligonucleotide
  Sense strand starting at position 2962 of SEQ ID NO: 587404
uuggacuauuagucaggua

SEQ ID NO: 789657 - RNA, 19 nt, Artificial Sequence
  Description of Artificial Sequence: Synthetic oligonucleotide
  Antisense strand to SEQ ID NO: 789656
uaccugacuaauaguccaa

SEQ ID NO: 789658 - RNA, 19 nt, Artificial Sequence
  Description of Artificial Sequence: Synthetic oligonucleotide
  Sense strand starting at position 3190 of SEQ ID NO: 587404
cagcauucugugcauggga

SEQ ID NO: 789659 - RNA, 19 nt, Artificial Sequence
  Description of Artificial Sequence: Synthetic oligonucleotide
  Antisense strand to SEQ ID NO: 789658
ucccaugcacagaaugcug

SEQ ID NO: 789660 - RNA, 19 nt, Artificial Sequence
  Description of Artificial Sequence: Synthetic oligonucleotide
  Sense strand starting at position 3243 of SEQ ID NO: 587404
gagggugaugcaggugauu

SEQ ID NO: 789661 - RNA, 19 nt, Artificial Sequence
  Description of Artificial Sequence: Synthetic oligonucleotide
  Antisense strand to SEQ ID NO: 789660
aaucaccugcaucacccuc

SEQ ID NO: 789662 - RNA, 19 nt, Artificial Sequence
  Description of Artificial Sequence: Synthetic oligonucleotide
  Sense strand starting at position 3304 of SEQ ID NO: 587404
gcuugucuaccucucguau

SEQ ID NO: 789663 - RNA, 19 nt, Artificial Sequence
  Description of Artificial Sequence: Synthetic oligonucleotide
  Antisense strand to SEQ ID NO: 789662
auacgagagguagacaagc

SEQ ID NO: 789664 - RNA, 19 nt, Artificial Sequence
  Description of Artificial Sequence: Synthetic oligonucleotide
  Sense strand starting at position 3312 of SEQ ID NO: 587404
accucucguauggaaguua

SEQ ID NO: 789665 - RNA, 19 nt, Artificial Sequence
  Description of Artificial Sequence: Synthetic oligonucleotide
  Antisense strand to SEQ ID NO: 789664
uaacuuccauacgagaggu

SEQ ID NO: 789666 - RNA, 19 nt, Artificial Sequence
  Description of Artificial Sequence: Synthetic oligonucleotide
  Sense strand starting at position 3376 of SEQ ID NO: 587404
gcaugauaacccuggugac

SEQ ID NO: 789667 - RNA, 19 nt, Artificial Sequence
  Description of Artificial Sequence: Synthetic oligonucleotide
  Antisense strand to SEQ ID NO: 789666
gucaccaggguuaucaugc

SEQ ID NO: 789668 - RNA, 19 nt, Artificial Sequence
  Description of Artificial Sequence: Synthetic oligonucleotide
  Sense strand starting at position 3377 of SEQ ID NO: 587404
caugauaacccuggugacu

SEQ ID NO: 789669 - RNA, 19 nt, Artificial Sequence
  Description of Artificial Sequence: Synthetic oligonucleotide
  Antisense strand to SEQ ID NO: 789668
agucaccaggguuaucaug

SEQ ID NO: 789670 - RNA, 19 nt, Artificial Sequence
  Description of Artificial Sequence: Synthetic oligonucleotide
  Sense strand starting at position 3607 of SEQ ID NO: 587404
gagcacuuggcauggaaca

SEQ ID NO: 789671 - RNA, 19 nt, Artificial Sequence
  Description of Artificial Sequence: Synthetic oligonucleotide
  Antisense strand to SEQ ID NO: 789670
uguuccaugccaagugcuc

SEQ ID NO: 789672 - RNA, 19 nt, Artificial Sequence
  Description of Artificial Sequence: Synthetic oligonucleotide
  Sense strand starting at position 3620 of SEQ ID NO: 587404
ggaacagagccucggauua

SEQ ID NO: 789673 - RNA, 19 nt, Artificial Sequence
  Description of Artificial Sequence: Synthetic oligonucleotide
  Antisense strand to SEQ ID NO: 789672
uaauccgaggcucuguucc

SEQ ID NO: 789674 - RNA, 19 nt, Artificial Sequence
  Description of Artificial Sequence: Synthetic oligonucleotide
  Sense strand starting at position 3770 of SEQ ID NO: 587404
uugagauccugucuccaca

SEQ ID NO: 789675 - RNA, 19 nt, Artificial Sequence
  Description of Artificial Sequence: Synthetic oligonucleotide
  Antisense strand to SEQ ID NO: 789674
uguggagacaggaucucaa

SEQ ID NO: 789676 - RNA, 19 nt, Artificial Sequence
  Description of Artificial Sequence: Synthetic oligonucleotide
  Sense strand starting at position 405 of SEQ ID NO: 587405
acacgugaccaaugaaaga

SEQ ID NO: 789677 - RNA, 19 nt, Artificial Sequence
  Description of Artificial Sequence: Synthetic oligonucleotide
  Antisense strand to SEQ ID NO: 789676
ucuuucauuggucacgugu

SEQ ID NO: 789678 - RNA, 19 nt, Artificial Sequence
  Description of Artificial Sequence: Synthetic oligonucleotide
  Sense strand starting at position 464 of SEQ ID NO: 587405
agaagcauaaugugagcaa

SEQ ID NO: 789679 - RNA, 19 nt, Artificial Sequence
  Description of Artificial Sequence: Synthetic oligonucleotide
  Antisense strand to SEQ ID NO: 789678
uugcucacauuaugcuucu

SEQ ID NO: 789680 - RNA, 19 nt, Artificial Sequence
  Description of Artificial Sequence: Synthetic oligonucleotide
  Sense strand starting at position 467 of SEQ ID NO: 587405
agcauaaugugagcaaaca

SEQ ID NO: 789681 - RNA, 19 nt, Artificial Sequence
  Description of Artificial Sequence: Synthetic oligonucleotide
  Antisense strand to SEQ ID NO: 789680
uguuugcucacauuaugcu

SEQ ID NO: 789682 - RNA, 19 nt, Artificial Sequence
  Description of Artificial Sequence: Synthetic oligonucleotide
  Sense strand starting at position 468 of SEQ ID NO: 587405
gcauaaugugagcaaacaa

SEQ ID NO: 789683 - RNA, 19 nt, Artificial Sequence
  Description of Artificial Sequence: Synthetic oligonucleotide
  Antisense strand to SEQ ID NO: 789682
uuguuugcucacauuaugc

SEQ ID NO: 789684 - RNA, 19 nt, Artificial Sequence
  Description of Artificial Sequence: Synthetic oligonucleotide
  Sense strand starting at position 491 of SEQ ID NO: 587405
ggccgagugacaugaauaa

SEQ ID NO: 789685 - RNA, 19 nt, Artificial Sequence
  Description of Artificial Sequence: Synthetic oligonucleotide
  Antisense strand to SEQ ID NO: 789684
uuauucaugucacucggcc

SEQ ID NO: 789686 - RNA, 19 nt, Artificial Sequence
  Description of Artificial Sequence: Synthetic oligonucleotide
  Sense strand starting at position 601 of SEQ ID NO: 587405
auaucaagcguugagggaa

SEQ ID NO: 789687 - RNA, 19 nt, Artificial Sequence
  Description of Artificial Sequence: Synthetic oligonucleotide
  Antisense strand to SEQ ID NO: 789686
uucccucaacgcuugauau

SEQ ID NO: 789688 - RNA, 19 nt, Artificial Sequence
  Description of Artificial Sequence: Synthetic oligonucleotide
  Sense strand starting at position 743 of SEQ ID NO: 587405
augaaucauuaugcaugua

SEQ ID NO: 789689 - RNA, 19 nt, Artificial Sequence
  Description of Artificial Sequence: Synthetic oligonucleotide
  Antisense strand to SEQ ID NO: 789688
uacaugcauaaugauucau

SEQ ID NO: 789690 - RNA, 19 nt, Artificial Sequence
  Description of Artificial Sequence: Synthetic oligonucleotide
  Sense strand starting at position 876 of SEQ ID NO: 587405
uguaauacacaauggugua

SEQ ID NO: 789691 - RNA, 19 nt, Artificial Sequence
  Description of Artificial Sequence: Synthetic oligonucleotide
  Antisense strand to SEQ ID NO: 789690
uacaccauuguguauuaca

SEQ ID NO: 789692 - RNA, 19 nt, Artificial Sequence
  Description of Artificial Sequence: Synthetic oligonucleotide
  Sense strand starting at position 1110 of SEQ ID NO: 587405
ugauuacuuuggguaggga

SEQ ID NO: 789693 - RNA, 19 nt, Artificial Sequence
  Description of Artificial Sequence: Synthetic oligonucleotide
  Antisense strand to SEQ ID NO: 789692
ucccuacccaaaguaauca

SEQ ID NO: 789694 - RNA, 19 nt, Artificial Sequence
  Description of Artificial Sequence: Synthetic oligonucleotide
  Sense strand starting at position 1266 of SEQ ID NO: 587405
agucauagaucaguaauac

SEQ ID NO: 789695 - RNA, 19 nt, Artificial Sequence
  Description of Artificial Sequence: Synthetic oligonucleotide
  Antisense strand to SEQ ID NO: 789694
guauuacugaucuaugacu

SEQ ID NO: 789696 - RNA, 19 nt, Artificial Sequence
  Description of Artificial Sequence: Synthetic oligonucleotide
  Sense strand starting at position 1267 of SEQ ID NO: 587405
gucauagaucaguaauacu

SEQ ID NO: 789697 - RNA, 19 nt, Artificial Sequence
  Description of Artificial Sequence: Synthetic oligonucleotide
  Antisense strand to SEQ ID NO: 789696
aguauuacugaucuaugac

SEQ ID NO: 789698 - RNA, 19 nt, Artificial Sequence
  Description of Artificial Sequence: Synthetic oligonucleotide
  Sense strand starting at position 1277 of SEQ ID NO: 587405
aguaauacucgcgaacaag

SEQ ID NO: 789699 - RNA, 19 nt, Artificial Sequence
  Description of Artificial Sequence: Synthetic oligonucleotide
  Antisense strand to SEQ ID NO: 789698
cuuguucgcgaguauuacu

SEQ ID NO: 789700 - RNA, 19 nt, Artificial Sequence
  Description of Artificial Sequence: Synthetic oligonucleotide
  Sense strand starting at position 1554 of SEQ ID NO: 587405
uaauucgaaugguuuacau

SEQ ID NO: 789701 - RNA, 19 nt, Artificial Sequence
  Description of Artificial Sequence: Synthetic oligonucleotide
  Antisense strand to SEQ ID NO: 789700
auguaaaccauucgaauua

SEQ ID NO: 789702 - RNA, 19 nt, Artificial Sequence
  Description of Artificial Sequence: Synthetic oligonucleotide
  Sense strand starting at position 1576 of SEQ ID NO: 587405
guaugcaucguuuccaguu

SEQ ID NO: 789703 - RNA, 19 nt, Artificial Sequence
  Description of Artificial Sequence: Synthetic oligonucleotide
  Antisense strand to SEQ ID NO: 789702
aacuggaaacgaugcauac

SEQ ID NO: 789704 - RNA, 19 nt, Artificial Sequence
  Description of Artificial Sequence: Synthetic oligonucleotide
  Sense strand starting at position 1645 of SEQ ID NO: 587405
ggguccugagaguaaguuu

SEQ ID NO: 789705 - RNA, 19 nt, Artificial Sequence
  Description of Artificial Sequence: Synthetic oligonucleotide
  Antisense strand to SEQ ID NO: 789704
aaacuuacucucaggaccc

SEQ ID NO: 789706 - RNA, 19 nt, Artificial Sequence
  Description of Artificial Sequence: Synthetic oligonucleotide
  Sense strand starting at position 1927 of SEQ ID NO: 587405
ucagguacucaucagguau

SEQ ID NO: 789707 - RNA, 19 nt, Artificial Sequence
  Description of Artificial Sequence: Synthetic oligonucleotide
  Antisense strand to SEQ ID NO: 789706
auaccugaugaguaccuga

SEQ ID NO: 789708 - RNA, 19 nt, Artificial Sequence
  Description of Artificial Sequence: Synthetic oligonucleotide
  Sense strand starting at position 2008 of SEQ ID NO: 587405
acaaucuuggcaggcagaa

SEQ ID NO: 789709 - RNA, 19 nt, Artificial Sequence
  Description of Artificial Sequence: Synthetic oligonucleotide
  Antisense strand to SEQ ID NO: 789708
uucugccugccaagauugu

SEQ ID NO: 789710 - RNA, 19 nt, Artificial Sequence
  Description of Artificial Sequence: Synthetic oligonucleotide
  Sense strand starting at position 2067 of SEQ ID NO: 587405
uguagauagaaucgauaaa

SEQ ID NO: 789711 - RNA, 19 nt, Artificial Sequence
  Description of Artificial Sequence: Synthetic oligonucleotide
  Antisense strand to SEQ ID NO: 789710
uuuaucgauucuaucuaca

SEQ ID NO: 789712 - RNA, 19 nt, Artificial Sequence
  Description of Artificial Sequence: Synthetic oligonucleotide
  Sense strand starting at position 2103 of SEQ ID NO: 587405
acugacacacuguguuaaa

SEQ ID NO: 789713 - RNA, 19 nt, Artificial Sequence
  Description of Artificial Sequence: Synthetic oligonucleotide
  Antisense strand to SEQ ID NO: 789712
uuuaacacagugugucagu

SEQ ID NO: 789714 - RNA, 19 nt, Artificial Sequence
  Description of Artificial Sequence: Synthetic oligonucleotide
  Sense strand starting at position 2249 of SEQ ID NO: 587405
ccaugagaguacucaguua

SEQ ID NO: 789715 - RNA, 19 nt, Artificial Sequence
  Description of Artificial Sequence: Synthetic oligonucleotide
  Antisense strand to SEQ ID NO: 789714
uaacugaguacucucaugg

SEQ ID NO: 789716 - RNA, 19 nt, Artificial Sequence
  Description of Artificial Sequence: Synthetic oligonucleotide
  Sense strand starting at position 2293 of SEQ ID NO: 587405
aggucucaacauugcauaa

SEQ ID NO: 789717 - RNA, 19 nt, Artificial Sequence
  Description of Artificial Sequence: Synthetic oligonucleotide
  Antisense strand to SEQ ID NO: 789716
uuaugcaauguugagaccu

SEQ ID NO: 789718 - RNA, 19 nt, Artificial Sequence
  Description of Artificial Sequence: Synthetic oligonucleotide
  Sense strand starting at position 2454 of SEQ ID NO: 587405
uuccuuggccuuugaagaa

SEQ ID NO: 789719 - RNA, 19 nt, Artificial Sequence
  Description of Artificial Sequence: Synthetic oligonucleotide
  Antisense strand to SEQ ID NO: 789718
uucuucaaaggccaaggaa

SEQ ID NO: 789720 - RNA, 19 nt, Artificial Sequence
  Description of Artificial Sequence: Synthetic oligonucleotide
  Sense strand starting at position 2556 of SEQ ID NO: 587405
aucuccugaugaguucuua

SEQ ID NO: 789721 - RNA, 19 nt, Artificial Sequence
  Description of Artificial Sequence: Synthetic oligonucleotide
  Antisense strand to SEQ ID NO: 789720
uaagaacucaucaggagau

SEQ ID NO: 789722 - RNA, 19 nt, Artificial Sequence
  Description of Artificial Sequence: Synthetic oligonucleotide
  Sense strand starting at position 2560 of SEQ ID NO: 587405
ccugaugaguucuuaauac

SEQ ID NO: 789723 - RNA, 19 nt, Artificial Sequence
  Description of Artificial Sequence: Synthetic oligonucleotide
  Antisense strand to SEQ ID NO: 789722
guauuaagaacucaucagg

SEQ ID NO: 789724 - RNA, 19 nt, Artificial Sequence
  Description of Artificial Sequence: Synthetic oligonucleotide
  Sense strand starting at position 2598 of SEQ ID NO: 587405
ggcaguagccuggaaauaa

SEQ ID NO: 789725 - RNA, 19 nt, Artificial Sequence
  Description of Artificial Sequence: Synthetic oligonucleotide
  Antisense strand to SEQ ID NO: 789724
uuauuuccaggcuacugcc

SEQ ID NO: 789726 - RNA, 19 nt, Artificial Sequence
  Description of Artificial Sequence: Synthetic oligonucleotide
  Sense strand starting at position 2695 of SEQ ID NO: 587405
cgaaaugggagcgaaugau

SEQ ID NO: 789727 - RNA, 19 nt, Artificial Sequence
  Description of Artificial Sequence: Synthetic oligonucleotide
  Antisense strand to SEQ ID NO: 789726
aucauucgcucccauuucg

SEQ ID NO: 789728 - RNA, 19 nt, Artificial Sequence
  Description of Artificial Sequence: Synthetic oligonucleotide
  Sense strand starting at position 2705 of SEQ ID NO: 587405
gcgaaugauagugacauca

SEQ ID NO: 789729 - RNA, 19 nt, Artificial Sequence
  Description of Artificial Sequence: Synthetic oligonucleotide
  Antisense strand to SEQ ID NO: 789728
ugaugucacuaucauucgc

SEQ ID NO: 789730 - RNA, 19 nt, Artificial Sequence
  Description of Artificial Sequence: Synthetic oligonucleotide
  Sense strand starting at position 2713 of SEQ ID NO: 587405
uagugacaucaguguggaa

SEQ ID NO: 789731 - RNA, 19 nt, Artificial Sequence
  Description of Artificial Sequence: Synthetic oligonucleotide
  Antisense strand to SEQ ID NO: 789730
uuccacacugaugucacua

SEQ ID NO: 789732 - RNA, 19 nt, Artificial Sequence
  Description of Artificial Sequence: Synthetic oligonucleotide
  Sense strand starting at position 2715 of SEQ ID NO: 587405
gugacaucaguguggaaga

SEQ ID NO: 789733 - RNA, 19 nt, Artificial Sequence
  Description of Artificial Sequence: Synthetic oligonucleotide
  Antisense strand to SEQ ID NO: 789732
ucuuccacacugaugucac

SEQ ID NO: 789734 - RNA, 19 nt, Artificial Sequence
  Description of Artificial Sequence: Synthetic oligonucleotide
  Sense strand starting at position 2729 of SEQ ID NO: 587405
gaagaacuucgauguuuac

SEQ ID NO: 789735 - RNA, 19 nt, Artificial Sequence
  Description of Artificial Sequence: Synthetic oligonucleotide
  Antisense strand to SEQ ID NO: 789734
guaaacaucgaaguucuuc

SEQ ID NO: 789736 - RNA, 19 nt, Artificial Sequence
  Description of Artificial Sequence: Synthetic oligonucleotide
  Sense strand starting at position 2738 of SEQ ID NO: 587405
cgauguuuacacugaauaa

SEQ ID NO: 789737 - RNA, 19 nt, Artificial Sequence
  Description of Artificial Sequence: Synthetic oligonucleotide
  Antisense strand to SEQ ID NO: 789736
uuauucaguguaaacaucg

SEQ ID NO: 789738 - RNA, 19 nt, Artificial Sequence
  Description of Artificial Sequence: Synthetic oligonucleotide
  Sense strand starting at position 2758 of SEQ ID NO: 587405
aguguagaauuguccaaag

SEQ ID NO: 789739 - RNA, 19 nt, Artificial Sequence
  Description of Artificial Sequence: Synthetic oligonucleotide
  Antisense strand to SEQ ID NO: 789738
cuuuggacaauucuacacu

SEQ ID NO: 789740 - RNA, 19 nt, Artificial Sequence
  Description of Artificial Sequence: Synthetic oligonucleotide
  Sense strand starting at position 2760 of SEQ ID NO: 587405
uguagaauuguccaaaguc

SEQ ID NO: 789741 - RNA, 19 nt, Artificial Sequence
  Description of Artificial Sequence: Synthetic oligonucleotide
  Antisense strand to SEQ ID NO: 789740
gacuuuggacaauucuaca

SEQ ID NO: 789742 - RNA, 19 nt, Artificial Sequence
  Description of Artificial Sequence: Synthetic oligonucleotide
  Sense strand starting at position 2823 of SEQ ID NO: 587405
uugucucagcaaggaaaua

SEQ ID NO: 789743 - RNA, 19 nt, Artificial Sequence
  Description of Artificial Sequence: Synthetic oligonucleotide
  Antisense strand to SEQ ID NO: 789742
uauuuccuugcugagacaa

SEQ ID NO: 789744 - RNA, 19 nt, Artificial Sequence
  Description of Artificial Sequence: Synthetic oligonucleotide
  Sense strand starting at position 2937 of SEQ ID NO: 587405
aggaaauuagacugggugu

SEQ ID NO: 789745 - RNA, 19 nt, Artificial Sequence
  Description of Artificial Sequence: Synthetic oligonucleotide
  Antisense strand to SEQ ID NO: 789744
acacccagucuaauuuccu

SEQ ID NO: 789746 - RNA, 19 nt, Artificial Sequence
  Description of Artificial Sequence: Synthetic oligonucleotide
  Sense strand starting at position 3172 of SEQ ID NO: 587405
ugcaguuaaccucaauggu

SEQ ID NO: 789747 - RNA, 19 nt, Artificial Sequence
  Description of Artificial Sequence: Synthetic oligonucleotide
  Antisense strand to SEQ ID NO: 789746
accauugagguuaacugca

SEQ ID NO: 789748 - RNA, 19 nt, Artificial Sequence
  Description of Artificial Sequence: Synthetic oligonucleotide
  Sense strand starting at position 3175 of SEQ ID NO: 587405
aguuaaccucaaugguacu

SEQ ID NO: 789749 - RNA, 19 nt, Artificial Sequence
  Description of Artificial Sequence: Synthetic oligonucleotide
  Antisense strand to SEQ ID NO: 789748
aguaccauugagguuaacu

SEQ ID NO: 789750 - RNA, 19 nt, Artificial Sequence
  Description of Artificial Sequence: Synthetic oligonucleotide
  Sense strand starting at position 3379 of SEQ ID NO: 587405
cauugaacagacuguuaga

SEQ ID NO: 789751 - RNA, 19 nt, Artificial Sequence
  Description of Artificial Sequence: Synthetic oligonucleotide
  Antisense strand to SEQ ID NO: 789750
ucuaacagucuguucaaug

SEQ ID NO: 789752 - RNA, 19 nt, Artificial Sequence
  Description of Artificial Sequence: Synthetic oligonucleotide
  Sense strand starting at position 3691 of SEQ ID NO: 587405
guauuuauuuaagguccca

SEQ ID NO: 789753 - RNA, 19 nt, Artificial Sequence
  Description of Artificial Sequence: Synthetic oligonucleotide
  Antisense strand to SEQ ID NO: 789752
ugggaccuuaaauaaauac

SEQ ID NO: 789754 - RNA, 19 nt, Artificial Sequence
  Description of Artificial Sequence: Synthetic oligonucleotide
  Sense strand starting at position 3924 of SEQ ID NO: 587405
cuggcugucucucuuauuu

SEQ ID NO: 789755 - RNA, 19 nt, Artificial Sequence
  Description of Artificial Sequence: Synthetic oligonucleotide
  Antisense strand to SEQ ID NO: 789754
aaauaagagagacagccag

SEQ ID NO: 789756 - RNA, 19 nt, Artificial Sequence
  Description of Artificial Sequence: Synthetic oligonucleotide
  Sense strand starting at position 61 of SEQ ID NO: 587406
aucugagacucaguauucu

SEQ ID NO: 789757 - RNA, 19 nt, Artificial Sequence
  Description of Artificial Sequence: Synthetic oligonucleotide
  Antisense strand to SEQ ID NO: 789756
agaauacugagucucagau

SEQ ID NO: 789758 - RNA, 19 nt, Artificial Sequence
  Description of Artificial Sequence: Synthetic oligonucleotide
  Sense strand starting at position 144 of SEQ ID NO: 587406
uccucuaugucaccaguaa

SEQ ID NO: 789759 - RNA, 19 nt, Artificial Sequence
  Description of Artificial Sequence: Synthetic oligonucleotide
  Antisense strand to SEQ ID NO: 789758
uuacuggugacauagagga

SEQ ID NO: 789760 - RNA, 19 nt, Artificial Sequence
  Description of Artificial Sequence: Synthetic oligonucleotide
  Sense strand starting at position 145 of SEQ ID NO: 587406
ccucuaugucaccaguaau

SEQ ID NO: 789761 - RNA, 19 nt, Artificial Sequence
  Description of Artificial Sequence: Synthetic oligonucleotide
  Antisense strand to SEQ ID NO: 789760
auuacuggugacauagagg

SEQ ID NO: 789762 - RNA, 19 nt, Artificial Sequence
  Description of Artificial Sequence: Synthetic oligonucleotide
  Sense strand starting at position 155 of SEQ ID NO: 587406
accaguaaucgccgaaaca

SEQ ID NO: 789763 - RNA, 19 nt, Artificial Sequence
  Description of Artificial Sequence: Synthetic oligonucleotide
  Antisense strand to SEQ ID NO: 789762
uguuucggcgauuacuggu

SEQ ID NO: 789764 - RNA, 19 nt, Artificial Sequence
  Description of Artificial Sequence: Synthetic oligonucleotide
  Sense strand starting at position 156 of SEQ ID NO: 587406
ccaguaaucgccgaaacaa

SEQ ID NO: 789765 - RNA, 19 nt, Artificial Sequence
  Description of Artificial Sequence: Synthetic oligonucleotide
  Antisense strand to SEQ ID NO: 789764
uuguuucggcgauuacugg

SEQ ID NO: 789766 - RNA, 19 nt, Artificial Sequence
  Description of Artificial Sequence: Synthetic oligonucleotide
  Sense strand starting at position 177 of SEQ ID NO: 587406
ucugaauccugagaaugaa

SEQ ID NO: 789767 - RNA, 19 nt, Artificial Sequence
  Description of Artificial Sequence: Synthetic oligonucleotide
  Antisense strand to SEQ ID NO: 789766
uucauucucaggauucaga

SEQ ID NO: 789768 - RNA, 19 nt, Artificial Sequence
  Description of Artificial Sequence: Synthetic oligonucleotide
  Sense strand starting at position 206 of SEQ ID NO: 587406
cauccauauuggguguaaa

SEQ ID NO: 789769 - RNA, 19 nt, Artificial Sequence
  Description of Artificial Sequence: Synthetic oligonucleotide
  Antisense strand to SEQ ID NO: 789768
uuuacacccaauauggaug

SEQ ID NO: 789770 - RNA, 19 nt, Artificial Sequence
  Description of Artificial Sequence: Synthetic oligonucleotide
  Sense strand starting at position 271 of SEQ ID NO: 587406
ggacgaagcuuucuuuaag

SEQ ID NO: 789771 - RNA, 19 nt, Artificial Sequence
  Description of Artificial Sequence: Synthetic oligonucleotide
  Antisense strand to SEQ ID NO: 789770
cuuaaagaaagcuucgucc

SEQ ID NO: 789772 - RNA, 19 nt, Artificial Sequence
  Description of Artificial Sequence: Synthetic oligonucleotide
  Sense strand starting at position 272 of SEQ ID NO: 587406
gacgaagcuuucuuuaagu

SEQ ID NO: 789773 - RNA, 19 nt, Artificial Sequence
  Description of Artificial Sequence: Synthetic oligonucleotide
  Antisense strand to SEQ ID NO: 789772
acuuaaagaaagcuucguc

SEQ ID NO: 789774 - RNA, 19 nt, Artificial Sequence
  Description of Artificial Sequence: Synthetic oligonucleotide
  Sense strand starting at position 280 of SEQ ID NO: 587406
uuucuuuaagugcagauua

SEQ ID NO: 789775 - RNA, 19 nt, Artificial Sequence
  Description of Artificial Sequence: Synthetic oligonucleotide
  Antisense strand to SEQ ID NO: 789774
uaaucugcacuuaaagaaa

SEQ ID NO: 789776 - RNA, 19 nt, Artificial Sequence
  Description of Artificial Sequence: Synthetic oligonucleotide
  Sense strand starting at position 282 of SEQ ID NO: 587406
ucuuuaagugcagauuaau

SEQ ID NO: 789777 - RNA, 19 nt, Artificial Sequence
  Description of Artificial Sequence: Synthetic oligonucleotide
  Antisense strand to SEQ ID NO: 789776
auuaaucugcacuuaaaga

SEQ ID NO: 789778 - RNA, 19 nt, Artificial Sequence
  Description of Artificial Sequence: Synthetic oligonucleotide
  Sense strand starting at position 291 of SEQ ID NO: 587406
gcagauuaaugacugcaag

SEQ ID NO: 789779 - RNA, 19 nt, Artificial Sequence
  Description of Artificial Sequence: Synthetic oligonucleotide
  Antisense strand to SEQ ID NO: 789778
cuugcagucauuaaucugc

SEQ ID NO: 789780 - RNA, 19 nt, Artificial Sequence
  Description of Artificial Sequence: Synthetic oligonucleotide
  Sense strand starting at position 654 of SEQ ID NO: 587406
ccuccuucggagggaucaa

SEQ ID NO: 789781 - RNA, 19 nt, Artificial Sequence
  Description of Artificial Sequence: Synthetic oligonucleotide
  Antisense strand to SEQ ID NO: 789780
uugaucccuccgaaggagg

SEQ ID NO: 789782 - RNA, 19 nt, Artificial Sequence
  Description of Artificial Sequence: Synthetic oligonucleotide
  Sense strand starting at position 732 of SEQ ID NO: 587406
agaagcugucgccuuguua

SEQ ID NO: 789783 - RNA, 19 nt, Artificial Sequence
  Description of Artificial Sequence: Synthetic oligonucleotide
  Antisense strand to SEQ ID NO: 789782
uaacaaggcgacagcuucu

SEQ ID NO: 789784 - RNA, 19 nt, Artificial Sequence
  Description of Artificial Sequence: Synthetic oligonucleotide
  Sense strand starting at position 1052 of SEQ ID NO: 587406
auucccagcgcuuaaagua

SEQ ID NO: 789785 - RNA, 19 nt, Artificial Sequence
  Description of Artificial Sequence: Synthetic oligonucleotide
  Antisense strand to SEQ ID NO: 789784
uacuuuaagcgcugggaau

SEQ ID NO: 789786 - RNA, 19 nt, Artificial Sequence
  Description of Artificial Sequence: Synthetic oligonucleotide
  Sense strand starting at position 1208 of SEQ ID NO: 587406
uuggacuaagcuggugaau

SEQ ID NO: 789787 - RNA, 19 nt, Artificial Sequence
  Description of Artificial Sequence: Synthetic oligonucleotide
  Antisense strand to SEQ ID NO: 789786
auucaccagcuuaguccaa

SEQ ID NO: 789788 - RNA, 19 nt, Artificial Sequence
  Description of Artificial Sequence: Synthetic oligonucleotide
  Sense strand starting at position 1503 of SEQ ID NO: 587406
uccggagacucugcagaaa

SEQ ID NO: 789789 - RNA, 19 nt, Artificial Sequence
  Description of Artificial Sequence: Synthetic oligonucleotide
  Antisense strand to SEQ ID NO: 789788
uuucugcagagucuccgga

SEQ ID NO: 789790 - RNA, 19 nt, Artificial Sequence
  Description of Artificial Sequence: Synthetic oligonucleotide
  Sense strand starting at position 1515 of SEQ ID NO: 587406
gcagaaagcguuuaaagag

SEQ ID NO: 789791 - RNA, 19 nt, Artificial Sequence
  Description of Artificial Sequence: Synthetic oligonucleotide
  Antisense strand to SEQ ID NO: 789790
cucuuuaaacgcuuucugc

SEQ ID NO: 789792 - RNA, 19 nt, Artificial Sequence
  Description of Artificial Sequence: Synthetic oligonucleotide
  Sense strand starting at position 1522 of SEQ ID NO: 587406
gcguuuaaagagcacagaa

SEQ ID NO: 789793 - RNA, 19 nt, Artificial Sequence
  Description of Artificial Sequence: Synthetic oligonucleotide
  Antisense strand to SEQ ID NO: 789792
uucugugcucuuuaaacgc

SEQ ID NO: 789794 - RNA, 19 nt, Artificial Sequence
  Description of Artificial Sequence: Synthetic oligonucleotide
  Sense strand starting at position 1664 of SEQ ID NO: 587406
ggcuucuuucugcacauca

SEQ ID NO: 789795 - RNA, 19 nt, Artificial Sequence
  Description of Artificial Sequence: Synthetic oligonucleotide
  Antisense strand to SEQ ID NO: 789794
ugaugugcagaaagaagcc

SEQ ID NO: 789796 - RNA, 19 nt, Artificial Sequence
  Description of Artificial Sequence: Synthetic oligonucleotide
  Sense strand starting at position 2520 of SEQ ID NO: 587406
ggaagggauggucaguguu

SEQ ID NO: 789797 - RNA, 19 nt, Artificial Sequence
  Description of Artificial Sequence: Synthetic oligonucleotide
  Antisense strand to SEQ ID NO: 789796
aacacugaccaucccuucc

SEQ ID NO: 789798 - RNA, 19 nt, Artificial Sequence
  Description of Artificial Sequence: Synthetic oligonucleotide
  Sense strand starting at position 2526 of SEQ ID NO: 587406
gauggucaguguuuccaga

SEQ ID NO: 789799 - RNA, 19 nt, Artificial Sequence
  Description of Artificial Sequence: Synthetic oligonucleotide
  Antisense strand to SEQ ID NO: 789798
ucuggaaacacugaccauc

SEQ ID NO: 789800 - RNA, 19 nt, Artificial Sequence
  Description of Artificial Sequence: Synthetic oligonucleotide
  Sense strand starting at position 2565 of SEQ ID NO: 587406
guaccugucccuuggacau

SEQ ID NO: 789801 - RNA, 19 nt, Artificial Sequence
  Description of Artificial Sequence: Synthetic oligonucleotide
  Antisense strand to SEQ ID NO: 789800
auguccaagggacagguac

SEQ ID NO: 789802 - RNA, 19 nt, Artificial Sequence
  Description of Artificial Sequence: Synthetic oligonucleotide
  Sense strand starting at position 2616 of SEQ ID NO: 587406
ggagccaauguaggugaua

SEQ ID NO: 789803 - RNA, 19 nt, Artificial Sequence
  Description of Artificial Sequence: Synthetic oligonucleotide
  Antisense strand to SEQ ID NO: 789802
uaucaccuacauuggcucc

SEQ ID NO: 789804 - RNA, 19 nt, Artificial Sequence
  Description of Artificial Sequence: Synthetic oligonucleotide
  Sense strand starting at position 2617 of SEQ ID NO: 587406
gagccaauguaggugauaa

SEQ ID NO: 789805 - RNA, 19 nt, Artificial Sequence
  Description of Artificial Sequence: Synthetic oligonucleotide
  Antisense strand to SEQ ID NO: 789804
uuaucaccuacauuggcuc

SEQ ID NO: 789806 - RNA, 19 nt, Artificial Sequence
  Description of Artificial Sequence: Synthetic oligonucleotide
  Sense strand starting at position 2618 of SEQ ID NO: 587406
agccaauguaggugauaaa

SEQ ID NO: 789807 - RNA, 19 nt, Artificial Sequence
  Description of Artificial Sequence: Synthetic oligonucleotide
  Antisense strand to SEQ ID NO: 789806
uuuaucaccuacauuggcu

SEQ ID NO: 789808 - RNA, 19 nt, Artificial Sequence
  Description of Artificial Sequence: Synthetic oligonucleotide
  Sense strand starting at position 2619 of SEQ ID NO: 587406
gccaauguaggugauaaau

SEQ ID NO: 789809 - RNA, 19 nt, Artificial Sequence
  Description of Artificial Sequence: Synthetic oligonucleotide
  Antisense strand to SEQ ID NO: 789808
auuuaucaccuacauuggc

SEQ ID NO: 789810 - RNA, 19 nt, Artificial Sequence
  Description of Artificial Sequence: Synthetic oligonucleotide
  Sense strand starting at position 2783 of SEQ ID NO: 587406
ugaugagaaucugcaacuu

SEQ ID NO: 789811 - RNA, 19 nt, Artificial Sequence
  Description of Artificial Sequence: Synthetic oligonucleotide
  Antisense strand to SEQ ID NO: 789810
aaguugcagauucucauca

SEQ ID NO: 789812 - RNA, 19 nt, Artificial Sequence
  Description of Artificial Sequence: Synthetic oligonucleotide
  Sense strand starting at position 2862 of SEQ ID NO: 587406
gccuaaugugaagggauca

SEQ ID NO: 789813 - RNA, 19 nt, Artificial Sequence
  Description of Artificial Sequence: Synthetic oligonucleotide
  Antisense strand to SEQ ID NO: 789812
ugaucccuucacauuaggc

SEQ ID NO: 789814 - RNA, 19 nt, Artificial Sequence
  Description of Artificial Sequence: Synthetic oligonucleotide
  Sense strand starting at position 2882 of SEQ ID NO: 587406
agcuaaauauaguugcauu

SEQ ID NO: 789815 - RNA, 19 nt, Artificial Sequence
  Description of Artificial Sequence: Synthetic oligonucleotide
  Antisense strand to SEQ ID NO: 789814
aaugcaacuauauuuagcu

SEQ ID NO: 789816 - RNA, 19 nt, Artificial Sequence
  Description of Artificial Sequence: Synthetic oligonucleotide
  Sense strand starting at position 2920 of SEQ ID NO: 587406
agaacuggauuccaugaaa

SEQ ID NO: 789817 - RNA, 19 nt, Artificial Sequence
  Description of Artificial Sequence: Synthetic oligonucleotide
  Antisense strand to SEQ ID NO: 789816
uuucauggaauccaguucu

SEQ ID NO: 789818 - RNA, 19 nt, Artificial Sequence
  Description of Artificial Sequence: Synthetic oligonucleotide
  Sense strand starting at position 2970 of SEQ ID NO: 587406
ugcuaucucugggcaagga

SEQ ID NO: 789819 - RNA, 19 nt, Artificial Sequence
  Description of Artificial Sequence: Synthetic oligonucleotide
  Antisense strand to SEQ ID NO: 789818
uccuugcccagagauagca

SEQ ID NO: 789820 - RNA, 19 nt, Artificial Sequence
  Description of Artificial Sequence: Synthetic oligonucleotide
  Sense strand starting at position 2971 of SEQ ID NO: 587406
gcuaucucugggcaaggaa

SEQ ID NO: 789821 - RNA, 19 nt, Artificial Sequence
  Description of Artificial Sequence: Synthetic oligonucleotide
  Antisense strand to SEQ ID NO: 789820
uuccuugcccagagauagc

SEQ ID NO: 789822 - RNA, 19 nt, Artificial Sequence
  Description of Artificial Sequence: Synthetic oligonucleotide
  Sense strand starting at position 3054 of SEQ ID NO: 587406
agcuguagacugggagaua

SEQ ID NO: 789823 - RNA, 19 nt, Artificial Sequence
  Description of Artificial Sequence: Synthetic oligonucleotide
  Antisense strand to SEQ ID NO: 789822
uaucucccagucuacagcu

SEQ ID NO: 789824 - RNA, 19 nt, Artificial Sequence
  Description of Artificial Sequence: Synthetic oligonucleotide
  Sense strand starting at position 3160 of SEQ ID NO: 587406
auauauagaguaugucuga

SEQ ID NO: 789825 - RNA, 19 nt, Artificial Sequence
  Description of Artificial Sequence: Synthetic oligonucleotide
  Antisense strand to SEQ ID NO: 789824
ucagacauacucuauauau

SEQ ID NO: 789826 - RNA, 19 nt, Artificial Sequence
  Description of Artificial Sequence: Synthetic oligonucleotide
  Sense strand starting at position 3161 of SEQ ID NO: 587406
uauauagaguaugucugau

SEQ ID NO: 789827 - RNA, 19 nt, Artificial Sequence
  Description of Artificial Sequence: Synthetic oligonucleotide
  Antisense strand to SEQ ID NO: 789826
aucagacauacucuauaua

SEQ ID NO: 789828 - RNA, 19 nt, Artificial Sequence
  Description of Artificial Sequence: Synthetic oligonucleotide
  Sense strand starting at position 3169 of SEQ ID NO: 587406
guaugucugauggagauac

SEQ ID NO: 789829 - RNA, 19 nt, Artificial Sequence
  Description of Artificial Sequence: Synthetic oligonucleotide
  Antisense strand to SEQ ID NO: 789828
guaucuccaucagacauac

SEQ ID NO: 789830 - RNA, 19 nt, Artificial Sequence
  Description of Artificial Sequence: Synthetic oligonucleotide
  Sense strand starting at position 3304 of SEQ ID NO: 587406
agcgauaucuuaguuuaca

SEQ ID NO: 789831 - RNA, 19 nt, Artificial Sequence
  Description of Artificial Sequence: Synthetic oligonucleotide
  Antisense strand to SEQ ID NO: 789830
uguaaacuaagauaucgcu

SEQ ID NO: 789832 - RNA, 19 nt, Artificial Sequence
  Description of Artificial Sequence: Synthetic oligonucleotide
  Sense strand starting at position 3462 of SEQ ID NO: 587406
caggguuggcaauauagca

SEQ ID NO: 789833 - RNA, 19 nt, Artificial Sequence
  Description of Artificial Sequence: Synthetic oligonucleotide
  Antisense strand to SEQ ID NO: 789832
ugcuauauugccaacccug

SEQ ID NO: 789834 - RNA, 19 nt, Artificial Sequence
  Description of Artificial Sequence: Synthetic oligonucleotide
  Sense strand starting at position 3874 of SEQ ID NO: 587406
aguccuuaggagugauaaa

SEQ ID NO: 789835 - RNA, 19 nt, Artificial Sequence
  Description of Artificial Sequence: Synthetic oligonucleotide
  Antisense strand to SEQ ID NO: 789834
uuuaucacuccuaaggacu

SEQ ID NO: 789836 - RNA, 19 nt, Artificial Sequence
  Description of Artificial Sequence: Synthetic oligonucleotide
  Sense strand starting at position 78 of SEQ ID NO: 587407
cugcaaauuucugucugca

SEQ ID NO: 789837 - RNA, 19 nt, Artificial Sequence
  Description of Artificial Sequence: Synthetic oligonucleotide
  Antisense strand to SEQ ID NO: 789836
ugcagacagaaauuugcag

SEQ ID NO: 789838 - RNA, 19 nt, Artificial Sequence
  Description of Artificial Sequence: Synthetic oligonucleotide
  Sense strand starting at position 80 of SEQ ID NO: 587407
gcaaauuucugucugcaaa

SEQ ID NO: 789839 - RNA, 19 nt, Artificial Sequence
  Description of Artificial Sequence: Synthetic oligonucleotide
  Antisense strand to SEQ ID NO: 789838
uuugcagacagaaauuugc

SEQ ID NO: 789840 - RNA, 19 nt, Artificial Sequence
  Description of Artificial Sequence: Synthetic oligonucleotide
  Sense strand starting at position 306 of SEQ ID NO: 587407
aggagaccaucucuuaugu

SEQ ID NO: 789841 - RNA, 19 nt, Artificial Sequence
  Description of Artificial Sequence: Synthetic oligonucleotide
  Antisense strand to SEQ ID NO: 789840
acauaagagauggucuccu

SEQ ID NO: 789842 - RNA, 19 nt, Artificial Sequence
  Description of Artificial Sequence: Synthetic oligonucleotide
  Sense strand starting at position 447 of SEQ ID NO: 587407
acaaauugucagugaauag

SEQ ID NO: 789843 - RNA, 19 nt, Artificial Sequence
  Description of Artificial Sequence: Synthetic oligonucleotide
  Antisense strand to SEQ ID NO: 789842
cuauucacugacaauuugu

SEQ ID NO: 789844 - RNA, 19 nt, Artificial Sequence
  Description of Artificial Sequence: Synthetic oligonucleotide
  Sense strand starting at position 451 of SEQ ID NO: 587407
auugucagugaauaguuaa

SEQ ID NO: 789845 - RNA, 19 nt, Artificial Sequence
  Description of Artificial Sequence: Synthetic oligonucleotide
  Antisense strand to SEQ ID NO: 789844
uuaacuauucacugacaau

SEQ ID NO: 789846 - RNA, 19 nt, Artificial Sequence
  Description of Artificial Sequence: Synthetic oligonucleotide
  Sense strand starting at position 832 of SEQ ID NO: 587407
acuacagucagguggaaau

SEQ ID NO: 789847 - RNA, 19 nt, Artificial Sequence
  Description of Artificial Sequence: Synthetic oligonucleotide
  Antisense strand to SEQ ID NO: 789846
auuuccaccugacuguagu

SEQ ID NO: 789848 - RNA, 19 nt, Artificial Sequence
  Description of Artificial Sequence: Synthetic oligonucleotide
  Sense strand starting at position 888 of SEQ ID NO: 587407
uuccauaugacuggaguga

SEQ ID NO: 789849 - RNA, 19 nt, Artificial Sequence
  Description of Artificial Sequence: Synthetic oligonucleotide
  Antisense strand to SEQ ID NO: 789848
ucacuccagucauauggaa

SEQ ID NO: 789850 - RNA, 19 nt, Artificial Sequence
  Description of Artificial Sequence: Synthetic oligonucleotide
  Sense strand starting at position 902 of SEQ ID NO: 587407
agugauuucuggcugccuu

SEQ ID NO: 789851 - RNA, 19 nt, Artificial Sequence
  Description of Artificial Sequence: Synthetic oligonucleotide
  Antisense strand to SEQ ID NO: 789850
aaggcagccagaaaucacu

SEQ ID NO: 789852 - RNA, 19 nt, Artificial Sequence
  Description of Artificial Sequence: Synthetic oligonucleotide
  Sense strand starting at position 925 of SEQ ID NO: 587407
gaguuauaaugagugucag

SEQ ID NO: 789853 - RNA, 19 nt, Artificial Sequence
  Description of Artificial Sequence: Synthetic oligonucleotide
  Antisense strand to SEQ ID NO: 789852
cugacacucauuauaacuc

SEQ ID NO: 789854 - RNA, 19 nt, Artificial Sequence
  Description of Artificial Sequence: Synthetic oligonucleotide
  Sense strand starting at position 939 of SEQ ID NO: 587407
gucagugucauugagauug

SEQ ID NO: 789855 - RNA, 19 nt, Artificial Sequence
  Description of Artificial Sequence: Synthetic oligonucleotide
  Antisense strand to SEQ ID NO: 789854
caaucucaaugacacugac

SEQ ID NO: 789856 - RNA, 19 nt, Artificial Sequence
  Description of Artificial Sequence: Synthetic oligonucleotide
  Sense strand starting at position 1171 of SEQ ID NO: 587407
ugaaacuggcuuggguaaa

SEQ ID NO: 789857 - RNA, 19 nt, Artificial Sequence
  Description of Artificial Sequence: Synthetic oligonucleotide
  Antisense strand to SEQ ID NO: 789856
uuuacccaagccaguuuca

SEQ ID NO: 789858 - RNA, 19 nt, Artificial Sequence
  Description of Artificial Sequence: Synthetic oligonucleotide
  Sense strand starting at position 1242 of SEQ ID NO: 587407
ggagacugauuauuaagca

SEQ ID NO: 789859 - RNA, 19 nt, Artificial Sequence
  Description of Artificial Sequence: Synthetic oligonucleotide
  Antisense strand to SEQ ID NO: 789858
ugcuuaauaaucagucucc

SEQ ID NO: 789860 - RNA, 19 nt, Artificial Sequence
  Description of Artificial Sequence: Synthetic oligonucleotide
  Sense strand starting at position 1328 of SEQ ID NO: 587407
cucacacugaugugugaga

SEQ ID NO: 789861 - RNA, 19 nt, Artificial Sequence
  Description of Artificial Sequence: Synthetic oligonucleotide
  Antisense strand to SEQ ID NO: 789860
ucucacacaucagugugag

SEQ ID NO: 789862 - RNA, 19 nt, Artificial Sequence
  Description of Artificial Sequence: Synthetic oligonucleotide
  Sense strand starting at position 1329 of SEQ ID NO: 587407
ucacacugaugugugagaa

SEQ ID NO: 789863 - RNA, 19 nt, Artificial Sequence
  Description of Artificial Sequence: Synthetic oligonucleotide
  Antisense strand to SEQ ID NO: 789862
uucucacacaucaguguga

SEQ ID NO: 789864 - RNA, 19 nt, Artificial Sequence
  Description of Artificial Sequence: Synthetic oligonucleotide
  Sense strand starting at position 1330 of SEQ ID NO: 587407
cacacugaugugugagaaa

SEQ ID NO: 789865 - RNA, 19 nt, Artificial Sequence
  Description of Artificial Sequence: Synthetic oligonucleotide
  Antisense strand to SEQ ID NO: 789864
uuucucacacaucagugug

SEQ ID NO: 789866 - RNA, 19 nt, Artificial Sequence
  Description of Artificial Sequence: Synthetic oligonucleotide
  Sense strand starting at position 1362 of SEQ ID NO: 587407
acguuaugccaagaaauag

SEQ ID NO: 789867 - RNA, 19 nt, Artificial Sequence
  Description of Artificial Sequence: Synthetic oligonucleotide
  Antisense strand to SEQ ID NO: 789866
cuauuucuuggcauaacgu

SEQ ID NO: 789868 - RNA, 19 nt, Artificial Sequence
  Description of Artificial Sequence: Synthetic oligonucleotide
  Sense strand starting at position 1646 of SEQ ID NO: 587407
cgccucaaagcauaaagau

SEQ ID NO: 789869 - RNA, 19 nt, Artificial Sequence
  Description of Artificial Sequence: Synthetic oligonucleotide
  Antisense strand to SEQ ID NO: 789868
aucuuuaugcuuugaggcg

SEQ ID NO: 789870 - RNA, 19 nt, Artificial Sequence
  Description of Artificial Sequence: Synthetic oligonucleotide
  Sense strand starting at position 1655 of SEQ ID NO: 587407
gcauaaagauaguccauag

SEQ ID NO: 789871 - RNA, 19 nt, Artificial Sequence
  Description of Artificial Sequence: Synthetic oligonucleotide
  Antisense strand to SEQ ID NO: 789870
cuauggacuaucuuuaugc

SEQ ID NO: 789872 - RNA, 19 nt, Artificial Sequence
  Description of Artificial Sequence: Synthetic oligonucleotide
  Sense strand starting at position 1779 of SEQ ID NO: 587407
cccauuucgugguugagau

SEQ ID NO: 789873 - RNA, 19 nt, Artificial Sequence
  Description of Artificial Sequence: Synthetic oligonucleotide
  Antisense strand to SEQ ID NO: 789872
aucucaaccacgaaauggg

SEQ ID NO: 789874 - RNA, 19 nt, Artificial Sequence
  Description of Artificial Sequence: Synthetic oligonucleotide
  Sense strand starting at position 1780 of SEQ ID NO: 587407
ccauuucgugguugagauc

SEQ ID NO: 789875 - RNA, 19 nt, Artificial Sequence
  Description of Artificial Sequence: Synthetic oligonucleotide
  Antisense strand to SEQ ID NO: 789874
gaucucaaccacgaaaugg

SEQ ID NO: 789876 - RNA, 19 nt, Artificial Sequence
  Description of Artificial Sequence: Synthetic oligonucleotide
  Sense strand starting at position 1905 of SEQ ID NO: 587407
gugacuucugucuacuaaa

SEQ ID NO: 789877 - RNA, 19 nt, Artificial Sequence
  Description of Artificial Sequence: Synthetic oligonucleotide
  Antisense strand to SEQ ID NO: 789876
uuuaguagacagaagucac

SEQ ID NO: 789878 - RNA, 19 nt, Artificial Sequence
  Description of Artificial Sequence: Synthetic oligonucleotide
  Sense strand starting at position 1965 of SEQ ID NO: 587407
ccagauugccuggaaagua

SEQ ID NO: 789879 - RNA, 19 nt, Artificial Sequence
  Description of Artificial Sequence: Synthetic oligonucleotide
  Antisense strand to SEQ ID NO: 789878
uacuuuccaggcaaucugg

SEQ ID NO: 789880 - RNA, 19 nt, Artificial Sequence
  Description of Artificial Sequence: Synthetic oligonucleotide
  Sense strand starting at position 2105 of SEQ ID NO: 587407
gucaaagcucuugagguga

SEQ ID NO: 789881 - RNA, 19 nt, Artificial Sequence
  Description of Artificial Sequence: Synthetic oligonucleotide
  Antisense strand to SEQ ID NO: 789880
ucaccucaagagcuuugac

SEQ ID NO: 789882 - RNA, 19 nt, Artificial Sequence
  Description of Artificial Sequence: Synthetic oligonucleotide
  Sense strand starting at position 2121 of SEQ ID NO: 587407
ugauuagcuguagagucau

SEQ ID NO: 789883 - RNA, 19 nt, Artificial Sequence
  Description of Artificial Sequence: Synthetic oligonucleotide
  Antisense strand to SEQ ID NO: 789882
augacucuacagcuaauca

SEQ ID NO: 789884 - RNA, 19 nt, Artificial Sequence
  Description of Artificial Sequence: Synthetic oligonucleotide
  Sense strand starting at position 2409 of SEQ ID NO: 587407
cugagaccaucuguaagua

SEQ ID NO: 789885 - RNA, 19 nt, Artificial Sequence
  Description of Artificial Sequence: Synthetic oligonucleotide
  Antisense strand to SEQ ID NO: 789884
uacuuacagauggucucag

SEQ ID NO: 789886 - RNA, 19 nt, Artificial Sequence
  Description of Artificial Sequence: Synthetic oligonucleotide
  Sense strand starting at position 2544 of SEQ ID NO: 587407
gucagaauccuccaguuac

SEQ ID NO: 789887 - RNA, 19 nt, Artificial Sequence
  Description of Artificial Sequence: Synthetic oligonucleotide
  Antisense strand to SEQ ID NO: 789886
guaacuggaggauucugac

SEQ ID NO: 789888 - RNA, 19 nt, Artificial Sequence
  Description of Artificial Sequence: Synthetic oligonucleotide
  Sense strand starting at position 2609 of SEQ ID NO: 587407
uagagucuugcugacauua

SEQ ID NO: 789889 - RNA, 19 nt, Artificial Sequence
  Description of Artificial Sequence: Synthetic oligonucleotide
  Antisense strand to SEQ ID NO: 789888
uaaugucagcaagacucua

SEQ ID NO: 789890 - RNA, 19 nt, Artificial Sequence
  Description of Artificial Sequence: Synthetic oligonucleotide
  Sense strand starting at position 2849 of SEQ ID NO: 587407
uggagaauuuagggaauaa

SEQ ID NO: 789891 - RNA, 19 nt, Artificial Sequence
  Description of Artificial Sequence: Synthetic oligonucleotide
  Antisense strand to SEQ ID NO: 789890
uuauucccuaaauucucca

SEQ ID NO: 789892 - RNA, 19 nt, Artificial Sequence
  Description of Artificial Sequence: Synthetic oligonucleotide
  Sense strand starting at position 2882 of SEQ ID NO: 587407
caaguauggcuuuaauuag

SEQ ID NO: 789893 - RNA, 19 nt, Artificial Sequence
  Description of Artificial Sequence: Synthetic oligonucleotide
  Antisense strand to SEQ ID NO: 789892
cuaauuaaagccauacuug

SEQ ID NO: 789894 - RNA, 19 nt, Artificial Sequence
  Description of Artificial Sequence: Synthetic oligonucleotide
  Sense strand starting at position 3027 of SEQ ID NO: 587407
cucuuuagagaauguggaa

SEQ ID NO: 789895 - RNA, 19 nt, Artificial Sequence
  Description of Artificial Sequence: Synthetic oligonucleotide
  Antisense strand to SEQ ID NO: 789894
uuccacauucucuaaagag

SEQ ID NO: 789896 - RNA, 19 nt, Artificial Sequence
  Description of Artificial Sequence: Synthetic oligonucleotide
  Sense strand starting at position 3110 of SEQ ID NO: 587407
uguuuauaccagggaagca

SEQ ID NO: 789897 - RNA, 19 nt, Artificial Sequence
  Description of Artificial Sequence: Synthetic oligonucleotide
  Antisense strand to SEQ ID NO: 789896
ugcuucccugguauaaaca

SEQ ID NO: 789898 - RNA, 19 nt, Artificial Sequence
  Description of Artificial Sequence: Synthetic oligonucleotide
  Sense strand starting at position 3164 of SEQ ID NO: 587407
guggaaauggcucagucau

SEQ ID NO: 789899 - RNA, 19 nt, Artificial Sequence
  Description of Artificial Sequence: Synthetic oligonucleotide
  Antisense strand to SEQ ID NO: 789898
augacugagccauuuccac

SEQ ID NO: 789900 - RNA, 19 nt, Artificial Sequence
  Description of Artificial Sequence: Synthetic oligonucleotide
  Sense strand starting at position 3209 of SEQ ID NO: 587407
aauggauuucgcugcuauu

SEQ ID NO: 789901 - RNA, 19 nt, Artificial Sequence
  Description of Artificial Sequence: Synthetic oligonucleotide
  Antisense strand to SEQ ID NO: 789900
aauagcagcgaaauccauu

SEQ ID NO: 789902 - RNA, 19 nt, Artificial Sequence
  Description of Artificial Sequence: Synthetic oligonucleotide
  Sense strand starting at position 3337 of SEQ ID NO: 587407
auuccaguuggaugugaua

SEQ ID NO: 789903 - RNA, 19 nt, Artificial Sequence
  Description of Artificial Sequence: Synthetic oligonucleotide
  Antisense strand to SEQ ID NO: 789902
uaucacauccaacuggaau

SEQ ID NO: 789904 - RNA, 19 nt, Artificial Sequence
  Description of Artificial Sequence: Synthetic oligonucleotide
  Sense strand starting at position 3393 of SEQ ID NO: 587407
acuuguuggcccuaagauc

SEQ ID NO: 789905 - RNA, 19 nt, Artificial Sequence
  Description of Artificial Sequence: Synthetic oligonucleotide
  Antisense strand to SEQ ID NO: 789904
gaucuuagggccaacaagu

SEQ ID NO: 789906 - RNA, 19 nt, Artificial Sequence
  Description of Artificial Sequence: Synthetic oligonucleotide
  Sense strand starting at position 3508 of SEQ ID NO: 587407
uaauauuggguaggugaua

SEQ ID NO: 789907 - RNA, 19 nt, Artificial Sequence
  Description of Artificial Sequence: Synthetic oligonucleotide
  Antisense strand to SEQ ID NO: 789906
uaucaccuacccaauauua

SEQ ID NO: 789908 - RNA, 19 nt, Artificial Sequence
  Description of Artificial Sequence: Synthetic oligonucleotide
  Sense strand starting at position 3612 of SEQ ID NO: 587407
auauuagacccauguuaga

SEQ ID NO: 789909 - RNA, 19 nt, Artificial Sequence
  Description of Artificial Sequence: Synthetic oligonucleotide
  Antisense strand to SEQ ID NO: 789908
ucuaacaugggucuaauau

SEQ ID NO: 789910 - RNA, 19 nt, Artificial Sequence
  Description of Artificial Sequence: Synthetic oligonucleotide
  Sense strand starting at position 3748 of SEQ ID NO: 587407
gcauuuagguuucuuuaau

SEQ ID NO: 789911 - RNA, 19 nt, Artificial Sequence
  Description of Artificial Sequence: Synthetic oligonucleotide
  Antisense strand to SEQ ID NO: 789910
auuaaagaaaccuaaaugc

SEQ ID NO: 789912 - RNA, 19 nt, Artificial Sequence
  Description of Artificial Sequence: Synthetic oligonucleotide
  Sense strand starting at position 3787 of SEQ ID NO: 587407
aagaaagaagucuguucuu

SEQ ID NO: 789913 - RNA, 19 nt, Artificial Sequence
  Description of Artificial Sequence: Synthetic oligonucleotide
  Antisense strand to SEQ ID NO: 789912
aagaacagacuucuuucuu

SEQ ID NO: 789914 - RNA, 19 nt, Artificial Sequence
  Description of Artificial Sequence: Synthetic oligonucleotide
  Sense strand starting at position 3844 of SEQ ID NO: 587407
aguguuucuacugacagua

SEQ ID NO: 789915 - RNA, 19 nt, Artificial Sequence
  Description of Artificial Sequence: Synthetic oligonucleotide
  Antisense strand to SEQ ID NO: 789914
uacugucaguagaaacacu

SEQ ID NO: 789916 - RNA, 19 nt, Artificial Sequence
  Description of Artificial Sequence: Synthetic oligonucleotide
  Sense strand starting at position 154 of SEQ ID NO: 587408
gcuauacagcaacaugaau

SEQ ID NO: 789917 - RNA, 19 nt, Artificial Sequence
  Description of Artificial Sequence: Synthetic oligonucleotide
  Antisense strand to SEQ ID NO: 789916
auucauguugcuguauagc

SEQ ID NO: 789918 - RNA, 19 nt, Artificial Sequence
  Description of Artificial Sequence: Synthetic oligonucleotide
  Sense strand starting at position 385 of SEQ ID NO: 587408
gagugacuccugcacucuu

SEQ ID NO: 789919 - RNA, 19 nt, Artificial Sequence
  Description of Artificial Sequence: Synthetic oligonucleotide
  Antisense strand to SEQ ID NO: 789918
aagagugcaggagucacuc

SEQ ID NO: 789920 - RNA, 19 nt, Artificial Sequence
  Description of Artificial Sequence: Synthetic oligonucleotide
  Sense strand starting at position 632 of SEQ ID NO: 587408
aaaugagucccgugcauuu

SEQ ID NO: 789921 - RNA, 19 nt, Artificial Sequence
  Description of Artificial Sequence: Synthetic oligonucleotide
  Antisense strand to SEQ ID NO: 789920
aaaugcacgggacucauuu

SEQ ID NO: 789922 - RNA, 19 nt, Artificial Sequence
  Description of Artificial Sequence: Synthetic oligonucleotide
  Sense strand starting at position 680 of SEQ ID NO: 587408
aagauucaucgcgauggag

SEQ ID NO: 789923 - RNA, 19 nt, Artificial Sequence
  Description of Artificial Sequence: Synthetic oligonucleotide
  Antisense strand to SEQ ID NO: 789922
cuccaucgcgaugaaucuu

SEQ ID NO: 789924 - RNA, 19 nt, Artificial Sequence
  Description of Artificial Sequence: Synthetic oligonucleotide
  Sense strand starting at position 692 of SEQ ID NO: 587408
gauggaguauugccagacu

SEQ ID NO: 789925 - RNA, 19 nt, Artificial Sequence
  Description of Artificial Sequence: Synthetic oligonucleotide
  Antisense strand to SEQ ID NO: 789924
agucuggcaauacuccauc

SEQ ID NO: 789926 - RNA, 19 nt, Artificial Sequence
  Description of Artificial Sequence: Synthetic oligonucleotide
  Sense strand starting at position 695 of SEQ ID NO: 587408
ggaguauugccagacugag

SEQ ID NO: 789927 - RNA, 19 nt, Artificial Sequence
  Description of Artificial Sequence: Synthetic oligonucleotide
  Antisense strand to SEQ ID NO: 789926
cucagucuggcaauacucc

SEQ ID NO: 789928 - RNA, 19 nt, Artificial Sequence
  Description of Artificial Sequence: Synthetic oligonucleotide
  Sense strand starting at position 808 of SEQ ID NO: 587408
gaagaaaggcuguguagaa

SEQ ID NO: 789929 - RNA, 19 nt, Artificial Sequence
  Description of Artificial Sequence: Synthetic oligonucleotide
  Antisense strand to SEQ ID NO: 789928
uucuacacagccuuucuuc

SEQ ID NO: 789930 - RNA, 19 nt, Artificial Sequence
  Description of Artificial Sequence: Synthetic oligonucleotide
  Sense strand starting at position 828 of SEQ ID NO: 587408
gucaguuagcaacaaaucu

SEQ ID NO: 789931 - RNA, 19 nt, Artificial Sequence
  Description of Artificial Sequence: Synthetic oligonucleotide
  Antisense strand to SEQ ID NO: 789930
agauuuguugcuaacugac

SEQ ID NO: 789932 - RNA, 19 nt, Artificial Sequence
  Description of Artificial Sequence: Synthetic oligonucleotide
  Sense strand starting at position 836 of SEQ ID NO: 587408
gcaacaaaucuaggacuca

SEQ ID NO: 789933 - RNA, 19 nt, Artificial Sequence
  Description of Artificial Sequence: Synthetic oligonucleotide
  Antisense strand to SEQ ID NO: 789932
ugaguccuagauuuguugc

SEQ ID NO: 789934 - RNA, 19 nt, Artificial Sequence
  Description of Artificial Sequence: Synthetic oligonucleotide
  Sense strand starting at position 872 of SEQ ID NO: 587408
acggucauccuuuagaacu

SEQ ID NO: 789935 - RNA, 19 nt, Artificial Sequence
  Description of Artificial Sequence: Synthetic oligonucleotide
  Antisense strand to SEQ ID NO: 789934
aguucuaaaggaugaccgu

SEQ ID NO: 789936 - RNA, 19 nt, Artificial Sequence
  Description of Artificial Sequence: Synthetic oligonucleotide
  Sense strand starting at position 993 of SEQ ID NO: 587408
cgauauuauucuuuaggca

SEQ ID NO: 789937 - RNA, 19 nt, Artificial Sequence
  Description of Artificial Sequence: Synthetic oligonucleotide
  Antisense strand to SEQ ID NO: 789936
ugccuaaagaauaauaucg

SEQ ID NO: 789938 - RNA, 19 nt, Artificial Sequence
  Description of Artificial Sequence: Synthetic oligonucleotide
  Sense strand starting at position 1084 of SEQ ID NO: 587408
uugaacuuaugauccgaga

SEQ ID NO: 789939 - RNA, 19 nt, Artificial Sequence
  Description of Artificial Sequence: Synthetic oligonucleotide
  Antisense strand to SEQ ID NO: 789938
ucucggaucauaaguucaa

SEQ ID NO: 789940 - RNA, 19 nt, Artificial Sequence
  Description of Artificial Sequence: Synthetic oligonucleotide
  Sense strand starting at position 1133 of SEQ ID NO: 587408
cugucaguggcuugagaaa

SEQ ID NO: 789941 - RNA, 19 nt, Artificial Sequence
  Description of Artificial Sequence: Synthetic oligonucleotide
  Antisense strand to SEQ ID NO: 789940
uuucucaagccacugacag

SEQ ID NO: 789942 - RNA, 19 nt, Artificial Sequence
  Description of Artificial Sequence: Synthetic oligonucleotide
  Sense strand starting at position 1421 of SEQ ID NO: 587408
aaaugaaauuuccacguga

SEQ ID NO: 789943 - RNA, 19 nt, Artificial Sequence
  Description of Artificial Sequence: Synthetic oligonucleotide
  Antisense strand to SEQ ID NO: 789942
ucacguggaaauuucauuu

SEQ ID NO: 789944 - RNA, 19 nt, Artificial Sequence
  Description of Artificial Sequence: Synthetic oligonucleotide
  Sense strand starting at position 1614 of SEQ ID NO: 587408
uccugaguuugcuuagaau

SEQ ID NO: 789945 - RNA, 19 nt, Artificial Sequence
  Description of Artificial Sequence: Synthetic oligonucleotide
  Antisense strand to SEQ ID NO: 789944
auucuaagcaaacucagga

SEQ ID NO: 789946 - RNA, 19 nt, Artificial Sequence
  Description of Artificial Sequence: Synthetic oligonucleotide
  Sense strand starting at position 1623 of SEQ ID NO: 587408
ugcuuagaauauguuuaga

SEQ ID NO: 789947 - RNA, 19 nt, Artificial Sequence
  Description of Artificial Sequence: Synthetic oligonucleotide
  Antisense strand to SEQ ID NO: 789946
ucuaaacauauucuaagca

SEQ ID NO: 789948 - RNA, 19 nt, Artificial Sequence
  Description of Artificial Sequence: Synthetic oligonucleotide
  Sense strand starting at position 1625 of SEQ ID NO: 587408
cuuagaauauguuuagaca

SEQ ID NO: 789949 - RNA, 19 nt, Artificial Sequence
  Description of Artificial Sequence: Synthetic oligonucleotide
  Antisense strand to SEQ ID NO: 789948
ugucuaaacauauucuaag

SEQ ID NO: 789950 - RNA, 19 nt, Artificial Sequence
  Description of Artificial Sequence: Synthetic oligonucleotide
  Sense strand starting at position 1924 of SEQ ID NO: 587408
ucuguacucuaccuagauc

SEQ ID NO: 789951 - RNA, 19 nt, Artificial Sequence
  Description of Artificial Sequence: Synthetic oligonucleotide
  Antisense strand to SEQ ID NO: 789950
gaucuagguagaguacaga

SEQ ID NO: 789952 - RNA, 19 nt, Artificial Sequence
  Description of Artificial Sequence: Synthetic oligonucleotide
  Sense strand starting at position 2026 of SEQ ID NO: 587408
ucuuuaaugcguuucuggu

SEQ ID NO: 789953 - RNA, 19 nt, Artificial Sequence
  Description of Artificial Sequence: Synthetic oligonucleotide
  Antisense strand to SEQ ID NO: 789952
accagaaacgcauuaaaga

SEQ ID NO: 789954 - RNA, 19 nt, Artificial Sequence
  Description of Artificial Sequence: Synthetic oligonucleotide
  Sense strand starting at position 2196 of SEQ ID NO: 587408
gcagcauugugaccacaga

SEQ ID NO: 789955 - RNA, 19 nt, Artificial Sequence
  Description of Artificial Sequence: Synthetic oligonucleotide
  Antisense strand to SEQ ID NO: 789954
ucuguggucacaaugcugc

SEQ ID NO: 789956 - RNA, 19 nt, Artificial Sequence
  Description of Artificial Sequence: Synthetic oligonucleotide
  Sense strand starting at position 2197 of SEQ ID NO: 587408
cagcauugugaccacagau

SEQ ID NO: 789957 - RNA, 19 nt, Artificial Sequence
  Description of Artificial Sequence: Synthetic oligonucleotide
  Antisense strand to SEQ ID NO: 789956
aucuguggucacaaugcug

SEQ ID NO: 789958 - RNA, 19 nt, Artificial Sequence
  Description of Artificial Sequence: Synthetic oligonucleotide
  Sense strand starting at position 2308 of SEQ ID NO: 587408
uuauuugcauuggaacaga

SEQ ID NO: 789959 - RNA, 19 nt, Artificial Sequence
  Description of Artificial Sequence: Synthetic oligonucleotide
  Antisense strand to SEQ ID NO: 789958
ucuguuccaaugcaaauaa

SEQ ID NO: 789960 - RNA, 19 nt, Artificial Sequence
  Description of Artificial Sequence: Synthetic oligonucleotide
  Sense strand starting at position 2392 of SEQ ID NO: 587408
cccugcaucgcccaugaga

SEQ ID NO: 789961 - RNA, 19 nt, Artificial Sequence
  Description of Artificial Sequence: Synthetic oligonucleotide
  Antisense strand to SEQ ID NO: 789960
ucucaugggcgaugcaggg

SEQ ID NO: 789962 - RNA, 19 nt, Artificial Sequence
  Description of Artificial Sequence: Synthetic oligonucleotide
  Sense strand starting at position 2409 of SEQ ID NO: 587408
gaaagacuuuccuuccggu

SEQ ID NO: 789963 - RNA, 19 nt, Artificial Sequence
  Description of Artificial Sequence: Synthetic oligonucleotide
  Antisense strand to SEQ ID NO: 789962
accggaaggaaagucuuuc

SEQ ID NO: 789964 - RNA, 19 nt, Artificial Sequence
  Description of Artificial Sequence: Synthetic oligonucleotide
  Sense strand starting at position 2476 of SEQ ID NO: 587408
cugcauuugugaucuuagu

SEQ ID NO: 789965 - RNA, 19 nt, Artificial Sequence
  Description of Artificial Sequence: Synthetic oligonucleotide
  Antisense strand to SEQ ID NO: 789964
acuaagaucacaaaugcag

SEQ ID NO: 789966 - RNA, 19 nt, Artificial Sequence
  Description of Artificial Sequence: Synthetic oligonucleotide
  Sense strand starting at position 2485 of SEQ ID NO: 587408
ugaucuuagugcuuaauau

SEQ ID NO: 789967 - RNA, 19 nt, Artificial Sequence
  Description of Artificial Sequence: Synthetic oligonucleotide
  Antisense strand to SEQ ID NO: 789966
auauuaagcacuaagauca

SEQ ID NO: 789968 - RNA, 19 nt, Artificial Sequence
  Description of Artificial Sequence: Synthetic oligonucleotide
  Sense strand starting at position 2722 of SEQ ID NO: 587408
gacagacaagcuugucacu

SEQ ID NO: 789969 - RNA, 19 nt, Artificial Sequence
  Description of Artificial Sequence: Synthetic oligonucleotide
  Antisense strand to SEQ ID NO: 789968
agugacaagcuugucuguc

SEQ ID NO: 789970 - RNA, 19 nt, Artificial Sequence
  Description of Artificial Sequence: Synthetic oligonucleotide
  Sense strand starting at position 2727 of SEQ ID NO: 587408
acaagcuugucacuugauu

SEQ ID NO: 789971 - RNA, 19 nt, Artificial Sequence
  Description of Artificial Sequence: Synthetic oligonucleotide
  Antisense strand to SEQ ID NO: 789970
aaucaagugacaagcuugu

SEQ ID NO: 789972 - RNA, 19 nt, Artificial Sequence
  Description of Artificial Sequence: Synthetic oligonucleotide
  Sense strand starting at position 2798 of SEQ ID NO: 587408
gugggcucugcccaggaaa

SEQ ID NO: 789973 - RNA, 19 nt, Artificial Sequence
  Description of Artificial Sequence: Synthetic oligonucleotide
  Antisense strand to SEQ ID NO: 789972
uuuccugggcagagcccac

SEQ ID NO: 789974 - RNA, 19 nt, Artificial Sequence
  Description of Artificial Sequence: Synthetic oligonucleotide
  Sense strand starting at position 2891 of SEQ ID NO: 587408
ggaggcucugcccaggaaa

SEQ ID NO: 789975 - RNA, 19 nt, Artificial Sequence
  Description of Artificial Sequence: Synthetic oligonucleotide
  Antisense strand to SEQ ID NO: 789974
uuuccugggcagagccucc

SEQ ID NO: 789976 - RNA, 19 nt, Artificial Sequence
  Description of Artificial Sequence: Synthetic oligonucleotide
  Sense strand starting at position 3317 of SEQ ID NO: 587408
auauguggguuuccaauau

SEQ ID NO: 789977 - RNA, 19 nt, Artificial Sequence
  Description of Artificial Sequence: Synthetic oligonucleotide
  Antisense strand to SEQ ID NO: 789976
auauuggaaacccacauau

SEQ ID NO: 789978 - RNA, 19 nt, Artificial Sequence
  Description of Artificial Sequence: Synthetic oligonucleotide
  Sense strand starting at position 3414 of SEQ ID NO: 587408
guagucugcaaacggauuu

SEQ ID NO: 789979 - RNA, 19 nt, Artificial Sequence
  Description of Artificial Sequence: Synthetic oligonucleotide
  Antisense strand to SEQ ID NO: 789978
aaauccguuugcagacuac

SEQ ID NO: 789980 - RNA, 19 nt, Artificial Sequence
  Description of Artificial Sequence: Synthetic oligonucleotide
  Sense strand starting at position 3516 of SEQ ID NO: 587408
uucguagagguuugggaaa

SEQ ID NO: 789981 - RNA, 19 nt, Artificial Sequence
  Description of Artificial Sequence: Synthetic oligonucleotide
  Antisense strand to SEQ ID NO: 789980
uuucccaaaccucuacgaa

SEQ ID NO: 789982 - RNA, 19 nt, Artificial Sequence
  Description of Artificial Sequence: Synthetic oligonucleotide
  Sense strand starting at position 3550 of SEQ ID NO: 587408
uggaaugugagaugcugau

SEQ ID NO: 789983 - RNA, 19 nt, Artificial Sequence
  Description of Artificial Sequence: Synthetic oligonucleotide
  Antisense strand to SEQ ID NO: 789982
aucagcaucucacauucca

SEQ ID NO: 789984 - RNA, 19 nt, Artificial Sequence
  Description of Artificial Sequence: Synthetic oligonucleotide
  Sense strand starting at position 3663 of SEQ ID NO: 587408
agaaauagcuaucugaauu

SEQ ID NO: 789985 - RNA, 19 nt, Artificial Sequence
  Description of Artificial Sequence: Synthetic oligonucleotide
  Antisense strand to SEQ ID NO: 789984
aauucagauagcuauuucu

SEQ ID NO: 789986 - RNA, 19 nt, Artificial Sequence
  Description of Artificial Sequence: Synthetic oligonucleotide
  Sense strand starting at position 3796 of SEQ ID NO: 587408
gccaaauguccacauuaag

SEQ ID NO: 789987 - RNA, 19 nt, Artificial Sequence
  Description of Artificial Sequence: Synthetic oligonucleotide
  Antisense strand to SEQ ID NO: 789986
cuuaauguggacauuuggc

SEQ ID NO: 789988 - RNA, 19 nt, Artificial Sequence
  Description of Artificial Sequence: Synthetic oligonucleotide
  Sense strand starting at position 3892 of SEQ ID NO: 587408
cauggagaccaucgucaua

SEQ ID NO: 789989 - RNA, 19 nt, Artificial Sequence
  Description of Artificial Sequence: Synthetic oligonucleotide
  Antisense strand to SEQ ID NO: 789988
uaugacgauggucuccaug

SEQ ID NO: 789990 - RNA, 19 nt, Artificial Sequence
  Description of Artificial Sequence: Synthetic oligonucleotide
  Sense strand starting at position 3894 of SEQ ID NO: 587408
uggagaccaucgucauaug

SEQ ID NO: 789991 - RNA, 19 nt, Artificial Sequence
  Description of Artificial Sequence: Synthetic oligonucleotide
  Antisense strand to SEQ ID NO: 789990
cauaugacgauggucucca

SEQ ID NO: 789992 - RNA, 19 nt, Artificial Sequence
  Description of Artificial Sequence: Synthetic oligonucleotide
  Sense strand starting at position 3895 of SEQ ID NO: 587408
ggagaccaucgucauaugu

SEQ ID NO: 789993 - RNA, 19 nt, Artificial Sequence
  Description of Artificial Sequence: Synthetic oligonucleotide
  Antisense strand to SEQ ID NO: 789992
acauaugacgauggucucc

SEQ ID NO: 789994 - RNA, 19 nt, Artificial Sequence
  Description of Artificial Sequence: Synthetic oligonucleotide
  Sense strand starting at position 3912 of SEQ ID NO: 587408
gugugaguaaugugagaac

SEQ ID NO: 789995 - RNA, 19 nt, Artificial Sequence
  Description of Artificial Sequence: Synthetic oligonucleotide
  Antisense strand to SEQ ID NO: 789994
guucucacauuacucacac

SEQ ID NO: 789996 - RNA, 19 nt, Artificial Sequence
  Description of Artificial Sequence: Synthetic oligonucleotide
  Sense strand starting at position 129 of SEQ ID NO: 587409
cccuguauacuugggacuu

SEQ ID NO: 789997 - RNA, 19 nt, Artificial Sequence
  Description of Artificial Sequence: Synthetic oligonucleotide
  Antisense strand to SEQ ID NO: 789996
aagucccaaguauacaggg

SEQ ID NO: 789998 - RNA, 19 nt, Artificial Sequence
  Description of Artificial Sequence: Synthetic oligonucleotide
  Sense strand starting at position 130 of SEQ ID NO: 587409
ccuguauacuugggacuuu

SEQ ID NO: 789999 - RNA, 19 nt, Artificial Sequence
  Description of Artificial Sequence: Synthetic oligonucleotide
  Antisense strand to SEQ ID NO: 789998
aaagucccaaguauacagg

SEQ ID NO: 790000 - RNA, 19 nt, Artificial Sequence
  Description of Artificial Sequence: Synthetic oligonucleotide
  Sense strand starting at position 184 of SEQ ID NO: 587409
ucuccucauuuagagauga

SEQ ID NO: 790001 - RNA, 19 nt, Artificial Sequence
  Description of Artificial Sequence: Synthetic oligonucleotide
  Antisense strand to SEQ ID NO: 790000
ucaucucuaaaugaggaga

SEQ ID NO: 790002 - RNA, 19 nt, Artificial Sequence
  Description of Artificial Sequence: Synthetic oligonucleotide
  Sense strand starting at position 742 of SEQ ID NO: 587409
caguuacuguggcaacaau

SEQ ID NO: 790003 - RNA, 19 nt, Artificial Sequence
  Description of Artificial Sequence: Synthetic oligonucleotide
  Antisense strand to SEQ ID NO: 790002
auuguugccacaguaacug

SEQ ID NO: 790004 - RNA, 19 nt, Artificial Sequence
  Description of Artificial Sequence: Synthetic oligonucleotide
  Sense strand starting at position 779 of SEQ ID NO: 587409
gcagaauccagcuagguca

SEQ ID NO: 790005 - RNA, 19 nt, Artificial Sequence
  Description of Artificial Sequence: Synthetic oligonucleotide
  Antisense strand to SEQ ID NO: 790004
ugaccuagcuggauucugc

SEQ ID NO: 790006 - RNA, 19 nt, Artificial Sequence
  Description of Artificial Sequence: Synthetic oligonucleotide
  Sense strand starting at position 1000 of SEQ ID NO: 587409
agaggugucccuuacuuag

SEQ ID NO: 790007 - RNA, 19 nt, Artificial Sequence
  Description of Artificial Sequence: Synthetic oligonucleotide
  Antisense strand to SEQ ID NO: 790006
cuaaguaagggacaccucu

SEQ ID NO: 790008 - RNA, 19 nt, Artificial Sequence
  Description of Artificial Sequence: Synthetic oligonucleotide
  Sense strand starting at position 1119 of SEQ ID NO: 587409
cguugugucugcugggaug

SEQ ID NO: 790009 - RNA, 19 nt, Artificial Sequence
  Description of Artificial Sequence: Synthetic oligonucleotide
  Antisense strand to SEQ ID NO: 790008
caucccagcagacacaacg

SEQ ID NO: 790010 - RNA, 19 nt, Artificial Sequence
  Description of Artificial Sequence: Synthetic oligonucleotide
  Sense strand starting at position 1169 of SEQ ID NO: 587409
ccucucauacucggauaaa

SEQ ID NO: 790011 - RNA, 19 nt, Artificial Sequence
  Description of Artificial Sequence: Synthetic oligonucleotide
  Antisense strand to SEQ ID NO: 790010
uuuauccgaguaugagagg

SEQ ID NO: 790012 - RNA, 19 nt, Artificial Sequence
  Description of Artificial Sequence: Synthetic oligonucleotide
  Sense strand starting at position 1170 of SEQ ID NO: 587409
cucucauacucggauaaag

SEQ ID NO: 790013 - RNA, 19 nt, Artificial Sequence
  Description of Artificial Sequence: Synthetic oligonucleotide
  Antisense strand to SEQ ID NO: 790012
cuuuauccgaguaugagag

SEQ ID NO: 790014 - RNA, 19 nt, Artificial Sequence
  Description of Artificial Sequence: Synthetic oligonucleotide
  Sense strand starting at position 1452 of SEQ ID NO: 587409
uauagcugguccuguugua

SEQ ID NO: 790015 - RNA, 19 nt, Artificial Sequence
  Description of Artificial Sequence: Synthetic oligonucleotide
  Antisense strand to SEQ ID NO: 790014
uacaacaggaccagcuaua

SEQ ID NO: 790016 - RNA, 19 nt, Artificial Sequence
  Description of Artificial Sequence: Synthetic oligonucleotide
  Sense strand starting at position 1841 of SEQ ID NO: 587409
uggcauccaucccagagua

SEQ ID NO: 790017 - RNA, 19 nt, Artificial Sequence
  Description of Artificial Sequence: Synthetic oligonucleotide
  Antisense strand to SEQ ID NO: 790016
uacucugggauggaugcca

SEQ ID NO: 790018 - RNA, 19 nt, Artificial Sequence
  Description of Artificial Sequence: Synthetic oligonucleotide
  Sense strand starting at position 1843 of SEQ ID NO: 587409
gcauccaucccagaguagu

SEQ ID NO: 790019 - RNA, 19 nt, Artificial Sequence
  Description of Artificial Sequence: Synthetic oligonucleotide
  Antisense strand to SEQ ID NO: 790018
acuacucugggauggaugc

SEQ ID NO: 790020 - RNA, 19 nt, Artificial Sequence
  Description of Artificial Sequence: Synthetic oligonucleotide
  Sense strand starting at position 1862 of SEQ ID NO: 587409
gcacguguacagcaacaua

SEQ ID NO: 790021 - RNA, 19 nt, Artificial Sequence
  Description of Artificial Sequence: Synthetic oligonucleotide
  Antisense strand to SEQ ID NO: 790020
uauguugcuguacacgugc

SEQ ID NO: 790022 - RNA, 19 nt, Artificial Sequence
  Description of Artificial Sequence: Synthetic oligonucleotide
  Sense strand starting at position 2023 of SEQ ID NO: 587409
gggugugucugcccaagaa

SEQ ID NO: 790023 - RNA, 19 nt, Artificial Sequence
  Description of Artificial Sequence: Synthetic oligonucleotide
  Antisense strand to SEQ ID NO: 790022
uucuugggcagacacaccc

SEQ ID NO: 790024 - RNA, 19 nt, Artificial Sequence
  Description of Artificial Sequence: Synthetic oligonucleotide
  Sense strand starting at position 2369 of SEQ ID NO: 587409
gccaguauucagcagagag

SEQ ID NO: 790025 - RNA, 19 nt, Artificial Sequence
  Description of Artificial Sequence: Synthetic oligonucleotide
  Antisense strand to SEQ ID NO: 790024
cucucugcugaauacuggc

SEQ ID NO: 790026 - RNA, 19 nt, Artificial Sequence
  Description of Artificial Sequence: Synthetic oligonucleotide
  Sense strand starting at position 2495 of SEQ ID NO: 587409
gggagcaguucucauccuu

SEQ ID NO: 790027 - RNA, 19 nt, Artificial Sequence
  Description of Artificial Sequence: Synthetic oligonucleotide
  Antisense strand to SEQ ID NO: 790026
aaggaugagaacugcuccc

SEQ ID NO: 790028 - RNA, 19 nt, Artificial Sequence
  Description of Artificial Sequence: Synthetic oligonucleotide
  Sense strand starting at position 2500 of SEQ ID NO: 587409
caguucucauccuugggau

SEQ ID NO: 790029 - RNA, 19 nt, Artificial Sequence
  Description of Artificial Sequence: Synthetic oligonucleotide
  Antisense strand to SEQ ID NO: 790028
aucccaaggaugagaacug

SEQ ID NO: 790030 - RNA, 19 nt, Artificial Sequence
  Description of Artificial Sequence: Synthetic oligonucleotide
  Sense strand starting at position 2501 of SEQ ID NO: 587409
aguucucauccuugggaug

SEQ ID NO: 790031 - RNA, 19 nt, Artificial Sequence
  Description of Artificial Sequence: Synthetic oligonucleotide
  Antisense strand to SEQ ID NO: 790030
caucccaaggaugagaacu

SEQ ID NO: 790032 - RNA, 19 nt, Artificial Sequence
  Description of Artificial Sequence: Synthetic oligonucleotide
  Sense strand starting at position 2502 of SEQ ID NO: 587409
guucucauccuugggauga

SEQ ID NO: 790033 - RNA, 19 nt, Artificial Sequence
  Description of Artificial Sequence: Synthetic oligonucleotide
  Antisense strand to SEQ ID NO: 790032
ucaucccaaggaugagaac

SEQ ID NO: 790034 - RNA, 19 nt, Artificial Sequence
  Description of Artificial Sequence: Synthetic oligonucleotide
  Sense strand starting at position 2546 of SEQ ID NO: 587409
aucagaagguuccauuaga

SEQ ID NO: 790035 - RNA, 19 nt, Artificial Sequence
  Description of Artificial Sequence: Synthetic oligonucleotide
  Antisense strand to SEQ ID NO: 790034
ucuaauggaaccuucugau

SEQ ID NO: 790036 - RNA, 19 nt, Artificial Sequence
  Description of Artificial Sequence: Synthetic oligonucleotide
  Sense strand starting at position 2828 of SEQ ID NO: 587409
auaggugucucuuccagga

SEQ ID NO: 790037 - RNA, 19 nt, Artificial Sequence
  Description of Artificial Sequence: Synthetic oligonucleotide
  Antisense strand to SEQ ID NO: 790036
uccuggaagagacaccuau

SEQ ID NO: 790038 - RNA, 19 nt, Artificial Sequence
  Description of Artificial Sequence: Synthetic oligonucleotide
  Sense strand starting at position 3205 of SEQ ID NO: 587409
gcauuaacccagcgucaug

SEQ ID NO: 790039 - RNA, 19 nt, Artificial Sequence
  Description of Artificial Sequence: Synthetic oligonucleotide
  Antisense strand to SEQ ID NO: 790038
caugacgcuggguuaaugc

SEQ ID NO: 790040 - RNA, 19 nt, Artificial Sequence
  Description of Artificial Sequence: Synthetic oligonucleotide
  Sense strand starting at position 3210 of SEQ ID NO: 587409
aacccagcgucaugacaaa

SEQ ID NO: 790041 - RNA, 19 nt, Artificial Sequence
  Description of Artificial Sequence: Synthetic oligonucleotide
  Antisense strand to SEQ ID NO: 790040
uuugucaugacgcuggguu

SEQ ID NO: 790042 - RNA, 19 nt, Artificial Sequence
  Description of Artificial Sequence: Synthetic oligonucleotide
  Sense strand starting at position 3520 of SEQ ID NO: 587409
gccagaauugguuacccaa

SEQ ID NO: 790043 - RNA, 19 nt, Artificial Sequence
  Description of Artificial Sequence: Synthetic oligonucleotide
  Antisense strand to SEQ ID NO: 790042
uuggguaaccaauucuggc

SEQ ID NO: 790044 - RNA, 19 nt, Artificial Sequence
  Description of Artificial Sequence: Synthetic oligonucleotide
  Sense strand starting at position 3583 of SEQ ID NO: 587409
gguccucaguacugagacu

SEQ ID NO: 790045 - RNA, 19 nt, Artificial Sequence
  Description of Artificial Sequence: Synthetic oligonucleotide
  Antisense strand to SEQ ID NO: 790044
agucucaguacugaggacc

SEQ ID NO: 790046 - RNA, 19 nt, Artificial Sequence
  Description of Artificial Sequence: Synthetic oligonucleotide
  Sense strand starting at position 3703 of SEQ ID NO: 587409
ggagcuuccugccugguaa

SEQ ID NO: 790047 - RNA, 19 nt, Artificial Sequence
  Description of Artificial Sequence: Synthetic oligonucleotide
  Antisense strand to SEQ ID NO: 790046
uuaccaggcaggaagcucc

SEQ ID NO: 790048 - RNA, 19 nt, Artificial Sequence
  Description of Artificial Sequence: Synthetic oligonucleotide
  Sense strand starting at position 3963 of SEQ ID NO: 587409
gaugguaucagcuguuguu

SEQ ID NO: 790049 - RNA, 19 nt, Artificial Sequence
  Description of Artificial Sequence: Synthetic oligonucleotide
  Antisense strand to SEQ ID NO: 790048
aacaacagcugauaccauc

SEQ ID NO: 790050 - RNA, 19 nt, Artificial Sequence
  Description of Artificial Sequence: Synthetic oligonucleotide
  Sense strand starting at position 158 of SEQ ID NO: 587410
gcauuaacccagcgucaug

SEQ ID NO: 790051 - RNA, 19 nt, Artificial Sequence
  Description of Artificial Sequence: Synthetic oligonucleotide
  Antisense strand to SEQ ID NO: 790050
caugacgcuggguuaaugc

SEQ ID NO: 790052 - RNA, 19 nt, Artificial Sequence
  Description of Artificial Sequence: Synthetic oligonucleotide
  Sense strand starting at position 163 of SEQ ID NO: 587410
aacccagcgucaugacaaa

SEQ ID NO: 790053 - RNA, 19 nt, Artificial Sequence
  Description of Artificial Sequence: Synthetic oligonucleotide
  Antisense strand to SEQ ID NO: 790052
uuugucaugacgcuggguu

SEQ ID NO: 790054 - RNA, 19 nt, Artificial Sequence
  Description of Artificial Sequence: Synthetic oligonucleotide
  Sense strand starting at position 473 of SEQ ID NO: 587410
gccagaauugguuacccaa

SEQ ID NO: 790055 - RNA, 19 nt, Artificial Sequence
  Description of Artificial Sequence: Synthetic oligonucleotide
  Antisense strand to SEQ ID NO: 790054
uuggguaaccaauucuggc

SEQ ID NO: 790056 - RNA, 19 nt, Artificial Sequence
  Description of Artificial Sequence: Synthetic oligonucleotide
  Sense strand starting at position 536 of SEQ ID NO: 587410
gguccucaguacugagacu

SEQ ID NO: 790057 - RNA, 19 nt, Artificial Sequence
  Description of Artificial Sequence: Synthetic oligonucleotide
  Antisense strand to SEQ ID NO: 790056
agucucaguacugaggacc

SEQ ID NO: 790058 - RNA, 19 nt, Artificial Sequence
  Description of Artificial Sequence: Synthetic oligonucleotide
  Sense strand starting at position 656 of SEQ ID NO: 587410
ggagcuuccugccugguaa

SEQ ID NO: 790059 - RNA, 19 nt, Artificial Sequence
  Description of Artificial Sequence: Synthetic oligonucleotide
  Antisense strand to SEQ ID NO: 790058
uuaccaggcaggaagcucc

SEQ ID NO: 790060 - RNA, 19 nt, Artificial Sequence
  Description of Artificial Sequence: Synthetic oligonucleotide
  Sense strand starting at position 916 of SEQ ID NO: 587410
gaugguaucagcuguuguu

SEQ ID NO: 790061 - RNA, 19 nt, Artificial Sequence
  Description of Artificial Sequence: Synthetic oligonucleotide
  Antisense strand to SEQ ID NO: 790060
aacaacagcugauaccauc

SEQ ID NO: 790062 - RNA, 19 nt, Artificial Sequence
  Description of Artificial Sequence: Synthetic oligonucleotide
  Sense strand starting at position 1202 of SEQ ID NO: 587410
gcaucagauccauggaacu

SEQ ID NO: 790063 - RNA, 19 nt, Artificial Sequence
  Description of Artificial Sequence: Synthetic oligonucleotide
  Antisense strand to SEQ ID NO: 790062
aguuccauggaucugaugc

SEQ ID NO: 790064 - RNA, 19 nt, Artificial Sequence
  Description of Artificial Sequence: Synthetic oligonucleotide
  Sense strand starting at position 1580 of SEQ ID NO: 587410
agagcugucuucuggugca

SEQ ID NO: 790065 - RNA, 19 nt, Artificial Sequence
  Description of Artificial Sequence: Synthetic oligonucleotide
  Antisense strand to SEQ ID NO: 790064
ugcaccagaagacagcucu

SEQ ID NO: 790066 - RNA, 19 nt, Artificial Sequence
  Description of Artificial Sequence: Synthetic oligonucleotide
  Sense strand starting at position 1715 of SEQ ID NO: 587410
ggugccuccuccuauugaa

SEQ ID NO: 790067 - RNA, 19 nt, Artificial Sequence
  Description of Artificial Sequence: Synthetic oligonucleotide
  Antisense strand to SEQ ID NO: 790066
uucaauaggaggaggcacc

SEQ ID NO: 790068 - RNA, 19 nt, Artificial Sequence
  Description of Artificial Sequence: Synthetic oligonucleotide
  Sense strand starting at position 1984 of SEQ ID NO: 587410
cugccucuuccucagagau

SEQ ID NO: 790069 - RNA, 19 nt, Artificial Sequence
  Description of Artificial Sequence: Synthetic oligonucleotide
  Antisense strand to SEQ ID NO: 790068
aucucugaggaagaggcag

SEQ ID NO: 790070 - RNA, 19 nt, Artificial Sequence
  Description of Artificial Sequence: Synthetic oligonucleotide
  Sense strand starting at position 2124 of SEQ ID NO: 587410
ggcucuagaauuggcuuua

SEQ ID NO: 790071 - RNA, 19 nt, Artificial Sequence
  Description of Artificial Sequence: Synthetic oligonucleotide
  Antisense strand to SEQ ID NO: 790070
uaaagccaauucuagagcc

SEQ ID NO: 790072 - RNA, 19 nt, Artificial Sequence
  Description of Artificial Sequence: Synthetic oligonucleotide
  Sense strand starting at position 2185 of SEQ ID NO: 587410
gccagucuugaagaguaug

SEQ ID NO: 790073 - RNA, 19 nt, Artificial Sequence
  Description of Artificial Sequence: Synthetic oligonucleotide
  Antisense strand to SEQ ID NO: 790072
cauacucuucaagacuggc

SEQ ID NO: 790074 - RNA, 19 nt, Artificial Sequence
  Description of Artificial Sequence: Synthetic oligonucleotide
  Sense strand starting at position 2239 of SEQ ID NO: 587410
guguggagcucgggacaau

SEQ ID NO: 790075 - RNA, 19 nt, Artificial Sequence
  Description of Artificial Sequence: Synthetic oligonucleotide
  Antisense strand to SEQ ID NO: 790074
auugucccgagcuccacac

SEQ ID NO: 790076 - RNA, 19 nt, Artificial Sequence
  Description of Artificial Sequence: Synthetic oligonucleotide
  Sense strand starting at position 2446 of SEQ ID NO: 587410
agggacagcucucuuccaa

SEQ ID NO: 790077 - RNA, 19 nt, Artificial Sequence
  Description of Artificial Sequence: Synthetic oligonucleotide
  Antisense strand to SEQ ID NO: 790076
uuggaagagagcugucccu

SEQ ID NO: 790078 - RNA, 19 nt, Artificial Sequence
  Description of Artificial Sequence: Synthetic oligonucleotide
  Sense strand starting at position 2500 of SEQ ID NO: 587410
gccugagucucacauucua

SEQ ID NO: 790079 - RNA, 19 nt, Artificial Sequence
  Description of Artificial Sequence: Synthetic oligonucleotide
  Antisense strand to SEQ ID NO: 790078
uagaaugugagacucaggc

SEQ ID NO: 790080 - RNA, 19 nt, Artificial Sequence
  Description of Artificial Sequence: Synthetic oligonucleotide
  Sense strand starting at position 2508 of SEQ ID NO: 587410
cucacauucuaucggaaug

SEQ ID NO: 790081 - RNA, 19 nt, Artificial Sequence
  Description of Artificial Sequence: Synthetic oligonucleotide
  Antisense strand to SEQ ID NO: 790080
cauuccgauagaaugugag

SEQ ID NO: 790082 - RNA, 19 nt, Artificial Sequence
  Description of Artificial Sequence: Synthetic oligonucleotide
  Sense strand starting at position 2791 of SEQ ID NO: 587410
guccuugucccaugggaag

SEQ ID NO: 790083 - RNA, 19 nt, Artificial Sequence
  Description of Artificial Sequence: Synthetic oligonucleotide
  Antisense strand to SEQ ID NO: 790082
cuucccaugggacaaggac

SEQ ID NO: 790084 - RNA, 19 nt, Artificial Sequence
  Description of Artificial Sequence: Synthetic oligonucleotide
  Sense strand starting at position 3023 of SEQ ID NO: 587410
cucucauaccuuuggaagu

SEQ ID NO: 790085 - RNA, 19 nt, Artificial Sequence
  Description of Artificial Sequence: Synthetic oligonucleotide
  Antisense strand to SEQ ID NO: 790084
acuuccaaagguaugagag

SEQ ID NO: 790086 - RNA, 19 nt, Artificial Sequence
  Description of Artificial Sequence: Synthetic oligonucleotide
  Sense strand starting at position 3024 of SEQ ID NO: 587410
ucucauaccuuuggaaguu

SEQ ID NO: 790087 - RNA, 19 nt, Artificial Sequence
  Description of Artificial Sequence: Synthetic oligonucleotide
  Antisense strand to SEQ ID NO: 790086
aacuuccaaagguaugaga

SEQ ID NO: 790088 - RNA, 19 nt, Artificial Sequence
  Description of Artificial Sequence: Synthetic oligonucleotide
  Sense strand starting at position 3918 of SEQ ID NO: 587410
gugcucacuagcugugaga

SEQ ID NO: 790089 - RNA, 19 nt, Artificial Sequence
  Description of Artificial Sequence: Synthetic oligonucleotide
  Antisense strand to SEQ ID NO: 790088
ucucacagcuagugagcac

SEQ ID NO: 790090 - RNA, 19 nt, Artificial Sequence
  Description of Artificial Sequence: Synthetic oligonucleotide
  Sense strand starting at position 3937 of SEQ ID NO: 587410
ccgugaauggccuggcauu

SEQ ID NO: 790091 - RNA, 19 nt, Artificial Sequence
  Description of Artificial Sequence: Synthetic oligonucleotide
  Antisense strand to SEQ ID NO: 790090
aaugccaggccauucacgg

SEQ ID NO: 790092 - RNA, 19 nt, Artificial Sequence
  Description of Artificial Sequence: Synthetic oligonucleotide
  Sense strand starting at position 3938 of SEQ ID NO: 587410
cgugaauggccuggcauuu

SEQ ID NO: 790093 - RNA, 19 nt, Artificial Sequence
  Description of Artificial Sequence: Synthetic oligonucleotide
  Antisense strand to SEQ ID NO: 790092
aaaugccaggccauucacg

SEQ ID NO: 790094 - RNA, 19 nt, Artificial Sequence
  Description of Artificial Sequence: Synthetic oligonucleotide
  Sense strand starting at position 3950 of SEQ ID NO: 587410
ggcauuucugagugugaac

SEQ ID NO: 790095 - RNA, 19 nt, Artificial Sequence
  Description of Artificial Sequence: Synthetic oligonucleotide
  Antisense strand to SEQ ID NO: 790094
guucacacucagaaaugcc

SEQ ID NO: 790096 - RNA, 19 nt, Artificial Sequence
  Description of Artificial Sequence: Synthetic oligonucleotide
  Sense strand starting at position 722 of SEQ ID NO: 587411
cugccucuuccucagagau

SEQ ID NO: 790097 - RNA, 19 nt, Artificial Sequence
  Description of Artificial Sequence: Synthetic oligonucleotide
  Antisense strand to SEQ ID NO: 790096
aucucugaggaagaggcag

SEQ ID NO: 790098 - RNA, 19 nt, Artificial Sequence
  Description of Artificial Sequence: Synthetic oligonucleotide
  Sense strand starting at position 862 of SEQ ID NO: 587411
ggcucuagaauuggcuuua

SEQ ID NO: 790099 - RNA, 19 nt, Artificial Sequence
  Description of Artificial Sequence: Synthetic oligonucleotide
  Antisense strand to SEQ ID NO: 790098
uaaagccaauucuagagcc

SEQ ID NO: 790100 - RNA, 19 nt, Artificial Sequence
  Description of Artificial Sequence: Synthetic oligonucleotide
  Sense strand starting at position 923 of SEQ ID NO: 587411
gccagucuugaagaguaug

SEQ ID NO: 790101 - RNA, 19 nt, Artificial Sequence
  Description of Artificial Sequence: Synthetic oligonucleotide
  Antisense strand to SEQ ID NO: 790100
cauacucuucaagacuggc

SEQ ID NO: 790102 - RNA, 19 nt, Artificial Sequence
  Description of Artificial Sequence: Synthetic oligonucleotide
  Sense strand starting at position 1184 of SEQ ID NO: 587411
agggacagcucucuuccaa

SEQ ID NO: 790103 - RNA, 19 nt, Artificial Sequence
  Description of Artificial Sequence: Synthetic oligonucleotide
  Antisense strand to SEQ ID NO: 790102
uuggaagagagcugucccu

SEQ ID NO: 790104 - RNA, 19 nt, Artificial Sequence
  Description of Artificial Sequence: Synthetic oligonucleotide
  Sense strand starting at position 1246 of SEQ ID NO: 587411
cucacauucuaucggaaug

SEQ ID NO: 790105 - RNA, 19 nt, Artificial Sequence
  Description of Artificial Sequence: Synthetic oligonucleotide
  Antisense strand to SEQ ID NO: 790104
cauuccgauagaaugugag

SEQ ID NO: 790106 - RNA, 19 nt, Artificial Sequence
  Description of Artificial Sequence: Synthetic oligonucleotide
  Sense strand starting at position 1529 of SEQ ID NO: 587411
guccuugucccaugggaag

SEQ ID NO: 790107 - RNA, 19 nt, Artificial Sequence
  Description of Artificial Sequence: Synthetic oligonucleotide
  Antisense strand to SEQ ID NO: 790106
cuucccaugggacaaggac

SEQ ID NO: 790108 - RNA, 19 nt, Artificial Sequence
  Description of Artificial Sequence: Synthetic oligonucleotide
  Sense strand starting at position 1761 of SEQ ID NO: 587411
cucucauaccuuuggaagu

SEQ ID NO: 790109 - RNA, 19 nt, Artificial Sequence
  Description of Artificial Sequence: Synthetic oligonucleotide
  Antisense strand to SEQ ID NO: 790108
acuuccaaagguaugagag

SEQ ID NO: 790110 - RNA, 19 nt, Artificial Sequence
  Description of Artificial Sequence: Synthetic oligonucleotide
  Sense strand starting at position 2656 of SEQ ID NO: 587411
gugcucacuagcugugaga

SEQ ID NO: 790111 - RNA, 19 nt, Artificial Sequence
  Description of Artificial Sequence: Synthetic oligonucleotide
  Antisense strand to SEQ ID NO: 790110
ucucacagcuagugagcac

SEQ ID NO: 790112 - RNA, 19 nt, Artificial Sequence
  Description of Artificial Sequence: Synthetic oligonucleotide
  Sense strand starting at position 2675 of SEQ ID NO: 587411
ccgugaauggccuggcauu

SEQ ID NO: 790113 - RNA, 19 nt, Artificial Sequence
  Description of Artificial Sequence: Synthetic oligonucleotide
  Antisense strand to SEQ ID NO: 790112
aaugccaggccauucacgg

SEQ ID NO: 790114 - RNA, 19 nt, Artificial Sequence
  Description of Artificial Sequence: Synthetic oligonucleotide
  Sense strand starting at position 2676 of SEQ ID NO: 587411
cgugaauggccuggcauuu

SEQ ID NO: 790115 - RNA, 19 nt, Artificial Sequence
  Description of Artificial Sequence: Synthetic oligonucleotide
  Antisense strand to SEQ ID NO: 790114
aaaugccaggccauucacg

SEQ ID NO: 790116 - RNA, 19 nt, Artificial Sequence
  Description of Artificial Sequence: Synthetic oligonucleotide
  Sense strand starting at position 2688 of SEQ ID NO: 587411
ggcauuucugagugugaac

SEQ ID NO: 790117 - RNA, 19 nt, Artificial Sequence
  Description of Artificial Sequence: Synthetic oligonucleotide
  Antisense strand to SEQ ID NO: 790116
guucacacucagaaaugcc

SEQ ID NO: 790118 - RNA, 19 nt, Artificial Sequence
  Description of Artificial Sequence: Synthetic oligonucleotide
  Sense strand starting at position 2727 of SEQ ID NO: 587411
ggaacaucucacugcccua

SEQ ID NO: 790119 - RNA, 19 nt, Artificial Sequence
  Description of Artificial Sequence: Synthetic oligonucleotide
  Antisense strand to SEQ ID NO: 790118
uagggcagugagauguucc

SEQ ID NO: 790120 - RNA, 19 nt, Artificial Sequence
  Description of Artificial Sequence: Synthetic oligonucleotide
  Sense strand starting at position 2760 of SEQ ID NO: 587411
gcaaguaugcccugagugu

SEQ ID NO: 790121 - RNA, 19 nt, Artificial Sequence
  Description of Artificial Sequence: Synthetic oligonucleotide
  Antisense strand to SEQ ID NO: 790120
acacucagggcauacuugc

SEQ ID NO: 790122 - RNA, 19 nt, Artificial Sequence
  Description of Artificial Sequence: Synthetic oligonucleotide
  Sense strand starting at position 2792 of SEQ ID NO: 587411
uccugagcucgguacauau

SEQ ID NO: 790123 - RNA, 19 nt, Artificial Sequence
  Description of Artificial Sequence: Synthetic oligonucleotide
  Antisense strand to SEQ ID NO: 790122
auauguaccgagcucagga

SEQ ID NO: 790124 - RNA, 19 nt, Artificial Sequence
  Description of Artificial Sequence: Synthetic oligonucleotide
  Sense strand starting at position 2794 of SEQ ID NO: 587411
cugagcucgguacauauua

SEQ ID NO: 790125 - RNA, 19 nt, Artificial Sequence
  Description of Artificial Sequence: Synthetic oligonucleotide
  Antisense strand to SEQ ID NO: 790124
uaauauguaccgagcucag

SEQ ID NO: 790126 - RNA, 19 nt, Artificial Sequence
  Description of Artificial Sequence: Synthetic oligonucleotide
  Sense strand starting at position 2796 of SEQ ID NO: 587411
gagcucgguacauauuagu

SEQ ID NO: 790127 - RNA, 19 nt, Artificial Sequence
  Description of Artificial Sequence: Synthetic oligonucleotide
  Antisense strand to SEQ ID NO: 790126
acuaauauguaccgagcuc

SEQ ID NO: 790128 - RNA, 19 nt, Artificial Sequence
  Description of Artificial Sequence: Synthetic oligonucleotide
  Sense strand starting at position 2802 of SEQ ID NO: 587411
gguacauauuaguuuccuu

SEQ ID NO: 790129 - RNA, 19 nt, Artificial Sequence
  Description of Artificial Sequence: Synthetic oligonucleotide
  Antisense strand to SEQ ID NO: 790128
aaggaaacuaauauguacc

SEQ ID NO: 790130 - RNA, 19 nt, Artificial Sequence
  Description of Artificial Sequence: Synthetic oligonucleotide
  Sense strand starting at position 2874 of SEQ ID NO: 587411
aaagguugcuuuguuaugu

SEQ ID NO: 790131 - RNA, 19 nt, Artificial Sequence
  Description of Artificial Sequence: Synthetic oligonucleotide
  Antisense strand to SEQ ID NO: 790130
acauaacaaagcaaccuuu

SEQ ID NO: 790132 - RNA, 19 nt, Artificial Sequence
  Description of Artificial Sequence: Synthetic oligonucleotide
  Sense strand starting at position 2885 of SEQ ID NO: 587411
uguuaugucauguguaaga

SEQ ID NO: 790133 - RNA, 19 nt, Artificial Sequence
  Description of Artificial Sequence: Synthetic oligonucleotide
  Antisense strand to SEQ ID NO: 790132
ucuuacacaugacauaaca

SEQ ID NO: 790134 - RNA, 19 nt, Artificial Sequence
  Description of Artificial Sequence: Synthetic oligonucleotide
  Sense strand starting at position 2887 of SEQ ID NO: 587411
uuaugucauguguaagaga

SEQ ID NO: 790135 - RNA, 19 nt, Artificial Sequence
  Description of Artificial Sequence: Synthetic oligonucleotide
  Antisense strand to SEQ ID NO: 790134
ucucuuacacaugacauaa

SEQ ID NO: 790136 - RNA, 19 nt, Artificial Sequence
  Description of Artificial Sequence: Synthetic oligonucleotide
  Sense strand starting at position 2950 of SEQ ID NO: 587411
auggguuuaucccuccaau

SEQ ID NO: 790137 - RNA, 19 nt, Artificial Sequence
  Description of Artificial Sequence: Synthetic oligonucleotide
  Antisense strand to SEQ ID NO: 790136
auuggagggauaaacccau

SEQ ID NO: 790138 - RNA, 19 nt, Artificial Sequence
  Description of Artificial Sequence: Synthetic oligonucleotide
  Sense strand starting at position 2982 of SEQ ID NO: 587411
ccuugagagcucuaucuug

SEQ ID NO: 790139 - RNA, 19 nt, Artificial Sequence
  Description of Artificial Sequence: Synthetic oligonucleotide
  Antisense strand to SEQ ID NO: 790138
caagauagagcucucaagg

SEQ ID NO: 790140 - RNA, 19 nt, Artificial Sequence
  Description of Artificial Sequence: Synthetic oligonucleotide
  Sense strand starting at position 2990 of SEQ ID NO: 587411
gcucuaucuuguccauguu

SEQ ID NO: 790141 - RNA, 19 nt, Artificial Sequence
  Description of Artificial Sequence: Synthetic oligonucleotide
  Antisense strand to SEQ ID NO: 790140
aacauggacaagauagagc

SEQ ID NO: 790142 - RNA, 19 nt, Artificial Sequence
  Description of Artificial Sequence: Synthetic oligonucleotide
  Sense strand starting at position 3125 of SEQ ID NO: 587411
gcaggauucuggccucucu

SEQ ID NO: 790143 - RNA, 19 nt, Artificial Sequence
  Description of Artificial Sequence: Synthetic oligonucleotide
  Antisense strand to SEQ ID NO: 790142
agagaggccagaauccugc

SEQ ID NO: 790144 - RNA, 19 nt, Artificial Sequence
  Description of Artificial Sequence: Synthetic oligonucleotide
  Sense strand starting at position 3178 of SEQ ID NO: 587411
gccaaugacuucuuucuag

SEQ ID NO: 790145 - RNA, 19 nt, Artificial Sequence
  Description of Artificial Sequence: Synthetic oligonucleotide
  Antisense strand to SEQ ID NO: 790144
cuagaaagaagucauuggc

SEQ ID NO: 790146 - RNA, 19 nt, Artificial Sequence
  Description of Artificial Sequence: Synthetic oligonucleotide
  Sense strand starting at position 3299 of SEQ ID NO: 587411
acuugcuauuuagcggaau

SEQ ID NO: 790147 - RNA, 19 nt, Artificial Sequence
  Description of Artificial Sequence: Synthetic oligonucleotide
  Antisense strand to SEQ ID NO: 790146
auuccgcuaaauagcaagu

SEQ ID NO: 790148 - RNA, 19 nt, Artificial Sequence
  Description of Artificial Sequence: Synthetic oligonucleotide
  Sense strand starting at position 3301 of SEQ ID NO: 587411
uugcuauuuagcggaauca

SEQ ID NO: 790149 - RNA, 19 nt, Artificial Sequence
  Description of Artificial Sequence: Synthetic oligonucleotide
  Antisense strand to SEQ ID NO: 790148
ugauuccgcuaaauagcaa

SEQ ID NO: 790150 - RNA, 19 nt, Artificial Sequence
  Description of Artificial Sequence: Synthetic oligonucleotide
  Sense strand starting at position 3335 of SEQ ID NO: 587411
ucaugacaguucuggacaa

SEQ ID NO: 790151 - RNA, 19 nt, Artificial Sequence
  Description of Artificial Sequence: Synthetic oligonucleotide
  Antisense strand to SEQ ID NO: 790150
uuguccagaacugucauga

SEQ ID NO: 790152 - RNA, 19 nt, Artificial Sequence
  Description of Artificial Sequence: Synthetic oligonucleotide
  Sense strand starting at position 3382 of SEQ ID NO: 587411
aagugaauggcuggcaaga

SEQ ID NO: 790153 - RNA, 19 nt, Artificial Sequence
  Description of Artificial Sequence: Synthetic oligonucleotide
  Antisense strand to SEQ ID NO: 790152
ucuugccagccauucacuu

SEQ ID NO: 790154 - RNA, 19 nt, Artificial Sequence
  Description of Artificial Sequence: Synthetic oligonucleotide
  Sense strand starting at position 3540 of SEQ ID NO: 587411
gggacaugcuugcuugaua

SEQ ID NO: 790155 - RNA, 19 nt, Artificial Sequence
  Description of Artificial Sequence: Synthetic oligonucleotide
  Antisense strand to SEQ ID NO: 790154
uaucaagcaagcauguccc

SEQ ID NO: 790156 - RNA, 19 nt, Artificial Sequence
  Description of Artificial Sequence: Synthetic oligonucleotide
  Sense strand starting at position 3541 of SEQ ID NO: 587411
ggacaugcuugcuugauag

SEQ ID NO: 790157 - RNA, 19 nt, Artificial Sequence
  Description of Artificial Sequence: Synthetic oligonucleotide
  Antisense strand to SEQ ID NO: 790156
cuaucaagcaagcaugucc

SEQ ID NO: 790158 - RNA, 19 nt, Artificial Sequence
  Description of Artificial Sequence: Synthetic oligonucleotide
  Sense strand starting at position 3655 of SEQ ID NO: 587411
uaaggaguuuggccgggau

SEQ ID NO: 790159 - RNA, 19 nt, Artificial Sequence
  Description of Artificial Sequence: Synthetic oligonucleotide
  Antisense strand to SEQ ID NO: 790158
aucccggccaaacuccuua

SEQ ID NO: 790160 - RNA, 19 nt, Artificial Sequence
  Description of Artificial Sequence: Synthetic oligonucleotide
  Sense strand starting at position 3658 of SEQ ID NO: 587411
ggaguuuggccgggauagu

SEQ ID NO: 790161 - RNA, 19 nt, Artificial Sequence
  Description of Artificial Sequence: Synthetic oligonucleotide
  Antisense strand to SEQ ID NO: 790160
acuaucccggccaaacucc

SEQ ID NO: 790162 - RNA, 19 nt, Artificial Sequence
  Description of Artificial Sequence: Synthetic oligonucleotide
  Sense strand starting at position 3683 of SEQ ID NO: 587411
uggguagagcugugguuga

SEQ ID NO: 790163 - RNA, 19 nt, Artificial Sequence
  Description of Artificial Sequence: Synthetic oligonucleotide
  Antisense strand to SEQ ID NO: 790162
ucaaccacagcucuaccca

SEQ ID NO: 790164 - RNA, 19 nt, Artificial Sequence
  Description of Artificial Sequence: Synthetic oligonucleotide
  Sense strand starting at position 3688 of SEQ ID NO: 587411
agagcugugguugauggua

SEQ ID NO: 790165 - RNA, 19 nt, Artificial Sequence
  Description of Artificial Sequence: Synthetic oligonucleotide
  Antisense strand to SEQ ID NO: 790164
uaccaucaaccacagcucu

SEQ ID NO: 790166 - RNA, 19 nt, Artificial Sequence
  Description of Artificial Sequence: Synthetic oligonucleotide
  Sense strand starting at position 3759 of SEQ ID NO: 587411
gaggcacagagaugaugua

SEQ ID NO: 790167 - RNA, 19 nt, Artificial Sequence
  Description of Artificial Sequence: Synthetic oligonucleotide
  Antisense strand to SEQ ID NO: 790166
uacaucaucucugugccuc

SEQ ID NO: 790168 - RNA, 19 nt, Artificial Sequence
  Description of Artificial Sequence: Synthetic oligonucleotide
  Sense strand starting at position 3785 of SEQ ID NO: 587411
aguggauauuuagauagau

SEQ ID NO: 790169 - RNA, 19 nt, Artificial Sequence
  Description of Artificial Sequence: Synthetic oligonucleotide
  Antisense strand to SEQ ID NO: 790168
aucuaucuaaauauccacu

SEQ ID NO: 790170 - RNA, 19 nt, Artificial Sequence
  Description of Artificial Sequence: Synthetic oligonucleotide
  Sense strand starting at position 3797 of SEQ ID NO: 587411
gauagaucccagugagguc

SEQ ID NO: 790171 - RNA, 19 nt, Artificial Sequence
  Description of Artificial Sequence: Synthetic oligonucleotide
  Antisense strand to SEQ ID NO: 790170
gaccucacugggaucuauc

SEQ ID NO: 790172 - RNA, 19 nt, Artificial Sequence
  Description of Artificial Sequence: Synthetic oligonucleotide
  Sense strand starting at position 3931 of SEQ ID NO: 587411
gggaaucuugggugagggu

SEQ ID NO: 790173 - RNA, 19 nt, Artificial Sequence
  Description of Artificial Sequence: Synthetic oligonucleotide
  Antisense strand to SEQ ID NO: 790172
acccucacccaagauuccc

SEQ ID NO: 790174 - RNA, 19 nt, Artificial Sequence
  Description of Artificial Sequence: Synthetic oligonucleotide
  Sense strand starting at position 3940 of SEQ ID NO: 587411
gggugaggguccucuguga

SEQ ID NO: 790175 - RNA, 19 nt, Artificial Sequence
  Description of Artificial Sequence: Synthetic oligonucleotide
  Antisense strand to SEQ ID NO: 790174
ucacagaggacccucaccc

SEQ ID NO: 790176 - RNA, 19 nt, Artificial Sequence
  Description of Artificial Sequence: Synthetic oligonucleotide
  Sense strand starting at position 211 of SEQ ID NO: 587412
cgaguaccucguuugcaca

SEQ ID NO: 790177 - RNA, 19 nt, Artificial Sequence
  Description of Artificial Sequence: Synthetic oligonucleotide
  Antisense strand to SEQ ID NO: 790176
ugugcaaacgagguacucg

SEQ ID NO: 790178 - RNA, 19 nt, Artificial Sequence
  Description of Artificial Sequence: Synthetic oligonucleotide
  Sense strand starting at position 218 of SEQ ID NO: 587412
cucguuugcacaugaagaa

SEQ ID NO: 790179 - RNA, 19 nt, Artificial Sequence
  Description of Artificial Sequence: Synthetic oligonucleotide
  Antisense strand to SEQ ID NO: 790178
uucuucaugugcaaacgag

SEQ ID NO: 790180 - RNA, 19 nt, Artificial Sequence
  Description of Artificial Sequence: Synthetic oligonucleotide
  Sense strand starting at position 230 of SEQ ID NO: 587412
ugaagaaguugagacuuga

SEQ ID NO: 790181 - RNA, 19 nt, Artificial Sequence
  Description of Artificial Sequence: Synthetic oligonucleotide
  Antisense strand to SEQ ID NO: 790180
ucaagucucaacuucuuca

SEQ ID NO: 790182 - RNA, 19 nt, Artificial Sequence
  Description of Artificial Sequence: Synthetic oligonucleotide
  Sense strand starting at position 250 of SEQ ID NO: 587412
caaguuaaguaguugguca

SEQ ID NO: 790183 - RNA, 19 nt, Artificial Sequence
  Description of Artificial Sequence: Synthetic oligonucleotide
  Antisense strand to SEQ ID NO: 790182
ugaccaacuacuuaacuug

SEQ ID NO: 790184 - RNA, 19 nt, Artificial Sequence
  Description of Artificial Sequence: Synthetic oligonucleotide
  Sense strand starting at position 254 of SEQ ID NO: 587412
uuaaguaguuggucaagga

SEQ ID NO: 790185 - RNA, 19 nt, Artificial Sequence
  Description of Artificial Sequence: Synthetic oligonucleotide
  Antisense strand to SEQ ID NO: 790184
uccuugaccaacuacuuaa

SEQ ID NO: 790186 - RNA, 19 nt, Artificial Sequence
  Description of Artificial Sequence: Synthetic oligonucleotide
  Sense strand starting at position 258 of SEQ ID NO: 587412
guaguuggucaaggacaca

SEQ ID NO: 790187 - RNA, 19 nt, Artificial Sequence
  Description of Artificial Sequence: Synthetic oligonucleotide
  Antisense strand to SEQ ID NO: 790186
uguguccuugaccaacuac

SEQ ID NO: 790188 - RNA, 19 nt, Artificial Sequence
  Description of Artificial Sequence: Synthetic oligonucleotide
  Sense strand starting at position 273 of SEQ ID NO: 587412
cacaguauuguguggaauc

SEQ ID NO: 790189 - RNA, 19 nt, Artificial Sequence
  Description of Artificial Sequence: Synthetic oligonucleotide
  Antisense strand to SEQ ID NO: 790188
gauuccacacaauacugug

SEQ ID NO: 790190 - RNA, 19 nt, Artificial Sequence
  Description of Artificial Sequence: Synthetic oligonucleotide
  Sense strand starting at position 275 of SEQ ID NO: 587412
caguauuguguggaaucua

SEQ ID NO: 790191 - RNA, 19 nt, Artificial Sequence
  Description of Artificial Sequence: Synthetic oligonucleotide
  Antisense strand to SEQ ID NO: 790190
uagauuccacacaauacug

SEQ ID NO: 790192 - RNA, 19 nt, Artificial Sequence
  Description of Artificial Sequence: Synthetic oligonucleotide
  Sense strand starting at position 426 of SEQ ID NO: 587412
gggucuugcgcuuuagcau

SEQ ID NO: 790193 - RNA, 19 nt, Artificial Sequence
  Description of Artificial Sequence: Synthetic oligonucleotide
  Antisense strand to SEQ ID NO: 790192
augcuaaagcgcaagaccc

SEQ ID NO: 790194 - RNA, 19 nt, Artificial Sequence
  Description of Artificial Sequence: Synthetic oligonucleotide
  Sense strand starting at position 497 of SEQ ID NO: 587412
ugccauuuguuagagagca

SEQ ID NO: 790195 - RNA, 19 nt, Artificial Sequence
  Description of Artificial Sequence: Synthetic oligonucleotide
  Antisense strand to SEQ ID NO: 790194
ugcucucuaacaaauggca

SEQ ID NO: 790196 - RNA, 19 nt, Artificial Sequence
  Description of Artificial Sequence: Synthetic oligonucleotide
  Sense strand starting at position 509 of SEQ ID NO: 587412
gagagcauguugguugaua

SEQ ID NO: 790197 - RNA, 19 nt, Artificial Sequence
  Description of Artificial Sequence: Synthetic oligonucleotide
  Antisense strand to SEQ ID NO: 790196
uaucaaccaacaugcucuc

SEQ ID NO: 790198 - RNA, 19 nt, Artificial Sequence
  Description of Artificial Sequence: Synthetic oligonucleotide
  Sense strand starting at position 510 of SEQ ID NO: 587412
agagcauguugguugauaa

SEQ ID NO: 790199 - RNA, 19 nt, Artificial Sequence
  Description of Artificial Sequence: Synthetic oligonucleotide
  Antisense strand to SEQ ID NO: 790198
uuaucaaccaacaugcucu

SEQ ID NO: 790200 - RNA, 19 nt, Artificial Sequence
  Description of Artificial Sequence: Synthetic oligonucleotide
  Sense strand starting at position 511 of SEQ ID NO: 587412
gagcauguugguugauaaa

SEQ ID NO: 790201 - RNA, 19 nt, Artificial Sequence
  Description of Artificial Sequence: Synthetic oligonucleotide
  Antisense strand to SEQ ID NO: 790200
uuuaucaaccaacaugcuc

SEQ ID NO: 790202 - RNA, 19 nt, Artificial Sequence
  Description of Artificial Sequence: Synthetic oligonucleotide
  Sense strand starting at position 514 of SEQ ID NO: 587412
cauguugguugauaaauua

SEQ ID NO: 790203 - RNA, 19 nt, Artificial Sequence
  Description of Artificial Sequence: Synthetic oligonucleotide
  Antisense strand to SEQ ID NO: 790202
uaauuuaucaaccaacaug

SEQ ID NO: 790204 - RNA, 19 nt, Artificial Sequence
  Description of Artificial Sequence: Synthetic oligonucleotide
  Sense strand starting at position 571 of SEQ ID NO: 587412
ggcauuugcacguaaacgu

SEQ ID NO: 790205 - RNA, 19 nt, Artificial Sequence
  Description of Artificial Sequence: Synthetic oligonucleotide
  Antisense strand to SEQ ID NO: 790204
acguuuacgugcaaaugcc

SEQ ID NO: 790206 - RNA, 19 nt, Artificial Sequence
  Description of Artificial Sequence: Synthetic oligonucleotide
  Sense strand starting at position 596 of SEQ ID NO: 587412
agccuuaaggcauaauguu

SEQ ID NO: 790207 - RNA, 19 nt, Artificial Sequence
  Description of Artificial Sequence: Synthetic oligonucleotide
  Antisense strand to SEQ ID NO: 790206
aacauuaugccuuaaggcu

SEQ ID NO: 790208 - RNA, 19 nt, Artificial Sequence
  Description of Artificial Sequence: Synthetic oligonucleotide
  Sense strand starting at position 602 of SEQ ID NO: 587412
aaggcauaauguuuguacu

SEQ ID NO: 790209 - RNA, 19 nt, Artificial Sequence
  Description of Artificial Sequence: Synthetic oligonucleotide
  Antisense strand to SEQ ID NO: 790208
aguacaaacauuaugccuu

SEQ ID NO: 790210 - RNA, 19 nt, Artificial Sequence
  Description of Artificial Sequence: Synthetic oligonucleotide
  Sense strand starting at position 756 of SEQ ID NO: 587412
gagagaguuuccuuggcuu

SEQ ID NO: 790211 - RNA, 19 nt, Artificial Sequence
  Description of Artificial Sequence: Synthetic oligonucleotide
  Antisense strand to SEQ ID NO: 790210
aagccaaggaaacucucuc

SEQ ID NO: 790212 - RNA, 19 nt, Artificial Sequence
  Description of Artificial Sequence: Synthetic oligonucleotide
  Sense strand starting at position 758 of SEQ ID NO: 587412
gagaguuuccuuggcuucu

SEQ ID NO: 790213 - RNA, 19 nt, Artificial Sequence
  Description of Artificial Sequence: Synthetic oligonucleotide
  Antisense strand to SEQ ID NO: 790212
agaagccaaggaaacucuc

SEQ ID NO: 790214 - RNA, 19 nt, Artificial Sequence
  Description of Artificial Sequence: Synthetic oligonucleotide
  Sense strand starting at position 829 of SEQ ID NO: 587412
ucauuucucgcaggucaag

SEQ ID NO: 790215 - RNA, 19 nt, Artificial Sequence
  Description of Artificial Sequence: Synthetic oligonucleotide
  Antisense strand to SEQ ID NO: 790214
cuugaccugcgagaaauga

SEQ ID NO: 790216 - RNA, 19 nt, Artificial Sequence
  Description of Artificial Sequence: Synthetic oligonucleotide
  Sense strand starting at position 1118 of SEQ ID NO: 587412
cugugugucccugccuuau

SEQ ID NO: 790217 - RNA, 19 nt, Artificial Sequence
  Description of Artificial Sequence: Synthetic oligonucleotide
  Antisense strand to SEQ ID NO: 790216
auaaggcagggacacacag

SEQ ID NO: 790218 - RNA, 19 nt, Artificial Sequence
  Description of Artificial Sequence: Synthetic oligonucleotide
  Sense strand starting at position 1192 of SEQ ID NO: 587412
ccaggaugugggugauaag

SEQ ID NO: 790219 - RNA, 19 nt, Artificial Sequence
  Description of Artificial Sequence: Synthetic oligonucleotide
  Antisense strand to SEQ ID NO: 790218
cuuaucacccacauccugg

SEQ ID NO: 790220 - RNA, 19 nt, Artificial Sequence
  Description of Artificial Sequence: Synthetic oligonucleotide
  Sense strand starting at position 1229 of SEQ ID NO: 587412
ccgaguuugugcccacuca

SEQ ID NO: 790221 - RNA, 19 nt, Artificial Sequence
  Description of Artificial Sequence: Synthetic oligonucleotide
  Antisense strand to SEQ ID NO: 790220
ugagugggcacaaacucgg

SEQ ID NO: 790222 - RNA, 19 nt, Artificial Sequence
  Description of Artificial Sequence: Synthetic oligonucleotide
  Sense strand starting at position 1230 of SEQ ID NO: 587412
cgaguuugugcccacucau

SEQ ID NO: 790223 - RNA, 19 nt, Artificial Sequence
  Description of Artificial Sequence: Synthetic oligonucleotide
  Antisense strand to SEQ ID NO: 790222
augagugggcacaaacucg

SEQ ID NO: 790224 - RNA, 19 nt, Artificial Sequence
  Description of Artificial Sequence: Synthetic oligonucleotide
  Sense strand starting at position 1257 of SEQ ID NO: 587412
gcucuucuuccaggcagaa

SEQ ID NO: 790225 - RNA, 19 nt, Artificial Sequence
  Description of Artificial Sequence: Synthetic oligonucleotide
  Antisense strand to SEQ ID NO: 790224
uucugccuggaagaagagc

SEQ ID NO: 790226 - RNA, 19 nt, Artificial Sequence
  Description of Artificial Sequence: Synthetic oligonucleotide
  Sense strand starting at position 1410 of SEQ ID NO: 587412
cccuguauacuugggacuu

SEQ ID NO: 790227 - RNA, 19 nt, Artificial Sequence
  Description of Artificial Sequence: Synthetic oligonucleotide
  Antisense strand to SEQ ID NO: 790226
aagucccaaguauacaggg

SEQ ID NO: 790228 - RNA, 19 nt, Artificial Sequence
  Description of Artificial Sequence: Synthetic oligonucleotide
  Sense strand starting at position 1465 of SEQ ID NO: 587412
ucuccucauuuagagauga

SEQ ID NO: 790229 - RNA, 19 nt, Artificial Sequence
  Description of Artificial Sequence: Synthetic oligonucleotide
  Antisense strand to SEQ ID NO: 790228
ucaucucuaaaugaggaga

SEQ ID NO: 790230 - RNA, 19 nt, Artificial Sequence
  Description of Artificial Sequence: Synthetic oligonucleotide
  Sense strand starting at position 2060 of SEQ ID NO: 587412
gcagaauccagcuagguca

SEQ ID NO: 790231 - RNA, 19 nt, Artificial Sequence
  Description of Artificial Sequence: Synthetic oligonucleotide
  Antisense strand to SEQ ID NO: 790230
ugaccuagcuggauucugc

SEQ ID NO: 790232 - RNA, 19 nt, Artificial Sequence
  Description of Artificial Sequence: Synthetic oligonucleotide
  Sense strand starting at position 2281 of SEQ ID NO: 587412
agaggugucccuuacuuag

SEQ ID NO: 790233 - RNA, 19 nt, Artificial Sequence
  Description of Artificial Sequence: Synthetic oligonucleotide
  Antisense strand to SEQ ID NO: 790232
cuaaguaagggacaccucu

SEQ ID NO: 790234 - RNA, 19 nt, Artificial Sequence
  Description of Artificial Sequence: Synthetic oligonucleotide
  Sense strand starting at position 2450 of SEQ ID NO: 587412
ccucucauacucggauaaa

SEQ ID NO: 790235 - RNA, 19 nt, Artificial Sequence
  Description of Artificial Sequence: Synthetic oligonucleotide
  Antisense strand to SEQ ID NO: 790234
uuuauccgaguaugagagg

SEQ ID NO: 790236 - RNA, 19 nt, Artificial Sequence
  Description of Artificial Sequence: Synthetic oligonucleotide
  Sense strand starting at position 2451 of SEQ ID NO: 587412
cucucauacucggauaaag

SEQ ID NO: 790237 - RNA, 19 nt, Artificial Sequence
  Description of Artificial Sequence: Synthetic oligonucleotide
  Antisense strand to SEQ ID NO: 790236
cuuuauccgaguaugagag

SEQ ID NO: 790238 - RNA, 19 nt, Artificial Sequence
  Description of Artificial Sequence: Synthetic oligonucleotide
  Sense strand starting at position 3122 of SEQ ID NO: 587412
uggcauccaucccagagua

SEQ ID NO: 790239 - RNA, 19 nt, Artificial Sequence
  Description of Artificial Sequence: Synthetic oligonucleotide
  Antisense strand to SEQ ID NO: 790238
uacucugggauggaugcca

SEQ ID NO: 790240 - RNA, 19 nt, Artificial Sequence
  Description of Artificial Sequence: Synthetic oligonucleotide
  Sense strand starting at position 3124 of SEQ ID NO: 587412
gcauccaucccagaguagu

SEQ ID NO: 790241 - RNA, 19 nt, Artificial Sequence
  Description of Artificial Sequence: Synthetic oligonucleotide
  Antisense strand to SEQ ID NO: 790240
acuacucugggauggaugc

SEQ ID NO: 790242 - RNA, 19 nt, Artificial Sequence
  Description of Artificial Sequence: Synthetic oligonucleotide
  Sense strand starting at position 3143 of SEQ ID NO: 587412
gcacguguacagcaacaua

SEQ ID NO: 790243 - RNA, 19 nt, Artificial Sequence
  Description of Artificial Sequence: Synthetic oligonucleotide
  Antisense strand to SEQ ID NO: 790242
uauguugcuguacacgugc

SEQ ID NO: 790244 - RNA, 19 nt, Artificial Sequence
  Description of Artificial Sequence: Synthetic oligonucleotide
  Sense strand starting at position 3304 of SEQ ID NO: 587412
gggugugucugcccaagaa

SEQ ID NO: 790245 - RNA, 19 nt, Artificial Sequence
  Description of Artificial Sequence: Synthetic oligonucleotide
  Antisense strand to SEQ ID NO: 790244
uucuugggcagacacaccc

SEQ ID NO: 790246 - RNA, 19 nt, Artificial Sequence
  Description of Artificial Sequence: Synthetic oligonucleotide
  Sense strand starting at position 3650 of SEQ ID NO: 587412
gccaguauucagcagagag

SEQ ID NO: 790247 - RNA, 19 nt, Artificial Sequence
  Description of Artificial Sequence: Synthetic oligonucleotide
  Antisense strand to SEQ ID NO: 790246
cucucugcugaauacuggc

SEQ ID NO: 790248 - RNA, 19 nt, Artificial Sequence
  Description of Artificial Sequence: Synthetic oligonucleotide
  Sense strand starting at position 3781 of SEQ ID NO: 587412
caguucucauccuugggau

SEQ ID NO: 790249 - RNA, 19 nt, Artificial Sequence
  Description of Artificial Sequence: Synthetic oligonucleotide
  Antisense strand to SEQ ID NO: 790248
aucccaaggaugagaacug

SEQ ID NO: 790250 - RNA, 19 nt, Artificial Sequence
  Description of Artificial Sequence: Synthetic oligonucleotide
  Sense strand starting at position 3782 of SEQ ID NO: 587412
aguucucauccuugggaug

SEQ ID NO: 790251 - RNA, 19 nt, Artificial Sequence
  Description of Artificial Sequence: Synthetic oligonucleotide
  Antisense strand to SEQ ID NO: 790250
caucccaaggaugagaacu

SEQ ID NO: 790252 - RNA, 19 nt, Artificial Sequence
  Description of Artificial Sequence: Synthetic oligonucleotide
  Sense strand starting at position 3783 of SEQ ID NO: 587412
guucucauccuugggauga

SEQ ID NO: 790253 - RNA, 19 nt, Artificial Sequence
  Description of Artificial Sequence: Synthetic oligonucleotide
  Antisense strand to SEQ ID NO: 790252
ucaucccaaggaugagaac

SEQ ID NO: 790254 - RNA, 19 nt, Artificial Sequence
  Description of Artificial Sequence: Synthetic oligonucleotide
  Sense strand starting at position 3827 of SEQ ID NO: 587412
aucagaagguuccauuaga

SEQ ID NO: 790255 - RNA, 19 nt, Artificial Sequence
  Description of Artificial Sequence: Synthetic oligonucleotide
  Antisense strand to SEQ ID NO: 790254
ucuaauggaaccuucugau

SEQ ID NO: 790256 - RNA, 19 nt, Artificial Sequence
  Description of Artificial Sequence: Synthetic oligonucleotide
  Sense strand starting at position 195 of SEQ ID NO: 587413
cuaggagaauaucugcuuu

SEQ ID NO: 790257 - RNA, 19 nt, Artificial Sequence
  Description of Artificial Sequence: Synthetic oligonucleotide
  Antisense strand to SEQ ID NO: 790256
aaagcagauauucuccuag

SEQ ID NO: 790258 - RNA, 19 nt, Artificial Sequence
  Description of Artificial Sequence: Synthetic oligonucleotide
  Sense strand starting at position 396 of SEQ ID NO: 587413
gcuugauacccuuagcuga

SEQ ID NO: 790259 - RNA, 19 nt, Artificial Sequence
  Description of Artificial Sequence: Synthetic oligonucleotide
  Antisense strand to SEQ ID NO: 790258
ucagcuaaggguaucaagc

SEQ ID NO: 790260 - RNA, 19 nt, Artificial Sequence
  Description of Artificial Sequence: Synthetic oligonucleotide
  Sense strand starting at position 456 of SEQ ID NO: 587413
aauggaugaucuucuaguu

SEQ ID NO: 790261 - RNA, 19 nt, Artificial Sequence
  Description of Artificial Sequence: Synthetic oligonucleotide
  Antisense strand to SEQ ID NO: 790260
aacuagaagaucauccauu

SEQ ID NO: 790262 - RNA, 19 nt, Artificial Sequence
  Description of Artificial Sequence: Synthetic oligonucleotide
  Sense strand starting at position 516 of SEQ ID NO: 587413
gcagcaugugacuaacaca

SEQ ID NO: 790263 - RNA, 19 nt, Artificial Sequence
  Description of Artificial Sequence: Synthetic oligonucleotide
  Antisense strand to SEQ ID NO: 790262
uguguuagucacaugcugc

SEQ ID NO: 790264 - RNA, 19 nt, Artificial Sequence
  Description of Artificial Sequence: Synthetic oligonucleotide
  Sense strand starting at position 692 of SEQ ID NO: 587413
gucuuaagugguuaugauu

SEQ ID NO: 790265 - RNA, 19 nt, Artificial Sequence
  Description of Artificial Sequence: Synthetic oligonucleotide
  Antisense strand to SEQ ID NO: 790264
aaucauaaccacuuaagac

SEQ ID NO: 790266 - RNA, 19 nt, Artificial Sequence
  Description of Artificial Sequence: Synthetic oligonucleotide
  Sense strand starting at position 737 of SEQ ID NO: 587413
cagugacuucuguacagaa

SEQ ID NO: 790267 - RNA, 19 nt, Artificial Sequence
  Description of Artificial Sequence: Synthetic oligonucleotide
  Antisense strand to SEQ ID NO: 790266
uucuguacagaagucacug

SEQ ID NO: 790268 - RNA, 19 nt, Artificial Sequence
  Description of Artificial Sequence: Synthetic oligonucleotide
  Sense strand starting at position 739 of SEQ ID NO: 587413
gugacuucuguacagaagu

SEQ ID NO: 790269 - RNA, 19 nt, Artificial Sequence
  Description of Artificial Sequence: Synthetic oligonucleotide
  Antisense strand to SEQ ID NO: 790268
acuucuguacagaagucac

SEQ ID NO: 790270 - RNA, 19 nt, Artificial Sequence
  Description of Artificial Sequence: Synthetic oligonucleotide
  Sense strand starting at position 860 of SEQ ID NO: 587413
gaguauugaccuuacugcu

SEQ ID NO: 790271 - RNA, 19 nt, Artificial Sequence
  Description of Artificial Sequence: Synthetic oligonucleotide
  Antisense strand to SEQ ID NO: 790270
agcaguaaggucaauacuc

SEQ ID NO: 790272 - RNA, 19 nt, Artificial Sequence
  Description of Artificial Sequence: Synthetic oligonucleotide
  Sense strand starting at position 927 of SEQ ID NO: 587413
guguccuguggauagagaa

SEQ ID NO: 790273 - RNA, 19 nt, Artificial Sequence
  Description of Artificial Sequence: Synthetic oligonucleotide
  Antisense strand to SEQ ID NO: 790272
uucucuauccacaggacac

SEQ ID NO: 790274 - RNA, 19 nt, Artificial Sequence
  Description of Artificial Sequence: Synthetic oligonucleotide
  Sense strand starting at position 1258 of SEQ ID NO: 587413
acaaguauuguagaagcca

SEQ ID NO: 790275 - RNA, 19 nt, Artificial Sequence
  Description of Artificial Sequence: Synthetic oligonucleotide
  Antisense strand to SEQ ID NO: 790274
uggcuucuacaauacuugu

SEQ ID NO: 790276 - RNA, 19 nt, Artificial Sequence
  Description of Artificial Sequence: Synthetic oligonucleotide
  Sense strand starting at position 1676 of SEQ ID NO: 587413
ggacuacagccucggaaau

SEQ ID NO: 790277 - RNA, 19 nt, Artificial Sequence
  Description of Artificial Sequence: Synthetic oligonucleotide
  Antisense strand to SEQ ID NO: 790276
auuuccgaggcuguagucc

SEQ ID NO: 790278 - RNA, 19 nt, Artificial Sequence
  Description of Artificial Sequence: Synthetic oligonucleotide
  Sense strand starting at position 1826 of SEQ ID NO: 587413
cuucuuaagcuuggagaca

SEQ ID NO: 790279 - RNA, 19 nt, Artificial Sequence
  Description of Artificial Sequence: Synthetic oligonucleotide
  Antisense strand to SEQ ID NO: 790278
ugucuccaagcuuaagaag

SEQ ID NO: 790280 - RNA, 19 nt, Artificial Sequence
  Description of Artificial Sequence: Synthetic oligonucleotide
  Sense strand starting at position 2051 of SEQ ID NO: 587413
ugugaugucacagagugga

SEQ ID NO: 790281 - RNA, 19 nt, Artificial Sequence
  Description of Artificial Sequence: Synthetic oligonucleotide
  Antisense strand to SEQ ID NO: 790280
uccacucugugacaucaca

SEQ ID NO: 790282 - RNA, 19 nt, Artificial Sequence
  Description of Artificial Sequence: Synthetic oligonucleotide
  Sense strand starting at position 2203 of SEQ ID NO: 587413
agggaagaaucccuuugca

SEQ ID NO: 790283 - RNA, 19 nt, Artificial Sequence
  Description of Artificial Sequence: Synthetic oligonucleotide
  Antisense strand to SEQ ID NO: 790282
ugcaaagggauucuucccu

SEQ ID NO: 790284 - RNA, 19 nt, Artificial Sequence
  Description of Artificial Sequence: Synthetic oligonucleotide
  Sense strand starting at position 2206 of SEQ ID NO: 587413
gaagaaucccuuugcaggu

SEQ ID NO: 790285 - RNA, 19 nt, Artificial Sequence
  Description of Artificial Sequence: Synthetic oligonucleotide
  Antisense strand to SEQ ID NO: 790284
accugcaaagggauucuuc

SEQ ID NO: 790286 - RNA, 19 nt, Artificial Sequence
  Description of Artificial Sequence: Synthetic oligonucleotide
  Sense strand starting at position 2237 of SEQ ID NO: 587413
ugcagaauuaugggaucuu

SEQ ID NO: 790287 - RNA, 19 nt, Artificial Sequence
  Description of Artificial Sequence: Synthetic oligonucleotide
  Antisense strand to SEQ ID NO: 790286
aagaucccauaauucugca

SEQ ID NO: 790288 - RNA, 19 nt, Artificial Sequence
  Description of Artificial Sequence: Synthetic oligonucleotide
  Sense strand starting at position 2287 of SEQ ID NO: 587413
gugaccagauucucaucua

SEQ ID NO: 790289 - RNA, 19 nt, Artificial Sequence
  Description of Artificial Sequence: Synthetic oligonucleotide
  Antisense strand to SEQ ID NO: 790288
uagaugagaaucuggucac

SEQ ID NO: 790290 - RNA, 19 nt, Artificial Sequence
  Description of Artificial Sequence: Synthetic oligonucleotide
  Sense strand starting at position 2341 of SEQ ID NO: 587413
ccacguggugaagacaauu

SEQ ID NO: 790291 - RNA, 19 nt, Artificial Sequence
  Description of Artificial Sequence: Synthetic oligonucleotide
  Antisense strand to SEQ ID NO: 790290
aauugucuucaccacgugg

SEQ ID NO: 790292 - RNA, 19 nt, Artificial Sequence
  Description of Artificial Sequence: Synthetic oligonucleotide
  Sense strand starting at position 2418 of SEQ ID NO: 587413
aacagagucucagugaaga

SEQ ID NO: 790293 - RNA, 19 nt, Artificial Sequence
  Description of Artificial Sequence: Synthetic oligonucleotide
  Antisense strand to SEQ ID NO: 790292
ucuucacugagacucuguu

SEQ ID NO: 790294 - RNA, 19 nt, Artificial Sequence
  Description of Artificial Sequence: Synthetic oligonucleotide
  Sense strand starting at position 2426 of SEQ ID NO: 587413
cucagugaagaucauguuu

SEQ ID NO: 790295 - RNA, 19 nt, Artificial Sequence
  Description of Artificial Sequence: Synthetic oligonucleotide
  Antisense strand to SEQ ID NO: 790294
aaacaugaucuucacugag

SEQ ID NO: 790296 - RNA, 19 nt, Artificial Sequence
  Description of Artificial Sequence: Synthetic oligonucleotide
  Sense strand starting at position 2532 of SEQ ID NO: 587413
caaguaaggugacuucuga

SEQ ID NO: 790297 - RNA, 19 nt, Artificial Sequence
  Description of Artificial Sequence: Synthetic oligonucleotide
  Antisense strand to SEQ ID NO: 790296
ucagaagucaccuuacuug

SEQ ID NO: 790298 - RNA, 19 nt, Artificial Sequence
  Description of Artificial Sequence: Synthetic oligonucleotide
  Sense strand starting at position 2539 of SEQ ID NO: 587413
ggugacuucugagcaacua

SEQ ID NO: 790299 - RNA, 19 nt, Artificial Sequence
  Description of Artificial Sequence: Synthetic oligonucleotide
  Antisense strand to SEQ ID NO: 790298
uaguugcucagaagucacc

SEQ ID NO: 790300 - RNA, 19 nt, Artificial Sequence
  Description of Artificial Sequence: Synthetic oligonucleotide
  Sense strand starting at position 2540 of SEQ ID NO: 587413
gugacuucugagcaacuaa

SEQ ID NO: 790301 - RNA, 19 nt, Artificial Sequence
  Description of Artificial Sequence: Synthetic oligonucleotide
  Antisense strand to SEQ ID NO: 790300
uuaguugcucagaagucac

SEQ ID NO: 790302 - RNA, 19 nt, Artificial Sequence
  Description of Artificial Sequence: Synthetic oligonucleotide
  Sense strand starting at position 2569 of SEQ ID NO: 587413
gagauuugaugauaagcag

SEQ ID NO: 790303 - RNA, 19 nt, Artificial Sequence
  Description of Artificial Sequence: Synthetic oligonucleotide
  Antisense strand to SEQ ID NO: 790302
cugcuuaucaucaaaucuc

SEQ ID NO: 790304 - RNA, 19 nt, Artificial Sequence
  Description of Artificial Sequence: Synthetic oligonucleotide
  Sense strand starting at position 2988 of SEQ ID NO: 587413
gguucuaguguugaguaag

SEQ ID NO: 790305 - RNA, 19 nt, Artificial Sequence
  Description of Artificial Sequence: Synthetic oligonucleotide
  Antisense strand to SEQ ID NO: 790304
cuuacucaacacuagaacc

SEQ ID NO: 790306 - RNA, 19 nt, Artificial Sequence
  Description of Artificial Sequence: Synthetic oligonucleotide
  Sense strand starting at position 2991 of SEQ ID NO: 587413
ucuaguguugaguaaggga

SEQ ID NO: 790307 - RNA, 19 nt, Artificial Sequence
  Description of Artificial Sequence: Synthetic oligonucleotide
  Antisense strand to SEQ ID NO: 790306
ucccuuacucaacacuaga

SEQ ID NO: 790308 - RNA, 19 nt, Artificial Sequence
  Description of Artificial Sequence: Synthetic oligonucleotide
  Sense strand starting at position 3013 of SEQ ID NO: 587413
ggaggagcaaucuguaaag

SEQ ID NO: 790309 - RNA, 19 nt, Artificial Sequence
  Description of Artificial Sequence: Synthetic oligonucleotide
  Antisense strand to SEQ ID NO: 790308
cuuuacagauugcuccucc

SEQ ID NO: 790310 - RNA, 19 nt, Artificial Sequence
  Description of Artificial Sequence: Synthetic oligonucleotide
  Sense strand starting at position 3033 of SEQ ID NO: 587413
aauagagucucacuggaau

SEQ ID NO: 790311 - RNA, 19 nt, Artificial Sequence
  Description of Artificial Sequence: Synthetic oligonucleotide
  Antisense strand to SEQ ID NO: 790310
auuccagugagacucuauu

SEQ ID NO: 790312 - RNA, 19 nt, Artificial Sequence
  Description of Artificial Sequence: Synthetic oligonucleotide
  Sense strand starting at position 3119 of SEQ ID NO: 587413
ucuguauugcaucagacga

SEQ ID NO: 790313 - RNA, 19 nt, Artificial Sequence
  Description of Artificial Sequence: Synthetic oligonucleotide
  Antisense strand to SEQ ID NO: 790312
ucgucugaugcaauacaga

SEQ ID NO: 790314 - RNA, 19 nt, Artificial Sequence
  Description of Artificial Sequence: Synthetic oligonucleotide
  Sense strand starting at position 3144 of SEQ ID NO: 587413
ugugaagucagagaauugu

SEQ ID NO: 790315 - RNA, 19 nt, Artificial Sequence
  Description of Artificial Sequence: Synthetic oligonucleotide
  Antisense strand to SEQ ID NO: 790314
acaauucucugacuucaca

SEQ ID NO: 790316 - RNA, 19 nt, Artificial Sequence
  Description of Artificial Sequence: Synthetic oligonucleotide
  Sense strand starting at position 3153 of SEQ ID NO: 587413
agagaauugugcuuuaaga

SEQ ID NO: 790317 - RNA, 19 nt, Artificial Sequence
  Description of Artificial Sequence: Synthetic oligonucleotide
  Antisense strand to SEQ ID NO: 790316
ucuuaaagcacaauucucu

SEQ ID NO: 790318 - RNA, 19 nt, Artificial Sequence
  Description of Artificial Sequence: Synthetic oligonucleotide
  Sense strand starting at position 3354 of SEQ ID NO: 587413
ugucuugcacgagaucaca

SEQ ID NO: 790319 - RNA, 19 nt, Artificial Sequence
  Description of Artificial Sequence: Synthetic oligonucleotide
  Antisense strand to SEQ ID NO: 790318
ugugaucucgugcaagaca

SEQ ID NO: 790320 - RNA, 19 nt, Artificial Sequence
  Description of Artificial Sequence: Synthetic oligonucleotide
  Sense strand starting at position 3375 of SEQ ID NO: 587413
gcuaauuaaguggaaaggu

SEQ ID NO: 790321 - RNA, 19 nt, Artificial Sequence
  Description of Artificial Sequence: Synthetic oligonucleotide
  Antisense strand to SEQ ID NO: 790320
accuuuccacuuaauuagc

SEQ ID NO: 790322 - RNA, 19 nt, Artificial Sequence
  Description of Artificial Sequence: Synthetic oligonucleotide
  Sense strand starting at position 3384 of SEQ ID NO: 587413
guggaaagguuacuuaaca

SEQ ID NO: 790323 - RNA, 19 nt, Artificial Sequence
  Description of Artificial Sequence: Synthetic oligonucleotide
  Antisense strand to SEQ ID NO: 790322
uguuaaguaaccuuuccac

SEQ ID NO: 790324 - RNA, 19 nt, Artificial Sequence
  Description of Artificial Sequence: Synthetic oligonucleotide
  Sense strand starting at position 3385 of SEQ ID NO: 587413
uggaaagguuacuuaacau

SEQ ID NO: 790325 - RNA, 19 nt, Artificial Sequence
  Description of Artificial Sequence: Synthetic oligonucleotide
  Antisense strand to SEQ ID NO: 790324
auguuaaguaaccuuucca

SEQ ID NO: 790326 - RNA, 19 nt, Artificial Sequence
  Description of Artificial Sequence: Synthetic oligonucleotide
  Sense strand starting at position 3462 of SEQ ID NO: 587413
gggagaaauugucauuugg

SEQ ID NO: 790327 - RNA, 19 nt, Artificial Sequence
  Description of Artificial Sequence: Synthetic oligonucleotide
  Antisense strand to SEQ ID NO: 790326
ccaaaugacaauuucuccc

SEQ ID NO: 790328 - RNA, 19 nt, Artificial Sequence
  Description of Artificial Sequence: Synthetic oligonucleotide
  Sense strand starting at position 3513 of SEQ ID NO: 587413
gcaacccuuugaguaacaa

SEQ ID NO: 790329 - RNA, 19 nt, Artificial Sequence
  Description of Artificial Sequence: Synthetic oligonucleotide
  Antisense strand to SEQ ID NO: 790328
uuguuacucaaaggguugc

SEQ ID NO: 790330 - RNA, 19 nt, Artificial Sequence
  Description of Artificial Sequence: Synthetic oligonucleotide
  Sense strand starting at position 3532 of SEQ ID NO: 587413
ggaagaaaguauucccgua

SEQ ID NO: 790331 - RNA, 19 nt, Artificial Sequence
  Description of Artificial Sequence: Synthetic oligonucleotide
  Antisense strand to SEQ ID NO: 790330
uacgggaauacuuucuucc

SEQ ID NO: 790332 - RNA, 19 nt, Artificial Sequence
  Description of Artificial Sequence: Synthetic oligonucleotide
  Sense strand starting at position 3542 of SEQ ID NO: 587413
auucccguaggucauaaau

SEQ ID NO: 790333 - RNA, 19 nt, Artificial Sequence
  Description of Artificial Sequence: Synthetic oligonucleotide
  Antisense strand to SEQ ID NO: 790332
auuuaugaccuacgggaau

SEQ ID NO: 790334 - RNA, 19 nt, Artificial Sequence
  Description of Artificial Sequence: Synthetic oligonucleotide
  Sense strand starting at position 3675 of SEQ ID NO: 587413
aucugugaauucuccuaag

SEQ ID NO: 790335 - RNA, 19 nt, Artificial Sequence
  Description of Artificial Sequence: Synthetic oligonucleotide
  Antisense strand to SEQ ID NO: 790334
cuuaggagaauucacagau

SEQ ID NO: 790336 - RNA, 19 nt, Artificial Sequence
  Description of Artificial Sequence: Synthetic oligonucleotide
  Sense strand starting at position 45 of SEQ ID NO: 587414
ugauaacauuucuguagug

SEQ ID NO: 790337 - RNA, 19 nt, Artificial Sequence
  Description of Artificial Sequence: Synthetic oligonucleotide
  Antisense strand to SEQ ID NO: 790336
cacuacagaaauguuauca

SEQ ID NO: 790338 - RNA, 19 nt, Artificial Sequence
  Description of Artificial Sequence: Synthetic oligonucleotide
  Sense strand starting at position 54 of SEQ ID NO: 587414
uucuguagugauugggcau

SEQ ID NO: 790339 - RNA, 19 nt, Artificial Sequence
  Description of Artificial Sequence: Synthetic oligonucleotide
  Antisense strand to SEQ ID NO: 790338
augcccaaucacuacagaa

SEQ ID NO: 790340 - RNA, 19 nt, Artificial Sequence
  Description of Artificial Sequence: Synthetic oligonucleotide
  Sense strand starting at position 55 of SEQ ID NO: 587414
ucuguagugauugggcauu

SEQ ID NO: 790341 - RNA, 19 nt, Artificial Sequence
  Description of Artificial Sequence: Synthetic oligonucleotide
  Antisense strand to SEQ ID NO: 790340
aaugcccaaucacuacaga

SEQ ID NO: 790342 - RNA, 19 nt, Artificial Sequence
  Description of Artificial Sequence: Synthetic oligonucleotide
  Sense strand starting at position 61 of SEQ ID NO: 587414
gugauugggcauuguaaau

SEQ ID NO: 790343 - RNA, 19 nt, Artificial Sequence
  Description of Artificial Sequence: Synthetic oligonucleotide
  Antisense strand to SEQ ID NO: 790342
auuuacaaugcccaaucac

SEQ ID NO: 790344 - RNA, 19 nt, Artificial Sequence
  Description of Artificial Sequence: Synthetic oligonucleotide
  Sense strand starting at position 67 of SEQ ID NO: 587414
gggcauuguaaauaugcuu

SEQ ID NO: 790345 - RNA, 19 nt, Artificial Sequence
  Description of Artificial Sequence: Synthetic oligonucleotide
  Antisense strand to SEQ ID NO: 790344
aagcauauuuacaaugccc

SEQ ID NO: 790346 - RNA, 19 nt, Artificial Sequence
  Description of Artificial Sequence: Synthetic oligonucleotide
  Sense strand starting at position 364 of SEQ ID NO: 587414
gagugagacucccucguca

SEQ ID NO: 790347 - RNA, 19 nt, Artificial Sequence
  Description of Artificial Sequence: Synthetic oligonucleotide
  Antisense strand to SEQ ID NO: 790346
ugacgagggagucucacuc

SEQ ID NO: 790348 - RNA, 19 nt, Artificial Sequence
  Description of Artificial Sequence: Synthetic oligonucleotide
  Sense strand starting at position 366 of SEQ ID NO: 587414
gugagacucccucgucagu

SEQ ID NO: 790349 - RNA, 19 nt, Artificial Sequence
  Description of Artificial Sequence: Synthetic oligonucleotide
  Antisense strand to SEQ ID NO: 790348
acugacgagggagucucac

SEQ ID NO: 790350 - RNA, 19 nt, Artificial Sequence
  Description of Artificial Sequence: Synthetic oligonucleotide
  Sense strand starting at position 376 of SEQ ID NO: 587414
cucgucaguccgucucaaa

SEQ ID NO: 790351 - RNA, 19 nt, Artificial Sequence
  Description of Artificial Sequence: Synthetic oligonucleotide
  Antisense strand to SEQ ID NO: 790350
uuugagacggacugacgag

SEQ ID NO: 790352 - RNA, 19 nt, Artificial Sequence
  Description of Artificial Sequence: Synthetic oligonucleotide
  Sense strand starting at position 451 of SEQ ID NO: 587414
acccauuucugagaugcag

SEQ ID NO: 790353 - RNA, 19 nt, Artificial Sequence
  Description of Artificial Sequence: Synthetic oligonucleotide
  Antisense strand to SEQ ID NO: 790352
cugcaucucagaaaugggu

SEQ ID NO: 790354 - RNA, 19 nt, Artificial Sequence
  Description of Artificial Sequence: Synthetic oligonucleotide
  Sense strand starting at position 474 of SEQ ID NO: 587414
gggagagacuaagauucua

SEQ ID NO: 790355 - RNA, 19 nt, Artificial Sequence
  Description of Artificial Sequence: Synthetic oligonucleotide
  Antisense strand to SEQ ID NO: 790354
uagaaucuuagucucuccc

SEQ ID NO: 790356 - RNA, 19 nt, Artificial Sequence
  Description of Artificial Sequence: Synthetic oligonucleotide
  Sense strand starting at position 634 of SEQ ID NO: 587414
ccugacuccuggcuacaga

SEQ ID NO: 790357 - RNA, 19 nt, Artificial Sequence
  Description of Artificial Sequence: Synthetic oligonucleotide
  Antisense strand to SEQ ID NO: 790356
ucuguagccaggagucagg

SEQ ID NO: 790358 - RNA, 19 nt, Artificial Sequence
  Description of Artificial Sequence: Synthetic oligonucleotide
  Sense strand starting at position 670 of SEQ ID NO: 587414
cacguugaguagcucuuaa

SEQ ID NO: 790359 - RNA, 19 nt, Artificial Sequence
  Description of Artificial Sequence: Synthetic oligonucleotide
  Antisense strand to SEQ ID NO: 790358
uuaagagcuacucaacgug

SEQ ID NO: 790360 - RNA, 19 nt, Artificial Sequence
  Description of Artificial Sequence: Synthetic oligonucleotide
  Sense strand starting at position 779 of SEQ ID NO: 587414
augaauggaucugagagga

SEQ ID NO: 790361 - RNA, 19 nt, Artificial Sequence
  Description of Artificial Sequence: Synthetic oligonucleotide
  Antisense strand to SEQ ID NO: 790360
uccucucagauccauucau

SEQ ID NO: 790362 - RNA, 19 nt, Artificial Sequence
  Description of Artificial Sequence: Synthetic oligonucleotide
  Sense strand starting at position 826 of SEQ ID NO: 587414
guguuuauuguagggaauc

SEQ ID NO: 790363 - RNA, 19 nt, Artificial Sequence
  Description of Artificial Sequence: Synthetic oligonucleotide
  Antisense strand to SEQ ID NO: 790362
gauucccuacaauaaacac

SEQ ID NO: 790364 - RNA, 19 nt, Artificial Sequence
  Description of Artificial Sequence: Synthetic oligonucleotide
  Sense strand starting at position 932 of SEQ ID NO: 587414
gccaaaggagccugacuuu

SEQ ID NO: 790365 - RNA, 19 nt, Artificial Sequence
  Description of Artificial Sequence: Synthetic oligonucleotide
  Antisense strand to SEQ ID NO: 790364
aaagucaggcuccuuuggc

SEQ ID NO: 790366 - RNA, 19 nt, Artificial Sequence
  Description of Artificial Sequence: Synthetic oligonucleotide
  Sense strand starting at position 1077 of SEQ ID NO: 587414
cuggcacaguuuccuuaau

SEQ ID NO: 790367 - RNA, 19 nt, Artificial Sequence
  Description of Artificial Sequence: Synthetic oligonucleotide
  Antisense strand to SEQ ID NO: 790366
auuaaggaaacugugccag

SEQ ID NO: 790368 - RNA, 19 nt, Artificial Sequence
  Description of Artificial Sequence: Synthetic oligonucleotide
  Sense strand starting at position 1078 of SEQ ID NO: 587414
uggcacaguuuccuuaaua

SEQ ID NO: 790369 - RNA, 19 nt, Artificial Sequence
  Description of Artificial Sequence: Synthetic oligonucleotide
  Antisense strand to SEQ ID NO: 790368
uauuaaggaaacugugcca

SEQ ID NO: 790370 - RNA, 19 nt, Artificial Sequence
  Description of Artificial Sequence: Synthetic oligonucleotide
  Sense strand starting at position 1079 of SEQ ID NO: 587414
ggcacaguuuccuuaauaa

SEQ ID NO: 790371 - RNA, 19 nt, Artificial Sequence
  Description of Artificial Sequence: Synthetic oligonucleotide
  Antisense strand to SEQ ID NO: 790370
uuauuaaggaaacugugcc

SEQ ID NO: 790372 - RNA, 19 nt, Artificial Sequence
  Description of Artificial Sequence: Synthetic oligonucleotide
  Sense strand starting at position 1108 of SEQ ID NO: 587414
ucucgucuccaggaugaaa

SEQ ID NO: 790373 - RNA, 19 nt, Artificial Sequence
  Description of Artificial Sequence: Synthetic oligonucleotide
  Antisense strand to SEQ ID NO: 790372
uuucauccuggagacgaga

SEQ ID NO: 790374 - RNA, 19 nt, Artificial Sequence
  Description of Artificial Sequence: Synthetic oligonucleotide
  Sense strand starting at position 1260 of SEQ ID NO: 587414
ccacgacucuaguuuccau

SEQ ID NO: 790375 - RNA, 19 nt, Artificial Sequence
  Description of Artificial Sequence: Synthetic oligonucleotide
  Antisense strand to SEQ ID NO: 790374
auggaaacuagagucgugg

SEQ ID NO: 790376 - RNA, 19 nt, Artificial Sequence
  Description of Artificial Sequence: Synthetic oligonucleotide
  Sense strand starting at position 1550 of SEQ ID NO: 587414
gugugaagugccggagauu

SEQ ID NO: 790377 - RNA, 19 nt, Artificial Sequence
  Description of Artificial Sequence: Synthetic oligonucleotide
  Antisense strand to SEQ ID NO: 790376
aaucuccggcacuucacac

SEQ ID NO: 790378 - RNA, 19 nt, Artificial Sequence
  Description of Artificial Sequence: Synthetic oligonucleotide
  Sense strand starting at position 1561 of SEQ ID NO: 587414
cggagauugggaugcaaga

SEQ ID NO: 790379 - RNA, 19 nt, Artificial Sequence
  Description of Artificial Sequence: Synthetic oligonucleotide
  Antisense strand to SEQ ID NO: 790378
ucuugcaucccaaucuccg

SEQ ID NO: 790380 - RNA, 19 nt, Artificial Sequence
  Description of Artificial Sequence: Synthetic oligonucleotide
  Sense strand starting at position 2734 of SEQ ID NO: 587414
ggauccucugcagggaaau

SEQ ID NO: 790381 - RNA, 19 nt, Artificial Sequence
  Description of Artificial Sequence: Synthetic oligonucleotide
  Antisense strand to SEQ ID NO: 790380
auuucccugcagaggaucc

SEQ ID NO: 790382 - RNA, 19 nt, Artificial Sequence
  Description of Artificial Sequence: Synthetic oligonucleotide
  Sense strand starting at position 2735 of SEQ ID NO: 587414
gauccucugcagggaaauu

SEQ ID NO: 790383 - RNA, 19 nt, Artificial Sequence
  Description of Artificial Sequence: Synthetic oligonucleotide
  Antisense strand to SEQ ID NO: 790382
aauuucccugcagaggauc

SEQ ID NO: 790384 - RNA, 19 nt, Artificial Sequence
  Description of Artificial Sequence: Synthetic oligonucleotide
  Sense strand starting at position 2876 of SEQ ID NO: 587414
agagcauucccguggagaa

SEQ ID NO: 790385 - RNA, 19 nt, Artificial Sequence
  Description of Artificial Sequence: Synthetic oligonucleotide
  Antisense strand to SEQ ID NO: 790384
uucuccacgggaaugcucu

SEQ ID NO: 790386 - RNA, 19 nt, Artificial Sequence
  Description of Artificial Sequence: Synthetic oligonucleotide
  Sense strand starting at position 2877 of SEQ ID NO: 587414
gagcauucccguggagaaa

SEQ ID NO: 790387 - RNA, 19 nt, Artificial Sequence
  Description of Artificial Sequence: Synthetic oligonucleotide
  Antisense strand to SEQ ID NO: 790386
uuucuccacgggaaugcuc

SEQ ID NO: 790388 - RNA, 19 nt, Artificial Sequence
  Description of Artificial Sequence: Synthetic oligonucleotide
  Sense strand starting at position 3075 of SEQ ID NO: 587414
cuaccuuguaccgagaagu

SEQ ID NO: 790389 - RNA, 19 nt, Artificial Sequence
  Description of Artificial Sequence: Synthetic oligonucleotide
  Antisense strand to SEQ ID NO: 790388
acuucucgguacaagguag

SEQ ID NO: 790390 - RNA, 19 nt, Artificial Sequence
  Description of Artificial Sequence: Synthetic oligonucleotide
  Sense strand starting at position 3081 of SEQ ID NO: 587414
uguaccgagaaguaacauu

SEQ ID NO: 790391 - RNA, 19 nt, Artificial Sequence
  Description of Artificial Sequence: Synthetic oligonucleotide
  Antisense strand to SEQ ID NO: 790390
aauguuacuucucgguaca

SEQ ID NO: 790392 - RNA, 19 nt, Artificial Sequence
  Description of Artificial Sequence: Synthetic oligonucleotide
  Sense strand starting at position 3098 of SEQ ID NO: 587414
uugcaaguagaguaaauga

SEQ ID NO: 790393 - RNA, 19 nt, Artificial Sequence
  Description of Artificial Sequence: Synthetic oligonucleotide
  Antisense strand to SEQ ID NO: 790392
ucauuuacucuacuugcaa

SEQ ID NO: 790394 - RNA, 19 nt, Artificial Sequence
  Description of Artificial Sequence: Synthetic oligonucleotide
  Sense strand starting at position 3139 of SEQ ID NO: 587414
cgaagaagauuccucuaga

SEQ ID NO: 790395 - RNA, 19 nt, Artificial Sequence
  Description of Artificial Sequence: Synthetic oligonucleotide
  Antisense strand to SEQ ID NO: 790394
ucuagaggaaucuucuucg

SEQ ID NO: 790396 - RNA, 19 nt, Artificial Sequence
  Description of Artificial Sequence: Synthetic oligonucleotide
  Sense strand starting at position 3226 of SEQ ID NO: 587414
acaaacauguaguaaagau

SEQ ID NO: 790397 - RNA, 19 nt, Artificial Sequence
  Description of Artificial Sequence: Synthetic oligonucleotide
  Antisense strand to SEQ ID NO: 790396
aucuuuacuacauguuugu

SEQ ID NO: 790398 - RNA, 19 nt, Artificial Sequence
  Description of Artificial Sequence: Synthetic oligonucleotide
  Sense strand starting at position 3243 of SEQ ID NO: 587414
auaguaaagacagguaguu

SEQ ID NO: 790399 - RNA, 19 nt, Artificial Sequence
  Description of Artificial Sequence: Synthetic oligonucleotide
  Antisense strand to SEQ ID NO: 790398
aacuaccugucuuuacuau

SEQ ID NO: 790400 - RNA, 19 nt, Artificial Sequence
  Description of Artificial Sequence: Synthetic oligonucleotide
  Sense strand starting at position 3478 of SEQ ID NO: 587414
ggcuauaagugagccgaga

SEQ ID NO: 790401 - RNA, 19 nt, Artificial Sequence
  Description of Artificial Sequence: Synthetic oligonucleotide
  Antisense strand to SEQ ID NO: 790400
ucucggcucacuuauagcc

SEQ ID NO: 790402 - RNA, 19 nt, Artificial Sequence
  Description of Artificial Sequence: Synthetic oligonucleotide
  Sense strand starting at position 3480 of SEQ ID NO: 587414
cuauaagugagccgagauc

SEQ ID NO: 790403 - RNA, 19 nt, Artificial Sequence
  Description of Artificial Sequence: Synthetic oligonucleotide
  Antisense strand to SEQ ID NO: 790402
gaucucggcucacuuauag

SEQ ID NO: 790404 - RNA, 19 nt, Artificial Sequence
  Description of Artificial Sequence: Synthetic oligonucleotide
  Sense strand starting at position 3613 of SEQ ID NO: 587414
auuggagaauuagugcauu

SEQ ID NO: 790405 - RNA, 19 nt, Artificial Sequence
  Description of Artificial Sequence: Synthetic oligonucleotide
  Antisense strand to SEQ ID NO: 790404
aaugcacuaauucuccaau

SEQ ID NO: 790406 - RNA, 19 nt, Artificial Sequence
  Description of Artificial Sequence: Synthetic oligonucleotide
  Sense strand starting at position 3652 of SEQ ID NO: 587414
ccaaacgaggucugaaauu

SEQ ID NO: 790407 - RNA, 19 nt, Artificial Sequence
  Description of Artificial Sequence: Synthetic oligonucleotide
  Antisense strand to SEQ ID NO: 790406
aauuucagaccucguuugg

SEQ ID NO: 790408 - RNA, 19 nt, Artificial Sequence
  Description of Artificial Sequence: Synthetic oligonucleotide
  Sense strand starting at position 3680 of SEQ ID NO: 587414
uccuauucacgguggguaa

SEQ ID NO: 790409 - RNA, 19 nt, Artificial Sequence
  Description of Artificial Sequence: Synthetic oligonucleotide
  Antisense strand to SEQ ID NO: 790408
uuacccaccgugaauagga

SEQ ID NO: 790410 - RNA, 19 nt, Artificial Sequence
  Description of Artificial Sequence: Synthetic oligonucleotide
  Sense strand starting at position 3773 of SEQ ID NO: 587414
auuccucugucacuuuaga

SEQ ID NO: 790411 - RNA, 19 nt, Artificial Sequence
  Description of Artificial Sequence: Synthetic oligonucleotide
  Antisense strand to SEQ ID NO: 790410
ucuaaagugacagaggaau

SEQ ID NO: 790412 - RNA, 19 nt, Artificial Sequence
  Description of Artificial Sequence: Synthetic oligonucleotide
  Sense strand starting at position 3909 of SEQ ID NO: 587414
auuaaaugccuacacguua

SEQ ID NO: 790413 - RNA, 19 nt, Artificial Sequence
  Description of Artificial Sequence: Synthetic oligonucleotide
  Antisense strand to SEQ ID NO: 790412
uaacguguaggcauuuaau

SEQ ID NO: 790414 - RNA, 19 nt, Artificial Sequence
  Description of Artificial Sequence: Synthetic oligonucleotide
  Sense strand starting at position 3962 of SEQ ID NO: 587414
cggugaauacaguagaaug

SEQ ID NO: 790415 - RNA, 19 nt, Artificial Sequence
  Description of Artificial Sequence: Synthetic oligonucleotide
  Antisense strand to SEQ ID NO: 790414
cauucuacuguauucaccg

SEQ ID NO: 790416 - RNA, 19 nt, Artificial Sequence
  Description of Artificial Sequence: Synthetic oligonucleotide
  Sense strand starting at position 609 of SEQ ID NO: 587415
gcuccuuggucuccaggaa

SEQ ID NO: 790417 - RNA, 19 nt, Artificial Sequence
  Description of Artificial Sequence: Synthetic oligonucleotide
  Antisense strand to SEQ ID NO: 790416
uuccuggagaccaaggagc

SEQ ID NO: 790418 - RNA, 19 nt, Artificial Sequence
  Description of Artificial Sequence: Synthetic oligonucleotide
  Sense strand starting at position 808 of SEQ ID NO: 587415
gcgccauuucugugccaga

SEQ ID NO: 790419 - RNA, 19 nt, Artificial Sequence
  Description of Artificial Sequence: Synthetic oligonucleotide
  Antisense strand to SEQ ID NO: 790418
ucuggcacagaaauggcgc

SEQ ID NO: 790420 - RNA, 19 nt, Artificial Sequence
  Description of Artificial Sequence: Synthetic oligonucleotide
  Sense strand starting at position 943 of SEQ ID NO: 587415
aggugaagaucacaugaga

SEQ ID NO: 790421 - RNA, 19 nt, Artificial Sequence
  Description of Artificial Sequence: Synthetic oligonucleotide
  Antisense strand to SEQ ID NO: 790420
ucucaugugaucuucaccu

SEQ ID NO: 790422 - RNA, 19 nt, Artificial Sequence
  Description of Artificial Sequence: Synthetic oligonucleotide
  Sense strand starting at position 1222 of SEQ ID NO: 587415
auucuccuucugugcgaaa

SEQ ID NO: 790423 - RNA, 19 nt, Artificial Sequence
  Description of Artificial Sequence: Synthetic oligonucleotide
  Antisense strand to SEQ ID NO: 790422
uuucgcacagaaggagaau

SEQ ID NO: 790424 - RNA, 19 nt, Artificial Sequence
  Description of Artificial Sequence: Synthetic oligonucleotide
  Sense strand starting at position 1223 of SEQ ID NO: 587415
uucuccuucugugcgaaau

SEQ ID NO: 790425 - RNA, 19 nt, Artificial Sequence
  Description of Artificial Sequence: Synthetic oligonucleotide
  Antisense strand to SEQ ID NO: 790424
auuucgcacagaaggagaa

SEQ ID NO: 790426 - RNA, 19 nt, Artificial Sequence
  Description of Artificial Sequence: Synthetic oligonucleotide
  Sense strand starting at position 1278 of SEQ ID NO: 587415
gcugccucauuccuugaua

SEQ ID NO: 790427 - RNA, 19 nt, Artificial Sequence
  Description of Artificial Sequence: Synthetic oligonucleotide
  Antisense strand to SEQ ID NO: 790426
uaucaaggaaugaggcagc

SEQ ID NO: 790428 - RNA, 19 nt, Artificial Sequence
  Description of Artificial Sequence: Synthetic oligonucleotide
  Sense strand starting at position 1281 of SEQ ID NO: 587415
gccucauuccuugauaggu

SEQ ID NO: 790429 - RNA, 19 nt, Artificial Sequence
  Description of Artificial Sequence: Synthetic oligonucleotide
  Antisense strand to SEQ ID NO: 790428
accuaucaaggaaugaggc

SEQ ID NO: 790430 - RNA, 19 nt, Artificial Sequence
  Description of Artificial Sequence: Synthetic oligonucleotide
  Sense strand starting at position 1295 of SEQ ID NO: 587415
uagguugggccaugagaga

SEQ ID NO: 790431 - RNA, 19 nt, Artificial Sequence
  Description of Artificial Sequence: Synthetic oligonucleotide
  Antisense strand to SEQ ID NO: 790430
ucucucauggcccaaccua

SEQ ID NO: 790432 - RNA, 19 nt, Artificial Sequence
  Description of Artificial Sequence: Synthetic oligonucleotide
  Sense strand starting at position 1708 of SEQ ID NO: 587415
aguugagcucugggucuaa

SEQ ID NO: 790433 - RNA, 19 nt, Artificial Sequence
  Description of Artificial Sequence: Synthetic oligonucleotide
  Antisense strand to SEQ ID NO: 790432
uuagacccagagcucaacu

SEQ ID NO: 790434 - RNA, 19 nt, Artificial Sequence
  Description of Artificial Sequence: Synthetic oligonucleotide
  Sense strand starting at position 1982 of SEQ ID NO: 587415
guguuucccuucucugaag

SEQ ID NO: 790435 - RNA, 19 nt, Artificial Sequence
  Description of Artificial Sequence: Synthetic oligonucleotide
  Antisense strand to SEQ ID NO: 790434
cuucagagaagggaaacac

SEQ ID NO: 790436 - RNA, 19 nt, Artificial Sequence
  Description of Artificial Sequence: Synthetic oligonucleotide
  Sense strand starting at position 1984 of SEQ ID NO: 587415
guuucccuucucugaaguu

SEQ ID NO: 790437 - RNA, 19 nt, Artificial Sequence
  Description of Artificial Sequence: Synthetic oligonucleotide
  Antisense strand to SEQ ID NO: 790436
aacuucagagaagggaaac

SEQ ID NO: 790438 - RNA, 19 nt, Artificial Sequence
  Description of Artificial Sequence: Synthetic oligonucleotide
  Sense strand starting at position 2034 of SEQ ID NO: 587415
auucuagucugcucgauga

SEQ ID NO: 790439 - RNA, 19 nt, Artificial Sequence
  Description of Artificial Sequence: Synthetic oligonucleotide
  Antisense strand to SEQ ID NO: 790438
ucaucgagcagacuagaau

SEQ ID NO: 790440 - RNA, 19 nt, Artificial Sequence
  Description of Artificial Sequence: Synthetic oligonucleotide
  Sense strand starting at position 2073 of SEQ ID NO: 587415
cgguuucuucugagugugu

SEQ ID NO: 790441 - RNA, 19 nt, Artificial Sequence
  Description of Artificial Sequence: Synthetic oligonucleotide
  Antisense strand to SEQ ID NO: 790440
acacacucagaagaaaccg

SEQ ID NO: 790442 - RNA, 19 nt, Artificial Sequence
  Description of Artificial Sequence: Synthetic oligonucleotide
  Sense strand starting at position 2147 of SEQ ID NO: 587415
cugcauuuccagugaguua

SEQ ID NO: 790443 - RNA, 19 nt, Artificial Sequence
  Description of Artificial Sequence: Synthetic oligonucleotide
  Antisense strand to SEQ ID NO: 790442
uaacucacuggaaaugcag

SEQ ID NO: 790444 - RNA, 19 nt, Artificial Sequence
  Description of Artificial Sequence: Synthetic oligonucleotide
  Sense strand starting at position 2382 of SEQ ID NO: 587415
cuuggaaagucugagggau

SEQ ID NO: 790445 - RNA, 19 nt, Artificial Sequence
  Description of Artificial Sequence: Synthetic oligonucleotide
  Antisense strand to SEQ ID NO: 790444
aucccucagacuuuccaag

SEQ ID NO: 790446 - RNA, 19 nt, Artificial Sequence
  Description of Artificial Sequence: Synthetic oligonucleotide
  Sense strand starting at position 2384 of SEQ ID NO: 587415
uggaaagucugagggauuu

SEQ ID NO: 790447 - RNA, 19 nt, Artificial Sequence
  Description of Artificial Sequence: Synthetic oligonucleotide
  Antisense strand to SEQ ID NO: 790446
aaaucccucagacuuucca

SEQ ID NO: 790448 - RNA, 19 nt, Artificial Sequence
  Description of Artificial Sequence: Synthetic oligonucleotide
  Sense strand starting at position 2427 of SEQ ID NO: 587415
caggucucucaacgcuuaa

SEQ ID NO: 790449 - RNA, 19 nt, Artificial Sequence
  Description of Artificial Sequence: Synthetic oligonucleotide
  Antisense strand to SEQ ID NO: 790448
uuaagcguugagagaccug

SEQ ID NO: 790450 - RNA, 19 nt, Artificial Sequence
  Description of Artificial Sequence: Synthetic oligonucleotide
  Sense strand starting at position 2554 of SEQ ID NO: 587415
gagagaggcaaccguuuaa

SEQ ID NO: 790451 - RNA, 19 nt, Artificial Sequence
  Description of Artificial Sequence: Synthetic oligonucleotide
  Antisense strand to SEQ ID NO: 790450
uuaaacgguugccucucuc

SEQ ID NO: 790452 - RNA, 19 nt, Artificial Sequence
  Description of Artificial Sequence: Synthetic oligonucleotide
  Sense strand starting at position 2622 of SEQ ID NO: 587415
cuguaaagauucuagaaag

SEQ ID NO: 790453 - RNA, 19 nt, Artificial Sequence
  Description of Artificial Sequence: Synthetic oligonucleotide
  Antisense strand to SEQ ID NO: 790452
cuuucuagaaucuuuacag

SEQ ID NO: 790454 - RNA, 19 nt, Artificial Sequence
  Description of Artificial Sequence: Synthetic oligonucleotide
  Sense strand starting at position 2710 of SEQ ID NO: 587415
gcaagcauuccugagcauu

SEQ ID NO: 790455 - RNA, 19 nt, Artificial Sequence
  Description of Artificial Sequence: Synthetic oligonucleotide
  Antisense strand to SEQ ID NO: 790454
aaugcucaggaaugcuugc

SEQ ID NO: 790456 - RNA, 19 nt, Artificial Sequence
  Description of Artificial Sequence: Synthetic oligonucleotide
  Sense strand starting at position 2713 of SEQ ID NO: 587415
agcauuccugagcauuaga

SEQ ID NO: 790457 - RNA, 19 nt, Artificial Sequence
  Description of Artificial Sequence: Synthetic oligonucleotide
  Antisense strand to SEQ ID NO: 790456
ucuaaugcucaggaaugcu

SEQ ID NO: 790458 - RNA, 19 nt, Artificial Sequence
  Description of Artificial Sequence: Synthetic oligonucleotide
  Sense strand starting at position 2724 of SEQ ID NO: 587415
gcauuagaaagaugcuuag

SEQ ID NO: 790459 - RNA, 19 nt, Artificial Sequence
  Description of Artificial Sequence: Synthetic oligonucleotide
  Antisense strand to SEQ ID NO: 790458
cuaagcaucuuucuaaugc

SEQ ID NO: 790460 - RNA, 19 nt, Artificial Sequence
  Description of Artificial Sequence: Synthetic oligonucleotide
  Sense strand starting at position 2727 of SEQ ID NO: 587415
uuagaaagaugcuuagguu

SEQ ID NO: 790461 - RNA, 19 nt, Artificial Sequence
  Description of Artificial Sequence: Synthetic oligonucleotide
  Antisense strand to SEQ ID NO: 790460
aaccuaagcaucuuucuaa

SEQ ID NO: 790462 - RNA, 19 nt, Artificial Sequence
  Description of Artificial Sequence: Synthetic oligonucleotide
  Sense strand starting at position 2728 of SEQ ID NO: 587415
uagaaagaugcuuagguuu

SEQ ID NO: 790463 - RNA, 19 nt, Artificial Sequence
  Description of Artificial Sequence: Synthetic oligonucleotide
  Antisense strand to SEQ ID NO: 790462
aaaccuaagcaucuuucua

SEQ ID NO: 790464 - RNA, 19 nt, Artificial Sequence
  Description of Artificial Sequence: Synthetic oligonucleotide
  Sense strand starting at position 2804 of SEQ ID NO: 587415
gguucagaguuaccgaaag

SEQ ID NO: 790465 - RNA, 19 nt, Artificial Sequence
  Description of Artificial Sequence: Synthetic oligonucleotide
  Antisense strand to SEQ ID NO: 790464
cuuucgguaacucugaacc

SEQ ID NO: 790466 - RNA, 19 nt, Artificial Sequence
  Description of Artificial Sequence: Synthetic oligonucleotide
  Sense strand starting at position 2822 of SEQ ID NO: 587415
gugcuucguagcucgcaaa

SEQ ID NO: 790467 - RNA, 19 nt, Artificial Sequence
  Description of Artificial Sequence: Synthetic oligonucleotide
  Antisense strand to SEQ ID NO: 790466
uuugcgagcuacgaagcac

SEQ ID NO: 790468 - RNA, 19 nt, Artificial Sequence
  Description of Artificial Sequence: Synthetic oligonucleotide
  Sense strand starting at position 2971 of SEQ ID NO: 587415
ggcuccugaucuuuaauuc

SEQ ID NO: 790469 - RNA, 19 nt, Artificial Sequence
  Description of Artificial Sequence: Synthetic oligonucleotide
  Antisense strand to SEQ ID NO: 790468
gaauuaaagaucaggagcc

SEQ ID NO: 790470 - RNA, 19 nt, Artificial Sequence
  Description of Artificial Sequence: Synthetic oligonucleotide
  Sense strand starting at position 3077 of SEQ ID NO: 587415
aacuuaaagccagaugguu

SEQ ID NO: 790471 - RNA, 19 nt, Artificial Sequence
  Description of Artificial Sequence: Synthetic oligonucleotide
  Antisense strand to SEQ ID NO: 790470
aaccaucuggcuuuaaguu

SEQ ID NO: 790472 - RNA, 19 nt, Artificial Sequence
  Description of Artificial Sequence: Synthetic oligonucleotide
  Sense strand starting at position 3179 of SEQ ID NO: 587415
auaacaggugcuuauauaa

SEQ ID NO: 790473 - RNA, 19 nt, Artificial Sequence
  Description of Artificial Sequence: Synthetic oligonucleotide
  Antisense strand to SEQ ID NO: 790472
uuauauaagcaccuguuau

SEQ ID NO: 790474 - RNA, 19 nt, Artificial Sequence
  Description of Artificial Sequence: Synthetic oligonucleotide
  Sense strand starting at position 3317 of SEQ ID NO: 587415
aaugaaugucaugagcucu

SEQ ID NO: 790475 - RNA, 19 nt, Artificial Sequence
  Description of Artificial Sequence: Synthetic oligonucleotide
  Antisense strand to SEQ ID NO: 790474
agagcucaugacauucauu

SEQ ID NO: 790476 - RNA, 19 nt, Artificial Sequence
  Description of Artificial Sequence: Synthetic oligonucleotide
  Sense strand starting at position 3325 of SEQ ID NO: 587415
ucaugagcucugugaggac

SEQ ID NO: 790477 - RNA, 19 nt, Artificial Sequence
  Description of Artificial Sequence: Synthetic oligonucleotide
  Antisense strand to SEQ ID NO: 790476
guccucacagagcucauga

SEQ ID NO: 790478 - RNA, 19 nt, Artificial Sequence
  Description of Artificial Sequence: Synthetic oligonucleotide
  Sense strand starting at position 3378 of SEQ ID NO: 587415
cgugaugccuggguuugaa

SEQ ID NO: 790479 - RNA, 19 nt, Artificial Sequence
  Description of Artificial Sequence: Synthetic oligonucleotide
  Antisense strand to SEQ ID NO: 790478
uucaaacccaggcaucacg

SEQ ID NO: 790480 - RNA, 19 nt, Artificial Sequence
  Description of Artificial Sequence: Synthetic oligonucleotide
  Sense strand starting at position 3387 of SEQ ID NO: 587415
uggguuugaagagguugau

SEQ ID NO: 790481 - RNA, 19 nt, Artificial Sequence
  Description of Artificial Sequence: Synthetic oligonucleotide
  Antisense strand to SEQ ID NO: 790480
aucaaccucuucaaaccca

SEQ ID NO: 790482 - RNA, 19 nt, Artificial Sequence
  Description of Artificial Sequence: Synthetic oligonucleotide
  Sense strand starting at position 3390 of SEQ ID NO: 587415
guuugaagagguugaucca

SEQ ID NO: 790483 - RNA, 19 nt, Artificial Sequence
  Description of Artificial Sequence: Synthetic oligonucleotide
  Antisense strand to SEQ ID NO: 790482
uggaucaaccucuucaaac

SEQ ID NO: 790484 - RNA, 19 nt, Artificial Sequence
  Description of Artificial Sequence: Synthetic oligonucleotide
  Sense strand starting at position 3499 of SEQ ID NO: 587415
ccucuuuagucccuaagga

SEQ ID NO: 790485 - RNA, 19 nt, Artificial Sequence
  Description of Artificial Sequence: Synthetic oligonucleotide
  Antisense strand to SEQ ID NO: 790484
uccuuagggacuaaagagg

SEQ ID NO: 790486 - RNA, 19 nt, Artificial Sequence
  Description of Artificial Sequence: Synthetic oligonucleotide
  Sense strand starting at position 3573 of SEQ ID NO: 587415
gggcuuuauggccaucuua

SEQ ID NO: 790487 - RNA, 19 nt, Artificial Sequence
  Description of Artificial Sequence: Synthetic oligonucleotide
  Antisense strand to SEQ ID NO: 790486
uaagauggccauaaagccc

SEQ ID NO: 790488 - RNA, 19 nt, Artificial Sequence
  Description of Artificial Sequence: Synthetic oligonucleotide
  Sense strand starting at position 3666 of SEQ ID NO: 587415
uggaaugagcccugagaug

SEQ ID NO: 790489 - RNA, 19 nt, Artificial Sequence
  Description of Artificial Sequence: Synthetic oligonucleotide
  Antisense strand to SEQ ID NO: 790488
caucucagggcucauucca

SEQ ID NO: 790490 - RNA, 19 nt, Artificial Sequence
  Description of Artificial Sequence: Synthetic oligonucleotide
  Sense strand starting at position 3825 of SEQ ID NO: 587415
acuugaaaguuguuuaaac

SEQ ID NO: 790491 - RNA, 19 nt, Artificial Sequence
  Description of Artificial Sequence: Synthetic oligonucleotide
  Antisense strand to SEQ ID NO: 790490
guuuaaacaacuuucaagu

SEQ ID NO: 790492 - RNA, 19 nt, Artificial Sequence
  Description of Artificial Sequence: Synthetic oligonucleotide
  Sense strand starting at position 3879 of SEQ ID NO: 587415
cuugucaucccuugcuuau

SEQ ID NO: 790493 - RNA, 19 nt, Artificial Sequence
  Description of Artificial Sequence: Synthetic oligonucleotide
  Antisense strand to SEQ ID NO: 790492
auaagcaagggaugacaag

SEQ ID NO: 790494 - RNA, 19 nt, Artificial Sequence
  Description of Artificial Sequence: Synthetic oligonucleotide
  Sense strand starting at position 3921 of SEQ ID NO: 587415
agccguugacugcagaaga

SEQ ID NO: 790495 - RNA, 19 nt, Artificial Sequence
  Description of Artificial Sequence: Synthetic oligonucleotide
  Antisense strand to SEQ ID NO: 790494
ucuucugcagucaacggcu

SEQ ID NO: 790496 - RNA, 19 nt, Artificial Sequence
  Description of Artificial Sequence: Synthetic oligonucleotide
  Sense strand starting at position 229 of SEQ ID NO: 587416
gcuuuaaguuaagcaugaa

SEQ ID NO: 790497 - RNA, 19 nt, Artificial Sequence
  Description of Artificial Sequence: Synthetic oligonucleotide
  Antisense strand to SEQ ID NO: 790496
uucaugcuuaacuuaaagc

SEQ ID NO: 790498 - RNA, 19 nt, Artificial Sequence
  Description of Artificial Sequence: Synthetic oligonucleotide
  Sense strand starting at position 232 of SEQ ID NO: 587416
uuaaguuaagcaugaaugu

SEQ ID NO: 790499 - RNA, 19 nt, Artificial Sequence
  Description of Artificial Sequence: Synthetic oligonucleotide
  Antisense strand to SEQ ID NO: 790498
acauucaugcuuaacuuaa

SEQ ID NO: 790500 - RNA, 19 nt, Artificial Sequence
  Description of Artificial Sequence: Synthetic oligonucleotide
  Sense strand starting at position 233 of SEQ ID NO: 587416
uaaguuaagcaugaaugua

SEQ ID NO: 790501 - RNA, 19 nt, Artificial Sequence
  Description of Artificial Sequence: Synthetic oligonucleotide
  Antisense strand to SEQ ID NO: 790500
uacauucaugcuuaacuua

SEQ ID NO: 790502 - RNA, 19 nt, Artificial Sequence
  Description of Artificial Sequence: Synthetic oligonucleotide
  Sense strand starting at position 241 of SEQ ID NO: 587416
gcaugaauguacucauagg

SEQ ID NO: 790503 - RNA, 19 nt, Artificial Sequence
  Description of Artificial Sequence: Synthetic oligonucleotide
  Antisense strand to SEQ ID NO: 790502
ccuaugaguacauucaugc

SEQ ID NO: 790504 - RNA, 19 nt, Artificial Sequence
  Description of Artificial Sequence: Synthetic oligonucleotide
  Sense strand starting at position 576 of SEQ ID NO: 587416
uccgcugaauccuuuaaac

SEQ ID NO: 790505 - RNA, 19 nt, Artificial Sequence
  Description of Artificial Sequence: Synthetic oligonucleotide
  Antisense strand to SEQ ID NO: 790504
guuuaaaggauucagcgga

SEQ ID NO: 790506 - RNA, 19 nt, Artificial Sequence
  Description of Artificial Sequence: Synthetic oligonucleotide
  Sense strand starting at position 578 of SEQ ID NO: 587416
cgcugaauccuuuaaacuc

SEQ ID NO: 790507 - RNA, 19 nt, Artificial Sequence
  Description of Artificial Sequence: Synthetic oligonucleotide
  Antisense strand to SEQ ID NO: 790506
gaguuuaaaggauucagcg

SEQ ID NO: 790508 - RNA, 19 nt, Artificial Sequence
  Description of Artificial Sequence: Synthetic oligonucleotide
  Sense strand starting at position 1063 of SEQ ID NO: 587416
ugaaguuacuaugccauga

SEQ ID NO: 790509 - RNA, 19 nt, Artificial Sequence
  Description of Artificial Sequence: Synthetic oligonucleotide
  Antisense strand to SEQ ID NO: 790508
ucauggcauaguaacuuca

SEQ ID NO: 790510 - RNA, 19 nt, Artificial Sequence
  Description of Artificial Sequence: Synthetic oligonucleotide
  Sense strand starting at position 1067 of SEQ ID NO: 587416
guuacuaugccaugaguau

SEQ ID NO: 790511 - RNA, 19 nt, Artificial Sequence
  Description of Artificial Sequence: Synthetic oligonucleotide
  Antisense strand to SEQ ID NO: 790510
auacucauggcauaguaac

SEQ ID NO: 790512 - RNA, 19 nt, Artificial Sequence
  Description of Artificial Sequence: Synthetic oligonucleotide
  Sense strand starting at position 1068 of SEQ ID NO: 587416
uuacuaugccaugaguauu

SEQ ID NO: 790513 - RNA, 19 nt, Artificial Sequence
  Description of Artificial Sequence: Synthetic oligonucleotide
  Antisense strand to SEQ ID NO: 790512
aauacucauggcauaguaa

SEQ ID NO: 790514 - RNA, 19 nt, Artificial Sequence
  Description of Artificial Sequence: Synthetic oligonucleotide
  Sense strand starting at position 1076 of SEQ ID NO: 587416
ccaugaguauuccuuguau

SEQ ID NO: 790515 - RNA, 19 nt, Artificial Sequence
  Description of Artificial Sequence: Synthetic oligonucleotide
  Antisense strand to SEQ ID NO: 790514
auacaaggaauacucaugg

SEQ ID NO: 790516 - RNA, 19 nt, Artificial Sequence
  Description of Artificial Sequence: Synthetic oligonucleotide
  Sense strand starting at position 1078 of SEQ ID NO: 587416
augaguauuccuuguauug

SEQ ID NO: 790517 - RNA, 19 nt, Artificial Sequence
  Description of Artificial Sequence: Synthetic oligonucleotide
  Antisense strand to SEQ ID NO: 790516
caauacaaggaauacucau

SEQ ID NO: 790518 - RNA, 19 nt, Artificial Sequence
  Description of Artificial Sequence: Synthetic oligonucleotide
  Sense strand starting at position 1085 of SEQ ID NO: 587416
uuccuuguauuguuuauca

SEQ ID NO: 790519 - RNA, 19 nt, Artificial Sequence
  Description of Artificial Sequence: Synthetic oligonucleotide
  Antisense strand to SEQ ID NO: 790518
ugauaaacaauacaaggaa

SEQ ID NO: 790520 - RNA, 19 nt, Artificial Sequence
  Description of Artificial Sequence: Synthetic oligonucleotide
  Sense strand starting at position 1087 of SEQ ID NO: 587416
ccuuguauuguuuaucacu

SEQ ID NO: 790521 - RNA, 19 nt, Artificial Sequence
  Description of Artificial Sequence: Synthetic oligonucleotide
  Antisense strand to SEQ ID NO: 790520
agugauaaacaauacaagg

SEQ ID NO: 790522 - RNA, 19 nt, Artificial Sequence
  Description of Artificial Sequence: Synthetic oligonucleotide
  Sense strand starting at position 1093 of SEQ ID NO: 587416
auuguuuaucacuaaccga

SEQ ID NO: 790523 - RNA, 19 nt, Artificial Sequence
  Description of Artificial Sequence: Synthetic oligonucleotide
  Antisense strand to SEQ ID NO: 790522
ucgguuagugauaaacaau

SEQ ID NO: 790524 - RNA, 19 nt, Artificial Sequence
  Description of Artificial Sequence: Synthetic oligonucleotide
  Sense strand starting at position 1096 of SEQ ID NO: 587416
guuuaucacuaaccgauaa

SEQ ID NO: 790525 - RNA, 19 nt, Artificial Sequence
  Description of Artificial Sequence: Synthetic oligonucleotide
  Antisense strand to SEQ ID NO: 790524
uuaucgguuagugauaaac

SEQ ID NO: 790526 - RNA, 19 nt, Artificial Sequence
  Description of Artificial Sequence: Synthetic oligonucleotide
  Sense strand starting at position 1100 of SEQ ID NO: 587416
aucacuaaccgauaaguuu

SEQ ID NO: 790527 - RNA, 19 nt, Artificial Sequence
  Description of Artificial Sequence: Synthetic oligonucleotide
  Antisense strand to SEQ ID NO: 790526
aaacuuaucgguuagugau

SEQ ID NO: 790528 - RNA, 19 nt, Artificial Sequence
  Description of Artificial Sequence: Synthetic oligonucleotide
  Sense strand starting at position 1291 of SEQ ID NO: 587416
auuagauggcucugcucuu

SEQ ID NO: 790529 - RNA, 19 nt, Artificial Sequence
  Description of Artificial Sequence: Synthetic oligonucleotide
  Antisense strand to SEQ ID NO: 790528
aagagcagagccaucuaau

SEQ ID NO: 790530 - RNA, 19 nt, Artificial Sequence
  Description of Artificial Sequence: Synthetic oligonucleotide
  Sense strand starting at position 1298 of SEQ ID NO: 587416
ggcucugcucuuuaccauu

SEQ ID NO: 790531 - RNA, 19 nt, Artificial Sequence
  Description of Artificial Sequence: Synthetic oligonucleotide
  Antisense strand to SEQ ID NO: 790530
aaugguaaagagcagagcc

SEQ ID NO: 790532 - RNA, 19 nt, Artificial Sequence
  Description of Artificial Sequence: Synthetic oligonucleotide
  Sense strand starting at position 1330 of SEQ ID NO: 587416
aagugaacuuggcuuucuu

SEQ ID NO: 790533 - RNA, 19 nt, Artificial Sequence
  Description of Artificial Sequence: Synthetic oligonucleotide
  Antisense strand to SEQ ID NO: 790532
aagaaagccaaguucacuu

SEQ ID NO: 790534 - RNA, 19 nt, Artificial Sequence
  Description of Artificial Sequence: Synthetic oligonucleotide
  Sense strand starting at position 1447 of SEQ ID NO: 587416
gccucuggguuugucaaua

SEQ ID NO: 790535 - RNA, 19 nt, Artificial Sequence
  Description of Artificial Sequence: Synthetic oligonucleotide
  Antisense strand to SEQ ID NO: 790534
uauugacaaacccagaggc

SEQ ID NO: 790536 - RNA, 19 nt, Artificial Sequence
  Description of Artificial Sequence: Synthetic oligonucleotide
  Sense strand starting at position 1491 of SEQ ID NO: 587416
ccaaauaugcacugaguac

SEQ ID NO: 790537 - RNA, 19 nt, Artificial Sequence
  Description of Artificial Sequence: Synthetic oligonucleotide
  Antisense strand to SEQ ID NO: 790536
guacucagugcauauuugg

SEQ ID NO: 790538 - RNA, 19 nt, Artificial Sequence
  Description of Artificial Sequence: Synthetic oligonucleotide
  Sense strand starting at position 1508 of SEQ ID NO: 587416
accuaaaccugaucuucga

SEQ ID NO: 790539 - RNA, 19 nt, Artificial Sequence
  Description of Artificial Sequence: Synthetic oligonucleotide
  Antisense strand to SEQ ID NO: 790538
ucgaagaucagguuuaggu

SEQ ID NO: 790540 - RNA, 19 nt, Artificial Sequence
  Description of Artificial Sequence: Synthetic oligonucleotide
  Sense strand starting at position 1647 of SEQ ID NO: 587416
ucccaauucggccgacaaa

SEQ ID NO: 790541 - RNA, 19 nt, Artificial Sequence
  Description of Artificial Sequence: Synthetic oligonucleotide
  Antisense strand to SEQ ID NO: 790540
uuugucggccgaauuggga

SEQ ID NO: 790542 - RNA, 19 nt, Artificial Sequence
  Description of Artificial Sequence: Synthetic oligonucleotide
  Sense strand starting at position 1689 of SEQ ID NO: 587416
uccugaauuucuccgcagu

SEQ ID NO: 790543 - RNA, 19 nt, Artificial Sequence
  Description of Artificial Sequence: Synthetic oligonucleotide
  Antisense strand to SEQ ID NO: 790542
acugcggagaaauucagga

SEQ ID NO: 790544 - RNA, 19 nt, Artificial Sequence
  Description of Artificial Sequence: Synthetic oligonucleotide
  Sense strand starting at position 2246 of SEQ ID NO: 587416
gcaugcuuuccgccacuuu

SEQ ID NO: 790545 - RNA, 19 nt, Artificial Sequence
  Description of Artificial Sequence: Synthetic oligonucleotide
  Antisense strand to SEQ ID NO: 790544
aaaguggcggaaagcaugc

SEQ ID NO: 790546 - RNA, 19 nt, Artificial Sequence
  Description of Artificial Sequence: Synthetic oligonucleotide
  Sense strand starting at position 2273 of SEQ ID NO: 587416
cgcgacuuagcgagucaga

SEQ ID NO: 790547 - RNA, 19 nt, Artificial Sequence
  Description of Artificial Sequence: Synthetic oligonucleotide
  Antisense strand to SEQ ID NO: 790546
ucugacucgcuaagucgcg

SEQ ID NO: 790548 - RNA, 19 nt, Artificial Sequence
  Description of Artificial Sequence: Synthetic oligonucleotide
  Sense strand starting at position 2282 of SEQ ID NO: 587416
gcgagucagagacgaucau

SEQ ID NO: 790549 - RNA, 19 nt, Artificial Sequence
  Description of Artificial Sequence: Synthetic oligonucleotide
  Antisense strand to SEQ ID NO: 790548
augaucgucucugacucgc

SEQ ID NO: 790550 - RNA, 19 nt, Artificial Sequence
  Description of Artificial Sequence: Synthetic oligonucleotide
  Sense strand starting at position 2348 of SEQ ID NO: 587416
ggaggaaacucagaucuaa

SEQ ID NO: 790551 - RNA, 19 nt, Artificial Sequence
  Description of Artificial Sequence: Synthetic oligonucleotide
  Antisense strand to SEQ ID NO: 790550
uuagaucugaguuuccucc

SEQ ID NO: 790552 - RNA, 19 nt, Artificial Sequence
  Description of Artificial Sequence: Synthetic oligonucleotide
  Sense strand starting at position 2437 of SEQ ID NO: 587416
ugcguucucgcugggauuu

SEQ ID NO: 790553 - RNA, 19 nt, Artificial Sequence
  Description of Artificial Sequence: Synthetic oligonucleotide
  Antisense strand to SEQ ID NO: 790552
aaaucccagcgagaacgca

SEQ ID NO: 790554 - RNA, 19 nt, Artificial Sequence
  Description of Artificial Sequence: Synthetic oligonucleotide
  Sense strand starting at position 2519 of SEQ ID NO: 587416
aagaaagaagcuugugcuu

SEQ ID NO: 790555 - RNA, 19 nt, Artificial Sequence
  Description of Artificial Sequence: Synthetic oligonucleotide
  Antisense strand to SEQ ID NO: 790554
aagcacaagcuucuuucuu

SEQ ID NO: 790556 - RNA, 19 nt, Artificial Sequence
  Description of Artificial Sequence: Synthetic oligonucleotide
  Sense strand starting at position 2525 of SEQ ID NO: 587416
gaagcuugugcuuggaacu

SEQ ID NO: 790557 - RNA, 19 nt, Artificial Sequence
  Description of Artificial Sequence: Synthetic oligonucleotide
  Antisense strand to SEQ ID NO: 790556
aguuccaagcacaagcuuc

SEQ ID NO: 790558 - RNA, 19 nt, Artificial Sequence
  Description of Artificial Sequence: Synthetic oligonucleotide
  Sense strand starting at position 2526 of SEQ ID NO: 587416
aagcuugugcuuggaacuu

SEQ ID NO: 790559 - RNA, 19 nt, Artificial Sequence
  Description of Artificial Sequence: Synthetic oligonucleotide
  Antisense strand to SEQ ID NO: 790558
aaguuccaagcacaagcuu

SEQ ID NO: 790560 - RNA, 19 nt, Artificial Sequence
  Description of Artificial Sequence: Synthetic oligonucleotide
  Sense strand starting at position 2685 of SEQ ID NO: 587416
uuguuaaacuguguuuaac

SEQ ID NO: 790561 - RNA, 19 nt, Artificial Sequence
  Description of Artificial Sequence: Synthetic oligonucleotide
  Antisense strand to SEQ ID NO: 790560
guuaaacacaguuuaacaa

SEQ ID NO: 790562 - RNA, 19 nt, Artificial Sequence
  Description of Artificial Sequence: Synthetic oligonucleotide
  Sense strand starting at position 2687 of SEQ ID NO: 587416
guuaaacuguguuuaacuu

SEQ ID NO: 790563 - RNA, 19 nt, Artificial Sequence
  Description of Artificial Sequence: Synthetic oligonucleotide
  Antisense strand to SEQ ID NO: 790562
aaguuaaacacaguuuaac

SEQ ID NO: 790564 - RNA, 19 nt, Artificial Sequence
  Description of Artificial Sequence: Synthetic oligonucleotide
  Sense strand starting at position 2866 of SEQ ID NO: 587416
gcagcaagauucuccuaau

SEQ ID NO: 790565 - RNA, 19 nt, Artificial Sequence
  Description of Artificial Sequence: Synthetic oligonucleotide
  Antisense strand to SEQ ID NO: 790564
auuaggagaaucuugcugc

SEQ ID NO: 790566 - RNA, 19 nt, Artificial Sequence
  Description of Artificial Sequence: Synthetic oligonucleotide
  Sense strand starting at position 2889 of SEQ ID NO: 587416
ccuuuaaguuaggauauuu

SEQ ID NO: 790567 - RNA, 19 nt, Artificial Sequence
  Description of Artificial Sequence: Synthetic oligonucleotide
  Antisense strand to SEQ ID NO: 790566
aaauauccuaacuuaaagg

SEQ ID NO: 790568 - RNA, 19 nt, Artificial Sequence
  Description of Artificial Sequence: Synthetic oligonucleotide
  Sense strand starting at position 3583 of SEQ ID NO: 587416
ugaguaugcugcuuaucag

SEQ ID NO: 790569 - RNA, 19 nt, Artificial Sequence
  Description of Artificial Sequence: Synthetic oligonucleotide
  Antisense strand to SEQ ID NO: 790568
cugauaagcagcauacuca

SEQ ID NO: 790570 - RNA, 19 nt, Artificial Sequence
  Description of Artificial Sequence: Synthetic oligonucleotide
  Sense strand starting at position 3584 of SEQ ID NO: 587416
gaguaugcugcuuaucaga

SEQ ID NO: 790571 - RNA, 19 nt, Artificial Sequence
  Description of Artificial Sequence: Synthetic oligonucleotide
  Antisense strand to SEQ ID NO: 790570
ucugauaagcagcauacuc

SEQ ID NO: 790572 - RNA, 19 nt, Artificial Sequence
  Description of Artificial Sequence: Synthetic oligonucleotide
  Sense strand starting at position 3586 of SEQ ID NO: 587416
guaugcugcuuaucagauc

SEQ ID NO: 790573 - RNA, 19 nt, Artificial Sequence
  Description of Artificial Sequence: Synthetic oligonucleotide
  Antisense strand to SEQ ID NO: 790572
gaucugauaagcagcauac

SEQ ID NO: 790574 - RNA, 19 nt, Artificial Sequence
  Description of Artificial Sequence: Synthetic oligonucleotide
  Sense strand starting at position 3831 of SEQ ID NO: 587416
agauaauuaugcccuagua

SEQ ID NO: 790575 - RNA, 19 nt, Artificial Sequence
  Description of Artificial Sequence: Synthetic oligonucleotide
  Antisense strand to SEQ ID NO: 790574
uacuagggcauaauuaucu

SEQ ID NO: 790576 - RNA, 19 nt, Artificial Sequence
  Description of Artificial Sequence: Synthetic oligonucleotide
  Sense strand starting at position 132 of SEQ ID NO: 587417
ucaguauaugaaugaagua

SEQ ID NO: 790577 - RNA, 19 nt, Artificial Sequence
  Description of Artificial Sequence: Synthetic oligonucleotide
  Antisense strand to SEQ ID NO: 790576
uacuucauucauauacuga

SEQ ID NO: 790578 - RNA, 19 nt, Artificial Sequence
  Description of Artificial Sequence: Synthetic oligonucleotide
  Sense strand starting at position 335 of SEQ ID NO: 587417
caagguaugguccaaguga

SEQ ID NO: 790579 - RNA, 19 nt, Artificial Sequence
  Description of Artificial Sequence: Synthetic oligonucleotide
  Antisense strand to SEQ ID NO: 790578
ucacuuggaccauaccuug

SEQ ID NO: 790580 - RNA, 19 nt, Artificial Sequence
  Description of Artificial Sequence: Synthetic oligonucleotide
  Sense strand starting at position 356 of SEQ ID NO: 587417
agccaaggccuuuaguaua

SEQ ID NO: 790581 - RNA, 19 nt, Artificial Sequence
  Description of Artificial Sequence: Synthetic oligonucleotide
  Antisense strand to SEQ ID NO: 790580
uauacuaaaggccuuggcu

SEQ ID NO: 790582 - RNA, 19 nt, Artificial Sequence
  Description of Artificial Sequence: Synthetic oligonucleotide
  Sense strand starting at position 361 of SEQ ID NO: 587417
aggccuuuaguauaucaau

SEQ ID NO: 790583 - RNA, 19 nt, Artificial Sequence
  Description of Artificial Sequence: Synthetic oligonucleotide
  Antisense strand to SEQ ID NO: 790582
auugauauacuaaaggccu

SEQ ID NO: 790584 - RNA, 19 nt, Artificial Sequence
  Description of Artificial Sequence: Synthetic oligonucleotide
  Sense strand starting at position 441 of SEQ ID NO: 587417
ggaugugggcuuuacuuua

SEQ ID NO: 790585 - RNA, 19 nt, Artificial Sequence
  Description of Artificial Sequence: Synthetic oligonucleotide
  Antisense strand to SEQ ID NO: 790584
uaaaguaaagcccacaucc

SEQ ID NO: 790586 - RNA, 19 nt, Artificial Sequence
  Description of Artificial Sequence: Synthetic oligonucleotide
  Sense strand starting at position 464 of SEQ ID NO: 587417
aagugcugagaguagaauu

SEQ ID NO: 790587 - RNA, 19 nt, Artificial Sequence
  Description of Artificial Sequence: Synthetic oligonucleotide
  Antisense strand to SEQ ID NO: 790586
aauucuacucucagcacuu

SEQ ID NO: 790588 - RNA, 19 nt, Artificial Sequence
  Description of Artificial Sequence: Synthetic oligonucleotide
  Sense strand starting at position 496 of SEQ ID NO: 587417
ccuguaaagcugcucuguu

SEQ ID NO: 790589 - RNA, 19 nt, Artificial Sequence
  Description of Artificial Sequence: Synthetic oligonucleotide
  Antisense strand to SEQ ID NO: 790588
aacagagcagcuuuacagg

SEQ ID NO: 790590 - RNA, 19 nt, Artificial Sequence
  Description of Artificial Sequence: Synthetic oligonucleotide
  Sense strand starting at position 726 of SEQ ID NO: 587417
uggacaaguuugguuuaag

SEQ ID NO: 790591 - RNA, 19 nt, Artificial Sequence
  Description of Artificial Sequence: Synthetic oligonucleotide
  Antisense strand to SEQ ID NO: 790590
cuuaaaccaaacuugucca

SEQ ID NO: 790592 - RNA, 19 nt, Artificial Sequence
  Description of Artificial Sequence: Synthetic oligonucleotide
  Sense strand starting at position 727 of SEQ ID NO: 587417
ggacaaguuugguuuaagu

SEQ ID NO: 790593 - RNA, 19 nt, Artificial Sequence
  Description of Artificial Sequence: Synthetic oligonucleotide
  Antisense strand to SEQ ID NO: 790592
acuuaaaccaaacuugucc

SEQ ID NO: 790594 - RNA, 19 nt, Artificial Sequence
  Description of Artificial Sequence: Synthetic oligonucleotide
  Sense strand starting at position 729 of SEQ ID NO: 587417
acaaguuugguuuaaguuu

SEQ ID NO: 790595 - RNA, 19 nt, Artificial Sequence
  Description of Artificial Sequence: Synthetic oligonucleotide
  Antisense strand to SEQ ID NO: 790594
aaacuuaaaccaaacuugu

SEQ ID NO: 790596 - RNA, 19 nt, Artificial Sequence
  Description of Artificial Sequence: Synthetic oligonucleotide
  Sense strand starting at position 770 of SEQ ID NO: 587417
aggccuuuguaucuagaga

SEQ ID NO: 790597 - RNA, 19 nt, Artificial Sequence
  Description of Artificial Sequence: Synthetic oligonucleotide
  Antisense strand to SEQ ID NO: 790596
ucucuagauacaaaggccu

SEQ ID NO: 790598 - RNA, 19 nt, Artificial Sequence
  Description of Artificial Sequence: Synthetic oligonucleotide
  Sense strand starting at position 771 of SEQ ID NO: 587417
ggccuuuguaucuagagaa

SEQ ID NO: 790599 - RNA, 19 nt, Artificial Sequence
  Description of Artificial Sequence: Synthetic oligonucleotide
  Antisense strand to SEQ ID NO: 790598
uucucuagauacaaaggcc

SEQ ID NO: 790600 - RNA, 19 nt, Artificial Sequence
  Description of Artificial Sequence: Synthetic oligonucleotide
  Sense strand starting at position 858 of SEQ ID NO: 587417
guacuccagcagcaagaau

SEQ ID NO: 790601 - RNA, 19 nt, Artificial Sequence
  Description of Artificial Sequence: Synthetic oligonucleotide
  Antisense strand to SEQ ID NO: 790600
auucuugcugcuggaguac

SEQ ID NO: 790602 - RNA, 19 nt, Artificial Sequence
  Description of Artificial Sequence: Synthetic oligonucleotide
  Sense strand starting at position 936 of SEQ ID NO: 587417
ugugugaguguugcgagau

SEQ ID NO: 790603 - RNA, 19 nt, Artificial Sequence
  Description of Artificial Sequence: Synthetic oligonucleotide
  Antisense strand to SEQ ID NO: 790602
aucucgcaacacucacaca

SEQ ID NO: 790604 - RNA, 19 nt, Artificial Sequence
  Description of Artificial Sequence: Synthetic oligonucleotide
  Sense strand starting at position 939 of SEQ ID NO: 587417
gugaguguugcgagaucau

SEQ ID NO: 790605 - RNA, 19 nt, Artificial Sequence
  Description of Artificial Sequence: Synthetic oligonucleotide
  Antisense strand to SEQ ID NO: 790604
augaucucgcaacacucac

SEQ ID NO: 790606 - RNA, 19 nt, Artificial Sequence
  Description of Artificial Sequence: Synthetic oligonucleotide
  Sense strand starting at position 1115 of SEQ ID NO: 587417
cuguaacuaccaggugaau

SEQ ID NO: 790607 - RNA, 19 nt, Artificial Sequence
  Description of Artificial Sequence: Synthetic oligonucleotide
  Antisense strand to SEQ ID NO: 790606
auucaccugguaguuacag

SEQ ID NO: 790608 - RNA, 19 nt, Artificial Sequence
  Description of Artificial Sequence: Synthetic oligonucleotide
  Sense strand starting at position 1171 of SEQ ID NO: 587417
ggucgaaaugguugggaga

SEQ ID NO: 790609 - RNA, 19 nt, Artificial Sequence
  Description of Artificial Sequence: Synthetic oligonucleotide
  Antisense strand to SEQ ID NO: 790608
ucucccaaccauuucgacc

SEQ ID NO: 790610 - RNA, 19 nt, Artificial Sequence
  Description of Artificial Sequence: Synthetic oligonucleotide
  Sense strand starting at position 1172 of SEQ ID NO: 587417
gucgaaaugguugggagaa

SEQ ID NO: 790611 - RNA, 19 nt, Artificial Sequence
  Description of Artificial Sequence: Synthetic oligonucleotide
  Antisense strand to SEQ ID NO: 790610
uucucccaaccauuucgac

SEQ ID NO: 790612 - RNA, 19 nt, Artificial Sequence
  Description of Artificial Sequence: Synthetic oligonucleotide
  Sense strand starting at position 1184 of SEQ ID NO: 587417
gggagaaauggcuggaagu

SEQ ID NO: 790613 - RNA, 19 nt, Artificial Sequence
  Description of Artificial Sequence: Synthetic oligonucleotide
  Antisense strand to SEQ ID NO: 790612
acuuccagccauuucuccc

SEQ ID NO: 790614 - RNA, 19 nt, Artificial Sequence
  Description of Artificial Sequence: Synthetic oligonucleotide
  Sense strand starting at position 1185 of SEQ ID NO: 587417
ggagaaauggcuggaagug

SEQ ID NO: 790615 - RNA, 19 nt, Artificial Sequence
  Description of Artificial Sequence: Synthetic oligonucleotide
  Antisense strand to SEQ ID NO: 790614
cacuuccagccauuucucc

SEQ ID NO: 790616 - RNA, 19 nt, Artificial Sequence
  Description of Artificial Sequence: Synthetic oligonucleotide
  Sense strand starting at position 1243 of SEQ ID NO: 587417
uugcgacuuccacagaaca

SEQ ID NO: 790617 - RNA, 19 nt, Artificial Sequence
  Description of Artificial Sequence: Synthetic oligonucleotide
  Antisense strand to SEQ ID NO: 790616
uguucuguggaagucgcaa

SEQ ID NO: 790618 - RNA, 19 nt, Artificial Sequence
  Description of Artificial Sequence: Synthetic oligonucleotide
  Sense strand starting at position 1292 of SEQ ID NO: 587417
gggaguaagcgguauagag

SEQ ID NO: 790619 - RNA, 19 nt, Artificial Sequence
  Description of Artificial Sequence: Synthetic oligonucleotide
  Antisense strand to SEQ ID NO: 790618
cucuauaccgcuuacuccc

SEQ ID NO: 790620 - RNA, 19 nt, Artificial Sequence
  Description of Artificial Sequence: Synthetic oligonucleotide
  Sense strand starting at position 1294 of SEQ ID NO: 587417
gaguaagcgguauagagaa

SEQ ID NO: 790621 - RNA, 19 nt, Artificial Sequence
  Description of Artificial Sequence: Synthetic oligonucleotide
  Antisense strand to SEQ ID NO: 790620
uucucuauaccgcuuacuc

SEQ ID NO: 790622 - RNA, 19 nt, Artificial Sequence
  Description of Artificial Sequence: Synthetic oligonucleotide
  Sense strand starting at position 1296 of SEQ ID NO: 587417
guaagcgguauagagaaau

SEQ ID NO: 790623 - RNA, 19 nt, Artificial Sequence
  Description of Artificial Sequence: Synthetic oligonucleotide
  Antisense strand to SEQ ID NO: 790622
auuucucuauaccgcuuac

SEQ ID NO: 790624 - RNA, 19 nt, Artificial Sequence
  Description of Artificial Sequence: Synthetic oligonucleotide
  Sense strand starting at position 2173 of SEQ ID NO: 587417
cggagucauuggaagggaa

SEQ ID NO: 790625 - RNA, 19 nt, Artificial Sequence
  Description of Artificial Sequence: Synthetic oligonucleotide
  Antisense strand to SEQ ID NO: 790624
uucccuuccaaugacuccg

SEQ ID NO: 790626 - RNA, 19 nt, Artificial Sequence
  Description of Artificial Sequence: Synthetic oligonucleotide
  Sense strand starting at position 2232 of SEQ ID NO: 587417
ucauaagauuaggugcuaa

SEQ ID NO: 790627 - RNA, 19 nt, Artificial Sequence
  Description of Artificial Sequence: Synthetic oligonucleotide
  Antisense strand to SEQ ID NO: 790626
uuagcaccuaaucuuauga

SEQ ID NO: 790628 - RNA, 19 nt, Artificial Sequence
  Description of Artificial Sequence: Synthetic oligonucleotide
  Sense strand starting at position 2415 of SEQ ID NO: 587417
aaauguucuuaagcgagga

SEQ ID NO: 790629 - RNA, 19 nt, Artificial Sequence
  Description of Artificial Sequence: Synthetic oligonucleotide
  Antisense strand to SEQ ID NO: 790628
uccucgcuuaagaacauuu

SEQ ID NO: 790630 - RNA, 19 nt, Artificial Sequence
  Description of Artificial Sequence: Synthetic oligonucleotide
  Sense strand starting at position 2748 of SEQ ID NO: 587417
auaugaucauggcugugaa

SEQ ID NO: 790631 - RNA, 19 nt, Artificial Sequence
  Description of Artificial Sequence: Synthetic oligonucleotide
  Antisense strand to SEQ ID NO: 790630
uucacagccaugaucauau

SEQ ID NO: 790632 - RNA, 19 nt, Artificial Sequence
  Description of Artificial Sequence: Synthetic oligonucleotide
  Sense strand starting at position 2749 of SEQ ID NO: 587417
uaugaucauggcugugaau

SEQ ID NO: 790633 - RNA, 19 nt, Artificial Sequence
  Description of Artificial Sequence: Synthetic oligonucleotide
  Antisense strand to SEQ ID NO: 790632
auucacagccaugaucaua

SEQ ID NO: 790634 - RNA, 19 nt, Artificial Sequence
  Description of Artificial Sequence: Synthetic oligonucleotide
  Sense strand starting at position 2751 of SEQ ID NO: 587417
ugaucauggcugugaauac

SEQ ID NO: 790635 - RNA, 19 nt, Artificial Sequence
  Description of Artificial Sequence: Synthetic oligonucleotide
  Antisense strand to SEQ ID NO: 790634
guauucacagccaugauca

SEQ ID NO: 790636 - RNA, 19 nt, Artificial Sequence
  Description of Artificial Sequence: Synthetic oligonucleotide
  Sense strand starting at position 2782 of SEQ ID NO: 587417
ugggaagcaccaugcaaau

SEQ ID NO: 790637 - RNA, 19 nt, Artificial Sequence
  Description of Artificial Sequence: Synthetic oligonucleotide
  Antisense strand to SEQ ID NO: 790636
auuugcauggugcuuccca

SEQ ID NO: 790638 - RNA, 19 nt, Artificial Sequence
  Description of Artificial Sequence: Synthetic oligonucleotide
  Sense strand starting at position 2808 of SEQ ID NO: 587417
aauacuggcuuuguaagga

SEQ ID NO: 790639 - RNA, 19 nt, Artificial Sequence
  Description of Artificial Sequence: Synthetic oligonucleotide
  Antisense strand to SEQ ID NO: 790638
uccuuacaaagccaguauu

SEQ ID NO: 790640 - RNA, 19 nt, Artificial Sequence
  Description of Artificial Sequence: Synthetic oligonucleotide
  Sense strand starting at position 2953 of SEQ ID NO: 587417
acauucuaucuuugagaag

SEQ ID NO: 790641 - RNA, 19 nt, Artificial Sequence
  Description of Artificial Sequence: Synthetic oligonucleotide
  Antisense strand to SEQ ID NO: 790640
cuucucaaagauagaaugu

SEQ ID NO: 790642 - RNA, 19 nt, Artificial Sequence
  Description of Artificial Sequence: Synthetic oligonucleotide
  Sense strand starting at position 3000 of SEQ ID NO: 587417
gugaguuuauuucuggcuu

SEQ ID NO: 790643 - RNA, 19 nt, Artificial Sequence
  Description of Artificial Sequence: Synthetic oligonucleotide
  Antisense strand to SEQ ID NO: 790642
aagccagaaauaaacucac

SEQ ID NO: 790644 - RNA, 19 nt, Artificial Sequence
  Description of Artificial Sequence: Synthetic oligonucleotide
  Sense strand starting at position 3032 of SEQ ID NO: 587417
auggaagauuugugaagag

SEQ ID NO: 790645 - RNA, 19 nt, Artificial Sequence
  Description of Artificial Sequence: Synthetic oligonucleotide
  Antisense strand to SEQ ID NO: 790644
cucuucacaaaucuuccau

SEQ ID NO: 790646 - RNA, 19 nt, Artificial Sequence
  Description of Artificial Sequence: Synthetic oligonucleotide
  Sense strand starting at position 3107 of SEQ ID NO: 587417
gacauagugcuccagguag

SEQ ID NO: 790647 - RNA, 19 nt, Artificial Sequence
  Description of Artificial Sequence: Synthetic oligonucleotide
  Antisense strand to SEQ ID NO: 790646
cuaccuggagcacuauguc

SEQ ID NO: 790648 - RNA, 19 nt, Artificial Sequence
  Description of Artificial Sequence: Synthetic oligonucleotide
  Sense strand starting at position 3176 of SEQ ID NO: 587417
gugguuaagcuaugaggga

SEQ ID NO: 790649 - RNA, 19 nt, Artificial Sequence
  Description of Artificial Sequence: Synthetic oligonucleotide
  Antisense strand to SEQ ID NO: 790648
ucccucauagcuuaaccac

SEQ ID NO: 790650 - RNA, 19 nt, Artificial Sequence
  Description of Artificial Sequence: Synthetic oligonucleotide
  Sense strand starting at position 3349 of SEQ ID NO: 587417
aaggguuaugaagggucau

SEQ ID NO: 790651 - RNA, 19 nt, Artificial Sequence
  Description of Artificial Sequence: Synthetic oligonucleotide
  Antisense strand to SEQ ID NO: 790650
augacccuucauaacccuu

SEQ ID NO: 790652 - RNA, 19 nt, Artificial Sequence
  Description of Artificial Sequence: Synthetic oligonucleotide
  Sense strand starting at position 3448 of SEQ ID NO: 587417
gggaaauccucugccugaa

SEQ ID NO: 790653 - RNA, 19 nt, Artificial Sequence
  Description of Artificial Sequence: Synthetic oligonucleotide
  Antisense strand to SEQ ID NO: 790652
uucaggcagaggauuuccc

SEQ ID NO: 790654 - RNA, 19 nt, Artificial Sequence
  Description of Artificial Sequence: Synthetic oligonucleotide
  Sense strand starting at position 3611 of SEQ ID NO: 587417
cuaccagucagguaguaaa

SEQ ID NO: 790655 - RNA, 19 nt, Artificial Sequence
  Description of Artificial Sequence: Synthetic oligonucleotide
  Antisense strand to SEQ ID NO: 790654
uuuacuaccugacugguag

SEQ ID NO: 790656 - RNA, 19 nt, Artificial Sequence
  Description of Artificial Sequence: Synthetic oligonucleotide
  Sense strand starting at position 223 of SEQ ID NO: 587418
aaaggcugucacuguaagu

SEQ ID NO: 790657 - RNA, 19 nt, Artificial Sequence
  Description of Artificial Sequence: Synthetic oligonucleotide
  Antisense strand to SEQ ID NO: 790656
acuuacagugacagccuuu

SEQ ID NO: 790658 - RNA, 19 nt, Artificial Sequence
  Description of Artificial Sequence: Synthetic oligonucleotide
  Sense strand starting at position 246 of SEQ ID NO: 587418
aaauguaaaugcuugugga

SEQ ID NO: 790659 - RNA, 19 nt, Artificial Sequence
  Description of Artificial Sequence: Synthetic oligonucleotide
  Antisense strand to SEQ ID NO: 790658
uccacaagcauuuacauuu

SEQ ID NO: 790660 - RNA, 19 nt, Artificial Sequence
  Description of Artificial Sequence: Synthetic oligonucleotide
  Sense strand starting at position 247 of SEQ ID NO: 587418
aauguaaaugcuuguggaa

SEQ ID NO: 790661 - RNA, 19 nt, Artificial Sequence
  Description of Artificial Sequence: Synthetic oligonucleotide
  Antisense strand to SEQ ID NO: 790660
uuccacaagcauuuacauu

SEQ ID NO: 790662 - RNA, 19 nt, Artificial Sequence
  Description of Artificial Sequence: Synthetic oligonucleotide
  Sense strand starting at position 259 of SEQ ID NO: 587418
uguggaaucccucgcugaa

SEQ ID NO: 790663 - RNA, 19 nt, Artificial Sequence
  Description of Artificial Sequence: Synthetic oligonucleotide
  Antisense strand to SEQ ID NO: 790662
uucagcgagggauuccaca

SEQ ID NO: 790664 - RNA, 19 nt, Artificial Sequence
  Description of Artificial Sequence: Synthetic oligonucleotide
  Sense strand starting at position 261 of SEQ ID NO: 587418
uggaaucccucgcugaaua

SEQ ID NO: 790665 - RNA, 19 nt, Artificial Sequence
  Description of Artificial Sequence: Synthetic oligonucleotide
  Antisense strand to SEQ ID NO: 790664
uauucagcgagggauucca

SEQ ID NO: 790666 - RNA, 19 nt, Artificial Sequence
  Description of Artificial Sequence: Synthetic oligonucleotide
  Sense strand starting at position 262 of SEQ ID NO: 587418
ggaaucccucgcugaauau

SEQ ID NO: 790667 - RNA, 19 nt, Artificial Sequence
  Description of Artificial Sequence: Synthetic oligonucleotide
  Antisense strand to SEQ ID NO: 790666
auauucagcgagggauucc

SEQ ID NO: 790668 - RNA, 19 nt, Artificial Sequence
  Description of Artificial Sequence: Synthetic oligonucleotide
  Sense strand starting at position 272 of SEQ ID NO: 587418
gcugaauauguauagacca

SEQ ID NO: 790669 - RNA, 19 nt, Artificial Sequence
  Description of Artificial Sequence: Synthetic oligonucleotide
  Antisense strand to SEQ ID NO: 790668
uggucuauacauauucagc

SEQ ID NO: 790670 - RNA, 19 nt, Artificial Sequence
  Description of Artificial Sequence: Synthetic oligonucleotide
  Sense strand starting at position 303 of SEQ ID NO: 587418
cuggaagcccucugagaag

SEQ ID NO: 790671 - RNA, 19 nt, Artificial Sequence
  Description of Artificial Sequence: Synthetic oligonucleotide
  Antisense strand to SEQ ID NO: 790670
cuucucagagggcuuccag

SEQ ID NO: 790672 - RNA, 19 nt, Artificial Sequence
  Description of Artificial Sequence: Synthetic oligonucleotide
  Sense strand starting at position 494 of SEQ ID NO: 587418
agaaauuaaggcuguggaa

SEQ ID NO: 790673 - RNA, 19 nt, Artificial Sequence
  Description of Artificial Sequence: Synthetic oligonucleotide
  Antisense strand to SEQ ID NO: 790672
uuccacagccuuaauuucu

SEQ ID NO: 790674 - RNA, 19 nt, Artificial Sequence
  Description of Artificial Sequence: Synthetic oligonucleotide
  Sense strand starting at position 526 of SEQ ID NO: 587418
guguaaggaucacucagau

SEQ ID NO: 790675 - RNA, 19 nt, Artificial Sequence
  Description of Artificial Sequence: Synthetic oligonucleotide
  Antisense strand to SEQ ID NO: 790674
aucugagugauccuuacac

SEQ ID NO: 790676 - RNA, 19 nt, Artificial Sequence
  Description of Artificial Sequence: Synthetic oligonucleotide
  Sense strand starting at position 551 of SEQ ID NO: 587418
agaauuguggugugagauu

SEQ ID NO: 790677 - RNA, 19 nt, Artificial Sequence
  Description of Artificial Sequence: Synthetic oligonucleotide
  Antisense strand to SEQ ID NO: 790676
aaucucacaccacaauucu

SEQ ID NO: 790678 - RNA, 19 nt, Artificial Sequence
  Description of Artificial Sequence: Synthetic oligonucleotide
  Sense strand starting at position 565 of SEQ ID NO: 587418
agauuauuacugcgcugaa

SEQ ID NO: 790679 - RNA, 19 nt, Artificial Sequence
  Description of Artificial Sequence: Synthetic oligonucleotide
  Antisense strand to SEQ ID NO: 790678
uucagcgcaguaauaaucu

SEQ ID NO: 790680 - RNA, 19 nt, Artificial Sequence
  Description of Artificial Sequence: Synthetic oligonucleotide
  Sense strand starting at position 566 of SEQ ID NO: 587418
gauuauuacugcgcugaaa

SEQ ID NO: 790681 - RNA, 19 nt, Artificial Sequence
  Description of Artificial Sequence: Synthetic oligonucleotide
  Antisense strand to SEQ ID NO: 790680
uuucagcgcaguaauaauc

SEQ ID NO: 790682 - RNA, 19 nt, Artificial Sequence
  Description of Artificial Sequence: Synthetic oligonucleotide
  Sense strand starting at position 596 of SEQ ID NO: 587418
ucauauuugucagaaagug

SEQ ID NO: 790683 - RNA, 19 nt, Artificial Sequence
  Description of Artificial Sequence: Synthetic oligonucleotide
  Antisense strand to SEQ ID NO: 790682
cacuuucugacaaauauga

SEQ ID NO: 790684 - RNA, 19 nt, Artificial Sequence
  Description of Artificial Sequence: Synthetic oligonucleotide
  Sense strand starting at position 683 of SEQ ID NO: 587418
gguuuagucuucuucgaca

SEQ ID NO: 790685 - RNA, 19 nt, Artificial Sequence
  Description of Artificial Sequence: Synthetic oligonucleotide
  Antisense strand to SEQ ID NO: 790684
ugucgaagaagacuaaacc

SEQ ID NO: 790686 - RNA, 19 nt, Artificial Sequence
  Description of Artificial Sequence: Synthetic oligonucleotide
  Sense strand starting at position 685 of SEQ ID NO: 587418
uuuagucuucuucgacagu

SEQ ID NO: 790687 - RNA, 19 nt, Artificial Sequence
  Description of Artificial Sequence: Synthetic oligonucleotide
  Antisense strand to SEQ ID NO: 790686
acugucgaagaagacuaaa

SEQ ID NO: 790688 - RNA, 19 nt, Artificial Sequence
  Description of Artificial Sequence: Synthetic oligonucleotide
  Sense strand starting at position 688 of SEQ ID NO: 587418
agucuucuucgacagucua

SEQ ID NO: 790689 - RNA, 19 nt, Artificial Sequence
  Description of Artificial Sequence: Synthetic oligonucleotide
  Antisense strand to SEQ ID NO: 790688
uagacugucgaagaagacu

SEQ ID NO: 790690 - RNA, 19 nt, Artificial Sequence
  Description of Artificial Sequence: Synthetic oligonucleotide
  Sense strand starting at position 696 of SEQ ID NO: 587418
ucgacagucuauuucgagu

SEQ ID NO: 790691 - RNA, 19 nt, Artificial Sequence
  Description of Artificial Sequence: Synthetic oligonucleotide
  Antisense strand to SEQ ID NO: 790690
acucgaaauagacugucga

SEQ ID NO: 790692 - RNA, 19 nt, Artificial Sequence
  Description of Artificial Sequence: Synthetic oligonucleotide
  Sense strand starting at position 2544 of SEQ ID NO: 587418
ugggugugagcugauggau

SEQ ID NO: 790693 - RNA, 19 nt, Artificial Sequence
  Description of Artificial Sequence: Synthetic oligonucleotide
  Antisense strand to SEQ ID NO: 790692
auccaucagcucacaccca

SEQ ID NO: 790694 - RNA, 19 nt, Artificial Sequence
  Description of Artificial Sequence: Synthetic oligonucleotide
  Sense strand starting at position 2900 of SEQ ID NO: 587418
aagagugcagucgggaauu

SEQ ID NO: 790695 - RNA, 19 nt, Artificial Sequence
  Description of Artificial Sequence: Synthetic oligonucleotide
  Antisense strand to SEQ ID NO: 790694
aauucccgacugcacucuu

SEQ ID NO: 790696 - RNA, 19 nt, Artificial Sequence
  Description of Artificial Sequence: Synthetic oligonucleotide
  Sense strand starting at position 3022 of SEQ ID NO: 587418
ugucgcgauuugguuuauu

SEQ ID NO: 790697 - RNA, 19 nt, Artificial Sequence
  Description of Artificial Sequence: Synthetic oligonucleotide
  Antisense strand to SEQ ID NO: 790696
aauaaaccaaaucgcgaca

SEQ ID NO: 790698 - RNA, 19 nt, Artificial Sequence
  Description of Artificial Sequence: Synthetic oligonucleotide
  Sense strand starting at position 3272 of SEQ ID NO: 587418
cugugagugccaugaauug

SEQ ID NO: 790699 - RNA, 19 nt, Artificial Sequence
  Description of Artificial Sequence: Synthetic oligonucleotide
  Antisense strand to SEQ ID NO: 790698
caauucauggcacucacag

SEQ ID NO: 790700 - RNA, 19 nt, Artificial Sequence
  Description of Artificial Sequence: Synthetic oligonucleotide
  Sense strand starting at position 3385 of SEQ ID NO: 587418
auuagauuugugugccuaa

SEQ ID NO: 790701 - RNA, 19 nt, Artificial Sequence
  Description of Artificial Sequence: Synthetic oligonucleotide
  Antisense strand to SEQ ID NO: 790700
uuaggcacacaaaucuaau

SEQ ID NO: 790702 - RNA, 19 nt, Artificial Sequence
  Description of Artificial Sequence: Synthetic oligonucleotide
  Sense strand starting at position 3386 of SEQ ID NO: 587418
uuagauuugugugccuaac

SEQ ID NO: 790703 - RNA, 19 nt, Artificial Sequence
  Description of Artificial Sequence: Synthetic oligonucleotide
  Antisense strand to SEQ ID NO: 790702
guuaggcacacaaaucuaa

SEQ ID NO: 790704 - RNA, 19 nt, Artificial Sequence
  Description of Artificial Sequence: Synthetic oligonucleotide
  Sense strand starting at position 3388 of SEQ ID NO: 587418
agauuugugugccuaacac

SEQ ID NO: 790705 - RNA, 19 nt, Artificial Sequence
  Description of Artificial Sequence: Synthetic oligonucleotide
  Antisense strand to SEQ ID NO: 790704
guguuaggcacacaaaucu

SEQ ID NO: 790706 - RNA, 19 nt, Artificial Sequence
  Description of Artificial Sequence: Synthetic oligonucleotide
  Sense strand starting at position 3629 of SEQ ID NO: 587418
ccguguaaccagggaucca

SEQ ID NO: 790707 - RNA, 19 nt, Artificial Sequence
  Description of Artificial Sequence: Synthetic oligonucleotide
  Antisense strand to SEQ ID NO: 790706
uggaucccugguuacacgg

SEQ ID NO: 790708 - RNA, 19 nt, Artificial Sequence
  Description of Artificial Sequence: Synthetic oligonucleotide
  Sense strand starting at position 3653 of SEQ ID NO: 587418
auugucagcccaggauuaa

SEQ ID NO: 790709 - RNA, 19 nt, Artificial Sequence
  Description of Artificial Sequence: Synthetic oligonucleotide
  Antisense strand to SEQ ID NO: 790708
uuaauccugggcugacaau

SEQ ID NO: 790710 - RNA, 19 nt, Artificial Sequence
  Description of Artificial Sequence: Synthetic oligonucleotide
  Sense strand starting at position 3654 of SEQ ID NO: 587418
uugucagcccaggauuaaa

SEQ ID NO: 790711 - RNA, 19 nt, Artificial Sequence
  Description of Artificial Sequence: Synthetic oligonucleotide
  Antisense strand to SEQ ID NO: 790710
uuuaauccugggcugacaa

SEQ ID NO: 790712 - RNA, 19 nt, Artificial Sequence
  Description of Artificial Sequence: Synthetic oligonucleotide
  Sense strand starting at position 3707 of SEQ ID NO: 587418
agagauaguuuggugaaua

SEQ ID NO: 790713 - RNA, 19 nt, Artificial Sequence
  Description of Artificial Sequence: Synthetic oligonucleotide
  Antisense strand to SEQ ID NO: 790712
uauucaccaaacuaucucu

SEQ ID NO: 790714 - RNA, 19 nt, Artificial Sequence
  Description of Artificial Sequence: Synthetic oligonucleotide
  Sense strand starting at position 3712 of SEQ ID NO: 587418
uaguuuggugaauauaguu

SEQ ID NO: 790715 - RNA, 19 nt, Artificial Sequence
  Description of Artificial Sequence: Synthetic oligonucleotide
  Antisense strand to SEQ ID NO: 790714
aacuauauucaccaaacua

SEQ ID NO: 790716 - RNA, 19 nt, Artificial Sequence
  Description of Artificial Sequence: Synthetic oligonucleotide
  Sense strand starting at position 3717 of SEQ ID NO: 587418
uggugaauauaguuacauc

SEQ ID NO: 790717 - RNA, 19 nt, Artificial Sequence
  Description of Artificial Sequence: Synthetic oligonucleotide
  Antisense strand to SEQ ID NO: 790716
gauguaacuauauucacca

SEQ ID NO: 790718 - RNA, 19 nt, Artificial Sequence
  Description of Artificial Sequence: Synthetic oligonucleotide
  Sense strand starting at position 3728 of SEQ ID NO: 587418
guuacaucugcuggacaau

SEQ ID NO: 790719 - RNA, 19 nt, Artificial Sequence
  Description of Artificial Sequence: Synthetic oligonucleotide
  Antisense strand to SEQ ID NO: 790718
auuguccagcagauguaac

SEQ ID NO: 790720 - RNA, 19 nt, Artificial Sequence
  Description of Artificial Sequence: Synthetic oligonucleotide
  Sense strand starting at position 3739 of SEQ ID NO: 587418
uggacaaucagucgcaauu

SEQ ID NO: 790721 - RNA, 19 nt, Artificial Sequence
  Description of Artificial Sequence: Synthetic oligonucleotide
  Antisense strand to SEQ ID NO: 790720
aauugcgacugauugucca

SEQ ID NO: 790722 - RNA, 19 nt, Artificial Sequence
  Description of Artificial Sequence: Synthetic oligonucleotide
  Sense strand starting at position 3768 of SEQ ID NO: 587418
cccaucuugauagguggaa

SEQ ID NO: 790723 - RNA, 19 nt, Artificial Sequence
  Description of Artificial Sequence: Synthetic oligonucleotide
  Antisense strand to SEQ ID NO: 790722
uuccaccuaucaagauggg

SEQ ID NO: 790724 - RNA, 19 nt, Artificial Sequence
  Description of Artificial Sequence: Synthetic oligonucleotide
  Sense strand starting at position 3769 of SEQ ID NO: 587418
ccaucuugauagguggaaa

SEQ ID NO: 790725 - RNA, 19 nt, Artificial Sequence
  Description of Artificial Sequence: Synthetic oligonucleotide
  Antisense strand to SEQ ID NO: 790724
uuuccaccuaucaagaugg

SEQ ID NO: 790726 - RNA, 19 nt, Artificial Sequence
  Description of Artificial Sequence: Synthetic oligonucleotide
  Sense strand starting at position 3788 of SEQ ID NO: 587418
ggcgucuccggaugagaaa

SEQ ID NO: 790727 - RNA, 19 nt, Artificial Sequence
  Description of Artificial Sequence: Synthetic oligonucleotide
  Antisense strand to SEQ ID NO: 790726
uuucucauccggagacgcc

SEQ ID NO: 790728 - RNA, 19 nt, Artificial Sequence
  Description of Artificial Sequence: Synthetic oligonucleotide
  Sense strand starting at position 3876 of SEQ ID NO: 587418
gcagaugugcuuugcauuu

SEQ ID NO: 790729 - RNA, 19 nt, Artificial Sequence
  Description of Artificial Sequence: Synthetic oligonucleotide
  Antisense strand to SEQ ID NO: 790728
aaaugcaaagcacaucugc

SEQ ID NO: 790730 - RNA, 19 nt, Artificial Sequence
  Description of Artificial Sequence: Synthetic oligonucleotide
  Sense strand starting at position 3883 of SEQ ID NO: 587418
ugcuuugcauuugaauaaa

SEQ ID NO: 790731 - RNA, 19 nt, Artificial Sequence
  Description of Artificial Sequence: Synthetic oligonucleotide
  Antisense strand to SEQ ID NO: 790730
uuuauucaaaugcaaagca

SEQ ID NO: 790732 - RNA, 19 nt, Artificial Sequence
  Description of Artificial Sequence: Synthetic oligonucleotide
  Sense strand starting at position 3959 of SEQ ID NO: 587418
gugagaugcgugccuuauc

SEQ ID NO: 790733 - RNA, 19 nt, Artificial Sequence
  Description of Artificial Sequence: Synthetic oligonucleotide
  Antisense strand to SEQ ID NO: 790732
gauaaggcacgcaucucac

SEQ ID NO: 790734 - RNA, 19 nt, Artificial Sequence
  Description of Artificial Sequence: Synthetic oligonucleotide
  Sense strand starting at position 3983 of SEQ ID NO: 587418
ugcuuuccagguuaggaaa

SEQ ID NO: 790735 - RNA, 19 nt, Artificial Sequence
  Description of Artificial Sequence: Synthetic oligonucleotide
  Antisense strand to SEQ ID NO: 790734
uuuccuaaccuggaaagca

SEQ ID NO: 790736 - RNA, 19 nt, Artificial Sequence
  Description of Artificial Sequence: Synthetic oligonucleotide
  Sense strand starting at position 6 of SEQ ID NO: 587419
acaucagagccucgaaaga

SEQ ID NO: 790737 - RNA, 19 nt, Artificial Sequence
  Description of Artificial Sequence: Synthetic oligonucleotide
  Antisense strand to SEQ ID NO: 790736
ucuuucgaggcucugaugu

SEQ ID NO: 790738 - RNA, 19 nt, Artificial Sequence
  Description of Artificial Sequence: Synthetic oligonucleotide
  Sense strand starting at position 20 of SEQ ID NO: 587419
aaagaaaucugugagguag

SEQ ID NO: 790739 - RNA, 19 nt, Artificial Sequence
  Description of Artificial Sequence: Synthetic oligonucleotide
  Antisense strand to SEQ ID NO: 790738
cuaccucacagauuucuuu

SEQ ID NO: 790740 - RNA, 19 nt, Artificial Sequence
  Description of Artificial Sequence: Synthetic oligonucleotide
  Sense strand starting at position 22 of SEQ ID NO: 587419
agaaaucugugagguagau

SEQ ID NO: 790741 - RNA, 19 nt, Artificial Sequence
  Description of Artificial Sequence: Synthetic oligonucleotide
  Antisense strand to SEQ ID NO: 790740
aucuaccucacagauuucu

SEQ ID NO: 790742 - RNA, 19 nt, Artificial Sequence
  Description of Artificial Sequence: Synthetic oligonucleotide
  Sense strand starting at position 47 of SEQ ID NO: 587419
agguucuauucccaugaca

SEQ ID NO: 790743 - RNA, 19 nt, Artificial Sequence
  Description of Artificial Sequence: Synthetic oligonucleotide
  Antisense strand to SEQ ID NO: 790742
ugucaugggaauagaaccu

SEQ ID NO: 790744 - RNA, 19 nt, Artificial Sequence
  Description of Artificial Sequence: Synthetic oligonucleotide
  Sense strand starting at position 49 of SEQ ID NO: 587419
guucuauucccaugacaca

SEQ ID NO: 790745 - RNA, 19 nt, Artificial Sequence
  Description of Artificial Sequence: Synthetic oligonucleotide
  Antisense strand to SEQ ID NO: 790744
ugugucaugggaauagaac

SEQ ID NO: 790746 - RNA, 19 nt, Artificial Sequence
  Description of Artificial Sequence: Synthetic oligonucleotide
  Sense strand starting at position 124 of SEQ ID NO: 587419
gcacuuguccucugucuac

SEQ ID NO: 790747 - RNA, 19 nt, Artificial Sequence
  Description of Artificial Sequence: Synthetic oligonucleotide
  Antisense strand to SEQ ID NO: 790746
guagacagaggacaagugc

SEQ ID NO: 790748 - RNA, 19 nt, Artificial Sequence
  Description of Artificial Sequence: Synthetic oligonucleotide
  Sense strand starting at position 127 of SEQ ID NO: 587419
cuuguccucugucuacaau

SEQ ID NO: 790749 - RNA, 19 nt, Artificial Sequence
  Description of Artificial Sequence: Synthetic oligonucleotide
  Antisense strand to SEQ ID NO: 790748
auuguagacagaggacaag

SEQ ID NO: 790750 - RNA, 19 nt, Artificial Sequence
  Description of Artificial Sequence: Synthetic oligonucleotide
  Sense strand starting at position 167 of SEQ ID NO: 587419
ucucuaagcuuccauggaa

SEQ ID NO: 790751 - RNA, 19 nt, Artificial Sequence
  Description of Artificial Sequence: Synthetic oligonucleotide
  Antisense strand to SEQ ID NO: 790750
uuccauggaagcuuagaga

SEQ ID NO: 790752 - RNA, 19 nt, Artificial Sequence
  Description of Artificial Sequence: Synthetic oligonucleotide
  Sense strand starting at position 170 of SEQ ID NO: 587419
cuaagcuuccauggaauaa

SEQ ID NO: 790753 - RNA, 19 nt, Artificial Sequence
  Description of Artificial Sequence: Synthetic oligonucleotide
  Antisense strand to SEQ ID NO: 790752
uuauuccauggaagcuuag

SEQ ID NO: 790754 - RNA, 19 nt, Artificial Sequence
  Description of Artificial Sequence: Synthetic oligonucleotide
  Sense strand starting at position 260 of SEQ ID NO: 587419
cagccaucaccgcgaauau

SEQ ID NO: 790755 - RNA, 19 nt, Artificial Sequence
  Description of Artificial Sequence: Synthetic oligonucleotide
  Antisense strand to SEQ ID NO: 790754
auauucgcggugauggcug

SEQ ID NO: 790756 - RNA, 19 nt, Artificial Sequence
  Description of Artificial Sequence: Synthetic oligonucleotide
  Sense strand starting at position 270 of SEQ ID NO: 587419
cgcgaauaucccgagccaa

SEQ ID NO: 790757 - RNA, 19 nt, Artificial Sequence
  Description of Artificial Sequence: Synthetic oligonucleotide
  Antisense strand to SEQ ID NO: 790756
uuggcucgggauauucgcg

SEQ ID NO: 790758 - RNA, 19 nt, Artificial Sequence
  Description of Artificial Sequence: Synthetic oligonucleotide
  Sense strand starting at position 285 of SEQ ID NO: 587419
ccaacaugaugccaugaaa

SEQ ID NO: 790759 - RNA, 19 nt, Artificial Sequence
  Description of Artificial Sequence: Synthetic oligonucleotide
  Antisense strand to SEQ ID NO: 790758
uuucauggcaucauguugg

SEQ ID NO: 790760 - RNA, 19 nt, Artificial Sequence
  Description of Artificial Sequence: Synthetic oligonucleotide
  Sense strand starting at position 384 of SEQ ID NO: 587419
ggaggaauaccaugcuaua

SEQ ID NO: 790761 - RNA, 19 nt, Artificial Sequence
  Description of Artificial Sequence: Synthetic oligonucleotide
  Antisense strand to SEQ ID NO: 790760
uauagcaugguauuccucc

SEQ ID NO: 790762 - RNA, 19 nt, Artificial Sequence
  Description of Artificial Sequence: Synthetic oligonucleotide
  Sense strand starting at position 387 of SEQ ID NO: 587419
ggaauaccaugcuauaggu

SEQ ID NO: 790763 - RNA, 19 nt, Artificial Sequence
  Description of Artificial Sequence: Synthetic oligonucleotide
  Antisense strand to SEQ ID NO: 790762
accuauagcaugguauucc

SEQ ID NO: 790764 - RNA, 19 nt, Artificial Sequence
  Description of Artificial Sequence: Synthetic oligonucleotide
  Sense strand starting at position 396 of SEQ ID NO: 587419
ugcuauagguccuaugaua

SEQ ID NO: 790765 - RNA, 19 nt, Artificial Sequence
  Description of Artificial Sequence: Synthetic oligonucleotide
  Antisense strand to SEQ ID NO: 790764
uaucauaggaccuauagca

SEQ ID NO: 790766 - RNA, 19 nt, Artificial Sequence
  Description of Artificial Sequence: Synthetic oligonucleotide
  Sense strand starting at position 569 of SEQ ID NO: 587419
auuugaggcuugcugcaaa

SEQ ID NO: 790767 - RNA, 19 nt, Artificial Sequence
  Description of Artificial Sequence: Synthetic oligonucleotide
  Antisense strand to SEQ ID NO: 790766
uuugcagcaagccucaaau

SEQ ID NO: 790768 - RNA, 19 nt, Artificial Sequence
  Description of Artificial Sequence: Synthetic oligonucleotide
  Sense strand starting at position 572 of SEQ ID NO: 587419
ugaggcuugcugcaaaucu

SEQ ID NO: 790769 - RNA, 19 nt, Artificial Sequence
  Description of Artificial Sequence: Synthetic oligonucleotide
  Antisense strand to SEQ ID NO: 790768
agauuugcagcaagccuca

SEQ ID NO: 790770 - RNA, 19 nt, Artificial Sequence
  Description of Artificial Sequence: Synthetic oligonucleotide
  Sense strand starting at position 860 of SEQ ID NO: 587419
caaagagcguccuuauauc

SEQ ID NO: 790771 - RNA, 19 nt, Artificial Sequence
  Description of Artificial Sequence: Synthetic oligonucleotide
  Antisense strand to SEQ ID NO: 790770
gauauaaggacgcucuuug

SEQ ID NO: 790772 - RNA, 19 nt, Artificial Sequence
  Description of Artificial Sequence: Synthetic oligonucleotide
  Sense strand starting at position 928 of SEQ ID NO: 587419
gccucaguccuagguucua

SEQ ID NO: 790773 - RNA, 19 nt, Artificial Sequence
  Description of Artificial Sequence: Synthetic oligonucleotide
  Antisense strand to SEQ ID NO: 790772
uagaaccuaggacugaggc

SEQ ID NO: 790774 - RNA, 19 nt, Artificial Sequence
  Description of Artificial Sequence: Synthetic oligonucleotide
  Sense strand starting at position 937 of SEQ ID NO: 587419
cuagguucuacccgggaau

SEQ ID NO: 790775 - RNA, 19 nt, Artificial Sequence
  Description of Artificial Sequence: Synthetic oligonucleotide
  Antisense strand to SEQ ID NO: 790774
auucccggguagaaccuag

SEQ ID NO: 790776 - RNA, 19 nt, Artificial Sequence
  Description of Artificial Sequence: Synthetic oligonucleotide
  Sense strand starting at position 939 of SEQ ID NO: 587419
agguucuacccgggaauca

SEQ ID NO: 790777 - RNA, 19 nt, Artificial Sequence
  Description of Artificial Sequence: Synthetic oligonucleotide
  Antisense strand to SEQ ID NO: 790776
ugauucccggguagaaccu

SEQ ID NO: 790778 - RNA, 19 nt, Artificial Sequence
  Description of Artificial Sequence: Synthetic oligonucleotide
  Sense strand starting at position 1107 of SEQ ID NO: 587419
gagcaagacuggugcugau

SEQ ID NO: 790779 - RNA, 19 nt, Artificial Sequence
  Description of Artificial Sequence: Synthetic oligonucleotide
  Antisense strand to SEQ ID NO: 790778
aucagcaccagucuugcuc

SEQ ID NO: 790780 - RNA, 19 nt, Artificial Sequence
  Description of Artificial Sequence: Synthetic oligonucleotide
  Sense strand starting at position 1117 of SEQ ID NO: 587419
ggugcugaucucugaggca

SEQ ID NO: 790781 - RNA, 19 nt, Artificial Sequence
  Description of Artificial Sequence: Synthetic oligonucleotide
  Antisense strand to SEQ ID NO: 790780
ugccucagagaucagcacc

SEQ ID NO: 790782 - RNA, 19 nt, Artificial Sequence
  Description of Artificial Sequence: Synthetic oligonucleotide
  Sense strand starting at position 1314 of SEQ ID NO: 587419
ccugcaguccgcuuuguau

SEQ ID NO: 790783 - RNA, 19 nt, Artificial Sequence
  Description of Artificial Sequence: Synthetic oligonucleotide
  Antisense strand to SEQ ID NO: 790782
auacaaagcggacugcagg

SEQ ID NO: 790784 - RNA, 19 nt, Artificial Sequence
  Description of Artificial Sequence: Synthetic oligonucleotide
  Sense strand starting at position 1579 of SEQ ID NO: 587419
gcaucccucugcugucauu

SEQ ID NO: 790785 - RNA, 19 nt, Artificial Sequence
  Description of Artificial Sequence: Synthetic oligonucleotide
  Antisense strand to SEQ ID NO: 790784
aaugacagcagagggaugc

SEQ ID NO: 790786 - RNA, 19 nt, Artificial Sequence
  Description of Artificial Sequence: Synthetic oligonucleotide
  Sense strand starting at position 2100 of SEQ ID NO: 587419
guaccaaacucaccgugau

SEQ ID NO: 790787 - RNA, 19 nt, Artificial Sequence
  Description of Artificial Sequence: Synthetic oligonucleotide
  Antisense strand to SEQ ID NO: 790786
aucacggugaguuugguac

SEQ ID NO: 790788 - RNA, 19 nt, Artificial Sequence
  Description of Artificial Sequence: Synthetic oligonucleotide
  Sense strand starting at position 2110 of SEQ ID NO: 587419
caccgugaugcguggaaua

SEQ ID NO: 790789 - RNA, 19 nt, Artificial Sequence
  Description of Artificial Sequence: Synthetic oligonucleotide
  Antisense strand to SEQ ID NO: 790788
uauuccacgcaucacggug

SEQ ID NO: 790790 - RNA, 19 nt, Artificial Sequence
  Description of Artificial Sequence: Synthetic oligonucleotide
  Sense strand starting at position 2568 of SEQ ID NO: 587419
gcgauccugggauaugcaa

SEQ ID NO: 790791 - RNA, 19 nt, Artificial Sequence
  Description of Artificial Sequence: Synthetic oligonucleotide
  Antisense strand to SEQ ID NO: 790790
uugcauaucccaggaucgc

SEQ ID NO: 790792 - RNA, 19 nt, Artificial Sequence
  Description of Artificial Sequence: Synthetic oligonucleotide
  Sense strand starting at position 2622 of SEQ ID NO: 587419
gcgaaaugcggcagugaac

SEQ ID NO: 790793 - RNA, 19 nt, Artificial Sequence
  Description of Artificial Sequence: Synthetic oligonucleotide
  Antisense strand to SEQ ID NO: 790792
guucacugccgcauuucgc

SEQ ID NO: 790794 - RNA, 19 nt, Artificial Sequence
  Description of Artificial Sequence: Synthetic oligonucleotide
  Sense strand starting at position 3557 of SEQ ID NO: 587419
gaggguuuacagugccagu

SEQ ID NO: 790795 - RNA, 19 nt, Artificial Sequence
  Description of Artificial Sequence: Synthetic oligonucleotide
  Antisense strand to SEQ ID NO: 790794
acuggcacuguaaacccuc

SEQ ID NO: 790796 - RNA, 19 nt, Artificial Sequence
  Description of Artificial Sequence: Synthetic oligonucleotide
  Sense strand starting at position 3643 of SEQ ID NO: 587419
gaguuuauaucccacagga

SEQ ID NO: 790797 - RNA, 19 nt, Artificial Sequence
  Description of Artificial Sequence: Synthetic oligonucleotide
  Antisense strand to SEQ ID NO: 790796
uccugugggauauaaacuc

SEQ ID NO: 790798 - RNA, 19 nt, Artificial Sequence
  Description of Artificial Sequence: Synthetic oligonucleotide
  Sense strand starting at position 3686 of SEQ ID NO: 587419
accuacugaaucggaguua

SEQ ID NO: 790799 - RNA, 19 nt, Artificial Sequence
  Description of Artificial Sequence: Synthetic oligonucleotide
  Antisense strand to SEQ ID NO: 790798
uaacuccgauucaguaggu

SEQ ID NO: 790800 - RNA, 19 nt, Artificial Sequence
  Description of Artificial Sequence: Synthetic oligonucleotide
  Sense strand starting at position 3687 of SEQ ID NO: 587419
ccuacugaaucggaguuaa

SEQ ID NO: 790801 - RNA, 19 nt, Artificial Sequence
  Description of Artificial Sequence: Synthetic oligonucleotide
  Antisense strand to SEQ ID NO: 790800
uuaacuccgauucaguagg

SEQ ID NO: 790802 - RNA, 19 nt, Artificial Sequence
  Description of Artificial Sequence: Synthetic oligonucleotide
  Sense strand starting at position 3706 of SEQ ID NO: 587419
aaucaagaguguccugacu

SEQ ID NO: 790803 - RNA, 19 nt, Artificial Sequence
  Description of Artificial Sequence: Synthetic oligonucleotide
  Antisense strand to SEQ ID NO: 790802
agucaggacacucuugauu

SEQ ID NO: 790804 - RNA, 19 nt, Artificial Sequence
  Description of Artificial Sequence: Synthetic oligonucleotide
  Sense strand starting at position 3728 of SEQ ID NO: 587419
caggcagagccuugucacu

SEQ ID NO: 790805 - RNA, 19 nt, Artificial Sequence
  Description of Artificial Sequence: Synthetic oligonucleotide
  Antisense strand to SEQ ID NO: 790804
agugacaaggcucugccug

SEQ ID NO: 790806 - RNA, 19 nt, Artificial Sequence
  Description of Artificial Sequence: Synthetic oligonucleotide
  Sense strand starting at position 3803 of SEQ ID NO: 587419
cuuagcuuugccuguccaa

SEQ ID NO: 790807 - RNA, 19 nt, Artificial Sequence
  Description of Artificial Sequence: Synthetic oligonucleotide
  Antisense strand to SEQ ID NO: 790806
uuggacaggcaaagcuaag

SEQ ID NO: 790808 - RNA, 19 nt, Artificial Sequence
  Description of Artificial Sequence: Synthetic oligonucleotide
  Sense strand starting at position 3873 of SEQ ID NO: 587419
uccaguugauccucaggaa

SEQ ID NO: 790809 - RNA, 19 nt, Artificial Sequence
  Description of Artificial Sequence: Synthetic oligonucleotide
  Antisense strand to SEQ ID NO: 790808
uuccugaggaucaacugga

SEQ ID NO: 790810 - RNA, 19 nt, Artificial Sequence
  Description of Artificial Sequence: Synthetic oligonucleotide
  Sense strand starting at position 3876 of SEQ ID NO: 587419
aguugauccucaggaaucu

SEQ ID NO: 790811 - RNA, 19 nt, Artificial Sequence
  Description of Artificial Sequence: Synthetic oligonucleotide
  Antisense strand to SEQ ID NO: 790810
agauuccugaggaucaacu

SEQ ID NO: 790812 - RNA, 19 nt, Artificial Sequence
  Description of Artificial Sequence: Synthetic oligonucleotide
  Sense strand starting at position 3980 of SEQ ID NO: 587419
cugcuugaggucgaaggau

SEQ ID NO: 790813 - RNA, 19 nt, Artificial Sequence
  Description of Artificial Sequence: Synthetic oligonucleotide
  Antisense strand to SEQ ID NO: 790812
auccuucgaccucaagcag

SEQ ID NO: 790814 - RNA, 19 nt, Artificial Sequence
  Description of Artificial Sequence: Synthetic oligonucleotide
  Sense strand starting at position 279 of SEQ ID NO: 587420
caaagagcguccuuauauc

SEQ ID NO: 790815 - RNA, 19 nt, Artificial Sequence
  Description of Artificial Sequence: Synthetic oligonucleotide
  Antisense strand to SEQ ID NO: 790814
gauauaaggacgcucuuug

SEQ ID NO: 790816 - RNA, 19 nt, Artificial Sequence
  Description of Artificial Sequence: Synthetic oligonucleotide
  Sense strand starting at position 347 of SEQ ID NO: 587420
gccucaguccuagguucua

SEQ ID NO: 790817 - RNA, 19 nt, Artificial Sequence
  Description of Artificial Sequence: Synthetic oligonucleotide
  Antisense strand to SEQ ID NO: 790816
uagaaccuaggacugaggc

SEQ ID NO: 790818 - RNA, 19 nt, Artificial Sequence
  Description of Artificial Sequence: Synthetic oligonucleotide
  Sense strand starting at position 356 of SEQ ID NO: 587420
cuagguucuacccgggaau

SEQ ID NO: 790819 - RNA, 19 nt, Artificial Sequence
  Description of Artificial Sequence: Synthetic oligonucleotide
  Antisense strand to SEQ ID NO: 790818
auucccggguagaaccuag

SEQ ID NO: 790820 - RNA, 19 nt, Artificial Sequence
  Description of Artificial Sequence: Synthetic oligonucleotide
  Sense strand starting at position 358 of SEQ ID NO: 587420
agguucuacccgggaauca

SEQ ID NO: 790821 - RNA, 19 nt, Artificial Sequence
  Description of Artificial Sequence: Synthetic oligonucleotide
  Antisense strand to SEQ ID NO: 790820
ugauucccggguagaaccu

SEQ ID NO: 790822 - RNA, 19 nt, Artificial Sequence
  Description of Artificial Sequence: Synthetic oligonucleotide
  Sense strand starting at position 526 of SEQ ID NO: 587420
gagcaagacuggugcugau

SEQ ID NO: 790823 - RNA, 19 nt, Artificial Sequence
  Description of Artificial Sequence: Synthetic oligonucleotide
  Antisense strand to SEQ ID NO: 790822
aucagcaccagucuugcuc

SEQ ID NO: 790824 - RNA, 19 nt, Artificial Sequence
  Description of Artificial Sequence: Synthetic oligonucleotide
  Sense strand starting at position 536 of SEQ ID NO: 587420
ggugcugaucucugaggca

SEQ ID NO: 790825 - RNA, 19 nt, Artificial Sequence
  Description of Artificial Sequence: Synthetic oligonucleotide
  Antisense strand to SEQ ID NO: 790824
ugccucagagaucagcacc

SEQ ID NO: 790826 - RNA, 19 nt, Artificial Sequence
  Description of Artificial Sequence: Synthetic oligonucleotide
  Sense strand starting at position 733 of SEQ ID NO: 587420
ccugcaguccgcuuuguau

SEQ ID NO: 790827 - RNA, 19 nt, Artificial Sequence
  Description of Artificial Sequence: Synthetic oligonucleotide
  Antisense strand to SEQ ID NO: 790826
auacaaagcggacugcagg

SEQ ID NO: 790828 - RNA, 19 nt, Artificial Sequence
  Description of Artificial Sequence: Synthetic oligonucleotide
  Sense strand starting at position 1519 of SEQ ID NO: 587420
guaccaaacucaccgugau

SEQ ID NO: 790829 - RNA, 19 nt, Artificial Sequence
  Description of Artificial Sequence: Synthetic oligonucleotide
  Antisense strand to SEQ ID NO: 790828
aucacggugaguuugguac

SEQ ID NO: 790830 - RNA, 19 nt, Artificial Sequence
  Description of Artificial Sequence: Synthetic oligonucleotide
  Sense strand starting at position 1529 of SEQ ID NO: 587420
caccgugaugcguggaaua

SEQ ID NO: 790831 - RNA, 19 nt, Artificial Sequence
  Description of Artificial Sequence: Synthetic oligonucleotide
  Antisense strand to SEQ ID NO: 790830
uauuccacgcaucacggug

SEQ ID NO: 790832 - RNA, 19 nt, Artificial Sequence
  Description of Artificial Sequence: Synthetic oligonucleotide
  Sense strand starting at position 1987 of SEQ ID NO: 587420
gcgauccugggauaugcaa

SEQ ID NO: 790833 - RNA, 19 nt, Artificial Sequence
  Description of Artificial Sequence: Synthetic oligonucleotide
  Antisense strand to SEQ ID NO: 790832
uugcauaucccaggaucgc

SEQ ID NO: 790834 - RNA, 19 nt, Artificial Sequence
  Description of Artificial Sequence: Synthetic oligonucleotide
  Sense strand starting at position 2041 of SEQ ID NO: 587420
gcgaaaugcggcagugaac

SEQ ID NO: 790835 - RNA, 19 nt, Artificial Sequence
  Description of Artificial Sequence: Synthetic oligonucleotide
  Antisense strand to SEQ ID NO: 790834
guucacugccgcauuucgc

SEQ ID NO: 790836 - RNA, 19 nt, Artificial Sequence
  Description of Artificial Sequence: Synthetic oligonucleotide
  Sense strand starting at position 2976 of SEQ ID NO: 587420
gaggguuuacagugccagu

SEQ ID NO: 790837 - RNA, 19 nt, Artificial Sequence
  Description of Artificial Sequence: Synthetic oligonucleotide
  Antisense strand to SEQ ID NO: 790836
acuggcacuguaaacccuc

SEQ ID NO: 790838 - RNA, 19 nt, Artificial Sequence
  Description of Artificial Sequence: Synthetic oligonucleotide
  Sense strand starting at position 3062 of SEQ ID NO: 587420
gaguuuauaucccacagga

SEQ ID NO: 790839 - RNA, 19 nt, Artificial Sequence
  Description of Artificial Sequence: Synthetic oligonucleotide
  Antisense strand to SEQ ID NO: 790838
uccugugggauauaaacuc

SEQ ID NO: 790840 - RNA, 19 nt, Artificial Sequence
  Description of Artificial Sequence: Synthetic oligonucleotide
  Sense strand starting at position 3105 of SEQ ID NO: 587420
accuacugaaucggaguua

SEQ ID NO: 790841 - RNA, 19 nt, Artificial Sequence
  Description of Artificial Sequence: Synthetic oligonucleotide
  Antisense strand to SEQ ID NO: 790840
uaacuccgauucaguaggu

SEQ ID NO: 790842 - RNA, 19 nt, Artificial Sequence
  Description of Artificial Sequence: Synthetic oligonucleotide
  Sense strand starting at position 3106 of SEQ ID NO: 587420
ccuacugaaucggaguuaa

SEQ ID NO: 790843 - RNA, 19 nt, Artificial Sequence
  Description of Artificial Sequence: Synthetic oligonucleotide
  Antisense strand to SEQ ID NO: 790842
uuaacuccgauucaguagg

SEQ ID NO: 790844 - RNA, 19 nt, Artificial Sequence
  Description of Artificial Sequence: Synthetic oligonucleotide
  Sense strand starting at position 3125 of SEQ ID NO: 587420
aaucaagaguguccugacu

SEQ ID NO: 790845 - RNA, 19 nt, Artificial Sequence
  Description of Artificial Sequence: Synthetic oligonucleotide
  Antisense strand to SEQ ID NO: 790844
agucaggacacucuugauu

SEQ ID NO: 790846 - RNA, 19 nt, Artificial Sequence
  Description of Artificial Sequence: Synthetic oligonucleotide
  Sense strand starting at position 3147 of SEQ ID NO: 587420
caggcagagccuugucacu

SEQ ID NO: 790847 - RNA, 19 nt, Artificial Sequence
  Description of Artificial Sequence: Synthetic oligonucleotide
  Antisense strand to SEQ ID NO: 790846
agugacaaggcucugccug

SEQ ID NO: 790848 - RNA, 19 nt, Artificial Sequence
  Description of Artificial Sequence: Synthetic oligonucleotide
  Sense strand starting at position 3222 of SEQ ID NO: 587420
cuuagcuuugccuguccaa

SEQ ID NO: 790849 - RNA, 19 nt, Artificial Sequence
  Description of Artificial Sequence: Synthetic oligonucleotide
  Antisense strand to SEQ ID NO: 790848
uuggacaggcaaagcuaag

SEQ ID NO: 790850 - RNA, 19 nt, Artificial Sequence
  Description of Artificial Sequence: Synthetic oligonucleotide
  Sense strand starting at position 3292 of SEQ ID NO: 587420
uccaguugauccucaggaa

SEQ ID NO: 790851 - RNA, 19 nt, Artificial Sequence
  Description of Artificial Sequence: Synthetic oligonucleotide
  Antisense strand to SEQ ID NO: 790850
uuccugaggaucaacugga

SEQ ID NO: 790852 - RNA, 19 nt, Artificial Sequence
  Description of Artificial Sequence: Synthetic oligonucleotide
  Sense strand starting at position 3295 of SEQ ID NO: 587420
aguugauccucaggaaucu

SEQ ID NO: 790853 - RNA, 19 nt, Artificial Sequence
  Description of Artificial Sequence: Synthetic oligonucleotide
  Antisense strand to SEQ ID NO: 790852
agauuccugaggaucaacu

SEQ ID NO: 790854 - RNA, 19 nt, Artificial Sequence
  Description of Artificial Sequence: Synthetic oligonucleotide
  Sense strand starting at position 3399 of SEQ ID NO: 587420
cugcuugaggucgaaggau

SEQ ID NO: 790855 - RNA, 19 nt, Artificial Sequence
  Description of Artificial Sequence: Synthetic oligonucleotide
  Antisense strand to SEQ ID NO: 790854
auccuucgaccucaagcag

SEQ ID NO: 790856 - RNA, 19 nt, Artificial Sequence
  Description of Artificial Sequence: Synthetic oligonucleotide
  Sense strand starting at position 3420 of SEQ ID NO: 587420
auagaaucccuacguaauc

SEQ ID NO: 790857 - RNA, 19 nt, Artificial Sequence
  Description of Artificial Sequence: Synthetic oligonucleotide
  Antisense strand to SEQ ID NO: 790856
gauuacguagggauucuau

SEQ ID NO: 790858 - RNA, 19 nt, Artificial Sequence
  Description of Artificial Sequence: Synthetic oligonucleotide
  Sense strand starting at position 3463 of SEQ ID NO: 587420
agaguauguaauuggcuca

SEQ ID NO: 790859 - RNA, 19 nt, Artificial Sequence
  Description of Artificial Sequence: Synthetic oligonucleotide
  Antisense strand to SEQ ID NO: 790858
ugagccaauuacauacucu

SEQ ID NO: 790860 - RNA, 19 nt, Artificial Sequence
  Description of Artificial Sequence: Synthetic oligonucleotide
  Sense strand starting at position 3468 of SEQ ID NO: 587420
auguaauuggcucacaccu

SEQ ID NO: 790861 - RNA, 19 nt, Artificial Sequence
  Description of Artificial Sequence: Synthetic oligonucleotide
  Antisense strand to SEQ ID NO: 790860
aggugugagccaauuacau

SEQ ID NO: 790862 - RNA, 19 nt, Artificial Sequence
  Description of Artificial Sequence: Synthetic oligonucleotide
  Sense strand starting at position 3491 of SEQ ID NO: 587420
agcaaagcuuagcuagaua

SEQ ID NO: 790863 - RNA, 19 nt, Artificial Sequence
  Description of Artificial Sequence: Synthetic oligonucleotide
  Antisense strand to SEQ ID NO: 790862
uaucuagcuaagcuuugcu

SEQ ID NO: 790864 - RNA, 19 nt, Artificial Sequence
  Description of Artificial Sequence: Synthetic oligonucleotide
  Sense strand starting at position 3503 of SEQ ID NO: 587420
cuagauaaauacggaauaa

SEQ ID NO: 790865 - RNA, 19 nt, Artificial Sequence
  Description of Artificial Sequence: Synthetic oligonucleotide
  Antisense strand to SEQ ID NO: 790864
uuauuccguauuuaucuag

SEQ ID NO: 790866 - RNA, 19 nt, Artificial Sequence
  Description of Artificial Sequence: Synthetic oligonucleotide
  Sense strand starting at position 3535 of SEQ ID NO: 587420
gggccugacuuccaaucuu

SEQ ID NO: 790867 - RNA, 19 nt, Artificial Sequence
  Description of Artificial Sequence: Synthetic oligonucleotide
  Antisense strand to SEQ ID NO: 790866
aagauuggaagucaggccc

SEQ ID NO: 790868 - RNA, 19 nt, Artificial Sequence
  Description of Artificial Sequence: Synthetic oligonucleotide
  Sense strand starting at position 3583 of SEQ ID NO: 587420
gggaaugucuguccuucca

SEQ ID NO: 790869 - RNA, 19 nt, Artificial Sequence
  Description of Artificial Sequence: Synthetic oligonucleotide
  Antisense strand to SEQ ID NO: 790868
uggaaggacagacauuccc

SEQ ID NO: 790870 - RNA, 19 nt, Artificial Sequence
  Description of Artificial Sequence: Synthetic oligonucleotide
  Sense strand starting at position 3585 of SEQ ID NO: 587420
gaaugucuguccuuccaga

SEQ ID NO: 790871 - RNA, 19 nt, Artificial Sequence
  Description of Artificial Sequence: Synthetic oligonucleotide
  Antisense strand to SEQ ID NO: 790870
ucuggaaggacagacauuc

SEQ ID NO: 790872 - RNA, 19 nt, Artificial Sequence
  Description of Artificial Sequence: Synthetic oligonucleotide
  Sense strand starting at position 3718 of SEQ ID NO: 587420
ucaauuuagcugugcaucu

SEQ ID NO: 790873 - RNA, 19 nt, Artificial Sequence
  Description of Artificial Sequence: Synthetic oligonucleotide
  Antisense strand to SEQ ID NO: 790872
agaugcacagcuaaauuga

SEQ ID NO: 790874 - RNA, 19 nt, Artificial Sequence
  Description of Artificial Sequence: Synthetic oligonucleotide
  Sense strand starting at position 3771 of SEQ ID NO: 587420
ucugauaugccgcaagcaa

SEQ ID NO: 790875 - RNA, 19 nt, Artificial Sequence
  Description of Artificial Sequence: Synthetic oligonucleotide
  Antisense strand to SEQ ID NO: 790874
uugcuugcggcauaucaga

SEQ ID NO: 790876 - RNA, 19 nt, Artificial Sequence
  Description of Artificial Sequence: Synthetic oligonucleotide
  Sense strand starting at position 3792 of SEQ ID NO: 587420
ugagaugaugucggcaagu

SEQ ID NO: 790877 - RNA, 19 nt, Artificial Sequence
  Description of Artificial Sequence: Synthetic oligonucleotide
  Antisense strand to SEQ ID NO: 790876
acuugccgacaucaucuca

SEQ ID NO: 790878 - RNA, 19 nt, Artificial Sequence
  Description of Artificial Sequence: Synthetic oligonucleotide
  Sense strand starting at position 3794 of SEQ ID NO: 587420
agaugaugucggcaaguau

SEQ ID NO: 790879 - RNA, 19 nt, Artificial Sequence
  Description of Artificial Sequence: Synthetic oligonucleotide
  Antisense strand to SEQ ID NO: 790878
auacuugccgacaucaucu

SEQ ID NO: 790880 - RNA, 19 nt, Artificial Sequence
  Description of Artificial Sequence: Synthetic oligonucleotide
  Sense strand starting at position 3803 of SEQ ID NO: 587420
cggcaaguauugcugucaa

SEQ ID NO: 790881 - RNA, 19 nt, Artificial Sequence
  Description of Artificial Sequence: Synthetic oligonucleotide
  Antisense strand to SEQ ID NO: 790880
uugacagcaauacuugccg

SEQ ID NO: 790882 - RNA, 19 nt, Artificial Sequence
  Description of Artificial Sequence: Synthetic oligonucleotide
  Sense strand starting at position 3811 of SEQ ID NO: 587420
auugcugucaaccgguaau

SEQ ID NO: 790883 - RNA, 19 nt, Artificial Sequence
  Description of Artificial Sequence: Synthetic oligonucleotide
  Antisense strand to SEQ ID NO: 790882
auuaccgguugacagcaau

SEQ ID NO: 790884 - RNA, 19 nt, Artificial Sequence
  Description of Artificial Sequence: Synthetic oligonucleotide
  Sense strand starting at position 3814 of SEQ ID NO: 587420
gcugucaaccgguaauggu

SEQ ID NO: 790885 - RNA, 19 nt, Artificial Sequence
  Description of Artificial Sequence: Synthetic oligonucleotide
  Antisense strand to SEQ ID NO: 790884
accauuaccgguugacagc

SEQ ID NO: 790886 - RNA, 19 nt, Artificial Sequence
  Description of Artificial Sequence: Synthetic oligonucleotide
  Sense strand starting at position 3835 of SEQ ID NO: 587420
aagucacgagucugagaaa

SEQ ID NO: 790887 - RNA, 19 nt, Artificial Sequence
  Description of Artificial Sequence: Synthetic oligonucleotide
  Antisense strand to SEQ ID NO: 790886
uuucucagacucgugacuu

SEQ ID NO: 790888 - RNA, 19 nt, Artificial Sequence
  Description of Artificial Sequence: Synthetic oligonucleotide
  Sense strand starting at position 3838 of SEQ ID NO: 587420
ucacgagucugagaaagcu

SEQ ID NO: 790889 - RNA, 19 nt, Artificial Sequence
  Description of Artificial Sequence: Synthetic oligonucleotide
  Antisense strand to SEQ ID NO: 790888
agcuuucucagacucguga

SEQ ID NO: 790890 - RNA, 19 nt, Artificial Sequence
  Description of Artificial Sequence: Synthetic oligonucleotide
  Sense strand starting at position 3940 of SEQ ID NO: 587420
agaggaguguccuauuagc

SEQ ID NO: 790891 - RNA, 19 nt, Artificial Sequence
  Description of Artificial Sequence: Synthetic oligonucleotide
  Antisense strand to SEQ ID NO: 790890
gcuaauaggacacuccucu

SEQ ID NO: 790892 - RNA, 19 nt, Artificial Sequence
  Description of Artificial Sequence: Synthetic oligonucleotide
  Sense strand starting at position 3946 of SEQ ID NO: 587420
guguccuauuagcucacaa

SEQ ID NO: 790893 - RNA, 19 nt, Artificial Sequence
  Description of Artificial Sequence: Synthetic oligonucleotide
  Antisense strand to SEQ ID NO: 790892
uugugagcuaauaggacac

SEQ ID NO: 790894 - RNA, 19 nt, Artificial Sequence
  Description of Artificial Sequence: Synthetic oligonucleotide
  Sense strand starting at position 52 of SEQ ID NO: 587421
agaagaucgcucgagagca

SEQ ID NO: 790895 - RNA, 19 nt, Artificial Sequence
  Description of Artificial Sequence: Synthetic oligonucleotide
  Antisense strand to SEQ ID NO: 790894
ugcucucgagcgaucuucu

SEQ ID NO: 790896 - RNA, 19 nt, Artificial Sequence
  Description of Artificial Sequence: Synthetic oligonucleotide
  Sense strand starting at position 144 of SEQ ID NO: 587421
ugugaugaugcacaccuua

SEQ ID NO: 790897 - RNA, 19 nt, Artificial Sequence
  Description of Artificial Sequence: Synthetic oligonucleotide
  Antisense strand to SEQ ID NO: 790896
uaaggugugcaucaucaca

SEQ ID NO: 790898 - RNA, 19 nt, Artificial Sequence
  Description of Artificial Sequence: Synthetic oligonucleotide
  Sense strand starting at position 488 of SEQ ID NO: 587421
gaaauagcagacuguguau

SEQ ID NO: 790899 - RNA, 19 nt, Artificial Sequence
  Description of Artificial Sequence: Synthetic oligonucleotide
  Antisense strand to SEQ ID NO: 790898
auacacagucugcuauuuc

SEQ ID NO: 790900 - RNA, 19 nt, Artificial Sequence
  Description of Artificial Sequence: Synthetic oligonucleotide
  Sense strand starting at position 566 of SEQ ID NO: 587421
ugcuaauaaugcuuaauag

SEQ ID NO: 790901 - RNA, 19 nt, Artificial Sequence
  Description of Artificial Sequence: Synthetic oligonucleotide
  Antisense strand to SEQ ID NO: 790900
cuauuaagcauuauuagca

SEQ ID NO: 790902 - RNA, 19 nt, Artificial Sequence
  Description of Artificial Sequence: Synthetic oligonucleotide
  Sense strand starting at position 587 of SEQ ID NO: 587421
ccaaguaccuagucuuuaa

SEQ ID NO: 790903 - RNA, 19 nt, Artificial Sequence
  Description of Artificial Sequence: Synthetic oligonucleotide
  Antisense strand to SEQ ID NO: 790902
uuaaagacuagguacuugg

SEQ ID NO: 790904 - RNA, 19 nt, Artificial Sequence
  Description of Artificial Sequence: Synthetic oligonucleotide
  Sense strand starting at position 590 of SEQ ID NO: 587421
aguaccuagucuuuaacau

SEQ ID NO: 790905 - RNA, 19 nt, Artificial Sequence
  Description of Artificial Sequence: Synthetic oligonucleotide
  Antisense strand to SEQ ID NO: 790904
auguuaaagacuagguacu

SEQ ID NO: 790906 - RNA, 19 nt, Artificial Sequence
  Description of Artificial Sequence: Synthetic oligonucleotide
  Sense strand starting at position 591 of SEQ ID NO: 587421
guaccuagucuuuaacauu

SEQ ID NO: 790907 - RNA, 19 nt, Artificial Sequence
  Description of Artificial Sequence: Synthetic oligonucleotide
  Antisense strand to SEQ ID NO: 790906
aauguuaaagacuagguac

SEQ ID NO: 790908 - RNA, 19 nt, Artificial Sequence
  Description of Artificial Sequence: Synthetic oligonucleotide
  Sense strand starting at position 862 of SEQ ID NO: 587421
gguacuuugagguauauag

SEQ ID NO: 790909 - RNA, 19 nt, Artificial Sequence
  Description of Artificial Sequence: Synthetic oligonucleotide
  Antisense strand to SEQ ID NO: 790908
cuauauaccucaaaguacc

SEQ ID NO: 790910 - RNA, 19 nt, Artificial Sequence
  Description of Artificial Sequence: Synthetic oligonucleotide
  Sense strand starting at position 864 of SEQ ID NO: 587421
uacuuugagguauauagca

SEQ ID NO: 790911 - RNA, 19 nt, Artificial Sequence
  Description of Artificial Sequence: Synthetic oligonucleotide
  Antisense strand to SEQ ID NO: 790910
ugcuauauaccucaaagua

SEQ ID NO: 790912 - RNA, 19 nt, Artificial Sequence
  Description of Artificial Sequence: Synthetic oligonucleotide
  Sense strand starting at position 873 of SEQ ID NO: 587421
guauauagcagguaucuga

SEQ ID NO: 790913 - RNA, 19 nt, Artificial Sequence
  Description of Artificial Sequence: Synthetic oligonucleotide
  Antisense strand to SEQ ID NO: 790912
ucagauaccugcuauauac

SEQ ID NO: 790914 - RNA, 19 nt, Artificial Sequence
  Description of Artificial Sequence: Synthetic oligonucleotide
  Sense strand starting at position 877 of SEQ ID NO: 587421
auagcagguaucugaagaa

SEQ ID NO: 790915 - RNA, 19 nt, Artificial Sequence
  Description of Artificial Sequence: Synthetic oligonucleotide
  Antisense strand to SEQ ID NO: 790914
uucuucagauaccugcuau

SEQ ID NO: 790916 - RNA, 19 nt, Artificial Sequence
  Description of Artificial Sequence: Synthetic oligonucleotide
  Sense strand starting at position 912 of SEQ ID NO: 587421
acacucuuuggugggcaaa

SEQ ID NO: 790917 - RNA, 19 nt, Artificial Sequence
  Description of Artificial Sequence: Synthetic oligonucleotide
  Antisense strand to SEQ ID NO: 790916
uuugcccaccaaagagugu

SEQ ID NO: 790918 - RNA, 19 nt, Artificial Sequence
  Description of Artificial Sequence: Synthetic oligonucleotide
  Sense strand starting at position 915 of SEQ ID NO: 587421
cucuuuggugggcaaagua

SEQ ID NO: 790919 - RNA, 19 nt, Artificial Sequence
  Description of Artificial Sequence: Synthetic oligonucleotide
  Antisense strand to SEQ ID NO: 790918
uacuuugcccaccaaagag

SEQ ID NO: 790920 - RNA, 19 nt, Artificial Sequence
  Description of Artificial Sequence: Synthetic oligonucleotide
  Sense strand starting at position 1137 of SEQ ID NO: 587421
uucgacuucuaaucaauga

SEQ ID NO: 790921 - RNA, 19 nt, Artificial Sequence
  Description of Artificial Sequence: Synthetic oligonucleotide
  Antisense strand to SEQ ID NO: 790920
ucauugauuagaagucgaa

SEQ ID NO: 790922 - RNA, 19 nt, Artificial Sequence
  Description of Artificial Sequence: Synthetic oligonucleotide
  Sense strand starting at position 1167 of SEQ ID NO: 587421
guuuguaucugaccuggaa

SEQ ID NO: 790923 - RNA, 19 nt, Artificial Sequence
  Description of Artificial Sequence: Synthetic oligonucleotide
  Antisense strand to SEQ ID NO: 790922
uuccaggucagauacaaac

SEQ ID NO: 790924 - RNA, 19 nt, Artificial Sequence
  Description of Artificial Sequence: Synthetic oligonucleotide
  Sense strand starting at position 1170 of SEQ ID NO: 587421
uguaucugaccuggaauua

SEQ ID NO: 790925 - RNA, 19 nt, Artificial Sequence
  Description of Artificial Sequence: Synthetic oligonucleotide
  Antisense strand to SEQ ID NO: 790924
uaauuccaggucagauaca

SEQ ID NO: 790926 - RNA, 19 nt, Artificial Sequence
  Description of Artificial Sequence: Synthetic oligonucleotide
  Sense strand starting at position 1320 of SEQ ID NO: 587421
gcaagaguucuauaaacau

SEQ ID NO: 790927 - RNA, 19 nt, Artificial Sequence
  Description of Artificial Sequence: Synthetic oligonucleotide
  Antisense strand to SEQ ID NO: 790926
auguuuauagaacucuugc

SEQ ID NO: 790928 - RNA, 19 nt, Artificial Sequence
  Description of Artificial Sequence: Synthetic oligonucleotide
  Sense strand starting at position 1327 of SEQ ID NO: 587421
uucuauaaacauuggguau

SEQ ID NO: 790929 - RNA, 19 nt, Artificial Sequence
  Description of Artificial Sequence: Synthetic oligonucleotide
  Antisense strand to SEQ ID NO: 790928
auacccaauguuuauagaa

SEQ ID NO: 790930 - RNA, 19 nt, Artificial Sequence
  Description of Artificial Sequence: Synthetic oligonucleotide
  Sense strand starting at position 1392 of SEQ ID NO: 587421
uguaaucaccgguaacucu

SEQ ID NO: 790931 - RNA, 19 nt, Artificial Sequence
  Description of Artificial Sequence: Synthetic oligonucleotide
  Antisense strand to SEQ ID NO: 790930
agaguuaccggugauuaca

SEQ ID NO: 790932 - RNA, 19 nt, Artificial Sequence
  Description of Artificial Sequence: Synthetic oligonucleotide
  Sense strand starting at position 2307 of SEQ ID NO: 587421
gugauaaccacuuggcaug

SEQ ID NO: 790933 - RNA, 19 nt, Artificial Sequence
  Description of Artificial Sequence: Synthetic oligonucleotide
  Antisense strand to SEQ ID NO: 790932
caugccaagugguuaucac

SEQ ID NO: 790934 - RNA, 19 nt, Artificial Sequence
  Description of Artificial Sequence: Synthetic oligonucleotide
  Sense strand starting at position 2409 of SEQ ID NO: 587421
gcucgugauggcagaguca

SEQ ID NO: 790935 - RNA, 19 nt, Artificial Sequence
  Description of Artificial Sequence: Synthetic oligonucleotide
  Antisense strand to SEQ ID NO: 790934
ugacucugccaucacgagc

SEQ ID NO: 790936 - RNA, 19 nt, Artificial Sequence
  Description of Artificial Sequence: Synthetic oligonucleotide
  Sense strand starting at position 2789 of SEQ ID NO: 587421
auacaugaauugcuuguaa

SEQ ID NO: 790937 - RNA, 19 nt, Artificial Sequence
  Description of Artificial Sequence: Synthetic oligonucleotide
  Antisense strand to SEQ ID NO: 790936
uuacaagcaauucauguau

SEQ ID NO: 790938 - RNA, 19 nt, Artificial Sequence
  Description of Artificial Sequence: Synthetic oligonucleotide
  Sense strand starting at position 2791 of SEQ ID NO: 587421
acaugaauugcuuguaaca

SEQ ID NO: 790939 - RNA, 19 nt, Artificial Sequence
  Description of Artificial Sequence: Synthetic oligonucleotide
  Antisense strand to SEQ ID NO: 790938
uguuacaagcaauucaugu

SEQ ID NO: 790940 - RNA, 19 nt, Artificial Sequence
  Description of Artificial Sequence: Synthetic oligonucleotide
  Sense strand starting at position 2800 of SEQ ID NO: 587421
gcuuguaacagcguaaugu

SEQ ID NO: 790941 - RNA, 19 nt, Artificial Sequence
  Description of Artificial Sequence: Synthetic oligonucleotide
  Antisense strand to SEQ ID NO: 790940
acauuacgcuguuacaagc

SEQ ID NO: 790942 - RNA, 19 nt, Artificial Sequence
  Description of Artificial Sequence: Synthetic oligonucleotide
  Sense strand starting at position 2816 of SEQ ID NO: 587421
uguguaaacuuucccagag

SEQ ID NO: 790943 - RNA, 19 nt, Artificial Sequence
  Description of Artificial Sequence: Synthetic oligonucleotide
  Antisense strand to SEQ ID NO: 790942
cucugggaaaguuuacaca

SEQ ID NO: 790944 - RNA, 19 nt, Artificial Sequence
  Description of Artificial Sequence: Synthetic oligonucleotide
  Sense strand starting at position 2817 of SEQ ID NO: 587421
guguaaacuuucccagaga

SEQ ID NO: 790945 - RNA, 19 nt, Artificial Sequence
  Description of Artificial Sequence: Synthetic oligonucleotide
  Antisense strand to SEQ ID NO: 790944
ucucugggaaaguuuacac

SEQ ID NO: 790946 - RNA, 19 nt, Artificial Sequence
  Description of Artificial Sequence: Synthetic oligonucleotide
  Sense strand starting at position 2902 of SEQ ID NO: 587421
aagagauggugaccuccua

SEQ ID NO: 790947 - RNA, 19 nt, Artificial Sequence
  Description of Artificial Sequence: Synthetic oligonucleotide
  Antisense strand to SEQ ID NO: 790946
uaggaggucaccaucucuu

SEQ ID NO: 790948 - RNA, 19 nt, Artificial Sequence
  Description of Artificial Sequence: Synthetic oligonucleotide
  Sense strand starting at position 2936 of SEQ ID NO: 587421
cagaccuugcuugaaguga

SEQ ID NO: 790949 - RNA, 19 nt, Artificial Sequence
  Description of Artificial Sequence: Synthetic oligonucleotide
  Antisense strand to SEQ ID NO: 790948
ucacuucaagcaaggucug

SEQ ID NO: 790950 - RNA, 19 nt, Artificial Sequence
  Description of Artificial Sequence: Synthetic oligonucleotide
  Sense strand starting at position 2940 of SEQ ID NO: 587421
ccuugcuugaagugaaaga

SEQ ID NO: 790951 - RNA, 19 nt, Artificial Sequence
  Description of Artificial Sequence: Synthetic oligonucleotide
  Antisense strand to SEQ ID NO: 790950
ucuuucacuucaagcaagg

SEQ ID NO: 790952 - RNA, 19 nt, Artificial Sequence
  Description of Artificial Sequence: Synthetic oligonucleotide
  Sense strand starting at position 2966 of SEQ ID NO: 587421
ggguaagguguugaauuca

SEQ ID NO: 790953 - RNA, 19 nt, Artificial Sequence
  Description of Artificial Sequence: Synthetic oligonucleotide
  Antisense strand to SEQ ID NO: 790952
ugaauucaacaccuuaccc

SEQ ID NO: 790954 - RNA, 19 nt, Artificial Sequence
  Description of Artificial Sequence: Synthetic oligonucleotide
  Sense strand starting at position 3074 of SEQ ID NO: 587421
ucguuggugguggaaagau

SEQ ID NO: 790955 - RNA, 19 nt, Artificial Sequence
  Description of Artificial Sequence: Synthetic oligonucleotide
  Antisense strand to SEQ ID NO: 790954
aucuuuccaccaccaacga

SEQ ID NO: 790956 - RNA, 19 nt, Artificial Sequence
  Description of Artificial Sequence: Synthetic oligonucleotide
  Sense strand starting at position 3083 of SEQ ID NO: 587421
guggaaagauugguucaug

SEQ ID NO: 790957 - RNA, 19 nt, Artificial Sequence
  Description of Artificial Sequence: Synthetic oligonucleotide
  Antisense strand to SEQ ID NO: 790956
caugaaccaaucuuuccac

SEQ ID NO: 790958 - RNA, 19 nt, Artificial Sequence
  Description of Artificial Sequence: Synthetic oligonucleotide
  Sense strand starting at position 3084 of SEQ ID NO: 587421
uggaaagauugguucaugu

SEQ ID NO: 790959 - RNA, 19 nt, Artificial Sequence
  Description of Artificial Sequence: Synthetic oligonucleotide
  Antisense strand to SEQ ID NO: 790958
acaugaaccaaucuuucca

SEQ ID NO: 790960 - RNA, 19 nt, Artificial Sequence
  Description of Artificial Sequence: Synthetic oligonucleotide
  Sense strand starting at position 3141 of SEQ ID NO: 587421
auaggaauucgguggaaug

SEQ ID NO: 790961 - RNA, 19 nt, Artificial Sequence
  Description of Artificial Sequence: Synthetic oligonucleotide
  Antisense strand to SEQ ID NO: 790960
cauuccaccgaauuccuau

SEQ ID NO: 790962 - RNA, 19 nt, Artificial Sequence
  Description of Artificial Sequence: Synthetic oligonucleotide
  Sense strand starting at position 3142 of SEQ ID NO: 587421
uaggaauucgguggaauga

SEQ ID NO: 790963 - RNA, 19 nt, Artificial Sequence
  Description of Artificial Sequence: Synthetic oligonucleotide
  Antisense strand to SEQ ID NO: 790962
ucauuccaccgaauuccua

SEQ ID NO: 790964 - RNA, 19 nt, Artificial Sequence
  Description of Artificial Sequence: Synthetic oligonucleotide
  Sense strand starting at position 3158 of SEQ ID NO: 587421
ugaaauccugaaugugaca

SEQ ID NO: 790965 - RNA, 19 nt, Artificial Sequence
  Description of Artificial Sequence: Synthetic oligonucleotide
  Antisense strand to SEQ ID NO: 790964
ugucacauucaggauuuca

SEQ ID NO: 790966 - RNA, 19 nt, Artificial Sequence
  Description of Artificial Sequence: Synthetic oligonucleotide
  Sense strand starting at position 3195 of SEQ ID NO: 587421
guuauuauugaagggaauc

SEQ ID NO: 790967 - RNA, 19 nt, Artificial Sequence
  Description of Artificial Sequence: Synthetic oligonucleotide
  Antisense strand to SEQ ID NO: 790966
gauucccuucaauaauaac

SEQ ID NO: 790968 - RNA, 19 nt, Artificial Sequence
  Description of Artificial Sequence: Synthetic oligonucleotide
  Sense strand starting at position 3208 of SEQ ID NO: 587421
ggaaucaaccauuguaguu

SEQ ID NO: 790969 - RNA, 19 nt, Artificial Sequence
  Description of Artificial Sequence: Synthetic oligonucleotide
  Antisense strand to SEQ ID NO: 790968
aacuacaaugguugauucc

SEQ ID NO: 790970 - RNA, 19 nt, Artificial Sequence
  Description of Artificial Sequence: Synthetic oligonucleotide
  Sense strand starting at position 3367 of SEQ ID NO: 587421
aguacaacuuccuuaucga

SEQ ID NO: 790971 - RNA, 19 nt, Artificial Sequence
  Description of Artificial Sequence: Synthetic oligonucleotide
  Antisense strand to SEQ ID NO: 790970
ucgauaaggaaguuguacu

SEQ ID NO: 790972 - RNA, 19 nt, Artificial Sequence
  Description of Artificial Sequence: Synthetic oligonucleotide
  Sense strand starting at position 3368 of SEQ ID NO: 587421
guacaacuuccuuaucgau

SEQ ID NO: 790973 - RNA, 19 nt, Artificial Sequence
  Description of Artificial Sequence: Synthetic oligonucleotide
  Antisense strand to SEQ ID NO: 790972
aucgauaaggaaguuguac

SEQ ID NO: 790974 - RNA, 19 nt, Artificial Sequence
  Description of Artificial Sequence: Synthetic oligonucleotide
  Sense strand starting at position 228 of SEQ ID NO: 587422
agauaaaccugcuauggga

SEQ ID NO: 790975 - RNA, 19 nt, Artificial Sequence
  Description of Artificial Sequence: Synthetic oligonucleotide
  Antisense strand to SEQ ID NO: 790974
ucccauagcagguuuaucu

SEQ ID NO: 790976 - RNA, 19 nt, Artificial Sequence
  Description of Artificial Sequence: Synthetic oligonucleotide
  Sense strand starting at position 271 of SEQ ID NO: 587422
gugaguggagaauagcaau

SEQ ID NO: 790977 - RNA, 19 nt, Artificial Sequence
  Description of Artificial Sequence: Synthetic oligonucleotide
  Antisense strand to SEQ ID NO: 790976
auugcuauucuccacucac

SEQ ID NO: 790978 - RNA, 19 nt, Artificial Sequence
  Description of Artificial Sequence: Synthetic oligonucleotide
  Sense strand starting at position 274 of SEQ ID NO: 587422
aguggagaauagcaauaaa

SEQ ID NO: 790979 - RNA, 19 nt, Artificial Sequence
  Description of Artificial Sequence: Synthetic oligonucleotide
  Antisense strand to SEQ ID NO: 790978
uuuauugcuauucuccacu

SEQ ID NO: 790980 - RNA, 19 nt, Artificial Sequence
  Description of Artificial Sequence: Synthetic oligonucleotide
  Sense strand starting at position 325 of SEQ ID NO: 587422
ugcugaaugcaugagcuua

SEQ ID NO: 790981 - RNA, 19 nt, Artificial Sequence
  Description of Artificial Sequence: Synthetic oligonucleotide
  Antisense strand to SEQ ID NO: 790980
uaagcucaugcauucagca

SEQ ID NO: 790982 - RNA, 19 nt, Artificial Sequence
  Description of Artificial Sequence: Synthetic oligonucleotide
  Sense strand starting at position 330 of SEQ ID NO: 587422
aaugcaugagcuuauggaa

SEQ ID NO: 790983 - RNA, 19 nt, Artificial Sequence
  Description of Artificial Sequence: Synthetic oligonucleotide
  Antisense strand to SEQ ID NO: 790982
uuccauaagcucaugcauu

SEQ ID NO: 790984 - RNA, 19 nt, Artificial Sequence
  Description of Artificial Sequence: Synthetic oligonucleotide
  Sense strand starting at position 353 of SEQ ID NO: 587422
gcaccaaucuaugugcaca

SEQ ID NO: 790985 - RNA, 19 nt, Artificial Sequence
  Description of Artificial Sequence: Synthetic oligonucleotide
  Antisense strand to SEQ ID NO: 790984
ugugcacauagauuggugc

SEQ ID NO: 790986 - RNA, 19 nt, Artificial Sequence
  Description of Artificial Sequence: Synthetic oligonucleotide
  Sense strand starting at position 426 of SEQ ID NO: 587422
gcucuaaugugagaauuuc

SEQ ID NO: 790987 - RNA, 19 nt, Artificial Sequence
  Description of Artificial Sequence: Synthetic oligonucleotide
  Antisense strand to SEQ ID NO: 790986
gaaauucucacauuagagc

SEQ ID NO: 790988 - RNA, 19 nt, Artificial Sequence
  Description of Artificial Sequence: Synthetic oligonucleotide
  Sense strand starting at position 434 of SEQ ID NO: 587422
gugagaauuucugaaucua

SEQ ID NO: 790989 - RNA, 19 nt, Artificial Sequence
  Description of Artificial Sequence: Synthetic oligonucleotide
  Antisense strand to SEQ ID NO: 790988
uagauucagaaauucucac

SEQ ID NO: 790990 - RNA, 19 nt, Artificial Sequence
  Description of Artificial Sequence: Synthetic oligonucleotide
  Sense strand starting at position 643 of SEQ ID NO: 587422
ggcucagaggcuuagaauu

SEQ ID NO: 790991 - RNA, 19 nt, Artificial Sequence
  Description of Artificial Sequence: Synthetic oligonucleotide
  Antisense strand to SEQ ID NO: 790990
aauucuaagccucugagcc

SEQ ID NO: 790992 - RNA, 19 nt, Artificial Sequence
  Description of Artificial Sequence: Synthetic oligonucleotide
  Sense strand starting at position 673 of SEQ ID NO: 587422
ggcuguuggagucaaguga

SEQ ID NO: 790993 - RNA, 19 nt, Artificial Sequence
  Description of Artificial Sequence: Synthetic oligonucleotide
  Antisense strand to SEQ ID NO: 790992
ucacuugacuccaacagcc

SEQ ID NO: 790994 - RNA, 19 nt, Artificial Sequence
  Description of Artificial Sequence: Synthetic oligonucleotide
  Sense strand starting at position 735 of SEQ ID NO: 587422
gucucagauuaccuguuga

SEQ ID NO: 790995 - RNA, 19 nt, Artificial Sequence
  Description of Artificial Sequence: Synthetic oligonucleotide
  Antisense strand to SEQ ID NO: 790994
ucaacagguaaucugagac

SEQ ID NO: 790996 - RNA, 19 nt, Artificial Sequence
  Description of Artificial Sequence: Synthetic oligonucleotide
  Sense strand starting at position 864 of SEQ ID NO: 587422
gguccugccuguuugaaag

SEQ ID NO: 790997 - RNA, 19 nt, Artificial Sequence
  Description of Artificial Sequence: Synthetic oligonucleotide
  Antisense strand to SEQ ID NO: 790996
cuuucaaacaggcaggacc

SEQ ID NO: 790998 - RNA, 19 nt, Artificial Sequence
  Description of Artificial Sequence: Synthetic oligonucleotide
  Sense strand starting at position 1098 of SEQ ID NO: 587422
caggauuggugagggaaga

SEQ ID NO: 790999 - RNA, 19 nt, Artificial Sequence
  Description of Artificial Sequence: Synthetic oligonucleotide
  Antisense strand to SEQ ID NO: 790998
ucuucccucaccaauccug

SEQ ID NO: 791000 - RNA, 19 nt, Artificial Sequence
  Description of Artificial Sequence: Synthetic oligonucleotide
  Sense strand starting at position 1108 of SEQ ID NO: 587422
gagggaagauuggauguua

SEQ ID NO: 791001 - RNA, 19 nt, Artificial Sequence
  Description of Artificial Sequence: Synthetic oligonucleotide
  Antisense strand to SEQ ID NO: 791000
uaacauccaaucuucccuc

SEQ ID NO: 791002 - RNA, 19 nt, Artificial Sequence
  Description of Artificial Sequence: Synthetic oligonucleotide
  Sense strand starting at position 1117 of SEQ ID NO: 587422
uuggauguuagggaguuua

SEQ ID NO: 791003 - RNA, 19 nt, Artificial Sequence
  Description of Artificial Sequence: Synthetic oligonucleotide
  Antisense strand to SEQ ID NO: 791002
uaaacucccuaacauccaa

SEQ ID NO: 791004 - RNA, 19 nt, Artificial Sequence
  Description of Artificial Sequence: Synthetic oligonucleotide
  Sense strand starting at position 1327 of SEQ ID NO: 587422
gagucugcugucuacgaga

SEQ ID NO: 791005 - RNA, 19 nt, Artificial Sequence
  Description of Artificial Sequence: Synthetic oligonucleotide
  Antisense strand to SEQ ID NO: 791004
ucucguagacagcagacuc

SEQ ID NO: 791006 - RNA, 19 nt, Artificial Sequence
  Description of Artificial Sequence: Synthetic oligonucleotide
  Sense strand starting at position 1329 of SEQ ID NO: 587422
gucugcugucuacgagaug

SEQ ID NO: 791007 - RNA, 19 nt, Artificial Sequence
  Description of Artificial Sequence: Synthetic oligonucleotide
  Antisense strand to SEQ ID NO: 791006
caucucguagacagcagac

SEQ ID NO: 791008 - RNA, 19 nt, Artificial Sequence
  Description of Artificial Sequence: Synthetic oligonucleotide
  Sense strand starting at position 1332 of SEQ ID NO: 587422
ugcugucuacgagaugaug

SEQ ID NO: 791009 - RNA, 19 nt, Artificial Sequence
  Description of Artificial Sequence: Synthetic oligonucleotide
  Antisense strand to SEQ ID NO: 791008
caucaucucguagacagca

SEQ ID NO: 791010 - RNA, 19 nt, Artificial Sequence
  Description of Artificial Sequence: Synthetic oligonucleotide
  Sense strand starting at position 1334 of SEQ ID NO: 587422
cugucuacgagaugaugaa

SEQ ID NO: 791011 - RNA, 19 nt, Artificial Sequence
  Description of Artificial Sequence: Synthetic oligonucleotide
  Antisense strand to SEQ ID NO: 791010
uucaucaucucguagacag

SEQ ID NO: 791012 - RNA, 19 nt, Artificial Sequence
  Description of Artificial Sequence: Synthetic oligonucleotide
  Sense strand starting at position 1433 of SEQ ID NO: 587422
cuuucuguccagggauaca

SEQ ID NO: 791013 - RNA, 19 nt, Artificial Sequence
  Description of Artificial Sequence: Synthetic oligonucleotide
  Antisense strand to SEQ ID NO: 791012
uguaucccuggacagaaag

SEQ ID NO: 791014 - RNA, 19 nt, Artificial Sequence
  Description of Artificial Sequence: Synthetic oligonucleotide
  Sense strand starting at position 1838 of SEQ ID NO: 587422
gcuguuucugcccaagaca

SEQ ID NO: 791015 - RNA, 19 nt, Artificial Sequence
  Description of Artificial Sequence: Synthetic oligonucleotide
  Antisense strand to SEQ ID NO: 791014
ugucuugggcagaaacagc

SEQ ID NO: 791016 - RNA, 19 nt, Artificial Sequence
  Description of Artificial Sequence: Synthetic oligonucleotide
  Sense strand starting at position 1851 of SEQ ID NO: 587422
aagacagguugacagauua

SEQ ID NO: 791017 - RNA, 19 nt, Artificial Sequence
  Description of Artificial Sequence: Synthetic oligonucleotide
  Antisense strand to SEQ ID NO: 791016
uaaucugucaaccugucuu

SEQ ID NO: 791018 - RNA, 19 nt, Artificial Sequence
  Description of Artificial Sequence: Synthetic oligonucleotide
  Sense strand starting at position 1919 of SEQ ID NO: 587422
gcgugugcgcuggugacau

SEQ ID NO: 791019 - RNA, 19 nt, Artificial Sequence
  Description of Artificial Sequence: Synthetic oligonucleotide
  Antisense strand to SEQ ID NO: 791018
augucaccagcgcacacgc

SEQ ID NO: 791020 - RNA, 19 nt, Artificial Sequence
  Description of Artificial Sequence: Synthetic oligonucleotide
  Sense strand starting at position 2074 of SEQ ID NO: 587422
gcguguguucucagagcug

SEQ ID NO: 791021 - RNA, 19 nt, Artificial Sequence
  Description of Artificial Sequence: Synthetic oligonucleotide
  Antisense strand to SEQ ID NO: 791020
cagcucugagaacacacgc

SEQ ID NO: 791022 - RNA, 19 nt, Artificial Sequence
  Description of Artificial Sequence: Synthetic oligonucleotide
  Sense strand starting at position 2328 of SEQ ID NO: 587422
cccacaagucuaugaggga

SEQ ID NO: 791023 - RNA, 19 nt, Artificial Sequence
  Description of Artificial Sequence: Synthetic oligonucleotide
  Antisense strand to SEQ ID NO: 791022
ucccucauagacuuguggg

SEQ ID NO: 791024 - RNA, 19 nt, Artificial Sequence
  Description of Artificial Sequence: Synthetic oligonucleotide
  Sense strand starting at position 2478 of SEQ ID NO: 587422
aguuuauguccuuaaccac

SEQ ID NO: 791025 - RNA, 19 nt, Artificial Sequence
  Description of Artificial Sequence: Synthetic oligonucleotide
  Antisense strand to SEQ ID NO: 791024
gugguuaaggacauaaacu

SEQ ID NO: 791026 - RNA, 19 nt, Artificial Sequence
  Description of Artificial Sequence: Synthetic oligonucleotide
  Sense strand starting at position 3019 of SEQ ID NO: 587422
ccaagauuguaagcacuuu

SEQ ID NO: 791027 - RNA, 19 nt, Artificial Sequence
  Description of Artificial Sequence: Synthetic oligonucleotide
  Antisense strand to SEQ ID NO: 791026
aaagugcuuacaaucuugg

SEQ ID NO: 791028 - RNA, 19 nt, Artificial Sequence
  Description of Artificial Sequence: Synthetic oligonucleotide
  Sense strand starting at position 3103 of SEQ ID NO: 587422
ugauaaauguuagcagaug

SEQ ID NO: 791029 - RNA, 19 nt, Artificial Sequence
  Description of Artificial Sequence: Synthetic oligonucleotide
  Antisense strand to SEQ ID NO: 791028
caucugcuaacauuuauca

SEQ ID NO: 791030 - RNA, 19 nt, Artificial Sequence
  Description of Artificial Sequence: Synthetic oligonucleotide
  Sense strand starting at position 3118 of SEQ ID NO: 587422
gaugaugcuguugagaacu

SEQ ID NO: 791031 - RNA, 19 nt, Artificial Sequence
  Description of Artificial Sequence: Synthetic oligonucleotide
  Antisense strand to SEQ ID NO: 791030
aguucucaacagcaucauc

SEQ ID NO: 791032 - RNA, 19 nt, Artificial Sequence
  Description of Artificial Sequence: Synthetic oligonucleotide
  Sense strand starting at position 3144 of SEQ ID NO: 587422
cuugaacucucgcugucua

SEQ ID NO: 791033 - RNA, 19 nt, Artificial Sequence
  Description of Artificial Sequence: Synthetic oligonucleotide
  Antisense strand to SEQ ID NO: 791032
uagacagcgagaguucaag

SEQ ID NO: 791034 - RNA, 19 nt, Artificial Sequence
  Description of Artificial Sequence: Synthetic oligonucleotide
  Sense strand starting at position 3154 of SEQ ID NO: 587422
cgcugucuacuagaagaaa

SEQ ID NO: 791035 - RNA, 19 nt, Artificial Sequence
  Description of Artificial Sequence: Synthetic oligonucleotide
  Antisense strand to SEQ ID NO: 791034
uuucuucuaguagacagcg

SEQ ID NO: 791036 - RNA, 19 nt, Artificial Sequence
  Description of Artificial Sequence: Synthetic oligonucleotide
  Sense strand starting at position 3177 of SEQ ID NO: 587422
gaaaguagauuggcucaga

SEQ ID NO: 791037 - RNA, 19 nt, Artificial Sequence
  Description of Artificial Sequence: Synthetic oligonucleotide
  Antisense strand to SEQ ID NO: 791036
ucugagccaaucuacuuuc

SEQ ID NO: 791038 - RNA, 19 nt, Artificial Sequence
  Description of Artificial Sequence: Synthetic oligonucleotide
  Sense strand starting at position 3178 of SEQ ID NO: 587422
aaaguagauuggcucagau

SEQ ID NO: 791039 - RNA, 19 nt, Artificial Sequence
  Description of Artificial Sequence: Synthetic oligonucleotide
  Antisense strand to SEQ ID NO: 791038
aucugagccaaucuacuuu

SEQ ID NO: 791040 - RNA, 19 nt, Artificial Sequence
  Description of Artificial Sequence: Synthetic oligonucleotide
  Sense strand starting at position 3180 of SEQ ID NO: 587422
aguagauuggcucagauug

SEQ ID NO: 791041 - RNA, 19 nt, Artificial Sequence
  Description of Artificial Sequence: Synthetic oligonucleotide
  Antisense strand to SEQ ID NO: 791040
caaucugagccaaucuacu

SEQ ID NO: 791042 - RNA, 19 nt, Artificial Sequence
  Description of Artificial Sequence: Synthetic oligonucleotide
  Sense strand starting at position 3204 of SEQ ID NO: 587422
gauggugucagcuauagcu

SEQ ID NO: 791043 - RNA, 19 nt, Artificial Sequence
  Description of Artificial Sequence: Synthetic oligonucleotide
  Antisense strand to SEQ ID NO: 791042
agcuauagcugacaccauc

SEQ ID NO: 791044 - RNA, 19 nt, Artificial Sequence
  Description of Artificial Sequence: Synthetic oligonucleotide
  Sense strand starting at position 3206 of SEQ ID NO: 587422
uggugucagcuauagcuga

SEQ ID NO: 791045 - RNA, 19 nt, Artificial Sequence
  Description of Artificial Sequence: Synthetic oligonucleotide
  Antisense strand to SEQ ID NO: 791044
ucagcuauagcugacacca

SEQ ID NO: 791046 - RNA, 19 nt, Artificial Sequence
  Description of Artificial Sequence: Synthetic oligonucleotide
  Sense strand starting at position 3268 of SEQ ID NO: 587422
uuugaucucuggguuagag

SEQ ID NO: 791047 - RNA, 19 nt, Artificial Sequence
  Description of Artificial Sequence: Synthetic oligonucleotide
  Antisense strand to SEQ ID NO: 791046
cucuaacccagagaucaaa

SEQ ID NO: 791048 - RNA, 19 nt, Artificial Sequence
  Description of Artificial Sequence: Synthetic oligonucleotide
  Sense strand starting at position 3283 of SEQ ID NO: 587422
agagaaaguacuggccaau

SEQ ID NO: 791049 - RNA, 19 nt, Artificial Sequence
  Description of Artificial Sequence: Synthetic oligonucleotide
  Antisense strand to SEQ ID NO: 791048
auuggccaguacuuucucu

SEQ ID NO: 791050 - RNA, 19 nt, Artificial Sequence
  Description of Artificial Sequence: Synthetic oligonucleotide
  Sense strand starting at position 3332 of SEQ ID NO: 587422
gccauccaaguuuaaugua

SEQ ID NO: 791051 - RNA, 19 nt, Artificial Sequence
  Description of Artificial Sequence: Synthetic oligonucleotide
  Antisense strand to SEQ ID NO: 791050
uacauuaaacuuggauggc

SEQ ID NO: 791052 - RNA, 19 nt, Artificial Sequence
  Description of Artificial Sequence: Synthetic oligonucleotide
  Sense strand starting at position 3413 of SEQ ID NO: 587422
guuacagcaguuuaaauau

SEQ ID NO: 791053 - RNA, 19 nt, Artificial Sequence
  Description of Artificial Sequence: Synthetic oligonucleotide
  Antisense strand to SEQ ID NO: 791052
auauuuaaacugcuguaac

SEQ ID NO: 791054 - RNA, 19 nt, Artificial Sequence
  Description of Artificial Sequence: Synthetic oligonucleotide
  Sense strand starting at position 88 of SEQ ID NO: 587423
gcggaagaaugcgcggaau

SEQ ID NO: 791055 - RNA, 19 nt, Artificial Sequence
  Description of Artificial Sequence: Synthetic oligonucleotide
  Antisense strand to SEQ ID NO: 791054
auuccgcgcauucuuccgc

SEQ ID NO: 791056 - RNA, 19 nt, Artificial Sequence
  Description of Artificial Sequence: Synthetic oligonucleotide
  Sense strand starting at position 398 of SEQ ID NO: 587423
cggauuugcaggcgcuaga

SEQ ID NO: 791057 - RNA, 19 nt, Artificial Sequence
  Description of Artificial Sequence: Synthetic oligonucleotide
  Antisense strand to SEQ ID NO: 791056
ucuagcgccugcaaauccg

SEQ ID NO: 791058 - RNA, 19 nt, Artificial Sequence
  Description of Artificial Sequence: Synthetic oligonucleotide
  Sense strand starting at position 543 of SEQ ID NO: 587423
gcagauacagaucgcucua

SEQ ID NO: 791059 - RNA, 19 nt, Artificial Sequence
  Description of Artificial Sequence: Synthetic oligonucleotide
  Antisense strand to SEQ ID NO: 791058
uagagcgaucuguaucugc

SEQ ID NO: 791060 - RNA, 19 nt, Artificial Sequence
  Description of Artificial Sequence: Synthetic oligonucleotide
  Sense strand starting at position 545 of SEQ ID NO: 587423
agauacagaucgcucuaca

SEQ ID NO: 791061 - RNA, 19 nt, Artificial Sequence
  Description of Artificial Sequence: Synthetic oligonucleotide
  Antisense strand to SEQ ID NO: 791060
uguagagcgaucuguaucu

SEQ ID NO: 791062 - RNA, 19 nt, Artificial Sequence
  Description of Artificial Sequence: Synthetic oligonucleotide
  Sense strand starting at position 763 of SEQ ID NO: 587423
ggaaacuguucccgggacu

SEQ ID NO: 791063 - RNA, 19 nt, Artificial Sequence
  Description of Artificial Sequence: Synthetic oligonucleotide
  Antisense strand to SEQ ID NO: 791062
agucccgggaacaguuucc

SEQ ID NO: 791064 - RNA, 19 nt, Artificial Sequence
  Description of Artificial Sequence: Synthetic oligonucleotide
  Sense strand starting at position 766 of SEQ ID NO: 587423
aacuguucccgggacucaa

SEQ ID NO: 791065 - RNA, 19 nt, Artificial Sequence
  Description of Artificial Sequence: Synthetic oligonucleotide
  Antisense strand to SEQ ID NO: 791064
uugagucccgggaacaguu

SEQ ID NO: 791066 - RNA, 19 nt, Artificial Sequence
  Description of Artificial Sequence: Synthetic oligonucleotide
  Sense strand starting at position 805 of SEQ ID NO: 587423
cgcuucauccucgaggcua

SEQ ID NO: 791067 - RNA, 19 nt, Artificial Sequence
  Description of Artificial Sequence: Synthetic oligonucleotide
  Antisense strand to SEQ ID NO: 791066
uagccucgaggaugaagcg

SEQ ID NO: 791068 - RNA, 19 nt, Artificial Sequence
  Description of Artificial Sequence: Synthetic oligonucleotide
  Sense strand starting at position 816 of SEQ ID NO: 587423
cgaggcuaggaccguuaau

SEQ ID NO: 791069 - RNA, 19 nt, Artificial Sequence
  Description of Artificial Sequence: Synthetic oligonucleotide
  Antisense strand to SEQ ID NO: 791068
auuaacgguccuagccucg

SEQ ID NO: 791070 - RNA, 19 nt, Artificial Sequence
  Description of Artificial Sequence: Synthetic oligonucleotide
  Sense strand starting at position 825 of SEQ ID NO: 587423
gaccguuaaugucaauaaa

SEQ ID NO: 791071 - RNA, 19 nt, Artificial Sequence
  Description of Artificial Sequence: Synthetic oligonucleotide
  Antisense strand to SEQ ID NO: 791070
uuuauugacauuaacgguc

SEQ ID NO: 791072 - RNA, 19 nt, Artificial Sequence
  Description of Artificial Sequence: Synthetic oligonucleotide
  Sense strand starting at position 895 of SEQ ID NO: 587423
cgcacuuucccugaggacu

SEQ ID NO: 791073 - RNA, 19 nt, Artificial Sequence
  Description of Artificial Sequence: Synthetic oligonucleotide
  Antisense strand to SEQ ID NO: 791072
aguccucagggaaagugcg

SEQ ID NO: 791074 - RNA, 19 nt, Artificial Sequence
  Description of Artificial Sequence: Synthetic oligonucleotide
  Sense strand starting at position 1010 of SEQ ID NO: 587423
gacuccuucccgugccaau

SEQ ID NO: 791075 - RNA, 19 nt, Artificial Sequence
  Description of Artificial Sequence: Synthetic oligonucleotide
  Antisense strand to SEQ ID NO: 791074
auuggcacgggaaggaguc

SEQ ID NO: 791076 - RNA, 19 nt, Artificial Sequence
  Description of Artificial Sequence: Synthetic oligonucleotide
  Sense strand starting at position 1640 of SEQ ID NO: 587423
ccgcaaacuugguccucaa

SEQ ID NO: 791077 - RNA, 19 nt, Artificial Sequence
  Description of Artificial Sequence: Synthetic oligonucleotide
  Antisense strand to SEQ ID NO: 791076
uugaggaccaaguuugcgg

SEQ ID NO: 791078 - RNA, 19 nt, Artificial Sequence
  Description of Artificial Sequence: Synthetic oligonucleotide
  Sense strand starting at position 1703 of SEQ ID NO: 587423
gcagccucgcggucacaua

SEQ ID NO: 791079 - RNA, 19 nt, Artificial Sequence
  Description of Artificial Sequence: Synthetic oligonucleotide
  Antisense strand to SEQ ID NO: 791078
uaugugaccgcgaggcugc

SEQ ID NO: 791080 - RNA, 19 nt, Artificial Sequence
  Description of Artificial Sequence: Synthetic oligonucleotide
  Sense strand starting at position 1787 of SEQ ID NO: 587423
aggagaguguguuuacgag

SEQ ID NO: 791081 - RNA, 19 nt, Artificial Sequence
  Description of Artificial Sequence: Synthetic oligonucleotide
  Antisense strand to SEQ ID NO: 791080
cucguaaacacacucuccu

SEQ ID NO: 791082 - RNA, 19 nt, Artificial Sequence
  Description of Artificial Sequence: Synthetic oligonucleotide
  Sense strand starting at position 1788 of SEQ ID NO: 587423
ggagaguguguuuacgaga

SEQ ID NO: 791083 - RNA, 19 nt, Artificial Sequence
  Description of Artificial Sequence: Synthetic oligonucleotide
  Antisense strand to SEQ ID NO: 791082
ucucguaaacacacucucc

SEQ ID NO: 791084 - RNA, 19 nt, Artificial Sequence
  Description of Artificial Sequence: Synthetic oligonucleotide
  Sense strand starting at position 1791 of SEQ ID NO: 587423
gaguguguuuacgagagag

SEQ ID NO: 791085 - RNA, 19 nt, Artificial Sequence
  Description of Artificial Sequence: Synthetic oligonucleotide
  Antisense strand to SEQ ID NO: 791084
cucucucguaaacacacuc

SEQ ID NO: 791086 - RNA, 19 nt, Artificial Sequence
  Description of Artificial Sequence: Synthetic oligonucleotide
  Sense strand starting at position 1793 of SEQ ID NO: 587423
guguguuuacgagagagga

SEQ ID NO: 791087 - RNA, 19 nt, Artificial Sequence
  Description of Artificial Sequence: Synthetic oligonucleotide
  Antisense strand to SEQ ID NO: 791086
uccucucucguaaacacac

SEQ ID NO: 791088 - RNA, 19 nt, Artificial Sequence
  Description of Artificial Sequence: Synthetic oligonucleotide
  Sense strand starting at position 1830 of SEQ ID NO: 587423
gacggccucccguguauuu

SEQ ID NO: 791089 - RNA, 19 nt, Artificial Sequence
  Description of Artificial Sequence: Synthetic oligonucleotide
  Antisense strand to SEQ ID NO: 791088
aaauacacgggaggccguc

SEQ ID NO: 791090 - RNA, 19 nt, Artificial Sequence
  Description of Artificial Sequence: Synthetic oligonucleotide
  Sense strand starting at position 1947 of SEQ ID NO: 587423
ggcuuagagguuuauuaau

SEQ ID NO: 791091 - RNA, 19 nt, Artificial Sequence
  Description of Artificial Sequence: Synthetic oligonucleotide
  Antisense strand to SEQ ID NO: 791090
auuaauaaaccucuaagcc

SEQ ID NO: 791092 - RNA, 19 nt, Artificial Sequence
  Description of Artificial Sequence: Synthetic oligonucleotide
  Sense strand starting at position 2288 of SEQ ID NO: 587423
gcgcccggacuuugugaau

SEQ ID NO: 791093 - RNA, 19 nt, Artificial Sequence
  Description of Artificial Sequence: Synthetic oligonucleotide
  Antisense strand to SEQ ID NO: 791092
auucacaaaguccgggcgc

SEQ ID NO: 791094 - RNA, 19 nt, Artificial Sequence
  Description of Artificial Sequence: Synthetic oligonucleotide
  Sense strand starting at position 2291 of SEQ ID NO: 587423
cccggacuuugugaaugga

SEQ ID NO: 791095 - RNA, 19 nt, Artificial Sequence
  Description of Artificial Sequence: Synthetic oligonucleotide
  Antisense strand to SEQ ID NO: 791094
uccauucacaaaguccggg

SEQ ID NO: 791096 - RNA, 19 nt, Artificial Sequence
  Description of Artificial Sequence: Synthetic oligonucleotide
  Sense strand starting at position 2613 of SEQ ID NO: 587423
ccaguccuuucugaauaug

SEQ ID NO: 791097 - RNA, 19 nt, Artificial Sequence
  Description of Artificial Sequence: Synthetic oligonucleotide
  Antisense strand to SEQ ID NO: 791096
cauauucagaaaggacugg

SEQ ID NO: 791098 - RNA, 19 nt, Artificial Sequence
  Description of Artificial Sequence: Synthetic oligonucleotide
  Sense strand starting at position 2616 of SEQ ID NO: 587423
guccuuucugaauaugcga

SEQ ID NO: 791099 - RNA, 19 nt, Artificial Sequence
  Description of Artificial Sequence: Synthetic oligonucleotide
  Antisense strand to SEQ ID NO: 791098
ucgcauauucagaaaggac

SEQ ID NO: 791100 - RNA, 19 nt, Artificial Sequence
  Description of Artificial Sequence: Synthetic oligonucleotide
  Sense strand starting at position 2642 of SEQ ID NO: 587423
gacguuagcguaugcauua

SEQ ID NO: 791101 - RNA, 19 nt, Artificial Sequence
  Description of Artificial Sequence: Synthetic oligonucleotide
  Antisense strand to SEQ ID NO: 791100
uaaugcauacgcuaacguc

SEQ ID NO: 791102 - RNA, 19 nt, Artificial Sequence
  Description of Artificial Sequence: Synthetic oligonucleotide
  Sense strand starting at position 2652 of SEQ ID NO: 587423
uaugcauuagcgugaucga

SEQ ID NO: 791103 - RNA, 19 nt, Artificial Sequence
  Description of Artificial Sequence: Synthetic oligonucleotide
  Antisense strand to SEQ ID NO: 791102
ucgaucacgcuaaugcaua

SEQ ID NO: 791104 - RNA, 19 nt, Artificial Sequence
  Description of Artificial Sequence: Synthetic oligonucleotide
  Sense strand starting at position 2653 of SEQ ID NO: 587423
augcauuagcgugaucgau

SEQ ID NO: 791105 - RNA, 19 nt, Artificial Sequence
  Description of Artificial Sequence: Synthetic oligonucleotide
  Antisense strand to SEQ ID NO: 791104
aucgaucacgcuaaugcau

SEQ ID NO: 791106 - RNA, 19 nt, Artificial Sequence
  Description of Artificial Sequence: Synthetic oligonucleotide
  Sense strand starting at position 2655 of SEQ ID NO: 587423
gcauuagcgugaucgauuu

SEQ ID NO: 791107 - RNA, 19 nt, Artificial Sequence
  Description of Artificial Sequence: Synthetic oligonucleotide
  Antisense strand to SEQ ID NO: 791106
aaaucgaucacgcuaaugc

SEQ ID NO: 791108 - RNA, 19 nt, Artificial Sequence
  Description of Artificial Sequence: Synthetic oligonucleotide
  Sense strand starting at position 2817 of SEQ ID NO: 587423
aggcauuaauugccggaau

SEQ ID NO: 791109 - RNA, 19 nt, Artificial Sequence
  Description of Artificial Sequence: Synthetic oligonucleotide
  Antisense strand to SEQ ID NO: 791108
auuccggcaauuaaugccu

SEQ ID NO: 791110 - RNA, 19 nt, Artificial Sequence
  Description of Artificial Sequence: Synthetic oligonucleotide
  Sense strand starting at position 2820 of SEQ ID NO: 587423
cauuaauugccggaauggu

SEQ ID NO: 791111 - RNA, 19 nt, Artificial Sequence
  Description of Artificial Sequence: Synthetic oligonucleotide
  Antisense strand to SEQ ID NO: 791110
accauuccggcaauuaaug

SEQ ID NO: 791112 - RNA, 19 nt, Artificial Sequence
  Description of Artificial Sequence: Synthetic oligonucleotide
  Sense strand starting at position 2831 of SEQ ID NO: 587423
ggaaugguguuccgaggga

SEQ ID NO: 791113 - RNA, 19 nt, Artificial Sequence
  Description of Artificial Sequence: Synthetic oligonucleotide
  Antisense strand to SEQ ID NO: 791112
ucccucggaacaccauucc

SEQ ID NO: 791114 - RNA, 19 nt, Artificial Sequence
  Description of Artificial Sequence: Synthetic oligonucleotide
  Sense strand starting at position 2951 of SEQ ID NO: 587423
uaucuugcauaguugugaa

SEQ ID NO: 791115 - RNA, 19 nt, Artificial Sequence
  Description of Artificial Sequence: Synthetic oligonucleotide
  Antisense strand to SEQ ID NO: 791114
uucacaacuaugcaagaua

SEQ ID NO: 791116 - RNA, 19 nt, Artificial Sequence
  Description of Artificial Sequence: Synthetic oligonucleotide
  Sense strand starting at position 3239 of SEQ ID NO: 587423
ugccaagucuuguuaguga

SEQ ID NO: 791117 - RNA, 19 nt, Artificial Sequence
  Description of Artificial Sequence: Synthetic oligonucleotide
  Antisense strand to SEQ ID NO: 791116
ucacuaacaagacuuggca

SEQ ID NO: 791118 - RNA, 19 nt, Artificial Sequence
  Description of Artificial Sequence: Synthetic oligonucleotide
  Sense strand starting at position 3242 of SEQ ID NO: 587423
caagucuuguuagugagaa

SEQ ID NO: 791119 - RNA, 19 nt, Artificial Sequence
  Description of Artificial Sequence: Synthetic oligonucleotide
  Antisense strand to SEQ ID NO: 791118
uucucacuaacaagacuug

SEQ ID NO: 791120 - RNA, 19 nt, Artificial Sequence
  Description of Artificial Sequence: Synthetic oligonucleotide
  Sense strand starting at position 3244 of SEQ ID NO: 587423
agucuuguuagugagaauu

SEQ ID NO: 791121 - RNA, 19 nt, Artificial Sequence
  Description of Artificial Sequence: Synthetic oligonucleotide
  Antisense strand to SEQ ID NO: 791120
aauucucacuaacaagacu

SEQ ID NO: 791122 - RNA, 19 nt, Artificial Sequence
  Description of Artificial Sequence: Synthetic oligonucleotide
  Sense strand starting at position 3246 of SEQ ID NO: 587423
ucuuguuagugagaauuaa

SEQ ID NO: 791123 - RNA, 19 nt, Artificial Sequence
  Description of Artificial Sequence: Synthetic oligonucleotide
  Antisense strand to SEQ ID NO: 791122
uuaauucucacuaacaaga

SEQ ID NO: 791124 - RNA, 19 nt, Artificial Sequence
  Description of Artificial Sequence: Synthetic oligonucleotide
  Sense strand starting at position 3436 of SEQ ID NO: 587423
cggcuuucccgagcucuca

SEQ ID NO: 791125 - RNA, 19 nt, Artificial Sequence
  Description of Artificial Sequence: Synthetic oligonucleotide
  Antisense strand to SEQ ID NO: 791124
ugagagcucgggaaagccg

SEQ ID NO: 791126 - RNA, 19 nt, Artificial Sequence
  Description of Artificial Sequence: Synthetic oligonucleotide
  Sense strand starting at position 3598 of SEQ ID NO: 587423
ccgcuugggcaaggugaua

SEQ ID NO: 791127 - RNA, 19 nt, Artificial Sequence
  Description of Artificial Sequence: Synthetic oligonucleotide
  Antisense strand to SEQ ID NO: 791126
uaucaccuugcccaagcgg

SEQ ID NO: 791128 - RNA, 19 nt, Artificial Sequence
  Description of Artificial Sequence: Synthetic oligonucleotide
  Sense strand starting at position 3733 of SEQ ID NO: 587423
gaggcauugcaucaagaua

SEQ ID NO: 791129 - RNA, 19 nt, Artificial Sequence
  Description of Artificial Sequence: Synthetic oligonucleotide
  Antisense strand to SEQ ID NO: 791128
uaucuugaugcaaugccuc

SEQ ID NO: 791130 - RNA, 19 nt, Artificial Sequence
  Description of Artificial Sequence: Synthetic oligonucleotide
  Sense strand starting at position 3899 of SEQ ID NO: 587423
gugggagaucaguggucaa

SEQ ID NO: 791131 - RNA, 19 nt, Artificial Sequence
  Description of Artificial Sequence: Synthetic oligonucleotide
  Antisense strand to SEQ ID NO: 791130
uugaccacugaucucccac

SEQ ID NO: 791132 - RNA, 19 nt, Artificial Sequence
  Description of Artificial Sequence: Synthetic oligonucleotide
  Sense strand starting at position 3952 of SEQ ID NO: 587423
aaaggugucugaguccagu

SEQ ID NO: 791133 - RNA, 19 nt, Artificial Sequence
  Description of Artificial Sequence: Synthetic oligonucleotide
  Antisense strand to SEQ ID NO: 791132
acuggacucagacaccuuu

SEQ ID NO: 791134 - RNA, 19 nt, Artificial Sequence
  Description of Artificial Sequence: Synthetic oligonucleotide
  Sense strand starting at position 63 of SEQ ID NO: 587424
gauagcuuuggcuggacau

SEQ ID NO: 791135 - RNA, 19 nt, Artificial Sequence
  Description of Artificial Sequence: Synthetic oligonucleotide
  Antisense strand to SEQ ID NO: 791134
auguccagccaaagcuauc

SEQ ID NO: 791136 - RNA, 19 nt, Artificial Sequence
  Description of Artificial Sequence: Synthetic oligonucleotide
  Sense strand starting at position 75 of SEQ ID NO: 587424
uggacaugcuacuaucacu

SEQ ID NO: 791137 - RNA, 19 nt, Artificial Sequence
  Description of Artificial Sequence: Synthetic oligonucleotide
  Antisense strand to SEQ ID NO: 791136
agugauaguagcaugucca

SEQ ID NO: 791138 - RNA, 19 nt, Artificial Sequence
  Description of Artificial Sequence: Synthetic oligonucleotide
  Sense strand starting at position 174 of SEQ ID NO: 587424
ggcuuccuguccugcuuua

SEQ ID NO: 791139 - RNA, 19 nt, Artificial Sequence
  Description of Artificial Sequence: Synthetic oligonucleotide
  Antisense strand to SEQ ID NO: 791138
uaaagcaggacaggaagcc

SEQ ID NO: 791140 - RNA, 19 nt, Artificial Sequence
  Description of Artificial Sequence: Synthetic oligonucleotide
  Sense strand starting at position 584 of SEQ ID NO: 587424
aaagauggccucugcugaa

SEQ ID NO: 791141 - RNA, 19 nt, Artificial Sequence
  Description of Artificial Sequence: Synthetic oligonucleotide
  Antisense strand to SEQ ID NO: 791140
uucagcagaggccaucuuu

SEQ ID NO: 791142 - RNA, 19 nt, Artificial Sequence
  Description of Artificial Sequence: Synthetic oligonucleotide
  Sense strand starting at position 631 of SEQ ID NO: 587424
ccgaauagggcccaguuaa

SEQ ID NO: 791143 - RNA, 19 nt, Artificial Sequence
  Description of Artificial Sequence: Synthetic oligonucleotide
  Antisense strand to SEQ ID NO: 791142
uuaacugggcccuauucgg

SEQ ID NO: 791144 - RNA, 19 nt, Artificial Sequence
  Description of Artificial Sequence: Synthetic oligonucleotide
  Sense strand starting at position 641 of SEQ ID NO: 587424
cccaguuaaccucaacgau

SEQ ID NO: 791145 - RNA, 19 nt, Artificial Sequence
  Description of Artificial Sequence: Synthetic oligonucleotide
  Antisense strand to SEQ ID NO: 791144
aucguugagguuaacuggg

SEQ ID NO: 791146 - RNA, 19 nt, Artificial Sequence
  Description of Artificial Sequence: Synthetic oligonucleotide
  Sense strand starting at position 644 of SEQ ID NO: 587424
aguuaaccucaacgauguu

SEQ ID NO: 791147 - RNA, 19 nt, Artificial Sequence
  Description of Artificial Sequence: Synthetic oligonucleotide
  Antisense strand to SEQ ID NO: 791146
aacaucguugagguuaacu

SEQ ID NO: 791148 - RNA, 19 nt, Artificial Sequence
  Description of Artificial Sequence: Synthetic oligonucleotide
  Sense strand starting at position 832 of SEQ ID NO: 587424
ggauguccacuuugagaug

SEQ ID NO: 791149 - RNA, 19 nt, Artificial Sequence
  Description of Artificial Sequence: Synthetic oligonucleotide
  Antisense strand to SEQ ID NO: 791148
caucucaaaguggacaucc

SEQ ID NO: 791150 - RNA, 19 nt, Artificial Sequence
  Description of Artificial Sequence: Synthetic oligonucleotide
  Sense strand starting at position 963 of SEQ ID NO: 587424
ccaccagagggcugucauu

SEQ ID NO: 791151 - RNA, 19 nt, Artificial Sequence
  Description of Artificial Sequence: Synthetic oligonucleotide
  Antisense strand to SEQ ID NO: 791150
aaugacagcccucuggugg

SEQ ID NO: 791152 - RNA, 19 nt, Artificial Sequence
  Description of Artificial Sequence: Synthetic oligonucleotide
  Sense strand starting at position 983 of SEQ ID NO: 587424
uaccuagaggccuguacua

SEQ ID NO: 791153 - RNA, 19 nt, Artificial Sequence
  Description of Artificial Sequence: Synthetic oligonucleotide
  Antisense strand to SEQ ID NO: 791152
uaguacaggccucuaggua

SEQ ID NO: 791154 - RNA, 19 nt, Artificial Sequence
  Description of Artificial Sequence: Synthetic oligonucleotide
  Sense strand starting at position 1079 of SEQ ID NO: 587424
gaggacucucaacgggauu

SEQ ID NO: 791155 - RNA, 19 nt, Artificial Sequence
  Description of Artificial Sequence: Synthetic oligonucleotide
  Antisense strand to SEQ ID NO: 791154
aaucccguugagaguccuc

SEQ ID NO: 791156 - RNA, 19 nt, Artificial Sequence
  Description of Artificial Sequence: Synthetic oligonucleotide
  Sense strand starting at position 1242 of SEQ ID NO: 587424
cgggauuucuuccaggaag

SEQ ID NO: 791157 - RNA, 19 nt, Artificial Sequence
  Description of Artificial Sequence: Synthetic oligonucleotide
  Antisense strand to SEQ ID NO: 791156
cuuccuggaagaaaucccg

SEQ ID NO: 791158 - RNA, 19 nt, Artificial Sequence
  Description of Artificial Sequence: Synthetic oligonucleotide
  Sense strand starting at position 1448 of SEQ ID NO: 587424
ggacuugcgucccagagga

SEQ ID NO: 791159 - RNA, 19 nt, Artificial Sequence
  Description of Artificial Sequence: Synthetic oligonucleotide
  Antisense strand to SEQ ID NO: 791158
uccucugggacgcaagucc

SEQ ID NO: 791160 - RNA, 19 nt, Artificial Sequence
  Description of Artificial Sequence: Synthetic oligonucleotide
  Sense strand starting at position 1450 of SEQ ID NO: 587424
acuugcgucccagaggaau

SEQ ID NO: 791161 - RNA, 19 nt, Artificial Sequence
  Description of Artificial Sequence: Synthetic oligonucleotide
  Antisense strand to SEQ ID NO: 791160
auuccucugggacgcaagu

SEQ ID NO: 791162 - RNA, 19 nt, Artificial Sequence
  Description of Artificial Sequence: Synthetic oligonucleotide
  Sense strand starting at position 1463 of SEQ ID NO: 587424
aggaauugcccucaucucu

SEQ ID NO: 791163 - RNA, 19 nt, Artificial Sequence
  Description of Artificial Sequence: Synthetic oligonucleotide
  Antisense strand to SEQ ID NO: 791162
agagaugagggcaauuccu

SEQ ID NO: 791164 - RNA, 19 nt, Artificial Sequence
  Description of Artificial Sequence: Synthetic oligonucleotide
  Sense strand starting at position 2033 of SEQ ID NO: 587424
gcggaagaaugcgcggaau

SEQ ID NO: 791165 - RNA, 19 nt, Artificial Sequence
  Description of Artificial Sequence: Synthetic oligonucleotide
  Antisense strand to SEQ ID NO: 791164
auuccgcgcauucuuccgc

SEQ ID NO: 791166 - RNA, 19 nt, Artificial Sequence
  Description of Artificial Sequence: Synthetic oligonucleotide
  Sense strand starting at position 2343 of SEQ ID NO: 587424
cggauuugcaggcgcuaga

SEQ ID NO: 791167 - RNA, 19 nt, Artificial Sequence
  Description of Artificial Sequence: Synthetic oligonucleotide
  Antisense strand to SEQ ID NO: 791166
ucuagcgccugcaaauccg

SEQ ID NO: 791168 - RNA, 19 nt, Artificial Sequence
  Description of Artificial Sequence: Synthetic oligonucleotide
  Sense strand starting at position 2488 of SEQ ID NO: 587424
gcagauacagaucgcucua

SEQ ID NO: 791169 - RNA, 19 nt, Artificial Sequence
  Description of Artificial Sequence: Synthetic oligonucleotide
  Antisense strand to SEQ ID NO: 791168
uagagcgaucuguaucugc

SEQ ID NO: 791170 - RNA, 19 nt, Artificial Sequence
  Description of Artificial Sequence: Synthetic oligonucleotide
  Sense strand starting at position 2490 of SEQ ID NO: 587424
agauacagaucgcucuaca

SEQ ID NO: 791171 - RNA, 19 nt, Artificial Sequence
  Description of Artificial Sequence: Synthetic oligonucleotide
  Antisense strand to SEQ ID NO: 791170
uguagagcgaucuguaucu

SEQ ID NO: 791172 - RNA, 19 nt, Artificial Sequence
  Description of Artificial Sequence: Synthetic oligonucleotide
  Sense strand starting at position 2708 of SEQ ID NO: 587424
ggaaacuguucccgggacu

SEQ ID NO: 791173 - RNA, 19 nt, Artificial Sequence
  Description of Artificial Sequence: Synthetic oligonucleotide
  Antisense strand to SEQ ID NO: 791172
agucccgggaacaguuucc

SEQ ID NO: 791174 - RNA, 19 nt, Artificial Sequence
  Description of Artificial Sequence: Synthetic oligonucleotide
  Sense strand starting at position 2711 of SEQ ID NO: 587424
aacuguucccgggacucaa

SEQ ID NO: 791175 - RNA, 19 nt, Artificial Sequence
  Description of Artificial Sequence: Synthetic oligonucleotide
  Antisense strand to SEQ ID NO: 791174
uugagucccgggaacaguu

SEQ ID NO: 791176 - RNA, 19 nt, Artificial Sequence
  Description of Artificial Sequence: Synthetic oligonucleotide
  Sense strand starting at position 2750 of SEQ ID NO: 587424
cgcuucauccucgaggcua

SEQ ID NO: 791177 - RNA, 19 nt, Artificial Sequence
  Description of Artificial Sequence: Synthetic oligonucleotide
  Antisense strand to SEQ ID NO: 791176
uagccucgaggaugaagcg

SEQ ID NO: 791178 - RNA, 19 nt, Artificial Sequence
  Description of Artificial Sequence: Synthetic oligonucleotide
  Sense strand starting at position 2761 of SEQ ID NO: 587424
cgaggcuaggaccguuaau

SEQ ID NO: 791179 - RNA, 19 nt, Artificial Sequence
  Description of Artificial Sequence: Synthetic oligonucleotide
  Antisense strand to SEQ ID NO: 791178
auuaacgguccuagccucg

SEQ ID NO: 791180 - RNA, 19 nt, Artificial Sequence
  Description of Artificial Sequence: Synthetic oligonucleotide
  Sense strand starting at position 2770 of SEQ ID NO: 587424
gaccguuaaugucaauaaa

SEQ ID NO: 791181 - RNA, 19 nt, Artificial Sequence
  Description of Artificial Sequence: Synthetic oligonucleotide
  Antisense strand to SEQ ID NO: 791180
uuuauugacauuaacgguc

SEQ ID NO: 791182 - RNA, 19 nt, Artificial Sequence
  Description of Artificial Sequence: Synthetic oligonucleotide
  Sense strand starting at position 2840 of SEQ ID NO: 587424
cgcacuuucccugaggacu

SEQ ID NO: 791183 - RNA, 19 nt, Artificial Sequence
  Description of Artificial Sequence: Synthetic oligonucleotide
  Antisense strand to SEQ ID NO: 791182
aguccucagggaaagugcg

SEQ ID NO: 791184 - RNA, 19 nt, Artificial Sequence
  Description of Artificial Sequence: Synthetic oligonucleotide
  Sense strand starting at position 2955 of SEQ ID NO: 587424
gacuccuucccgugccaau

SEQ ID NO: 791185 - RNA, 19 nt, Artificial Sequence
  Description of Artificial Sequence: Synthetic oligonucleotide
  Antisense strand to SEQ ID NO: 791184
auuggcacgggaaggaguc

SEQ ID NO: 791186 - RNA, 19 nt, Artificial Sequence
  Description of Artificial Sequence: Synthetic oligonucleotide
  Sense strand starting at position 3585 of SEQ ID NO: 587424
ccgcaaacuugguccucaa

SEQ ID NO: 791187 - RNA, 19 nt, Artificial Sequence
  Description of Artificial Sequence: Synthetic oligonucleotide
  Antisense strand to SEQ ID NO: 791186
uugaggaccaaguuugcgg

SEQ ID NO: 791188 - RNA, 19 nt, Artificial Sequence
  Description of Artificial Sequence: Synthetic oligonucleotide
  Sense strand starting at position 3648 of SEQ ID NO: 587424
gcagccucgcggucacaua

SEQ ID NO: 791189 - RNA, 19 nt, Artificial Sequence
  Description of Artificial Sequence: Synthetic oligonucleotide
  Antisense strand to SEQ ID NO: 791188
uaugugaccgcgaggcugc

SEQ ID NO: 791190 - RNA, 19 nt, Artificial Sequence
  Description of Artificial Sequence: Synthetic oligonucleotide
  Sense strand starting at position 3732 of SEQ ID NO: 587424
aggagaguguguuuacgag

SEQ ID NO: 791191 - RNA, 19 nt, Artificial Sequence
  Description of Artificial Sequence: Synthetic oligonucleotide
  Antisense strand to SEQ ID NO: 791190
cucguaaacacacucuccu

SEQ ID NO: 791192 - RNA, 19 nt, Artificial Sequence
  Description of Artificial Sequence: Synthetic oligonucleotide
  Sense strand starting at position 3733 of SEQ ID NO: 587424
ggagaguguguuuacgaga

SEQ ID NO: 791193 - RNA, 19 nt, Artificial Sequence
  Description of Artificial Sequence: Synthetic oligonucleotide
  Antisense strand to SEQ ID NO: 791192
ucucguaaacacacucucc

SEQ ID NO: 791194 - RNA, 19 nt, Artificial Sequence
  Description of Artificial Sequence: Synthetic oligonucleotide
  Sense strand starting at position 3736 of SEQ ID NO: 587424
gaguguguuuacgagagag

SEQ ID NO: 791195 - RNA, 19 nt, Artificial Sequence
  Description of Artificial Sequence: Synthetic oligonucleotide
  Antisense strand to SEQ ID NO: 791194
cucucucguaaacacacuc

SEQ ID NO: 791196 - RNA, 19 nt, Artificial Sequence
  Description of Artificial Sequence: Synthetic oligonucleotide
  Sense strand starting at position 3738 of SEQ ID NO: 587424
guguguuuacgagagagga

SEQ ID NO: 791197 - RNA, 19 nt, Artificial Sequence
  Description of Artificial Sequence: Synthetic oligonucleotide
  Antisense strand to SEQ ID NO: 791196
uccucucucguaaacacac

SEQ ID NO: 791198 - RNA, 19 nt, Artificial Sequence
  Description of Artificial Sequence: Synthetic oligonucleotide
  Sense strand starting at position 3775 of SEQ ID NO: 587424
gacggccucccguguauuu

SEQ ID NO: 791199 - RNA, 19 nt, Artificial Sequence
  Description of Artificial Sequence: Synthetic oligonucleotide
  Antisense strand to SEQ ID NO: 791198
aaauacacgggaggccguc

SEQ ID NO: 791200 - RNA, 19 nt, Artificial Sequence
  Description of Artificial Sequence: Synthetic oligonucleotide
  Sense strand starting at position 3892 of SEQ ID NO: 587424
ggcuuagagguuuauuaau

SEQ ID NO: 791201 - RNA, 19 nt, Artificial Sequence
  Description of Artificial Sequence: Synthetic oligonucleotide
  Antisense strand to SEQ ID NO: 791200
auuaauaaaccucuaagcc

SEQ ID NO: 791202 - RNA, 19 nt, Artificial Sequence
  Description of Artificial Sequence: Synthetic oligonucleotide
  Sense strand starting at position 49 of SEQ ID NO: 587425
ccaccauauccugaggcaa

SEQ ID NO: 791203 - RNA, 19 nt, Artificial Sequence
  Description of Artificial Sequence: Synthetic oligonucleotide
  Antisense strand to SEQ ID NO: 791202
uugccucaggauauggugg

SEQ ID NO: 791204 - RNA, 19 nt, Artificial Sequence
  Description of Artificial Sequence: Synthetic oligonucleotide
  Sense strand starting at position 198 of SEQ ID NO: 587425
ccaccugugcuuuguaaca

SEQ ID NO: 791205 - RNA, 19 nt, Artificial Sequence
  Description of Artificial Sequence: Synthetic oligonucleotide
  Antisense strand to SEQ ID NO: 791204
uguuacaaagcacaggugg

SEQ ID NO: 791206 - RNA, 19 nt, Artificial Sequence
  Description of Artificial Sequence: Synthetic oligonucleotide
  Sense strand starting at position 219 of SEQ ID NO: 587425
ccuggcuuucucugauaac

SEQ ID NO: 791207 - RNA, 19 nt, Artificial Sequence
  Description of Artificial Sequence: Synthetic oligonucleotide
  Antisense strand to SEQ ID NO: 791206
guuaucagagaaagccagg

SEQ ID NO: 791208 - RNA, 19 nt, Artificial Sequence
  Description of Artificial Sequence: Synthetic oligonucleotide
  Sense strand starting at position 590 of SEQ ID NO: 587425
gggccucuagcagaagagu

SEQ ID NO: 791209 - RNA, 19 nt, Artificial Sequence
  Description of Artificial Sequence: Synthetic oligonucleotide
  Antisense strand to SEQ ID NO: 791208
acucuucugcuagaggccc

SEQ ID NO: 791210 - RNA, 19 nt, Artificial Sequence
  Description of Artificial Sequence: Synthetic oligonucleotide
  Sense strand starting at position 615 of SEQ ID NO: 587425
cugcaagucuugguccuua

SEQ ID NO: 791211 - RNA, 19 nt, Artificial Sequence
  Description of Artificial Sequence: Synthetic oligonucleotide
  Antisense strand to SEQ ID NO: 791210
uaaggaccaagacuugcag

SEQ ID NO: 791212 - RNA, 19 nt, Artificial Sequence
  Description of Artificial Sequence: Synthetic oligonucleotide
  Sense strand starting at position 657 of SEQ ID NO: 587425
uaugcagagccuugaggau

SEQ ID NO: 791213 - RNA, 19 nt, Artificial Sequence
  Description of Artificial Sequence: Synthetic oligonucleotide
  Antisense strand to SEQ ID NO: 791212
auccucaaggcucugcaua

SEQ ID NO: 791214 - RNA, 19 nt, Artificial Sequence
  Description of Artificial Sequence: Synthetic oligonucleotide
  Sense strand starting at position 729 of SEQ ID NO: 587425
gggccaauccuccaaguaa

SEQ ID NO: 791215 - RNA, 19 nt, Artificial Sequence
  Description of Artificial Sequence: Synthetic oligonucleotide
  Antisense strand to SEQ ID NO: 791214
uuacuuggaggauuggccc

SEQ ID NO: 791216 - RNA, 19 nt, Artificial Sequence
  Description of Artificial Sequence: Synthetic oligonucleotide
  Sense strand starting at position 779 of SEQ ID NO: 587425
agugauuauugggcaguua

SEQ ID NO: 791217 - RNA, 19 nt, Artificial Sequence
  Description of Artificial Sequence: Synthetic oligonucleotide
  Antisense strand to SEQ ID NO: 791216
uaacugcccaauaaucacu

SEQ ID NO: 791218 - RNA, 19 nt, Artificial Sequence
  Description of Artificial Sequence: Synthetic oligonucleotide
  Sense strand starting at position 780 of SEQ ID NO: 587425
gugauuauugggcaguuag

SEQ ID NO: 791219 - RNA, 19 nt, Artificial Sequence
  Description of Artificial Sequence: Synthetic oligonucleotide
  Antisense strand to SEQ ID NO: 791218
cuaacugcccaauaaucac

SEQ ID NO: 791220 - RNA, 19 nt, Artificial Sequence
  Description of Artificial Sequence: Synthetic oligonucleotide
  Sense strand starting at position 850 of SEQ ID NO: 587425
gugaccacauucucauuau

SEQ ID NO: 791221 - RNA, 19 nt, Artificial Sequence
  Description of Artificial Sequence: Synthetic oligonucleotide
  Antisense strand to SEQ ID NO: 791220
auaaugagaauguggucac

SEQ ID NO: 791222 - RNA, 19 nt, Artificial Sequence
  Description of Artificial Sequence: Synthetic oligonucleotide
  Sense strand starting at position 876 of SEQ ID NO: 587425
gcuguugaauucuuccaaa

SEQ ID NO: 791223 - RNA, 19 nt, Artificial Sequence
  Description of Artificial Sequence: Synthetic oligonucleotide
  Antisense strand to SEQ ID NO: 791222
uuuggaagaauucaacagc

SEQ ID NO: 791224 - RNA, 19 nt, Artificial Sequence
  Description of Artificial Sequence: Synthetic oligonucleotide
  Sense strand starting at position 897 of SEQ ID NO: 587425
cuuccuagaucgguuaagu

SEQ ID NO: 791225 - RNA, 19 nt, Artificial Sequence
  Description of Artificial Sequence: Synthetic oligonucleotide
  Antisense strand to SEQ ID NO: 791224
acuuaaccgaucuaggaag

SEQ ID NO: 791226 - RNA, 19 nt, Artificial Sequence
  Description of Artificial Sequence: Synthetic oligonucleotide
  Sense strand starting at position 910 of SEQ ID NO: 587425
uuaagucauucuguaugac

SEQ ID NO: 791227 - RNA, 19 nt, Artificial Sequence
  Description of Artificial Sequence: Synthetic oligonucleotide
  Antisense strand to SEQ ID NO: 791226
gucauacagaaugacuuaa

SEQ ID NO: 791228 - RNA, 19 nt, Artificial Sequence
  Description of Artificial Sequence: Synthetic oligonucleotide
  Sense strand starting at position 913 of SEQ ID NO: 587425
agucauucuguaugacaga

SEQ ID NO: 791229 - RNA, 19 nt, Artificial Sequence
  Description of Artificial Sequence: Synthetic oligonucleotide
  Antisense strand to SEQ ID NO: 791228
ucugucauacagaaugacu

SEQ ID NO: 791230 - RNA, 19 nt, Artificial Sequence
  Description of Artificial Sequence: Synthetic oligonucleotide
  Sense strand starting at position 961 of SEQ ID NO: 587425
aaaucugaacgcuguaaag

SEQ ID NO: 791231 - RNA, 19 nt, Artificial Sequence
  Description of Artificial Sequence: Synthetic oligonucleotide
  Antisense strand to SEQ ID NO: 791230
cuuuacagcguucagauuu

SEQ ID NO: 791232 - RNA, 19 nt, Artificial Sequence
  Description of Artificial Sequence: Synthetic oligonucleotide
  Sense strand starting at position 963 of SEQ ID NO: 587425
aucugaacgcuguaaagga

SEQ ID NO: 791233 - RNA, 19 nt, Artificial Sequence
  Description of Artificial Sequence: Synthetic oligonucleotide
  Antisense strand to SEQ ID NO: 791232
uccuuuacagcguucagau

SEQ ID NO: 791234 - RNA, 19 nt, Artificial Sequence
  Description of Artificial Sequence: Synthetic oligonucleotide
  Sense strand starting at position 1013 of SEQ ID NO: 587425
caccucuuugggugaaagu

SEQ ID NO: 791235 - RNA, 19 nt, Artificial Sequence
  Description of Artificial Sequence: Synthetic oligonucleotide
  Antisense strand to SEQ ID NO: 791234
acuuucacccaaagaggug

SEQ ID NO: 791236 - RNA, 19 nt, Artificial Sequence
  Description of Artificial Sequence: Synthetic oligonucleotide
  Sense strand starting at position 1014 of SEQ ID NO: 587425
accucuuugggugaaaguu

SEQ ID NO: 791237 - RNA, 19 nt, Artificial Sequence
  Description of Artificial Sequence: Synthetic oligonucleotide
  Antisense strand to SEQ ID NO: 791236
aacuuucacccaaagaggu

SEQ ID NO: 791238 - RNA, 19 nt, Artificial Sequence
  Description of Artificial Sequence: Synthetic oligonucleotide
  Sense strand starting at position 1290 of SEQ ID NO: 587425
acuggaaucgccuauuaaa

SEQ ID NO: 791239 - RNA, 19 nt, Artificial Sequence
  Description of Artificial Sequence: Synthetic oligonucleotide
  Antisense strand to SEQ ID NO: 791238
uuuaauaggcgauuccagu

SEQ ID NO: 791240 - RNA, 19 nt, Artificial Sequence
  Description of Artificial Sequence: Synthetic oligonucleotide
  Sense strand starting at position 1475 of SEQ ID NO: 587425
gcucuuugucgagagccca

SEQ ID NO: 791241 - RNA, 19 nt, Artificial Sequence
  Description of Artificial Sequence: Synthetic oligonucleotide
  Antisense strand to SEQ ID NO: 791240
ugggcucucgacaaagagc

SEQ ID NO: 791242 - RNA, 19 nt, Artificial Sequence
  Description of Artificial Sequence: Synthetic oligonucleotide
  Sense strand starting at position 1587 of SEQ ID NO: 587425
gccacaugguccucggauu

SEQ ID NO: 791243 - RNA, 19 nt, Artificial Sequence
  Description of Artificial Sequence: Synthetic oligonucleotide
  Antisense strand to SEQ ID NO: 791242
aauccgaggaccauguggc

SEQ ID NO: 791244 - RNA, 19 nt, Artificial Sequence
  Description of Artificial Sequence: Synthetic oligonucleotide
  Sense strand starting at position 1724 of SEQ ID NO: 587425
agcucaccgcuuugagauc

SEQ ID NO: 791245 - RNA, 19 nt, Artificial Sequence
  Description of Artificial Sequence: Synthetic oligonucleotide
  Antisense strand to SEQ ID NO: 791244
gaucucaaagcggugagcu

SEQ ID NO: 791246 - RNA, 19 nt, Artificial Sequence
  Description of Artificial Sequence: Synthetic oligonucleotide
  Sense strand starting at position 2503 of SEQ ID NO: 587425
cguuugugagcggugaagu

SEQ ID NO: 791247 - RNA, 19 nt, Artificial Sequence
  Description of Artificial Sequence: Synthetic oligonucleotide
  Antisense strand to SEQ ID NO: 791246
acuucaccgcucacaaacg

SEQ ID NO: 791248 - RNA, 19 nt, Artificial Sequence
  Description of Artificial Sequence: Synthetic oligonucleotide
  Sense strand starting at position 2521 of SEQ ID NO: 587425
uugguugacugcucaaguu

SEQ ID NO: 791249 - RNA, 19 nt, Artificial Sequence
  Description of Artificial Sequence: Synthetic oligonucleotide
  Antisense strand to SEQ ID NO: 791248
aacuugagcagucaaccaa

SEQ ID NO: 791250 - RNA, 19 nt, Artificial Sequence
  Description of Artificial Sequence: Synthetic oligonucleotide
  Sense strand starting at position 2555 of SEQ ID NO: 587425
guagguuacuuucucugga

SEQ ID NO: 791251 - RNA, 19 nt, Artificial Sequence
  Description of Artificial Sequence: Synthetic oligonucleotide
  Antisense strand to SEQ ID NO: 791250
uccagagaaaguaaccuac

SEQ ID NO: 791252 - RNA, 19 nt, Artificial Sequence
  Description of Artificial Sequence: Synthetic oligonucleotide
  Sense strand starting at position 2778 of SEQ ID NO: 587425
gguugugaauugccaaaga

SEQ ID NO: 791253 - RNA, 19 nt, Artificial Sequence
  Description of Artificial Sequence: Synthetic oligonucleotide
  Antisense strand to SEQ ID NO: 791252
ucuuuggcaauucacaacc

SEQ ID NO: 791254 - RNA, 19 nt, Artificial Sequence
  Description of Artificial Sequence: Synthetic oligonucleotide
  Sense strand starting at position 2793 of SEQ ID NO: 587425
aagacaugccguuagauuc

SEQ ID NO: 791255 - RNA, 19 nt, Artificial Sequence
  Description of Artificial Sequence: Synthetic oligonucleotide
  Antisense strand to SEQ ID NO: 791254
gaaucuaacggcaugucuu

SEQ ID NO: 791256 - RNA, 19 nt, Artificial Sequence
  Description of Artificial Sequence: Synthetic oligonucleotide
  Sense strand starting at position 2811 of SEQ ID NO: 587425
ccagaucuccuguguuuga

SEQ ID NO: 791257 - RNA, 19 nt, Artificial Sequence
  Description of Artificial Sequence: Synthetic oligonucleotide
  Antisense strand to SEQ ID NO: 791256
ucaaacacaggagaucugg

SEQ ID NO: 791258 - RNA, 19 nt, Artificial Sequence
  Description of Artificial Sequence: Synthetic oligonucleotide
  Sense strand starting at position 2815 of SEQ ID NO: 587425
aucuccuguguuugaccaa

SEQ ID NO: 791259 - RNA, 19 nt, Artificial Sequence
  Description of Artificial Sequence: Synthetic oligonucleotide
  Antisense strand to SEQ ID NO: 791258
uuggucaaacacaggagau

SEQ ID NO: 791260 - RNA, 19 nt, Artificial Sequence
  Description of Artificial Sequence: Synthetic oligonucleotide
  Sense strand starting at position 2818 of SEQ ID NO: 587425
uccuguguuugaccaaagu

SEQ ID NO: 791261 - RNA, 19 nt, Artificial Sequence
  Description of Artificial Sequence: Synthetic oligonucleotide
  Antisense strand to SEQ ID NO: 791260
acuuuggucaaacacagga

SEQ ID NO: 791262 - RNA, 19 nt, Artificial Sequence
  Description of Artificial Sequence: Synthetic oligonucleotide
  Sense strand starting at position 2827 of SEQ ID NO: 587425
ugaccaaaguucuugacca

SEQ ID NO: 791263 - RNA, 19 nt, Artificial Sequence
  Description of Artificial Sequence: Synthetic oligonucleotide
  Antisense strand to SEQ ID NO: 791262
uggucaagaacuuugguca

SEQ ID NO: 791264 - RNA, 19 nt, Artificial Sequence
  Description of Artificial Sequence: Synthetic oligonucleotide
  Sense strand starting at position 2970 of SEQ ID NO: 587425
aaagaaagucguugggauu

SEQ ID NO: 791265 - RNA, 19 nt, Artificial Sequence
  Description of Artificial Sequence: Synthetic oligonucleotide
  Antisense strand to SEQ ID NO: 791264
aaucccaacgacuuucuuu

SEQ ID NO: 791266 - RNA, 19 nt, Artificial Sequence
  Description of Artificial Sequence: Synthetic oligonucleotide
  Sense strand starting at position 3060 of SEQ ID NO: 587425
cuuugaauauaguagacaa

SEQ ID NO: 791267 - RNA, 19 nt, Artificial Sequence
  Description of Artificial Sequence: Synthetic oligonucleotide
  Antisense strand to SEQ ID NO: 791266
uugucuacuauauucaaag

SEQ ID NO: 791268 - RNA, 19 nt, Artificial Sequence
  Description of Artificial Sequence: Synthetic oligonucleotide
  Sense strand starting at position 3799 of SEQ ID NO: 587425
aguaguauuucuuagaaca

SEQ ID NO: 791269 - RNA, 19 nt, Artificial Sequence
  Description of Artificial Sequence: Synthetic oligonucleotide
  Antisense strand to SEQ ID NO: 791268
uguucuaagaaauacuacu

SEQ ID NO: 791270 - RNA, 19 nt, Artificial Sequence
  Description of Artificial Sequence: Synthetic oligonucleotide
  Sense strand starting at position 3825 of SEQ ID NO: 587425
uuaggaagauucuaauuug

SEQ ID NO: 791271 - RNA, 19 nt, Artificial Sequence
  Description of Artificial Sequence: Synthetic oligonucleotide
  Antisense strand to SEQ ID NO: 791270
caaauuagaaucuuccuaa

SEQ ID NO: 791272 - RNA, 19 nt, Artificial Sequence
  Description of Artificial Sequence: Synthetic oligonucleotide
  Sense strand starting at position 3855 of SEQ ID NO: 587425
auaacagaacauuguguua

SEQ ID NO: 791273 - RNA, 19 nt, Artificial Sequence
  Description of Artificial Sequence: Synthetic oligonucleotide
  Antisense strand to SEQ ID NO: 791272
uaacacaauguucuguuau

SEQ ID NO: 791274 - RNA, 19 nt, Artificial Sequence
  Description of Artificial Sequence: Synthetic oligonucleotide
  Sense strand starting at position 3858 of SEQ ID NO: 587425
acagaacauuguguuauau

SEQ ID NO: 791275 - RNA, 19 nt, Artificial Sequence
  Description of Artificial Sequence: Synthetic oligonucleotide
  Antisense strand to SEQ ID NO: 791274
auauaacacaauguucugu

SEQ ID NO: 791276 - RNA, 19 nt, Artificial Sequence
  Description of Artificial Sequence: Synthetic oligonucleotide
  Sense strand starting at position 3867 of SEQ ID NO: 587425
uguguuauaugugcaggga

SEQ ID NO: 791277 - RNA, 19 nt, Artificial Sequence
  Description of Artificial Sequence: Synthetic oligonucleotide
  Antisense strand to SEQ ID NO: 791276
ucccugcacauauaacaca

SEQ ID NO: 791278 - RNA, 19 nt, Artificial Sequence
  Description of Artificial Sequence: Synthetic oligonucleotide
  Sense strand starting at position 3938 of SEQ ID NO: 587425
ggugucuuaguuugagaaa

SEQ ID NO: 791279 - RNA, 19 nt, Artificial Sequence
  Description of Artificial Sequence: Synthetic oligonucleotide
  Antisense strand to SEQ ID NO: 791278
uuucucaaacuaagacacc

SEQ ID NO: 791280 - RNA, 19 nt, Artificial Sequence
  Description of Artificial Sequence: Synthetic oligonucleotide
  Sense strand starting at position 3969 of SEQ ID NO: 587425
gggugacuuaacggaaauu

SEQ ID NO: 791281 - RNA, 19 nt, Artificial Sequence
  Description of Artificial Sequence: Synthetic oligonucleotide
  Antisense strand to SEQ ID NO: 791280
aauuuccguuaagucaccc

SEQ ID NO: 791282 - RNA, 19 nt, Artificial Sequence
  Description of Artificial Sequence: Synthetic oligonucleotide
  Sense strand starting at position 215 of SEQ ID NO: 587426
ggugguagagguugcagua

SEQ ID NO: 791283 - RNA, 19 nt, Artificial Sequence
  Description of Artificial Sequence: Synthetic oligonucleotide
  Antisense strand to SEQ ID NO: 791282
uacugcaaccucuaccacc

SEQ ID NO: 791284 - RNA, 19 nt, Artificial Sequence
  Description of Artificial Sequence: Synthetic oligonucleotide
  Sense strand starting at position 347 of SEQ ID NO: 587426
guugcaagaaaugggaaau

SEQ ID NO: 791285 - RNA, 19 nt, Artificial Sequence
  Description of Artificial Sequence: Synthetic oligonucleotide
  Antisense strand to SEQ ID NO: 791284
auuucccauuucuugcaac

SEQ ID NO: 791286 - RNA, 19 nt, Artificial Sequence
  Description of Artificial Sequence: Synthetic oligonucleotide
  Sense strand starting at position 384 of SEQ ID NO: 587426
ugguucucugugagugguu

SEQ ID NO: 791287 - RNA, 19 nt, Artificial Sequence
  Description of Artificial Sequence: Synthetic oligonucleotide
  Antisense strand to SEQ ID NO: 791286
aaccacucacagagaacca

SEQ ID NO: 791288 - RNA, 19 nt, Artificial Sequence
  Description of Artificial Sequence: Synthetic oligonucleotide
  Sense strand starting at position 389 of SEQ ID NO: 587426
cucugugagugguugcaua

SEQ ID NO: 791289 - RNA, 19 nt, Artificial Sequence
  Description of Artificial Sequence: Synthetic oligonucleotide
  Antisense strand to SEQ ID NO: 791288
uaugcaaccacucacagag

SEQ ID NO: 791290 - RNA, 19 nt, Artificial Sequence
  Description of Artificial Sequence: Synthetic oligonucleotide
  Sense strand starting at position 551 of SEQ ID NO: 587426
acucauaauugaggacagu

SEQ ID NO: 791291 - RNA, 19 nt, Artificial Sequence
  Description of Artificial Sequence: Synthetic oligonucleotide
  Antisense strand to SEQ ID NO: 791290
acuguccucaauuaugagu

SEQ ID NO: 791292 - RNA, 19 nt, Artificial Sequence
  Description of Artificial Sequence: Synthetic oligonucleotide
  Sense strand starting at position 560 of SEQ ID NO: 587426
ugaggacagucagucuuua

SEQ ID NO: 791293 - RNA, 19 nt, Artificial Sequence
  Description of Artificial Sequence: Synthetic oligonucleotide
  Antisense strand to SEQ ID NO: 791292
uaaagacugacuguccuca

SEQ ID NO: 791294 - RNA, 19 nt, Artificial Sequence
  Description of Artificial Sequence: Synthetic oligonucleotide
  Sense strand starting at position 568 of SEQ ID NO: 587426
gucagucuuuacuggugaa

SEQ ID NO: 791295 - RNA, 19 nt, Artificial Sequence
  Description of Artificial Sequence: Synthetic oligonucleotide
  Antisense strand to SEQ ID NO: 791294
uucaccaguaaagacugac

SEQ ID NO: 791296 - RNA, 19 nt, Artificial Sequence
  Description of Artificial Sequence: Synthetic oligonucleotide
  Sense strand starting at position 571 of SEQ ID NO: 587426
agucuuuacuggugaaauu

SEQ ID NO: 791297 - RNA, 19 nt, Artificial Sequence
  Description of Artificial Sequence: Synthetic oligonucleotide
  Antisense strand to SEQ ID NO: 791296
aauuucaccaguaaagacu

SEQ ID NO: 791298 - RNA, 19 nt, Artificial Sequence
  Description of Artificial Sequence: Synthetic oligonucleotide
  Sense strand starting at position 572 of SEQ ID NO: 587426
gucuuuacuggugaaauua

SEQ ID NO: 791299 - RNA, 19 nt, Artificial Sequence
  Description of Artificial Sequence: Synthetic oligonucleotide
  Antisense strand to SEQ ID NO: 791298
uaauuucaccaguaaagac

SEQ ID NO: 791300 - RNA, 19 nt, Artificial Sequence
  Description of Artificial Sequence: Synthetic oligonucleotide
  Sense strand starting at position 742 of SEQ ID NO: 587426
cugguugcagcacaauaau

SEQ ID NO: 791301 - RNA, 19 nt, Artificial Sequence
  Description of Artificial Sequence: Synthetic oligonucleotide
  Antisense strand to SEQ ID NO: 791300
auuauugugcugcaaccag

SEQ ID NO: 791302 - RNA, 19 nt, Artificial Sequence
  Description of Artificial Sequence: Synthetic oligonucleotide
  Sense strand starting at position 1045 of SEQ ID NO: 587426
ggcugaugucagcagucca

SEQ ID NO: 791303 - RNA, 19 nt, Artificial Sequence
  Description of Artificial Sequence: Synthetic oligonucleotide
  Antisense strand to SEQ ID NO: 791302
uggacugcugacaucagcc

SEQ ID NO: 791304 - RNA, 19 nt, Artificial Sequence
  Description of Artificial Sequence: Synthetic oligonucleotide
  Sense strand starting at position 1162 of SEQ ID NO: 587426
cugccucagugcucaaagu

SEQ ID NO: 791305 - RNA, 19 nt, Artificial Sequence
  Description of Artificial Sequence: Synthetic oligonucleotide
  Antisense strand to SEQ ID NO: 791304
acuuugagcacugaggcag

SEQ ID NO: 791306 - RNA, 19 nt, Artificial Sequence
  Description of Artificial Sequence: Synthetic oligonucleotide
  Sense strand starting at position 1245 of SEQ ID NO: 587426
agagauaaagccuguucca

SEQ ID NO: 791307 - RNA, 19 nt, Artificial Sequence
  Description of Artificial Sequence: Synthetic oligonucleotide
  Antisense strand to SEQ ID NO: 791306
uggaacaggcuuuaucucu

SEQ ID NO: 791308 - RNA, 19 nt, Artificial Sequence
  Description of Artificial Sequence: Synthetic oligonucleotide
  Sense strand starting at position 1248 of SEQ ID NO: 587426
gauaaagccuguuccagaa

SEQ ID NO: 791309 - RNA, 19 nt, Artificial Sequence
  Description of Artificial Sequence: Synthetic oligonucleotide
  Antisense strand to SEQ ID NO: 791308
uucuggaacaggcuuuauc

SEQ ID NO: 791310 - RNA, 19 nt, Artificial Sequence
  Description of Artificial Sequence: Synthetic oligonucleotide
  Sense strand starting at position 1286 of SEQ ID NO: 587426
ucaugacuaccagaagugu

SEQ ID NO: 791311 - RNA, 19 nt, Artificial Sequence
  Description of Artificial Sequence: Synthetic oligonucleotide
  Antisense strand to SEQ ID NO: 791310
acacuucugguagucauga

SEQ ID NO: 791312 - RNA, 19 nt, Artificial Sequence
  Description of Artificial Sequence: Synthetic oligonucleotide
  Sense strand starting at position 1357 of SEQ ID NO: 587426
aaaggaugcuaaggaguaa

SEQ ID NO: 791313 - RNA, 19 nt, Artificial Sequence
  Description of Artificial Sequence: Synthetic oligonucleotide
  Antisense strand to SEQ ID NO: 791312
uuacuccuuagcauccuuu

SEQ ID NO: 791314 - RNA, 19 nt, Artificial Sequence
  Description of Artificial Sequence: Synthetic oligonucleotide
  Sense strand starting at position 1446 of SEQ ID NO: 587426
gcagcaucaucacagaauu

SEQ ID NO: 791315 - RNA, 19 nt, Artificial Sequence
  Description of Artificial Sequence: Synthetic oligonucleotide
  Antisense strand to SEQ ID NO: 791314
aauucugugaugaugcugc

SEQ ID NO: 791316 - RNA, 19 nt, Artificial Sequence
  Description of Artificial Sequence: Synthetic oligonucleotide
  Sense strand starting at position 1460 of SEQ ID NO: 587426
gaauuaaaguauucuggau

SEQ ID NO: 791317 - RNA, 19 nt, Artificial Sequence
  Description of Artificial Sequence: Synthetic oligonucleotide
  Antisense strand to SEQ ID NO: 791316
auccagaauacuuuaauuc

SEQ ID NO: 791318 - RNA, 19 nt, Artificial Sequence
  Description of Artificial Sequence: Synthetic oligonucleotide
  Sense strand starting at position 1613 of SEQ ID NO: 587426
cauagaggcuuguuagguu

SEQ ID NO: 791319 - RNA, 19 nt, Artificial Sequence
  Description of Artificial Sequence: Synthetic oligonucleotide
  Antisense strand to SEQ ID NO: 791318
aaccuaacaagccucuaug

SEQ ID NO: 791320 - RNA, 19 nt, Artificial Sequence
  Description of Artificial Sequence: Synthetic oligonucleotide
  Sense strand starting at position 1654 of SEQ ID NO: 587426
cgaucaaacuuguuaucag

SEQ ID NO: 791321 - RNA, 19 nt, Artificial Sequence
  Description of Artificial Sequence: Synthetic oligonucleotide
  Antisense strand to SEQ ID NO: 791320
cugauaacaaguuugaucg

SEQ ID NO: 791322 - RNA, 19 nt, Artificial Sequence
  Description of Artificial Sequence: Synthetic oligonucleotide
  Sense strand starting at position 1678 of SEQ ID NO: 587426
aauaccgcauuguaagaua

SEQ ID NO: 791323 - RNA, 19 nt, Artificial Sequence
  Description of Artificial Sequence: Synthetic oligonucleotide
  Antisense strand to SEQ ID NO: 791322
uaucuuacaaugcgguauu

SEQ ID NO: 791324 - RNA, 19 nt, Artificial Sequence
  Description of Artificial Sequence: Synthetic oligonucleotide
  Sense strand starting at position 1681 of SEQ ID NO: 587426
accgcauuguaagauauuu

SEQ ID NO: 791325 - RNA, 19 nt, Artificial Sequence
  Description of Artificial Sequence: Synthetic oligonucleotide
  Antisense strand to SEQ ID NO: 791324
aaauaucuuacaaugcggu

SEQ ID NO: 791326 - RNA, 19 nt, Artificial Sequence
  Description of Artificial Sequence: Synthetic oligonucleotide
  Sense strand starting at position 1708 of SEQ ID NO: 587426
gccucaugguaacaacaaa

SEQ ID NO: 791327 - RNA, 19 nt, Artificial Sequence
  Description of Artificial Sequence: Synthetic oligonucleotide
  Antisense strand to SEQ ID NO: 791326
uuuguuguuaccaugaggc

SEQ ID NO: 791328 - RNA, 19 nt, Artificial Sequence
  Description of Artificial Sequence: Synthetic oligonucleotide
  Sense strand starting at position 2063 of SEQ ID NO: 587426
agcagaaguggcuauacau

SEQ ID NO: 791329 - RNA, 19 nt, Artificial Sequence
  Description of Artificial Sequence: Synthetic oligonucleotide
  Antisense strand to SEQ ID NO: 791328
auguauagccacuucugcu

SEQ ID NO: 791330 - RNA, 19 nt, Artificial Sequence
  Description of Artificial Sequence: Synthetic oligonucleotide
  Sense strand starting at position 2159 of SEQ ID NO: 587426
ucagcaacaugagauauaa

SEQ ID NO: 791331 - RNA, 19 nt, Artificial Sequence
  Description of Artificial Sequence: Synthetic oligonucleotide
  Antisense strand to SEQ ID NO: 791330
uuauaucucauguugcuga

SEQ ID NO: 791332 - RNA, 19 nt, Artificial Sequence
  Description of Artificial Sequence: Synthetic oligonucleotide
  Sense strand starting at position 2179 of SEQ ID NO: 587426
aguuguaaauaugugugaa

SEQ ID NO: 791333 - RNA, 19 nt, Artificial Sequence
  Description of Artificial Sequence: Synthetic oligonucleotide
  Antisense strand to SEQ ID NO: 791332
uucacacauauuuacaacu

SEQ ID NO: 791334 - RNA, 19 nt, Artificial Sequence
  Description of Artificial Sequence: Synthetic oligonucleotide
  Sense strand starting at position 2180 of SEQ ID NO: 587426
guuguaaauaugugugaac

SEQ ID NO: 791335 - RNA, 19 nt, Artificial Sequence
  Description of Artificial Sequence: Synthetic oligonucleotide
  Antisense strand to SEQ ID NO: 791334
guucacacauauuuacaac

SEQ ID NO: 791336 - RNA, 19 nt, Artificial Sequence
  Description of Artificial Sequence: Synthetic oligonucleotide
  Sense strand starting at position 2183 of SEQ ID NO: 587426
guaaauaugugugaaccca

SEQ ID NO: 791337 - RNA, 19 nt, Artificial Sequence
  Description of Artificial Sequence: Synthetic oligonucleotide
  Antisense strand to SEQ ID NO: 791336
uggguucacacauauuuac

SEQ ID NO: 791338 - RNA, 19 nt, Artificial Sequence
  Description of Artificial Sequence: Synthetic oligonucleotide
  Sense strand starting at position 2191 of SEQ ID NO: 587426
gugugaacccaauauagca

SEQ ID NO: 791339 - RNA, 19 nt, Artificial Sequence
  Description of Artificial Sequence: Synthetic oligonucleotide
  Antisense strand to SEQ ID NO: 791338
ugcuauauuggguucacac

SEQ ID NO: 791340 - RNA, 19 nt, Artificial Sequence
  Description of Artificial Sequence: Synthetic oligonucleotide
  Sense strand starting at position 2430 of SEQ ID NO: 587426
uucuccagguuagauuaua

SEQ ID NO: 791341 - RNA, 19 nt, Artificial Sequence
  Description of Artificial Sequence: Synthetic oligonucleotide
  Antisense strand to SEQ ID NO: 791340
uauaaucuaaccuggagaa

SEQ ID NO: 791342 - RNA, 19 nt, Artificial Sequence
  Description of Artificial Sequence: Synthetic oligonucleotide
  Sense strand starting at position 2435 of SEQ ID NO: 587426
cagguuagauuauauauga

SEQ ID NO: 791343 - RNA, 19 nt, Artificial Sequence
  Description of Artificial Sequence: Synthetic oligonucleotide
  Antisense strand to SEQ ID NO: 791342
ucauauauaaucuaaccug

SEQ ID NO: 791344 - RNA, 19 nt, Artificial Sequence
  Description of Artificial Sequence: Synthetic oligonucleotide
  Sense strand starting at position 2480 of SEQ ID NO: 587426
cuagaagacugagauaauu

SEQ ID NO: 791345 - RNA, 19 nt, Artificial Sequence
  Description of Artificial Sequence: Synthetic oligonucleotide
  Antisense strand to SEQ ID NO: 791344
aauuaucucagucuucuag

SEQ ID NO: 791346 - RNA, 19 nt, Artificial Sequence
  Description of Artificial Sequence: Synthetic oligonucleotide
  Sense strand starting at position 2488 of SEQ ID NO: 587426
cugagauaauuacaaguau

SEQ ID NO: 791347 - RNA, 19 nt, Artificial Sequence
  Description of Artificial Sequence: Synthetic oligonucleotide
  Antisense strand to SEQ ID NO: 791346
auacuuguaauuaucucag

SEQ ID NO: 791348 - RNA, 19 nt, Artificial Sequence
  Description of Artificial Sequence: Synthetic oligonucleotide
  Sense strand starting at position 2714 of SEQ ID NO: 587426
uuaugcuuggauuguuaga

SEQ ID NO: 791349 - RNA, 19 nt, Artificial Sequence
  Description of Artificial Sequence: Synthetic oligonucleotide
  Antisense strand to SEQ ID NO: 791348
ucuaacaauccaagcauaa

SEQ ID NO: 791350 - RNA, 19 nt, Artificial Sequence
  Description of Artificial Sequence: Synthetic oligonucleotide
  Sense strand starting at position 2716 of SEQ ID NO: 587426
augcuuggauuguuagaga

SEQ ID NO: 791351 - RNA, 19 nt, Artificial Sequence
  Description of Artificial Sequence: Synthetic oligonucleotide
  Antisense strand to SEQ ID NO: 791350
ucucuaacaauccaagcau

SEQ ID NO: 791352 - RNA, 19 nt, Artificial Sequence
  Description of Artificial Sequence: Synthetic oligonucleotide
  Sense strand starting at position 3660 of SEQ ID NO: 587426
guguauagccaguaauagg

SEQ ID NO: 791353 - RNA, 19 nt, Artificial Sequence
  Description of Artificial Sequence: Synthetic oligonucleotide
  Antisense strand to SEQ ID NO: 791352
ccuauuacuggcuauacac

SEQ ID NO: 791354 - RNA, 19 nt, Artificial Sequence
  Description of Artificial Sequence: Synthetic oligonucleotide
  Sense strand starting at position 64 of SEQ ID NO: 587427
gacuacagaacguguggua

SEQ ID NO: 791355 - RNA, 19 nt, Artificial Sequence
  Description of Artificial Sequence: Synthetic oligonucleotide
  Antisense strand to SEQ ID NO: 791354
uaccacacguucuguaguc

SEQ ID NO: 791356 - RNA, 19 nt, Artificial Sequence
  Description of Artificial Sequence: Synthetic oligonucleotide
  Sense strand starting at position 454 of SEQ ID NO: 587427
acugauacucauugacugu

SEQ ID NO: 791357 - RNA, 19 nt, Artificial Sequence
  Description of Artificial Sequence: Synthetic oligonucleotide
  Antisense strand to SEQ ID NO: 791356
acagucaaugaguaucagu

SEQ ID NO: 791358 - RNA, 19 nt, Artificial Sequence
  Description of Artificial Sequence: Synthetic oligonucleotide
  Sense strand starting at position 461 of SEQ ID NO: 587427
cucauugacugucuacuau

SEQ ID NO: 791359 - RNA, 19 nt, Artificial Sequence
  Description of Artificial Sequence: Synthetic oligonucleotide
  Antisense strand to SEQ ID NO: 791358
auaguagacagucaaugag

SEQ ID NO: 791360 - RNA, 19 nt, Artificial Sequence
  Description of Artificial Sequence: Synthetic oligonucleotide
  Sense strand starting at position 768 of SEQ ID NO: 587427
gcaggaauauccuuugaga

SEQ ID NO: 791361 - RNA, 19 nt, Artificial Sequence
  Description of Artificial Sequence: Synthetic oligonucleotide
  Antisense strand to SEQ ID NO: 791360
ucucaaaggauauuccugc

SEQ ID NO: 791362 - RNA, 19 nt, Artificial Sequence
  Description of Artificial Sequence: Synthetic oligonucleotide
  Sense strand starting at position 925 of SEQ ID NO: 587427
ucaugagcuugcccauaaa

SEQ ID NO: 791363 - RNA, 19 nt, Artificial Sequence
  Description of Artificial Sequence: Synthetic oligonucleotide
  Antisense strand to SEQ ID NO: 791362
uuuaugggcaagcucauga

SEQ ID NO: 791364 - RNA, 19 nt, Artificial Sequence
  Description of Artificial Sequence: Synthetic oligonucleotide
  Sense strand starting at position 928 of SEQ ID NO: 587427
ugagcuugcccauaaacuu

SEQ ID NO: 791365 - RNA, 19 nt, Artificial Sequence
  Description of Artificial Sequence: Synthetic oligonucleotide
  Antisense strand to SEQ ID NO: 791364
aaguuuaugggcaagcuca

SEQ ID NO: 791366 - RNA, 19 nt, Artificial Sequence
  Description of Artificial Sequence: Synthetic oligonucleotide
  Sense strand starting at position 1008 of SEQ ID NO: 587427
auuuauaggucucagucaa

SEQ ID NO: 791367 - RNA, 19 nt, Artificial Sequence
  Description of Artificial Sequence: Synthetic oligonucleotide
  Antisense strand to SEQ ID NO: 791366
uugacugagaccuauaaau

SEQ ID NO: 791368 - RNA, 19 nt, Artificial Sequence
  Description of Artificial Sequence: Synthetic oligonucleotide
  Sense strand starting at position 1100 of SEQ ID NO: 587427
ucaagacaauguucgauca

SEQ ID NO: 791369 - RNA, 19 nt, Artificial Sequence
  Description of Artificial Sequence: Synthetic oligonucleotide
  Antisense strand to SEQ ID NO: 791368
ugaucgaacauugucuuga

SEQ ID NO: 791370 - RNA, 19 nt, Artificial Sequence
  Description of Artificial Sequence: Synthetic oligonucleotide
  Sense strand starting at position 1112 of SEQ ID NO: 587427
ucgaucaccucacuggaau

SEQ ID NO: 791371 - RNA, 19 nt, Artificial Sequence
  Description of Artificial Sequence: Synthetic oligonucleotide
  Antisense strand to SEQ ID NO: 791370
auuccagugaggugaucga

SEQ ID NO: 791372 - RNA, 19 nt, Artificial Sequence
  Description of Artificial Sequence: Synthetic oligonucleotide
  Sense strand starting at position 1162 of SEQ ID NO: 587427
acuacucccguuuaauaga

SEQ ID NO: 791373 - RNA, 19 nt, Artificial Sequence
  Description of Artificial Sequence: Synthetic oligonucleotide
  Antisense strand to SEQ ID NO: 791372
ucuauuaaacgggaguagu

SEQ ID NO: 791374 - RNA, 19 nt, Artificial Sequence
  Description of Artificial Sequence: Synthetic oligonucleotide
  Sense strand starting at position 1169 of SEQ ID NO: 587427
ccguuuaauagaugagguu

SEQ ID NO: 791375 - RNA, 19 nt, Artificial Sequence
  Description of Artificial Sequence: Synthetic oligonucleotide
  Antisense strand to SEQ ID NO: 791374
aaccucaucuauuaaacgg

SEQ ID NO: 791376 - RNA, 19 nt, Artificial Sequence
  Description of Artificial Sequence: Synthetic oligonucleotide
  Sense strand starting at position 1341 of SEQ ID NO: 587427
aguaucuuacgcuacuuua

SEQ ID NO: 791377 - RNA, 19 nt, Artificial Sequence
  Description of Artificial Sequence: Synthetic oligonucleotide
  Antisense strand to SEQ ID NO: 791376
uaaaguagcguaagauacu

SEQ ID NO: 791378 - RNA, 19 nt, Artificial Sequence
  Description of Artificial Sequence: Synthetic oligonucleotide
  Sense strand starting at position 1488 of SEQ ID NO: 587427
gaggcaauguauccucauu

SEQ ID NO: 791379 - RNA, 19 nt, Artificial Sequence
  Description of Artificial Sequence: Synthetic oligonucleotide
  Antisense strand to SEQ ID NO: 791378
aaugaggauacauugccuc

SEQ ID NO: 791380 - RNA, 19 nt, Artificial Sequence
  Description of Artificial Sequence: Synthetic oligonucleotide
  Sense strand starting at position 1490 of SEQ ID NO: 587427
ggcaauguauccucauuaa

SEQ ID NO: 791381 - RNA, 19 nt, Artificial Sequence
  Description of Artificial Sequence: Synthetic oligonucleotide
  Antisense strand to SEQ ID NO: 791380
uuaaugaggauacauugcc

SEQ ID NO: 791382 - RNA, 19 nt, Artificial Sequence
  Description of Artificial Sequence: Synthetic oligonucleotide
  Sense strand starting at position 1544 of SEQ ID NO: 587427
gaaugagagcucugccaug

SEQ ID NO: 791383 - RNA, 19 nt, Artificial Sequence
  Description of Artificial Sequence: Synthetic oligonucleotide
  Antisense strand to SEQ ID NO: 791382
cauggcagagcucucauuc

SEQ ID NO: 791384 - RNA, 19 nt, Artificial Sequence
  Description of Artificial Sequence: Synthetic oligonucleotide
  Sense strand starting at position 1640 of SEQ ID NO: 587427
guugaaauucucgguaaac

SEQ ID NO: 791385 - RNA, 19 nt, Artificial Sequence
  Description of Artificial Sequence: Synthetic oligonucleotide
  Antisense strand to SEQ ID NO: 791384
guuuaccgagaauuucaac

SEQ ID NO: 791386 - RNA, 19 nt, Artificial Sequence
  Description of Artificial Sequence: Synthetic oligonucleotide
  Sense strand starting at position 1641 of SEQ ID NO: 587427
uugaaauucucgguaaacu

SEQ ID NO: 791387 - RNA, 19 nt, Artificial Sequence
  Description of Artificial Sequence: Synthetic oligonucleotide
  Antisense strand to SEQ ID NO: 791386
aguuuaccgagaauuucaa

SEQ ID NO: 791388 - RNA, 19 nt, Artificial Sequence
  Description of Artificial Sequence: Synthetic oligonucleotide
  Sense strand starting at position 1642 of SEQ ID NO: 587427
ugaaauucucgguaaacug

SEQ ID NO: 791389 - RNA, 19 nt, Artificial Sequence
  Description of Artificial Sequence: Synthetic oligonucleotide
  Antisense strand to SEQ ID NO: 791388
caguuuaccgagaauuuca

SEQ ID NO: 791390 - RNA, 19 nt, Artificial Sequence
  Description of Artificial Sequence: Synthetic oligonucleotide
  Sense strand starting at position 1719 of SEQ ID NO: 587427
aaucuauguucgguacaua

SEQ ID NO: 791391 - RNA, 19 nt, Artificial Sequence
  Description of Artificial Sequence: Synthetic oligonucleotide
  Antisense strand to SEQ ID NO: 791390
uauguaccgaacauagauu

SEQ ID NO: 791392 - RNA, 19 nt, Artificial Sequence
  Description of Artificial Sequence: Synthetic oligonucleotide
  Sense strand starting at position 1720 of SEQ ID NO: 587427
aucuauguucgguacauac

SEQ ID NO: 791393 - RNA, 19 nt, Artificial Sequence
  Description of Artificial Sequence: Synthetic oligonucleotide
  Antisense strand to SEQ ID NO: 791392
guauguaccgaacauagau

SEQ ID NO: 791394 - RNA, 19 nt, Artificial Sequence
  Description of Artificial Sequence: Synthetic oligonucleotide
  Sense strand starting at position 1722 of SEQ ID NO: 587427
cuauguucgguacauacua

SEQ ID NO: 791395 - RNA, 19 nt, Artificial Sequence
  Description of Artificial Sequence: Synthetic oligonucleotide
  Antisense strand to SEQ ID NO: 791394
uaguauguaccgaacauag

SEQ ID NO: 791396 - RNA, 19 nt, Artificial Sequence
  Description of Artificial Sequence: Synthetic oligonucleotide
  Sense strand starting at position 1808 of SEQ ID NO: 587427
ucuaguacaguccagaaua

SEQ ID NO: 791397 - RNA, 19 nt, Artificial Sequence
  Description of Artificial Sequence: Synthetic oligonucleotide
  Antisense strand to SEQ ID NO: 791396
uauucuggacuguacuaga

SEQ ID NO: 791398 - RNA, 19 nt, Artificial Sequence
  Description of Artificial Sequence: Synthetic oligonucleotide
  Sense strand starting at position 1834 of SEQ ID NO: 587427
acuauaacucucugaagug

SEQ ID NO: 791399 - RNA, 19 nt, Artificial Sequence
  Description of Artificial Sequence: Synthetic oligonucleotide
  Antisense strand to SEQ ID NO: 791398
cacuucagagaguuauagu

SEQ ID NO: 791400 - RNA, 19 nt, Artificial Sequence
  Description of Artificial Sequence: Synthetic oligonucleotide
  Sense strand starting at position 2015 of SEQ ID NO: 587427
gagucaggcccucaaguau

SEQ ID NO: 791401 - RNA, 19 nt, Artificial Sequence
  Description of Artificial Sequence: Synthetic oligonucleotide
  Antisense strand to SEQ ID NO: 791400
auacuugagggccugacuc

SEQ ID NO: 791402 - RNA, 19 nt, Artificial Sequence
  Description of Artificial Sequence: Synthetic oligonucleotide
  Sense strand starting at position 2062 of SEQ ID NO: 587427
ggaguaaggucuccagaau

SEQ ID NO: 791403 - RNA, 19 nt, Artificial Sequence
  Description of Artificial Sequence: Synthetic oligonucleotide
  Antisense strand to SEQ ID NO: 791402
auucuggagaccuuacucc

SEQ ID NO: 791404 - RNA, 19 nt, Artificial Sequence
  Description of Artificial Sequence: Synthetic oligonucleotide
  Sense strand starting at position 2122 of SEQ ID NO: 587427
ucagauuacccacgugaaa

SEQ ID NO: 791405 - RNA, 19 nt, Artificial Sequence
  Description of Artificial Sequence: Synthetic oligonucleotide
  Antisense strand to SEQ ID NO: 791404
uuucacguggguaaucuga

SEQ ID NO: 791406 - RNA, 19 nt, Artificial Sequence
  Description of Artificial Sequence: Synthetic oligonucleotide
  Sense strand starting at position 3139 of SEQ ID NO: 587427
gacuauugcgagcugcuuu

SEQ ID NO: 791407 - RNA, 19 nt, Artificial Sequence
  Description of Artificial Sequence: Synthetic oligonucleotide
  Antisense strand to SEQ ID NO: 791406
aaagcagcucgcaauaguc

SEQ ID NO: 791408 - RNA, 19 nt, Artificial Sequence
  Description of Artificial Sequence: Synthetic oligonucleotide
  Sense strand starting at position 3187 of SEQ ID NO: 587427
gccagaugucccuacuuuc

SEQ ID NO: 791409 - RNA, 19 nt, Artificial Sequence
  Description of Artificial Sequence: Synthetic oligonucleotide
  Antisense strand to SEQ ID NO: 791408
gaaaguagggacaucuggc

SEQ ID NO: 791410 - RNA, 19 nt, Artificial Sequence
  Description of Artificial Sequence: Synthetic oligonucleotide
  Sense strand starting at position 3269 of SEQ ID NO: 587427
gucagaugcgaccaaggaa

SEQ ID NO: 791411 - RNA, 19 nt, Artificial Sequence
  Description of Artificial Sequence: Synthetic oligonucleotide
  Antisense strand to SEQ ID NO: 791410
uuccuuggucgcaucugac

SEQ ID NO: 791412 - RNA, 19 nt, Artificial Sequence
  Description of Artificial Sequence: Synthetic oligonucleotide
  Sense strand starting at position 3387 of SEQ ID NO: 587427
guggaaugcugaguuuaau

SEQ ID NO: 791413 - RNA, 19 nt, Artificial Sequence
  Description of Artificial Sequence: Synthetic oligonucleotide
  Antisense strand to SEQ ID NO: 791412
auuaaacucagcauuccac

SEQ ID NO: 791414 - RNA, 19 nt, Artificial Sequence
  Description of Artificial Sequence: Synthetic oligonucleotide
  Sense strand starting at position 3486 of SEQ ID NO: 587427
augcauuuguuccucacau

SEQ ID NO: 791415 - RNA, 19 nt, Artificial Sequence
  Description of Artificial Sequence: Synthetic oligonucleotide
  Antisense strand to SEQ ID NO: 791414
augugaggaacaaaugcau

SEQ ID NO: 791416 - RNA, 19 nt, Artificial Sequence
  Description of Artificial Sequence: Synthetic oligonucleotide
  Sense strand starting at position 3487 of SEQ ID NO: 587427
ugcauuuguuccucacaug

SEQ ID NO: 791417 - RNA, 19 nt, Artificial Sequence
  Description of Artificial Sequence: Synthetic oligonucleotide
  Antisense strand to SEQ ID NO: 791416
caugugaggaacaaaugca

SEQ ID NO: 791418 - RNA, 19 nt, Artificial Sequence
  Description of Artificial Sequence: Synthetic oligonucleotide
  Sense strand starting at position 3532 of SEQ ID NO: 587427
cugagauguucuuuccuuc

SEQ ID NO: 791419 - RNA, 19 nt, Artificial Sequence
  Description of Artificial Sequence: Synthetic oligonucleotide
  Antisense strand to SEQ ID NO: 791418
gaaggaaagaacaucucag

SEQ ID NO: 791420 - RNA, 19 nt, Artificial Sequence
  Description of Artificial Sequence: Synthetic oligonucleotide
  Sense strand starting at position 3587 of SEQ ID NO: 587427
ucuuguaugcuaugaaagg

SEQ ID NO: 791421 - RNA, 19 nt, Artificial Sequence
  Description of Artificial Sequence: Synthetic oligonucleotide
  Antisense strand to SEQ ID NO: 791420
ccuuucauagcauacaaga

SEQ ID NO: 791422 - RNA, 19 nt, Artificial Sequence
  Description of Artificial Sequence: Synthetic oligonucleotide
  Sense strand starting at position 3887 of SEQ ID NO: 587427
acgggaaagauguguuuau

SEQ ID NO: 791423 - RNA, 19 nt, Artificial Sequence
  Description of Artificial Sequence: Synthetic oligonucleotide
  Antisense strand to SEQ ID NO: 791422
auaaacacaucuuucccgu

SEQ ID NO: 791424 - RNA, 19 nt, Artificial Sequence
  Description of Artificial Sequence: Synthetic oligonucleotide
  Sense strand starting at position 3888 of SEQ ID NO: 587427
cgggaaagauguguuuaug

SEQ ID NO: 791425 - RNA, 19 nt, Artificial Sequence
  Description of Artificial Sequence: Synthetic oligonucleotide
  Antisense strand to SEQ ID NO: 791424
cauaaacacaucuuucccg

SEQ ID NO: 791426 - RNA, 19 nt, Artificial Sequence
  Description of Artificial Sequence: Synthetic oligonucleotide
  Sense strand starting at position 3891 of SEQ ID NO: 587427
gaaagauguguuuauggcu

SEQ ID NO: 791427 - RNA, 19 nt, Artificial Sequence
  Description of Artificial Sequence: Synthetic oligonucleotide
  Antisense strand to SEQ ID NO: 791426
agccauaaacacaucuuuc

SEQ ID NO: 791428 - RNA, 19 nt, Artificial Sequence
  Description of Artificial Sequence: Synthetic oligonucleotide
  Sense strand starting at position 3917 of SEQ ID NO: 587427
uggaaugguucuguguaaa

SEQ ID NO: 791429 - RNA, 19 nt, Artificial Sequence
  Description of Artificial Sequence: Synthetic oligonucleotide
  Antisense strand to SEQ ID NO: 791428
uuuacacagaaccauucca

SEQ ID NO: 791430 - RNA, 19 nt, Artificial Sequence
  Description of Artificial Sequence: Synthetic oligonucleotide
  Sense strand starting at position 3920 of SEQ ID NO: 587427
aaugguucuguguaaaguu

SEQ ID NO: 791431 - RNA, 19 nt, Artificial Sequence
  Description of Artificial Sequence: Synthetic oligonucleotide
  Antisense strand to SEQ ID NO: 791430
aacuuuacacagaaccauu

SEQ ID NO: 791432 - RNA, 19 nt, Artificial Sequence
  Description of Artificial Sequence: Synthetic oligonucleotide
  Sense strand starting at position 3927 of SEQ ID NO: 587427
cuguguaaaguuggguaaa

SEQ ID NO: 791433 - RNA, 19 nt, Artificial Sequence
  Description of Artificial Sequence: Synthetic oligonucleotide
  Antisense strand to SEQ ID NO: 791432
uuuacccaacuuuacacag

SEQ ID NO: 791434 - RNA, 19 nt, Artificial Sequence
  Description of Artificial Sequence: Synthetic oligonucleotide
  Sense strand starting at position 217 of SEQ ID NO: 587428
gcaggaauauccuuugaga

SEQ ID NO: 791435 - RNA, 19 nt, Artificial Sequence
  Description of Artificial Sequence: Synthetic oligonucleotide
  Antisense strand to SEQ ID NO: 791434
ucucaaaggauauuccugc

SEQ ID NO: 791436 - RNA, 19 nt, Artificial Sequence
  Description of Artificial Sequence: Synthetic oligonucleotide
  Sense strand starting at position 374 of SEQ ID NO: 587428
ucaugagcuugcccauaaa

SEQ ID NO: 791437 - RNA, 19 nt, Artificial Sequence
  Description of Artificial Sequence: Synthetic oligonucleotide
  Antisense strand to SEQ ID NO: 791436
uuuaugggcaagcucauga

SEQ ID NO: 791438 - RNA, 19 nt, Artificial Sequence
  Description of Artificial Sequence: Synthetic oligonucleotide
  Sense strand starting at position 377 of SEQ ID NO: 587428
ugagcuugcccauaaacuu

SEQ ID NO: 791439 - RNA, 19 nt, Artificial Sequence
  Description of Artificial Sequence: Synthetic oligonucleotide
  Antisense strand to SEQ ID NO: 791438
aaguuuaugggcaagcuca

SEQ ID NO: 791440 - RNA, 19 nt, Artificial Sequence
  Description of Artificial Sequence: Synthetic oligonucleotide
  Sense strand starting at position 457 of SEQ ID NO: 587428
auuuauaggucucagucaa

SEQ ID NO: 791441 - RNA, 19 nt, Artificial Sequence
  Description of Artificial Sequence: Synthetic oligonucleotide
  Antisense strand to SEQ ID NO: 791440
uugacugagaccuauaaau

SEQ ID NO: 791442 - RNA, 19 nt, Artificial Sequence
  Description of Artificial Sequence: Synthetic oligonucleotide
  Sense strand starting at position 549 of SEQ ID NO: 587428
ucaagacaauguucgauca

SEQ ID NO: 791443 - RNA, 19 nt, Artificial Sequence
  Description of Artificial Sequence: Synthetic oligonucleotide
  Antisense strand to SEQ ID NO: 791442
ugaucgaacauugucuuga

SEQ ID NO: 791444 - RNA, 19 nt, Artificial Sequence
  Description of Artificial Sequence: Synthetic oligonucleotide
  Sense strand starting at position 561 of SEQ ID NO: 587428
ucgaucaccucacuggaau

SEQ ID NO: 791445 - RNA, 19 nt, Artificial Sequence
  Description of Artificial Sequence: Synthetic oligonucleotide
  Antisense strand to SEQ ID NO: 791444
auuccagugaggugaucga

SEQ ID NO: 791446 - RNA, 19 nt, Artificial Sequence
  Description of Artificial Sequence: Synthetic oligonucleotide
  Sense strand starting at position 611 of SEQ ID NO: 587428
acuacucccguuuaauaga

SEQ ID NO: 791447 - RNA, 19 nt, Artificial Sequence
  Description of Artificial Sequence: Synthetic oligonucleotide
  Antisense strand to SEQ ID NO: 791446
ucuauuaaacgggaguagu

SEQ ID NO: 791448 - RNA, 19 nt, Artificial Sequence
  Description of Artificial Sequence: Synthetic oligonucleotide
  Sense strand starting at position 618 of SEQ ID NO: 587428
ccguuuaauagaugagguu

SEQ ID NO: 791449 - RNA, 19 nt, Artificial Sequence
  Description of Artificial Sequence: Synthetic oligonucleotide
  Antisense strand to SEQ ID NO: 791448
aaccucaucuauuaaacgg

SEQ ID NO: 791450 - RNA, 19 nt, Artificial Sequence
  Description of Artificial Sequence: Synthetic oligonucleotide
  Sense strand starting at position 790 of SEQ ID NO: 587428
aguaucuuacgcuacuuua

SEQ ID NO: 791451 - RNA, 19 nt, Artificial Sequence
  Description of Artificial Sequence: Synthetic oligonucleotide
  Antisense strand to SEQ ID NO: 791450
uaaaguagcguaagauacu

SEQ ID NO: 791452 - RNA, 19 nt, Artificial Sequence
  Description of Artificial Sequence: Synthetic oligonucleotide
  Sense strand starting at position 937 of SEQ ID NO: 587428
gaggcaauguauccucauu

SEQ ID NO: 791453 - RNA, 19 nt, Artificial Sequence
  Description of Artificial Sequence: Synthetic oligonucleotide
  Antisense strand to SEQ ID NO: 791452
aaugaggauacauugccuc

SEQ ID NO: 791454 - RNA, 19 nt, Artificial Sequence
  Description of Artificial Sequence: Synthetic oligonucleotide
  Sense strand starting at position 939 of SEQ ID NO: 587428
ggcaauguauccucauuaa

SEQ ID NO: 791455 - RNA, 19 nt, Artificial Sequence
  Description of Artificial Sequence: Synthetic oligonucleotide
  Antisense strand to SEQ ID NO: 791454
uuaaugaggauacauugcc

SEQ ID NO: 791456 - RNA, 19 nt, Artificial Sequence
  Description of Artificial Sequence: Synthetic oligonucleotide
  Sense strand starting at position 973 of SEQ ID NO: 587428
ugacaacucuaggaaauca

SEQ ID NO: 791457 - RNA, 19 nt, Artificial Sequence
  Description of Artificial Sequence: Synthetic oligonucleotide
  Antisense strand to SEQ ID NO: 791456
ugauuuccuagaguuguca

SEQ ID NO: 791458 - RNA, 19 nt, Artificial Sequence
  Description of Artificial Sequence: Synthetic oligonucleotide
  Sense strand starting at position 993 of SEQ ID NO: 587428
gaaugagagcucugccaug

SEQ ID NO: 791459 - RNA, 19 nt, Artificial Sequence
  Description of Artificial Sequence: Synthetic oligonucleotide
  Antisense strand to SEQ ID NO: 791458
cauggcagagcucucauuc

SEQ ID NO: 791460 - RNA, 19 nt, Artificial Sequence
  Description of Artificial Sequence: Synthetic oligonucleotide
  Sense strand starting at position 1089 of SEQ ID NO: 587428
guugaaauucucgguaaac

SEQ ID NO: 791461 - RNA, 19 nt, Artificial Sequence
  Description of Artificial Sequence: Synthetic oligonucleotide
  Antisense strand to SEQ ID NO: 791460
guuuaccgagaauuucaac

SEQ ID NO: 791462 - RNA, 19 nt, Artificial Sequence
  Description of Artificial Sequence: Synthetic oligonucleotide
  Sense strand starting at position 1090 of SEQ ID NO: 587428
uugaaauucucgguaaacu

SEQ ID NO: 791463 - RNA, 19 nt, Artificial Sequence
  Description of Artificial Sequence: Synthetic oligonucleotide
  Antisense strand to SEQ ID NO: 791462
aguuuaccgagaauuucaa

SEQ ID NO: 791464 - RNA, 19 nt, Artificial Sequence
  Description of Artificial Sequence: Synthetic oligonucleotide
  Sense strand starting at position 1091 of SEQ ID NO: 587428
ugaaauucucgguaaacug

SEQ ID NO: 791465 - RNA, 19 nt, Artificial Sequence
  Description of Artificial Sequence: Synthetic oligonucleotide
  Antisense strand to SEQ ID NO: 791464
caguuuaccgagaauuuca

SEQ ID NO: 791466 - RNA, 19 nt, Artificial Sequence
  Description of Artificial Sequence: Synthetic oligonucleotide
  Sense strand starting at position 1168 of SEQ ID NO: 587428
aaucuauguucgguacaua

SEQ ID NO: 791467 - RNA, 19 nt, Artificial Sequence
  Description of Artificial Sequence: Synthetic oligonucleotide
  Antisense strand to SEQ ID NO: 791466
uauguaccgaacauagauu

SEQ ID NO: 791468 - RNA, 19 nt, Artificial Sequence
  Description of Artificial Sequence: Synthetic oligonucleotide
  Sense strand starting at position 1169 of SEQ ID NO: 587428
aucuauguucgguacauac

SEQ ID NO: 791469 - RNA, 19 nt, Artificial Sequence
  Description of Artificial Sequence: Synthetic oligonucleotide
  Antisense strand to SEQ ID NO: 791468
guauguaccgaacauagau

SEQ ID NO: 791470 - RNA, 19 nt, Artificial Sequence
  Description of Artificial Sequence: Synthetic oligonucleotide
  Sense strand starting at position 1171 of SEQ ID NO: 587428
cuauguucgguacauacua

SEQ ID NO: 791471 - RNA, 19 nt, Artificial Sequence
  Description of Artificial Sequence: Synthetic oligonucleotide
  Antisense strand to SEQ ID NO: 791470
uaguauguaccgaacauag

SEQ ID NO: 791472 - RNA, 19 nt, Artificial Sequence
  Description of Artificial Sequence: Synthetic oligonucleotide
  Sense strand starting at position 1257 of SEQ ID NO: 587428
ucuaguacaguccagaaua

SEQ ID NO: 791473 - RNA, 19 nt, Artificial Sequence
  Description of Artificial Sequence: Synthetic oligonucleotide
  Antisense strand to SEQ ID NO: 791472
uauucuggacuguacuaga

SEQ ID NO: 791474 - RNA, 19 nt, Artificial Sequence
  Description of Artificial Sequence: Synthetic oligonucleotide
  Sense strand starting at position 1283 of SEQ ID NO: 587428
acuauaacucucugaagug

SEQ ID NO: 791475 - RNA, 19 nt, Artificial Sequence
  Description of Artificial Sequence: Synthetic oligonucleotide
  Antisense strand to SEQ ID NO: 791474
cacuucagagaguuauagu

SEQ ID NO: 791476 - RNA, 19 nt, Artificial Sequence
  Description of Artificial Sequence: Synthetic oligonucleotide
  Sense strand starting at position 1464 of SEQ ID NO: 587428
gagucaggcccucaaguau

SEQ ID NO: 791477 - RNA, 19 nt, Artificial Sequence
  Description of Artificial Sequence: Synthetic oligonucleotide
  Antisense strand to SEQ ID NO: 791476
auacuugagggccugacuc

SEQ ID NO: 791478 - RNA, 19 nt, Artificial Sequence
  Description of Artificial Sequence: Synthetic oligonucleotide
  Sense strand starting at position 1511 of SEQ ID NO: 587428
ggaguaaggucuccagaau

SEQ ID NO: 791479 - RNA, 19 nt, Artificial Sequence
  Description of Artificial Sequence: Synthetic oligonucleotide
  Antisense strand to SEQ ID NO: 791478
auucuggagaccuuacucc

SEQ ID NO: 791480 - RNA, 19 nt, Artificial Sequence
  Description of Artificial Sequence: Synthetic oligonucleotide
  Sense strand starting at position 1571 of SEQ ID NO: 587428
ucagauuacccacgugaaa

SEQ ID NO: 791481 - RNA, 19 nt, Artificial Sequence
  Description of Artificial Sequence: Synthetic oligonucleotide
  Antisense strand to SEQ ID NO: 791480
uuucacguggguaaucuga

SEQ ID NO: 791482 - RNA, 19 nt, Artificial Sequence
  Description of Artificial Sequence: Synthetic oligonucleotide
  Sense strand starting at position 2588 of SEQ ID NO: 587428
gacuauugcgagcugcuuu

SEQ ID NO: 791483 - RNA, 19 nt, Artificial Sequence
  Description of Artificial Sequence: Synthetic oligonucleotide
  Antisense strand to SEQ ID NO: 791482
aaagcagcucgcaauaguc

SEQ ID NO: 791484 - RNA, 19 nt, Artificial Sequence
  Description of Artificial Sequence: Synthetic oligonucleotide
  Sense strand starting at position 2636 of SEQ ID NO: 587428
gccagaugucccuacuuuc

SEQ ID NO: 791485 - RNA, 19 nt, Artificial Sequence
  Description of Artificial Sequence: Synthetic oligonucleotide
  Antisense strand to SEQ ID NO: 791484
gaaaguagggacaucuggc

SEQ ID NO: 791486 - RNA, 19 nt, Artificial Sequence
  Description of Artificial Sequence: Synthetic oligonucleotide
  Sense strand starting at position 2718 of SEQ ID NO: 587428
gucagaugcgaccaaggaa

SEQ ID NO: 791487 - RNA, 19 nt, Artificial Sequence
  Description of Artificial Sequence: Synthetic oligonucleotide
  Antisense strand to SEQ ID NO: 791486
uuccuuggucgcaucugac

SEQ ID NO: 791488 - RNA, 19 nt, Artificial Sequence
  Description of Artificial Sequence: Synthetic oligonucleotide
  Sense strand starting at position 2836 of SEQ ID NO: 587428
guggaaugcugaguuuaau

SEQ ID NO: 791489 - RNA, 19 nt, Artificial Sequence
  Description of Artificial Sequence: Synthetic oligonucleotide
  Antisense strand to SEQ ID NO: 791488
auuaaacucagcauuccac

SEQ ID NO: 791490 - RNA, 19 nt, Artificial Sequence
  Description of Artificial Sequence: Synthetic oligonucleotide
  Sense strand starting at position 2935 of SEQ ID NO: 587428
augcauuuguuccucacau

SEQ ID NO: 791491 - RNA, 19 nt, Artificial Sequence
  Description of Artificial Sequence: Synthetic oligonucleotide
  Antisense strand to SEQ ID NO: 791490
augugaggaacaaaugcau

SEQ ID NO: 791492 - RNA, 19 nt, Artificial Sequence
  Description of Artificial Sequence: Synthetic oligonucleotide
  Sense strand starting at position 2936 of SEQ ID NO: 587428
ugcauuuguuccucacaug

SEQ ID NO: 791493 - RNA, 19 nt, Artificial Sequence
  Description of Artificial Sequence: Synthetic oligonucleotide
  Antisense strand to SEQ ID NO: 791492
caugugaggaacaaaugca

SEQ ID NO: 791494 - RNA, 19 nt, Artificial Sequence
  Description of Artificial Sequence: Synthetic oligonucleotide
  Sense strand starting at position 2981 of SEQ ID NO: 587428
cugagauguucuuuccuuc

SEQ ID NO: 791495 - RNA, 19 nt, Artificial Sequence
  Description of Artificial Sequence: Synthetic oligonucleotide
  Antisense strand to SEQ ID NO: 791494
gaaggaaagaacaucucag

SEQ ID NO: 791496 - RNA, 19 nt, Artificial Sequence
  Description of Artificial Sequence: Synthetic oligonucleotide
  Sense strand starting at position 3036 of SEQ ID NO: 587428
ucuuguaugcuaugaaagg

SEQ ID NO: 791497 - RNA, 19 nt, Artificial Sequence
  Description of Artificial Sequence: Synthetic oligonucleotide
  Antisense strand to SEQ ID NO: 791496
ccuuucauagcauacaaga

SEQ ID NO: 791498 - RNA, 19 nt, Artificial Sequence
  Description of Artificial Sequence: Synthetic oligonucleotide
  Sense strand starting at position 3336 of SEQ ID NO: 587428
acgggaaagauguguuuau

SEQ ID NO: 791499 - RNA, 19 nt, Artificial Sequence
  Description of Artificial Sequence: Synthetic oligonucleotide
  Antisense strand to SEQ ID NO: 791498
auaaacacaucuuucccgu

SEQ ID NO: 791500 - RNA, 19 nt, Artificial Sequence
  Description of Artificial Sequence: Synthetic oligonucleotide
  Sense strand starting at position 3337 of SEQ ID NO: 587428
cgggaaagauguguuuaug

SEQ ID NO: 791501 - RNA, 19 nt, Artificial Sequence
  Description of Artificial Sequence: Synthetic oligonucleotide
  Antisense strand to SEQ ID NO: 791500
cauaaacacaucuuucccg

SEQ ID NO: 791502 - RNA, 19 nt, Artificial Sequence
  Description of Artificial Sequence: Synthetic oligonucleotide
  Sense strand starting at position 3340 of SEQ ID NO: 587428
gaaagauguguuuauggcu

SEQ ID NO: 791503 - RNA, 19 nt, Artificial Sequence
  Description of Artificial Sequence: Synthetic oligonucleotide
  Antisense strand to SEQ ID NO: 791502
agccauaaacacaucuuuc

SEQ ID NO: 791504 - RNA, 19 nt, Artificial Sequence
  Description of Artificial Sequence: Synthetic oligonucleotide
  Sense strand starting at position 3366 of SEQ ID NO: 587428
uggaaugguucuguguaaa

SEQ ID NO: 791505 - RNA, 19 nt, Artificial Sequence
  Description of Artificial Sequence: Synthetic oligonucleotide
  Antisense strand to SEQ ID NO: 791504
uuuacacagaaccauucca

SEQ ID NO: 791506 - RNA, 19 nt, Artificial Sequence
  Description of Artificial Sequence: Synthetic oligonucleotide
  Sense strand starting at position 3369 of SEQ ID NO: 587428
aaugguucuguguaaaguu

SEQ ID NO: 791507 - RNA, 19 nt, Artificial Sequence
  Description of Artificial Sequence: Synthetic oligonucleotide
  Antisense strand to SEQ ID NO: 791506
aacuuuacacagaaccauu

SEQ ID NO: 791508 - RNA, 19 nt, Artificial Sequence
  Description of Artificial Sequence: Synthetic oligonucleotide
  Sense strand starting at position 3376 of SEQ ID NO: 587428
cuguguaaaguuggguaaa

SEQ ID NO: 791509 - RNA, 19 nt, Artificial Sequence
  Description of Artificial Sequence: Synthetic oligonucleotide
  Antisense strand to SEQ ID NO: 791508
uuuacccaacuuuacacag

SEQ ID NO: 791510 - RNA, 19 nt, Artificial Sequence
  Description of Artificial Sequence: Synthetic oligonucleotide
  Sense strand starting at position 3461 of SEQ ID NO: 587428
aguaguaaugcuugcaaag

SEQ ID NO: 791511 - RNA, 19 nt, Artificial Sequence
  Description of Artificial Sequence: Synthetic oligonucleotide
  Antisense strand to SEQ ID NO: 791510
cuuugcaagcauuacuacu

SEQ ID NO: 791512 - RNA, 19 nt, Artificial Sequence
  Description of Artificial Sequence: Synthetic oligonucleotide
  Sense strand starting at position 3565 of SEQ ID NO: 587428
gcauuacuacaguaucauu

SEQ ID NO: 791513 - RNA, 19 nt, Artificial Sequence
  Description of Artificial Sequence: Synthetic oligonucleotide
  Antisense strand to SEQ ID NO: 791512
aaugauacuguaguaaugc

SEQ ID NO: 791514 - RNA, 19 nt, Artificial Sequence
  Description of Artificial Sequence: Synthetic oligonucleotide
  Sense strand starting at position 2 of SEQ ID NO: 587429
ugagcuugcccauaaacuu

SEQ ID NO: 791515 - RNA, 19 nt, Artificial Sequence
  Description of Artificial Sequence: Synthetic oligonucleotide
  Antisense strand to SEQ ID NO: 791514
aaguuuaugggcaagcuca

SEQ ID NO: 791516 - RNA, 19 nt, Artificial Sequence
  Description of Artificial Sequence: Synthetic oligonucleotide
  Sense strand starting at position 174 of SEQ ID NO: 587429
ucaagacaauguucgauca

SEQ ID NO: 791517 - RNA, 19 nt, Artificial Sequence
  Description of Artificial Sequence: Synthetic oligonucleotide
  Antisense strand to SEQ ID NO: 791516
ugaucgaacauugucuuga

SEQ ID NO: 791518 - RNA, 19 nt, Artificial Sequence
  Description of Artificial Sequence: Synthetic oligonucleotide
  Sense strand starting at position 186 of SEQ ID NO: 587429
ucgaucaccucacuggaau

SEQ ID NO: 791519 - RNA, 19 nt, Artificial Sequence
  Description of Artificial Sequence: Synthetic oligonucleotide
  Antisense strand to SEQ ID NO: 791518
auuccagugaggugaucga

SEQ ID NO: 791520 - RNA, 19 nt, Artificial Sequence
  Description of Artificial Sequence: Synthetic oligonucleotide
  Sense strand starting at position 236 of SEQ ID NO: 587429
acuacucccguuuaauaga

SEQ ID NO: 791521 - RNA, 19 nt, Artificial Sequence
  Description of Artificial Sequence: Synthetic oligonucleotide
  Antisense strand to SEQ ID NO: 791520
ucuauuaaacgggaguagu

SEQ ID NO: 791522 - RNA, 19 nt, Artificial Sequence
  Description of Artificial Sequence: Synthetic oligonucleotide
  Sense strand starting at position 243 of SEQ ID NO: 587429
ccguuuaauagaugagguu

SEQ ID NO: 791523 - RNA, 19 nt, Artificial Sequence
  Description of Artificial Sequence: Synthetic oligonucleotide
  Antisense strand to SEQ ID NO: 791522
aaccucaucuauuaaacgg

SEQ ID NO: 791524 - RNA, 19 nt, Artificial Sequence
  Description of Artificial Sequence: Synthetic oligonucleotide
  Sense strand starting at position 415 of SEQ ID NO: 587429
aguaucuuacgcuacuuua

SEQ ID NO: 791525 - RNA, 19 nt, Artificial Sequence
  Description of Artificial Sequence: Synthetic oligonucleotide
  Antisense strand to SEQ ID NO: 791524
uaaaguagcguaagauacu

SEQ ID NO: 791526 - RNA, 19 nt, Artificial Sequence
  Description of Artificial Sequence: Synthetic oligonucleotide
  Sense strand starting at position 562 of SEQ ID NO: 587429
gaggcaauguauccucauu

SEQ ID NO: 791527 - RNA, 19 nt, Artificial Sequence
  Description of Artificial Sequence: Synthetic oligonucleotide
  Antisense strand to SEQ ID NO: 791526
aaugaggauacauugccuc

SEQ ID NO: 791528 - RNA, 19 nt, Artificial Sequence
  Description of Artificial Sequence: Synthetic oligonucleotide
  Sense strand starting at position 564 of SEQ ID NO: 587429
ggcaauguauccucauuaa

SEQ ID NO: 791529 - RNA, 19 nt, Artificial Sequence
  Description of Artificial Sequence: Synthetic oligonucleotide
  Antisense strand to SEQ ID NO: 791528
uuaaugaggauacauugcc

SEQ ID NO: 791530 - RNA, 19 nt, Artificial Sequence
  Description of Artificial Sequence: Synthetic oligonucleotide
  Sense strand starting at position 618 of SEQ ID NO: 587429
gaaugagagcucugccaug

SEQ ID NO: 791531 - RNA, 19 nt, Artificial Sequence
  Description of Artificial Sequence: Synthetic oligonucleotide
  Antisense strand to SEQ ID NO: 791530
cauggcagagcucucauuc

SEQ ID NO: 791532 - RNA, 19 nt, Artificial Sequence
  Description of Artificial Sequence: Synthetic oligonucleotide
  Sense strand starting at position 714 of SEQ ID NO: 587429
guugaaauucucgguaaac

SEQ ID NO: 791533 - RNA, 19 nt, Artificial Sequence
  Description of Artificial Sequence: Synthetic oligonucleotide
  Antisense strand to SEQ ID NO: 791532
guuuaccgagaauuucaac

SEQ ID NO: 791534 - RNA, 19 nt, Artificial Sequence
  Description of Artificial Sequence: Synthetic oligonucleotide
  Sense strand starting at position 715 of SEQ ID NO: 587429
uugaaauucucgguaaacu

SEQ ID NO: 791535 - RNA, 19 nt, Artificial Sequence
  Description of Artificial Sequence: Synthetic oligonucleotide
  Antisense strand to SEQ ID NO: 791534
aguuuaccgagaauuucaa

SEQ ID NO: 791536 - RNA, 19 nt, Artificial Sequence
  Description of Artificial Sequence: Synthetic oligonucleotide
  Sense strand starting at position 716 of SEQ ID NO: 587429
ugaaauucucgguaaacug

SEQ ID NO: 791537 - RNA, 19 nt, Artificial Sequence
  Description of Artificial Sequence: Synthetic oligonucleotide
  Antisense strand to SEQ ID NO: 791536
caguuuaccgagaauuuca

SEQ ID NO: 791538 - RNA, 19 nt, Artificial Sequence
  Description of Artificial Sequence: Synthetic oligonucleotide
  Sense strand starting at position 793 of SEQ ID NO: 587429
aaucuauguucgguacaua

SEQ ID NO: 791539 - RNA, 19 nt, Artificial Sequence
  Description of Artificial Sequence: Synthetic oligonucleotide
  Antisense strand to SEQ ID NO: 791538
uauguaccgaacauagauu

SEQ ID NO: 791540 - RNA, 19 nt, Artificial Sequence
  Description of Artificial Sequence: Synthetic oligonucleotide
  Sense strand starting at position 794 of SEQ ID NO: 587429
aucuauguucgguacauac

SEQ ID NO: 791541 - RNA, 19 nt, Artificial Sequence
  Description of Artificial Sequence: Synthetic oligonucleotide
  Antisense strand to SEQ ID NO: 791540
guauguaccgaacauagau

SEQ ID NO: 791542 - RNA, 19 nt, Artificial Sequence
  Description of Artificial Sequence: Synthetic oligonucleotide
  Sense strand starting at position 796 of SEQ ID NO: 587429
cuauguucgguacauacua

SEQ ID NO: 791543 - RNA, 19 nt, Artificial Sequence
  Description of Artificial Sequence: Synthetic oligonucleotide
  Antisense strand to SEQ ID NO: 791542
uaguauguaccgaacauag

SEQ ID NO: 791544 - RNA, 19 nt, Artificial Sequence
  Description of Artificial Sequence: Synthetic oligonucleotide
  Sense strand starting at position 882 of SEQ ID NO: 587429
ucuaguacaguccagaaua

SEQ ID NO: 791545 - RNA, 19 nt, Artificial Sequence
  Description of Artificial Sequence: Synthetic oligonucleotide
  Antisense strand to SEQ ID NO: 791544
uauucuggacuguacuaga

SEQ ID NO: 791546 - RNA, 19 nt, Artificial Sequence
  Description of Artificial Sequence: Synthetic oligonucleotide
  Sense strand starting at position 908 of SEQ ID NO: 587429
acuauaacucucugaagug

SEQ ID NO: 791547 - RNA, 19 nt, Artificial Sequence
  Description of Artificial Sequence: Synthetic oligonucleotide
  Antisense strand to SEQ ID NO: 791546
cacuucagagaguuauagu

SEQ ID NO: 791548 - RNA, 19 nt, Artificial Sequence
  Description of Artificial Sequence: Synthetic oligonucleotide
  Sense strand starting at position 1089 of SEQ ID NO: 587429
gagucaggcccucaaguau

SEQ ID NO: 791549 - RNA, 19 nt, Artificial Sequence
  Description of Artificial Sequence: Synthetic oligonucleotide
  Antisense strand to SEQ ID NO: 791548
auacuugagggccugacuc

SEQ ID NO: 791550 - RNA, 19 nt, Artificial Sequence
  Description of Artificial Sequence: Synthetic oligonucleotide
  Sense strand starting at position 1136 of SEQ ID NO: 587429
ggaguaaggucuccagaau

SEQ ID NO: 791551 - RNA, 19 nt, Artificial Sequence
  Description of Artificial Sequence: Synthetic oligonucleotide
  Antisense strand to SEQ ID NO: 791550
auucuggagaccuuacucc

SEQ ID NO: 791552 - RNA, 19 nt, Artificial Sequence
  Description of Artificial Sequence: Synthetic oligonucleotide
  Sense strand starting at position 1196 of SEQ ID NO: 587429
ucagauuacccacgugaaa

SEQ ID NO: 791553 - RNA, 19 nt, Artificial Sequence
  Description of Artificial Sequence: Synthetic oligonucleotide
  Antisense strand to SEQ ID NO: 791552
uuucacguggguaaucuga

SEQ ID NO: 791554 - RNA, 19 nt, Artificial Sequence
  Description of Artificial Sequence: Synthetic oligonucleotide
  Sense strand starting at position 2213 of SEQ ID NO: 587429
gacuauugcgagcugcuuu

SEQ ID NO: 791555 - RNA, 19 nt, Artificial Sequence
  Description of Artificial Sequence: Synthetic oligonucleotide
  Antisense strand to SEQ ID NO: 791554
aaagcagcucgcaauaguc

SEQ ID NO: 791556 - RNA, 19 nt, Artificial Sequence
  Description of Artificial Sequence: Synthetic oligonucleotide
  Sense strand starting at position 2261 of SEQ ID NO: 587429
gccagaugucccuacuuuc

SEQ ID NO: 791557 - RNA, 19 nt, Artificial Sequence
  Description of Artificial Sequence: Synthetic oligonucleotide
  Antisense strand to SEQ ID NO: 791556
gaaaguagggacaucuggc

SEQ ID NO: 791558 - RNA, 19 nt, Artificial Sequence
  Description of Artificial Sequence: Synthetic oligonucleotide
  Sense strand starting at position 2343 of SEQ ID NO: 587429
gucagaugcgaccaaggaa

SEQ ID NO: 791559 - RNA, 19 nt, Artificial Sequence
  Description of Artificial Sequence: Synthetic oligonucleotide
  Antisense strand to SEQ ID NO: 791558
uuccuuggucgcaucugac

SEQ ID NO: 791560 - RNA, 19 nt, Artificial Sequence
  Description of Artificial Sequence: Synthetic oligonucleotide
  Sense strand starting at position 2461 of SEQ ID NO: 587429
guggaaugcugaguuuaau

SEQ ID NO: 791561 - RNA, 19 nt, Artificial Sequence
  Description of Artificial Sequence: Synthetic oligonucleotide
  Antisense strand to SEQ ID NO: 791560
auuaaacucagcauuccac

SEQ ID NO: 791562 - RNA, 19 nt, Artificial Sequence
  Description of Artificial Sequence: Synthetic oligonucleotide
  Sense strand starting at position 2560 of SEQ ID NO: 587429
augcauuuguuccucacau

SEQ ID NO: 791563 - RNA, 19 nt, Artificial Sequence
  Description of Artificial Sequence: Synthetic oligonucleotide
  Antisense strand to SEQ ID NO: 791562
augugaggaacaaaugcau

SEQ ID NO: 791564 - RNA, 19 nt, Artificial Sequence
  Description of Artificial Sequence: Synthetic oligonucleotide
  Sense strand starting at position 2561 of SEQ ID NO: 587429
ugcauuuguuccucacaug

SEQ ID NO: 791565 - RNA, 19 nt, Artificial Sequence
  Description of Artificial Sequence: Synthetic oligonucleotide
  Antisense strand to SEQ ID NO: 791564
caugugaggaacaaaugca

SEQ ID NO: 791566 - RNA, 19 nt, Artificial Sequence
  Description of Artificial Sequence: Synthetic oligonucleotide
  Sense strand starting at position 2661 of SEQ ID NO: 587429
ucuuguaugcuaugaaagg

SEQ ID NO: 791567 - RNA, 19 nt, Artificial Sequence
  Description of Artificial Sequence: Synthetic oligonucleotide
  Antisense strand to SEQ ID NO: 791566
ccuuucauagcauacaaga

SEQ ID NO: 791568 - RNA, 19 nt, Artificial Sequence
  Description of Artificial Sequence: Synthetic oligonucleotide
  Sense strand starting at position 2961 of SEQ ID NO: 587429
acgggaaagauguguuuau

SEQ ID NO: 791569 - RNA, 19 nt, Artificial Sequence
  Description of Artificial Sequence: Synthetic oligonucleotide
  Antisense strand to SEQ ID NO: 791568
auaaacacaucuuucccgu

SEQ ID NO: 791570 - RNA, 19 nt, Artificial Sequence
  Description of Artificial Sequence: Synthetic oligonucleotide
  Sense strand starting at position 2962 of SEQ ID NO: 587429
cgggaaagauguguuuaug

SEQ ID NO: 791571 - RNA, 19 nt, Artificial Sequence
  Description of Artificial Sequence: Synthetic oligonucleotide
  Antisense strand to SEQ ID NO: 791570
cauaaacacaucuuucccg

SEQ ID NO: 791572 - RNA, 19 nt, Artificial Sequence
  Description of Artificial Sequence: Synthetic oligonucleotide
  Sense strand starting at position 2965 of SEQ ID NO: 587429
gaaagauguguuuauggcu

SEQ ID NO: 791573 - RNA, 19 nt, Artificial Sequence
  Description of Artificial Sequence: Synthetic oligonucleotide
  Antisense strand to SEQ ID NO: 791572
agccauaaacacaucuuuc

SEQ ID NO: 791574 - RNA, 19 nt, Artificial Sequence
  Description of Artificial Sequence: Synthetic oligonucleotide
  Sense strand starting at position 2991 of SEQ ID NO: 587429
uggaaugguucuguguaaa

SEQ ID NO: 791575 - RNA, 19 nt, Artificial Sequence
  Description of Artificial Sequence: Synthetic oligonucleotide
  Antisense strand to SEQ ID NO: 791574
uuuacacagaaccauucca

SEQ ID NO: 791576 - RNA, 19 nt, Artificial Sequence
  Description of Artificial Sequence: Synthetic oligonucleotide
  Sense strand starting at position 2994 of SEQ ID NO: 587429
aaugguucuguguaaaguu

SEQ ID NO: 791577 - RNA, 19 nt, Artificial Sequence
  Description of Artificial Sequence: Synthetic oligonucleotide
  Antisense strand to SEQ ID NO: 791576
aacuuuacacagaaccauu

SEQ ID NO: 791578 - RNA, 19 nt, Artificial Sequence
  Description of Artificial Sequence: Synthetic oligonucleotide
  Sense strand starting at position 3190 of SEQ ID NO: 587429
gcauuacuacaguaucauu

SEQ ID NO: 791579 - RNA, 19 nt, Artificial Sequence
  Description of Artificial Sequence: Synthetic oligonucleotide
  Antisense strand to SEQ ID NO: 791578
aaugauacuguaguaaugc

SEQ ID NO: 791580 - RNA, 19 nt, Artificial Sequence
  Description of Artificial Sequence: Synthetic oligonucleotide
  Sense strand starting at position 3702 of SEQ ID NO: 587429
uaaagaguugauugcuuua

SEQ ID NO: 791581 - RNA, 19 nt, Artificial Sequence
  Description of Artificial Sequence: Synthetic oligonucleotide
  Antisense strand to SEQ ID NO: 791580
uaaagcaaucaacucuuua

SEQ ID NO: 791582 - RNA, 19 nt, Artificial Sequence
  Description of Artificial Sequence: Synthetic oligonucleotide
  Sense strand starting at position 3704 of SEQ ID NO: 587429
aagaguugauugcuuuaga

SEQ ID NO: 791583 - RNA, 19 nt, Artificial Sequence
  Description of Artificial Sequence: Synthetic oligonucleotide
  Antisense strand to SEQ ID NO: 791582
ucuaaagcaaucaacucuu

SEQ ID NO: 791584 - RNA, 19 nt, Artificial Sequence
  Description of Artificial Sequence: Synthetic oligonucleotide
  Sense strand starting at position 3705 of SEQ ID NO: 587429
agaguugauugcuuuagac

SEQ ID NO: 791585 - RNA, 19 nt, Artificial Sequence
  Description of Artificial Sequence: Synthetic oligonucleotide
  Antisense strand to SEQ ID NO: 791584
gucuaaagcaaucaacucu

SEQ ID NO: 791586 - RNA, 19 nt, Artificial Sequence
  Description of Artificial Sequence: Synthetic oligonucleotide
  Sense strand starting at position 3707 of SEQ ID NO: 587429
aguugauugcuuuagacaa

SEQ ID NO: 791587 - RNA, 19 nt, Artificial Sequence
  Description of Artificial Sequence: Synthetic oligonucleotide
  Antisense strand to SEQ ID NO: 791586
uugucuaaagcaaucaacu

SEQ ID NO: 791588 - RNA, 19 nt, Artificial Sequence
  Description of Artificial Sequence: Synthetic oligonucleotide
  Sense strand starting at position 3838 of SEQ ID NO: 587429
cuaguuacugaguacuugu

SEQ ID NO: 791589 - RNA, 19 nt, Artificial Sequence
  Description of Artificial Sequence: Synthetic oligonucleotide
  Antisense strand to SEQ ID NO: 791588
acaaguacucaguaacuag

SEQ ID NO: 791590 - RNA, 19 nt, Artificial Sequence
  Description of Artificial Sequence: Synthetic oligonucleotide
  Sense strand starting at position 3845 of SEQ ID NO: 587429
cugaguacuuguuucccaa

SEQ ID NO: 791591 - RNA, 19 nt, Artificial Sequence
  Description of Artificial Sequence: Synthetic oligonucleotide
  Antisense strand to SEQ ID NO: 791590
uugggaaacaaguacucag

SEQ ID NO: 791592 - RNA, 19 nt, Artificial Sequence
  Description of Artificial Sequence: Synthetic oligonucleotide
  Sense strand starting at position 3963 of SEQ ID NO: 587429
guuaaauaguaagcccaua

SEQ ID NO: 791593 - RNA, 19 nt, Artificial Sequence
  Description of Artificial Sequence: Synthetic oligonucleotide
  Antisense strand to SEQ ID NO: 791592
uaugggcuuacuauuuaac

SEQ ID NO: 791594 - RNA, 19 nt, Artificial Sequence
  Description of Artificial Sequence: Synthetic oligonucleotide
  Sense strand starting at position 423 of SEQ ID NO: 587430
gcggucugccggagggaaa

SEQ ID NO: 791595 - RNA, 19 nt, Artificial Sequence
  Description of Artificial Sequence: Synthetic oligonucleotide
  Antisense strand to SEQ ID NO: 791594
uuucccuccggcagaccgc

SEQ ID NO: 791596 - RNA, 19 nt, Artificial Sequence
  Description of Artificial Sequence: Synthetic oligonucleotide
  Sense strand starting at position 424 of SEQ ID NO: 587430
cggucugccggagggaaau

SEQ ID NO: 791597 - RNA, 19 nt, Artificial Sequence
  Description of Artificial Sequence: Synthetic oligonucleotide
  Antisense strand to SEQ ID NO: 791596
auuucccuccggcagaccg

SEQ ID NO: 791598 - RNA, 19 nt, Artificial Sequence
  Description of Artificial Sequence: Synthetic oligonucleotide
  Sense strand starting at position 577 of SEQ ID NO: 587430
ggaucauuucuccguguga

SEQ ID NO: 791599 - RNA, 19 nt, Artificial Sequence
  Description of Artificial Sequence: Synthetic oligonucleotide
  Antisense strand to SEQ ID NO: 791598
ucacacggagaaaugaucc

SEQ ID NO: 791600 - RNA, 19 nt, Artificial Sequence
  Description of Artificial Sequence: Synthetic oligonucleotide
  Sense strand starting at position 578 of SEQ ID NO: 587430
gaucauuucuccgugugau

SEQ ID NO: 791601 - RNA, 19 nt, Artificial Sequence
  Description of Artificial Sequence: Synthetic oligonucleotide
  Antisense strand to SEQ ID NO: 791600
aucacacggagaaaugauc

SEQ ID NO: 791602 - RNA, 19 nt, Artificial Sequence
  Description of Artificial Sequence: Synthetic oligonucleotide
  Sense strand starting at position 579 of SEQ ID NO: 587430
aucauuucuccgugugaug

SEQ ID NO: 791603 - RNA, 19 nt, Artificial Sequence
  Description of Artificial Sequence: Synthetic oligonucleotide
  Antisense strand to SEQ ID NO: 791602
caucacacggagaaaugau

SEQ ID NO: 791604 - RNA, 19 nt, Artificial Sequence
  Description of Artificial Sequence: Synthetic oligonucleotide
  Sense strand starting at position 728 of SEQ ID NO: 587430
cucaguaguggugaugaga

SEQ ID NO: 791605 - RNA, 19 nt, Artificial Sequence
  Description of Artificial Sequence: Synthetic oligonucleotide
  Antisense strand to SEQ ID NO: 791604
ucucaucaccacuacugag

SEQ ID NO: 791606 - RNA, 19 nt, Artificial Sequence
  Description of Artificial Sequence: Synthetic oligonucleotide
  Sense strand starting at position 921 of SEQ ID NO: 587430
cucuuucuacugugacuca

SEQ ID NO: 791607 - RNA, 19 nt, Artificial Sequence
  Description of Artificial Sequence: Synthetic oligonucleotide
  Antisense strand to SEQ ID NO: 791606
ugagucacaguagaaagag

SEQ ID NO: 791608 - RNA, 19 nt, Artificial Sequence
  Description of Artificial Sequence: Synthetic oligonucleotide
  Sense strand starting at position 924 of SEQ ID NO: 587430
uuucuacugugacucagua

SEQ ID NO: 791609 - RNA, 19 nt, Artificial Sequence
  Description of Artificial Sequence: Synthetic oligonucleotide
  Antisense strand to SEQ ID NO: 791608
uacugagucacaguagaaa

SEQ ID NO: 791610 - RNA, 19 nt, Artificial Sequence
  Description of Artificial Sequence: Synthetic oligonucleotide
  Sense strand starting at position 1342 of SEQ ID NO: 587430
caaagaguggacuguggua

SEQ ID NO: 791611 - RNA, 19 nt, Artificial Sequence
  Description of Artificial Sequence: Synthetic oligonucleotide
  Antisense strand to SEQ ID NO: 791610
uaccacaguccacucuuug

SEQ ID NO: 791612 - RNA, 19 nt, Artificial Sequence
  Description of Artificial Sequence: Synthetic oligonucleotide
  Sense strand starting at position 1344 of SEQ ID NO: 587430
aagaguggacugugguaaa

SEQ ID NO: 791613 - RNA, 19 nt, Artificial Sequence
  Description of Artificial Sequence: Synthetic oligonucleotide
  Antisense strand to SEQ ID NO: 791612
uuuaccacaguccacucuu

SEQ ID NO: 791614 - RNA, 19 nt, Artificial Sequence
  Description of Artificial Sequence: Synthetic oligonucleotide
  Sense strand starting at position 1750 of SEQ ID NO: 587430
ccucuacugucgcuuuaaa

SEQ ID NO: 791615 - RNA, 19 nt, Artificial Sequence
  Description of Artificial Sequence: Synthetic oligonucleotide
  Antisense strand to SEQ ID NO: 791614
uuuaaagcgacaguagagg

SEQ ID NO: 791616 - RNA, 19 nt, Artificial Sequence
  Description of Artificial Sequence: Synthetic oligonucleotide
  Sense strand starting at position 1811 of SEQ ID NO: 587430
agcaaaucgucuccuccaa

SEQ ID NO: 791617 - RNA, 19 nt, Artificial Sequence
  Description of Artificial Sequence: Synthetic oligonucleotide
  Antisense strand to SEQ ID NO: 791616
uuggaggagacgauuugcu

SEQ ID NO: 791618 - RNA, 19 nt, Artificial Sequence
  Description of Artificial Sequence: Synthetic oligonucleotide
  Sense strand starting at position 1846 of SEQ ID NO: 587430
ggaucaagugcccaaguuu

SEQ ID NO: 791619 - RNA, 19 nt, Artificial Sequence
  Description of Artificial Sequence: Synthetic oligonucleotide
  Antisense strand to SEQ ID NO: 791618
aaacuugggcacuugaucc

SEQ ID NO: 791620 - RNA, 19 nt, Artificial Sequence
  Description of Artificial Sequence: Synthetic oligonucleotide
  Sense strand starting at position 1911 of SEQ ID NO: 587430
cgaggugcggacugaugua

SEQ ID NO: 791621 - RNA, 19 nt, Artificial Sequence
  Description of Artificial Sequence: Synthetic oligonucleotide
  Antisense strand to SEQ ID NO: 791620
uacaucaguccgcaccucg

SEQ ID NO: 791622 - RNA, 19 nt, Artificial Sequence
  Description of Artificial Sequence: Synthetic oligonucleotide
  Sense strand starting at position 1916 of SEQ ID NO: 587430
ugcggacugauguagucaa

SEQ ID NO: 791623 - RNA, 19 nt, Artificial Sequence
  Description of Artificial Sequence: Synthetic oligonucleotide
  Antisense strand to SEQ ID NO: 791622
uugacuacaucaguccgca

SEQ ID NO: 791624 - RNA, 19 nt, Artificial Sequence
  Description of Artificial Sequence: Synthetic oligonucleotide
  Sense strand starting at position 1930 of SEQ ID NO: 587430
gucaaaguuuggguucuua

SEQ ID NO: 791625 - RNA, 19 nt, Artificial Sequence
  Description of Artificial Sequence: Synthetic oligonucleotide
  Antisense strand to SEQ ID NO: 791624
uaagaacccaaacuuugac

SEQ ID NO: 791626 - RNA, 19 nt, Artificial Sequence
  Description of Artificial Sequence: Synthetic oligonucleotide
  Sense strand starting at position 1940 of SEQ ID NO: 587430
ggguucuuauccuccgcaa

SEQ ID NO: 791627 - RNA, 19 nt, Artificial Sequence
  Description of Artificial Sequence: Synthetic oligonucleotide
  Antisense strand to SEQ ID NO: 791626
uugcggaggauaagaaccc

SEQ ID NO: 791628 - RNA, 19 nt, Artificial Sequence
  Description of Artificial Sequence: Synthetic oligonucleotide
  Sense strand starting at position 2013 of SEQ ID NO: 587430
ugcagugcugccuccugaa

SEQ ID NO: 791629 - RNA, 19 nt, Artificial Sequence
  Description of Artificial Sequence: Synthetic oligonucleotide
  Antisense strand to SEQ ID NO: 791628
uucaggaggcagcacugca

SEQ ID NO: 791630 - RNA, 19 nt, Artificial Sequence
  Description of Artificial Sequence: Synthetic oligonucleotide
  Sense strand starting at position 2077 of SEQ ID NO: 587430
ggaaauugauggcugccua

SEQ ID NO: 791631 - RNA, 19 nt, Artificial Sequence
  Description of Artificial Sequence: Synthetic oligonucleotide
  Antisense strand to SEQ ID NO: 791630
uaggcagccaucaauuucc

SEQ ID NO: 791632 - RNA, 19 nt, Artificial Sequence
  Description of Artificial Sequence: Synthetic oligonucleotide
  Sense strand starting at position 2078 of SEQ ID NO: 587430
gaaauugauggcugccuaa

SEQ ID NO: 791633 - RNA, 19 nt, Artificial Sequence
  Description of Artificial Sequence: Synthetic oligonucleotide
  Antisense strand to SEQ ID NO: 791632
uuaggcagccaucaauuuc

SEQ ID NO: 791634 - RNA, 19 nt, Artificial Sequence
  Description of Artificial Sequence: Synthetic oligonucleotide
  Sense strand starting at position 2168 of SEQ ID NO: 587430
ccaacaggaucaguuguaa

SEQ ID NO: 791635 - RNA, 19 nt, Artificial Sequence
  Description of Artificial Sequence: Synthetic oligonucleotide
  Antisense strand to SEQ ID NO: 791634
uuacaacugauccuguugg

SEQ ID NO: 791636 - RNA, 19 nt, Artificial Sequence
  Description of Artificial Sequence: Synthetic oligonucleotide
  Sense strand starting at position 2451 of SEQ ID NO: 587430
cgucgaguccuagcacgaa

SEQ ID NO: 791637 - RNA, 19 nt, Artificial Sequence
  Description of Artificial Sequence: Synthetic oligonucleotide
  Antisense strand to SEQ ID NO: 791636
uucgugcuaggacucgacg

SEQ ID NO: 791638 - RNA, 19 nt, Artificial Sequence
  Description of Artificial Sequence: Synthetic oligonucleotide
  Sense strand starting at position 2580 of SEQ ID NO: 587430
ccuggauccugccucuaga

SEQ ID NO: 791639 - RNA, 19 nt, Artificial Sequence
  Description of Artificial Sequence: Synthetic oligonucleotide
  Antisense strand to SEQ ID NO: 791638
ucuagaggcaggauccagg

SEQ ID NO: 791640 - RNA, 19 nt, Artificial Sequence
  Description of Artificial Sequence: Synthetic oligonucleotide
  Sense strand starting at position 2583 of SEQ ID NO: 587430
ggauccugccucuagaugu

SEQ ID NO: 791641 - RNA, 19 nt, Artificial Sequence
  Description of Artificial Sequence: Synthetic oligonucleotide
  Antisense strand to SEQ ID NO: 791640
acaucuagaggcaggaucc

SEQ ID NO: 791642 - RNA, 19 nt, Artificial Sequence
  Description of Artificial Sequence: Synthetic oligonucleotide
  Sense strand starting at position 2673 of SEQ ID NO: 587430
gccacaugugcuuauguuu

SEQ ID NO: 791643 - RNA, 19 nt, Artificial Sequence
  Description of Artificial Sequence: Synthetic oligonucleotide
  Antisense strand to SEQ ID NO: 791642
aaacauaagcacauguggc

SEQ ID NO: 791644 - RNA, 19 nt, Artificial Sequence
  Description of Artificial Sequence: Synthetic oligonucleotide
  Sense strand starting at position 2747 of SEQ ID NO: 587430
gaguuccauggugauauca

SEQ ID NO: 791645 - RNA, 19 nt, Artificial Sequence
  Description of Artificial Sequence: Synthetic oligonucleotide
  Antisense strand to SEQ ID NO: 791644
ugauaucaccauggaacuc

SEQ ID NO: 791646 - RNA, 19 nt, Artificial Sequence
  Description of Artificial Sequence: Synthetic oligonucleotide
  Sense strand starting at position 2756 of SEQ ID NO: 587430
ggugauaucagauguugug

SEQ ID NO: 791647 - RNA, 19 nt, Artificial Sequence
  Description of Artificial Sequence: Synthetic oligonucleotide
  Antisense strand to SEQ ID NO: 791646
cacaacaucugauaucacc

SEQ ID NO: 791648 - RNA, 19 nt, Artificial Sequence
  Description of Artificial Sequence: Synthetic oligonucleotide
  Sense strand starting at position 2798 of SEQ ID NO: 587430
uggagaacauaugaaagaa

SEQ ID NO: 791649 - RNA, 19 nt, Artificial Sequence
  Description of Artificial Sequence: Synthetic oligonucleotide
  Antisense strand to SEQ ID NO: 791648
uucuuucauauguucucca

SEQ ID NO: 791650 - RNA, 19 nt, Artificial Sequence
  Description of Artificial Sequence: Synthetic oligonucleotide
  Sense strand starting at position 2850 of SEQ ID NO: 587430
gcaagugcugcucaaauac

SEQ ID NO: 791651 - RNA, 19 nt, Artificial Sequence
  Description of Artificial Sequence: Synthetic oligonucleotide
  Antisense strand to SEQ ID NO: 791650
guauuugagcagcacuugc

SEQ ID NO: 791652 - RNA, 19 nt, Artificial Sequence
  Description of Artificial Sequence: Synthetic oligonucleotide
  Sense strand starting at position 3269 of SEQ ID NO: 587430
uucugaucugcgcauagau

SEQ ID NO: 791653 - RNA, 19 nt, Artificial Sequence
  Description of Artificial Sequence: Synthetic oligonucleotide
  Antisense strand to SEQ ID NO: 791652
aucuaugcgcagaucagaa

SEQ ID NO: 791654 - RNA, 19 nt, Artificial Sequence
  Description of Artificial Sequence: Synthetic oligonucleotide
  Sense strand starting at position 3271 of SEQ ID NO: 587430
cugaucugcgcauagaucu

SEQ ID NO: 791655 - RNA, 19 nt, Artificial Sequence
  Description of Artificial Sequence: Synthetic oligonucleotide
  Antisense strand to SEQ ID NO: 791654
agaucuaugcgcagaucag

SEQ ID NO: 791656 - RNA, 19 nt, Artificial Sequence
  Description of Artificial Sequence: Synthetic oligonucleotide
  Sense strand starting at position 3342 of SEQ ID NO: 587430
augcaaaucugugcucaaa

SEQ ID NO: 791657 - RNA, 19 nt, Artificial Sequence
  Description of Artificial Sequence: Synthetic oligonucleotide
  Antisense strand to SEQ ID NO: 791656
uuugagcacagauuugcau

SEQ ID NO: 791658 - RNA, 19 nt, Artificial Sequence
  Description of Artificial Sequence: Synthetic oligonucleotide
  Sense strand starting at position 3344 of SEQ ID NO: 587430
gcaaaucugugcucaaaga

SEQ ID NO: 791659 - RNA, 19 nt, Artificial Sequence
  Description of Artificial Sequence: Synthetic oligonucleotide
  Antisense strand to SEQ ID NO: 791658
ucuuugagcacagauuugc

SEQ ID NO: 791660 - RNA, 19 nt, Artificial Sequence
  Description of Artificial Sequence: Synthetic oligonucleotide
  Sense strand starting at position 3378 of SEQ ID NO: 587430
gagacaaucagcuguucgu

SEQ ID NO: 791661 - RNA, 19 nt, Artificial Sequence
  Description of Artificial Sequence: Synthetic oligonucleotide
  Antisense strand to SEQ ID NO: 791660
acgaacagcugauugucuc

SEQ ID NO: 791662 - RNA, 19 nt, Artificial Sequence
  Description of Artificial Sequence: Synthetic oligonucleotide
  Sense strand starting at position 3484 of SEQ ID NO: 587430
ccucuugggucucagauuu

SEQ ID NO: 791663 - RNA, 19 nt, Artificial Sequence
  Description of Artificial Sequence: Synthetic oligonucleotide
  Antisense strand to SEQ ID NO: 791662
aaaucugagacccaagagg

SEQ ID NO: 791664 - RNA, 19 nt, Artificial Sequence
  Description of Artificial Sequence: Synthetic oligonucleotide
  Sense strand starting at position 3524 of SEQ ID NO: 587430
guaggugagcgcucgcaaa

SEQ ID NO: 791665 - RNA, 19 nt, Artificial Sequence
  Description of Artificial Sequence: Synthetic oligonucleotide
  Antisense strand to SEQ ID NO: 791664
uuugcgagcgcucaccuac

SEQ ID NO: 791666 - RNA, 19 nt, Artificial Sequence
  Description of Artificial Sequence: Synthetic oligonucleotide
  Sense strand starting at position 3526 of SEQ ID NO: 587430
aggugagcgcucgcaaaug

SEQ ID NO: 791667 - RNA, 19 nt, Artificial Sequence
  Description of Artificial Sequence: Synthetic oligonucleotide
  Antisense strand to SEQ ID NO: 791666
cauuugcgagcgcucaccu

SEQ ID NO: 791668 - RNA, 19 nt, Artificial Sequence
  Description of Artificial Sequence: Synthetic oligonucleotide
  Sense strand starting at position 3552 of SEQ ID NO: 587430
agaguuugccgcuagagga

SEQ ID NO: 791669 - RNA, 19 nt, Artificial Sequence
  Description of Artificial Sequence: Synthetic oligonucleotide
  Antisense strand to SEQ ID NO: 791668
uccucuagcggcaaacucu

SEQ ID NO: 791670 - RNA, 19 nt, Artificial Sequence
  Description of Artificial Sequence: Synthetic oligonucleotide
  Sense strand starting at position 3737 of SEQ ID NO: 587430
ugcggagauucgcuugaaa

SEQ ID NO: 791671 - RNA, 19 nt, Artificial Sequence
  Description of Artificial Sequence: Synthetic oligonucleotide
  Antisense strand to SEQ ID NO: 791670
uuucaagcgaaucuccgca

SEQ ID NO: 791672 - RNA, 19 nt, Artificial Sequence
  Description of Artificial Sequence: Synthetic oligonucleotide
  Sense strand starting at position 3977 of SEQ ID NO: 587430
ggaucggguggcuaguaaa

SEQ ID NO: 791673 - RNA, 19 nt, Artificial Sequence
  Description of Artificial Sequence: Synthetic oligonucleotide
  Antisense strand to SEQ ID NO: 791672
uuuacuagccacccgaucc

SEQ ID NO: 791674 - RNA, 19 nt, Artificial Sequence
  Description of Artificial Sequence: Synthetic oligonucleotide
  Sense strand starting at position 374 of SEQ ID NO: 587431
ccagguacucuuuguccau

SEQ ID NO: 791675 - RNA, 19 nt, Artificial Sequence
  Description of Artificial Sequence: Synthetic oligonucleotide
  Antisense strand to SEQ ID NO: 791674
auggacaaagaguaccugg

SEQ ID NO: 791676 - RNA, 19 nt, Artificial Sequence
  Description of Artificial Sequence: Synthetic oligonucleotide
  Sense strand starting at position 377 of SEQ ID NO: 587431
gguacucuuuguccaucau

SEQ ID NO: 791677 - RNA, 19 nt, Artificial Sequence
  Description of Artificial Sequence: Synthetic oligonucleotide
  Antisense strand to SEQ ID NO: 791676
augauggacaaagaguacc

SEQ ID NO: 791678 - RNA, 19 nt, Artificial Sequence
  Description of Artificial Sequence: Synthetic oligonucleotide
  Sense strand starting at position 464 of SEQ ID NO: 587431
ggccuaguccuccagagga

SEQ ID NO: 791679 - RNA, 19 nt, Artificial Sequence
  Description of Artificial Sequence: Synthetic oligonucleotide
  Antisense strand to SEQ ID NO: 791678
uccucuggaggacuaggcc

SEQ ID NO: 791680 - RNA, 19 nt, Artificial Sequence
  Description of Artificial Sequence: Synthetic oligonucleotide
  Sense strand starting at position 570 of SEQ ID NO: 587431
gcugcugucucacaggauu

SEQ ID NO: 791681 - RNA, 19 nt, Artificial Sequence
  Description of Artificial Sequence: Synthetic oligonucleotide
  Antisense strand to SEQ ID NO: 791680
aauccugugagacagcagc

SEQ ID NO: 791682 - RNA, 19 nt, Artificial Sequence
  Description of Artificial Sequence: Synthetic oligonucleotide
  Sense strand starting at position 673 of SEQ ID NO: 587431
cgucuacuuccucagagga

SEQ ID NO: 791683 - RNA, 19 nt, Artificial Sequence
  Description of Artificial Sequence: Synthetic oligonucleotide
  Antisense strand to SEQ ID NO: 791682
uccucugaggaaguagacg

SEQ ID NO: 791684 - RNA, 19 nt, Artificial Sequence
  Description of Artificial Sequence: Synthetic oligonucleotide
  Sense strand starting at position 1066 of SEQ ID NO: 587431
acuuaaagccucugaaagu

SEQ ID NO: 791685 - RNA, 19 nt, Artificial Sequence
  Description of Artificial Sequence: Synthetic oligonucleotide
  Antisense strand to SEQ ID NO: 791684
acuuucagaggcuuuaagu

SEQ ID NO: 791686 - RNA, 19 nt, Artificial Sequence
  Description of Artificial Sequence: Synthetic oligonucleotide
  Sense strand starting at position 1067 of SEQ ID NO: 587431
cuuaaagccucugaaagua

SEQ ID NO: 791687 - RNA, 19 nt, Artificial Sequence
  Description of Artificial Sequence: Synthetic oligonucleotide
  Antisense strand to SEQ ID NO: 791686
uacuuucagaggcuuuaag

SEQ ID NO: 791688 - RNA, 19 nt, Artificial Sequence
  Description of Artificial Sequence: Synthetic oligonucleotide
  Sense strand starting at position 1198 of SEQ ID NO: 587431
gcucacuagcgucuaaguu

SEQ ID NO: 791689 - RNA, 19 nt, Artificial Sequence
  Description of Artificial Sequence: Synthetic oligonucleotide
  Antisense strand to SEQ ID NO: 791688
aacuuagacgcuagugagc

SEQ ID NO: 791690 - RNA, 19 nt, Artificial Sequence
  Description of Artificial Sequence: Synthetic oligonucleotide
  Sense strand starting at position 1268 of SEQ ID NO: 587431
aguaacuggugcuugacaa

SEQ ID NO: 791691 - RNA, 19 nt, Artificial Sequence
  Description of Artificial Sequence: Synthetic oligonucleotide
  Antisense strand to SEQ ID NO: 791690
uugucaagcaccaguuacu

SEQ ID NO: 791692 - RNA, 19 nt, Artificial Sequence
  Description of Artificial Sequence: Synthetic oligonucleotide
  Sense strand starting at position 1269 of SEQ ID NO: 587431
guaacuggugcuugacaaa

SEQ ID NO: 791693 - RNA, 19 nt, Artificial Sequence
  Description of Artificial Sequence: Synthetic oligonucleotide
  Antisense strand to SEQ ID NO: 791692
uuugucaagcaccaguuac

SEQ ID NO: 791694 - RNA, 19 nt, Artificial Sequence
  Description of Artificial Sequence: Synthetic oligonucleotide
  Sense strand starting at position 1280 of SEQ ID NO: 587431
uugacaaagacguggugua

SEQ ID NO: 791695 - RNA, 19 nt, Artificial Sequence
  Description of Artificial Sequence: Synthetic oligonucleotide
  Antisense strand to SEQ ID NO: 791694
uacaccacgucuuugucaa

SEQ ID NO: 791696 - RNA, 19 nt, Artificial Sequence
  Description of Artificial Sequence: Synthetic oligonucleotide
  Sense strand starting at position 1330 of SEQ ID NO: 587431
gcagaugucuggucuccca

SEQ ID NO: 791697 - RNA, 19 nt, Artificial Sequence
  Description of Artificial Sequence: Synthetic oligonucleotide
  Antisense strand to SEQ ID NO: 791696
ugggagaccagacaucugc

SEQ ID NO: 791698 - RNA, 19 nt, Artificial Sequence
  Description of Artificial Sequence: Synthetic oligonucleotide
  Sense strand starting at position 1410 of SEQ ID NO: 587431
cgggaugcgccgugagaca

SEQ ID NO: 791699 - RNA, 19 nt, Artificial Sequence
  Description of Artificial Sequence: Synthetic oligonucleotide
  Antisense strand to SEQ ID NO: 791698
ugucucacggcgcaucccg

SEQ ID NO: 791700 - RNA, 19 nt, Artificial Sequence
  Description of Artificial Sequence: Synthetic oligonucleotide
  Sense strand starting at position 1885 of SEQ ID NO: 587431
gcagaauuccguuggagau

SEQ ID NO: 791701 - RNA, 19 nt, Artificial Sequence
  Description of Artificial Sequence: Synthetic oligonucleotide
  Antisense strand to SEQ ID NO: 791700
aucuccaacggaauucugc

SEQ ID NO: 791702 - RNA, 19 nt, Artificial Sequence
  Description of Artificial Sequence: Synthetic oligonucleotide
  Sense strand starting at position 1886 of SEQ ID NO: 587431
cagaauuccguuggagaug

SEQ ID NO: 791703 - RNA, 19 nt, Artificial Sequence
  Description of Artificial Sequence: Synthetic oligonucleotide
  Antisense strand to SEQ ID NO: 791702
caucuccaacggaauucug

SEQ ID NO: 791704 - RNA, 19 nt, Artificial Sequence
  Description of Artificial Sequence: Synthetic oligonucleotide
  Sense strand starting at position 218 of SEQ ID NO: 587432
gccuguccugcauaucuca

SEQ ID NO: 791705 - RNA, 19 nt, Artificial Sequence
  Description of Artificial Sequence: Synthetic oligonucleotide
  Antisense strand to SEQ ID NO: 791704
ugagauaugcaggacaggc

SEQ ID NO: 791706 - RNA, 19 nt, Artificial Sequence
  Description of Artificial Sequence: Synthetic oligonucleotide
  Sense strand starting at position 225 of SEQ ID NO: 587432
cugcauaucucagagcacu

SEQ ID NO: 791707 - RNA, 19 nt, Artificial Sequence
  Description of Artificial Sequence: Synthetic oligonucleotide
  Antisense strand to SEQ ID NO: 791706
agugcucugagauaugcag

SEQ ID NO: 791708 - RNA, 19 nt, Artificial Sequence
  Description of Artificial Sequence: Synthetic oligonucleotide
  Sense strand starting at position 661 of SEQ ID NO: 587432
ccagguacucuuuguccau

SEQ ID NO: 791709 - RNA, 19 nt, Artificial Sequence
  Description of Artificial Sequence: Synthetic oligonucleotide
  Antisense strand to SEQ ID NO: 791708
auggacaaagaguaccugg

SEQ ID NO: 791710 - RNA, 19 nt, Artificial Sequence
  Description of Artificial Sequence: Synthetic oligonucleotide
  Sense strand starting at position 664 of SEQ ID NO: 587432
gguacucuuuguccaucau

SEQ ID NO: 791711 - RNA, 19 nt, Artificial Sequence
  Description of Artificial Sequence: Synthetic oligonucleotide
  Antisense strand to SEQ ID NO: 791710
augauggacaaagaguacc

SEQ ID NO: 791712 - RNA, 19 nt, Artificial Sequence
  Description of Artificial Sequence: Synthetic oligonucleotide
  Sense strand starting at position 751 of SEQ ID NO: 587432
ggccuaguccuccagagga

SEQ ID NO: 791713 - RNA, 19 nt, Artificial Sequence
  Description of Artificial Sequence: Synthetic oligonucleotide
  Antisense strand to SEQ ID NO: 791712
uccucuggaggacuaggcc

SEQ ID NO: 791714 - RNA, 19 nt, Artificial Sequence
  Description of Artificial Sequence: Synthetic oligonucleotide
  Sense strand starting at position 857 of SEQ ID NO: 587432
gcugcugucucacaggauu

SEQ ID NO: 791715 - RNA, 19 nt, Artificial Sequence
  Description of Artificial Sequence: Synthetic oligonucleotide
  Antisense strand to SEQ ID NO: 791714
aauccugugagacagcagc

SEQ ID NO: 791716 - RNA, 19 nt, Artificial Sequence
  Description of Artificial Sequence: Synthetic oligonucleotide
  Sense strand starting at position 960 of SEQ ID NO: 587432
cgucuacuuccucagagga

SEQ ID NO: 791717 - RNA, 19 nt, Artificial Sequence
  Description of Artificial Sequence: Synthetic oligonucleotide
  Antisense strand to SEQ ID NO: 791716
uccucugaggaaguagacg

SEQ ID NO: 791718 - RNA, 19 nt, Artificial Sequence
  Description of Artificial Sequence: Synthetic oligonucleotide
  Sense strand starting at position 1353 of SEQ ID NO: 587432
acuuaaagccucugaaagu

SEQ ID NO: 791719 - RNA, 19 nt, Artificial Sequence
  Description of Artificial Sequence: Synthetic oligonucleotide
  Antisense strand to SEQ ID NO: 791718
acuuucagaggcuuuaagu

SEQ ID NO: 791720 - RNA, 19 nt, Artificial Sequence
  Description of Artificial Sequence: Synthetic oligonucleotide
  Sense strand starting at position 1354 of SEQ ID NO: 587432
cuuaaagccucugaaagua

SEQ ID NO: 791721 - RNA, 19 nt, Artificial Sequence
  Description of Artificial Sequence: Synthetic oligonucleotide
  Antisense strand to SEQ ID NO: 791720
uacuuucagaggcuuuaag

SEQ ID NO: 791722 - RNA, 19 nt, Artificial Sequence
  Description of Artificial Sequence: Synthetic oligonucleotide
  Sense strand starting at position 1485 of SEQ ID NO: 587432
gcucacuagcgucuaaguu

SEQ ID NO: 791723 - RNA, 19 nt, Artificial Sequence
  Description of Artificial Sequence: Synthetic oligonucleotide
  Antisense strand to SEQ ID NO: 791722
aacuuagacgcuagugagc

SEQ ID NO: 791724 - RNA, 19 nt, Artificial Sequence
  Description of Artificial Sequence: Synthetic oligonucleotide
  Sense strand starting at position 1555 of SEQ ID NO: 587432
aguaacuggugcuugacaa

SEQ ID NO: 791725 - RNA, 19 nt, Artificial Sequence
  Description of Artificial Sequence: Synthetic oligonucleotide
  Antisense strand to SEQ ID NO: 791724
uugucaagcaccaguuacu

SEQ ID NO: 791726 - RNA, 19 nt, Artificial Sequence
  Description of Artificial Sequence: Synthetic oligonucleotide
  Sense strand starting at position 1556 of SEQ ID NO: 587432
guaacuggugcuugacaaa

SEQ ID NO: 791727 - RNA, 19 nt, Artificial Sequence
  Description of Artificial Sequence: Synthetic oligonucleotide
  Antisense strand to SEQ ID NO: 791726
uuugucaagcaccaguuac

SEQ ID NO: 791728 - RNA, 19 nt, Artificial Sequence
  Description of Artificial Sequence: Synthetic oligonucleotide
  Sense strand starting at position 1567 of SEQ ID NO: 587432
uugacaaagacguggugua

SEQ ID NO: 791729 - RNA, 19 nt, Artificial Sequence
  Description of Artificial Sequence: Synthetic oligonucleotide
  Antisense strand to SEQ ID NO: 791728
uacaccacgucuuugucaa

SEQ ID NO: 791730 - RNA, 19 nt, Artificial Sequence
  Description of Artificial Sequence: Synthetic oligonucleotide
  Sense strand starting at position 1617 of SEQ ID NO: 587432
gcagaugucuggucuccca

SEQ ID NO: 791731 - RNA, 19 nt, Artificial Sequence
  Description of Artificial Sequence: Synthetic oligonucleotide
  Antisense strand to SEQ ID NO: 791730
ugggagaccagacaucugc

SEQ ID NO: 791732 - RNA, 19 nt, Artificial Sequence
  Description of Artificial Sequence: Synthetic oligonucleotide
  Sense strand starting at position 1697 of SEQ ID NO: 587432
cgggaugcgccgugagaca

SEQ ID NO: 791733 - RNA, 19 nt, Artificial Sequence
  Description of Artificial Sequence: Synthetic oligonucleotide
  Antisense strand to SEQ ID NO: 791732
ugucucacggcgcaucccg

SEQ ID NO: 791734 - RNA, 19 nt, Artificial Sequence
  Description of Artificial Sequence: Synthetic oligonucleotide
  Sense strand starting at position 2172 of SEQ ID NO: 587432
gcagaauuccguuggagau

SEQ ID NO: 791735 - RNA, 19 nt, Artificial Sequence
  Description of Artificial Sequence: Synthetic oligonucleotide
  Antisense strand to SEQ ID NO: 791734
aucuccaacggaauucugc

SEQ ID NO: 791736 - RNA, 19 nt, Artificial Sequence
  Description of Artificial Sequence: Synthetic oligonucleotide
  Sense strand starting at position 2173 of SEQ ID NO: 587432
cagaauuccguuggagaug

SEQ ID NO: 791737 - RNA, 19 nt, Artificial Sequence
  Description of Artificial Sequence: Synthetic oligonucleotide
  Antisense strand to SEQ ID NO: 791736
caucuccaacggaauucug

SEQ ID NO: 791738 - RNA, 19 nt, Artificial Sequence
  Description of Artificial Sequence: Synthetic oligonucleotide
  Sense strand starting at position 111 of SEQ ID NO: 587433
gaauguguccugcagaaca

SEQ ID NO: 791739 - RNA, 19 nt, Artificial Sequence
  Description of Artificial Sequence: Synthetic oligonucleotide
  Antisense strand to SEQ ID NO: 791738
uguucugcaggacacauuc

SEQ ID NO: 791740 - RNA, 19 nt, Artificial Sequence
  Description of Artificial Sequence: Synthetic oligonucleotide
  Sense strand starting at position 113 of SEQ ID NO: 587433
auguguccugcagaacaua

SEQ ID NO: 791741 - RNA, 19 nt, Artificial Sequence
  Description of Artificial Sequence: Synthetic oligonucleotide
  Antisense strand to SEQ ID NO: 791740
uauguucugcaggacacau

SEQ ID NO: 791742 - RNA, 19 nt, Artificial Sequence
  Description of Artificial Sequence: Synthetic oligonucleotide
  Sense strand starting at position 121 of SEQ ID NO: 587433
ugcagaacauaucuguaga

SEQ ID NO: 791743 - RNA, 19 nt, Artificial Sequence
  Description of Artificial Sequence: Synthetic oligonucleotide
  Antisense strand to SEQ ID NO: 791742
ucuacagauauguucugca

SEQ ID NO: 791744 - RNA, 19 nt, Artificial Sequence
  Description of Artificial Sequence: Synthetic oligonucleotide
  Sense strand starting at position 136 of SEQ ID NO: 587433
uagaacagugcaugaacua

SEQ ID NO: 791745 - RNA, 19 nt, Artificial Sequence
  Description of Artificial Sequence: Synthetic oligonucleotide
  Antisense strand to SEQ ID NO: 791744
uaguucaugcacuguucua

SEQ ID NO: 791746 - RNA, 19 nt, Artificial Sequence
  Description of Artificial Sequence: Synthetic oligonucleotide
  Sense strand starting at position 148 of SEQ ID NO: 587433
ugaacuagauguucucuua

SEQ ID NO: 791747 - RNA, 19 nt, Artificial Sequence
  Description of Artificial Sequence: Synthetic oligonucleotide
  Antisense strand to SEQ ID NO: 791746
uaagagaacaucuaguuca

SEQ ID NO: 791748 - RNA, 19 nt, Artificial Sequence
  Description of Artificial Sequence: Synthetic oligonucleotide
  Sense strand starting at position 151 of SEQ ID NO: 587433
acuagauguucucuuaaga

SEQ ID NO: 791749 - RNA, 19 nt, Artificial Sequence
  Description of Artificial Sequence: Synthetic oligonucleotide
  Antisense strand to SEQ ID NO: 791748
ucuuaagagaacaucuagu

SEQ ID NO: 791750 - RNA, 19 nt, Artificial Sequence
  Description of Artificial Sequence: Synthetic oligonucleotide
  Sense strand starting at position 262 of SEQ ID NO: 587433
aaguucuuccguuaaagaa

SEQ ID NO: 791751 - RNA, 19 nt, Artificial Sequence
  Description of Artificial Sequence: Synthetic oligonucleotide
  Antisense strand to SEQ ID NO: 791750
uucuuuaacggaagaacuu

SEQ ID NO: 791752 - RNA, 19 nt, Artificial Sequence
  Description of Artificial Sequence: Synthetic oligonucleotide
  Sense strand starting at position 294 of SEQ ID NO: 587433
uauaauguccaugacguau

SEQ ID NO: 791753 - RNA, 19 nt, Artificial Sequence
  Description of Artificial Sequence: Synthetic oligonucleotide
  Antisense strand to SEQ ID NO: 791752
auacgucauggacauuaua

SEQ ID NO: 791754 - RNA, 19 nt, Artificial Sequence
  Description of Artificial Sequence: Synthetic oligonucleotide
  Sense strand starting at position 300 of SEQ ID NO: 587433
guccaugacguauaacuau

SEQ ID NO: 791755 - RNA, 19 nt, Artificial Sequence
  Description of Artificial Sequence: Synthetic oligonucleotide
  Antisense strand to SEQ ID NO: 791754
auaguuauacgucauggac

SEQ ID NO: 791756 - RNA, 19 nt, Artificial Sequence
  Description of Artificial Sequence: Synthetic oligonucleotide
  Sense strand starting at position 340 of SEQ ID NO: 587433
aucaucuaaguuuguaaga

SEQ ID NO: 791757 - RNA, 19 nt, Artificial Sequence
  Description of Artificial Sequence: Synthetic oligonucleotide
  Antisense strand to SEQ ID NO: 791756
ucuuacaaacuuagaugau

SEQ ID NO: 791758 - RNA, 19 nt, Artificial Sequence
  Description of Artificial Sequence: Synthetic oligonucleotide
  Sense strand starting at position 460 of SEQ ID NO: 587433
acagaaugauugucugcaa

SEQ ID NO: 791759 - RNA, 19 nt, Artificial Sequence
  Description of Artificial Sequence: Synthetic oligonucleotide
  Antisense strand to SEQ ID NO: 791758
uugcagacaaucauucugu

SEQ ID NO: 791760 - RNA, 19 nt, Artificial Sequence
  Description of Artificial Sequence: Synthetic oligonucleotide
  Sense strand starting at position 595 of SEQ ID NO: 587433
acuagauguuuacuagaag

SEQ ID NO: 791761 - RNA, 19 nt, Artificial Sequence
  Description of Artificial Sequence: Synthetic oligonucleotide
  Antisense strand to SEQ ID NO: 791760
cuucuaguaaacaucuagu

SEQ ID NO: 791762 - RNA, 19 nt, Artificial Sequence
  Description of Artificial Sequence: Synthetic oligonucleotide
  Sense strand starting at position 670 of SEQ ID NO: 587433
cccucaucagaguauagua

SEQ ID NO: 791763 - RNA, 19 nt, Artificial Sequence
  Description of Artificial Sequence: Synthetic oligonucleotide
  Antisense strand to SEQ ID NO: 791762
uacuauacucugaugaggg

SEQ ID NO: 791764 - RNA, 19 nt, Artificial Sequence
  Description of Artificial Sequence: Synthetic oligonucleotide
  Sense strand starting at position 678 of SEQ ID NO: 587433
agaguauaguagucauaau

SEQ ID NO: 791765 - RNA, 19 nt, Artificial Sequence
  Description of Artificial Sequence: Synthetic oligonucleotide
  Antisense strand to SEQ ID NO: 791764
auuaugacuacuauacucu

SEQ ID NO: 791766 - RNA, 19 nt, Artificial Sequence
  Description of Artificial Sequence: Synthetic oligonucleotide
  Sense strand starting at position 820 of SEQ ID NO: 587433
ugauaauuagaaugcacua

SEQ ID NO: 791767 - RNA, 19 nt, Artificial Sequence
  Description of Artificial Sequence: Synthetic oligonucleotide
  Antisense strand to SEQ ID NO: 791766
uagugcauucuaauuauca

SEQ ID NO: 791768 - RNA, 19 nt, Artificial Sequence
  Description of Artificial Sequence: Synthetic oligonucleotide
  Sense strand starting at position 969 of SEQ ID NO: 587433
aaguuugcucgacaggaaa

SEQ ID NO: 791769 - RNA, 19 nt, Artificial Sequence
  Description of Artificial Sequence: Synthetic oligonucleotide
  Antisense strand to SEQ ID NO: 791768
uuuccugucgagcaaacuu

SEQ ID NO: 791770 - RNA, 19 nt, Artificial Sequence
  Description of Artificial Sequence: Synthetic oligonucleotide
  Sense strand starting at position 972 of SEQ ID NO: 587433
uuugcucgacaggaaauua

SEQ ID NO: 791771 - RNA, 19 nt, Artificial Sequence
  Description of Artificial Sequence: Synthetic oligonucleotide
  Antisense strand to SEQ ID NO: 791770
uaauuuccugucgagcaaa

SEQ ID NO: 791772 - RNA, 19 nt, Artificial Sequence
  Description of Artificial Sequence: Synthetic oligonucleotide
  Sense strand starting at position 1225 of SEQ ID NO: 587433
acguguuuaguugugcuga

SEQ ID NO: 791773 - RNA, 19 nt, Artificial Sequence
  Description of Artificial Sequence: Synthetic oligonucleotide
  Antisense strand to SEQ ID NO: 791772
ucagcacaacuaaacacgu

SEQ ID NO: 791774 - RNA, 19 nt, Artificial Sequence
  Description of Artificial Sequence: Synthetic oligonucleotide
  Sense strand starting at position 1264 of SEQ ID NO: 587433
auuguucugaggcacagau

SEQ ID NO: 791775 - RNA, 19 nt, Artificial Sequence
  Description of Artificial Sequence: Synthetic oligonucleotide
  Antisense strand to SEQ ID NO: 791774
aucugugccucagaacaau

SEQ ID NO: 791776 - RNA, 19 nt, Artificial Sequence
  Description of Artificial Sequence: Synthetic oligonucleotide
  Sense strand starting at position 1304 of SEQ ID NO: 587433
ccgaaagauguugagaagu

SEQ ID NO: 791777 - RNA, 19 nt, Artificial Sequence
  Description of Artificial Sequence: Synthetic oligonucleotide
  Antisense strand to SEQ ID NO: 791776
acuucucaacaucuuucgg

SEQ ID NO: 791778 - RNA, 19 nt, Artificial Sequence
  Description of Artificial Sequence: Synthetic oligonucleotide
  Sense strand starting at position 1380 of SEQ ID NO: 587433
guguaugugcgagcuauaa

SEQ ID NO: 791779 - RNA, 19 nt, Artificial Sequence
  Description of Artificial Sequence: Synthetic oligonucleotide
  Antisense strand to SEQ ID NO: 791778
uuauagcucgcacauacac

SEQ ID NO: 791780 - RNA, 19 nt, Artificial Sequence
  Description of Artificial Sequence: Synthetic oligonucleotide
  Sense strand starting at position 1937 of SEQ ID NO: 587433
cgcggugaggucucaguua

SEQ ID NO: 791781 - RNA, 19 nt, Artificial Sequence
  Description of Artificial Sequence: Synthetic oligonucleotide
  Antisense strand to SEQ ID NO: 791780
uaacugagaccucaccgcg

SEQ ID NO: 791782 - RNA, 19 nt, Artificial Sequence
  Description of Artificial Sequence: Synthetic oligonucleotide
  Sense strand starting at position 1942 of SEQ ID NO: 587433
ugaggucucaguuacugau

SEQ ID NO: 791783 - RNA, 19 nt, Artificial Sequence
  Description of Artificial Sequence: Synthetic oligonucleotide
  Antisense strand to SEQ ID NO: 791782
aucaguaacugagaccuca

SEQ ID NO: 791784 - RNA, 19 nt, Artificial Sequence
  Description of Artificial Sequence: Synthetic oligonucleotide
  Sense strand starting at position 2220 of SEQ ID NO: 587433
uugauugcaguguaaauca

SEQ ID NO: 791785 - RNA, 19 nt, Artificial Sequence
  Description of Artificial Sequence: Synthetic oligonucleotide
  Antisense strand to SEQ ID NO: 791784
ugauuuacacugcaaucaa

SEQ ID NO: 791786 - RNA, 19 nt, Artificial Sequence
  Description of Artificial Sequence: Synthetic oligonucleotide
  Sense strand starting at position 2312 of SEQ ID NO: 587433
gcccaagaucuuggacauc

SEQ ID NO: 791787 - RNA, 19 nt, Artificial Sequence
  Description of Artificial Sequence: Synthetic oligonucleotide
  Antisense strand to SEQ ID NO: 791786
gauguccaagaucuugggc

SEQ ID NO: 791788 - RNA, 19 nt, Artificial Sequence
  Description of Artificial Sequence: Synthetic oligonucleotide
  Sense strand starting at position 2446 of SEQ ID NO: 587433
uucagucuuggugagguaa

SEQ ID NO: 791789 - RNA, 19 nt, Artificial Sequence
  Description of Artificial Sequence: Synthetic oligonucleotide
  Antisense strand to SEQ ID NO: 791788
uuaccucaccaagacugaa

SEQ ID NO: 791790 - RNA, 19 nt, Artificial Sequence
  Description of Artificial Sequence: Synthetic oligonucleotide
  Sense strand starting at position 2810 of SEQ ID NO: 587433
uugucugauguugacuuaa

SEQ ID NO: 791791 - RNA, 19 nt, Artificial Sequence
  Description of Artificial Sequence: Synthetic oligonucleotide
  Antisense strand to SEQ ID NO: 791790
uuaagucaacaucagacaa

SEQ ID NO: 791792 - RNA, 19 nt, Artificial Sequence
  Description of Artificial Sequence: Synthetic oligonucleotide
  Sense strand starting at position 2905 of SEQ ID NO: 587433
gucuguggaaucugaggaa

SEQ ID NO: 791793 - RNA, 19 nt, Artificial Sequence
  Description of Artificial Sequence: Synthetic oligonucleotide
  Antisense strand to SEQ ID NO: 791792
uuccucagauuccacagac

SEQ ID NO: 791794 - RNA, 19 nt, Artificial Sequence
  Description of Artificial Sequence: Synthetic oligonucleotide
  Sense strand starting at position 3080 of SEQ ID NO: 587433
ccggcagacaaaggauauu

SEQ ID NO: 791795 - RNA, 19 nt, Artificial Sequence
  Description of Artificial Sequence: Synthetic oligonucleotide
  Antisense strand to SEQ ID NO: 791794
aauauccuuugucugccgg

SEQ ID NO: 791796 - RNA, 19 nt, Artificial Sequence
  Description of Artificial Sequence: Synthetic oligonucleotide
  Sense strand starting at position 3211 of SEQ ID NO: 587433
uacaguauucuccagagug

SEQ ID NO: 791797 - RNA, 19 nt, Artificial Sequence
  Description of Artificial Sequence: Synthetic oligonucleotide
  Antisense strand to SEQ ID NO: 791796
cacucuggagaauacugua

SEQ ID NO: 791798 - RNA, 19 nt, Artificial Sequence
  Description of Artificial Sequence: Synthetic oligonucleotide
  Sense strand starting at position 3227 of SEQ ID NO: 587433
gugccugcucguuuaacuu

SEQ ID NO: 791799 - RNA, 19 nt, Artificial Sequence
  Description of Artificial Sequence: Synthetic oligonucleotide
  Antisense strand to SEQ ID NO: 791798
aaguuaaacgagcaggcac

SEQ ID NO: 791800 - RNA, 19 nt, Artificial Sequence
  Description of Artificial Sequence: Synthetic oligonucleotide
  Sense strand starting at position 3390 of SEQ ID NO: 587433
uuguuuguggaaugaagga

SEQ ID NO: 791801 - RNA, 19 nt, Artificial Sequence
  Description of Artificial Sequence: Synthetic oligonucleotide
  Antisense strand to SEQ ID NO: 791800
uccuucauuccacaaacaa

SEQ ID NO: 791802 - RNA, 19 nt, Artificial Sequence
  Description of Artificial Sequence: Synthetic oligonucleotide
  Sense strand starting at position 3489 of SEQ ID NO: 587433
acaguuacccgauaugaau

SEQ ID NO: 791803 - RNA, 19 nt, Artificial Sequence
  Description of Artificial Sequence: Synthetic oligonucleotide
  Antisense strand to SEQ ID NO: 791802
auucauaucggguaacugu

SEQ ID NO: 791804 - RNA, 19 nt, Artificial Sequence
  Description of Artificial Sequence: Synthetic oligonucleotide
  Sense strand starting at position 3500 of SEQ ID NO: 587433
auaugaauugauggugauu

SEQ ID NO: 791805 - RNA, 19 nt, Artificial Sequence
  Description of Artificial Sequence: Synthetic oligonucleotide
  Antisense strand to SEQ ID NO: 791804
aaucaccaucaauucauau

SEQ ID NO: 791806 - RNA, 19 nt, Artificial Sequence
  Description of Artificial Sequence: Synthetic oligonucleotide
  Sense strand starting at position 3506 of SEQ ID NO: 587433
auugauggugauuaugagu

SEQ ID NO: 791807 - RNA, 19 nt, Artificial Sequence
  Description of Artificial Sequence: Synthetic oligonucleotide
  Antisense strand to SEQ ID NO: 791806
acucauaaucaccaucaau

SEQ ID NO: 791808 - RNA, 19 nt, Artificial Sequence
  Description of Artificial Sequence: Synthetic oligonucleotide
  Sense strand starting at position 3514 of SEQ ID NO: 587433
ugauuaugaguuuguaaca

SEQ ID NO: 791809 - RNA, 19 nt, Artificial Sequence
  Description of Artificial Sequence: Synthetic oligonucleotide
  Antisense strand to SEQ ID NO: 791808
uguuacaaacucauaauca

SEQ ID NO: 791810 - RNA, 19 nt, Artificial Sequence
  Description of Artificial Sequence: Synthetic oligonucleotide
  Sense strand starting at position 3515 of SEQ ID NO: 587433
gauuaugaguuuguaacag

SEQ ID NO: 791811 - RNA, 19 nt, Artificial Sequence
  Description of Artificial Sequence: Synthetic oligonucleotide
  Antisense strand to SEQ ID NO: 791810
cuguuacaaacucauaauc

SEQ ID NO: 791812 - RNA, 19 nt, Artificial Sequence
  Description of Artificial Sequence: Synthetic oligonucleotide
  Sense strand starting at position 3568 of SEQ ID NO: 587433
ugucuagaagagugaaauu

SEQ ID NO: 791813 - RNA, 19 nt, Artificial Sequence
  Description of Artificial Sequence: Synthetic oligonucleotide
  Antisense strand to SEQ ID NO: 791812
aauuucacucuucuagaca

SEQ ID NO: 791814 - RNA, 19 nt, Artificial Sequence
  Description of Artificial Sequence: Synthetic oligonucleotide
  Sense strand starting at position 3617 of SEQ ID NO: 587433
cuggacauauuugaauuau

SEQ ID NO: 791815 - RNA, 19 nt, Artificial Sequence
  Description of Artificial Sequence: Synthetic oligonucleotide
  Antisense strand to SEQ ID NO: 791814
auaauucaaauauguccag

SEQ ID NO: 791816 - RNA, 19 nt, Artificial Sequence
  Description of Artificial Sequence: Synthetic oligonucleotide
  Sense strand starting at position 3669 of SEQ ID NO: 587433
aucacagagcuguagcaaa

SEQ ID NO: 791817 - RNA, 19 nt, Artificial Sequence
  Description of Artificial Sequence: Synthetic oligonucleotide
  Antisense strand to SEQ ID NO: 791816
uuugcuacagcucugugau

SEQ ID NO: 791818 - RNA, 19 nt, Artificial Sequence
  Description of Artificial Sequence: Synthetic oligonucleotide
  Sense strand starting at position 96 of SEQ ID NO: 587434
gugugaaaucugcauucuu

SEQ ID NO: 791819 - RNA, 19 nt, Artificial Sequence
  Description of Artificial Sequence: Synthetic oligonucleotide
  Antisense strand to SEQ ID NO: 791818
aagaaugcagauuucacac

SEQ ID NO: 791820 - RNA, 19 nt, Artificial Sequence
  Description of Artificial Sequence: Synthetic oligonucleotide
  Sense strand starting at position 184 of SEQ ID NO: 587434
acgaguuuacuauauccac

SEQ ID NO: 791821 - RNA, 19 nt, Artificial Sequence
  Description of Artificial Sequence: Synthetic oligonucleotide
  Antisense strand to SEQ ID NO: 791820
guggauauaguaaacucgu

SEQ ID NO: 791822 - RNA, 19 nt, Artificial Sequence
  Description of Artificial Sequence: Synthetic oligonucleotide
  Sense strand starting at position 193 of SEQ ID NO: 587434
cuauauccacucugugaag

SEQ ID NO: 791823 - RNA, 19 nt, Artificial Sequence
  Description of Artificial Sequence: Synthetic oligonucleotide
  Antisense strand to SEQ ID NO: 791822
cuucacagaguggauauag

SEQ ID NO: 791824 - RNA, 19 nt, Artificial Sequence
  Description of Artificial Sequence: Synthetic oligonucleotide
  Sense strand starting at position 259 of SEQ ID NO: 587434
ucuggcauguuaccaauaa

SEQ ID NO: 791825 - RNA, 19 nt, Artificial Sequence
  Description of Artificial Sequence: Synthetic oligonucleotide
  Antisense strand to SEQ ID NO: 791824
uuauugguaacaugccaga

SEQ ID NO: 791826 - RNA, 19 nt, Artificial Sequence
  Description of Artificial Sequence: Synthetic oligonucleotide
  Sense strand starting at position 321 of SEQ ID NO: 587434
cccuuugguuucucagaaa

SEQ ID NO: 791827 - RNA, 19 nt, Artificial Sequence
  Description of Artificial Sequence: Synthetic oligonucleotide
  Antisense strand to SEQ ID NO: 791826
uuucugagaaaccaaaggg

SEQ ID NO: 791828 - RNA, 19 nt, Artificial Sequence
  Description of Artificial Sequence: Synthetic oligonucleotide
  Sense strand starting at position 504 of SEQ ID NO: 587434
aguccaagaacgugaguua

SEQ ID NO: 791829 - RNA, 19 nt, Artificial Sequence
  Description of Artificial Sequence: Synthetic oligonucleotide
  Antisense strand to SEQ ID NO: 791828
uaacucacguucuuggacu

SEQ ID NO: 791830 - RNA, 19 nt, Artificial Sequence
  Description of Artificial Sequence: Synthetic oligonucleotide
  Sense strand starting at position 505 of SEQ ID NO: 587434
guccaagaacgugaguuaa

SEQ ID NO: 791831 - RNA, 19 nt, Artificial Sequence
  Description of Artificial Sequence: Synthetic oligonucleotide
  Antisense strand to SEQ ID NO: 791830
uuaacucacguucuuggac

SEQ ID NO: 791832 - RNA, 19 nt, Artificial Sequence
  Description of Artificial Sequence: Synthetic oligonucleotide
  Sense strand starting at position 529 of SEQ ID NO: 587434
cacaguagugugugaagaa

SEQ ID NO: 791833 - RNA, 19 nt, Artificial Sequence
  Description of Artificial Sequence: Synthetic oligonucleotide
  Antisense strand to SEQ ID NO: 791832
uucuucacacacuacugug

SEQ ID NO: 791834 - RNA, 19 nt, Artificial Sequence
  Description of Artificial Sequence: Synthetic oligonucleotide
  Sense strand starting at position 754 of SEQ ID NO: 587434
agacgaaacgugcauugga

SEQ ID NO: 791835 - RNA, 19 nt, Artificial Sequence
  Description of Artificial Sequence: Synthetic oligonucleotide
  Antisense strand to SEQ ID NO: 791834
uccaaugcacguuucgucu

SEQ ID NO: 791836 - RNA, 19 nt, Artificial Sequence
  Description of Artificial Sequence: Synthetic oligonucleotide
  Sense strand starting at position 1000 of SEQ ID NO: 587434
aaagucacacugcgauuau

SEQ ID NO: 791837 - RNA, 19 nt, Artificial Sequence
  Description of Artificial Sequence: Synthetic oligonucleotide
  Antisense strand to SEQ ID NO: 791836
auaaucgcagugugacuuu

SEQ ID NO: 791838 - RNA, 19 nt, Artificial Sequence
  Description of Artificial Sequence: Synthetic oligonucleotide
  Sense strand starting at position 1011 of SEQ ID NO: 587434
gcgauuaucugggucauuu

SEQ ID NO: 791839 - RNA, 19 nt, Artificial Sequence
  Description of Artificial Sequence: Synthetic oligonucleotide
  Antisense strand to SEQ ID NO: 791838
aaaugacccagauaaucgc

SEQ ID NO: 791840 - RNA, 19 nt, Artificial Sequence
  Description of Artificial Sequence: Synthetic oligonucleotide
  Sense strand starting at position 1053 of SEQ ID NO: 587434
uguaguaucgcgucugucu

SEQ ID NO: 791841 - RNA, 19 nt, Artificial Sequence
  Description of Artificial Sequence: Synthetic oligonucleotide
  Antisense strand to SEQ ID NO: 791840
agacagacgcgauacuaca

SEQ ID NO: 791842 - RNA, 19 nt, Artificial Sequence
  Description of Artificial Sequence: Synthetic oligonucleotide
  Sense strand starting at position 1054 of SEQ ID NO: 587434
guaguaucgcgucugucua

SEQ ID NO: 791843 - RNA, 19 nt, Artificial Sequence
  Description of Artificial Sequence: Synthetic oligonucleotide
  Antisense strand to SEQ ID NO: 791842
uagacagacgcgauacuac

SEQ ID NO: 791844 - RNA, 19 nt, Artificial Sequence
  Description of Artificial Sequence: Synthetic oligonucleotide
  Sense strand starting at position 1125 of SEQ ID NO: 587434
cagggacgcuuauuagaca

SEQ ID NO: 791845 - RNA, 19 nt, Artificial Sequence
  Description of Artificial Sequence: Synthetic oligonucleotide
  Antisense strand to SEQ ID NO: 791844
ugucuaauaagcgucccug

SEQ ID NO: 791846 - RNA, 19 nt, Artificial Sequence
  Description of Artificial Sequence: Synthetic oligonucleotide
  Sense strand starting at position 1157 of SEQ ID NO: 587434
gcccaagcuccagacuaau

SEQ ID NO: 791847 - RNA, 19 nt, Artificial Sequence
  Description of Artificial Sequence: Synthetic oligonucleotide
  Antisense strand to SEQ ID NO: 791846
auuagucuggagcuugggc

SEQ ID NO: 791848 - RNA, 19 nt, Artificial Sequence
  Description of Artificial Sequence: Synthetic oligonucleotide
  Sense strand starting at position 1494 of SEQ ID NO: 587434
gggcuuuaacuuugaaauc

SEQ ID NO: 791849 - RNA, 19 nt, Artificial Sequence
  Description of Artificial Sequence: Synthetic oligonucleotide
  Antisense strand to SEQ ID NO: 791848
gauuucaaaguuaaagccc

SEQ ID NO: 791850 - RNA, 19 nt, Artificial Sequence
  Description of Artificial Sequence: Synthetic oligonucleotide
  Sense strand starting at position 1504 of SEQ ID NO: 587434
uuugaaaucccacggguca

SEQ ID NO: 791851 - RNA, 19 nt, Artificial Sequence
  Description of Artificial Sequence: Synthetic oligonucleotide
  Antisense strand to SEQ ID NO: 791850
ugacccgugggauuucaaa

SEQ ID NO: 791852 - RNA, 19 nt, Artificial Sequence
  Description of Artificial Sequence: Synthetic oligonucleotide
  Sense strand starting at position 2208 of SEQ ID NO: 587434
uuuggagugcaucacuuua

SEQ ID NO: 791853 - RNA, 19 nt, Artificial Sequence
  Description of Artificial Sequence: Synthetic oligonucleotide
  Antisense strand to SEQ ID NO: 791852
uaaagugaugcacuccaaa

SEQ ID NO: 791854 - RNA, 19 nt, Artificial Sequence
  Description of Artificial Sequence: Synthetic oligonucleotide
  Sense strand starting at position 2220 of SEQ ID NO: 587434
cacuuuacguuugugagga

SEQ ID NO: 791855 - RNA, 19 nt, Artificial Sequence
  Description of Artificial Sequence: Synthetic oligonucleotide
  Antisense strand to SEQ ID NO: 791854
uccucacaaacguaaagug

SEQ ID NO: 791856 - RNA, 19 nt, Artificial Sequence
  Description of Artificial Sequence: Synthetic oligonucleotide
  Sense strand starting at position 2315 of SEQ ID NO: 587434
cucugaaagcaugguuuau

SEQ ID NO: 791857 - RNA, 19 nt, Artificial Sequence
  Description of Artificial Sequence: Synthetic oligonucleotide
  Antisense strand to SEQ ID NO: 791856
auaaaccaugcuuucagag

SEQ ID NO: 791858 - RNA, 19 nt, Artificial Sequence
  Description of Artificial Sequence: Synthetic oligonucleotide
  Sense strand starting at position 2427 of SEQ ID NO: 587434
gaccuuaucccucaggagu

SEQ ID NO: 791859 - RNA, 19 nt, Artificial Sequence
  Description of Artificial Sequence: Synthetic oligonucleotide
  Antisense strand to SEQ ID NO: 791858
acuccugagggauaagguc

SEQ ID NO: 791860 - RNA, 19 nt, Artificial Sequence
  Description of Artificial Sequence: Synthetic oligonucleotide
  Sense strand starting at position 2442 of SEQ ID NO: 587434
gaguuagucuccucuggag

SEQ ID NO: 791861 - RNA, 19 nt, Artificial Sequence
  Description of Artificial Sequence: Synthetic oligonucleotide
  Antisense strand to SEQ ID NO: 791860
cuccagaggagacuaacuc

SEQ ID NO: 791862 - RNA, 19 nt, Artificial Sequence
  Description of Artificial Sequence: Synthetic oligonucleotide
  Sense strand starting at position 2444 of SEQ ID NO: 587434
guuagucuccucuggagag

SEQ ID NO: 791863 - RNA, 19 nt, Artificial Sequence
  Description of Artificial Sequence: Synthetic oligonucleotide
  Antisense strand to SEQ ID NO: 791862
cucuccagaggagacuaac

SEQ ID NO: 791864 - RNA, 19 nt, Artificial Sequence
  Description of Artificial Sequence: Synthetic oligonucleotide
  Sense strand starting at position 2494 of SEQ ID NO: 587434
ucuugacucugggugucau

SEQ ID NO: 791865 - RNA, 19 nt, Artificial Sequence
  Description of Artificial Sequence: Synthetic oligonucleotide
  Antisense strand to SEQ ID NO: 791864
augacacccagagucaaga

SEQ ID NO: 791866 - RNA, 19 nt, Artificial Sequence
  Description of Artificial Sequence: Synthetic oligonucleotide
  Sense strand starting at position 2523 of SEQ ID NO: 587434
gguaucuaauagucaccaa

SEQ ID NO: 791867 - RNA, 19 nt, Artificial Sequence
  Description of Artificial Sequence: Synthetic oligonucleotide
  Antisense strand to SEQ ID NO: 791866
uuggugacuauuagauacc

SEQ ID NO: 791868 - RNA, 19 nt, Artificial Sequence
  Description of Artificial Sequence: Synthetic oligonucleotide
  Sense strand starting at position 2796 of SEQ ID NO: 587434
cugagaaccuuuguccuaa

SEQ ID NO: 791869 - RNA, 19 nt, Artificial Sequence
  Description of Artificial Sequence: Synthetic oligonucleotide
  Antisense strand to SEQ ID NO: 791868
uuaggacaaagguucucag

SEQ ID NO: 791870 - RNA, 19 nt, Artificial Sequence
  Description of Artificial Sequence: Synthetic oligonucleotide
  Sense strand starting at position 2797 of SEQ ID NO: 587434
ugagaaccuuuguccuaaa

SEQ ID NO: 791871 - RNA, 19 nt, Artificial Sequence
  Description of Artificial Sequence: Synthetic oligonucleotide
  Antisense strand to SEQ ID NO: 791870
uuuaggacaaagguucuca

SEQ ID NO: 791872 - RNA, 19 nt, Artificial Sequence
  Description of Artificial Sequence: Synthetic oligonucleotide
  Sense strand starting at position 2841 of SEQ ID NO: 587434
aaaugauauugugcaguac

SEQ ID NO: 791873 - RNA, 19 nt, Artificial Sequence
  Description of Artificial Sequence: Synthetic oligonucleotide
  Antisense strand to SEQ ID NO: 791872
guacugcacaauaucauuu

SEQ ID NO: 791874 - RNA, 19 nt, Artificial Sequence
  Description of Artificial Sequence: Synthetic oligonucleotide
  Sense strand starting at position 2842 of SEQ ID NO: 587434
aaugauauugugcaguacu

SEQ ID NO: 791875 - RNA, 19 nt, Artificial Sequence
  Description of Artificial Sequence: Synthetic oligonucleotide
  Antisense strand to SEQ ID NO: 791874
aguacugcacaauaucauu

SEQ ID NO: 791876 - RNA, 19 nt, Artificial Sequence
  Description of Artificial Sequence: Synthetic oligonucleotide
  Sense strand starting at position 2899 of SEQ ID NO: 587434
aagcgcugaggagaaauua

SEQ ID NO: 791877 - RNA, 19 nt, Artificial Sequence
  Description of Artificial Sequence: Synthetic oligonucleotide
  Antisense strand to SEQ ID NO: 791876
uaauuucuccucagcgcuu

SEQ ID NO: 791878 - RNA, 19 nt, Artificial Sequence
  Description of Artificial Sequence: Synthetic oligonucleotide
  Sense strand starting at position 2911 of SEQ ID NO: 587434
gaaauuagucuuggcuuga

SEQ ID NO: 791879 - RNA, 19 nt, Artificial Sequence
  Description of Artificial Sequence: Synthetic oligonucleotide
  Antisense strand to SEQ ID NO: 791878
ucaagccaagacuaauuuc

SEQ ID NO: 791880 - RNA, 19 nt, Artificial Sequence
  Description of Artificial Sequence: Synthetic oligonucleotide
  Sense strand starting at position 2912 of SEQ ID NO: 587434
aaauuagucuuggcuugag

SEQ ID NO: 791881 - RNA, 19 nt, Artificial Sequence
  Description of Artificial Sequence: Synthetic oligonucleotide
  Antisense strand to SEQ ID NO: 791880
cucaagccaagacuaauuu

SEQ ID NO: 791882 - RNA, 19 nt, Artificial Sequence
  Description of Artificial Sequence: Synthetic oligonucleotide
  Sense strand starting at position 3044 of SEQ ID NO: 587434
gaguguguacuguaccuau

SEQ ID NO: 791883 - RNA, 19 nt, Artificial Sequence
  Description of Artificial Sequence: Synthetic oligonucleotide
  Antisense strand to SEQ ID NO: 791882
auagguacaguacacacuc

SEQ ID NO: 791884 - RNA, 19 nt, Artificial Sequence
  Description of Artificial Sequence: Synthetic oligonucleotide
  Sense strand starting at position 3047 of SEQ ID NO: 587434
uguguacuguaccuauaaa

SEQ ID NO: 791885 - RNA, 19 nt, Artificial Sequence
  Description of Artificial Sequence: Synthetic oligonucleotide
  Antisense strand to SEQ ID NO: 791884
uuuauagguacaguacaca

SEQ ID NO: 791886 - RNA, 19 nt, Artificial Sequence
  Description of Artificial Sequence: Synthetic oligonucleotide
  Sense strand starting at position 3389 of SEQ ID NO: 587434
gagagacugucccuugcua

SEQ ID NO: 791887 - RNA, 19 nt, Artificial Sequence
  Description of Artificial Sequence: Synthetic oligonucleotide
  Antisense strand to SEQ ID NO: 791886
uagcaagggacagucucuc

SEQ ID NO: 791888 - RNA, 19 nt, Artificial Sequence
  Description of Artificial Sequence: Synthetic oligonucleotide
  Sense strand starting at position 3391 of SEQ ID NO: 587434
gagacugucccuugcuaac

SEQ ID NO: 791889 - RNA, 19 nt, Artificial Sequence
  Description of Artificial Sequence: Synthetic oligonucleotide
  Antisense strand to SEQ ID NO: 791888
guuagcaagggacagucuc

SEQ ID NO: 791890 - RNA, 19 nt, Artificial Sequence
  Description of Artificial Sequence: Synthetic oligonucleotide
  Sense strand starting at position 3501 of SEQ ID NO: 587434
ucccuaagacuuuggcauu

SEQ ID NO: 791891 - RNA, 19 nt, Artificial Sequence
  Description of Artificial Sequence: Synthetic oligonucleotide
  Antisense strand to SEQ ID NO: 791890
aaugccaaagucuuaggga

SEQ ID NO: 791892 - RNA, 19 nt, Artificial Sequence
  Description of Artificial Sequence: Synthetic oligonucleotide
  Sense strand starting at position 3513 of SEQ ID NO: 587434
uggcauuaucuugauuccu

SEQ ID NO: 791893 - RNA, 19 nt, Artificial Sequence
  Description of Artificial Sequence: Synthetic oligonucleotide
  Antisense strand to SEQ ID NO: 791892
aggaaucaagauaaugcca

SEQ ID NO: 791894 - RNA, 19 nt, Artificial Sequence
  Description of Artificial Sequence: Synthetic oligonucleotide
  Sense strand starting at position 3570 of SEQ ID NO: 587434
cugucaugagugcuugugu

SEQ ID NO: 791895 - RNA, 19 nt, Artificial Sequence
  Description of Artificial Sequence: Synthetic oligonucleotide
  Antisense strand to SEQ ID NO: 791894
acacaagcacucaugacag

SEQ ID NO: 791896 - RNA, 19 nt, Artificial Sequence
  Description of Artificial Sequence: Synthetic oligonucleotide
  Sense strand starting at position 3791 of SEQ ID NO: 587434
uuaagaaacuguucuguga

SEQ ID NO: 791897 - RNA, 19 nt, Artificial Sequence
  Description of Artificial Sequence: Synthetic oligonucleotide
  Antisense strand to SEQ ID NO: 791896
ucacagaacaguuucuuaa

SEQ ID NO: 791898 - RNA, 19 nt, Artificial Sequence
  Description of Artificial Sequence: Synthetic oligonucleotide
  Sense strand starting at position 264 of SEQ ID NO: 587435
cguaugagugcggauguga

SEQ ID NO: 791899 - RNA, 19 nt, Artificial Sequence
  Description of Artificial Sequence: Synthetic oligonucleotide
  Antisense strand to SEQ ID NO: 791898
ucacauccgcacucauacg

SEQ ID NO: 791900 - RNA, 19 nt, Artificial Sequence
  Description of Artificial Sequence: Synthetic oligonucleotide
  Sense strand starting at position 527 of SEQ ID NO: 587435
gguggaucugcuugucuuu

SEQ ID NO: 791901 - RNA, 19 nt, Artificial Sequence
  Description of Artificial Sequence: Synthetic oligonucleotide
  Antisense strand to SEQ ID NO: 791900
aaagacaagcagauccacc

SEQ ID NO: 791902 - RNA, 19 nt, Artificial Sequence
  Description of Artificial Sequence: Synthetic oligonucleotide
  Sense strand starting at position 529 of SEQ ID NO: 587435
uggaucugcuugucuuuga

SEQ ID NO: 791903 - RNA, 19 nt, Artificial Sequence
  Description of Artificial Sequence: Synthetic oligonucleotide
  Antisense strand to SEQ ID NO: 791902
ucaaagacaagcagaucca

SEQ ID NO: 791904 - RNA, 19 nt, Artificial Sequence
  Description of Artificial Sequence: Synthetic oligonucleotide
  Sense strand starting at position 530 of SEQ ID NO: 587435
ggaucugcuugucuuugaa

SEQ ID NO: 791905 - RNA, 19 nt, Artificial Sequence
  Description of Artificial Sequence: Synthetic oligonucleotide
  Antisense strand to SEQ ID NO: 791904
uucaaagacaagcagaucc

SEQ ID NO: 791906 - RNA, 19 nt, Artificial Sequence
  Description of Artificial Sequence: Synthetic oligonucleotide
  Sense strand starting at position 542 of SEQ ID NO: 587435
cuuugaaugccuugauggu

SEQ ID NO: 791907 - RNA, 19 nt, Artificial Sequence
  Description of Artificial Sequence: Synthetic oligonucleotide
  Antisense strand to SEQ ID NO: 791906
accaucaaggcauucaaag

SEQ ID NO: 791908 - RNA, 19 nt, Artificial Sequence
  Description of Artificial Sequence: Synthetic oligonucleotide
  Sense strand starting at position 615 of SEQ ID NO: 587435
gggcuugugcuccggaaug

SEQ ID NO: 791909 - RNA, 19 nt, Artificial Sequence
  Description of Artificial Sequence: Synthetic oligonucleotide
  Antisense strand to SEQ ID NO: 791908
cauuccggagcacaagccc

SEQ ID NO: 791910 - RNA, 19 nt, Artificial Sequence
  Description of Artificial Sequence: Synthetic oligonucleotide
  Sense strand starting at position 617 of SEQ ID NO: 587435
gcuugugcuccggaaugga

SEQ ID NO: 791911 - RNA, 19 nt, Artificial Sequence
  Description of Artificial Sequence: Synthetic oligonucleotide
  Antisense strand to SEQ ID NO: 791910
uccauuccggagcacaagc

SEQ ID NO: 791912 - RNA, 19 nt, Artificial Sequence
  Description of Artificial Sequence: Synthetic oligonucleotide
  Sense strand starting at position 659 of SEQ ID NO: 587435
agagguuguagucaggaau

SEQ ID NO: 791913 - RNA, 19 nt, Artificial Sequence
  Description of Artificial Sequence: Synthetic oligonucleotide
  Antisense strand to SEQ ID NO: 791912
auuccugacuacaaccucu

SEQ ID NO: 791914 - RNA, 19 nt, Artificial Sequence
  Description of Artificial Sequence: Synthetic oligonucleotide
  Sense strand starting at position 662 of SEQ ID NO: 587435
gguuguagucaggaaucau

SEQ ID NO: 791915 - RNA, 19 nt, Artificial Sequence
  Description of Artificial Sequence: Synthetic oligonucleotide
  Antisense strand to SEQ ID NO: 791914
augauuccugacuacaacc

SEQ ID NO: 791916 - RNA, 19 nt, Artificial Sequence
  Description of Artificial Sequence: Synthetic oligonucleotide
  Sense strand starting at position 926 of SEQ ID NO: 587435
cgcucaugaggcuaaugau

SEQ ID NO: 791917 - RNA, 19 nt, Artificial Sequence
  Description of Artificial Sequence: Synthetic oligonucleotide
  Antisense strand to SEQ ID NO: 791916
aucauuagccucaugagcg

SEQ ID NO: 791918 - RNA, 19 nt, Artificial Sequence
  Description of Artificial Sequence: Synthetic oligonucleotide
  Sense strand starting at position 938 of SEQ ID NO: 587435
uaaugauguuguccuggca

SEQ ID NO: 791919 - RNA, 19 nt, Artificial Sequence
  Description of Artificial Sequence: Synthetic oligonucleotide
  Antisense strand to SEQ ID NO: 791918
ugccaggacaacaucauua

SEQ ID NO: 791920 - RNA, 19 nt, Artificial Sequence
  Description of Artificial Sequence: Synthetic oligonucleotide
  Sense strand starting at position 977 of SEQ ID NO: 587435
aggcgaacuuucccaagua

SEQ ID NO: 791921 - RNA, 19 nt, Artificial Sequence
  Description of Artificial Sequence: Synthetic oligonucleotide
  Antisense strand to SEQ ID NO: 791920
uacuugggaaaguucgccu

SEQ ID NO: 791922 - RNA, 19 nt, Artificial Sequence
  Description of Artificial Sequence: Synthetic oligonucleotide
  Sense strand starting at position 1056 of SEQ ID NO: 587435
gggcuucucguuggucaga

SEQ ID NO: 791923 - RNA, 19 nt, Artificial Sequence
  Description of Artificial Sequence: Synthetic oligonucleotide
  Antisense strand to SEQ ID NO: 791922
ucugaccaacgagaagccc

SEQ ID NO: 791924 - RNA, 19 nt, Artificial Sequence
  Description of Artificial Sequence: Synthetic oligonucleotide
  Sense strand starting at position 1067 of SEQ ID NO: 587435
uggucagaccgauguccau

SEQ ID NO: 791925 - RNA, 19 nt, Artificial Sequence
  Description of Artificial Sequence: Synthetic oligonucleotide
  Antisense strand to SEQ ID NO: 791924
auggacaucggucugacca

SEQ ID NO: 791926 - RNA, 19 nt, Artificial Sequence
  Description of Artificial Sequence: Synthetic oligonucleotide
  Sense strand starting at position 1084 of SEQ ID NO: 587435
auuacauucucugcggaga

SEQ ID NO: 791927 - RNA, 19 nt, Artificial Sequence
  Description of Artificial Sequence: Synthetic oligonucleotide
  Antisense strand to SEQ ID NO: 791926
ucuccgcagagaauguaau

SEQ ID NO: 791928 - RNA, 19 nt, Artificial Sequence
  Description of Artificial Sequence: Synthetic oligonucleotide
  Sense strand starting at position 1373 of SEQ ID NO: 587435
gcgcgagaagcauuguugu

SEQ ID NO: 791929 - RNA, 19 nt, Artificial Sequence
  Description of Artificial Sequence: Synthetic oligonucleotide
  Antisense strand to SEQ ID NO: 791928
acaacaaugcuucucgcgc

SEQ ID NO: 791930 - RNA, 19 nt, Artificial Sequence
  Description of Artificial Sequence: Synthetic oligonucleotide
  Sense strand starting at position 2404 of SEQ ID NO: 587435
guagccaucugauuguaau

SEQ ID NO: 791931 - RNA, 19 nt, Artificial Sequence
  Description of Artificial Sequence: Synthetic oligonucleotide
  Antisense strand to SEQ ID NO: 791930
auuacaaucagauggcuac

SEQ ID NO: 791932 - RNA, 19 nt, Artificial Sequence
  Description of Artificial Sequence: Synthetic oligonucleotide
  Sense strand starting at position 2405 of SEQ ID NO: 587435
uagccaucugauuguaaug

SEQ ID NO: 791933 - RNA, 19 nt, Artificial Sequence
  Description of Artificial Sequence: Synthetic oligonucleotide
  Antisense strand to SEQ ID NO: 791932
cauuacaaucagauggcua

SEQ ID NO: 791934 - RNA, 19 nt, Artificial Sequence
  Description of Artificial Sequence: Synthetic oligonucleotide
  Sense strand starting at position 2410 of SEQ ID NO: 587435
aucugauuguaauggacua

SEQ ID NO: 791935 - RNA, 19 nt, Artificial Sequence
  Description of Artificial Sequence: Synthetic oligonucleotide
  Antisense strand to SEQ ID NO: 791934
uaguccauuacaaucagau

SEQ ID NO: 791936 - RNA, 19 nt, Artificial Sequence
  Description of Artificial Sequence: Synthetic oligonucleotide
  Sense strand starting at position 2539 of SEQ ID NO: 587435
gcgaguuugccggucauag

SEQ ID NO: 791937 - RNA, 19 nt, Artificial Sequence
  Description of Artificial Sequence: Synthetic oligonucleotide
  Antisense strand to SEQ ID NO: 791936
cuaugaccggcaaacucgc

SEQ ID NO: 791938 - RNA, 19 nt, Artificial Sequence
  Description of Artificial Sequence: Synthetic oligonucleotide
  Sense strand starting at position 2540 of SEQ ID NO: 587435
cgaguuugccggucauagc

SEQ ID NO: 791939 - RNA, 19 nt, Artificial Sequence
  Description of Artificial Sequence: Synthetic oligonucleotide
  Antisense strand to SEQ ID NO: 791938
gcuaugaccggcaaacucg

SEQ ID NO: 791940 - RNA, 19 nt, Artificial Sequence
  Description of Artificial Sequence: Synthetic oligonucleotide
  Sense strand starting at position 2541 of SEQ ID NO: 587435
gaguuugccggucauagca

SEQ ID NO: 791941 - RNA, 19 nt, Artificial Sequence
  Description of Artificial Sequence: Synthetic oligonucleotide
  Antisense strand to SEQ ID NO: 791940
ugcuaugaccggcaaacuc

SEQ ID NO: 791942 - RNA, 19 nt, Artificial Sequence
  Description of Artificial Sequence: Synthetic oligonucleotide
  Sense strand starting at position 3129 of SEQ ID NO: 587435
gggaaagcuccgugacgua

SEQ ID NO: 791943 - RNA, 19 nt, Artificial Sequence
  Description of Artificial Sequence: Synthetic oligonucleotide
  Antisense strand to SEQ ID NO: 791942
uacgucacggagcuuuccc

SEQ ID NO: 791944 - RNA, 19 nt, Artificial Sequence
  Description of Artificial Sequence: Synthetic oligonucleotide
  Sense strand starting at position 3141 of SEQ ID NO: 587435
ugacguagcugcccauaua

SEQ ID NO: 791945 - RNA, 19 nt, Artificial Sequence
  Description of Artificial Sequence: Synthetic oligonucleotide
  Antisense strand to SEQ ID NO: 791944
uauaugggcagcuacguca

SEQ ID NO: 791946 - RNA, 19 nt, Artificial Sequence
  Description of Artificial Sequence: Synthetic oligonucleotide
  Sense strand starting at position 3142 of SEQ ID NO: 587435
gacguagcugcccauauau

SEQ ID NO: 791947 - RNA, 19 nt, Artificial Sequence
  Description of Artificial Sequence: Synthetic oligonucleotide
  Antisense strand to SEQ ID NO: 791946
auauaugggcagcuacguc

SEQ ID NO: 791948 - RNA, 19 nt, Artificial Sequence
  Description of Artificial Sequence: Synthetic oligonucleotide
  Sense strand starting at position 3186 of SEQ ID NO: 587435
gcgcgacgucacaauggaa

SEQ ID NO: 791949 - RNA, 19 nt, Artificial Sequence
  Description of Artificial Sequence: Synthetic oligonucleotide
  Antisense strand to SEQ ID NO: 791948
uuccauugugacgucgcgc

SEQ ID NO: 791950 - RNA, 19 nt, Artificial Sequence
  Description of Artificial Sequence: Synthetic oligonucleotide
  Sense strand starting at position 3307 of SEQ ID NO: 587435
caagaagaaugcgagaaga

SEQ ID NO: 791951 - RNA, 19 nt, Artificial Sequence
  Description of Artificial Sequence: Synthetic oligonucleotide
  Antisense strand to SEQ ID NO: 791950
ucuucucgcauucuucuug

SEQ ID NO: 791952 - RNA, 19 nt, Artificial Sequence
  Description of Artificial Sequence: Synthetic oligonucleotide
  Sense strand starting at position 3387 of SEQ ID NO: 587435
ccaguaacucauugugugu

SEQ ID NO: 791953 - RNA, 19 nt, Artificial Sequence
  Description of Artificial Sequence: Synthetic oligonucleotide
  Antisense strand to SEQ ID NO: 791952
acacacaaugaguuacugg

SEQ ID NO: 791954 - RNA, 19 nt, Artificial Sequence
  Description of Artificial Sequence: Synthetic oligonucleotide
  Sense strand starting at position 3402 of SEQ ID NO: 587435
guguguuuauuugagguuu

SEQ ID NO: 791955 - RNA, 19 nt, Artificial Sequence
  Description of Artificial Sequence: Synthetic oligonucleotide
  Antisense strand to SEQ ID NO: 791954
aaaccucaaauaaacacac

SEQ ID NO: 791956 - RNA, 19 nt, Artificial Sequence
  Description of Artificial Sequence: Synthetic oligonucleotide
  Sense strand starting at position 3408 of SEQ ID NO: 587435
uuauuugagguuugcguua

SEQ ID NO: 791957 - RNA, 19 nt, Artificial Sequence
  Description of Artificial Sequence: Synthetic oligonucleotide
  Antisense strand to SEQ ID NO: 791956
uaacgcaaaccucaaauaa

SEQ ID NO: 791958 - RNA, 19 nt, Artificial Sequence
  Description of Artificial Sequence: Synthetic oligonucleotide
  Sense strand starting at position 3463 of SEQ ID NO: 587435
gguuguuugcaaguggucu

SEQ ID NO: 791959 - RNA, 19 nt, Artificial Sequence
  Description of Artificial Sequence: Synthetic oligonucleotide
  Antisense strand to SEQ ID NO: 791958
agaccacuugcaaacaacc

SEQ ID NO: 791960 - RNA, 19 nt, Artificial Sequence
  Description of Artificial Sequence: Synthetic oligonucleotide
  Sense strand starting at position 3467 of SEQ ID NO: 587435
guuugcaaguggucuccaa

SEQ ID NO: 791961 - RNA, 19 nt, Artificial Sequence
  Description of Artificial Sequence: Synthetic oligonucleotide
  Antisense strand to SEQ ID NO: 791960
uuggagaccacuugcaaac

SEQ ID NO: 791962 - RNA, 19 nt, Artificial Sequence
  Description of Artificial Sequence: Synthetic oligonucleotide
  Sense strand starting at position 3605 of SEQ ID NO: 587435
ucgggauccuauccgagau

SEQ ID NO: 791963 - RNA, 19 nt, Artificial Sequence
  Description of Artificial Sequence: Synthetic oligonucleotide
  Antisense strand to SEQ ID NO: 791962
aucucggauaggaucccga

SEQ ID NO: 791964 - RNA, 19 nt, Artificial Sequence
  Description of Artificial Sequence: Synthetic oligonucleotide
  Sense strand starting at position 3606 of SEQ ID NO: 587435
cgggauccuauccgagauu

SEQ ID NO: 791965 - RNA, 19 nt, Artificial Sequence
  Description of Artificial Sequence: Synthetic oligonucleotide
  Antisense strand to SEQ ID NO: 791964
aaucucggauaggaucccg

SEQ ID NO: 791966 - RNA, 19 nt, Artificial Sequence
  Description of Artificial Sequence: Synthetic oligonucleotide
  Sense strand starting at position 3607 of SEQ ID NO: 587435
gggauccuauccgagauua

SEQ ID NO: 791967 - RNA, 19 nt, Artificial Sequence
  Description of Artificial Sequence: Synthetic oligonucleotide
  Antisense strand to SEQ ID NO: 791966
uaaucucggauaggauccc

SEQ ID NO: 791968 - RNA, 19 nt, Artificial Sequence
  Description of Artificial Sequence: Synthetic oligonucleotide
  Sense strand starting at position 3697 of SEQ ID NO: 587435
gucagaauuccuuggucca

SEQ ID NO: 791969 - RNA, 19 nt, Artificial Sequence
  Description of Artificial Sequence: Synthetic oligonucleotide
  Antisense strand to SEQ ID NO: 791968
uggaccaaggaauucugac

SEQ ID NO: 791970 - RNA, 19 nt, Artificial Sequence
  Description of Artificial Sequence: Synthetic oligonucleotide
  Sense strand starting at position 3698 of SEQ ID NO: 587435
ucagaauuccuugguccaa

SEQ ID NO: 791971 - RNA, 19 nt, Artificial Sequence
  Description of Artificial Sequence: Synthetic oligonucleotide
  Antisense strand to SEQ ID NO: 791970
uuggaccaaggaauucuga

SEQ ID NO: 791972 - RNA, 19 nt, Artificial Sequence
  Description of Artificial Sequence: Synthetic oligonucleotide
  Sense strand starting at position 3700 of SEQ ID NO: 587435
agaauuccuugguccaaua

SEQ ID NO: 791973 - RNA, 19 nt, Artificial Sequence
  Description of Artificial Sequence: Synthetic oligonucleotide
  Antisense strand to SEQ ID NO: 791972
uauuggaccaaggaauucu

SEQ ID NO: 791974 - RNA, 19 nt, Artificial Sequence
  Description of Artificial Sequence: Synthetic oligonucleotide
  Sense strand starting at position 3710 of SEQ ID NO: 587435
gguccaauaucccaagaac

SEQ ID NO: 791975 - RNA, 19 nt, Artificial Sequence
  Description of Artificial Sequence: Synthetic oligonucleotide
  Antisense strand to SEQ ID NO: 791974
guucuugggauauuggacc

SEQ ID NO: 791976 - RNA, 19 nt, Artificial Sequence
  Description of Artificial Sequence: Synthetic oligonucleotide
  Sense strand starting at position 3950 of SEQ ID NO: 587435
caguaaauucccuaacggu

SEQ ID NO: 791977 - RNA, 19 nt, Artificial Sequence
  Description of Artificial Sequence: Synthetic oligonucleotide
  Antisense strand to SEQ ID NO: 791976
accguuagggaauuuacug

SEQ ID NO: 791978 - RNA, 19 nt, Artificial Sequence
  Description of Artificial Sequence: Synthetic oligonucleotide
  Sense strand starting at position 73 of SEQ ID NO: 587436
cguaugagugcggauguga

SEQ ID NO: 791979 - RNA, 19 nt, Artificial Sequence
  Description of Artificial Sequence: Synthetic oligonucleotide
  Antisense strand to SEQ ID NO: 791978
ucacauccgcacucauacg

SEQ ID NO: 791980 - RNA, 19 nt, Artificial Sequence
  Description of Artificial Sequence: Synthetic oligonucleotide
  Sense strand starting at position 336 of SEQ ID NO: 587436
gguggaucugcuugucuuu

SEQ ID NO: 791981 - RNA, 19 nt, Artificial Sequence
  Description of Artificial Sequence: Synthetic oligonucleotide
  Antisense strand to SEQ ID NO: 791980
aaagacaagcagauccacc

SEQ ID NO: 791982 - RNA, 19 nt, Artificial Sequence
  Description of Artificial Sequence: Synthetic oligonucleotide
  Sense strand starting at position 338 of SEQ ID NO: 587436
uggaucugcuugucuuuga

SEQ ID NO: 791983 - RNA, 19 nt, Artificial Sequence
  Description of Artificial Sequence: Synthetic oligonucleotide
  Antisense strand to SEQ ID NO: 791982
ucaaagacaagcagaucca

SEQ ID NO: 791984 - RNA, 19 nt, Artificial Sequence
  Description of Artificial Sequence: Synthetic oligonucleotide
  Sense strand starting at position 339 of SEQ ID NO: 587436
ggaucugcuugucuuugaa

SEQ ID NO: 791985 - RNA, 19 nt, Artificial Sequence
  Description of Artificial Sequence: Synthetic oligonucleotide
  Antisense strand to SEQ ID NO: 791984
uucaaagacaagcagaucc

SEQ ID NO: 791986 - RNA, 19 nt, Artificial Sequence
  Description of Artificial Sequence: Synthetic oligonucleotide
  Sense strand starting at position 351 of SEQ ID NO: 587436
cuuugaaugccuugauggu

SEQ ID NO: 791987 - RNA, 19 nt, Artificial Sequence
  Description of Artificial Sequence: Synthetic oligonucleotide
  Antisense strand to SEQ ID NO: 791986
accaucaaggcauucaaag

SEQ ID NO: 791988 - RNA, 19 nt, Artificial Sequence
  Description of Artificial Sequence: Synthetic oligonucleotide
  Sense strand starting at position 424 of SEQ ID NO: 587436
gggcuugugcuccggaaug

SEQ ID NO: 791989 - RNA, 19 nt, Artificial Sequence
  Description of Artificial Sequence: Synthetic oligonucleotide
  Antisense strand to SEQ ID NO: 791988
cauuccggagcacaagccc

SEQ ID NO: 791990 - RNA, 19 nt, Artificial Sequence
  Description of Artificial Sequence: Synthetic oligonucleotide
  Sense strand starting at position 426 of SEQ ID NO: 587436
gcuugugcuccggaaugga

SEQ ID NO: 791991 - RNA, 19 nt, Artificial Sequence
  Description of Artificial Sequence: Synthetic oligonucleotide
  Antisense strand to SEQ ID NO: 791990
uccauuccggagcacaagc

SEQ ID NO: 791992 - RNA, 19 nt, Artificial Sequence
  Description of Artificial Sequence: Synthetic oligonucleotide
  Sense strand starting at position 468 of SEQ ID NO: 587436
agagguuguagucaggaau

SEQ ID NO: 791993 - RNA, 19 nt, Artificial Sequence
  Description of Artificial Sequence: Synthetic oligonucleotide
  Antisense strand to SEQ ID NO: 791992
auuccugacuacaaccucu

SEQ ID NO: 791994 - RNA, 19 nt, Artificial Sequence
  Description of Artificial Sequence: Synthetic oligonucleotide
  Sense strand starting at position 471 of SEQ ID NO: 587436
gguuguagucaggaaucau

SEQ ID NO: 791995 - RNA, 19 nt, Artificial Sequence
  Description of Artificial Sequence: Synthetic oligonucleotide
  Antisense strand to SEQ ID NO: 791994
augauuccugacuacaacc

SEQ ID NO: 791996 - RNA, 19 nt, Artificial Sequence
  Description of Artificial Sequence: Synthetic oligonucleotide
  Sense strand starting at position 735 of SEQ ID NO: 587436
cgcucaugaggcuaaugau

SEQ ID NO: 791997 - RNA, 19 nt, Artificial Sequence
  Description of Artificial Sequence: Synthetic oligonucleotide
  Antisense strand to SEQ ID NO: 791996
aucauuagccucaugagcg

SEQ ID NO: 791998 - RNA, 19 nt, Artificial Sequence
  Description of Artificial Sequence: Synthetic oligonucleotide
  Sense strand starting at position 747 of SEQ ID NO: 587436
uaaugauguuguccuggca

SEQ ID NO: 791999 - RNA, 19 nt, Artificial Sequence
  Description of Artificial Sequence: Synthetic oligonucleotide
  Antisense strand to SEQ ID NO: 791998
ugccaggacaacaucauua

SEQ ID NO: 792000 - RNA, 19 nt, Artificial Sequence
  Description of Artificial Sequence: Synthetic oligonucleotide
  Sense strand starting at position 786 of SEQ ID NO: 587436
aggcgaacuuucccaagua

SEQ ID NO: 792001 - RNA, 19 nt, Artificial Sequence
  Description of Artificial Sequence: Synthetic oligonucleotide
  Antisense strand to SEQ ID NO: 792000
uacuugggaaaguucgccu

SEQ ID NO: 792002 - RNA, 19 nt, Artificial Sequence
  Description of Artificial Sequence: Synthetic oligonucleotide
  Sense strand starting at position 865 of SEQ ID NO: 587436
gggcuucucguuggucaga

SEQ ID NO: 792003 - RNA, 19 nt, Artificial Sequence
  Description of Artificial Sequence: Synthetic oligonucleotide
  Antisense strand to SEQ ID NO: 792002
ucugaccaacgagaagccc

SEQ ID NO: 792004 - RNA, 19 nt, Artificial Sequence
  Description of Artificial Sequence: Synthetic oligonucleotide
  Sense strand starting at position 876 of SEQ ID NO: 587436
uggucagaccgauguccau

SEQ ID NO: 792005 - RNA, 19 nt, Artificial Sequence
  Description of Artificial Sequence: Synthetic oligonucleotide
  Antisense strand to SEQ ID NO: 792004
auggacaucggucugacca

SEQ ID NO: 792006 - RNA, 19 nt, Artificial Sequence
  Description of Artificial Sequence: Synthetic oligonucleotide
  Sense strand starting at position 893 of SEQ ID NO: 587436
auuacauucucugcggaga

SEQ ID NO: 792007 - RNA, 19 nt, Artificial Sequence
  Description of Artificial Sequence: Synthetic oligonucleotide
  Antisense strand to SEQ ID NO: 792006
ucuccgcagagaauguaau

SEQ ID NO: 792008 - RNA, 19 nt, Artificial Sequence
  Description of Artificial Sequence: Synthetic oligonucleotide
  Sense strand starting at position 1182 of SEQ ID NO: 587436
gcgcgagaagcauuguugu

SEQ ID NO: 792009 - RNA, 19 nt, Artificial Sequence
  Description of Artificial Sequence: Synthetic oligonucleotide
  Antisense strand to SEQ ID NO: 792008
acaacaaugcuucucgcgc

SEQ ID NO: 792010 - RNA, 19 nt, Artificial Sequence
  Description of Artificial Sequence: Synthetic oligonucleotide
  Sense strand starting at position 2213 of SEQ ID NO: 587436
guagccaucugauuguaau

SEQ ID NO: 792011 - RNA, 19 nt, Artificial Sequence
  Description of Artificial Sequence: Synthetic oligonucleotide
  Antisense strand to SEQ ID NO: 792010
auuacaaucagauggcuac

SEQ ID NO: 792012 - RNA, 19 nt, Artificial Sequence
  Description of Artificial Sequence: Synthetic oligonucleotide
  Sense strand starting at position 2214 of SEQ ID NO: 587436
uagccaucugauuguaaug

SEQ ID NO: 792013 - RNA, 19 nt, Artificial Sequence
  Description of Artificial Sequence: Synthetic oligonucleotide
  Antisense strand to SEQ ID NO: 792012
cauuacaaucagauggcua

SEQ ID NO: 792014 - RNA, 19 nt, Artificial Sequence
  Description of Artificial Sequence: Synthetic oligonucleotide
  Sense strand starting at position 2219 of SEQ ID NO: 587436
aucugauuguaauggacua

SEQ ID NO: 792015 - RNA, 19 nt, Artificial Sequence
  Description of Artificial Sequence: Synthetic oligonucleotide
  Antisense strand to SEQ ID NO: 792014
uaguccauuacaaucagau

SEQ ID NO: 792016 - RNA, 19 nt, Artificial Sequence
  Description of Artificial Sequence: Synthetic oligonucleotide
  Sense strand starting at position 2348 of SEQ ID NO: 587436
gcgaguuugccggucauag

SEQ ID NO: 792017 - RNA, 19 nt, Artificial Sequence
  Description of Artificial Sequence: Synthetic oligonucleotide
  Antisense strand to SEQ ID NO: 792016
cuaugaccggcaaacucgc

SEQ ID NO: 792018 - RNA, 19 nt, Artificial Sequence
  Description of Artificial Sequence: Synthetic oligonucleotide
  Sense strand starting at position 2349 of SEQ ID NO: 587436
cgaguuugccggucauagc

SEQ ID NO: 792019 - RNA, 19 nt, Artificial Sequence
  Description of Artificial Sequence: Synthetic oligonucleotide
  Antisense strand to SEQ ID NO: 792018
gcuaugaccggcaaacucg

SEQ ID NO: 792020 - RNA, 19 nt, Artificial Sequence
  Description of Artificial Sequence: Synthetic oligonucleotide
  Sense strand starting at position 2350 of SEQ ID NO: 587436
gaguuugccggucauagca

SEQ ID NO: 792021 - RNA, 19 nt, Artificial Sequence
  Description of Artificial Sequence: Synthetic oligonucleotide
  Antisense strand to SEQ ID NO: 792020
ugcuaugaccggcaaacuc

SEQ ID NO: 792022 - RNA, 19 nt, Artificial Sequence
  Description of Artificial Sequence: Synthetic oligonucleotide
  Sense strand starting at position 2938 of SEQ ID NO: 587436
gggaaagcuccgugacgua

SEQ ID NO: 792023 - RNA, 19 nt, Artificial Sequence
  Description of Artificial Sequence: Synthetic oligonucleotide
  Antisense strand to SEQ ID NO: 792022
uacgucacggagcuuuccc

SEQ ID NO: 792024 - RNA, 19 nt, Artificial Sequence
  Description of Artificial Sequence: Synthetic oligonucleotide
  Sense strand starting at position 2950 of SEQ ID NO: 587436
ugacguagcugcccauaua

SEQ ID NO: 792025 - RNA, 19 nt, Artificial Sequence
  Description of Artificial Sequence: Synthetic oligonucleotide
  Antisense strand to SEQ ID NO: 792024
uauaugggcagcuacguca

SEQ ID NO: 792026 - RNA, 19 nt, Artificial Sequence
  Description of Artificial Sequence: Synthetic oligonucleotide
  Sense strand starting at position 2951 of SEQ ID NO: 587436
gacguagcugcccauauau

SEQ ID NO: 792027 - RNA, 19 nt, Artificial Sequence
  Description of Artificial Sequence: Synthetic oligonucleotide
  Antisense strand to SEQ ID NO: 792026
auauaugggcagcuacguc

SEQ ID NO: 792028 - RNA, 19 nt, Artificial Sequence
  Description of Artificial Sequence: Synthetic oligonucleotide
  Sense strand starting at position 2995 of SEQ ID NO: 587436
gcgcgacgucacaauggaa

SEQ ID NO: 792029 - RNA, 19 nt, Artificial Sequence
  Description of Artificial Sequence: Synthetic oligonucleotide
  Antisense strand to SEQ ID NO: 792028
uuccauugugacgucgcgc

SEQ ID NO: 792030 - RNA, 19 nt, Artificial Sequence
  Description of Artificial Sequence: Synthetic oligonucleotide
  Sense strand starting at position 3116 of SEQ ID NO: 587436
caagaagaaugcgagaaga

SEQ ID NO: 792031 - RNA, 19 nt, Artificial Sequence
  Description of Artificial Sequence: Synthetic oligonucleotide
  Antisense strand to SEQ ID NO: 792030
ucuucucgcauucuucuug

SEQ ID NO: 792032 - RNA, 19 nt, Artificial Sequence
  Description of Artificial Sequence: Synthetic oligonucleotide
  Sense strand starting at position 3196 of SEQ ID NO: 587436
ccaguaacucauugugugu

SEQ ID NO: 792033 - RNA, 19 nt, Artificial Sequence
  Description of Artificial Sequence: Synthetic oligonucleotide
  Antisense strand to SEQ ID NO: 792032
acacacaaugaguuacugg

SEQ ID NO: 792034 - RNA, 19 nt, Artificial Sequence
  Description of Artificial Sequence: Synthetic oligonucleotide
  Sense strand starting at position 3211 of SEQ ID NO: 587436
guguguuuauuugagguuu

SEQ ID NO: 792035 - RNA, 19 nt, Artificial Sequence
  Description of Artificial Sequence: Synthetic oligonucleotide
  Antisense strand to SEQ ID NO: 792034
aaaccucaaauaaacacac

SEQ ID NO: 792036 - RNA, 19 nt, Artificial Sequence
  Description of Artificial Sequence: Synthetic oligonucleotide
  Sense strand starting at position 3217 of SEQ ID NO: 587436
uuauuugagguuugcguua

SEQ ID NO: 792037 - RNA, 19 nt, Artificial Sequence
  Description of Artificial Sequence: Synthetic oligonucleotide
  Antisense strand to SEQ ID NO: 792036
uaacgcaaaccucaaauaa

SEQ ID NO: 792038 - RNA, 19 nt, Artificial Sequence
  Description of Artificial Sequence: Synthetic oligonucleotide
  Sense strand starting at position 3272 of SEQ ID NO: 587436
gguuguuugcaaguggucu

SEQ ID NO: 792039 - RNA, 19 nt, Artificial Sequence
  Description of Artificial Sequence: Synthetic oligonucleotide
  Antisense strand to SEQ ID NO: 792038
agaccacuugcaaacaacc

SEQ ID NO: 792040 - RNA, 19 nt, Artificial Sequence
  Description of Artificial Sequence: Synthetic oligonucleotide
  Sense strand starting at position 3276 of SEQ ID NO: 587436
guuugcaaguggucuccaa

SEQ ID NO: 792041 - RNA, 19 nt, Artificial Sequence
  Description of Artificial Sequence: Synthetic oligonucleotide
  Antisense strand to SEQ ID NO: 792040
uuggagaccacuugcaaac

SEQ ID NO: 792042 - RNA, 19 nt, Artificial Sequence
  Description of Artificial Sequence: Synthetic oligonucleotide
  Sense strand starting at position 3414 of SEQ ID NO: 587436
ucgggauccuauccgagau

SEQ ID NO: 792043 - RNA, 19 nt, Artificial Sequence
  Description of Artificial Sequence: Synthetic oligonucleotide
  Antisense strand to SEQ ID NO: 792042
aucucggauaggaucccga

SEQ ID NO: 792044 - RNA, 19 nt, Artificial Sequence
  Description of Artificial Sequence: Synthetic oligonucleotide
  Sense strand starting at position 3415 of SEQ ID NO: 587436
cgggauccuauccgagauu

SEQ ID NO: 792045 - RNA, 19 nt, Artificial Sequence
  Description of Artificial Sequence: Synthetic oligonucleotide
  Antisense strand to SEQ ID NO: 792044
aaucucggauaggaucccg

SEQ ID NO: 792046 - RNA, 19 nt, Artificial Sequence
  Description of Artificial Sequence: Synthetic oligonucleotide
  Sense strand starting at position 3416 of SEQ ID NO: 587436
gggauccuauccgagauua

SEQ ID NO: 792047 - RNA, 19 nt, Artificial Sequence
  Description of Artificial Sequence: Synthetic oligonucleotide
  Antisense strand to SEQ ID NO: 792046
uaaucucggauaggauccc

SEQ ID NO: 792048 - RNA, 19 nt, Artificial Sequence
  Description of Artificial Sequence: Synthetic oligonucleotide
  Sense strand starting at position 3506 of SEQ ID NO: 587436
gucagaauuccuuggucca

SEQ ID NO: 792049 - RNA, 19 nt, Artificial Sequence
  Description of Artificial Sequence: Synthetic oligonucleotide
  Antisense strand to SEQ ID NO: 792048
uggaccaaggaauucugac

SEQ ID NO: 792050 - RNA, 19 nt, Artificial Sequence
  Description of Artificial Sequence: Synthetic oligonucleotide
  Sense strand starting at position 3507 of SEQ ID NO: 587436
ucagaauuccuugguccaa

SEQ ID NO: 792051 - RNA, 19 nt, Artificial Sequence
  Description of Artificial Sequence: Synthetic oligonucleotide
  Antisense strand to SEQ ID NO: 792050
uuggaccaaggaauucuga

SEQ ID NO: 792052 - RNA, 19 nt, Artificial Sequence
  Description of Artificial Sequence: Synthetic oligonucleotide
  Sense strand starting at position 3509 of SEQ ID NO: 587436
agaauuccuugguccaaua

SEQ ID NO: 792053 - RNA, 19 nt, Artificial Sequence
  Description of Artificial Sequence: Synthetic oligonucleotide
  Antisense strand to SEQ ID NO: 792052
uauuggaccaaggaauucu

SEQ ID NO: 792054 - RNA, 19 nt, Artificial Sequence
  Description of Artificial Sequence: Synthetic oligonucleotide
  Sense strand starting at position 3519 of SEQ ID NO: 587436
gguccaauaucccaagaac

SEQ ID NO: 792055 - RNA, 19 nt, Artificial Sequence
  Description of Artificial Sequence: Synthetic oligonucleotide
  Antisense strand to SEQ ID NO: 792054
guucuugggauauuggacc

SEQ ID NO: 792056 - RNA, 19 nt, Artificial Sequence
  Description of Artificial Sequence: Synthetic oligonucleotide
  Sense strand starting at position 3759 of SEQ ID NO: 587436
caguaaauucccuaacggu

SEQ ID NO: 792057 - RNA, 19 nt, Artificial Sequence
  Description of Artificial Sequence: Synthetic oligonucleotide
  Antisense strand to SEQ ID NO: 792056
accguuagggaauuuacug

SEQ ID NO: 792058 - RNA, 19 nt, Artificial Sequence
  Description of Artificial Sequence: Synthetic oligonucleotide
  Sense strand starting at position 13 of SEQ ID NO: 587437
cgcucaugaggcuaaugau

SEQ ID NO: 792059 - RNA, 19 nt, Artificial Sequence
  Description of Artificial Sequence: Synthetic oligonucleotide
  Antisense strand to SEQ ID NO: 792058
aucauuagccucaugagcg

SEQ ID NO: 792060 - RNA, 19 nt, Artificial Sequence
  Description of Artificial Sequence: Synthetic oligonucleotide
  Sense strand starting at position 16 of SEQ ID NO: 587437
ucaugaggcuaaugauguu

SEQ ID NO: 792061 - RNA, 19 nt, Artificial Sequence
  Description of Artificial Sequence: Synthetic oligonucleotide
  Antisense strand to SEQ ID NO: 792060
aacaucauuagccucauga

SEQ ID NO: 792062 - RNA, 19 nt, Artificial Sequence
  Description of Artificial Sequence: Synthetic oligonucleotide
  Sense strand starting at position 25 of SEQ ID NO: 587437
uaaugauguuguccuggca

SEQ ID NO: 792063 - RNA, 19 nt, Artificial Sequence
  Description of Artificial Sequence: Synthetic oligonucleotide
  Antisense strand to SEQ ID NO: 792062
ugccaggacaacaucauua

SEQ ID NO: 792064 - RNA, 19 nt, Artificial Sequence
  Description of Artificial Sequence: Synthetic oligonucleotide
  Sense strand starting at position 64 of SEQ ID NO: 587437
aggcgaacuuucccaagua

SEQ ID NO: 792065 - RNA, 19 nt, Artificial Sequence
  Description of Artificial Sequence: Synthetic oligonucleotide
  Antisense strand to SEQ ID NO: 792064
uacuugggaaaguucgccu

SEQ ID NO: 792066 - RNA, 19 nt, Artificial Sequence
  Description of Artificial Sequence: Synthetic oligonucleotide
  Sense strand starting at position 65 of SEQ ID NO: 587437
ggcgaacuuucccaaguag

SEQ ID NO: 792067 - RNA, 19 nt, Artificial Sequence
  Description of Artificial Sequence: Synthetic oligonucleotide
  Antisense strand to SEQ ID NO: 792066
cuacuugggaaaguucgcc

SEQ ID NO: 792068 - RNA, 19 nt, Artificial Sequence
  Description of Artificial Sequence: Synthetic oligonucleotide
  Sense strand starting at position 143 of SEQ ID NO: 587437
gggcuucucguuggucaga

SEQ ID NO: 792069 - RNA, 19 nt, Artificial Sequence
  Description of Artificial Sequence: Synthetic oligonucleotide
  Antisense strand to SEQ ID NO: 792068
ucugaccaacgagaagccc

SEQ ID NO: 792070 - RNA, 19 nt, Artificial Sequence
  Description of Artificial Sequence: Synthetic oligonucleotide
  Sense strand starting at position 148 of SEQ ID NO: 587437
ucucguuggucagaccgau

SEQ ID NO: 792071 - RNA, 19 nt, Artificial Sequence
  Description of Artificial Sequence: Synthetic oligonucleotide
  Antisense strand to SEQ ID NO: 792070
aucggucugaccaacgaga

SEQ ID NO: 792072 - RNA, 19 nt, Artificial Sequence
  Description of Artificial Sequence: Synthetic oligonucleotide
  Sense strand starting at position 154 of SEQ ID NO: 587437
uggucagaccgauguccau

SEQ ID NO: 792073 - RNA, 19 nt, Artificial Sequence
  Description of Artificial Sequence: Synthetic oligonucleotide
  Antisense strand to SEQ ID NO: 792072
auggacaucggucugacca

SEQ ID NO: 792074 - RNA, 19 nt, Artificial Sequence
  Description of Artificial Sequence: Synthetic oligonucleotide
  Sense strand starting at position 171 of SEQ ID NO: 587437
auuacauucucugcggaga

SEQ ID NO: 792075 - RNA, 19 nt, Artificial Sequence
  Description of Artificial Sequence: Synthetic oligonucleotide
  Antisense strand to SEQ ID NO: 792074
ucuccgcagagaauguaau

SEQ ID NO: 792076 - RNA, 19 nt, Artificial Sequence
  Description of Artificial Sequence: Synthetic oligonucleotide
  Sense strand starting at position 460 of SEQ ID NO: 587437
gcgcgagaagcauuguugu

SEQ ID NO: 792077 - RNA, 19 nt, Artificial Sequence
  Description of Artificial Sequence: Synthetic oligonucleotide
  Antisense strand to SEQ ID NO: 792076
acaacaaugcuucucgcgc

SEQ ID NO: 792078 - RNA, 19 nt, Artificial Sequence
  Description of Artificial Sequence: Synthetic oligonucleotide
  Sense strand starting at position 1491 of SEQ ID NO: 587437
guagccaucugauuguaau

SEQ ID NO: 792079 - RNA, 19 nt, Artificial Sequence
  Description of Artificial Sequence: Synthetic oligonucleotide
  Antisense strand to SEQ ID NO: 792078
auuacaaucagauggcuac

SEQ ID NO: 792080 - RNA, 19 nt, Artificial Sequence
  Description of Artificial Sequence: Synthetic oligonucleotide
  Sense strand starting at position 1492 of SEQ ID NO: 587437
uagccaucugauuguaaug

SEQ ID NO: 792081 - RNA, 19 nt, Artificial Sequence
  Description of Artificial Sequence: Synthetic oligonucleotide
  Antisense strand to SEQ ID NO: 792080
cauuacaaucagauggcua

SEQ ID NO: 792082 - RNA, 19 nt, Artificial Sequence
  Description of Artificial Sequence: Synthetic oligonucleotide
  Sense strand starting at position 1494 of SEQ ID NO: 587437
gccaucugauuguaaugga

SEQ ID NO: 792083 - RNA, 19 nt, Artificial Sequence
  Description of Artificial Sequence: Synthetic oligonucleotide
  Antisense strand to SEQ ID NO: 792082
uccauuacaaucagauggc

SEQ ID NO: 792084 - RNA, 19 nt, Artificial Sequence
  Description of Artificial Sequence: Synthetic oligonucleotide
  Sense strand starting at position 1497 of SEQ ID NO: 587437
aucugauuguaauggacua

SEQ ID NO: 792085 - RNA, 19 nt, Artificial Sequence
  Description of Artificial Sequence: Synthetic oligonucleotide
  Antisense strand to SEQ ID NO: 792084
uaguccauuacaaucagau

SEQ ID NO: 792086 - RNA, 19 nt, Artificial Sequence
  Description of Artificial Sequence: Synthetic oligonucleotide
  Sense strand starting at position 1569 of SEQ ID NO: 587437
uacagauugucaggcaguu

SEQ ID NO: 792087 - RNA, 19 nt, Artificial Sequence
  Description of Artificial Sequence: Synthetic oligonucleotide
  Antisense strand to SEQ ID NO: 792086
aacugccugacaaucugua

SEQ ID NO: 792088 - RNA, 19 nt, Artificial Sequence
  Description of Artificial Sequence: Synthetic oligonucleotide
  Sense strand starting at position 1615 of SEQ ID NO: 587437
gcagcuucucggcgaguuu

SEQ ID NO: 792089 - RNA, 19 nt, Artificial Sequence
  Description of Artificial Sequence: Synthetic oligonucleotide
  Antisense strand to SEQ ID NO: 792088
aaacucgccgagaagcugc

SEQ ID NO: 792090 - RNA, 19 nt, Artificial Sequence
  Description of Artificial Sequence: Synthetic oligonucleotide
  Sense strand starting at position 1624 of SEQ ID NO: 587437
cggcgaguuugccggucau

SEQ ID NO: 792091 - RNA, 19 nt, Artificial Sequence
  Description of Artificial Sequence: Synthetic oligonucleotide
  Antisense strand to SEQ ID NO: 792090
augaccggcaaacucgccg

SEQ ID NO: 792092 - RNA, 19 nt, Artificial Sequence
  Description of Artificial Sequence: Synthetic oligonucleotide
  Sense strand starting at position 1625 of SEQ ID NO: 587437
ggcgaguuugccggucaua

SEQ ID NO: 792093 - RNA, 19 nt, Artificial Sequence
  Description of Artificial Sequence: Synthetic oligonucleotide
  Antisense strand to SEQ ID NO: 792092
uaugaccggcaaacucgcc

SEQ ID NO: 792094 - RNA, 19 nt, Artificial Sequence
  Description of Artificial Sequence: Synthetic oligonucleotide
  Sense strand starting at position 1626 of SEQ ID NO: 587437
gcgaguuugccggucauag

SEQ ID NO: 792095 - RNA, 19 nt, Artificial Sequence
  Description of Artificial Sequence: Synthetic oligonucleotide
  Antisense strand to SEQ ID NO: 792094
cuaugaccggcaaacucgc

SEQ ID NO: 792096 - RNA, 19 nt, Artificial Sequence
  Description of Artificial Sequence: Synthetic oligonucleotide
  Sense strand starting at position 1627 of SEQ ID NO: 587437
cgaguuugccggucauagc

SEQ ID NO: 792097 - RNA, 19 nt, Artificial Sequence
  Description of Artificial Sequence: Synthetic oligonucleotide
  Antisense strand to SEQ ID NO: 792096
gcuaugaccggcaaacucg

SEQ ID NO: 792098 - RNA, 19 nt, Artificial Sequence
  Description of Artificial Sequence: Synthetic oligonucleotide
  Sense strand starting at position 1628 of SEQ ID NO: 587437
gaguuugccggucauagca

SEQ ID NO: 792099 - RNA, 19 nt, Artificial Sequence
  Description of Artificial Sequence: Synthetic oligonucleotide
  Antisense strand to SEQ ID NO: 792098
ugcuaugaccggcaaacuc

SEQ ID NO: 792100 - RNA, 19 nt, Artificial Sequence
  Description of Artificial Sequence: Synthetic oligonucleotide
  Sense strand starting at position 2216 of SEQ ID NO: 587437
gggaaagcuccgugacgua

SEQ ID NO: 792101 - RNA, 19 nt, Artificial Sequence
  Description of Artificial Sequence: Synthetic oligonucleotide
  Antisense strand to SEQ ID NO: 792100
uacgucacggagcuuuccc

SEQ ID NO: 792102 - RNA, 19 nt, Artificial Sequence
  Description of Artificial Sequence: Synthetic oligonucleotide
  Sense strand starting at position 2228 of SEQ ID NO: 587437
ugacguagcugcccauaua

SEQ ID NO: 792103 - RNA, 19 nt, Artificial Sequence
  Description of Artificial Sequence: Synthetic oligonucleotide
  Antisense strand to SEQ ID NO: 792102
uauaugggcagcuacguca

SEQ ID NO: 792104 - RNA, 19 nt, Artificial Sequence
  Description of Artificial Sequence: Synthetic oligonucleotide
  Sense strand starting at position 2229 of SEQ ID NO: 587437
gacguagcugcccauauau

SEQ ID NO: 792105 - RNA, 19 nt, Artificial Sequence
  Description of Artificial Sequence: Synthetic oligonucleotide
  Antisense strand to SEQ ID NO: 792104
auauaugggcagcuacguc

SEQ ID NO: 792106 - RNA, 19 nt, Artificial Sequence
  Description of Artificial Sequence: Synthetic oligonucleotide
  Sense strand starting at position 2273 of SEQ ID NO: 587437
gcgcgacgucacaauggaa

SEQ ID NO: 792107 - RNA, 19 nt, Artificial Sequence
  Description of Artificial Sequence: Synthetic oligonucleotide
  Antisense strand to SEQ ID NO: 792106
uuccauugugacgucgcgc

SEQ ID NO: 792108 - RNA, 19 nt, Artificial Sequence
  Description of Artificial Sequence: Synthetic oligonucleotide
  Sense strand starting at position 2394 of SEQ ID NO: 587437
caagaagaaugcgagaaga

SEQ ID NO: 792109 - RNA, 19 nt, Artificial Sequence
  Description of Artificial Sequence: Synthetic oligonucleotide
  Antisense strand to SEQ ID NO: 792108
ucuucucgcauucuucuug

SEQ ID NO: 792110 - RNA, 19 nt, Artificial Sequence
  Description of Artificial Sequence: Synthetic oligonucleotide
  Sense strand starting at position 2474 of SEQ ID NO: 587437
ccaguaacucauugugugu

SEQ ID NO: 792111 - RNA, 19 nt, Artificial Sequence
  Description of Artificial Sequence: Synthetic oligonucleotide
  Antisense strand to SEQ ID NO: 792110
acacacaaugaguuacugg

SEQ ID NO: 792112 - RNA, 19 nt, Artificial Sequence
  Description of Artificial Sequence: Synthetic oligonucleotide
  Sense strand starting at position 2489 of SEQ ID NO: 587437
guguguuuauuugagguuu

SEQ ID NO: 792113 - RNA, 19 nt, Artificial Sequence
  Description of Artificial Sequence: Synthetic oligonucleotide
  Antisense strand to SEQ ID NO: 792112
aaaccucaaauaaacacac

SEQ ID NO: 792114 - RNA, 19 nt, Artificial Sequence
  Description of Artificial Sequence: Synthetic oligonucleotide
  Sense strand starting at position 2495 of SEQ ID NO: 587437
uuauuugagguuugcguua

SEQ ID NO: 792115 - RNA, 19 nt, Artificial Sequence
  Description of Artificial Sequence: Synthetic oligonucleotide
  Antisense strand to SEQ ID NO: 792114
uaacgcaaaccucaaauaa

SEQ ID NO: 792116 - RNA, 19 nt, Artificial Sequence
  Description of Artificial Sequence: Synthetic oligonucleotide
  Sense strand starting at position 2550 of SEQ ID NO: 587437
gguuguuugcaaguggucu

SEQ ID NO: 792117 - RNA, 19 nt, Artificial Sequence
  Description of Artificial Sequence: Synthetic oligonucleotide
  Antisense strand to SEQ ID NO: 792116
agaccacuugcaaacaacc

SEQ ID NO: 792118 - RNA, 19 nt, Artificial Sequence
  Description of Artificial Sequence: Synthetic oligonucleotide
  Sense strand starting at position 2554 of SEQ ID NO: 587437
guuugcaaguggucuccaa

SEQ ID NO: 792119 - RNA, 19 nt, Artificial Sequence
  Description of Artificial Sequence: Synthetic oligonucleotide
  Antisense strand to SEQ ID NO: 792118
uuggagaccacuugcaaac

SEQ ID NO: 792120 - RNA, 19 nt, Artificial Sequence
  Description of Artificial Sequence: Synthetic oligonucleotide
  Sense strand starting at position 2692 of SEQ ID NO: 587437
ucgggauccuauccgagau

SEQ ID NO: 792121 - RNA, 19 nt, Artificial Sequence
  Description of Artificial Sequence: Synthetic oligonucleotide
  Antisense strand to SEQ ID NO: 792120
aucucggauaggaucccga

SEQ ID NO: 792122 - RNA, 19 nt, Artificial Sequence
  Description of Artificial Sequence: Synthetic oligonucleotide
  Sense strand starting at position 2693 of SEQ ID NO: 587437
cgggauccuauccgagauu

SEQ ID NO: 792123 - RNA, 19 nt, Artificial Sequence
  Description of Artificial Sequence: Synthetic oligonucleotide
  Antisense strand to SEQ ID NO: 792122
aaucucggauaggaucccg

SEQ ID NO: 792124 - RNA, 19 nt, Artificial Sequence
  Description of Artificial Sequence: Synthetic oligonucleotide
  Sense strand starting at position 2694 of SEQ ID NO: 587437
gggauccuauccgagauua

SEQ ID NO: 792125 - RNA, 19 nt, Artificial Sequence
  Description of Artificial Sequence: Synthetic oligonucleotide
  Antisense strand to SEQ ID NO: 792124
uaaucucggauaggauccc

SEQ ID NO: 792126 - RNA, 19 nt, Artificial Sequence
  Description of Artificial Sequence: Synthetic oligonucleotide
  Sense strand starting at position 2784 of SEQ ID NO: 587437
gucagaauuccuuggucca

SEQ ID NO: 792127 - RNA, 19 nt, Artificial Sequence
  Description of Artificial Sequence: Synthetic oligonucleotide
  Antisense strand to SEQ ID NO: 792126
uggaccaaggaauucugac

SEQ ID NO: 792128 - RNA, 19 nt, Artificial Sequence
  Description of Artificial Sequence: Synthetic oligonucleotide
  Sense strand starting at position 2785 of SEQ ID NO: 587437
ucagaauuccuugguccaa

SEQ ID NO: 792129 - RNA, 19 nt, Artificial Sequence
  Description of Artificial Sequence: Synthetic oligonucleotide
  Antisense strand to SEQ ID NO: 792128
uuggaccaaggaauucuga

SEQ ID NO: 792130 - RNA, 19 nt, Artificial Sequence
  Description of Artificial Sequence: Synthetic oligonucleotide
  Sense strand starting at position 2787 of SEQ ID NO: 587437
agaauuccuugguccaaua

SEQ ID NO: 792131 - RNA, 19 nt, Artificial Sequence
  Description of Artificial Sequence: Synthetic oligonucleotide
  Antisense strand to SEQ ID NO: 792130
uauuggaccaaggaauucu

SEQ ID NO: 792132 - RNA, 19 nt, Artificial Sequence
  Description of Artificial Sequence: Synthetic oligonucleotide
  Sense strand starting at position 2797 of SEQ ID NO: 587437
gguccaauaucccaagaac

SEQ ID NO: 792133 - RNA, 19 nt, Artificial Sequence
  Description of Artificial Sequence: Synthetic oligonucleotide
  Antisense strand to SEQ ID NO: 792132
guucuugggauauuggacc

SEQ ID NO: 792134 - RNA, 19 nt, Artificial Sequence
  Description of Artificial Sequence: Synthetic oligonucleotide
  Sense strand starting at position 3037 of SEQ ID NO: 587437
caguaaauucccuaacggu

SEQ ID NO: 792135 - RNA, 19 nt, Artificial Sequence
  Description of Artificial Sequence: Synthetic oligonucleotide
  Antisense strand to SEQ ID NO: 792134
accguuagggaauuuacug

SEQ ID NO: 792136 - RNA, 19 nt, Artificial Sequence
  Description of Artificial Sequence: Synthetic oligonucleotide
  Sense strand starting at position 3740 of SEQ ID NO: 587437
uccaguucuuaggaaagga

SEQ ID NO: 792137 - RNA, 19 nt, Artificial Sequence
  Description of Artificial Sequence: Synthetic oligonucleotide
  Antisense strand to SEQ ID NO: 792136
uccuuuccuaagaacugga

SEQ ID NO: 792138 - RNA, 19 nt, Artificial Sequence
  Description of Artificial Sequence: Synthetic oligonucleotide
  Sense strand starting at position 191 of SEQ ID NO: 587438
uccugucagcauuaggaua

SEQ ID NO: 792139 - RNA, 19 nt, Artificial Sequence
  Description of Artificial Sequence: Synthetic oligonucleotide
  Antisense strand to SEQ ID NO: 792138
uauccuaaugcugacagga

SEQ ID NO: 792140 - RNA, 19 nt, Artificial Sequence
  Description of Artificial Sequence: Synthetic oligonucleotide
  Sense strand starting at position 279 of SEQ ID NO: 587438
uguacuguccaagagucaa

SEQ ID NO: 792141 - RNA, 19 nt, Artificial Sequence
  Description of Artificial Sequence: Synthetic oligonucleotide
  Antisense strand to SEQ ID NO: 792140
uugacucuuggacaguaca

SEQ ID NO: 792142 - RNA, 19 nt, Artificial Sequence
  Description of Artificial Sequence: Synthetic oligonucleotide
  Sense strand starting at position 292 of SEQ ID NO: 587438
agucaaauguacuuagaaa

SEQ ID NO: 792143 - RNA, 19 nt, Artificial Sequence
  Description of Artificial Sequence: Synthetic oligonucleotide
  Antisense strand to SEQ ID NO: 792142
uuucuaaguacauuugacu

SEQ ID NO: 792144 - RNA, 19 nt, Artificial Sequence
  Description of Artificial Sequence: Synthetic oligonucleotide
  Sense strand starting at position 786 of SEQ ID NO: 587438
cgucaacaacuuuagaguu

SEQ ID NO: 792145 - RNA, 19 nt, Artificial Sequence
  Description of Artificial Sequence: Synthetic oligonucleotide
  Antisense strand to SEQ ID NO: 792144
aacucuaaaguuguugacg

SEQ ID NO: 792146 - RNA, 19 nt, Artificial Sequence
  Description of Artificial Sequence: Synthetic oligonucleotide
  Sense strand starting at position 823 of SEQ ID NO: 587438
ugcauaugaauaugaggau

SEQ ID NO: 792147 - RNA, 19 nt, Artificial Sequence
  Description of Artificial Sequence: Synthetic oligonucleotide
  Antisense strand to SEQ ID NO: 792146
auccucauauucauaugca

SEQ ID NO: 792148 - RNA, 19 nt, Artificial Sequence
  Description of Artificial Sequence: Synthetic oligonucleotide
  Sense strand starting at position 835 of SEQ ID NO: 587438
ugaggauuauaccugucua

SEQ ID NO: 792149 - RNA, 19 nt, Artificial Sequence
  Description of Artificial Sequence: Synthetic oligonucleotide
  Antisense strand to SEQ ID NO: 792148
uagacagguauaauccuca

SEQ ID NO: 792150 - RNA, 19 nt, Artificial Sequence
  Description of Artificial Sequence: Synthetic oligonucleotide
  Sense strand starting at position 839 of SEQ ID NO: 587438
gauuauaccugucuaacga

SEQ ID NO: 792151 - RNA, 19 nt, Artificial Sequence
  Description of Artificial Sequence: Synthetic oligonucleotide
  Antisense strand to SEQ ID NO: 792150
ucguuagacagguauaauc

SEQ ID NO: 792152 - RNA, 19 nt, Artificial Sequence
  Description of Artificial Sequence: Synthetic oligonucleotide
  Sense strand starting at position 941 of SEQ ID NO: 587438
ucuagaguucccuaaguag

SEQ ID NO: 792153 - RNA, 19 nt, Artificial Sequence
  Description of Artificial Sequence: Synthetic oligonucleotide
  Antisense strand to SEQ ID NO: 792152
cuacuuagggaacucuaga

SEQ ID NO: 792154 - RNA, 19 nt, Artificial Sequence
  Description of Artificial Sequence: Synthetic oligonucleotide
  Sense strand starting at position 944 of SEQ ID NO: 587438
agaguucccuaaguagacu

SEQ ID NO: 792155 - RNA, 19 nt, Artificial Sequence
  Description of Artificial Sequence: Synthetic oligonucleotide
  Antisense strand to SEQ ID NO: 792154
agucuacuuagggaacucu

SEQ ID NO: 792156 - RNA, 19 nt, Artificial Sequence
  Description of Artificial Sequence: Synthetic oligonucleotide
  Sense strand starting at position 1188 of SEQ ID NO: 587438
augauaucuugaguagaua

SEQ ID NO: 792157 - RNA, 19 nt, Artificial Sequence
  Description of Artificial Sequence: Synthetic oligonucleotide
  Antisense strand to SEQ ID NO: 792156
uaucuacucaagauaucau

SEQ ID NO: 792158 - RNA, 19 nt, Artificial Sequence
  Description of Artificial Sequence: Synthetic oligonucleotide
  Sense strand starting at position 1332 of SEQ ID NO: 587438
gaaauaugcuguucuagaa

SEQ ID NO: 792159 - RNA, 19 nt, Artificial Sequence
  Description of Artificial Sequence: Synthetic oligonucleotide
  Antisense strand to SEQ ID NO: 792158
uucuagaacagcauauuuc

SEQ ID NO: 792160 - RNA, 19 nt, Artificial Sequence
  Description of Artificial Sequence: Synthetic oligonucleotide
  Sense strand starting at position 1398 of SEQ ID NO: 587438
uggaaauuaaagcgcuaga

SEQ ID NO: 792161 - RNA, 19 nt, Artificial Sequence
  Description of Artificial Sequence: Synthetic oligonucleotide
  Antisense strand to SEQ ID NO: 792160
ucuagcgcuuuaauuucca

SEQ ID NO: 792162 - RNA, 19 nt, Artificial Sequence
  Description of Artificial Sequence: Synthetic oligonucleotide
  Sense strand starting at position 1403 of SEQ ID NO: 587438
auuaaagcgcuagauacuu

SEQ ID NO: 792163 - RNA, 19 nt, Artificial Sequence
  Description of Artificial Sequence: Synthetic oligonucleotide
  Antisense strand to SEQ ID NO: 792162
aaguaucuagcgcuuuaau

SEQ ID NO: 792164 - RNA, 19 nt, Artificial Sequence
  Description of Artificial Sequence: Synthetic oligonucleotide
  Sense strand starting at position 1634 of SEQ ID NO: 587438
cugacaccucaguaaguga

SEQ ID NO: 792165 - RNA, 19 nt, Artificial Sequence
  Description of Artificial Sequence: Synthetic oligonucleotide
  Antisense strand to SEQ ID NO: 792164
ucacuuacugaggugucag

SEQ ID NO: 792166 - RNA, 19 nt, Artificial Sequence
  Description of Artificial Sequence: Synthetic oligonucleotide
  Sense strand starting at position 1720 of SEQ ID NO: 587438
cugagacgacgcuaaacua

SEQ ID NO: 792167 - RNA, 19 nt, Artificial Sequence
  Description of Artificial Sequence: Synthetic oligonucleotide
  Antisense strand to SEQ ID NO: 792166
uaguuuagcgucgucucag

SEQ ID NO: 792168 - RNA, 19 nt, Artificial Sequence
  Description of Artificial Sequence: Synthetic oligonucleotide
  Sense strand starting at position 1738 of SEQ ID NO: 587438
accagaagauccuuagugu

SEQ ID NO: 792169 - RNA, 19 nt, Artificial Sequence
  Description of Artificial Sequence: Synthetic oligonucleotide
  Antisense strand to SEQ ID NO: 792168
acacuaaggaucuucuggu

SEQ ID NO: 792170 - RNA, 19 nt, Artificial Sequence
  Description of Artificial Sequence: Synthetic oligonucleotide
  Sense strand starting at position 1739 of SEQ ID NO: 587438
ccagaagauccuuaguguc

SEQ ID NO: 792171 - RNA, 19 nt, Artificial Sequence
  Description of Artificial Sequence: Synthetic oligonucleotide
  Antisense strand to SEQ ID NO: 792170
gacacuaaggaucuucugg

SEQ ID NO: 792172 - RNA, 19 nt, Artificial Sequence
  Description of Artificial Sequence: Synthetic oligonucleotide
  Sense strand starting at position 1988 of SEQ ID NO: 587438
ggagucugugcucacuaaa

SEQ ID NO: 792173 - RNA, 19 nt, Artificial Sequence
  Description of Artificial Sequence: Synthetic oligonucleotide
  Antisense strand to SEQ ID NO: 792172
uuuagugagcacagacucc

SEQ ID NO: 792174 - RNA, 19 nt, Artificial Sequence
  Description of Artificial Sequence: Synthetic oligonucleotide
  Sense strand starting at position 2091 of SEQ ID NO: 587438
ggguuuacccuggagagca

SEQ ID NO: 792175 - RNA, 19 nt, Artificial Sequence
  Description of Artificial Sequence: Synthetic oligonucleotide
  Antisense strand to SEQ ID NO: 792174
ugcucuccaggguaaaccc

SEQ ID NO: 792176 - RNA, 19 nt, Artificial Sequence
  Description of Artificial Sequence: Synthetic oligonucleotide
  Sense strand starting at position 2184 of SEQ ID NO: 587438
auuuguagguuugucggua

SEQ ID NO: 792177 - RNA, 19 nt, Artificial Sequence
  Description of Artificial Sequence: Synthetic oligonucleotide
  Antisense strand to SEQ ID NO: 792176
uaccgacaaaccuacaaau

SEQ ID NO: 792178 - RNA, 19 nt, Artificial Sequence
  Description of Artificial Sequence: Synthetic oligonucleotide
  Sense strand starting at position 2247 of SEQ ID NO: 587438
agucuauuccguuaauaac

SEQ ID NO: 792179 - RNA, 19 nt, Artificial Sequence
  Description of Artificial Sequence: Synthetic oligonucleotide
  Antisense strand to SEQ ID NO: 792178
guuauuaacggaauagacu

SEQ ID NO: 792180 - RNA, 19 nt, Artificial Sequence
  Description of Artificial Sequence: Synthetic oligonucleotide
  Sense strand starting at position 2341 of SEQ ID NO: 587438
ccugcuuuccaggaaguua

SEQ ID NO: 792181 - RNA, 19 nt, Artificial Sequence
  Description of Artificial Sequence: Synthetic oligonucleotide
  Antisense strand to SEQ ID NO: 792180
uaacuuccuggaaagcagg

SEQ ID NO: 792182 - RNA, 19 nt, Artificial Sequence
  Description of Artificial Sequence: Synthetic oligonucleotide
  Sense strand starting at position 2519 of SEQ ID NO: 587438
uuuaauuaggaugguuaga

SEQ ID NO: 792183 - RNA, 19 nt, Artificial Sequence
  Description of Artificial Sequence: Synthetic oligonucleotide
  Antisense strand to SEQ ID NO: 792182
ucuaaccauccuaauuaaa

SEQ ID NO: 792184 - RNA, 19 nt, Artificial Sequence
  Description of Artificial Sequence: Synthetic oligonucleotide
  Sense strand starting at position 2628 of SEQ ID NO: 587438
aaacuagagccaggguaaa

SEQ ID NO: 792185 - RNA, 19 nt, Artificial Sequence
  Description of Artificial Sequence: Synthetic oligonucleotide
  Antisense strand to SEQ ID NO: 792184
uuuacccuggcucuaguuu

SEQ ID NO: 792186 - RNA, 19 nt, Artificial Sequence
  Description of Artificial Sequence: Synthetic oligonucleotide
  Sense strand starting at position 2751 of SEQ ID NO: 587438
gguuaaagaguuugacaag

SEQ ID NO: 792187 - RNA, 19 nt, Artificial Sequence
  Description of Artificial Sequence: Synthetic oligonucleotide
  Antisense strand to SEQ ID NO: 792186
cuugucaaacucuuuaacc

SEQ ID NO: 792188 - RNA, 19 nt, Artificial Sequence
  Description of Artificial Sequence: Synthetic oligonucleotide
  Sense strand starting at position 2769 of SEQ ID NO: 587438
gggucaggucaugauuaug

SEQ ID NO: 792189 - RNA, 19 nt, Artificial Sequence
  Description of Artificial Sequence: Synthetic oligonucleotide
  Antisense strand to SEQ ID NO: 792188
cauaaucaugaccugaccc

SEQ ID NO: 792190 - RNA, 19 nt, Artificial Sequence
  Description of Artificial Sequence: Synthetic oligonucleotide
  Sense strand starting at position 2979 of SEQ ID NO: 587438
acugacuauuagucccaga

SEQ ID NO: 792191 - RNA, 19 nt, Artificial Sequence
  Description of Artificial Sequence: Synthetic oligonucleotide
  Antisense strand to SEQ ID NO: 792190
ucugggacuaauagucagu

SEQ ID NO: 792192 - RNA, 19 nt, Artificial Sequence
  Description of Artificial Sequence: Synthetic oligonucleotide
  Sense strand starting at position 3132 of SEQ ID NO: 587438
accuuagagucaucauuga

SEQ ID NO: 792193 - RNA, 19 nt, Artificial Sequence
  Description of Artificial Sequence: Synthetic oligonucleotide
  Antisense strand to SEQ ID NO: 792192
ucaaugaugacucuaaggu

SEQ ID NO: 792194 - RNA, 19 nt, Artificial Sequence
  Description of Artificial Sequence: Synthetic oligonucleotide
  Sense strand starting at position 3158 of SEQ ID NO: 587438
ucuuacacugugcaugaaa

SEQ ID NO: 792195 - RNA, 19 nt, Artificial Sequence
  Description of Artificial Sequence: Synthetic oligonucleotide
  Antisense strand to SEQ ID NO: 792194
uuucaugcacaguguaaga

SEQ ID NO: 792196 - RNA, 19 nt, Artificial Sequence
  Description of Artificial Sequence: Synthetic oligonucleotide
  Sense strand starting at position 3294 of SEQ ID NO: 587438
ggaaucaccucgucacuaa

SEQ ID NO: 792197 - RNA, 19 nt, Artificial Sequence
  Description of Artificial Sequence: Synthetic oligonucleotide
  Antisense strand to SEQ ID NO: 792196
uuagugacgaggugauucc

SEQ ID NO: 792198 - RNA, 19 nt, Artificial Sequence
  Description of Artificial Sequence: Synthetic oligonucleotide
  Sense strand starting at position 3380 of SEQ ID NO: 587438
gucaaauuaugcuuaaagg

SEQ ID NO: 792199 - RNA, 19 nt, Artificial Sequence
  Description of Artificial Sequence: Synthetic oligonucleotide
  Antisense strand to SEQ ID NO: 792198
ccuuuaagcauaauuugac

SEQ ID NO: 792200 - RNA, 19 nt, Artificial Sequence
  Description of Artificial Sequence: Synthetic oligonucleotide
  Sense strand starting at position 3381 of SEQ ID NO: 587438
ucaaauuaugcuuaaaggu

SEQ ID NO: 792201 - RNA, 19 nt, Artificial Sequence
  Description of Artificial Sequence: Synthetic oligonucleotide
  Antisense strand to SEQ ID NO: 792200
accuuuaagcauaauuuga

SEQ ID NO: 792202 - RNA, 19 nt, Artificial Sequence
  Description of Artificial Sequence: Synthetic oligonucleotide
  Sense strand starting at position 3429 of SEQ ID NO: 587438
aaagauguaguagguauua

SEQ ID NO: 792203 - RNA, 19 nt, Artificial Sequence
  Description of Artificial Sequence: Synthetic oligonucleotide
  Antisense strand to SEQ ID NO: 792202
uaauaccuacuacaucuuu

SEQ ID NO: 792204 - RNA, 19 nt, Artificial Sequence
  Description of Artificial Sequence: Synthetic oligonucleotide
  Sense strand starting at position 3431 of SEQ ID NO: 587438
agauguaguagguauuaua

SEQ ID NO: 792205 - RNA, 19 nt, Artificial Sequence
  Description of Artificial Sequence: Synthetic oligonucleotide
  Antisense strand to SEQ ID NO: 792204
uauaauaccuacuacaucu

SEQ ID NO: 792206 - RNA, 19 nt, Artificial Sequence
  Description of Artificial Sequence: Synthetic oligonucleotide
  Sense strand starting at position 3593 of SEQ ID NO: 587438
ccuguuauauuugcuauua

SEQ ID NO: 792207 - RNA, 19 nt, Artificial Sequence
  Description of Artificial Sequence: Synthetic oligonucleotide
  Antisense strand to SEQ ID NO: 792206
uaauagcaaauauaacagg

SEQ ID NO: 792208 - RNA, 19 nt, Artificial Sequence
  Description of Artificial Sequence: Synthetic oligonucleotide
  Sense strand starting at position 3594 of SEQ ID NO: 587438
cuguuauauuugcuauuac

SEQ ID NO: 792209 - RNA, 19 nt, Artificial Sequence
  Description of Artificial Sequence: Synthetic oligonucleotide
  Antisense strand to SEQ ID NO: 792208
guaauagcaaauauaacag

SEQ ID NO: 792210 - RNA, 19 nt, Artificial Sequence
  Description of Artificial Sequence: Synthetic oligonucleotide
  Sense strand starting at position 3683 of SEQ ID NO: 587438
augucaucugcucaaugag

SEQ ID NO: 792211 - RNA, 19 nt, Artificial Sequence
  Description of Artificial Sequence: Synthetic oligonucleotide
  Antisense strand to SEQ ID NO: 792210
cucauugagcagaugacau

SEQ ID NO: 792212 - RNA, 19 nt, Artificial Sequence
  Description of Artificial Sequence: Synthetic oligonucleotide
  Sense strand starting at position 3817 of SEQ ID NO: 587438
uuggucuucccugacuauu

SEQ ID NO: 792213 - RNA, 19 nt, Artificial Sequence
  Description of Artificial Sequence: Synthetic oligonucleotide
  Antisense strand to SEQ ID NO: 792212
aauagucagggaagaccaa

SEQ ID NO: 792214 - RNA, 19 nt, Artificial Sequence
  Description of Artificial Sequence: Synthetic oligonucleotide
  Sense strand starting at position 3942 of SEQ ID NO: 587438
uuugaauguguauaugagu

SEQ ID NO: 792215 - RNA, 19 nt, Artificial Sequence
  Description of Artificial Sequence: Synthetic oligonucleotide
  Antisense strand to SEQ ID NO: 792214
acucauauacacauucaaa

SEQ ID NO: 792216 - RNA, 19 nt, Artificial Sequence
  Description of Artificial Sequence: Synthetic oligonucleotide
  Sense strand starting at position 3981 of SEQ ID NO: 587438
uggagagugauguaaaguu

SEQ ID NO: 792217 - RNA, 19 nt, Artificial Sequence
  Description of Artificial Sequence: Synthetic oligonucleotide
  Antisense strand to SEQ ID NO: 792216
aacuuuacaucacucucca

SEQ ID NO: 792218 - RNA, 19 nt, Artificial Sequence
  Description of Artificial Sequence: Synthetic oligonucleotide
  Sense strand starting at position 71 of SEQ ID NO: 587439
gcuguugugacauagcaaa

SEQ ID NO: 792219 - RNA, 19 nt, Artificial Sequence
  Description of Artificial Sequence: Synthetic oligonucleotide
  Antisense strand to SEQ ID NO: 792218
uuugcuaugucacaacagc

SEQ ID NO: 792220 - RNA, 19 nt, Artificial Sequence
  Description of Artificial Sequence: Synthetic oligonucleotide
  Sense strand starting at position 183 of SEQ ID NO: 587439
uuuagagauuugcaaucuc

SEQ ID NO: 792221 - RNA, 19 nt, Artificial Sequence
  Description of Artificial Sequence: Synthetic oligonucleotide
  Antisense strand to SEQ ID NO: 792220
gagauugcaaaucucuaaa

SEQ ID NO: 792222 - RNA, 19 nt, Artificial Sequence
  Description of Artificial Sequence: Synthetic oligonucleotide
  Sense strand starting at position 717 of SEQ ID NO: 587439
gugauuacacuguacuaca

SEQ ID NO: 792223 - RNA, 19 nt, Artificial Sequence
  Description of Artificial Sequence: Synthetic oligonucleotide
  Antisense strand to SEQ ID NO: 792222
uguaguacaguguaaucac

SEQ ID NO: 792224 - RNA, 19 nt, Artificial Sequence
  Description of Artificial Sequence: Synthetic oligonucleotide
  Sense strand starting at position 833 of SEQ ID NO: 587439
gcuaacuugccuuaaaguc

SEQ ID NO: 792225 - RNA, 19 nt, Artificial Sequence
  Description of Artificial Sequence: Synthetic oligonucleotide
  Antisense strand to SEQ ID NO: 792224
gacuuuaaggcaaguuagc

SEQ ID NO: 792226 - RNA, 19 nt, Artificial Sequence
  Description of Artificial Sequence: Synthetic oligonucleotide
  Sense strand starting at position 916 of SEQ ID NO: 587439
uuguauccaguuuaacuaa

SEQ ID NO: 792227 - RNA, 19 nt, Artificial Sequence
  Description of Artificial Sequence: Synthetic oligonucleotide
  Antisense strand to SEQ ID NO: 792226
uuaguuaaacuggauacaa

SEQ ID NO: 792228 - RNA, 19 nt, Artificial Sequence
  Description of Artificial Sequence: Synthetic oligonucleotide
  Sense strand starting at position 956 of SEQ ID NO: 587439
auaugcugcguuuaaauua

SEQ ID NO: 792229 - RNA, 19 nt, Artificial Sequence
  Description of Artificial Sequence: Synthetic oligonucleotide
  Antisense strand to SEQ ID NO: 792228
uaauuuaaacgcagcauau

SEQ ID NO: 792230 - RNA, 19 nt, Artificial Sequence
  Description of Artificial Sequence: Synthetic oligonucleotide
  Sense strand starting at position 963 of SEQ ID NO: 587439
gcguuuaaauuaucaacag

SEQ ID NO: 792231 - RNA, 19 nt, Artificial Sequence
  Description of Artificial Sequence: Synthetic oligonucleotide
  Antisense strand to SEQ ID NO: 792230
cuguugauaauuuaaacgc

SEQ ID NO: 792232 - RNA, 19 nt, Artificial Sequence
  Description of Artificial Sequence: Synthetic oligonucleotide
  Sense strand starting at position 1296 of SEQ ID NO: 587439
aggcccuucucuuugauau

SEQ ID NO: 792233 - RNA, 19 nt, Artificial Sequence
  Description of Artificial Sequence: Synthetic oligonucleotide
  Antisense strand to SEQ ID NO: 792232
auaucaaagagaagggccu

SEQ ID NO: 792234 - RNA, 19 nt, Artificial Sequence
  Description of Artificial Sequence: Synthetic oligonucleotide
  Sense strand starting at position 1420 of SEQ ID NO: 587439
cuccacuuggaacguuaua

SEQ ID NO: 792235 - RNA, 19 nt, Artificial Sequence
  Description of Artificial Sequence: Synthetic oligonucleotide
  Antisense strand to SEQ ID NO: 792234
uauaacguuccaaguggag

SEQ ID NO: 792236 - RNA, 19 nt, Artificial Sequence
  Description of Artificial Sequence: Synthetic oligonucleotide
  Sense strand starting at position 1429 of SEQ ID NO: 587439
gaacguuauagaugucaga

SEQ ID NO: 792237 - RNA, 19 nt, Artificial Sequence
  Description of Artificial Sequence: Synthetic oligonucleotide
  Antisense strand to SEQ ID NO: 792236
ucugacaucuauaacguuc

SEQ ID NO: 792238 - RNA, 19 nt, Artificial Sequence
  Description of Artificial Sequence: Synthetic oligonucleotide
  Sense strand starting at position 1454 of SEQ ID NO: 587439
cagggaaucaguggaguuu

SEQ ID NO: 792239 - RNA, 19 nt, Artificial Sequence
  Description of Artificial Sequence: Synthetic oligonucleotide
  Antisense strand to SEQ ID NO: 792238
aaacuccacugauucccug

SEQ ID NO: 792240 - RNA, 19 nt, Artificial Sequence
  Description of Artificial Sequence: Synthetic oligonucleotide
  Sense strand starting at position 1463 of SEQ ID NO: 587439
aguggaguuuccuuacucu

SEQ ID NO: 792241 - RNA, 19 nt, Artificial Sequence
  Description of Artificial Sequence: Synthetic oligonucleotide
  Antisense strand to SEQ ID NO: 792240
agaguaaggaaacuccacu

SEQ ID NO: 792242 - RNA, 19 nt, Artificial Sequence
  Description of Artificial Sequence: Synthetic oligonucleotide
  Sense strand starting at position 1504 of SEQ ID NO: 587439
gucccuaaauccuucucga

SEQ ID NO: 792243 - RNA, 19 nt, Artificial Sequence
  Description of Artificial Sequence: Synthetic oligonucleotide
  Antisense strand to SEQ ID NO: 792242
ucgagaaggauuuagggac

SEQ ID NO: 792244 - RNA, 19 nt, Artificial Sequence
  Description of Artificial Sequence: Synthetic oligonucleotide
  Sense strand starting at position 1537 of SEQ ID NO: 587439
gcuggucuccaggagucuu

SEQ ID NO: 792245 - RNA, 19 nt, Artificial Sequence
  Description of Artificial Sequence: Synthetic oligonucleotide
  Antisense strand to SEQ ID NO: 792244
aagacuccuggagaccagc

SEQ ID NO: 792246 - RNA, 19 nt, Artificial Sequence
  Description of Artificial Sequence: Synthetic oligonucleotide
  Sense strand starting at position 1675 of SEQ ID NO: 587439
gucgaagcuccugaacaaa

SEQ ID NO: 792247 - RNA, 19 nt, Artificial Sequence
  Description of Artificial Sequence: Synthetic oligonucleotide
  Antisense strand to SEQ ID NO: 792246
uuuguucaggagcuucgac

SEQ ID NO: 792248 - RNA, 19 nt, Artificial Sequence
  Description of Artificial Sequence: Synthetic oligonucleotide
  Sense strand starting at position 1994 of SEQ ID NO: 587439
gaaagagaaacgugaguua

SEQ ID NO: 792249 - RNA, 19 nt, Artificial Sequence
  Description of Artificial Sequence: Synthetic oligonucleotide
  Antisense strand to SEQ ID NO: 792248
uaacucacguuucucuuuc

SEQ ID NO: 792250 - RNA, 19 nt, Artificial Sequence
  Description of Artificial Sequence: Synthetic oligonucleotide
  Sense strand starting at position 2176 of SEQ ID NO: 587439
accucuuuccgauggaaug

SEQ ID NO: 792251 - RNA, 19 nt, Artificial Sequence
  Description of Artificial Sequence: Synthetic oligonucleotide
  Antisense strand to SEQ ID NO: 792250
cauuccaucggaaagaggu

SEQ ID NO: 792252 - RNA, 19 nt, Artificial Sequence
  Description of Artificial Sequence: Synthetic oligonucleotide
  Sense strand starting at position 2177 of SEQ ID NO: 587439
ccucuuuccgauggaauga

SEQ ID NO: 792253 - RNA, 19 nt, Artificial Sequence
  Description of Artificial Sequence: Synthetic oligonucleotide
  Antisense strand to SEQ ID NO: 792252
ucauuccaucggaaagagg

SEQ ID NO: 792254 - RNA, 19 nt, Artificial Sequence
  Description of Artificial Sequence: Synthetic oligonucleotide
  Sense strand starting at position 2178 of SEQ ID NO: 587439
cucuuuccgauggaaugau

SEQ ID NO: 792255 - RNA, 19 nt, Artificial Sequence
  Description of Artificial Sequence: Synthetic oligonucleotide
  Antisense strand to SEQ ID NO: 792254
aucauuccaucggaaagag

SEQ ID NO: 792256 - RNA, 19 nt, Artificial Sequence
  Description of Artificial Sequence: Synthetic oligonucleotide
  Sense strand starting at position 2240 of SEQ ID NO: 587439
uaggcaaaccgucauaaua

SEQ ID NO: 792257 - RNA, 19 nt, Artificial Sequence
  Description of Artificial Sequence: Synthetic oligonucleotide
  Antisense strand to SEQ ID NO: 792256
uauuaugacgguuugccua

SEQ ID NO: 792258 - RNA, 19 nt, Artificial Sequence
  Description of Artificial Sequence: Synthetic oligonucleotide
  Sense strand starting at position 2268 of SEQ ID NO: 587439
uucgcauuauuucuguagu

SEQ ID NO: 792259 - RNA, 19 nt, Artificial Sequence
  Description of Artificial Sequence: Synthetic oligonucleotide
  Antisense strand to SEQ ID NO: 792258
acuacagaaauaaugcgaa

SEQ ID NO: 792260 - RNA, 19 nt, Artificial Sequence
  Description of Artificial Sequence: Synthetic oligonucleotide
  Sense strand starting at position 2270 of SEQ ID NO: 587439
cgcauuauuucuguagugu

SEQ ID NO: 792261 - RNA, 19 nt, Artificial Sequence
  Description of Artificial Sequence: Synthetic oligonucleotide
  Antisense strand to SEQ ID NO: 792260
acacuacagaaauaaugcg

SEQ ID NO: 792262 - RNA, 19 nt, Artificial Sequence
  Description of Artificial Sequence: Synthetic oligonucleotide
  Sense strand starting at position 2271 of SEQ ID NO: 587439
gcauuauuucuguaguguc

SEQ ID NO: 792263 - RNA, 19 nt, Artificial Sequence
  Description of Artificial Sequence: Synthetic oligonucleotide
  Antisense strand to SEQ ID NO: 792262
gacacuacagaaauaaugc

SEQ ID NO: 792264 - RNA, 19 nt, Artificial Sequence
  Description of Artificial Sequence: Synthetic oligonucleotide
  Sense strand starting at position 2324 of SEQ ID NO: 587439
aaugaagugcuguacuaac

SEQ ID NO: 792265 - RNA, 19 nt, Artificial Sequence
  Description of Artificial Sequence: Synthetic oligonucleotide
  Antisense strand to SEQ ID NO: 792264
guuaguacagcacuucauu

SEQ ID NO: 792266 - RNA, 19 nt, Artificial Sequence
  Description of Artificial Sequence: Synthetic oligonucleotide
  Sense strand starting at position 2343 of SEQ ID NO: 587439
ucgcauuaugcauauuaga

SEQ ID NO: 792267 - RNA, 19 nt, Artificial Sequence
  Description of Artificial Sequence: Synthetic oligonucleotide
  Antisense strand to SEQ ID NO: 792266
ucuaauaugcauaaugcga

SEQ ID NO: 792268 - RNA, 19 nt, Artificial Sequence
  Description of Artificial Sequence: Synthetic oligonucleotide
  Sense strand starting at position 2382 of SEQ ID NO: 587439
cgacauuauucuguuaauu

SEQ ID NO: 792269 - RNA, 19 nt, Artificial Sequence
  Description of Artificial Sequence: Synthetic oligonucleotide
  Antisense strand to SEQ ID NO: 792268
aauuaacagaauaaugucg

SEQ ID NO: 792270 - RNA, 19 nt, Artificial Sequence
  Description of Artificial Sequence: Synthetic oligonucleotide
  Sense strand starting at position 2565 of SEQ ID NO: 587439
caaagaaguuaucugaggu

SEQ ID NO: 792271 - RNA, 19 nt, Artificial Sequence
  Description of Artificial Sequence: Synthetic oligonucleotide
  Antisense strand to SEQ ID NO: 792270
accucagauaacuucuuug

SEQ ID NO: 792272 - RNA, 19 nt, Artificial Sequence
  Description of Artificial Sequence: Synthetic oligonucleotide
  Sense strand starting at position 2571 of SEQ ID NO: 587439
aguuaucugagguauuguu

SEQ ID NO: 792273 - RNA, 19 nt, Artificial Sequence
  Description of Artificial Sequence: Synthetic oligonucleotide
  Antisense strand to SEQ ID NO: 792272
aacaauaccucagauaacu

SEQ ID NO: 792274 - RNA, 19 nt, Artificial Sequence
  Description of Artificial Sequence: Synthetic oligonucleotide
  Sense strand starting at position 2581 of SEQ ID NO: 587439
gguauuguugaaggaugau

SEQ ID NO: 792275 - RNA, 19 nt, Artificial Sequence
  Description of Artificial Sequence: Synthetic oligonucleotide
  Antisense strand to SEQ ID NO: 792274
aucauccuucaacaauacc

SEQ ID NO: 792276 - RNA, 19 nt, Artificial Sequence
  Description of Artificial Sequence: Synthetic oligonucleotide
  Sense strand starting at position 2587 of SEQ ID NO: 587439
guugaaggaugauacagaa

SEQ ID NO: 792277 - RNA, 19 nt, Artificial Sequence
  Description of Artificial Sequence: Synthetic oligonucleotide
  Antisense strand to SEQ ID NO: 792276
uucuguaucauccuucaac

SEQ ID NO: 792278 - RNA, 19 nt, Artificial Sequence
  Description of Artificial Sequence: Synthetic oligonucleotide
  Sense strand starting at position 2625 of SEQ ID NO: 587439
gcugauuuaugacacauua

SEQ ID NO: 792279 - RNA, 19 nt, Artificial Sequence
  Description of Artificial Sequence: Synthetic oligonucleotide
  Antisense strand to SEQ ID NO: 792278
uaaugugucauaaaucagc

SEQ ID NO: 792280 - RNA, 19 nt, Artificial Sequence
  Description of Artificial Sequence: Synthetic oligonucleotide
  Sense strand starting at position 2825 of SEQ ID NO: 587439
ggcauauccugcccugaag

SEQ ID NO: 792281 - RNA, 19 nt, Artificial Sequence
  Description of Artificial Sequence: Synthetic oligonucleotide
  Antisense strand to SEQ ID NO: 792280
cuucagggcaggauaugcc

SEQ ID NO: 792282 - RNA, 19 nt, Artificial Sequence
  Description of Artificial Sequence: Synthetic oligonucleotide
  Sense strand starting at position 2828 of SEQ ID NO: 587439
auauccugcccugaaguuu

SEQ ID NO: 792283 - RNA, 19 nt, Artificial Sequence
  Description of Artificial Sequence: Synthetic oligonucleotide
  Antisense strand to SEQ ID NO: 792282
aaacuucagggcaggauau

SEQ ID NO: 792284 - RNA, 19 nt, Artificial Sequence
  Description of Artificial Sequence: Synthetic oligonucleotide
  Sense strand starting at position 3013 of SEQ ID NO: 587439
uccacaaauuuagagguuu

SEQ ID NO: 792285 - RNA, 19 nt, Artificial Sequence
  Description of Artificial Sequence: Synthetic oligonucleotide
  Antisense strand to SEQ ID NO: 792284
aaaccucuaaauuugugga

SEQ ID NO: 792286 - RNA, 19 nt, Artificial Sequence
  Description of Artificial Sequence: Synthetic oligonucleotide
  Sense strand starting at position 3060 of SEQ ID NO: 587439
agaaauugguaacagaaca

SEQ ID NO: 792287 - RNA, 19 nt, Artificial Sequence
  Description of Artificial Sequence: Synthetic oligonucleotide
  Antisense strand to SEQ ID NO: 792286
uguucuguuaccaauuucu

SEQ ID NO: 792288 - RNA, 19 nt, Artificial Sequence
  Description of Artificial Sequence: Synthetic oligonucleotide
  Sense strand starting at position 3172 of SEQ ID NO: 587439
cagugaggcuacuuauaaa

SEQ ID NO: 792289 - RNA, 19 nt, Artificial Sequence
  Description of Artificial Sequence: Synthetic oligonucleotide
  Antisense strand to SEQ ID NO: 792288
uuuauaaguagccucacug

SEQ ID NO: 792290 - RNA, 19 nt, Artificial Sequence
  Description of Artificial Sequence: Synthetic oligonucleotide
  Sense strand starting at position 3409 of SEQ ID NO: 587439
gugggcccucuuuaugaaa

SEQ ID NO: 792291 - RNA, 19 nt, Artificial Sequence
  Description of Artificial Sequence: Synthetic oligonucleotide
  Antisense strand to SEQ ID NO: 792290
uuucauaaagagggcccac

SEQ ID NO: 792292 - RNA, 19 nt, Artificial Sequence
  Description of Artificial Sequence: Synthetic oligonucleotide
  Sense strand starting at position 3432 of SEQ ID NO: 587439
cuagauguaagagguacaa

SEQ ID NO: 792293 - RNA, 19 nt, Artificial Sequence
  Description of Artificial Sequence: Synthetic oligonucleotide
  Antisense strand to SEQ ID NO: 792292
uuguaccucuuacaucuag

SEQ ID NO: 792294 - RNA, 19 nt, Artificial Sequence
  Description of Artificial Sequence: Synthetic oligonucleotide
  Sense strand starting at position 3510 of SEQ ID NO: 587439
ugaucaccuugacaagaaa

SEQ ID NO: 792295 - RNA, 19 nt, Artificial Sequence
  Description of Artificial Sequence: Synthetic oligonucleotide
  Antisense strand to SEQ ID NO: 792294
uuucuugucaaggugauca

SEQ ID NO: 792296 - RNA, 19 nt, Artificial Sequence
  Description of Artificial Sequence: Synthetic oligonucleotide
  Sense strand starting at position 3554 of SEQ ID NO: 587439
ucacuucgguuccuaauuu

SEQ ID NO: 792297 - RNA, 19 nt, Artificial Sequence
  Description of Artificial Sequence: Synthetic oligonucleotide
  Antisense strand to SEQ ID NO: 792296
aaauuaggaaccgaaguga

SEQ ID NO: 792298 - RNA, 19 nt, Artificial Sequence
  Description of Artificial Sequence: Synthetic oligonucleotide
  Sense strand starting at position 35 of SEQ ID NO: 587440
gagugcaguggucaaucau

SEQ ID NO: 792299 - RNA, 19 nt, Artificial Sequence
  Description of Artificial Sequence: Synthetic oligonucleotide
  Antisense strand to SEQ ID NO: 792298
augauugaccacugcacuc

SEQ ID NO: 792300 - RNA, 19 nt, Artificial Sequence
  Description of Artificial Sequence: Synthetic oligonucleotide
  Sense strand starting at position 242 of SEQ ID NO: 587440
gcauuacaggugugaaccu

SEQ ID NO: 792301 - RNA, 19 nt, Artificial Sequence
  Description of Artificial Sequence: Synthetic oligonucleotide
  Antisense strand to SEQ ID NO: 792300
agguucacaccuguaaugc

SEQ ID NO: 792302 - RNA, 19 nt, Artificial Sequence
  Description of Artificial Sequence: Synthetic oligonucleotide
  Sense strand starting at position 271 of SEQ ID NO: 587440
gccagaagugccuauaaac

SEQ ID NO: 792303 - RNA, 19 nt, Artificial Sequence
  Description of Artificial Sequence: Synthetic oligonucleotide
  Antisense strand to SEQ ID NO: 792302
guuuauaggcacuucuggc

SEQ ID NO: 792304 - RNA, 19 nt, Artificial Sequence
  Description of Artificial Sequence: Synthetic oligonucleotide
  Sense strand starting at position 288 of SEQ ID NO: 587440
acaguauccuggcuuccaa

SEQ ID NO: 792305 - RNA, 19 nt, Artificial Sequence
  Description of Artificial Sequence: Synthetic oligonucleotide
  Antisense strand to SEQ ID NO: 792304
uuggaagccaggauacugu

SEQ ID NO: 792306 - RNA, 19 nt, Artificial Sequence
  Description of Artificial Sequence: Synthetic oligonucleotide
  Sense strand starting at position 437 of SEQ ID NO: 587440
aggaauuguccugguagac

SEQ ID NO: 792307 - RNA, 19 nt, Artificial Sequence
  Description of Artificial Sequence: Synthetic oligonucleotide
  Antisense strand to SEQ ID NO: 792306
gucuaccaggacaauuccu

SEQ ID NO: 792308 - RNA, 19 nt, Artificial Sequence
  Description of Artificial Sequence: Synthetic oligonucleotide
  Sense strand starting at position 447 of SEQ ID NO: 587440
cugguagaccauugugaca

SEQ ID NO: 792309 - RNA, 19 nt, Artificial Sequence
  Description of Artificial Sequence: Synthetic oligonucleotide
  Antisense strand to SEQ ID NO: 792308
ugucacaauggucuaccag

SEQ ID NO: 792310 - RNA, 19 nt, Artificial Sequence
  Description of Artificial Sequence: Synthetic oligonucleotide
  Sense strand starting at position 558 of SEQ ID NO: 587440
uuggcucauuucuaauaga

SEQ ID NO: 792311 - RNA, 19 nt, Artificial Sequence
  Description of Artificial Sequence: Synthetic oligonucleotide
  Antisense strand to SEQ ID NO: 792310
ucuauuagaaaugagccaa

SEQ ID NO: 792312 - RNA, 19 nt, Artificial Sequence
  Description of Artificial Sequence: Synthetic oligonucleotide
  Sense strand starting at position 715 of SEQ ID NO: 587440
ggacaagaucccuaaccgu

SEQ ID NO: 792313 - RNA, 19 nt, Artificial Sequence
  Description of Artificial Sequence: Synthetic oligonucleotide
  Antisense strand to SEQ ID NO: 792312
acgguuagggaucuugucc

SEQ ID NO: 792314 - RNA, 19 nt, Artificial Sequence
  Description of Artificial Sequence: Synthetic oligonucleotide
  Sense strand starting at position 732 of SEQ ID NO: 587440
guucuaacaguguauguuu

SEQ ID NO: 792315 - RNA, 19 nt, Artificial Sequence
  Description of Artificial Sequence: Synthetic oligonucleotide
  Antisense strand to SEQ ID NO: 792314
aaacauacacuguuagaac

SEQ ID NO: 792316 - RNA, 19 nt, Artificial Sequence
  Description of Artificial Sequence: Synthetic oligonucleotide
  Sense strand starting at position 799 of SEQ ID NO: 587440
gggacagcugccugagaaa

SEQ ID NO: 792317 - RNA, 19 nt, Artificial Sequence
  Description of Artificial Sequence: Synthetic oligonucleotide
  Antisense strand to SEQ ID NO: 792316
uuucucaggcagcuguccc

SEQ ID NO: 792318 - RNA, 19 nt, Artificial Sequence
  Description of Artificial Sequence: Synthetic oligonucleotide
  Sense strand starting at position 871 of SEQ ID NO: 587440
uuucuaguaguauggaaag

SEQ ID NO: 792319 - RNA, 19 nt, Artificial Sequence
  Description of Artificial Sequence: Synthetic oligonucleotide
  Antisense strand to SEQ ID NO: 792318
cuuuccauacuacuagaaa

SEQ ID NO: 792320 - RNA, 19 nt, Artificial Sequence
  Description of Artificial Sequence: Synthetic oligonucleotide
  Sense strand starting at position 873 of SEQ ID NO: 587440
ucuaguaguauggaaagca

SEQ ID NO: 792321 - RNA, 19 nt, Artificial Sequence
  Description of Artificial Sequence: Synthetic oligonucleotide
  Antisense strand to SEQ ID NO: 792320
ugcuuuccauacuacuaga

SEQ ID NO: 792322 - RNA, 19 nt, Artificial Sequence
  Description of Artificial Sequence: Synthetic oligonucleotide
  Sense strand starting at position 1333 of SEQ ID NO: 587440
ggcgugcuucgggaaggaa

SEQ ID NO: 792323 - RNA, 19 nt, Artificial Sequence
  Description of Artificial Sequence: Synthetic oligonucleotide
  Antisense strand to SEQ ID NO: 792322
uuccuucccgaagcacgcc

SEQ ID NO: 792324 - RNA, 19 nt, Artificial Sequence
  Description of Artificial Sequence: Synthetic oligonucleotide
  Sense strand starting at position 1362 of SEQ ID NO: 587440
gcaggaaucguuuauccca

SEQ ID NO: 792325 - RNA, 19 nt, Artificial Sequence
  Description of Artificial Sequence: Synthetic oligonucleotide
  Antisense strand to SEQ ID NO: 792324
ugggauaaacgauuccugc

SEQ ID NO: 792326 - RNA, 19 nt, Artificial Sequence
  Description of Artificial Sequence: Synthetic oligonucleotide
  Sense strand starting at position 1365 of SEQ ID NO: 587440
ggaaucguuuaucccaaca

SEQ ID NO: 792327 - RNA, 19 nt, Artificial Sequence
  Description of Artificial Sequence: Synthetic oligonucleotide
  Antisense strand to SEQ ID NO: 792326
uguugggauaaacgauucc

SEQ ID NO: 792328 - RNA, 19 nt, Artificial Sequence
  Description of Artificial Sequence: Synthetic oligonucleotide
  Sense strand starting at position 1370 of SEQ ID NO: 587440
cguuuaucccaacagauaa

SEQ ID NO: 792329 - RNA, 19 nt, Artificial Sequence
  Description of Artificial Sequence: Synthetic oligonucleotide
  Antisense strand to SEQ ID NO: 792328
uuaucuguugggauaaacg

SEQ ID NO: 792330 - RNA, 19 nt, Artificial Sequence
  Description of Artificial Sequence: Synthetic oligonucleotide
  Sense strand starting at position 1519 of SEQ ID NO: 587440
gaggcgugcguguuuguua

SEQ ID NO: 792331 - RNA, 19 nt, Artificial Sequence
  Description of Artificial Sequence: Synthetic oligonucleotide
  Antisense strand to SEQ ID NO: 792330
uaacaaacacgcacgccuc

SEQ ID NO: 792332 - RNA, 19 nt, Artificial Sequence
  Description of Artificial Sequence: Synthetic oligonucleotide
  Sense strand starting at position 2347 of SEQ ID NO: 587440
cgguuucugcauuaggaca

SEQ ID NO: 792333 - RNA, 19 nt, Artificial Sequence
  Description of Artificial Sequence: Synthetic oligonucleotide
  Antisense strand to SEQ ID NO: 792332
uguccuaaugcagaaaccg

SEQ ID NO: 792334 - RNA, 19 nt, Artificial Sequence
  Description of Artificial Sequence: Synthetic oligonucleotide
  Sense strand starting at position 2361 of SEQ ID NO: 587440
ggacaucaggccuggugua

SEQ ID NO: 792335 - RNA, 19 nt, Artificial Sequence
  Description of Artificial Sequence: Synthetic oligonucleotide
  Antisense strand to SEQ ID NO: 792334
uacaccaggccugaugucc

SEQ ID NO: 792336 - RNA, 19 nt, Artificial Sequence
  Description of Artificial Sequence: Synthetic oligonucleotide
  Sense strand starting at position 2392 of SEQ ID NO: 587440
cccuguuucgugccuuagu

SEQ ID NO: 792337 - RNA, 19 nt, Artificial Sequence
  Description of Artificial Sequence: Synthetic oligonucleotide
  Antisense strand to SEQ ID NO: 792336
acuaaggcacgaaacaggg

SEQ ID NO: 792338 - RNA, 19 nt, Artificial Sequence
  Description of Artificial Sequence: Synthetic oligonucleotide
  Sense strand starting at position 2402 of SEQ ID NO: 587440
ugccuuaguuccucagaug

SEQ ID NO: 792339 - RNA, 19 nt, Artificial Sequence
  Description of Artificial Sequence: Synthetic oligonucleotide
  Antisense strand to SEQ ID NO: 792338
caucugaggaacuaaggca

SEQ ID NO: 792340 - RNA, 19 nt, Artificial Sequence
  Description of Artificial Sequence: Synthetic oligonucleotide
  Sense strand starting at position 2403 of SEQ ID NO: 587440
gccuuaguuccucagauga

SEQ ID NO: 792341 - RNA, 19 nt, Artificial Sequence
  Description of Artificial Sequence: Synthetic oligonucleotide
  Antisense strand to SEQ ID NO: 792340
ucaucugaggaacuaaggc

SEQ ID NO: 792342 - RNA, 19 nt, Artificial Sequence
  Description of Artificial Sequence: Synthetic oligonucleotide
  Sense strand starting at position 2429 of SEQ ID NO: 587440
gggauugaguaguuaugcu

SEQ ID NO: 792343 - RNA, 19 nt, Artificial Sequence
  Description of Artificial Sequence: Synthetic oligonucleotide
  Antisense strand to SEQ ID NO: 792342
agcauaacuacucaauccc

SEQ ID NO: 792344 - RNA, 19 nt, Artificial Sequence
  Description of Artificial Sequence: Synthetic oligonucleotide
  Sense strand starting at position 2563 of SEQ ID NO: 587440
cggcguccugggagcuaaa

SEQ ID NO: 792345 - RNA, 19 nt, Artificial Sequence
  Description of Artificial Sequence: Synthetic oligonucleotide
  Antisense strand to SEQ ID NO: 792344
uuuagcucccaggacgccg

SEQ ID NO: 792346 - RNA, 19 nt, Artificial Sequence
  Description of Artificial Sequence: Synthetic oligonucleotide
  Sense strand starting at position 2618 of SEQ ID NO: 587440
gggcguuggagaggaguaa

SEQ ID NO: 792347 - RNA, 19 nt, Artificial Sequence
  Description of Artificial Sequence: Synthetic oligonucleotide
  Antisense strand to SEQ ID NO: 792346
uuacuccucuccaacgccc

SEQ ID NO: 792348 - RNA, 19 nt, Artificial Sequence
  Description of Artificial Sequence: Synthetic oligonucleotide
  Sense strand starting at position 2633 of SEQ ID NO: 587440
guaagagugucgaagaggu

SEQ ID NO: 792349 - RNA, 19 nt, Artificial Sequence
  Description of Artificial Sequence: Synthetic oligonucleotide
  Antisense strand to SEQ ID NO: 792348
accucuucgacacucuuac

SEQ ID NO: 792350 - RNA, 19 nt, Artificial Sequence
  Description of Artificial Sequence: Synthetic oligonucleotide
  Sense strand starting at position 2635 of SEQ ID NO: 587440
aagagugucgaagagguuu

SEQ ID NO: 792351 - RNA, 19 nt, Artificial Sequence
  Description of Artificial Sequence: Synthetic oligonucleotide
  Antisense strand to SEQ ID NO: 792350
aaaccucuucgacacucuu

SEQ ID NO: 792352 - RNA, 19 nt, Artificial Sequence
  Description of Artificial Sequence: Synthetic oligonucleotide
  Sense strand starting at position 2643 of SEQ ID NO: 587440
cgaagagguuucccgauag

SEQ ID NO: 792353 - RNA, 19 nt, Artificial Sequence
  Description of Artificial Sequence: Synthetic oligonucleotide
  Antisense strand to SEQ ID NO: 792352
cuaucgggaaaccucuucg

SEQ ID NO: 792354 - RNA, 19 nt, Artificial Sequence
  Description of Artificial Sequence: Synthetic oligonucleotide
  Sense strand starting at position 2685 of SEQ ID NO: 587440
accugagguuuaguaggua

SEQ ID NO: 792355 - RNA, 19 nt, Artificial Sequence
  Description of Artificial Sequence: Synthetic oligonucleotide
  Antisense strand to SEQ ID NO: 792354
uaccuacuaaaccucaggu

SEQ ID NO: 792356 - RNA, 19 nt, Artificial Sequence
  Description of Artificial Sequence: Synthetic oligonucleotide
  Sense strand starting at position 2800 of SEQ ID NO: 587440
gcuuguuggguuugagaag

SEQ ID NO: 792357 - RNA, 19 nt, Artificial Sequence
  Description of Artificial Sequence: Synthetic oligonucleotide
  Antisense strand to SEQ ID NO: 792356
cuucucaaacccaacaagc

SEQ ID NO: 792358 - RNA, 19 nt, Artificial Sequence
  Description of Artificial Sequence: Synthetic oligonucleotide
  Sense strand starting at position 2822 of SEQ ID NO: 587440
uuagcauuaugggcacaua

SEQ ID NO: 792359 - RNA, 19 nt, Artificial Sequence
  Description of Artificial Sequence: Synthetic oligonucleotide
  Antisense strand to SEQ ID NO: 792358
uaugugcccauaaugcuaa

SEQ ID NO: 792360 - RNA, 19 nt, Artificial Sequence
  Description of Artificial Sequence: Synthetic oligonucleotide
  Sense strand starting at position 2823 of SEQ ID NO: 587440
uagcauuaugggcacauau

SEQ ID NO: 792361 - RNA, 19 nt, Artificial Sequence
  Description of Artificial Sequence: Synthetic oligonucleotide
  Antisense strand to SEQ ID NO: 792360
auaugugcccauaaugcua

SEQ ID NO: 792362 - RNA, 19 nt, Artificial Sequence
  Description of Artificial Sequence: Synthetic oligonucleotide
  Sense strand starting at position 3094 of SEQ ID NO: 587440
cuuggacuuugucuuagaa

SEQ ID NO: 792363 - RNA, 19 nt, Artificial Sequence
  Description of Artificial Sequence: Synthetic oligonucleotide
  Antisense strand to SEQ ID NO: 792362
uucuaagacaaaguccaag

SEQ ID NO: 792364 - RNA, 19 nt, Artificial Sequence
  Description of Artificial Sequence: Synthetic oligonucleotide
  Sense strand starting at position 3181 of SEQ ID NO: 587440
acuaguagccaguggaguu

SEQ ID NO: 792365 - RNA, 19 nt, Artificial Sequence
  Description of Artificial Sequence: Synthetic oligonucleotide
  Antisense strand to SEQ ID NO: 792364
aacuccacuggcuacuagu

SEQ ID NO: 792366 - RNA, 19 nt, Artificial Sequence
  Description of Artificial Sequence: Synthetic oligonucleotide
  Sense strand starting at position 3215 of SEQ ID NO: 587440
gagggcaaggccugagaua

SEQ ID NO: 792367 - RNA, 19 nt, Artificial Sequence
  Description of Artificial Sequence: Synthetic oligonucleotide
  Antisense strand to SEQ ID NO: 792366
uaucucaggccuugcccuc

SEQ ID NO: 792368 - RNA, 19 nt, Artificial Sequence
  Description of Artificial Sequence: Synthetic oligonucleotide
  Sense strand starting at position 3266 of SEQ ID NO: 587440
gggaaacuuuaggccuaca

SEQ ID NO: 792369 - RNA, 19 nt, Artificial Sequence
  Description of Artificial Sequence: Synthetic oligonucleotide
  Antisense strand to SEQ ID NO: 792368
uguaggccuaaaguuuccc

SEQ ID NO: 792370 - RNA, 19 nt, Artificial Sequence
  Description of Artificial Sequence: Synthetic oligonucleotide
  Sense strand starting at position 3350 of SEQ ID NO: 587440
cugucacaaguuuaacaua

SEQ ID NO: 792371 - RNA, 19 nt, Artificial Sequence
  Description of Artificial Sequence: Synthetic oligonucleotide
  Antisense strand to SEQ ID NO: 792370
uauguuaaacuugugacag

SEQ ID NO: 792372 - RNA, 19 nt, Artificial Sequence
  Description of Artificial Sequence: Synthetic oligonucleotide
  Sense strand starting at position 3434 of SEQ ID NO: 587440
uauugauuguauguugaac

SEQ ID NO: 792373 - RNA, 19 nt, Artificial Sequence
  Description of Artificial Sequence: Synthetic oligonucleotide
  Antisense strand to SEQ ID NO: 792372
guucaacauacaaucaaua

SEQ ID NO: 792374 - RNA, 19 nt, Artificial Sequence
  Description of Artificial Sequence: Synthetic oligonucleotide
  Sense strand starting at position 3463 of SEQ ID NO: 587440
uugaguauacuggguuaag

SEQ ID NO: 792375 - RNA, 19 nt, Artificial Sequence
  Description of Artificial Sequence: Synthetic oligonucleotide
  Antisense strand to SEQ ID NO: 792374
cuuaacccaguauacucaa

SEQ ID NO: 792376 - RNA, 19 nt, Artificial Sequence
  Description of Artificial Sequence: Synthetic oligonucleotide
  Sense strand starting at position 3464 of SEQ ID NO: 587440
ugaguauacuggguuaaga

SEQ ID NO: 792377 - RNA, 19 nt, Artificial Sequence
  Description of Artificial Sequence: Synthetic oligonucleotide
  Antisense strand to SEQ ID NO: 792376
ucuuaacccaguauacuca

SEQ ID NO: 792378 - RNA, 19 nt, Artificial Sequence
  Description of Artificial Sequence: Synthetic oligonucleotide
  Sense strand starting at position 34 of SEQ ID NO: 587441
aggcaaaggcauugaaaug

SEQ ID NO: 792379 - RNA, 19 nt, Artificial Sequence
  Description of Artificial Sequence: Synthetic oligonucleotide
  Antisense strand to SEQ ID NO: 792378
cauuucaaugccuuugccu

SEQ ID NO: 792380 - RNA, 19 nt, Artificial Sequence
  Description of Artificial Sequence: Synthetic oligonucleotide
  Sense strand starting at position 68 of SEQ ID NO: 587441
ugaagaauugcauauucuc

SEQ ID NO: 792381 - RNA, 19 nt, Artificial Sequence
  Description of Artificial Sequence: Synthetic oligonucleotide
  Antisense strand to SEQ ID NO: 792380
gagaauaugcaauucuuca

SEQ ID NO: 792382 - RNA, 19 nt, Artificial Sequence
  Description of Artificial Sequence: Synthetic oligonucleotide
  Sense strand starting at position 114 of SEQ ID NO: 587441
acguuuaaggaagguaaga

SEQ ID NO: 792383 - RNA, 19 nt, Artificial Sequence
  Description of Artificial Sequence: Synthetic oligonucleotide
  Antisense strand to SEQ ID NO: 792382
ucuuaccuuccuuaaacgu

SEQ ID NO: 792384 - RNA, 19 nt, Artificial Sequence
  Description of Artificial Sequence: Synthetic oligonucleotide
  Sense strand starting at position 119 of SEQ ID NO: 587441
uaaggaagguaagaauauu

SEQ ID NO: 792385 - RNA, 19 nt, Artificial Sequence
  Description of Artificial Sequence: Synthetic oligonucleotide
  Antisense strand to SEQ ID NO: 792384
aauauucuuaccuuccuua

SEQ ID NO: 792386 - RNA, 19 nt, Artificial Sequence
  Description of Artificial Sequence: Synthetic oligonucleotide
  Sense strand starting at position 127 of SEQ ID NO: 587441
guaagaauauuaucgguac

SEQ ID NO: 792387 - RNA, 19 nt, Artificial Sequence
  Description of Artificial Sequence: Synthetic oligonucleotide
  Antisense strand to SEQ ID NO: 792386
guaccgauaauauucuuac

SEQ ID NO: 792388 - RNA, 19 nt, Artificial Sequence
  Description of Artificial Sequence: Synthetic oligonucleotide
  Sense strand starting at position 130 of SEQ ID NO: 587441
agaauauuaucgguacaaa

SEQ ID NO: 792389 - RNA, 19 nt, Artificial Sequence
  Description of Artificial Sequence: Synthetic oligonucleotide
  Antisense strand to SEQ ID NO: 792388
uuuguaccgauaauauucu

SEQ ID NO: 792390 - RNA, 19 nt, Artificial Sequence
  Description of Artificial Sequence: Synthetic oligonucleotide
  Sense strand starting at position 844 of SEQ ID NO: 587441
ucaacaugacuuggugaca

SEQ ID NO: 792391 - RNA, 19 nt, Artificial Sequence
  Description of Artificial Sequence: Synthetic oligonucleotide
  Antisense strand to SEQ ID NO: 792390
ugucaccaagucauguuga

SEQ ID NO: 792392 - RNA, 19 nt, Artificial Sequence
  Description of Artificial Sequence: Synthetic oligonucleotide
  Sense strand starting at position 896 of SEQ ID NO: 587441
ggagcaaguuagagugaga

SEQ ID NO: 792393 - RNA, 19 nt, Artificial Sequence
  Description of Artificial Sequence: Synthetic oligonucleotide
  Antisense strand to SEQ ID NO: 792392
ucucacucuaacuugcucc

SEQ ID NO: 792394 - RNA, 19 nt, Artificial Sequence
  Description of Artificial Sequence: Synthetic oligonucleotide
  Sense strand starting at position 976 of SEQ ID NO: 587441
uagaauuguugcuuggaag

SEQ ID NO: 792395 - RNA, 19 nt, Artificial Sequence
  Description of Artificial Sequence: Synthetic oligonucleotide
  Antisense strand to SEQ ID NO: 792394
cuuccaagcaacaauucua

SEQ ID NO: 792396 - RNA, 19 nt, Artificial Sequence
  Description of Artificial Sequence: Synthetic oligonucleotide
  Sense strand starting at position 977 of SEQ ID NO: 587441
agaauuguugcuuggaaga

SEQ ID NO: 792397 - RNA, 19 nt, Artificial Sequence
  Description of Artificial Sequence: Synthetic oligonucleotide
  Antisense strand to SEQ ID NO: 792396
ucuuccaagcaacaauucu

SEQ ID NO: 792398 - RNA, 19 nt, Artificial Sequence
  Description of Artificial Sequence: Synthetic oligonucleotide
  Sense strand starting at position 1008 of SEQ ID NO: 587441
aguuaaugucaagaagcau

SEQ ID NO: 792399 - RNA, 19 nt, Artificial Sequence
  Description of Artificial Sequence: Synthetic oligonucleotide
  Antisense strand to SEQ ID NO: 792398
augcuucuugacauuaacu

SEQ ID NO: 792400 - RNA, 19 nt, Artificial Sequence
  Description of Artificial Sequence: Synthetic oligonucleotide
  Sense strand starting at position 1209 of SEQ ID NO: 587441
gguagcuauuauucugaca

SEQ ID NO: 792401 - RNA, 19 nt, Artificial Sequence
  Description of Artificial Sequence: Synthetic oligonucleotide
  Antisense strand to SEQ ID NO: 792400
ugucagaauaauagcuacc

SEQ ID NO: 792402 - RNA, 19 nt, Artificial Sequence
  Description of Artificial Sequence: Synthetic oligonucleotide
  Sense strand starting at position 1352 of SEQ ID NO: 587441
gguggaauuguucauugcu

SEQ ID NO: 792403 - RNA, 19 nt, Artificial Sequence
  Description of Artificial Sequence: Synthetic oligonucleotide
  Antisense strand to SEQ ID NO: 792402
agcaaugaacaauuccacc

SEQ ID NO: 792404 - RNA, 19 nt, Artificial Sequence
  Description of Artificial Sequence: Synthetic oligonucleotide
  Sense strand starting at position 1366 of SEQ ID NO: 587441
uugcuaacucaugauguaa

SEQ ID NO: 792405 - RNA, 19 nt, Artificial Sequence
  Description of Artificial Sequence: Synthetic oligonucleotide
  Antisense strand to SEQ ID NO: 792404
uuacaucaugaguuagcaa

SEQ ID NO: 792406 - RNA, 19 nt, Artificial Sequence
  Description of Artificial Sequence: Synthetic oligonucleotide
  Sense strand starting at position 1393 of SEQ ID NO: 587441
ggaauaauugcaugcacaa

SEQ ID NO: 792407 - RNA, 19 nt, Artificial Sequence
  Description of Artificial Sequence: Synthetic oligonucleotide
  Antisense strand to SEQ ID NO: 792406
uugugcaugcaauuauucc

SEQ ID NO: 792408 - RNA, 19 nt, Artificial Sequence
  Description of Artificial Sequence: Synthetic oligonucleotide
  Sense strand starting at position 1479 of SEQ ID NO: 587441
ucucuaacacgucaaaugu

SEQ ID NO: 792409 - RNA, 19 nt, Artificial Sequence
  Description of Artificial Sequence: Synthetic oligonucleotide
  Antisense strand to SEQ ID NO: 792408
acauuugacguguuagaga

SEQ ID NO: 792410 - RNA, 19 nt, Artificial Sequence
  Description of Artificial Sequence: Synthetic oligonucleotide
  Sense strand starting at position 2316 of SEQ ID NO: 587441
ucccauguuguggaaacua

SEQ ID NO: 792411 - RNA, 19 nt, Artificial Sequence
  Description of Artificial Sequence: Synthetic oligonucleotide
  Antisense strand to SEQ ID NO: 792410
uaguuuccacaacauggga

SEQ ID NO: 792412 - RNA, 19 nt, Artificial Sequence
  Description of Artificial Sequence: Synthetic oligonucleotide
  Sense strand starting at position 2358 of SEQ ID NO: 587441
gcgggaaucgaguaagaau

SEQ ID NO: 792413 - RNA, 19 nt, Artificial Sequence
  Description of Artificial Sequence: Synthetic oligonucleotide
  Antisense strand to SEQ ID NO: 792412
auucuuacucgauucccgc

SEQ ID NO: 792414 - RNA, 19 nt, Artificial Sequence
  Description of Artificial Sequence: Synthetic oligonucleotide
  Sense strand starting at position 2369 of SEQ ID NO: 587441
guaagaauccgaggugcag

SEQ ID NO: 792415 - RNA, 19 nt, Artificial Sequence
  Description of Artificial Sequence: Synthetic oligonucleotide
  Antisense strand to SEQ ID NO: 792414
cugcaccucggauucuuac

SEQ ID NO: 792416 - RNA, 19 nt, Artificial Sequence
  Description of Artificial Sequence: Synthetic oligonucleotide
  Sense strand starting at position 2402 of SEQ ID NO: 587441
uggucaccuuggucuuaga

SEQ ID NO: 792417 - RNA, 19 nt, Artificial Sequence
  Description of Artificial Sequence: Synthetic oligonucleotide
  Antisense strand to SEQ ID NO: 792416
ucuaagaccaaggugacca

SEQ ID NO: 792418 - RNA, 19 nt, Artificial Sequence
  Description of Artificial Sequence: Synthetic oligonucleotide
  Sense strand starting at position 2413 of SEQ ID NO: 587441
gucuuagaugaauggcaca

SEQ ID NO: 792419 - RNA, 19 nt, Artificial Sequence
  Description of Artificial Sequence: Synthetic oligonucleotide
  Antisense strand to SEQ ID NO: 792418
ugugccauucaucuaagac

SEQ ID NO: 792420 - RNA, 19 nt, Artificial Sequence
  Description of Artificial Sequence: Synthetic oligonucleotide
  Sense strand starting at position 2425 of SEQ ID NO: 587441
uggcacauaugaucgguaa

SEQ ID NO: 792421 - RNA, 19 nt, Artificial Sequence
  Description of Artificial Sequence: Synthetic oligonucleotide
  Antisense strand to SEQ ID NO: 792420
uuaccgaucauaugugcca

SEQ ID NO: 792422 - RNA, 19 nt, Artificial Sequence
  Description of Artificial Sequence: Synthetic oligonucleotide
  Sense strand starting at position 2426 of SEQ ID NO: 587441
ggcacauaugaucgguaac

SEQ ID NO: 792423 - RNA, 19 nt, Artificial Sequence
  Description of Artificial Sequence: Synthetic oligonucleotide
  Antisense strand to SEQ ID NO: 792422
guuaccgaucauaugugcc

SEQ ID NO: 792424 - RNA, 19 nt, Artificial Sequence
  Description of Artificial Sequence: Synthetic oligonucleotide
  Sense strand starting at position 2428 of SEQ ID NO: 587441
cacauaugaucgguaacca

SEQ ID NO: 792425 - RNA, 19 nt, Artificial Sequence
  Description of Artificial Sequence: Synthetic oligonucleotide
  Antisense strand to SEQ ID NO: 792424
ugguuaccgaucauaugug

SEQ ID NO: 792426 - RNA, 19 nt, Artificial Sequence
  Description of Artificial Sequence: Synthetic oligonucleotide
  Sense strand starting at position 2429 of SEQ ID NO: 587441
acauaugaucgguaaccau

SEQ ID NO: 792427 - RNA, 19 nt, Artificial Sequence
  Description of Artificial Sequence: Synthetic oligonucleotide
  Antisense strand to SEQ ID NO: 792426
augguuaccgaucauaugu

SEQ ID NO: 792428 - RNA, 19 nt, Artificial Sequence
  Description of Artificial Sequence: Synthetic oligonucleotide
  Sense strand starting at position 2436 of SEQ ID NO: 587441
aucgguaaccaucgugaaa

SEQ ID NO: 792429 - RNA, 19 nt, Artificial Sequence
  Description of Artificial Sequence: Synthetic oligonucleotide
  Antisense strand to SEQ ID NO: 792428
uuucacgaugguuaccgau

SEQ ID NO: 792430 - RNA, 19 nt, Artificial Sequence
  Description of Artificial Sequence: Synthetic oligonucleotide
  Sense strand starting at position 2462 of SEQ ID NO: 587441
augucucuuguggaaggaa

SEQ ID NO: 792431 - RNA, 19 nt, Artificial Sequence
  Description of Artificial Sequence: Synthetic oligonucleotide
  Antisense strand to SEQ ID NO: 792430
uuccuuccacaagagacau

SEQ ID NO: 792432 - RNA, 19 nt, Artificial Sequence
  Description of Artificial Sequence: Synthetic oligonucleotide
  Sense strand starting at position 2768 of SEQ ID NO: 587441
uggagaucauucucuguug

SEQ ID NO: 792433 - RNA, 19 nt, Artificial Sequence
  Description of Artificial Sequence: Synthetic oligonucleotide
  Antisense strand to SEQ ID NO: 792432
caacagagaaugaucucca

SEQ ID NO: 792434 - RNA, 19 nt, Artificial Sequence
  Description of Artificial Sequence: Synthetic oligonucleotide
  Sense strand starting at position 2769 of SEQ ID NO: 587441
ggagaucauucucuguugu

SEQ ID NO: 792435 - RNA, 19 nt, Artificial Sequence
  Description of Artificial Sequence: Synthetic oligonucleotide
  Antisense strand to SEQ ID NO: 792434
acaacagagaaugaucucc

SEQ ID NO: 792436 - RNA, 19 nt, Artificial Sequence
  Description of Artificial Sequence: Synthetic oligonucleotide
  Sense strand starting at position 2945 of SEQ ID NO: 587441
aguugcucacagggaaauu

SEQ ID NO: 792437 - RNA, 19 nt, Artificial Sequence
  Description of Artificial Sequence: Synthetic oligonucleotide
  Antisense strand to SEQ ID NO: 792436
aauuucccugugagcaacu

SEQ ID NO: 792438 - RNA, 19 nt, Artificial Sequence
  Description of Artificial Sequence: Synthetic oligonucleotide
  Sense strand starting at position 2966 of SEQ ID NO: 587441
uugugaguggcagagucuu

SEQ ID NO: 792439 - RNA, 19 nt, Artificial Sequence
  Description of Artificial Sequence: Synthetic oligonucleotide
  Antisense strand to SEQ ID NO: 792438
aagacucugccacucacaa

SEQ ID NO: 792440 - RNA, 19 nt, Artificial Sequence
  Description of Artificial Sequence: Synthetic oligonucleotide
  Sense strand starting at position 3151 of SEQ ID NO: 587441
gugugaaaugaaugcauag

SEQ ID NO: 792441 - RNA, 19 nt, Artificial Sequence
  Description of Artificial Sequence: Synthetic oligonucleotide
  Antisense strand to SEQ ID NO: 792440
cuaugcauucauuucacac

SEQ ID NO: 792442 - RNA, 19 nt, Artificial Sequence
  Description of Artificial Sequence: Synthetic oligonucleotide
  Sense strand starting at position 3334 of SEQ ID NO: 587441
ucagacacuguuugguuua

SEQ ID NO: 792443 - RNA, 19 nt, Artificial Sequence
  Description of Artificial Sequence: Synthetic oligonucleotide
  Antisense strand to SEQ ID NO: 792442
uaaaccaaacagugucuga

SEQ ID NO: 792444 - RNA, 19 nt, Artificial Sequence
  Description of Artificial Sequence: Synthetic oligonucleotide
  Sense strand starting at position 3347 of SEQ ID NO: 587441
gguuuacguucuccagaaa

SEQ ID NO: 792445 - RNA, 19 nt, Artificial Sequence
  Description of Artificial Sequence: Synthetic oligonucleotide
  Antisense strand to SEQ ID NO: 792444
uuucuggagaacguaaacc

SEQ ID NO: 792446 - RNA, 19 nt, Artificial Sequence
  Description of Artificial Sequence: Synthetic oligonucleotide
  Sense strand starting at position 3444 of SEQ ID NO: 587441
uguccaugggcuggagauu

SEQ ID NO: 792447 - RNA, 19 nt, Artificial Sequence
  Description of Artificial Sequence: Synthetic oligonucleotide
  Antisense strand to SEQ ID NO: 792446
aaucuccagcccauggaca

SEQ ID NO: 792448 - RNA, 19 nt, Artificial Sequence
  Description of Artificial Sequence: Synthetic oligonucleotide
  Sense strand starting at position 3445 of SEQ ID NO: 587441
guccaugggcuggagauua

SEQ ID NO: 792449 - RNA, 19 nt, Artificial Sequence
  Description of Artificial Sequence: Synthetic oligonucleotide
  Antisense strand to SEQ ID NO: 792448
uaaucuccagcccauggac

SEQ ID NO: 792450 - RNA, 19 nt, Artificial Sequence
  Description of Artificial Sequence: Synthetic oligonucleotide
  Sense strand starting at position 3488 of SEQ ID NO: 587441
aggaauauguacccuacua

SEQ ID NO: 792451 - RNA, 19 nt, Artificial Sequence
  Description of Artificial Sequence: Synthetic oligonucleotide
  Antisense strand to SEQ ID NO: 792450
uaguaggguacauauuccu

SEQ ID NO: 792452 - RNA, 19 nt, Artificial Sequence
  Description of Artificial Sequence: Synthetic oligonucleotide
  Sense strand starting at position 3594 of SEQ ID NO: 587441
agugguauuugucugaccu

SEQ ID NO: 792453 - RNA, 19 nt, Artificial Sequence
  Description of Artificial Sequence: Synthetic oligonucleotide
  Antisense strand to SEQ ID NO: 792452
aggucagacaaauaccacu

SEQ ID NO: 792454 - RNA, 19 nt, Artificial Sequence
  Description of Artificial Sequence: Synthetic oligonucleotide
  Sense strand starting at position 3595 of SEQ ID NO: 587441
gugguauuugucugaccuc

SEQ ID NO: 792455 - RNA, 19 nt, Artificial Sequence
  Description of Artificial Sequence: Synthetic oligonucleotide
  Antisense strand to SEQ ID NO: 792454
gaggucagacaaauaccac

SEQ ID NO: 792456 - RNA, 19 nt, Artificial Sequence
  Description of Artificial Sequence: Synthetic oligonucleotide
  Sense strand starting at position 3598 of SEQ ID NO: 587441
guauuugucugaccucauu

SEQ ID NO: 792457 - RNA, 19 nt, Artificial Sequence
  Description of Artificial Sequence: Synthetic oligonucleotide
  Antisense strand to SEQ ID NO: 792456
aaugaggucagacaaauac

SEQ ID NO: 792458 - RNA, 19 nt, Artificial Sequence
  Description of Artificial Sequence: Synthetic oligonucleotide
  Sense strand starting at position 109 of SEQ ID NO: 587442
aguugcucacagggaaauu

SEQ ID NO: 792459 - RNA, 19 nt, Artificial Sequence
  Description of Artificial Sequence: Synthetic oligonucleotide
  Antisense strand to SEQ ID NO: 792458
aauuucccugugagcaacu

SEQ ID NO: 792460 - RNA, 19 nt, Artificial Sequence
  Description of Artificial Sequence: Synthetic oligonucleotide
  Sense strand starting at position 315 of SEQ ID NO: 587442
gugugaaaugaaugcauag

SEQ ID NO: 792461 - RNA, 19 nt, Artificial Sequence
  Description of Artificial Sequence: Synthetic oligonucleotide
  Antisense strand to SEQ ID NO: 792460
cuaugcauucauuucacac

SEQ ID NO: 792462 - RNA, 19 nt, Artificial Sequence
  Description of Artificial Sequence: Synthetic oligonucleotide
  Sense strand starting at position 498 of SEQ ID NO: 587442
ucagacacuguuugguuua

SEQ ID NO: 792463 - RNA, 19 nt, Artificial Sequence
  Description of Artificial Sequence: Synthetic oligonucleotide
  Antisense strand to SEQ ID NO: 792462
uaaaccaaacagugucuga

SEQ ID NO: 792464 - RNA, 19 nt, Artificial Sequence
  Description of Artificial Sequence: Synthetic oligonucleotide
  Sense strand starting at position 511 of SEQ ID NO: 587442
gguuuacguucuccagaaa

SEQ ID NO: 792465 - RNA, 19 nt, Artificial Sequence
  Description of Artificial Sequence: Synthetic oligonucleotide
  Antisense strand to SEQ ID NO: 792464
uuucuggagaacguaaacc

SEQ ID NO: 792466 - RNA, 19 nt, Artificial Sequence
  Description of Artificial Sequence: Synthetic oligonucleotide
  Sense strand starting at position 608 of SEQ ID NO: 587442
uguccaugggcuggagauu

SEQ ID NO: 792467 - RNA, 19 nt, Artificial Sequence
  Description of Artificial Sequence: Synthetic oligonucleotide
  Antisense strand to SEQ ID NO: 792466
aaucuccagcccauggaca

SEQ ID NO: 792468 - RNA, 19 nt, Artificial Sequence
  Description of Artificial Sequence: Synthetic oligonucleotide
  Sense strand starting at position 609 of SEQ ID NO: 587442
guccaugggcuggagauua

SEQ ID NO: 792469 - RNA, 19 nt, Artificial Sequence
  Description of Artificial Sequence: Synthetic oligonucleotide
  Antisense strand to SEQ ID NO: 792468
uaaucuccagcccauggac

SEQ ID NO: 792470 - RNA, 19 nt, Artificial Sequence
  Description of Artificial Sequence: Synthetic oligonucleotide
  Sense strand starting at position 652 of SEQ ID NO: 587442
aggaauauguacccuacua

SEQ ID NO: 792471 - RNA, 19 nt, Artificial Sequence
  Description of Artificial Sequence: Synthetic oligonucleotide
  Antisense strand to SEQ ID NO: 792470
uaguaggguacauauuccu

SEQ ID NO: 792472 - RNA, 19 nt, Artificial Sequence
  Description of Artificial Sequence: Synthetic oligonucleotide
  Sense strand starting at position 758 of SEQ ID NO: 587442
agugguauuugucugaccu

SEQ ID NO: 792473 - RNA, 19 nt, Artificial Sequence
  Description of Artificial Sequence: Synthetic oligonucleotide
  Antisense strand to SEQ ID NO: 792472
aggucagacaaauaccacu

SEQ ID NO: 792474 - RNA, 19 nt, Artificial Sequence
  Description of Artificial Sequence: Synthetic oligonucleotide
  Sense strand starting at position 759 of SEQ ID NO: 587442
gugguauuugucugaccuc

SEQ ID NO: 792475 - RNA, 19 nt, Artificial Sequence
  Description of Artificial Sequence: Synthetic oligonucleotide
  Antisense strand to SEQ ID NO: 792474
gaggucagacaaauaccac

SEQ ID NO: 792476 - RNA, 19 nt, Artificial Sequence
  Description of Artificial Sequence: Synthetic oligonucleotide
  Sense strand starting at position 762 of SEQ ID NO: 587442
guauuugucugaccucauu

SEQ ID NO: 792477 - RNA, 19 nt, Artificial Sequence
  Description of Artificial Sequence: Synthetic oligonucleotide
  Antisense strand to SEQ ID NO: 792476
aaugaggucagacaaauac

SEQ ID NO: 792478 - RNA, 19 nt, Artificial Sequence
  Description of Artificial Sequence: Synthetic oligonucleotide
  Sense strand starting at position 1401 of SEQ ID NO: 587442
ccacaacucugugucuuaa

SEQ ID NO: 792479 - RNA, 19 nt, Artificial Sequence
  Description of Artificial Sequence: Synthetic oligonucleotide
  Antisense strand to SEQ ID NO: 792478
uuaagacacagaguugugg

SEQ ID NO: 792480 - RNA, 19 nt, Artificial Sequence
  Description of Artificial Sequence: Synthetic oligonucleotide
  Sense strand starting at position 1532 of SEQ ID NO: 587442
ccacaucaaugcuuugagu

SEQ ID NO: 792481 - RNA, 19 nt, Artificial Sequence
  Description of Artificial Sequence: Synthetic oligonucleotide
  Antisense strand to SEQ ID NO: 792480
acucaaagcauugaugugg

SEQ ID NO: 792482 - RNA, 19 nt, Artificial Sequence
  Description of Artificial Sequence: Synthetic oligonucleotide
  Sense strand starting at position 1534 of SEQ ID NO: 587442
acaucaaugcuuugaguug

SEQ ID NO: 792483 - RNA, 19 nt, Artificial Sequence
  Description of Artificial Sequence: Synthetic oligonucleotide
  Antisense strand to SEQ ID NO: 792482
caacucaaagcauugaugu

SEQ ID NO: 792484 - RNA, 19 nt, Artificial Sequence
  Description of Artificial Sequence: Synthetic oligonucleotide
  Sense strand starting at position 1697 of SEQ ID NO: 587442
agggaaaguauauguguau

SEQ ID NO: 792485 - RNA, 19 nt, Artificial Sequence
  Description of Artificial Sequence: Synthetic oligonucleotide
  Antisense strand to SEQ ID NO: 792484
auacacauauacuuucccu

SEQ ID NO: 792486 - RNA, 19 nt, Artificial Sequence
  Description of Artificial Sequence: Synthetic oligonucleotide
  Sense strand starting at position 1698 of SEQ ID NO: 587442
gggaaaguauauguguaua

SEQ ID NO: 792487 - RNA, 19 nt, Artificial Sequence
  Description of Artificial Sequence: Synthetic oligonucleotide
  Antisense strand to SEQ ID NO: 792486
uauacacauauacuuuccc

SEQ ID NO: 792488 - RNA, 19 nt, Artificial Sequence
  Description of Artificial Sequence: Synthetic oligonucleotide
  Sense strand starting at position 1700 of SEQ ID NO: 587442
gaaaguauauguguauaca

SEQ ID NO: 792489 - RNA, 19 nt, Artificial Sequence
  Description of Artificial Sequence: Synthetic oligonucleotide
  Antisense strand to SEQ ID NO: 792488
uguauacacauauacuuuc

SEQ ID NO: 792490 - RNA, 19 nt, Artificial Sequence
  Description of Artificial Sequence: Synthetic oligonucleotide
  Sense strand starting at position 2175 of SEQ ID NO: 587442
gaaacagcgcuggaugaaa

SEQ ID NO: 792491 - RNA, 19 nt, Artificial Sequence
  Description of Artificial Sequence: Synthetic oligonucleotide
  Antisense strand to SEQ ID NO: 792490
uuucauccagcgcuguuuc

SEQ ID NO: 792492 - RNA, 19 nt, Artificial Sequence
  Description of Artificial Sequence: Synthetic oligonucleotide
  Sense strand starting at position 2458 of SEQ ID NO: 587442
gaguuuggacacuggauca

SEQ ID NO: 792493 - RNA, 19 nt, Artificial Sequence
  Description of Artificial Sequence: Synthetic oligonucleotide
  Antisense strand to SEQ ID NO: 792492
ugauccaguguccaaacuc

SEQ ID NO: 792494 - RNA, 19 nt, Artificial Sequence
  Description of Artificial Sequence: Synthetic oligonucleotide
  Sense strand starting at position 2563 of SEQ ID NO: 587442
guggcaacaccugaacauu

SEQ ID NO: 792495 - RNA, 19 nt, Artificial Sequence
  Description of Artificial Sequence: Synthetic oligonucleotide
  Antisense strand to SEQ ID NO: 792494
aauguucagguguugccac

SEQ ID NO: 792496 - RNA, 19 nt, Artificial Sequence
  Description of Artificial Sequence: Synthetic oligonucleotide
  Sense strand starting at position 2636 of SEQ ID NO: 587442
cuugacauuucugcguaaa

SEQ ID NO: 792497 - RNA, 19 nt, Artificial Sequence
  Description of Artificial Sequence: Synthetic oligonucleotide
  Antisense strand to SEQ ID NO: 792496
uuuacgcagaaaugucaag

SEQ ID NO: 792498 - RNA, 19 nt, Artificial Sequence
  Description of Artificial Sequence: Synthetic oligonucleotide
  Sense strand starting at position 2637 of SEQ ID NO: 587442
uugacauuucugcguaaau

SEQ ID NO: 792499 - RNA, 19 nt, Artificial Sequence
  Description of Artificial Sequence: Synthetic oligonucleotide
  Antisense strand to SEQ ID NO: 792498
auuuacgcagaaaugucaa

SEQ ID NO: 792500 - RNA, 19 nt, Artificial Sequence
  Description of Artificial Sequence: Synthetic oligonucleotide
  Sense strand starting at position 2638 of SEQ ID NO: 587442
ugacauuucugcguaaauu

SEQ ID NO: 792501 - RNA, 19 nt, Artificial Sequence
  Description of Artificial Sequence: Synthetic oligonucleotide
  Antisense strand to SEQ ID NO: 792500
aauuuacgcagaaauguca

SEQ ID NO: 792502 - RNA, 19 nt, Artificial Sequence
  Description of Artificial Sequence: Synthetic oligonucleotide
  Sense strand starting at position 2801 of SEQ ID NO: 587442
gcaaguugcuauuuaacac

SEQ ID NO: 792503 - RNA, 19 nt, Artificial Sequence
  Description of Artificial Sequence: Synthetic oligonucleotide
  Antisense strand to SEQ ID NO: 792502
guguuaaauagcaacuugc

SEQ ID NO: 792504 - RNA, 19 nt, Artificial Sequence
  Description of Artificial Sequence: Synthetic oligonucleotide
  Sense strand starting at position 2903 of SEQ ID NO: 587442
gccucaguuggucaaucau

SEQ ID NO: 792505 - RNA, 19 nt, Artificial Sequence
  Description of Artificial Sequence: Synthetic oligonucleotide
  Antisense strand to SEQ ID NO: 792504
augauugaccaacugaggc

SEQ ID NO: 792506 - RNA, 19 nt, Artificial Sequence
  Description of Artificial Sequence: Synthetic oligonucleotide
  Sense strand starting at position 2912 of SEQ ID NO: 587442
ggucaaucauggcucagaa

SEQ ID NO: 792507 - RNA, 19 nt, Artificial Sequence
  Description of Artificial Sequence: Synthetic oligonucleotide
  Antisense strand to SEQ ID NO: 792506
uucugagccaugauugacc

SEQ ID NO: 792508 - RNA, 19 nt, Artificial Sequence
  Description of Artificial Sequence: Synthetic oligonucleotide
  Sense strand starting at position 3128 of SEQ ID NO: 587442
acguguuugcucccagguu

SEQ ID NO: 792509 - RNA, 19 nt, Artificial Sequence
  Description of Artificial Sequence: Synthetic oligonucleotide
  Antisense strand to SEQ ID NO: 792508
aaccugggagcaaacacgu

SEQ ID NO: 792510 - RNA, 19 nt, Artificial Sequence
  Description of Artificial Sequence: Synthetic oligonucleotide
  Sense strand starting at position 3181 of SEQ ID NO: 587442
ucuuguuagauuugggugu

SEQ ID NO: 792511 - RNA, 19 nt, Artificial Sequence
  Description of Artificial Sequence: Synthetic oligonucleotide
  Antisense strand to SEQ ID NO: 792510
acacccaaaucuaacaaga

SEQ ID NO: 792512 - RNA, 19 nt, Artificial Sequence
  Description of Artificial Sequence: Synthetic oligonucleotide
  Sense strand starting at position 3328 of SEQ ID NO: 587442
ggugguuaaagguauaauu

SEQ ID NO: 792513 - RNA, 19 nt, Artificial Sequence
  Description of Artificial Sequence: Synthetic oligonucleotide
  Antisense strand to SEQ ID NO: 792512
aauuauaccuuuaaccacc

SEQ ID NO: 792514 - RNA, 19 nt, Artificial Sequence
  Description of Artificial Sequence: Synthetic oligonucleotide
  Sense strand starting at position 3368 of SEQ ID NO: 587442
ccuuauugacaaugugaua

SEQ ID NO: 792515 - RNA, 19 nt, Artificial Sequence
  Description of Artificial Sequence: Synthetic oligonucleotide
  Antisense strand to SEQ ID NO: 792514
uaucacauugucaauaagg

SEQ ID NO: 792516 - RNA, 19 nt, Artificial Sequence
  Description of Artificial Sequence: Synthetic oligonucleotide
  Sense strand starting at position 3373 of SEQ ID NO: 587442
uugacaaugugauauuuga

SEQ ID NO: 792517 - RNA, 19 nt, Artificial Sequence
  Description of Artificial Sequence: Synthetic oligonucleotide
  Antisense strand to SEQ ID NO: 792516
ucaaauaucacauugucaa

SEQ ID NO: 792518 - RNA, 19 nt, Artificial Sequence
  Description of Artificial Sequence: Synthetic oligonucleotide
  Sense strand starting at position 3390 of SEQ ID NO: 587442
gagcuaauacuugaugugu

SEQ ID NO: 792519 - RNA, 19 nt, Artificial Sequence
  Description of Artificial Sequence: Synthetic oligonucleotide
  Antisense strand to SEQ ID NO: 792518
acacaucaaguauuagcuc

SEQ ID NO: 792520 - RNA, 19 nt, Artificial Sequence
  Description of Artificial Sequence: Synthetic oligonucleotide
  Sense strand starting at position 3395 of SEQ ID NO: 587442
aauacuugauguguagaua

SEQ ID NO: 792521 - RNA, 19 nt, Artificial Sequence
  Description of Artificial Sequence: Synthetic oligonucleotide
  Antisense strand to SEQ ID NO: 792520
uaucuacacaucaaguauu

SEQ ID NO: 792522 - RNA, 19 nt, Artificial Sequence
  Description of Artificial Sequence: Synthetic oligonucleotide
  Sense strand starting at position 3396 of SEQ ID NO: 587442
auacuugauguguagauau

SEQ ID NO: 792523 - RNA, 19 nt, Artificial Sequence
  Description of Artificial Sequence: Synthetic oligonucleotide
  Antisense strand to SEQ ID NO: 792522
auaucuacacaucaaguau

SEQ ID NO: 792524 - RNA, 19 nt, Artificial Sequence
  Description of Artificial Sequence: Synthetic oligonucleotide
  Sense strand starting at position 3398 of SEQ ID NO: 587442
acuugauguguagauaugu

SEQ ID NO: 792525 - RNA, 19 nt, Artificial Sequence
  Description of Artificial Sequence: Synthetic oligonucleotide
  Antisense strand to SEQ ID NO: 792524
acauaucuacacaucaagu

SEQ ID NO: 792526 - RNA, 19 nt, Artificial Sequence
  Description of Artificial Sequence: Synthetic oligonucleotide
  Sense strand starting at position 3403 of SEQ ID NO: 587442
auguguagauaugugggaa

SEQ ID NO: 792527 - RNA, 19 nt, Artificial Sequence
  Description of Artificial Sequence: Synthetic oligonucleotide
  Antisense strand to SEQ ID NO: 792526
uucccacauaucuacacau

SEQ ID NO: 792528 - RNA, 19 nt, Artificial Sequence
  Description of Artificial Sequence: Synthetic oligonucleotide
  Sense strand starting at position 3404 of SEQ ID NO: 587442
uguguagauaugugggaaa

SEQ ID NO: 792529 - RNA, 19 nt, Artificial Sequence
  Description of Artificial Sequence: Synthetic oligonucleotide
  Antisense strand to SEQ ID NO: 792528
uuucccacauaucuacaca

SEQ ID NO: 792530 - RNA, 19 nt, Artificial Sequence
  Description of Artificial Sequence: Synthetic oligonucleotide
  Sense strand starting at position 3406 of SEQ ID NO: 587442
uguagauaugugggaaaga

SEQ ID NO: 792531 - RNA, 19 nt, Artificial Sequence
  Description of Artificial Sequence: Synthetic oligonucleotide
  Antisense strand to SEQ ID NO: 792530
ucuuucccacauaucuaca

SEQ ID NO: 792532 - RNA, 19 nt, Artificial Sequence
  Description of Artificial Sequence: Synthetic oligonucleotide
  Sense strand starting at position 3433 of SEQ ID NO: 587442
ggcuaagauaaugguuagu

SEQ ID NO: 792533 - RNA, 19 nt, Artificial Sequence
  Description of Artificial Sequence: Synthetic oligonucleotide
  Antisense strand to SEQ ID NO: 792532
acuaaccauuaucuuagcc

SEQ ID NO: 792534 - RNA, 19 nt, Artificial Sequence
  Description of Artificial Sequence: Synthetic oligonucleotide
  Sense strand starting at position 3436 of SEQ ID NO: 587442
uaagauaaugguuagugca

SEQ ID NO: 792535 - RNA, 19 nt, Artificial Sequence
  Description of Artificial Sequence: Synthetic oligonucleotide
  Antisense strand to SEQ ID NO: 792534
ugcacuaaccauuaucuua

SEQ ID NO: 792536 - RNA, 19 nt, Artificial Sequence
  Description of Artificial Sequence: Synthetic oligonucleotide
  Sense strand starting at position 3438 of SEQ ID NO: 587442
agauaaugguuagugcaaa

SEQ ID NO: 792537 - RNA, 19 nt, Artificial Sequence
  Description of Artificial Sequence: Synthetic oligonucleotide
  Antisense strand to SEQ ID NO: 792536
uuugcacuaaccauuaucu

SEQ ID NO: 792538 - RNA, 19 nt, Artificial Sequence
  Description of Artificial Sequence: Synthetic oligonucleotide
  Sense strand starting at position 295 of SEQ ID NO: 587443
gggcaaccgccagaucaua

SEQ ID NO: 792539 - RNA, 19 nt, Artificial Sequence
  Description of Artificial Sequence: Synthetic oligonucleotide
  Antisense strand to SEQ ID NO: 792538
uaugaucuggcgguugccc

SEQ ID NO: 792540 - RNA, 19 nt, Artificial Sequence
  Description of Artificial Sequence: Synthetic oligonucleotide
  Sense strand starting at position 492 of SEQ ID NO: 587443
agguccaauuacucaguua

SEQ ID NO: 792541 - RNA, 19 nt, Artificial Sequence
  Description of Artificial Sequence: Synthetic oligonucleotide
  Antisense strand to SEQ ID NO: 792540
uaacugaguaauuggaccu

SEQ ID NO: 792542 - RNA, 19 nt, Artificial Sequence
  Description of Artificial Sequence: Synthetic oligonucleotide
  Sense strand starting at position 539 of SEQ ID NO: 587443
cuacucgucccucaggauu

SEQ ID NO: 792543 - RNA, 19 nt, Artificial Sequence
  Description of Artificial Sequence: Synthetic oligonucleotide
  Antisense strand to SEQ ID NO: 792542
aauccugagggacgaguag

SEQ ID NO: 792544 - RNA, 19 nt, Artificial Sequence
  Description of Artificial Sequence: Synthetic oligonucleotide
  Sense strand starting at position 564 of SEQ ID NO: 587443
augcuacuaucaucuagga

SEQ ID NO: 792545 - RNA, 19 nt, Artificial Sequence
  Description of Artificial Sequence: Synthetic oligonucleotide
  Antisense strand to SEQ ID NO: 792544
uccuagaugauaguagcau

SEQ ID NO: 792546 - RNA, 19 nt, Artificial Sequence
  Description of Artificial Sequence: Synthetic oligonucleotide
  Sense strand starting at position 727 of SEQ ID NO: 587443
guguguuuacagguuuguu

SEQ ID NO: 792547 - RNA, 19 nt, Artificial Sequence
  Description of Artificial Sequence: Synthetic oligonucleotide
  Antisense strand to SEQ ID NO: 792546
aacaaaccuguaaacacac

SEQ ID NO: 792548 - RNA, 19 nt, Artificial Sequence
  Description of Artificial Sequence: Synthetic oligonucleotide
  Sense strand starting at position 747 of SEQ ID NO: 587443
ucuccauuagauugugacu

SEQ ID NO: 792549 - RNA, 19 nt, Artificial Sequence
  Description of Artificial Sequence: Synthetic oligonucleotide
  Antisense strand to SEQ ID NO: 792548
agucacaaucuaauggaga

SEQ ID NO: 792550 - RNA, 19 nt, Artificial Sequence
  Description of Artificial Sequence: Synthetic oligonucleotide
  Sense strand starting at position 752 of SEQ ID NO: 587443
auuagauugugacuuccuu

SEQ ID NO: 792551 - RNA, 19 nt, Artificial Sequence
  Description of Artificial Sequence: Synthetic oligonucleotide
  Antisense strand to SEQ ID NO: 792550
aaggaagucacaaucuaau

SEQ ID NO: 792552 - RNA, 19 nt, Artificial Sequence
  Description of Artificial Sequence: Synthetic oligonucleotide
  Sense strand starting at position 756 of SEQ ID NO: 587443
gauugugacuuccuuggaa

SEQ ID NO: 792553 - RNA, 19 nt, Artificial Sequence
  Description of Artificial Sequence: Synthetic oligonucleotide
  Antisense strand to SEQ ID NO: 792552
uuccaaggaagucacaauc

SEQ ID NO: 792554 - RNA, 19 nt, Artificial Sequence
  Description of Artificial Sequence: Synthetic oligonucleotide
  Sense strand starting at position 814 of SEQ ID NO: 587443
agaaaucaacacuguuguu

SEQ ID NO: 792555 - RNA, 19 nt, Artificial Sequence
  Description of Artificial Sequence: Synthetic oligonucleotide
  Antisense strand to SEQ ID NO: 792554
aacaacaguguugauuucu

SEQ ID NO: 792556 - RNA, 19 nt, Artificial Sequence
  Description of Artificial Sequence: Synthetic oligonucleotide
  Sense strand starting at position 819 of SEQ ID NO: 587443
ucaacacuguuguuuaaua

SEQ ID NO: 792557 - RNA, 19 nt, Artificial Sequence
  Description of Artificial Sequence: Synthetic oligonucleotide
  Antisense strand to SEQ ID NO: 792556
uauuaaacaacaguguuga

SEQ ID NO: 792558 - RNA, 19 nt, Artificial Sequence
  Description of Artificial Sequence: Synthetic oligonucleotide
  Sense strand starting at position 1055 of SEQ ID NO: 587443
gaaggcauucguuaagcaa

SEQ ID NO: 792559 - RNA, 19 nt, Artificial Sequence
  Description of Artificial Sequence: Synthetic oligonucleotide
  Antisense strand to SEQ ID NO: 792558
uugcuuaacgaaugccuuc

SEQ ID NO: 792560 - RNA, 19 nt, Artificial Sequence
  Description of Artificial Sequence: Synthetic oligonucleotide
  Sense strand starting at position 1083 of SEQ ID NO: 587443
ugaagucuccuguauuaug

SEQ ID NO: 792561 - RNA, 19 nt, Artificial Sequence
  Description of Artificial Sequence: Synthetic oligonucleotide
  Antisense strand to SEQ ID NO: 792560
cauaauacaggagacuuca

SEQ ID NO: 792562 - RNA, 19 nt, Artificial Sequence
  Description of Artificial Sequence: Synthetic oligonucleotide
  Sense strand starting at position 1099 of SEQ ID NO: 587443
auguuaaaugcugggaaua

SEQ ID NO: 792563 - RNA, 19 nt, Artificial Sequence
  Description of Artificial Sequence: Synthetic oligonucleotide
  Antisense strand to SEQ ID NO: 792562
uauucccagcauuuaacau

SEQ ID NO: 792564 - RNA, 19 nt, Artificial Sequence
  Description of Artificial Sequence: Synthetic oligonucleotide
  Sense strand starting at position 1100 of SEQ ID NO: 587443
uguuaaaugcugggaauau

SEQ ID NO: 792565 - RNA, 19 nt, Artificial Sequence
  Description of Artificial Sequence: Synthetic oligonucleotide
  Antisense strand to SEQ ID NO: 792564
auauucccagcauuuaaca

SEQ ID NO: 792566 - RNA, 19 nt, Artificial Sequence
  Description of Artificial Sequence: Synthetic oligonucleotide
  Sense strand starting at position 1160 of SEQ ID NO: 587443
guuucuuaagcacacagaa

SEQ ID NO: 792567 - RNA, 19 nt, Artificial Sequence
  Description of Artificial Sequence: Synthetic oligonucleotide
  Antisense strand to SEQ ID NO: 792566
uucugugugcuuaagaaac

SEQ ID NO: 792568 - RNA, 19 nt, Artificial Sequence
  Description of Artificial Sequence: Synthetic oligonucleotide
  Sense strand starting at position 1410 of SEQ ID NO: 587443
acuggaaacccggguuuaa

SEQ ID NO: 792569 - RNA, 19 nt, Artificial Sequence
  Description of Artificial Sequence: Synthetic oligonucleotide
  Antisense strand to SEQ ID NO: 792568
uuaaacccggguuuccagu

SEQ ID NO: 792570 - RNA, 19 nt, Artificial Sequence
  Description of Artificial Sequence: Synthetic oligonucleotide
  Sense strand starting at position 1437 of SEQ ID NO: 587443
cuaaauguagaguggcaua

SEQ ID NO: 792571 - RNA, 19 nt, Artificial Sequence
  Description of Artificial Sequence: Synthetic oligonucleotide
  Antisense strand to SEQ ID NO: 792570
uaugccacucuacauuuag

SEQ ID NO: 792572 - RNA, 19 nt, Artificial Sequence
  Description of Artificial Sequence: Synthetic oligonucleotide
  Sense strand starting at position 1442 of SEQ ID NO: 587443
uguagaguggcauaugaga

SEQ ID NO: 792573 - RNA, 19 nt, Artificial Sequence
  Description of Artificial Sequence: Synthetic oligonucleotide
  Antisense strand to SEQ ID NO: 792572
ucucauaugccacucuaca

SEQ ID NO: 792574 - RNA, 19 nt, Artificial Sequence
  Description of Artificial Sequence: Synthetic oligonucleotide
  Sense strand starting at position 1453 of SEQ ID NO: 587443
auaugagaaucacauuugu

SEQ ID NO: 792575 - RNA, 19 nt, Artificial Sequence
  Description of Artificial Sequence: Synthetic oligonucleotide
  Antisense strand to SEQ ID NO: 792574
acaaaugugauucucauau

SEQ ID NO: 792576 - RNA, 19 nt, Artificial Sequence
  Description of Artificial Sequence: Synthetic oligonucleotide
  Sense strand starting at position 1614 of SEQ ID NO: 587443
accaguuagcgugcgacaa

SEQ ID NO: 792577 - RNA, 19 nt, Artificial Sequence
  Description of Artificial Sequence: Synthetic oligonucleotide
  Antisense strand to SEQ ID NO: 792576
uugucgcacgcuaacuggu

SEQ ID NO: 792578 - RNA, 19 nt, Artificial Sequence
  Description of Artificial Sequence: Synthetic oligonucleotide
  Sense strand starting at position 2055 of SEQ ID NO: 587443
uuucucauuggccaagaga

SEQ ID NO: 792579 - RNA, 19 nt, Artificial Sequence
  Description of Artificial Sequence: Synthetic oligonucleotide
  Antisense strand to SEQ ID NO: 792578
ucucuuggccaaugagaaa

SEQ ID NO: 792580 - RNA, 19 nt, Artificial Sequence
  Description of Artificial Sequence: Synthetic oligonucleotide
  Sense strand starting at position 2461 of SEQ ID NO: 587443
gggauuugcuuuccguuca

SEQ ID NO: 792581 - RNA, 19 nt, Artificial Sequence
  Description of Artificial Sequence: Synthetic oligonucleotide
  Antisense strand to SEQ ID NO: 792580
ugaacggaaagcaaauccc

SEQ ID NO: 792582 - RNA, 19 nt, Artificial Sequence
  Description of Artificial Sequence: Synthetic oligonucleotide
  Sense strand starting at position 2546 of SEQ ID NO: 587443
cucugaaguucccuugaau

SEQ ID NO: 792583 - RNA, 19 nt, Artificial Sequence
  Description of Artificial Sequence: Synthetic oligonucleotide
  Antisense strand to SEQ ID NO: 792582
auucaagggaacuucagag

SEQ ID NO: 792584 - RNA, 19 nt, Artificial Sequence
  Description of Artificial Sequence: Synthetic oligonucleotide
  Sense strand starting at position 2658 of SEQ ID NO: 587443
cgaguauguaaguacuuau

SEQ ID NO: 792585 - RNA, 19 nt, Artificial Sequence
  Description of Artificial Sequence: Synthetic oligonucleotide
  Antisense strand to SEQ ID NO: 792584
auaaguacuuacauacucg

SEQ ID NO: 792586 - RNA, 19 nt, Artificial Sequence
  Description of Artificial Sequence: Synthetic oligonucleotide
  Sense strand starting at position 2661 of SEQ ID NO: 587443
guauguaaguacuuauaag

SEQ ID NO: 792587 - RNA, 19 nt, Artificial Sequence
  Description of Artificial Sequence: Synthetic oligonucleotide
  Antisense strand to SEQ ID NO: 792586
cuuauaaguacuuacauac

SEQ ID NO: 792588 - RNA, 19 nt, Artificial Sequence
  Description of Artificial Sequence: Synthetic oligonucleotide
  Sense strand starting at position 2725 of SEQ ID NO: 587443
cucauuacuccugggugga

SEQ ID NO: 792589 - RNA, 19 nt, Artificial Sequence
  Description of Artificial Sequence: Synthetic oligonucleotide
  Antisense strand to SEQ ID NO: 792588
uccacccaggaguaaugag

SEQ ID NO: 792590 - RNA, 19 nt, Artificial Sequence
  Description of Artificial Sequence: Synthetic oligonucleotide
  Sense strand starting at position 2726 of SEQ ID NO: 587443
ucauuacuccuggguggau

SEQ ID NO: 792591 - RNA, 19 nt, Artificial Sequence
  Description of Artificial Sequence: Synthetic oligonucleotide
  Antisense strand to SEQ ID NO: 792590
auccacccaggaguaauga

SEQ ID NO: 792592 - RNA, 19 nt, Artificial Sequence
  Description of Artificial Sequence: Synthetic oligonucleotide
  Sense strand starting at position 2794 of SEQ ID NO: 587443
cgucaucuccuagacuuaa

SEQ ID NO: 792593 - RNA, 19 nt, Artificial Sequence
  Description of Artificial Sequence: Synthetic oligonucleotide
  Antisense strand to SEQ ID NO: 792592
uuaagucuaggagaugacg

SEQ ID NO: 792594 - RNA, 19 nt, Artificial Sequence
  Description of Artificial Sequence: Synthetic oligonucleotide
  Sense strand starting at position 2844 of SEQ ID NO: 587443
ugaggaugauaagcguaua

SEQ ID NO: 792595 - RNA, 19 nt, Artificial Sequence
  Description of Artificial Sequence: Synthetic oligonucleotide
  Antisense strand to SEQ ID NO: 792594
uauacgcuuaucauccuca

SEQ ID NO: 792596 - RNA, 19 nt, Artificial Sequence
  Description of Artificial Sequence: Synthetic oligonucleotide
  Sense strand starting at position 2845 of SEQ ID NO: 587443
gaggaugauaagcguauau

SEQ ID NO: 792597 - RNA, 19 nt, Artificial Sequence
  Description of Artificial Sequence: Synthetic oligonucleotide
  Antisense strand to SEQ ID NO: 792596
auauacgcuuaucauccuc

SEQ ID NO: 792598 - RNA, 19 nt, Artificial Sequence
  Description of Artificial Sequence: Synthetic oligonucleotide
  Sense strand starting at position 2900 of SEQ ID NO: 587443
ggaaauauguaagcugaga

SEQ ID NO: 792599 - RNA, 19 nt, Artificial Sequence
  Description of Artificial Sequence: Synthetic oligonucleotide
  Antisense strand to SEQ ID NO: 792598
ucucagcuuacauauuucc

SEQ ID NO: 792600 - RNA, 19 nt, Artificial Sequence
  Description of Artificial Sequence: Synthetic oligonucleotide
  Sense strand starting at position 2948 of SEQ ID NO: 587443
aaaguuauuggucaguaaa

SEQ ID NO: 792601 - RNA, 19 nt, Artificial Sequence
  Description of Artificial Sequence: Synthetic oligonucleotide
  Antisense strand to SEQ ID NO: 792600
uuuacugaccaauaacuuu

SEQ ID NO: 792602 - RNA, 19 nt, Artificial Sequence
  Description of Artificial Sequence: Synthetic oligonucleotide
  Sense strand starting at position 2950 of SEQ ID NO: 587443
aguuauuggucaguaaaga

SEQ ID NO: 792603 - RNA, 19 nt, Artificial Sequence
  Description of Artificial Sequence: Synthetic oligonucleotide
  Antisense strand to SEQ ID NO: 792602
ucuuuacugaccaauaacu

SEQ ID NO: 792604 - RNA, 19 nt, Artificial Sequence
  Description of Artificial Sequence: Synthetic oligonucleotide
  Sense strand starting at position 2951 of SEQ ID NO: 587443
guuauuggucaguaaagaa

SEQ ID NO: 792605 - RNA, 19 nt, Artificial Sequence
  Description of Artificial Sequence: Synthetic oligonucleotide
  Antisense strand to SEQ ID NO: 792604
uucuuuacugaccaauaac

SEQ ID NO: 792606 - RNA, 19 nt, Artificial Sequence
  Description of Artificial Sequence: Synthetic oligonucleotide
  Sense strand starting at position 3043 of SEQ ID NO: 587443
uuuauugagguguaaugga

SEQ ID NO: 792607 - RNA, 19 nt, Artificial Sequence
  Description of Artificial Sequence: Synthetic oligonucleotide
  Antisense strand to SEQ ID NO: 792606
uccauuacaccucaauaaa

SEQ ID NO: 792608 - RNA, 19 nt, Artificial Sequence
  Description of Artificial Sequence: Synthetic oligonucleotide
  Sense strand starting at position 3243 of SEQ ID NO: 587443
acagaauuauaacuguagu

SEQ ID NO: 792609 - RNA, 19 nt, Artificial Sequence
  Description of Artificial Sequence: Synthetic oligonucleotide
  Antisense strand to SEQ ID NO: 792608
acuacaguuauaauucugu

SEQ ID NO: 792610 - RNA, 19 nt, Artificial Sequence
  Description of Artificial Sequence: Synthetic oligonucleotide
  Sense strand starting at position 3249 of SEQ ID NO: 587443
uuauaacuguagucaccau

SEQ ID NO: 792611 - RNA, 19 nt, Artificial Sequence
  Description of Artificial Sequence: Synthetic oligonucleotide
  Antisense strand to SEQ ID NO: 792610
auggugacuacaguuauaa

SEQ ID NO: 792612 - RNA, 19 nt, Artificial Sequence
  Description of Artificial Sequence: Synthetic oligonucleotide
  Sense strand starting at position 3452 of SEQ ID NO: 587443
aagacuagugaauguauau

SEQ ID NO: 792613 - RNA, 19 nt, Artificial Sequence
  Description of Artificial Sequence: Synthetic oligonucleotide
  Antisense strand to SEQ ID NO: 792612
auauacauucacuagucuu

SEQ ID NO: 792614 - RNA, 19 nt, Artificial Sequence
  Description of Artificial Sequence: Synthetic oligonucleotide
  Sense strand starting at position 3461 of SEQ ID NO: 587443
gaauguauauacuuggauu

SEQ ID NO: 792615 - RNA, 19 nt, Artificial Sequence
  Description of Artificial Sequence: Synthetic oligonucleotide
  Antisense strand to SEQ ID NO: 792614
aauccaaguauauacauuc

SEQ ID NO: 792616 - RNA, 19 nt, Artificial Sequence
  Description of Artificial Sequence: Synthetic oligonucleotide
  Sense strand starting at position 3888 of SEQ ID NO: 587443
gcuugacguacucagauag

SEQ ID NO: 792617 - RNA, 19 nt, Artificial Sequence
  Description of Artificial Sequence: Synthetic oligonucleotide
  Antisense strand to SEQ ID NO: 792616
cuaucugaguacgucaagc

SEQ ID NO: 792618 - RNA, 19 nt, Artificial Sequence
  Description of Artificial Sequence: Synthetic oligonucleotide
  Sense strand starting at position 577 of SEQ ID NO: 587444
uuaguauuccaucaaugua

SEQ ID NO: 792619 - RNA, 19 nt, Artificial Sequence
  Description of Artificial Sequence: Synthetic oligonucleotide
  Antisense strand to SEQ ID NO: 792618
uacauugauggaauacuaa

SEQ ID NO: 792620 - RNA, 19 nt, Artificial Sequence
  Description of Artificial Sequence: Synthetic oligonucleotide
  Sense strand starting at position 601 of SEQ ID NO: 587444
ccuaacccgguugauaaua

SEQ ID NO: 792621 - RNA, 19 nt, Artificial Sequence
  Description of Artificial Sequence: Synthetic oligonucleotide
  Antisense strand to SEQ ID NO: 792620
uauuaucaaccggguuagg

SEQ ID NO: 792622 - RNA, 19 nt, Artificial Sequence
  Description of Artificial Sequence: Synthetic oligonucleotide
  Sense strand starting at position 747 of SEQ ID NO: 587444
aauauuguucccuagagug

SEQ ID NO: 792623 - RNA, 19 nt, Artificial Sequence
  Description of Artificial Sequence: Synthetic oligonucleotide
  Antisense strand to SEQ ID NO: 792622
cacucuagggaacaauauu

SEQ ID NO: 792624 - RNA, 19 nt, Artificial Sequence
  Description of Artificial Sequence: Synthetic oligonucleotide
  Sense strand starting at position 809 of SEQ ID NO: 587444
agcuccaauuuccaggaaa

SEQ ID NO: 792625 - RNA, 19 nt, Artificial Sequence
  Description of Artificial Sequence: Synthetic oligonucleotide
  Antisense strand to SEQ ID NO: 792624
uuuccuggaaauuggagcu

SEQ ID NO: 792626 - RNA, 19 nt, Artificial Sequence
  Description of Artificial Sequence: Synthetic oligonucleotide
  Sense strand starting at position 844 of SEQ ID NO: 587444
uuaagaccuggucaguuaa

SEQ ID NO: 792627 - RNA, 19 nt, Artificial Sequence
  Description of Artificial Sequence: Synthetic oligonucleotide
  Antisense strand to SEQ ID NO: 792626
uuaacugaccaggucuuaa

SEQ ID NO: 792628 - RNA, 19 nt, Artificial Sequence
  Description of Artificial Sequence: Synthetic oligonucleotide
  Sense strand starting at position 1279 of SEQ ID NO: 587444
cuugucugugaacaagagu

SEQ ID NO: 792629 - RNA, 19 nt, Artificial Sequence
  Description of Artificial Sequence: Synthetic oligonucleotide
  Antisense strand to SEQ ID NO: 792628
acucuuguucacagacaag

SEQ ID NO: 792630 - RNA, 19 nt, Artificial Sequence
  Description of Artificial Sequence: Synthetic oligonucleotide
  Sense strand starting at position 1439 of SEQ ID NO: 587444
ggacuaacuuaguuauacu

SEQ ID NO: 792631 - RNA, 19 nt, Artificial Sequence
  Description of Artificial Sequence: Synthetic oligonucleotide
  Antisense strand to SEQ ID NO: 792630
aguauaacuaaguuagucc

SEQ ID NO: 792632 - RNA, 19 nt, Artificial Sequence
  Description of Artificial Sequence: Synthetic oligonucleotide
  Sense strand starting at position 1447 of SEQ ID NO: 587444
uuaguuauacugcaagauu

SEQ ID NO: 792633 - RNA, 19 nt, Artificial Sequence
  Description of Artificial Sequence: Synthetic oligonucleotide
  Antisense strand to SEQ ID NO: 792632
aaucuugcaguauaacuaa

SEQ ID NO: 792634 - RNA, 19 nt, Artificial Sequence
  Description of Artificial Sequence: Synthetic oligonucleotide
  Sense strand starting at position 1450 of SEQ ID NO: 587444
guuauacugcaagauugua

SEQ ID NO: 792635 - RNA, 19 nt, Artificial Sequence
  Description of Artificial Sequence: Synthetic oligonucleotide
  Antisense strand to SEQ ID NO: 792634
uacaaucuugcaguauaac

SEQ ID NO: 792636 - RNA, 19 nt, Artificial Sequence
  Description of Artificial Sequence: Synthetic oligonucleotide
  Sense strand starting at position 1608 of SEQ ID NO: 587444
agugaauccuaagcagaua

SEQ ID NO: 792637 - RNA, 19 nt, Artificial Sequence
  Description of Artificial Sequence: Synthetic oligonucleotide
  Antisense strand to SEQ ID NO: 792636
uaucugcuuaggauucacu

SEQ ID NO: 792638 - RNA, 19 nt, Artificial Sequence
  Description of Artificial Sequence: Synthetic oligonucleotide
  Sense strand starting at position 1619 of SEQ ID NO: 587444
agcagauauugacuccaac

SEQ ID NO: 792639 - RNA, 19 nt, Artificial Sequence
  Description of Artificial Sequence: Synthetic oligonucleotide
  Antisense strand to SEQ ID NO: 792638
guuggagucaauaucugcu

SEQ ID NO: 792640 - RNA, 19 nt, Artificial Sequence
  Description of Artificial Sequence: Synthetic oligonucleotide
  Sense strand starting at position 1675 of SEQ ID NO: 587444
gagaccaaguugucaaaua

SEQ ID NO: 792641 - RNA, 19 nt, Artificial Sequence
  Description of Artificial Sequence: Synthetic oligonucleotide
  Antisense strand to SEQ ID NO: 792640
uauuugacaacuuggucuc

SEQ ID NO: 792642 - RNA, 19 nt, Artificial Sequence
  Description of Artificial Sequence: Synthetic oligonucleotide
  Sense strand starting at position 1787 of SEQ ID NO: 587444
gugcuaucuuaauuugcac

SEQ ID NO: 792643 - RNA, 19 nt, Artificial Sequence
  Description of Artificial Sequence: Synthetic oligonucleotide
  Antisense strand to SEQ ID NO: 792642
gugcaaauuaagauagcac

SEQ ID NO: 792644 - RNA, 19 nt, Artificial Sequence
  Description of Artificial Sequence: Synthetic oligonucleotide
  Sense strand starting at position 1825 of SEQ ID NO: 587444
aucagucacugauucugaa

SEQ ID NO: 792645 - RNA, 19 nt, Artificial Sequence
  Description of Artificial Sequence: Synthetic oligonucleotide
  Antisense strand to SEQ ID NO: 792644
uucagaaucagugacugau

SEQ ID NO: 792646 - RNA, 19 nt, Artificial Sequence
  Description of Artificial Sequence: Synthetic oligonucleotide
  Sense strand starting at position 1914 of SEQ ID NO: 587444
ugucgaggauucuuggaaa

SEQ ID NO: 792647 - RNA, 19 nt, Artificial Sequence
  Description of Artificial Sequence: Synthetic oligonucleotide
  Antisense strand to SEQ ID NO: 792646
uuuccaagaauccucgaca

SEQ ID NO: 792648 - RNA, 19 nt, Artificial Sequence
  Description of Artificial Sequence: Synthetic oligonucleotide
  Sense strand starting at position 1985 of SEQ ID NO: 587444
cuggguuuagucuauuaac

SEQ ID NO: 792649 - RNA, 19 nt, Artificial Sequence
  Description of Artificial Sequence: Synthetic oligonucleotide
  Antisense strand to SEQ ID NO: 792648
guuaauagacuaaacccag

SEQ ID NO: 792650 - RNA, 19 nt, Artificial Sequence
  Description of Artificial Sequence: Synthetic oligonucleotide
  Sense strand starting at position 2027 of SEQ ID NO: 587444
uugacagacuccucugauu

SEQ ID NO: 792651 - RNA, 19 nt, Artificial Sequence
  Description of Artificial Sequence: Synthetic oligonucleotide
  Antisense strand to SEQ ID NO: 792650
aaucagaggagucugucaa

SEQ ID NO: 792652 - RNA, 19 nt, Artificial Sequence
  Description of Artificial Sequence: Synthetic oligonucleotide
  Sense strand starting at position 2046 of SEQ ID NO: 587444
uguccagagcuugauuaca

SEQ ID NO: 792653 - RNA, 19 nt, Artificial Sequence
  Description of Artificial Sequence: Synthetic oligonucleotide
  Antisense strand to SEQ ID NO: 792652
uguaaucaagcucuggaca

SEQ ID NO: 792654 - RNA, 19 nt, Artificial Sequence
  Description of Artificial Sequence: Synthetic oligonucleotide
  Sense strand starting at position 2048 of SEQ ID NO: 587444
uccagagcuugauuacauc

SEQ ID NO: 792655 - RNA, 19 nt, Artificial Sequence
  Description of Artificial Sequence: Synthetic oligonucleotide
  Antisense strand to SEQ ID NO: 792654
gauguaaucaagcucugga

SEQ ID NO: 792656 - RNA, 19 nt, Artificial Sequence
  Description of Artificial Sequence: Synthetic oligonucleotide
  Sense strand starting at position 2095 of SEQ ID NO: 587444
gccuaagaggcuuaagcua

SEQ ID NO: 792657 - RNA, 19 nt, Artificial Sequence
  Description of Artificial Sequence: Synthetic oligonucleotide
  Antisense strand to SEQ ID NO: 792656
uagcuuaagccucuuaggc

SEQ ID NO: 792658 - RNA, 19 nt, Artificial Sequence
  Description of Artificial Sequence: Synthetic oligonucleotide
  Sense strand starting at position 2189 of SEQ ID NO: 587444
acaggaggguuuguuacau

SEQ ID NO: 792659 - RNA, 19 nt, Artificial Sequence
  Description of Artificial Sequence: Synthetic oligonucleotide
  Antisense strand to SEQ ID NO: 792658
auguaacaaacccuccugu

SEQ ID NO: 792660 - RNA, 19 nt, Artificial Sequence
  Description of Artificial Sequence: Synthetic oligonucleotide
  Sense strand starting at position 2509 of SEQ ID NO: 587444
acuucugccuccuugaaag

SEQ ID NO: 792661 - RNA, 19 nt, Artificial Sequence
  Description of Artificial Sequence: Synthetic oligonucleotide
  Antisense strand to SEQ ID NO: 792660
cuuucaaggaggcagaagu

SEQ ID NO: 792662 - RNA, 19 nt, Artificial Sequence
  Description of Artificial Sequence: Synthetic oligonucleotide
  Sense strand starting at position 2519 of SEQ ID NO: 587444
ccuugaaaguuucucauga

SEQ ID NO: 792663 - RNA, 19 nt, Artificial Sequence
  Description of Artificial Sequence: Synthetic oligonucleotide
  Antisense strand to SEQ ID NO: 792662
ucaugagaaacuuucaagg

SEQ ID NO: 792664 - RNA, 19 nt, Artificial Sequence
  Description of Artificial Sequence: Synthetic oligonucleotide
  Sense strand starting at position 2520 of SEQ ID NO: 587444
cuugaaaguuucucaugau

SEQ ID NO: 792665 - RNA, 19 nt, Artificial Sequence
  Description of Artificial Sequence: Synthetic oligonucleotide
  Antisense strand to SEQ ID NO: 792664
aucaugagaaacuuucaag

SEQ ID NO: 792666 - RNA, 19 nt, Artificial Sequence
  Description of Artificial Sequence: Synthetic oligonucleotide
  Sense strand starting at position 2593 of SEQ ID NO: 587444
gugguucaaguuuagagaa

SEQ ID NO: 792667 - RNA, 19 nt, Artificial Sequence
  Description of Artificial Sequence: Synthetic oligonucleotide
  Antisense strand to SEQ ID NO: 792666
uucucuaaacuugaaccac

SEQ ID NO: 792668 - RNA, 19 nt, Artificial Sequence
  Description of Artificial Sequence: Synthetic oligonucleotide
  Sense strand starting at position 2702 of SEQ ID NO: 587444
cucuucuucccguaaagac

SEQ ID NO: 792669 - RNA, 19 nt, Artificial Sequence
  Description of Artificial Sequence: Synthetic oligonucleotide
  Antisense strand to SEQ ID NO: 792668
gucuuuacgggaagaagag

SEQ ID NO: 792670 - RNA, 19 nt, Artificial Sequence
  Description of Artificial Sequence: Synthetic oligonucleotide
  Sense strand starting at position 2795 of SEQ ID NO: 587444
ugggaagcuuuauuagcaa

SEQ ID NO: 792671 - RNA, 19 nt, Artificial Sequence
  Description of Artificial Sequence: Synthetic oligonucleotide
  Antisense strand to SEQ ID NO: 792670
uugcuaauaaagcuuccca

SEQ ID NO: 792672 - RNA, 19 nt, Artificial Sequence
  Description of Artificial Sequence: Synthetic oligonucleotide
  Sense strand starting at position 2832 of SEQ ID NO: 587444
ucucaauggcagcaagaau

SEQ ID NO: 792673 - RNA, 19 nt, Artificial Sequence
  Description of Artificial Sequence: Synthetic oligonucleotide
  Antisense strand to SEQ ID NO: 792672
auucuugcugccauugaga

SEQ ID NO: 792674 - RNA, 19 nt, Artificial Sequence
  Description of Artificial Sequence: Synthetic oligonucleotide
  Sense strand starting at position 2840 of SEQ ID NO: 587444
gcagcaagaauugaaaugu

SEQ ID NO: 792675 - RNA, 19 nt, Artificial Sequence
  Description of Artificial Sequence: Synthetic oligonucleotide
  Antisense strand to SEQ ID NO: 792674
acauuucaauucuugcugc

SEQ ID NO: 792676 - RNA, 19 nt, Artificial Sequence
  Description of Artificial Sequence: Synthetic oligonucleotide
  Sense strand starting at position 2872 of SEQ ID NO: 587444
ccuaguuauuucuugguua

SEQ ID NO: 792677 - RNA, 19 nt, Artificial Sequence
  Description of Artificial Sequence: Synthetic oligonucleotide
  Antisense strand to SEQ ID NO: 792676
uaaccaagaaauaacuagg

SEQ ID NO: 792678 - RNA, 19 nt, Artificial Sequence
  Description of Artificial Sequence: Synthetic oligonucleotide
  Sense strand starting at position 2921 of SEQ ID NO: 587444
ggcuauuguggguacuaaa

SEQ ID NO: 792679 - RNA, 19 nt, Artificial Sequence
  Description of Artificial Sequence: Synthetic oligonucleotide
  Antisense strand to SEQ ID NO: 792678
uuuaguacccacaauagcc

SEQ ID NO: 792680 - RNA, 19 nt, Artificial Sequence
  Description of Artificial Sequence: Synthetic oligonucleotide
  Sense strand starting at position 2993 of SEQ ID NO: 587444
gggcucuaaaucugaaagu

SEQ ID NO: 792681 - RNA, 19 nt, Artificial Sequence
  Description of Artificial Sequence: Synthetic oligonucleotide
  Antisense strand to SEQ ID NO: 792680
acuuucagauuuagagccc

SEQ ID NO: 792682 - RNA, 19 nt, Artificial Sequence
  Description of Artificial Sequence: Synthetic oligonucleotide
  Sense strand starting at position 3111 of SEQ ID NO: 587444
acauguguucgugcguaaa

SEQ ID NO: 792683 - RNA, 19 nt, Artificial Sequence
  Description of Artificial Sequence: Synthetic oligonucleotide
  Antisense strand to SEQ ID NO: 792682
uuuacgcacgaacacaugu

SEQ ID NO: 792684 - RNA, 19 nt, Artificial Sequence
  Description of Artificial Sequence: Synthetic oligonucleotide
  Sense strand starting at position 3115 of SEQ ID NO: 587444
guguucgugcguaaacaaa

SEQ ID NO: 792685 - RNA, 19 nt, Artificial Sequence
  Description of Artificial Sequence: Synthetic oligonucleotide
  Antisense strand to SEQ ID NO: 792684
uuuguuuacgcacgaacac

SEQ ID NO: 792686 - RNA, 19 nt, Artificial Sequence
  Description of Artificial Sequence: Synthetic oligonucleotide
  Sense strand starting at position 3136 of SEQ ID NO: 587444
cgagacuuaccaugcaaca

SEQ ID NO: 792687 - RNA, 19 nt, Artificial Sequence
  Description of Artificial Sequence: Synthetic oligonucleotide
  Antisense strand to SEQ ID NO: 792686
uguugcaugguaagucucg

SEQ ID NO: 792688 - RNA, 19 nt, Artificial Sequence
  Description of Artificial Sequence: Synthetic oligonucleotide
  Sense strand starting at position 3170 of SEQ ID NO: 587444
aguggcucugcucaaauaa

SEQ ID NO: 792689 - RNA, 19 nt, Artificial Sequence
  Description of Artificial Sequence: Synthetic oligonucleotide
  Antisense strand to SEQ ID NO: 792688
uuauuugagcagagccacu

SEQ ID NO: 792690 - RNA, 19 nt, Artificial Sequence
  Description of Artificial Sequence: Synthetic oligonucleotide
  Sense strand starting at position 3361 of SEQ ID NO: 587444
aggacaggcuuauacauuu

SEQ ID NO: 792691 - RNA, 19 nt, Artificial Sequence
  Description of Artificial Sequence: Synthetic oligonucleotide
  Antisense strand to SEQ ID NO: 792690
aaauguauaagccuguccu

SEQ ID NO: 792692 - RNA, 19 nt, Artificial Sequence
  Description of Artificial Sequence: Synthetic oligonucleotide
  Sense strand starting at position 3403 of SEQ ID NO: 587444
gucuguaugccauacugaa

SEQ ID NO: 792693 - RNA, 19 nt, Artificial Sequence
  Description of Artificial Sequence: Synthetic oligonucleotide
  Antisense strand to SEQ ID NO: 792692
uucaguauggcauacagac

SEQ ID NO: 792694 - RNA, 19 nt, Artificial Sequence
  Description of Artificial Sequence: Synthetic oligonucleotide
  Sense strand starting at position 3436 of SEQ ID NO: 587444
gguauuuagcaaggcuuau

SEQ ID NO: 792695 - RNA, 19 nt, Artificial Sequence
  Description of Artificial Sequence: Synthetic oligonucleotide
  Antisense strand to SEQ ID NO: 792694
auaagccuugcuaaauacc

SEQ ID NO: 792696 - RNA, 19 nt, Artificial Sequence
  Description of Artificial Sequence: Synthetic oligonucleotide
  Sense strand starting at position 3678 of SEQ ID NO: 587444
guauaaaccuagcuagaag

SEQ ID NO: 792697 - RNA, 19 nt, Artificial Sequence
  Description of Artificial Sequence: Synthetic oligonucleotide
  Antisense strand to SEQ ID NO: 792696
cuucuagcuagguuuauac

SEQ ID NO: 792698 - RNA, 19 nt, Artificial Sequence
  Description of Artificial Sequence: Synthetic oligonucleotide
  Sense strand starting at position 31 of SEQ ID NO: 587445
caacucuaggguugaaauc

SEQ ID NO: 792699 - RNA, 19 nt, Artificial Sequence
  Description of Artificial Sequence: Synthetic oligonucleotide
  Antisense strand to SEQ ID NO: 792698
gauuucaacccuagaguug

SEQ ID NO: 792700 - RNA, 19 nt, Artificial Sequence
  Description of Artificial Sequence: Synthetic oligonucleotide
  Sense strand starting at position 193 of SEQ ID NO: 587445
ucgauucuuccucagauau

SEQ ID NO: 792701 - RNA, 19 nt, Artificial Sequence
  Description of Artificial Sequence: Synthetic oligonucleotide
  Antisense strand to SEQ ID NO: 792700
auaucugaggaagaaucga

SEQ ID NO: 792702 - RNA, 19 nt, Artificial Sequence
  Description of Artificial Sequence: Synthetic oligonucleotide
  Sense strand starting at position 611 of SEQ ID NO: 587445
ggcacaagucaacauguuu

SEQ ID NO: 792703 - RNA, 19 nt, Artificial Sequence
  Description of Artificial Sequence: Synthetic oligonucleotide
  Antisense strand to SEQ ID NO: 792702
aaacauguugacuugugcc

SEQ ID NO: 792704 - RNA, 19 nt, Artificial Sequence
  Description of Artificial Sequence: Synthetic oligonucleotide
  Sense strand starting at position 649 of SEQ ID NO: 587445
guuacacauccugauguuu

SEQ ID NO: 792705 - RNA, 19 nt, Artificial Sequence
  Description of Artificial Sequence: Synthetic oligonucleotide
  Antisense strand to SEQ ID NO: 792704
aaacaucaggauguguaac

SEQ ID NO: 792706 - RNA, 19 nt, Artificial Sequence
  Description of Artificial Sequence: Synthetic oligonucleotide
  Sense strand starting at position 723 of SEQ ID NO: 587445
cugaguaaauacguagaga

SEQ ID NO: 792707 - RNA, 19 nt, Artificial Sequence
  Description of Artificial Sequence: Synthetic oligonucleotide
  Antisense strand to SEQ ID NO: 792706
ucucuacguauuuacucag

SEQ ID NO: 792708 - RNA, 19 nt, Artificial Sequence
  Description of Artificial Sequence: Synthetic oligonucleotide
  Sense strand starting at position 772 of SEQ ID NO: 587445
gucuccuuccuagacuaua

SEQ ID NO: 792709 - RNA, 19 nt, Artificial Sequence
  Description of Artificial Sequence: Synthetic oligonucleotide
  Antisense strand to SEQ ID NO: 792708
uauagucuaggaaggagac

SEQ ID NO: 792710 - RNA, 19 nt, Artificial Sequence
  Description of Artificial Sequence: Synthetic oligonucleotide
  Sense strand starting at position 864 of SEQ ID NO: 587445
cuacaagaccucuguuaag

SEQ ID NO: 792711 - RNA, 19 nt, Artificial Sequence
  Description of Artificial Sequence: Synthetic oligonucleotide
  Antisense strand to SEQ ID NO: 792710
cuuaacagaggucuuguag

SEQ ID NO: 792712 - RNA, 19 nt, Artificial Sequence
  Description of Artificial Sequence: Synthetic oligonucleotide
  Sense strand starting at position 912 of SEQ ID NO: 587445
acgaauuaguguuccauuu

SEQ ID NO: 792713 - RNA, 19 nt, Artificial Sequence
  Description of Artificial Sequence: Synthetic oligonucleotide
  Antisense strand to SEQ ID NO: 792712
aaauggaacacuaauucgu

SEQ ID NO: 792714 - RNA, 19 nt, Artificial Sequence
  Description of Artificial Sequence: Synthetic oligonucleotide
  Sense strand starting at position 1019 of SEQ ID NO: 587445
cucucuaaagcuggauaau

SEQ ID NO: 792715 - RNA, 19 nt, Artificial Sequence
  Description of Artificial Sequence: Synthetic oligonucleotide
  Antisense strand to SEQ ID NO: 792714
auuauccagcuuuagagag

SEQ ID NO: 792716 - RNA, 19 nt, Artificial Sequence
  Description of Artificial Sequence: Synthetic oligonucleotide
  Sense strand starting at position 1020 of SEQ ID NO: 587445
ucucuaaagcuggauaauu

SEQ ID NO: 792717 - RNA, 19 nt, Artificial Sequence
  Description of Artificial Sequence: Synthetic oligonucleotide
  Antisense strand to SEQ ID NO: 792716
aauuauccagcuuuagaga

SEQ ID NO: 792718 - RNA, 19 nt, Artificial Sequence
  Description of Artificial Sequence: Synthetic oligonucleotide
  Sense strand starting at position 1028 of SEQ ID NO: 587445
gcuggauaauuugguauuu

SEQ ID NO: 792719 - RNA, 19 nt, Artificial Sequence
  Description of Artificial Sequence: Synthetic oligonucleotide
  Antisense strand to SEQ ID NO: 792718
aaauaccaaauuauccagc

SEQ ID NO: 792720 - RNA, 19 nt, Artificial Sequence
  Description of Artificial Sequence: Synthetic oligonucleotide
  Sense strand starting at position 1067 of SEQ ID NO: 587445
caaagacugcaaugcgaaa

SEQ ID NO: 792721 - RNA, 19 nt, Artificial Sequence
  Description of Artificial Sequence: Synthetic oligonucleotide
  Antisense strand to SEQ ID NO: 792720
uuucgcauugcagucuuug

SEQ ID NO: 792722 - RNA, 19 nt, Artificial Sequence
  Description of Artificial Sequence: Synthetic oligonucleotide
  Sense strand starting at position 1094 of SEQ ID NO: 587445
ggcuuugagugucuaauuu

SEQ ID NO: 792723 - RNA, 19 nt, Artificial Sequence
  Description of Artificial Sequence: Synthetic oligonucleotide
  Antisense strand to SEQ ID NO: 792722
aaauuagacacucaaagcc

SEQ ID NO: 792724 - RNA, 19 nt, Artificial Sequence
  Description of Artificial Sequence: Synthetic oligonucleotide
  Sense strand starting at position 1138 of SEQ ID NO: 587445
accuucuagccugaaaguu

SEQ ID NO: 792725 - RNA, 19 nt, Artificial Sequence
  Description of Artificial Sequence: Synthetic oligonucleotide
  Antisense strand to SEQ ID NO: 792724
aacuuucaggcuagaaggu

SEQ ID NO: 792726 - RNA, 19 nt, Artificial Sequence
  Description of Artificial Sequence: Synthetic oligonucleotide
  Sense strand starting at position 1283 of SEQ ID NO: 587445
agagaauuguuccuuuaaa

SEQ ID NO: 792727 - RNA, 19 nt, Artificial Sequence
  Description of Artificial Sequence: Synthetic oligonucleotide
  Antisense strand to SEQ ID NO: 792726
uuuaaaggaacaauucucu

SEQ ID NO: 792728 - RNA, 19 nt, Artificial Sequence
  Description of Artificial Sequence: Synthetic oligonucleotide
  Sense strand starting at position 2221 of SEQ ID NO: 587445
gcuccuaacgguuauggaa

SEQ ID NO: 792729 - RNA, 19 nt, Artificial Sequence
  Description of Artificial Sequence: Synthetic oligonucleotide
  Antisense strand to SEQ ID NO: 792728
uuccauaaccguuaggagc

SEQ ID NO: 792730 - RNA, 19 nt, Artificial Sequence
  Description of Artificial Sequence: Synthetic oligonucleotide
  Sense strand starting at position 2476 of SEQ ID NO: 587445
acacgcaaugguuaugaga

SEQ ID NO: 792731 - RNA, 19 nt, Artificial Sequence
  Description of Artificial Sequence: Synthetic oligonucleotide
  Antisense strand to SEQ ID NO: 792730
ucucauaaccauugcgugu

SEQ ID NO: 792732 - RNA, 19 nt, Artificial Sequence
  Description of Artificial Sequence: Synthetic oligonucleotide
  Sense strand starting at position 2507 of SEQ ID NO: 587445
aaggguguuccugagauug

SEQ ID NO: 792733 - RNA, 19 nt, Artificial Sequence
  Description of Artificial Sequence: Synthetic oligonucleotide
  Antisense strand to SEQ ID NO: 792732
caaucucaggaacacccuu

SEQ ID NO: 792734 - RNA, 19 nt, Artificial Sequence
  Description of Artificial Sequence: Synthetic oligonucleotide
  Sense strand starting at position 2579 of SEQ ID NO: 587445
gcaauaaacugcuuugaag

SEQ ID NO: 792735 - RNA, 19 nt, Artificial Sequence
  Description of Artificial Sequence: Synthetic oligonucleotide
  Antisense strand to SEQ ID NO: 792734
cuucaaagcaguuuauugc

SEQ ID NO: 792736 - RNA, 19 nt, Artificial Sequence
  Description of Artificial Sequence: Synthetic oligonucleotide
  Sense strand starting at position 2751 of SEQ ID NO: 587445
ccuagaaacgucuacucca

SEQ ID NO: 792737 - RNA, 19 nt, Artificial Sequence
  Description of Artificial Sequence: Synthetic oligonucleotide
  Antisense strand to SEQ ID NO: 792736
uggaguagacguuucuagg

SEQ ID NO: 792738 - RNA, 19 nt, Artificial Sequence
  Description of Artificial Sequence: Synthetic oligonucleotide
  Sense strand starting at position 2992 of SEQ ID NO: 587445
uugagugacuuggccaaga

SEQ ID NO: 792739 - RNA, 19 nt, Artificial Sequence
  Description of Artificial Sequence: Synthetic oligonucleotide
  Antisense strand to SEQ ID NO: 792738
ucuuggccaagucacucaa

SEQ ID NO: 792740 - RNA, 19 nt, Artificial Sequence
  Description of Artificial Sequence: Synthetic oligonucleotide
  Sense strand starting at position 3085 of SEQ ID NO: 587445
gacaaucuguugcuauaag

SEQ ID NO: 792741 - RNA, 19 nt, Artificial Sequence
  Description of Artificial Sequence: Synthetic oligonucleotide
  Antisense strand to SEQ ID NO: 792740
cuuauagcaacagauuguc

SEQ ID NO: 792742 - RNA, 19 nt, Artificial Sequence
  Description of Artificial Sequence: Synthetic oligonucleotide
  Sense strand starting at position 3099 of SEQ ID NO: 587445
auaagaaauuacucguuug

SEQ ID NO: 792743 - RNA, 19 nt, Artificial Sequence
  Description of Artificial Sequence: Synthetic oligonucleotide
  Antisense strand to SEQ ID NO: 792742
caaacgaguaauuucuuau

SEQ ID NO: 792744 - RNA, 19 nt, Artificial Sequence
  Description of Artificial Sequence: Synthetic oligonucleotide
  Sense strand starting at position 3102 of SEQ ID NO: 587445
agaaauuacucguuuggau

SEQ ID NO: 792745 - RNA, 19 nt, Artificial Sequence
  Description of Artificial Sequence: Synthetic oligonucleotide
  Antisense strand to SEQ ID NO: 792744
auccaaacgaguaauuucu

SEQ ID NO: 792746 - RNA, 19 nt, Artificial Sequence
  Description of Artificial Sequence: Synthetic oligonucleotide
  Sense strand starting at position 3104 of SEQ ID NO: 587445
aaauuacucguuuggauaa

SEQ ID NO: 792747 - RNA, 19 nt, Artificial Sequence
  Description of Artificial Sequence: Synthetic oligonucleotide
  Antisense strand to SEQ ID NO: 792746
uuauccaaacgaguaauuu

SEQ ID NO: 792748 - RNA, 19 nt, Artificial Sequence
  Description of Artificial Sequence: Synthetic oligonucleotide
  Sense strand starting at position 3200 of SEQ ID NO: 587445
aggacagucuccuucgaaa

SEQ ID NO: 792749 - RNA, 19 nt, Artificial Sequence
  Description of Artificial Sequence: Synthetic oligonucleotide
  Antisense strand to SEQ ID NO: 792748
uuucgaaggagacuguccu

SEQ ID NO: 792750 - RNA, 19 nt, Artificial Sequence
  Description of Artificial Sequence: Synthetic oligonucleotide
  Sense strand starting at position 3268 of SEQ ID NO: 587445
guuagucuuccuuaaggag

SEQ ID NO: 792751 - RNA, 19 nt, Artificial Sequence
  Description of Artificial Sequence: Synthetic oligonucleotide
  Antisense strand to SEQ ID NO: 792750
cuccuuaaggaagacuaac

SEQ ID NO: 792752 - RNA, 19 nt, Artificial Sequence
  Description of Artificial Sequence: Synthetic oligonucleotide
  Sense strand starting at position 3364 of SEQ ID NO: 587445
gguggauugccugaaauua

SEQ ID NO: 792753 - RNA, 19 nt, Artificial Sequence
  Description of Artificial Sequence: Synthetic oligonucleotide
  Antisense strand to SEQ ID NO: 792752
uaauuucaggcaauccacc

SEQ ID NO: 792754 - RNA, 19 nt, Artificial Sequence
  Description of Artificial Sequence: Synthetic oligonucleotide
  Sense strand starting at position 3543 of SEQ ID NO: 587445
ccgagaucacgccaaugga

SEQ ID NO: 792755 - RNA, 19 nt, Artificial Sequence
  Description of Artificial Sequence: Synthetic oligonucleotide
  Antisense strand to SEQ ID NO: 792754
uccauuggcgugaucucgg

SEQ ID NO: 792756 - RNA, 19 nt, Artificial Sequence
  Description of Artificial Sequence: Synthetic oligonucleotide
  Sense strand starting at position 3616 of SEQ ID NO: 587445
ccagacuaguaaguauuau

SEQ ID NO: 792757 - RNA, 19 nt, Artificial Sequence
  Description of Artificial Sequence: Synthetic oligonucleotide
  Antisense strand to SEQ ID NO: 792756
auaauacuuacuagucugg

SEQ ID NO: 792758 - RNA, 19 nt, Artificial Sequence
  Description of Artificial Sequence: Synthetic oligonucleotide
  Sense strand starting at position 3666 of SEQ ID NO: 587445
guaauaauugucugauaag

SEQ ID NO: 792759 - RNA, 19 nt, Artificial Sequence
  Description of Artificial Sequence: Synthetic oligonucleotide
  Antisense strand to SEQ ID NO: 792758
cuuaucagacaauuauuac

SEQ ID NO: 792760 - RNA, 19 nt, Artificial Sequence
  Description of Artificial Sequence: Synthetic oligonucleotide
  Sense strand starting at position 3707 of SEQ ID NO: 587445
aaaguauggaaacguguaa

SEQ ID NO: 792761 - RNA, 19 nt, Artificial Sequence
  Description of Artificial Sequence: Synthetic oligonucleotide
  Antisense strand to SEQ ID NO: 792760
uuacacguuuccauacuuu

SEQ ID NO: 792762 - RNA, 19 nt, Artificial Sequence
  Description of Artificial Sequence: Synthetic oligonucleotide
  Sense strand starting at position 3721 of SEQ ID NO: 587445
uguaacuuggcauauuaca

SEQ ID NO: 792763 - RNA, 19 nt, Artificial Sequence
  Description of Artificial Sequence: Synthetic oligonucleotide
  Antisense strand to SEQ ID NO: 792762
uguaauaugccaaguuaca

SEQ ID NO: 792764 - RNA, 19 nt, Artificial Sequence
  Description of Artificial Sequence: Synthetic oligonucleotide
  Sense strand starting at position 3752 of SEQ ID NO: 587445
agugacaaauugcccuaaa

SEQ ID NO: 792765 - RNA, 19 nt, Artificial Sequence
  Description of Artificial Sequence: Synthetic oligonucleotide
  Antisense strand to SEQ ID NO: 792764
uuuagggcaauuugucacu

SEQ ID NO: 792766 - RNA, 19 nt, Artificial Sequence
  Description of Artificial Sequence: Synthetic oligonucleotide
  Sense strand starting at position 3774 of SEQ ID NO: 587445
gguggcuuaaagcaagaua

SEQ ID NO: 792767 - RNA, 19 nt, Artificial Sequence
  Description of Artificial Sequence: Synthetic oligonucleotide
  Antisense strand to SEQ ID NO: 792766
uaucuugcuuuaagccacc

SEQ ID NO: 792768 - RNA, 19 nt, Artificial Sequence
  Description of Artificial Sequence: Synthetic oligonucleotide
  Sense strand starting at position 3777 of SEQ ID NO: 587445
ggcuuaaagcaagauaauu

SEQ ID NO: 792769 - RNA, 19 nt, Artificial Sequence
  Description of Artificial Sequence: Synthetic oligonucleotide
  Antisense strand to SEQ ID NO: 792768
aauuaucuugcuuuaagcc

SEQ ID NO: 792770 - RNA, 19 nt, Artificial Sequence
  Description of Artificial Sequence: Synthetic oligonucleotide
  Sense strand starting at position 3802 of SEQ ID NO: 587445
cuuccaguucuagauggua

SEQ ID NO: 792771 - RNA, 19 nt, Artificial Sequence
  Description of Artificial Sequence: Synthetic oligonucleotide
  Antisense strand to SEQ ID NO: 792770
uaccaucuagaacuggaag

SEQ ID NO: 792772 - RNA, 19 nt, Artificial Sequence
  Description of Artificial Sequence: Synthetic oligonucleotide
  Sense strand starting at position 3804 of SEQ ID NO: 587445
uccaguucuagaugguaga

SEQ ID NO: 792773 - RNA, 19 nt, Artificial Sequence
  Description of Artificial Sequence: Synthetic oligonucleotide
  Antisense strand to SEQ ID NO: 792772
ucuaccaucuagaacugga

SEQ ID NO: 792774 - RNA, 19 nt, Artificial Sequence
  Description of Artificial Sequence: Synthetic oligonucleotide
  Sense strand starting at position 3805 of SEQ ID NO: 587445
ccaguucuagaugguagaa

SEQ ID NO: 792775 - RNA, 19 nt, Artificial Sequence
  Description of Artificial Sequence: Synthetic oligonucleotide
  Antisense strand to SEQ ID NO: 792774
uucuaccaucuagaacugg

SEQ ID NO: 792776 - RNA, 19 nt, Artificial Sequence
  Description of Artificial Sequence: Synthetic oligonucleotide
  Sense strand starting at position 3815 of SEQ ID NO: 587445
augguagaagccugaaaug

SEQ ID NO: 792777 - RNA, 19 nt, Artificial Sequence
  Description of Artificial Sequence: Synthetic oligonucleotide
  Antisense strand to SEQ ID NO: 792776
cauuucaggcuucuaccau

SEQ ID NO: 792778 - RNA, 19 nt, Artificial Sequence
  Description of Artificial Sequence: Synthetic oligonucleotide
  Sense strand starting at position 49 of SEQ ID NO: 587446
uuguuuagauucuuacaag

SEQ ID NO: 792779 - RNA, 19 nt, Artificial Sequence
  Description of Artificial Sequence: Synthetic oligonucleotide
  Antisense strand to SEQ ID NO: 792778
cuuguaagaaucuaaacaa

SEQ ID NO: 792780 - RNA, 19 nt, Artificial Sequence
  Description of Artificial Sequence: Synthetic oligonucleotide
  Sense strand starting at position 71 of SEQ ID NO: 587446
acuauuaaaggcggugaaa

SEQ ID NO: 792781 - RNA, 19 nt, Artificial Sequence
  Description of Artificial Sequence: Synthetic oligonucleotide
  Antisense strand to SEQ ID NO: 792780
uuucaccgccuuuaauagu

SEQ ID NO: 792782 - RNA, 19 nt, Artificial Sequence
  Description of Artificial Sequence: Synthetic oligonucleotide
  Sense strand starting at position 73 of SEQ ID NO: 587446
uauuaaaggcggugaaaug

SEQ ID NO: 792783 - RNA, 19 nt, Artificial Sequence
  Description of Artificial Sequence: Synthetic oligonucleotide
  Antisense strand to SEQ ID NO: 792782
cauuucaccgccuuuaaua

SEQ ID NO: 792784 - RNA, 19 nt, Artificial Sequence
  Description of Artificial Sequence: Synthetic oligonucleotide
  Sense strand starting at position 988 of SEQ ID NO: 587446
uagauaaggcucuaagugu

SEQ ID NO: 792785 - RNA, 19 nt, Artificial Sequence
  Description of Artificial Sequence: Synthetic oligonucleotide
  Antisense strand to SEQ ID NO: 792784
acacuuagagccuuaucua

SEQ ID NO: 792786 - RNA, 19 nt, Artificial Sequence
  Description of Artificial Sequence: Synthetic oligonucleotide
  Sense strand starting at position 1134 of SEQ ID NO: 587446
uuacaaaguccucaauugu

SEQ ID NO: 792787 - RNA, 19 nt, Artificial Sequence
  Description of Artificial Sequence: Synthetic oligonucleotide
  Antisense strand to SEQ ID NO: 792786
acaauugaggacuuuguaa

SEQ ID NO: 792788 - RNA, 19 nt, Artificial Sequence
  Description of Artificial Sequence: Synthetic oligonucleotide
  Sense strand starting at position 1281 of SEQ ID NO: 587446
aucugucacuaacuugaga

SEQ ID NO: 792789 - RNA, 19 nt, Artificial Sequence
  Description of Artificial Sequence: Synthetic oligonucleotide
  Antisense strand to SEQ ID NO: 792788
ucucaaguuagugacagau

SEQ ID NO: 792790 - RNA, 19 nt, Artificial Sequence
  Description of Artificial Sequence: Synthetic oligonucleotide
  Sense strand starting at position 1314 of SEQ ID NO: 587446
uuccaucuggccuauugaa

SEQ ID NO: 792791 - RNA, 19 nt, Artificial Sequence
  Description of Artificial Sequence: Synthetic oligonucleotide
  Antisense strand to SEQ ID NO: 792790
uucaauaggccagauggaa

SEQ ID NO: 792792 - RNA, 19 nt, Artificial Sequence
  Description of Artificial Sequence: Synthetic oligonucleotide
  Sense strand starting at position 1336 of SEQ ID NO: 587446
ucagacuggcaaugaguua

SEQ ID NO: 792793 - RNA, 19 nt, Artificial Sequence
  Description of Artificial Sequence: Synthetic oligonucleotide
  Antisense strand to SEQ ID NO: 792792
uaacucauugccagucuga

SEQ ID NO: 792794 - RNA, 19 nt, Artificial Sequence
  Description of Artificial Sequence: Synthetic oligonucleotide
  Sense strand starting at position 1341 of SEQ ID NO: 587446
cuggcaaugaguuaccaga

SEQ ID NO: 792795 - RNA, 19 nt, Artificial Sequence
  Description of Artificial Sequence: Synthetic oligonucleotide
  Antisense strand to SEQ ID NO: 792794
ucugguaacucauugccag

SEQ ID NO: 792796 - RNA, 19 nt, Artificial Sequence
  Description of Artificial Sequence: Synthetic oligonucleotide
  Sense strand starting at position 1343 of SEQ ID NO: 587446
ggcaaugaguuaccagagu

SEQ ID NO: 792797 - RNA, 19 nt, Artificial Sequence
  Description of Artificial Sequence: Synthetic oligonucleotide
  Antisense strand to SEQ ID NO: 792796
acucugguaacucauugcc

SEQ ID NO: 792798 - RNA, 19 nt, Artificial Sequence
  Description of Artificial Sequence: Synthetic oligonucleotide
  Sense strand starting at position 1436 of SEQ ID NO: 587446
guaauuggaggcuaacauu

SEQ ID NO: 792799 - RNA, 19 nt, Artificial Sequence
  Description of Artificial Sequence: Synthetic oligonucleotide
  Antisense strand to SEQ ID NO: 792798
aauguuagccuccaauuac

SEQ ID NO: 792800 - RNA, 19 nt, Artificial Sequence
  Description of Artificial Sequence: Synthetic oligonucleotide
  Sense strand starting at position 1480 of SEQ ID NO: 587446
aguaccacuccuggaauau

SEQ ID NO: 792801 - RNA, 19 nt, Artificial Sequence
  Description of Artificial Sequence: Synthetic oligonucleotide
  Antisense strand to SEQ ID NO: 792800
auauuccaggagugguacu

SEQ ID NO: 792802 - RNA, 19 nt, Artificial Sequence
  Description of Artificial Sequence: Synthetic oligonucleotide
  Sense strand starting at position 1481 of SEQ ID NO: 587446
guaccacuccuggaauauu

SEQ ID NO: 792803 - RNA, 19 nt, Artificial Sequence
  Description of Artificial Sequence: Synthetic oligonucleotide
  Antisense strand to SEQ ID NO: 792802
aauauuccaggagugguac

SEQ ID NO: 792804 - RNA, 19 nt, Artificial Sequence
  Description of Artificial Sequence: Synthetic oligonucleotide
  Sense strand starting at position 2023 of SEQ ID NO: 587446
ccuauaaugugagaauuua

SEQ ID NO: 792805 - RNA, 19 nt, Artificial Sequence
  Description of Artificial Sequence: Synthetic oligonucleotide
  Antisense strand to SEQ ID NO: 792804
uaaauucucacauuauagg

SEQ ID NO: 792806 - RNA, 19 nt, Artificial Sequence
  Description of Artificial Sequence: Synthetic oligonucleotide
  Sense strand starting at position 2345 of SEQ ID NO: 587446
ugaagagaccucuguugga

SEQ ID NO: 792807 - RNA, 19 nt, Artificial Sequence
  Description of Artificial Sequence: Synthetic oligonucleotide
  Antisense strand to SEQ ID NO: 792806
uccaacagaggucucuuca

SEQ ID NO: 792808 - RNA, 19 nt, Artificial Sequence
  Description of Artificial Sequence: Synthetic oligonucleotide
  Sense strand starting at position 2926 of SEQ ID NO: 587446
cauuaagaacucugguaga

SEQ ID NO: 792809 - RNA, 19 nt, Artificial Sequence
  Description of Artificial Sequence: Synthetic oligonucleotide
  Antisense strand to SEQ ID NO: 792808
ucuaccagaguucuuaaug

SEQ ID NO: 792810 - RNA, 19 nt, Artificial Sequence
  Description of Artificial Sequence: Synthetic oligonucleotide
  Sense strand starting at position 3015 of SEQ ID NO: 587446
cugguagaauauccuuacu

SEQ ID NO: 792811 - RNA, 19 nt, Artificial Sequence
  Description of Artificial Sequence: Synthetic oligonucleotide
  Antisense strand to SEQ ID NO: 792810
aguaaggauauucuaccag

SEQ ID NO: 792812 - RNA, 19 nt, Artificial Sequence
  Description of Artificial Sequence: Synthetic oligonucleotide
  Sense strand starting at position 3017 of SEQ ID NO: 587446
gguagaauauccuuacucu

SEQ ID NO: 792813 - RNA, 19 nt, Artificial Sequence
  Description of Artificial Sequence: Synthetic oligonucleotide
  Antisense strand to SEQ ID NO: 792812
agaguaaggauauucuacc

SEQ ID NO: 792814 - RNA, 19 nt, Artificial Sequence
  Description of Artificial Sequence: Synthetic oligonucleotide
  Sense strand starting at position 3300 of SEQ ID NO: 587446
agaggacuauuagcuaguu

SEQ ID NO: 792815 - RNA, 19 nt, Artificial Sequence
  Description of Artificial Sequence: Synthetic oligonucleotide
  Antisense strand to SEQ ID NO: 792814
aacuagcuaauaguccucu

SEQ ID NO: 792816 - RNA, 19 nt, Artificial Sequence
  Description of Artificial Sequence: Synthetic oligonucleotide
  Sense strand starting at position 3301 of SEQ ID NO: 587446
gaggacuauuagcuaguua

SEQ ID NO: 792817 - RNA, 19 nt, Artificial Sequence
  Description of Artificial Sequence: Synthetic oligonucleotide
  Antisense strand to SEQ ID NO: 792816
uaacuagcuaauaguccuc

SEQ ID NO: 792818 - RNA, 19 nt, Artificial Sequence
  Description of Artificial Sequence: Synthetic oligonucleotide
  Sense strand starting at position 3305 of SEQ ID NO: 587446
acuauuagcuaguuaggaa

SEQ ID NO: 792819 - RNA, 19 nt, Artificial Sequence
  Description of Artificial Sequence: Synthetic oligonucleotide
  Antisense strand to SEQ ID NO: 792818
uuccuaacuagcuaauagu

SEQ ID NO: 792820 - RNA, 19 nt, Artificial Sequence
  Description of Artificial Sequence: Synthetic oligonucleotide
  Sense strand starting at position 3360 of SEQ ID NO: 587446
aaggcagugauagggauau

SEQ ID NO: 792821 - RNA, 19 nt, Artificial Sequence
  Description of Artificial Sequence: Synthetic oligonucleotide
  Antisense strand to SEQ ID NO: 792820
auaucccuaucacugccuu

SEQ ID NO: 792822 - RNA, 19 nt, Artificial Sequence
  Description of Artificial Sequence: Synthetic oligonucleotide
  Sense strand starting at position 3362 of SEQ ID NO: 587446
ggcagugauagggauaugu

SEQ ID NO: 792823 - RNA, 19 nt, Artificial Sequence
  Description of Artificial Sequence: Synthetic oligonucleotide
  Antisense strand to SEQ ID NO: 792822
acauaucccuaucacugcc

SEQ ID NO: 792824 - RNA, 19 nt, Artificial Sequence
  Description of Artificial Sequence: Synthetic oligonucleotide
  Sense strand starting at position 3366 of SEQ ID NO: 587446
gugauagggauauguacaa

SEQ ID NO: 792825 - RNA, 19 nt, Artificial Sequence
  Description of Artificial Sequence: Synthetic oligonucleotide
  Antisense strand to SEQ ID NO: 792824
uuguacauaucccuaucac

SEQ ID NO: 792826 - RNA, 19 nt, Artificial Sequence
  Description of Artificial Sequence: Synthetic oligonucleotide
  Sense strand starting at position 3391 of SEQ ID NO: 587446
augguaguacuugaauauc

SEQ ID NO: 792827 - RNA, 19 nt, Artificial Sequence
  Description of Artificial Sequence: Synthetic oligonucleotide
  Antisense strand to SEQ ID NO: 792826
gauauucaaguacuaccau

SEQ ID NO: 792828 - RNA, 19 nt, Artificial Sequence
  Description of Artificial Sequence: Synthetic oligonucleotide
  Sense strand starting at position 3394 of SEQ ID NO: 587446
guaguacuugaauaucuuu

SEQ ID NO: 792829 - RNA, 19 nt, Artificial Sequence
  Description of Artificial Sequence: Synthetic oligonucleotide
  Antisense strand to SEQ ID NO: 792828
aaagauauucaaguacuac

SEQ ID NO: 792830 - RNA, 19 nt, Artificial Sequence
  Description of Artificial Sequence: Synthetic oligonucleotide
  Sense strand starting at position 3449 of SEQ ID NO: 587446
aggaguuaauaucuaaguu

SEQ ID NO: 792831 - RNA, 19 nt, Artificial Sequence
  Description of Artificial Sequence: Synthetic oligonucleotide
  Antisense strand to SEQ ID NO: 792830
aacuuagauauuaacuccu

SEQ ID NO: 792832 - RNA, 19 nt, Artificial Sequence
  Description of Artificial Sequence: Synthetic oligonucleotide
  Sense strand starting at position 3469 of SEQ ID NO: 587446
agcuuugaaggguagguua

SEQ ID NO: 792833 - RNA, 19 nt, Artificial Sequence
  Description of Artificial Sequence: Synthetic oligonucleotide
  Antisense strand to SEQ ID NO: 792832
uaaccuacccuucaaagcu

SEQ ID NO: 792834 - RNA, 19 nt, Artificial Sequence
  Description of Artificial Sequence: Synthetic oligonucleotide
  Sense strand starting at position 3481 of SEQ ID NO: 587446
uagguuaagaguugacuag

SEQ ID NO: 792835 - RNA, 19 nt, Artificial Sequence
  Description of Artificial Sequence: Synthetic oligonucleotide
  Antisense strand to SEQ ID NO: 792834
cuagucaacucuuaaccua

SEQ ID NO: 792836 - RNA, 19 nt, Artificial Sequence
  Description of Artificial Sequence: Synthetic oligonucleotide
  Sense strand starting at position 3589 of SEQ ID NO: 587446
augguaucaccauguuuag

SEQ ID NO: 792837 - RNA, 19 nt, Artificial Sequence
  Description of Artificial Sequence: Synthetic oligonucleotide
  Antisense strand to SEQ ID NO: 792836
cuaaacauggugauaccau

SEQ ID NO: 792838 - RNA, 19 nt, Artificial Sequence
  Description of Artificial Sequence: Synthetic oligonucleotide
  Sense strand starting at position 3605 of SEQ ID NO: 587446
uaguuagugcauuagaaag

SEQ ID NO: 792839 - RNA, 19 nt, Artificial Sequence
  Description of Artificial Sequence: Synthetic oligonucleotide
  Antisense strand to SEQ ID NO: 792838
cuuucuaaugcacuaacua

SEQ ID NO: 792840 - RNA, 19 nt, Artificial Sequence
  Description of Artificial Sequence: Synthetic oligonucleotide
  Sense strand starting at position 3707 of SEQ ID NO: 587446
ccuaguugggcucauugau

SEQ ID NO: 792841 - RNA, 19 nt, Artificial Sequence
  Description of Artificial Sequence: Synthetic oligonucleotide
  Antisense strand to SEQ ID NO: 792840
aucaaugagcccaacuagg

SEQ ID NO: 792842 - RNA, 19 nt, Artificial Sequence
  Description of Artificial Sequence: Synthetic oligonucleotide
  Sense strand starting at position 3772 of SEQ ID NO: 587446
gcuggacuuccucauaugu

SEQ ID NO: 792843 - RNA, 19 nt, Artificial Sequence
  Description of Artificial Sequence: Synthetic oligonucleotide
  Antisense strand to SEQ ID NO: 792842
acauaugaggaaguccagc

SEQ ID NO: 792844 - RNA, 19 nt, Artificial Sequence
  Description of Artificial Sequence: Synthetic oligonucleotide
  Sense strand starting at position 3808 of SEQ ID NO: 587446
ggucucagacuauaagcuu

SEQ ID NO: 792845 - RNA, 19 nt, Artificial Sequence
  Description of Artificial Sequence: Synthetic oligonucleotide
  Antisense strand to SEQ ID NO: 792844
aagcuuauagucugagacc

SEQ ID NO: 792846 - RNA, 19 nt, Artificial Sequence
  Description of Artificial Sequence: Synthetic oligonucleotide
  Sense strand starting at position 3814 of SEQ ID NO: 587446
agacuauaagcuuguuuaa

SEQ ID NO: 792847 - RNA, 19 nt, Artificial Sequence
  Description of Artificial Sequence: Synthetic oligonucleotide
  Antisense strand to SEQ ID NO: 792846
uuaaacaagcuuauagucu

SEQ ID NO: 792848 - RNA, 19 nt, Artificial Sequence
  Description of Artificial Sequence: Synthetic oligonucleotide
  Sense strand starting at position 3816 of SEQ ID NO: 587446
acuauaagcuuguuuaaga

SEQ ID NO: 792849 - RNA, 19 nt, Artificial Sequence
  Description of Artificial Sequence: Synthetic oligonucleotide
  Antisense strand to SEQ ID NO: 792848
ucuuaaacaagcuuauagu

SEQ ID NO: 792850 - RNA, 19 nt, Artificial Sequence
  Description of Artificial Sequence: Synthetic oligonucleotide
  Sense strand starting at position 3866 of SEQ ID NO: 587446
ccguguggucucuuauccu

SEQ ID NO: 792851 - RNA, 19 nt, Artificial Sequence
  Description of Artificial Sequence: Synthetic oligonucleotide
  Antisense strand to SEQ ID NO: 792850
aggauaagagaccacacgg

SEQ ID NO: 792852 - RNA, 19 nt, Artificial Sequence
  Description of Artificial Sequence: Synthetic oligonucleotide
  Sense strand starting at position 3879 of SEQ ID NO: 587446
uauccuuuagccgacuaga

SEQ ID NO: 792853 - RNA, 19 nt, Artificial Sequence
  Description of Artificial Sequence: Synthetic oligonucleotide
  Antisense strand to SEQ ID NO: 792852
ucuagucggcuaaaggaua

SEQ ID NO: 792854 - RNA, 19 nt, Artificial Sequence
  Description of Artificial Sequence: Synthetic oligonucleotide
  Sense strand starting at position 3882 of SEQ ID NO: 587446
ccuuuagccgacuagacua

SEQ ID NO: 792855 - RNA, 19 nt, Artificial Sequence
  Description of Artificial Sequence: Synthetic oligonucleotide
  Antisense strand to SEQ ID NO: 792854
uagucuagucggcuaaagg

SEQ ID NO: 792856 - RNA, 19 nt, Artificial Sequence
  Description of Artificial Sequence: Synthetic oligonucleotide
  Sense strand starting at position 3921 of SEQ ID NO: 587446
acacuugugccagagucau

SEQ ID NO: 792857 - RNA, 19 nt, Artificial Sequence
  Description of Artificial Sequence: Synthetic oligonucleotide
  Antisense strand to SEQ ID NO: 792856
augacucuggcacaagugu

SEQ ID NO: 792858 - RNA, 19 nt, Artificial Sequence
  Description of Artificial Sequence: Synthetic oligonucleotide
  Sense strand starting at position 107 of SEQ ID NO: 587447
uccuguuaugagggaggau

SEQ ID NO: 792859 - RNA, 19 nt, Artificial Sequence
  Description of Artificial Sequence: Synthetic oligonucleotide
  Antisense strand to SEQ ID NO: 792858
auccucccucauaacagga

SEQ ID NO: 792860 - RNA, 19 nt, Artificial Sequence
  Description of Artificial Sequence: Synthetic oligonucleotide
  Sense strand starting at position 399 of SEQ ID NO: 587447
gugcuuucgcuguucacga

SEQ ID NO: 792861 - RNA, 19 nt, Artificial Sequence
  Description of Artificial Sequence: Synthetic oligonucleotide
  Antisense strand to SEQ ID NO: 792860
ucgugaacagcgaaagcac

SEQ ID NO: 792862 - RNA, 19 nt, Artificial Sequence
  Description of Artificial Sequence: Synthetic oligonucleotide
  Sense strand starting at position 415 of SEQ ID NO: 587447
cgauaaaccuugcuaucac

SEQ ID NO: 792863 - RNA, 19 nt, Artificial Sequence
  Description of Artificial Sequence: Synthetic oligonucleotide
  Antisense strand to SEQ ID NO: 792862
gugauagcaagguuuaucg

SEQ ID NO: 792864 - RNA, 19 nt, Artificial Sequence
  Description of Artificial Sequence: Synthetic oligonucleotide
  Sense strand starting at position 453 of SEQ ID NO: 587447
caucuuuacgaguguaaca

SEQ ID NO: 792865 - RNA, 19 nt, Artificial Sequence
  Description of Artificial Sequence: Synthetic oligonucleotide
  Antisense strand to SEQ ID NO: 792864
uguuacacucguaaagaug

SEQ ID NO: 792866 - RNA, 19 nt, Artificial Sequence
  Description of Artificial Sequence: Synthetic oligonucleotide
  Sense strand starting at position 455 of SEQ ID NO: 587447
ucuuuacgaguguaacacu

SEQ ID NO: 792867 - RNA, 19 nt, Artificial Sequence
  Description of Artificial Sequence: Synthetic oligonucleotide
  Antisense strand to SEQ ID NO: 792866
aguguuacacucguaaaga

SEQ ID NO: 792868 - RNA, 19 nt, Artificial Sequence
  Description of Artificial Sequence: Synthetic oligonucleotide
  Sense strand starting at position 623 of SEQ ID NO: 587447
ugcacuaaugucuagcuaa

SEQ ID NO: 792869 - RNA, 19 nt, Artificial Sequence
  Description of Artificial Sequence: Synthetic oligonucleotide
  Antisense strand to SEQ ID NO: 792868
uuagcuagacauuagugca

SEQ ID NO: 792870 - RNA, 19 nt, Artificial Sequence
  Description of Artificial Sequence: Synthetic oligonucleotide
  Sense strand starting at position 852 of SEQ ID NO: 587447
cuuuaacagcuaugugauu

SEQ ID NO: 792871 - RNA, 19 nt, Artificial Sequence
  Description of Artificial Sequence: Synthetic oligonucleotide
  Antisense strand to SEQ ID NO: 792870
aaucacauagcuguuaaag

SEQ ID NO: 792872 - RNA, 19 nt, Artificial Sequence
  Description of Artificial Sequence: Synthetic oligonucleotide
  Sense strand starting at position 914 of SEQ ID NO: 587447
aaaggaggauaugaacaau

SEQ ID NO: 792873 - RNA, 19 nt, Artificial Sequence
  Description of Artificial Sequence: Synthetic oligonucleotide
  Antisense strand to SEQ ID NO: 792872
auuguucauauccuccuuu

SEQ ID NO: 792874 - RNA, 19 nt, Artificial Sequence
  Description of Artificial Sequence: Synthetic oligonucleotide
  Sense strand starting at position 982 of SEQ ID NO: 587447
cuccuuucugaauguggga

SEQ ID NO: 792875 - RNA, 19 nt, Artificial Sequence
  Description of Artificial Sequence: Synthetic oligonucleotide
  Antisense strand to SEQ ID NO: 792874
ucccacauucagaaaggag

SEQ ID NO: 792876 - RNA, 19 nt, Artificial Sequence
  Description of Artificial Sequence: Synthetic oligonucleotide
  Sense strand starting at position 984 of SEQ ID NO: 587447
ccuuucugaaugugggaau

SEQ ID NO: 792877 - RNA, 19 nt, Artificial Sequence
  Description of Artificial Sequence: Synthetic oligonucleotide
  Antisense strand to SEQ ID NO: 792876
auucccacauucagaaagg

SEQ ID NO: 792878 - RNA, 19 nt, Artificial Sequence
  Description of Artificial Sequence: Synthetic oligonucleotide
  Sense strand starting at position 1105 of SEQ ID NO: 587447
gauguacuuuggccuauuu

SEQ ID NO: 792879 - RNA, 19 nt, Artificial Sequence
  Description of Artificial Sequence: Synthetic oligonucleotide
  Antisense strand to SEQ ID NO: 792878
aaauaggccaaaguacauc

SEQ ID NO: 792880 - RNA, 19 nt, Artificial Sequence
  Description of Artificial Sequence: Synthetic oligonucleotide
  Sense strand starting at position 1367 of SEQ ID NO: 587447
ccugaaucucggcucgcau

SEQ ID NO: 792881 - RNA, 19 nt, Artificial Sequence
  Description of Artificial Sequence: Synthetic oligonucleotide
  Antisense strand to SEQ ID NO: 792880
augcgagccgagauucagg

SEQ ID NO: 792882 - RNA, 19 nt, Artificial Sequence
  Description of Artificial Sequence: Synthetic oligonucleotide
  Sense strand starting at position 1422 of SEQ ID NO: 587447
agcacaaagcuccaugagu

SEQ ID NO: 792883 - RNA, 19 nt, Artificial Sequence
  Description of Artificial Sequence: Synthetic oligonucleotide
  Antisense strand to SEQ ID NO: 792882
acucauggagcuuugugcu

SEQ ID NO: 792884 - RNA, 19 nt, Artificial Sequence
  Description of Artificial Sequence: Synthetic oligonucleotide
  Sense strand starting at position 1484 of SEQ ID NO: 587447
agaccuuggcaacguuuaa

SEQ ID NO: 792885 - RNA, 19 nt, Artificial Sequence
  Description of Artificial Sequence: Synthetic oligonucleotide
  Antisense strand to SEQ ID NO: 792884
uuaaacguugccaaggucu

SEQ ID NO: 792886 - RNA, 19 nt, Artificial Sequence
  Description of Artificial Sequence: Synthetic oligonucleotide
  Sense strand starting at position 1488 of SEQ ID NO: 587447
cuuggcaacguuuaauuau

SEQ ID NO: 792887 - RNA, 19 nt, Artificial Sequence
  Description of Artificial Sequence: Synthetic oligonucleotide
  Antisense strand to SEQ ID NO: 792886
auaauuaaacguugccaag

SEQ ID NO: 792888 - RNA, 19 nt, Artificial Sequence
  Description of Artificial Sequence: Synthetic oligonucleotide
  Sense strand starting at position 1491 of SEQ ID NO: 587447
ggcaacguuuaauuaugaa

SEQ ID NO: 792889 - RNA, 19 nt, Artificial Sequence
  Description of Artificial Sequence: Synthetic oligonucleotide
  Antisense strand to SEQ ID NO: 792888
uucauaauuaaacguugcc

SEQ ID NO: 792890 - RNA, 19 nt, Artificial Sequence
  Description of Artificial Sequence: Synthetic oligonucleotide
  Sense strand starting at position 2082 of SEQ ID NO: 587447
gcuuucuacugucucaaag

SEQ ID NO: 792891 - RNA, 19 nt, Artificial Sequence
  Description of Artificial Sequence: Synthetic oligonucleotide
  Antisense strand to SEQ ID NO: 792890
cuuugagacaguagaaagc

SEQ ID NO: 792892 - RNA, 19 nt, Artificial Sequence
  Description of Artificial Sequence: Synthetic oligonucleotide
  Sense strand starting at position 2217 of SEQ ID NO: 587447
cuuggaaugccugggaaag

SEQ ID NO: 792893 - RNA, 19 nt, Artificial Sequence
  Description of Artificial Sequence: Synthetic oligonucleotide
  Antisense strand to SEQ ID NO: 792892
cuuucccaggcauuccaag

SEQ ID NO: 792894 - RNA, 19 nt, Artificial Sequence
  Description of Artificial Sequence: Synthetic oligonucleotide
  Sense strand starting at position 2218 of SEQ ID NO: 587447
uuggaaugccugggaaaga

SEQ ID NO: 792895 - RNA, 19 nt, Artificial Sequence
  Description of Artificial Sequence: Synthetic oligonucleotide
  Antisense strand to SEQ ID NO: 792894
ucuuucccaggcauuccaa

SEQ ID NO: 792896 - RNA, 19 nt, Artificial Sequence
  Description of Artificial Sequence: Synthetic oligonucleotide
  Sense strand starting at position 2362 of SEQ ID NO: 587447
gggcauauccagugacuuu

SEQ ID NO: 792897 - RNA, 19 nt, Artificial Sequence
  Description of Artificial Sequence: Synthetic oligonucleotide
  Antisense strand to SEQ ID NO: 792896
aaagucacuggauaugccc

SEQ ID NO: 792898 - RNA, 19 nt, Artificial Sequence
  Description of Artificial Sequence: Synthetic oligonucleotide
  Sense strand starting at position 2504 of SEQ ID NO: 587447
agcccagaauacuucgauu

SEQ ID NO: 792899 - RNA, 19 nt, Artificial Sequence
  Description of Artificial Sequence: Synthetic oligonucleotide
  Antisense strand to SEQ ID NO: 792898
aaucgaaguauucugggcu

SEQ ID NO: 792900 - RNA, 19 nt, Artificial Sequence
  Description of Artificial Sequence: Synthetic oligonucleotide
  Sense strand starting at position 2551 of SEQ ID NO: 587447
gaacuaaauguaggcuauu

SEQ ID NO: 792901 - RNA, 19 nt, Artificial Sequence
  Description of Artificial Sequence: Synthetic oligonucleotide
  Antisense strand to SEQ ID NO: 792900
aauagccuacauuuaguuc

SEQ ID NO: 792902 - RNA, 19 nt, Artificial Sequence
  Description of Artificial Sequence: Synthetic oligonucleotide
  Sense strand starting at position 2554 of SEQ ID NO: 587447
cuaaauguaggcuauuauu

SEQ ID NO: 792903 - RNA, 19 nt, Artificial Sequence
  Description of Artificial Sequence: Synthetic oligonucleotide
  Antisense strand to SEQ ID NO: 792902
aauaauagccuacauuuag

SEQ ID NO: 792904 - RNA, 19 nt, Artificial Sequence
  Description of Artificial Sequence: Synthetic oligonucleotide
  Sense strand starting at position 2657 of SEQ ID NO: 587447
ucguuuauguuccuagaaa

SEQ ID NO: 792905 - RNA, 19 nt, Artificial Sequence
  Description of Artificial Sequence: Synthetic oligonucleotide
  Antisense strand to SEQ ID NO: 792904
uuucuaggaacauaaacga

SEQ ID NO: 792906 - RNA, 19 nt, Artificial Sequence
  Description of Artificial Sequence: Synthetic oligonucleotide
  Sense strand starting at position 2690 of SEQ ID NO: 587447
cugggaguucuugagcugu

SEQ ID NO: 792907 - RNA, 19 nt, Artificial Sequence
  Description of Artificial Sequence: Synthetic oligonucleotide
  Antisense strand to SEQ ID NO: 792906
acagcucaagaacucccag

SEQ ID NO: 792908 - RNA, 19 nt, Artificial Sequence
  Description of Artificial Sequence: Synthetic oligonucleotide
  Sense strand starting at position 2696 of SEQ ID NO: 587447
guucuugagcuguuguagu

SEQ ID NO: 792909 - RNA, 19 nt, Artificial Sequence
  Description of Artificial Sequence: Synthetic oligonucleotide
  Antisense strand to SEQ ID NO: 792908
acuacaacagcucaagaac

SEQ ID NO: 792910 - RNA, 19 nt, Artificial Sequence
  Description of Artificial Sequence: Synthetic oligonucleotide
  Sense strand starting at position 2737 of SEQ ID NO: 587447
gugucuuugguggagacca

SEQ ID NO: 792911 - RNA, 19 nt, Artificial Sequence
  Description of Artificial Sequence: Synthetic oligonucleotide
  Antisense strand to SEQ ID NO: 792910
uggucuccaccaaagacac

SEQ ID NO: 792912 - RNA, 19 nt, Artificial Sequence
  Description of Artificial Sequence: Synthetic oligonucleotide
  Sense strand starting at position 2764 of SEQ ID NO: 587447
gagugaggucuccaacagu

SEQ ID NO: 792913 - RNA, 19 nt, Artificial Sequence
  Description of Artificial Sequence: Synthetic oligonucleotide
  Antisense strand to SEQ ID NO: 792912
acuguuggagaccucacuc

SEQ ID NO: 792914 - RNA, 19 nt, Artificial Sequence
  Description of Artificial Sequence: Synthetic oligonucleotide
  Sense strand starting at position 2771 of SEQ ID NO: 587447
gucuccaacaguggagaau

SEQ ID NO: 792915 - RNA, 19 nt, Artificial Sequence
  Description of Artificial Sequence: Synthetic oligonucleotide
  Antisense strand to SEQ ID NO: 792914
auucuccacuguuggagac

SEQ ID NO: 792916 - RNA, 19 nt, Artificial Sequence
  Description of Artificial Sequence: Synthetic oligonucleotide
  Sense strand starting at position 2796 of SEQ ID NO: 587447
uugaaugugucucugugga

SEQ ID NO: 792917 - RNA, 19 nt, Artificial Sequence
  Description of Artificial Sequence: Synthetic oligonucleotide
  Antisense strand to SEQ ID NO: 792916
uccacagagacacauucaa

SEQ ID NO: 792918 - RNA, 19 nt, Artificial Sequence
  Description of Artificial Sequence: Synthetic oligonucleotide
  Sense strand starting at position 2798 of SEQ ID NO: 587447
gaaugugucucuguggauu

SEQ ID NO: 792919 - RNA, 19 nt, Artificial Sequence
  Description of Artificial Sequence: Synthetic oligonucleotide
  Antisense strand to SEQ ID NO: 792918
aauccacagagacacauuc

SEQ ID NO: 792920 - RNA, 19 nt, Artificial Sequence
  Description of Artificial Sequence: Synthetic oligonucleotide
  Sense strand starting at position 2885 of SEQ ID NO: 587447
cugggaggucuacaacagu

SEQ ID NO: 792921 - RNA, 19 nt, Artificial Sequence
  Description of Artificial Sequence: Synthetic oligonucleotide
  Antisense strand to SEQ ID NO: 792920
acuguuguagaccucccag

SEQ ID NO: 792922 - RNA, 19 nt, Artificial Sequence
  Description of Artificial Sequence: Synthetic oligonucleotide
  Sense strand starting at position 2957 of SEQ ID NO: 587447
ggcuguuugcccuuagcaa

SEQ ID NO: 792923 - RNA, 19 nt, Artificial Sequence
  Description of Artificial Sequence: Synthetic oligonucleotide
  Antisense strand to SEQ ID NO: 792922
uugcuaagggcaaacagcc

SEQ ID NO: 792924 - RNA, 19 nt, Artificial Sequence
  Description of Artificial Sequence: Synthetic oligonucleotide
  Sense strand starting at position 3246 of SEQ ID NO: 587447
cuaguuucucaugaaguua

SEQ ID NO: 792925 - RNA, 19 nt, Artificial Sequence
  Description of Artificial Sequence: Synthetic oligonucleotide
  Antisense strand to SEQ ID NO: 792924
uaacuucaugagaaacuag

SEQ ID NO: 792926 - RNA, 19 nt, Artificial Sequence
  Description of Artificial Sequence: Synthetic oligonucleotide
  Sense strand starting at position 3258 of SEQ ID NO: 587447
gaaguuaguugaucucaaa

SEQ ID NO: 792927 - RNA, 19 nt, Artificial Sequence
  Description of Artificial Sequence: Synthetic oligonucleotide
  Antisense strand to SEQ ID NO: 792926
uuugagaucaacuaacuuc

SEQ ID NO: 792928 - RNA, 19 nt, Artificial Sequence
  Description of Artificial Sequence: Synthetic oligonucleotide
  Sense strand starting at position 3338 of SEQ ID NO: 587447
cuguuaaaucuccagauug

SEQ ID NO: 792929 - RNA, 19 nt, Artificial Sequence
  Description of Artificial Sequence: Synthetic oligonucleotide
  Antisense strand to SEQ ID NO: 792928
caaucuggagauuuaacag

SEQ ID NO: 792930 - RNA, 19 nt, Artificial Sequence
  Description of Artificial Sequence: Synthetic oligonucleotide
  Sense strand starting at position 3752 of SEQ ID NO: 587447
ugaacaucuucucuugagu

SEQ ID NO: 792931 - RNA, 19 nt, Artificial Sequence
  Description of Artificial Sequence: Synthetic oligonucleotide
  Antisense strand to SEQ ID NO: 792930
acucaagagaagauguuca

SEQ ID NO: 792932 - RNA, 19 nt, Artificial Sequence
  Description of Artificial Sequence: Synthetic oligonucleotide
  Sense strand starting at position 3848 of SEQ ID NO: 587447
uaguguguucccuaucuua

SEQ ID NO: 792933 - RNA, 19 nt, Artificial Sequence
  Description of Artificial Sequence: Synthetic oligonucleotide
  Antisense strand to SEQ ID NO: 792932
uaagauagggaacacacua

SEQ ID NO: 792934 - RNA, 19 nt, Artificial Sequence
  Description of Artificial Sequence: Synthetic oligonucleotide
  Sense strand starting at position 3851 of SEQ ID NO: 587447
uguguucccuaucuuacaa

SEQ ID NO: 792935 - RNA, 19 nt, Artificial Sequence
  Description of Artificial Sequence: Synthetic oligonucleotide
  Antisense strand to SEQ ID NO: 792934
uuguaagauagggaacaca

SEQ ID NO: 792936 - RNA, 19 nt, Artificial Sequence
  Description of Artificial Sequence: Synthetic oligonucleotide
  Sense strand starting at position 3974 of SEQ ID NO: 587447
ugcugauugaggcagagau

SEQ ID NO: 792937 - RNA, 19 nt, Artificial Sequence
  Description of Artificial Sequence: Synthetic oligonucleotide
  Antisense strand to SEQ ID NO: 792936
aucucugccucaaucagca

SEQ ID NO: 792938 - RNA, 19 nt, Artificial Sequence
  Description of Artificial Sequence: Synthetic oligonucleotide
  Sense strand starting at position 273 of SEQ ID NO: 587448
uccuguuaugagggaggau

SEQ ID NO: 792939 - RNA, 19 nt, Artificial Sequence
  Description of Artificial Sequence: Synthetic oligonucleotide
  Antisense strand to SEQ ID NO: 792938
auccucccucauaacagga

SEQ ID NO: 792940 - RNA, 19 nt, Artificial Sequence
  Description of Artificial Sequence: Synthetic oligonucleotide
  Sense strand starting at position 565 of SEQ ID NO: 587448
gugcuuucgcuguucacga

SEQ ID NO: 792941 - RNA, 19 nt, Artificial Sequence
  Description of Artificial Sequence: Synthetic oligonucleotide
  Antisense strand to SEQ ID NO: 792940
ucgugaacagcgaaagcac

SEQ ID NO: 792942 - RNA, 19 nt, Artificial Sequence
  Description of Artificial Sequence: Synthetic oligonucleotide
  Sense strand starting at position 581 of SEQ ID NO: 587448
cgauaaaccuugcuaucac

SEQ ID NO: 792943 - RNA, 19 nt, Artificial Sequence
  Description of Artificial Sequence: Synthetic oligonucleotide
  Antisense strand to SEQ ID NO: 792942
gugauagcaagguuuaucg

SEQ ID NO: 792944 - RNA, 19 nt, Artificial Sequence
  Description of Artificial Sequence: Synthetic oligonucleotide
  Sense strand starting at position 619 of SEQ ID NO: 587448
caucuuuacgaguguaaca

SEQ ID NO: 792945 - RNA, 19 nt, Artificial Sequence
  Description of Artificial Sequence: Synthetic oligonucleotide
  Antisense strand to SEQ ID NO: 792944
uguuacacucguaaagaug

SEQ ID NO: 792946 - RNA, 19 nt, Artificial Sequence
  Description of Artificial Sequence: Synthetic oligonucleotide
  Sense strand starting at position 621 of SEQ ID NO: 587448
ucuuuacgaguguaacacu

SEQ ID NO: 792947 - RNA, 19 nt, Artificial Sequence
  Description of Artificial Sequence: Synthetic oligonucleotide
  Antisense strand to SEQ ID NO: 792946
aguguuacacucguaaaga

SEQ ID NO: 792948 - RNA, 19 nt, Artificial Sequence
  Description of Artificial Sequence: Synthetic oligonucleotide
  Sense strand starting at position 789 of SEQ ID NO: 587448
ugcacuaaugucuagcuaa

SEQ ID NO: 792949 - RNA, 19 nt, Artificial Sequence
  Description of Artificial Sequence: Synthetic oligonucleotide
  Antisense strand to SEQ ID NO: 792948
uuagcuagacauuagugca

SEQ ID NO: 792950 - RNA, 19 nt, Artificial Sequence
  Description of Artificial Sequence: Synthetic oligonucleotide
  Sense strand starting at position 1018 of SEQ ID NO: 587448
cuuuaacagcuaugugauu

SEQ ID NO: 792951 - RNA, 19 nt, Artificial Sequence
  Description of Artificial Sequence: Synthetic oligonucleotide
  Antisense strand to SEQ ID NO: 792950
aaucacauagcuguuaaag

SEQ ID NO: 792952 - RNA, 19 nt, Artificial Sequence
  Description of Artificial Sequence: Synthetic oligonucleotide
  Sense strand starting at position 1080 of SEQ ID NO: 587448
aaaggaggauaugaacaau

SEQ ID NO: 792953 - RNA, 19 nt, Artificial Sequence
  Description of Artificial Sequence: Synthetic oligonucleotide
  Antisense strand to SEQ ID NO: 792952
auuguucauauccuccuuu

SEQ ID NO: 792954 - RNA, 19 nt, Artificial Sequence
  Description of Artificial Sequence: Synthetic oligonucleotide
  Sense strand starting at position 1148 of SEQ ID NO: 587448
cuccuuucugaauguggga

SEQ ID NO: 792955 - RNA, 19 nt, Artificial Sequence
  Description of Artificial Sequence: Synthetic oligonucleotide
  Antisense strand to SEQ ID NO: 792954
ucccacauucagaaaggag

SEQ ID NO: 792956 - RNA, 19 nt, Artificial Sequence
  Description of Artificial Sequence: Synthetic oligonucleotide
  Sense strand starting at position 1150 of SEQ ID NO: 587448
ccuuucugaaugugggaau

SEQ ID NO: 792957 - RNA, 19 nt, Artificial Sequence
  Description of Artificial Sequence: Synthetic oligonucleotide
  Antisense strand to SEQ ID NO: 792956
auucccacauucagaaagg

SEQ ID NO: 792958 - RNA, 19 nt, Artificial Sequence
  Description of Artificial Sequence: Synthetic oligonucleotide
  Sense strand starting at position 1270 of SEQ ID NO: 587448
ugauguacuuuggccuauu

SEQ ID NO: 792959 - RNA, 19 nt, Artificial Sequence
  Description of Artificial Sequence: Synthetic oligonucleotide
  Antisense strand to SEQ ID NO: 792958
aauaggccaaaguacauca

SEQ ID NO: 792960 - RNA, 19 nt, Artificial Sequence
  Description of Artificial Sequence: Synthetic oligonucleotide
  Sense strand starting at position 1271 of SEQ ID NO: 587448
gauguacuuuggccuauuu

SEQ ID NO: 792961 - RNA, 19 nt, Artificial Sequence
  Description of Artificial Sequence: Synthetic oligonucleotide
  Antisense strand to SEQ ID NO: 792960
aaauaggccaaaguacauc

SEQ ID NO: 792962 - RNA, 19 nt, Artificial Sequence
  Description of Artificial Sequence: Synthetic oligonucleotide
  Sense strand starting at position 1533 of SEQ ID NO: 587448
ccugaaucucggcucgcau

SEQ ID NO: 792963 - RNA, 19 nt, Artificial Sequence
  Description of Artificial Sequence: Synthetic oligonucleotide
  Antisense strand to SEQ ID NO: 792962
augcgagccgagauucagg

SEQ ID NO: 792964 - RNA, 19 nt, Artificial Sequence
  Description of Artificial Sequence: Synthetic oligonucleotide
  Sense strand starting at position 1588 of SEQ ID NO: 587448
agcacaaagcuccaugagu

SEQ ID NO: 792965 - RNA, 19 nt, Artificial Sequence
  Description of Artificial Sequence: Synthetic oligonucleotide
  Antisense strand to SEQ ID NO: 792964
acucauggagcuuugugcu

SEQ ID NO: 792966 - RNA, 19 nt, Artificial Sequence
  Description of Artificial Sequence: Synthetic oligonucleotide
  Sense strand starting at position 1650 of SEQ ID NO: 587448
agaccuuggcaacguuuaa

SEQ ID NO: 792967 - RNA, 19 nt, Artificial Sequence
  Description of Artificial Sequence: Synthetic oligonucleotide
  Antisense strand to SEQ ID NO: 792966
uuaaacguugccaaggucu

SEQ ID NO: 792968 - RNA, 19 nt, Artificial Sequence
  Description of Artificial Sequence: Synthetic oligonucleotide
  Sense strand starting at position 1654 of SEQ ID NO: 587448
cuuggcaacguuuaauuau

SEQ ID NO: 792969 - RNA, 19 nt, Artificial Sequence
  Description of Artificial Sequence: Synthetic oligonucleotide
  Antisense strand to SEQ ID NO: 792968
auaauuaaacguugccaag

SEQ ID NO: 792970 - RNA, 19 nt, Artificial Sequence
  Description of Artificial Sequence: Synthetic oligonucleotide
  Sense strand starting at position 1657 of SEQ ID NO: 587448
ggcaacguuuaauuaugaa

SEQ ID NO: 792971 - RNA, 19 nt, Artificial Sequence
  Description of Artificial Sequence: Synthetic oligonucleotide
  Antisense strand to SEQ ID NO: 792970
uucauaauuaaacguugcc

SEQ ID NO: 792972 - RNA, 19 nt, Artificial Sequence
  Description of Artificial Sequence: Synthetic oligonucleotide
  Sense strand starting at position 2248 of SEQ ID NO: 587448
gcuuucuacugucucaaag

SEQ ID NO: 792973 - RNA, 19 nt, Artificial Sequence
  Description of Artificial Sequence: Synthetic oligonucleotide
  Antisense strand to SEQ ID NO: 792972
cuuugagacaguagaaagc

SEQ ID NO: 792974 - RNA, 19 nt, Artificial Sequence
  Description of Artificial Sequence: Synthetic oligonucleotide
  Sense strand starting at position 2383 of SEQ ID NO: 587448
cuuggaaugccugggaaag

SEQ ID NO: 792975 - RNA, 19 nt, Artificial Sequence
  Description of Artificial Sequence: Synthetic oligonucleotide
  Antisense strand to SEQ ID NO: 792974
cuuucccaggcauuccaag

SEQ ID NO: 792976 - RNA, 19 nt, Artificial Sequence
  Description of Artificial Sequence: Synthetic oligonucleotide
  Sense strand starting at position 2384 of SEQ ID NO: 587448
uuggaaugccugggaaaga

SEQ ID NO: 792977 - RNA, 19 nt, Artificial Sequence
  Description of Artificial Sequence: Synthetic oligonucleotide
  Antisense strand to SEQ ID NO: 792976
ucuuucccaggcauuccaa

SEQ ID NO: 792978 - RNA, 19 nt, Artificial Sequence
  Description of Artificial Sequence: Synthetic oligonucleotide
  Sense strand starting at position 2528 of SEQ ID NO: 587448
gggcauauccagugacuuu

SEQ ID NO: 792979 - RNA, 19 nt, Artificial Sequence
  Description of Artificial Sequence: Synthetic oligonucleotide
  Antisense strand to SEQ ID NO: 792978
aaagucacuggauaugccc

SEQ ID NO: 792980 - RNA, 19 nt, Artificial Sequence
  Description of Artificial Sequence: Synthetic oligonucleotide
  Sense strand starting at position 2670 of SEQ ID NO: 587448
agcccagaauacuucgauu

SEQ ID NO: 792981 - RNA, 19 nt, Artificial Sequence
  Description of Artificial Sequence: Synthetic oligonucleotide
  Antisense strand to SEQ ID NO: 792980
aaucgaaguauucugggcu

SEQ ID NO: 792982 - RNA, 19 nt, Artificial Sequence
  Description of Artificial Sequence: Synthetic oligonucleotide
  Sense strand starting at position 2717 of SEQ ID NO: 587448
gaacuaaauguaggcuauu

SEQ ID NO: 792983 - RNA, 19 nt, Artificial Sequence
  Description of Artificial Sequence: Synthetic oligonucleotide
  Antisense strand to SEQ ID NO: 792982
aauagccuacauuuaguuc

SEQ ID NO: 792984 - RNA, 19 nt, Artificial Sequence
  Description of Artificial Sequence: Synthetic oligonucleotide
  Sense strand starting at position 2720 of SEQ ID NO: 587448
cuaaauguaggcuauuauu

SEQ ID NO: 792985 - RNA, 19 nt, Artificial Sequence
  Description of Artificial Sequence: Synthetic oligonucleotide
  Antisense strand to SEQ ID NO: 792984
aauaauagccuacauuuag

SEQ ID NO: 792986 - RNA, 19 nt, Artificial Sequence
  Description of Artificial Sequence: Synthetic oligonucleotide
  Sense strand starting at position 2823 of SEQ ID NO: 587448
ucguuuauguuccuagaaa

SEQ ID NO: 792987 - RNA, 19 nt, Artificial Sequence
  Description of Artificial Sequence: Synthetic oligonucleotide
  Antisense strand to SEQ ID NO: 792986
uuucuaggaacauaaacga

SEQ ID NO: 792988 - RNA, 19 nt, Artificial Sequence
  Description of Artificial Sequence: Synthetic oligonucleotide
  Sense strand starting at position 2856 of SEQ ID NO: 587448
cugggaguucuugagcugu

SEQ ID NO: 792989 - RNA, 19 nt, Artificial Sequence
  Description of Artificial Sequence: Synthetic oligonucleotide
  Antisense strand to SEQ ID NO: 792988
acagcucaagaacucccag

SEQ ID NO: 792990 - RNA, 19 nt, Artificial Sequence
  Description of Artificial Sequence: Synthetic oligonucleotide
  Sense strand starting at position 2862 of SEQ ID NO: 587448
guucuugagcuguuguagu

SEQ ID NO: 792991 - RNA, 19 nt, Artificial Sequence
  Description of Artificial Sequence: Synthetic oligonucleotide
  Antisense strand to SEQ ID NO: 792990
acuacaacagcucaagaac

SEQ ID NO: 792992 - RNA, 19 nt, Artificial Sequence
  Description of Artificial Sequence: Synthetic oligonucleotide
  Sense strand starting at position 2878 of SEQ ID NO: 587448
agugcagcuccaugaauua

SEQ ID NO: 792993 - RNA, 19 nt, Artificial Sequence
  Description of Artificial Sequence: Synthetic oligonucleotide
  Antisense strand to SEQ ID NO: 792992
uaauucauggagcugcacu

SEQ ID NO: 792994 - RNA, 19 nt, Artificial Sequence
  Description of Artificial Sequence: Synthetic oligonucleotide
  Sense strand starting at position 2903 of SEQ ID NO: 587448
gugucuuugguggagacca

SEQ ID NO: 792995 - RNA, 19 nt, Artificial Sequence
  Description of Artificial Sequence: Synthetic oligonucleotide
  Antisense strand to SEQ ID NO: 792994
uggucuccaccaaagacac

SEQ ID NO: 792996 - RNA, 19 nt, Artificial Sequence
  Description of Artificial Sequence: Synthetic oligonucleotide
  Sense strand starting at position 2930 of SEQ ID NO: 587448
gagugaggucuccaacagu

SEQ ID NO: 792997 - RNA, 19 nt, Artificial Sequence
  Description of Artificial Sequence: Synthetic oligonucleotide
  Antisense strand to SEQ ID NO: 792996
acuguuggagaccucacuc

SEQ ID NO: 792998 - RNA, 19 nt, Artificial Sequence
  Description of Artificial Sequence: Synthetic oligonucleotide
  Sense strand starting at position 2937 of SEQ ID NO: 587448
gucuccaacaguggagaau

SEQ ID NO: 792999 - RNA, 19 nt, Artificial Sequence
  Description of Artificial Sequence: Synthetic oligonucleotide
  Antisense strand to SEQ ID NO: 792998
auucuccacuguuggagac

SEQ ID NO: 793000 - RNA, 19 nt, Artificial Sequence
  Description of Artificial Sequence: Synthetic oligonucleotide
  Sense strand starting at position 2962 of SEQ ID NO: 587448
uugaaugugucucugugga

SEQ ID NO: 793001 - RNA, 19 nt, Artificial Sequence
  Description of Artificial Sequence: Synthetic oligonucleotide
  Antisense strand to SEQ ID NO: 793000
uccacagagacacauucaa

SEQ ID NO: 793002 - RNA, 19 nt, Artificial Sequence
  Description of Artificial Sequence: Synthetic oligonucleotide
  Sense strand starting at position 2964 of SEQ ID NO: 587448
gaaugugucucuguggauu

SEQ ID NO: 793003 - RNA, 19 nt, Artificial Sequence
  Description of Artificial Sequence: Synthetic oligonucleotide
  Antisense strand to SEQ ID NO: 793002
aauccacagagacacauuc

SEQ ID NO: 793004 - RNA, 19 nt, Artificial Sequence
  Description of Artificial Sequence: Synthetic oligonucleotide
  Sense strand starting at position 3051 of SEQ ID NO: 587448
cugggaggucuacaacagu

SEQ ID NO: 793005 - RNA, 19 nt, Artificial Sequence
  Description of Artificial Sequence: Synthetic oligonucleotide
  Antisense strand to SEQ ID NO: 793004
acuguuguagaccucccag

SEQ ID NO: 793006 - RNA, 19 nt, Artificial Sequence
  Description of Artificial Sequence: Synthetic oligonucleotide
  Sense strand starting at position 3123 of SEQ ID NO: 587448
ggcuguuugcccuuagcaa

SEQ ID NO: 793007 - RNA, 19 nt, Artificial Sequence
  Description of Artificial Sequence: Synthetic oligonucleotide
  Antisense strand to SEQ ID NO: 793006
uugcuaagggcaaacagcc

SEQ ID NO: 793008 - RNA, 19 nt, Artificial Sequence
  Description of Artificial Sequence: Synthetic oligonucleotide
  Sense strand starting at position 3356 of SEQ ID NO: 587448
cuggauuacucuggauuug

SEQ ID NO: 793009 - RNA, 19 nt, Artificial Sequence
  Description of Artificial Sequence: Synthetic oligonucleotide
  Antisense strand to SEQ ID NO: 793008
caaauccagaguaauccag

SEQ ID NO: 793010 - RNA, 19 nt, Artificial Sequence
  Description of Artificial Sequence: Synthetic oligonucleotide
  Sense strand starting at position 3412 of SEQ ID NO: 587448
cuaguuucucaugaaguua

SEQ ID NO: 793011 - RNA, 19 nt, Artificial Sequence
  Description of Artificial Sequence: Synthetic oligonucleotide
  Antisense strand to SEQ ID NO: 793010
uaacuucaugagaaacuag

SEQ ID NO: 793012 - RNA, 19 nt, Artificial Sequence
  Description of Artificial Sequence: Synthetic oligonucleotide
  Sense strand starting at position 3424 of SEQ ID NO: 587448
gaaguuaguugaucucaaa

SEQ ID NO: 793013 - RNA, 19 nt, Artificial Sequence
  Description of Artificial Sequence: Synthetic oligonucleotide
  Antisense strand to SEQ ID NO: 793012
uuugagaucaacuaacuuc

SEQ ID NO: 793014 - RNA, 19 nt, Artificial Sequence
  Description of Artificial Sequence: Synthetic oligonucleotide
  Sense strand starting at position 3504 of SEQ ID NO: 587448
cuguuaaaucuccagauug

SEQ ID NO: 793015 - RNA, 19 nt, Artificial Sequence
  Description of Artificial Sequence: Synthetic oligonucleotide
  Antisense strand to SEQ ID NO: 793014
caaucuggagauuuaacag

SEQ ID NO: 793016 - RNA, 19 nt, Artificial Sequence
  Description of Artificial Sequence: Synthetic oligonucleotide
  Sense strand starting at position 3918 of SEQ ID NO: 587448
ugaacaucuucucuugagu

SEQ ID NO: 793017 - RNA, 19 nt, Artificial Sequence
  Description of Artificial Sequence: Synthetic oligonucleotide
  Antisense strand to SEQ ID NO: 793016
acucaagagaagauguuca

SEQ ID NO: 793018 - RNA, 19 nt, Artificial Sequence
  Description of Artificial Sequence: Synthetic oligonucleotide
  Sense strand starting at position 801 of SEQ ID NO: 587449
gggagugggugucuugacu

SEQ ID NO: 793019 - RNA, 19 nt, Artificial Sequence
  Description of Artificial Sequence: Synthetic oligonucleotide
  Antisense strand to SEQ ID NO: 793018
agucaagacacccacuccc

SEQ ID NO: 793020 - RNA, 19 nt, Artificial Sequence
  Description of Artificial Sequence: Synthetic oligonucleotide
  Sense strand starting at position 1079 of SEQ ID NO: 587449
gucugcaucucuuggguga

SEQ ID NO: 793021 - RNA, 19 nt, Artificial Sequence
  Description of Artificial Sequence: Synthetic oligonucleotide
  Antisense strand to SEQ ID NO: 793020
ucacccaagagaugcagac

SEQ ID NO: 793022 - RNA, 19 nt, Artificial Sequence
  Description of Artificial Sequence: Synthetic oligonucleotide
  Sense strand starting at position 1092 of SEQ ID NO: 587449
gggugaggucacugucugu

SEQ ID NO: 793023 - RNA, 19 nt, Artificial Sequence
  Description of Artificial Sequence: Synthetic oligonucleotide
  Antisense strand to SEQ ID NO: 793022
acagacagugaccucaccc

SEQ ID NO: 793024 - RNA, 19 nt, Artificial Sequence
  Description of Artificial Sequence: Synthetic oligonucleotide
  Sense strand starting at position 1292 of SEQ ID NO: 587449
gcaccaugaucagagauca

SEQ ID NO: 793025 - RNA, 19 nt, Artificial Sequence
  Description of Artificial Sequence: Synthetic oligonucleotide
  Antisense strand to SEQ ID NO: 793024
ugaucucugaucauggugc

SEQ ID NO: 793026 - RNA, 19 nt, Artificial Sequence
  Description of Artificial Sequence: Synthetic oligonucleotide
  Sense strand starting at position 1523 of SEQ ID NO: 587449
cggcaauguugccaggagu

SEQ ID NO: 793027 - RNA, 19 nt, Artificial Sequence
  Description of Artificial Sequence: Synthetic oligonucleotide
  Antisense strand to SEQ ID NO: 793026
acuccuggcaacauugccg

SEQ ID NO: 793028 - RNA, 19 nt, Artificial Sequence
  Description of Artificial Sequence: Synthetic oligonucleotide
  Sense strand starting at position 1547 of SEQ ID NO: 587449
cucucaauuugucggccua

SEQ ID NO: 793029 - RNA, 19 nt, Artificial Sequence
  Description of Artificial Sequence: Synthetic oligonucleotide
  Antisense strand to SEQ ID NO: 793028
uaggccgacaaauugagag

SEQ ID NO: 793030 - RNA, 19 nt, Artificial Sequence
  Description of Artificial Sequence: Synthetic oligonucleotide
  Sense strand starting at position 2201 of SEQ ID NO: 587449
gggagucaccgcgaaggaa

SEQ ID NO: 793031 - RNA, 19 nt, Artificial Sequence
  Description of Artificial Sequence: Synthetic oligonucleotide
  Antisense strand to SEQ ID NO: 793030
uuccuucgcggugacuccc

SEQ ID NO: 793032 - RNA, 19 nt, Artificial Sequence
  Description of Artificial Sequence: Synthetic oligonucleotide
  Sense strand starting at position 2238 of SEQ ID NO: 587449
gcguccugugcccuucaga

SEQ ID NO: 793033 - RNA, 19 nt, Artificial Sequence
  Description of Artificial Sequence: Synthetic oligonucleotide
  Antisense strand to SEQ ID NO: 793032
ucugaagggcacaggacgc

SEQ ID NO: 793034 - RNA, 19 nt, Artificial Sequence
  Description of Artificial Sequence: Synthetic oligonucleotide
  Sense strand starting at position 2558 of SEQ ID NO: 587449
agagaauguucccugucac

SEQ ID NO: 793035 - RNA, 19 nt, Artificial Sequence
  Description of Artificial Sequence: Synthetic oligonucleotide
  Antisense strand to SEQ ID NO: 793034
gugacagggaacauucucu

SEQ ID NO: 793036 - RNA, 19 nt, Artificial Sequence
  Description of Artificial Sequence: Synthetic oligonucleotide
  Sense strand starting at position 2559 of SEQ ID NO: 587449
gagaauguucccugucacc

SEQ ID NO: 793037 - RNA, 19 nt, Artificial Sequence
  Description of Artificial Sequence: Synthetic oligonucleotide
  Antisense strand to SEQ ID NO: 793036
ggugacagggaacauucuc

SEQ ID NO: 793038 - RNA, 19 nt, Artificial Sequence
  Description of Artificial Sequence: Synthetic oligonucleotide
  Sense strand starting at position 2568 of SEQ ID NO: 587449
cccugucacccugggagua

SEQ ID NO: 793039 - RNA, 19 nt, Artificial Sequence
  Description of Artificial Sequence: Synthetic oligonucleotide
  Antisense strand to SEQ ID NO: 793038
uacucccagggugacaggg

SEQ ID NO: 793040 - RNA, 19 nt, Artificial Sequence
  Description of Artificial Sequence: Synthetic oligonucleotide
  Sense strand starting at position 2707 of SEQ ID NO: 587449
acgggaaccuuccauggau

SEQ ID NO: 793041 - RNA, 19 nt, Artificial Sequence
  Description of Artificial Sequence: Synthetic oligonucleotide
  Antisense strand to SEQ ID NO: 793040
auccauggaagguucccgu

SEQ ID NO: 793042 - RNA, 19 nt, Artificial Sequence
  Description of Artificial Sequence: Synthetic oligonucleotide
  Sense strand starting at position 2710 of SEQ ID NO: 587449
ggaaccuuccauggaucuu

SEQ ID NO: 793043 - RNA, 19 nt, Artificial Sequence
  Description of Artificial Sequence: Synthetic oligonucleotide
  Antisense strand to SEQ ID NO: 793042
aagauccauggaagguucc

SEQ ID NO: 793044 - RNA, 19 nt, Artificial Sequence
  Description of Artificial Sequence: Synthetic oligonucleotide
  Sense strand starting at position 2913 of SEQ ID NO: 587449
ccaccucugccugagucau

SEQ ID NO: 793045 - RNA, 19 nt, Artificial Sequence
  Description of Artificial Sequence: Synthetic oligonucleotide
  Antisense strand to SEQ ID NO: 793044
augacucaggcagaggugg

SEQ ID NO: 793046 - RNA, 19 nt, Artificial Sequence
  Description of Artificial Sequence: Synthetic oligonucleotide
  Sense strand starting at position 2919 of SEQ ID NO: 587449
cugccugagucauucuuga

SEQ ID NO: 793047 - RNA, 19 nt, Artificial Sequence
  Description of Artificial Sequence: Synthetic oligonucleotide
  Antisense strand to SEQ ID NO: 793046
ucaagaaugacucaggcag

SEQ ID NO: 793048 - RNA, 19 nt, Artificial Sequence
  Description of Artificial Sequence: Synthetic oligonucleotide
  Sense strand starting at position 2923 of SEQ ID NO: 587449
cugagucauucuugaccag

SEQ ID NO: 793049 - RNA, 19 nt, Artificial Sequence
  Description of Artificial Sequence: Synthetic oligonucleotide
  Antisense strand to SEQ ID NO: 793048
cuggucaagaaugacucag

SEQ ID NO: 793050 - RNA, 19 nt, Artificial Sequence
  Description of Artificial Sequence: Synthetic oligonucleotide
  Sense strand starting at position 3440 of SEQ ID NO: 587449
ggguguuaggcuggccaga

SEQ ID NO: 793051 - RNA, 19 nt, Artificial Sequence
  Description of Artificial Sequence: Synthetic oligonucleotide
  Antisense strand to SEQ ID NO: 793050
ucuggccagccuaacaccc

SEQ ID NO: 793052 - RNA, 19 nt, Artificial Sequence
  Description of Artificial Sequence: Synthetic oligonucleotide
  Sense strand starting at position 3721 of SEQ ID NO: 587449
cggcuuugucuuccuguga

SEQ ID NO: 793053 - RNA, 19 nt, Artificial Sequence
  Description of Artificial Sequence: Synthetic oligonucleotide
  Antisense strand to SEQ ID NO: 793052
ucacaggaagacaaagccg

SEQ ID NO: 793054 - RNA, 19 nt, Artificial Sequence
  Description of Artificial Sequence: Synthetic oligonucleotide
  Sense strand starting at position 513 of SEQ ID NO: 587450
ugagauugacaacguaucu

SEQ ID NO: 793055 - RNA, 19 nt, Artificial Sequence
  Description of Artificial Sequence: Synthetic oligonucleotide
  Antisense strand to SEQ ID NO: 793054
agauacguugucaaucuca

SEQ ID NO: 793056 - RNA, 19 nt, Artificial Sequence
  Description of Artificial Sequence: Synthetic oligonucleotide
  Sense strand starting at position 552 of SEQ ID NO: 587450
guggaagagugguucuuua

SEQ ID NO: 793057 - RNA, 19 nt, Artificial Sequence
  Description of Artificial Sequence: Synthetic oligonucleotide
  Antisense strand to SEQ ID NO: 793056
uaaagaaccacucuuccac

SEQ ID NO: 793058 - RNA, 19 nt, Artificial Sequence
  Description of Artificial Sequence: Synthetic oligonucleotide
  Sense strand starting at position 556 of SEQ ID NO: 587450
aagagugguucuuuacaag

SEQ ID NO: 793059 - RNA, 19 nt, Artificial Sequence
  Description of Artificial Sequence: Synthetic oligonucleotide
  Antisense strand to SEQ ID NO: 793058
cuuguaaagaaccacucuu

SEQ ID NO: 793060 - RNA, 19 nt, Artificial Sequence
  Description of Artificial Sequence: Synthetic oligonucleotide
  Sense strand starting at position 582 of SEQ ID NO: 587450
augugcaaguacucuuuga

SEQ ID NO: 793061 - RNA, 19 nt, Artificial Sequence
  Description of Artificial Sequence: Synthetic oligonucleotide
  Antisense strand to SEQ ID NO: 793060
ucaaagaguacuugcacau

SEQ ID NO: 793062 - RNA, 19 nt, Artificial Sequence
  Description of Artificial Sequence: Synthetic oligonucleotide
  Sense strand starting at position 586 of SEQ ID NO: 587450
gcaaguacucuuugaaaua

SEQ ID NO: 793063 - RNA, 19 nt, Artificial Sequence
  Description of Artificial Sequence: Synthetic oligonucleotide
  Antisense strand to SEQ ID NO: 793062
uauuucaaagaguacuugc

SEQ ID NO: 793064 - RNA, 19 nt, Artificial Sequence
  Description of Artificial Sequence: Synthetic oligonucleotide
  Sense strand starting at position 623 of SEQ ID NO: 587450
agauaauugcaaggaucca

SEQ ID NO: 793065 - RNA, 19 nt, Artificial Sequence
  Description of Artificial Sequence: Synthetic oligonucleotide
  Antisense strand to SEQ ID NO: 793064
uggauccuugcaauuaucu

SEQ ID NO: 793066 - RNA, 19 nt, Artificial Sequence
  Description of Artificial Sequence: Synthetic oligonucleotide
  Sense strand starting at position 685 of SEQ ID NO: 587450
acgagaccuucuuuccaau

SEQ ID NO: 793067 - RNA, 19 nt, Artificial Sequence
  Description of Artificial Sequence: Synthetic oligonucleotide
  Antisense strand to SEQ ID NO: 793066
auuggaaagaaggucucgu

SEQ ID NO: 793068 - RNA, 19 nt, Artificial Sequence
  Description of Artificial Sequence: Synthetic oligonucleotide
  Sense strand starting at position 1013 of SEQ ID NO: 587450
agcgcuagucaacaauuaa

SEQ ID NO: 793069 - RNA, 19 nt, Artificial Sequence
  Description of Artificial Sequence: Synthetic oligonucleotide
  Antisense strand to SEQ ID NO: 793068
uuaauuguugacuagcgcu

SEQ ID NO: 793070 - RNA, 19 nt, Artificial Sequence
  Description of Artificial Sequence: Synthetic oligonucleotide
  Sense strand starting at position 1083 of SEQ ID NO: 587450
aguucaaccgaugagaugu

SEQ ID NO: 793071 - RNA, 19 nt, Artificial Sequence
  Description of Artificial Sequence: Synthetic oligonucleotide
  Antisense strand to SEQ ID NO: 793070
acaucucaucgguugaacu

SEQ ID NO: 793072 - RNA, 19 nt, Artificial Sequence
  Description of Artificial Sequence: Synthetic oligonucleotide
  Sense strand starting at position 1120 of SEQ ID NO: 587450
cuuauacuaugguuauaug

SEQ ID NO: 793073 - RNA, 19 nt, Artificial Sequence
  Description of Artificial Sequence: Synthetic oligonucleotide
  Antisense strand to SEQ ID NO: 793072
cauauaaccauaguauaag

SEQ ID NO: 793074 - RNA, 19 nt, Artificial Sequence
  Description of Artificial Sequence: Synthetic oligonucleotide
  Sense strand starting at position 1243 of SEQ ID NO: 587450
acaggcaugaagugacaua

SEQ ID NO: 793075 - RNA, 19 nt, Artificial Sequence
  Description of Artificial Sequence: Synthetic oligonucleotide
  Antisense strand to SEQ ID NO: 793074
uaugucacuucaugccugu

SEQ ID NO: 793076 - RNA, 19 nt, Artificial Sequence
  Description of Artificial Sequence: Synthetic oligonucleotide
  Sense strand starting at position 1405 of SEQ ID NO: 587450
agaacuggucuugacgauu

SEQ ID NO: 793077 - RNA, 19 nt, Artificial Sequence
  Description of Artificial Sequence: Synthetic oligonucleotide
  Antisense strand to SEQ ID NO: 793076
aaucgucaagaccaguucu

SEQ ID NO: 793078 - RNA, 19 nt, Artificial Sequence
  Description of Artificial Sequence: Synthetic oligonucleotide
  Sense strand starting at position 1436 of SEQ ID NO: 587450
gagagugauucggcccuga

SEQ ID NO: 793079 - RNA, 19 nt, Artificial Sequence
  Description of Artificial Sequence: Synthetic oligonucleotide
  Antisense strand to SEQ ID NO: 793078
ucagggccgaaucacucuc

SEQ ID NO: 793080 - RNA, 19 nt, Artificial Sequence
  Description of Artificial Sequence: Synthetic oligonucleotide
  Sense strand starting at position 1547 of SEQ ID NO: 587450
cgggacaccugagaagaaa

SEQ ID NO: 793081 - RNA, 19 nt, Artificial Sequence
  Description of Artificial Sequence: Synthetic oligonucleotide
  Antisense strand to SEQ ID NO: 793080
uuucuucucaggugucccg

SEQ ID NO: 793082 - RNA, 19 nt, Artificial Sequence
  Description of Artificial Sequence: Synthetic oligonucleotide
  Sense strand starting at position 2053 of SEQ ID NO: 587450
guugaaguugcgcaaggau

SEQ ID NO: 793083 - RNA, 19 nt, Artificial Sequence
  Description of Artificial Sequence: Synthetic oligonucleotide
  Antisense strand to SEQ ID NO: 793082
auccuugcgcaacuucaac

SEQ ID NO: 793084 - RNA, 19 nt, Artificial Sequence
  Description of Artificial Sequence: Synthetic oligonucleotide
  Sense strand starting at position 2103 of SEQ ID NO: 587450
cguguguucccgucagugu

SEQ ID NO: 793085 - RNA, 19 nt, Artificial Sequence
  Description of Artificial Sequence: Synthetic oligonucleotide
  Antisense strand to SEQ ID NO: 793084
acacugacgggaacacacg

SEQ ID NO: 793086 - RNA, 19 nt, Artificial Sequence
  Description of Artificial Sequence: Synthetic oligonucleotide
  Sense strand starting at position 2149 of SEQ ID NO: 587450
gugggaagauaucauagag

SEQ ID NO: 793087 - RNA, 19 nt, Artificial Sequence
  Description of Artificial Sequence: Synthetic oligonucleotide
  Antisense strand to SEQ ID NO: 793086
cucuaugauaucuucccac

SEQ ID NO: 793088 - RNA, 19 nt, Artificial Sequence
  Description of Artificial Sequence: Synthetic oligonucleotide
  Sense strand starting at position 2265 of SEQ ID NO: 587450
gggacuuagugucccacua

SEQ ID NO: 793089 - RNA, 19 nt, Artificial Sequence
  Description of Artificial Sequence: Synthetic oligonucleotide
  Antisense strand to SEQ ID NO: 793088
uagugggacacuaaguccc

SEQ ID NO: 793090 - RNA, 19 nt, Artificial Sequence
  Description of Artificial Sequence: Synthetic oligonucleotide
  Sense strand starting at position 2380 of SEQ ID NO: 587450
aaaggagccguauaucauc

SEQ ID NO: 793091 - RNA, 19 nt, Artificial Sequence
  Description of Artificial Sequence: Synthetic oligonucleotide
  Antisense strand to SEQ ID NO: 793090
gaugauauacggcuccuuu

SEQ ID NO: 793092 - RNA, 19 nt, Artificial Sequence
  Description of Artificial Sequence: Synthetic oligonucleotide
  Sense strand starting at position 2462 of SEQ ID NO: 587450
cuaggaucuccuggguuga

SEQ ID NO: 793093 - RNA, 19 nt, Artificial Sequence
  Description of Artificial Sequence: Synthetic oligonucleotide
  Antisense strand to SEQ ID NO: 793092
ucaacccaggagauccuag

SEQ ID NO: 793094 - RNA, 19 nt, Artificial Sequence
  Description of Artificial Sequence: Synthetic oligonucleotide
  Sense strand starting at position 2463 of SEQ ID NO: 587450
uaggaucuccuggguugaa

SEQ ID NO: 793095 - RNA, 19 nt, Artificial Sequence
  Description of Artificial Sequence: Synthetic oligonucleotide
  Antisense strand to SEQ ID NO: 793094
uucaacccaggagauccua

SEQ ID NO: 793096 - RNA, 19 nt, Artificial Sequence
  Description of Artificial Sequence: Synthetic oligonucleotide
  Sense strand starting at position 2464 of SEQ ID NO: 587450
aggaucuccuggguugaaa

SEQ ID NO: 793097 - RNA, 19 nt, Artificial Sequence
  Description of Artificial Sequence: Synthetic oligonucleotide
  Antisense strand to SEQ ID NO: 793096
uuucaacccaggagauccu

SEQ ID NO: 793098 - RNA, 19 nt, Artificial Sequence
  Description of Artificial Sequence: Synthetic oligonucleotide
  Sense strand starting at position 2487 of SEQ ID NO: 587450
agagauuggaguugacgaa

SEQ ID NO: 793099 - RNA, 19 nt, Artificial Sequence
  Description of Artificial Sequence: Synthetic oligonucleotide
  Antisense strand to SEQ ID NO: 793098
uucgucaacuccaaucucu

SEQ ID NO: 793100 - RNA, 19 nt, Artificial Sequence
  Description of Artificial Sequence: Synthetic oligonucleotide
  Sense strand starting at position 2581 of SEQ ID NO: 587450
ucagaaaucugcuuaggag

SEQ ID NO: 793101 - RNA, 19 nt, Artificial Sequence
  Description of Artificial Sequence: Synthetic oligonucleotide
  Antisense strand to SEQ ID NO: 793100
cuccuaagcagauuucuga

SEQ ID NO: 793102 - RNA, 19 nt, Artificial Sequence
  Description of Artificial Sequence: Synthetic oligonucleotide
  Sense strand starting at position 2582 of SEQ ID NO: 587450
cagaaaucugcuuaggagu

SEQ ID NO: 793103 - RNA, 19 nt, Artificial Sequence
  Description of Artificial Sequence: Synthetic oligonucleotide
  Antisense strand to SEQ ID NO: 793102
acuccuaagcagauuucug

SEQ ID NO: 793104 - RNA, 19 nt, Artificial Sequence
  Description of Artificial Sequence: Synthetic oligonucleotide
  Sense strand starting at position 2593 of SEQ ID NO: 587450
uuaggaguaccuugaaucu

SEQ ID NO: 793105 - RNA, 19 nt, Artificial Sequence
  Description of Artificial Sequence: Synthetic oligonucleotide
  Antisense strand to SEQ ID NO: 793104
agauucaagguacuccuaa

SEQ ID NO: 793106 - RNA, 19 nt, Artificial Sequence
  Description of Artificial Sequence: Synthetic oligonucleotide
  Sense strand starting at position 2912 of SEQ ID NO: 587450
gaacuuaguguauagcuua

SEQ ID NO: 793107 - RNA, 19 nt, Artificial Sequence
  Description of Artificial Sequence: Synthetic oligonucleotide
  Antisense strand to SEQ ID NO: 793106
uaagcuauacacuaaguuc

SEQ ID NO: 793108 - RNA, 19 nt, Artificial Sequence
  Description of Artificial Sequence: Synthetic oligonucleotide
  Sense strand starting at position 2917 of SEQ ID NO: 587450
uaguguauagcuuauaguu

SEQ ID NO: 793109 - RNA, 19 nt, Artificial Sequence
  Description of Artificial Sequence: Synthetic oligonucleotide
  Antisense strand to SEQ ID NO: 793108
aacuauaagcuauacacua

SEQ ID NO: 793110 - RNA, 19 nt, Artificial Sequence
  Description of Artificial Sequence: Synthetic oligonucleotide
  Sense strand starting at position 3002 of SEQ ID NO: 587450
acuaguaaauuagccgaaa

SEQ ID NO: 793111 - RNA, 19 nt, Artificial Sequence
  Description of Artificial Sequence: Synthetic oligonucleotide
  Antisense strand to SEQ ID NO: 793110
uuucggcuaauuuacuagu

SEQ ID NO: 793112 - RNA, 19 nt, Artificial Sequence
  Description of Artificial Sequence: Synthetic oligonucleotide
  Sense strand starting at position 3005 of SEQ ID NO: 587450
aguaaauuagccgaaagau

SEQ ID NO: 793113 - RNA, 19 nt, Artificial Sequence
  Description of Artificial Sequence: Synthetic oligonucleotide
  Antisense strand to SEQ ID NO: 793112
aucuuucggcuaauuuacu

SEQ ID NO: 793114 - RNA, 19 nt, Artificial Sequence
  Description of Artificial Sequence: Synthetic oligonucleotide
  Sense strand starting at position 3168 of SEQ ID NO: 587450
uggcaccucccagauugau

SEQ ID NO: 793115 - RNA, 19 nt, Artificial Sequence
  Description of Artificial Sequence: Synthetic oligonucleotide
  Antisense strand to SEQ ID NO: 793114
aucaaucugggaggugcca

SEQ ID NO: 793116 - RNA, 19 nt, Artificial Sequence
  Description of Artificial Sequence: Synthetic oligonucleotide
  Sense strand starting at position 3195 of SEQ ID NO: 587450
ucaccugaucuuggauaaa

SEQ ID NO: 793117 - RNA, 19 nt, Artificial Sequence
  Description of Artificial Sequence: Synthetic oligonucleotide
  Antisense strand to SEQ ID NO: 793116
uuuauccaagaucagguga

SEQ ID NO: 793118 - RNA, 19 nt, Artificial Sequence
  Description of Artificial Sequence: Synthetic oligonucleotide
  Sense strand starting at position 3418 of SEQ ID NO: 587450
cugccagcucugcaugaau

SEQ ID NO: 793119 - RNA, 19 nt, Artificial Sequence
  Description of Artificial Sequence: Synthetic oligonucleotide
  Antisense strand to SEQ ID NO: 793118
auucaugcagagcuggcag

SEQ ID NO: 793120 - RNA, 19 nt, Artificial Sequence
  Description of Artificial Sequence: Synthetic oligonucleotide
  Sense strand starting at position 3508 of SEQ ID NO: 587450
ggugguuacgaaaguguca

SEQ ID NO: 793121 - RNA, 19 nt, Artificial Sequence
  Description of Artificial Sequence: Synthetic oligonucleotide
  Antisense strand to SEQ ID NO: 793120
ugacacuuucguaaccacc

SEQ ID NO: 793122 - RNA, 19 nt, Artificial Sequence
  Description of Artificial Sequence: Synthetic oligonucleotide
  Sense strand starting at position 3510 of SEQ ID NO: 587450
ugguuacgaaagugucaug

SEQ ID NO: 793123 - RNA, 19 nt, Artificial Sequence
  Description of Artificial Sequence: Synthetic oligonucleotide
  Antisense strand to SEQ ID NO: 793122
caugacacuuucguaacca

SEQ ID NO: 793124 - RNA, 19 nt, Artificial Sequence
  Description of Artificial Sequence: Synthetic oligonucleotide
  Sense strand starting at position 3617 of SEQ ID NO: 587450
ggaucaaacugcucuguaa

SEQ ID NO: 793125 - RNA, 19 nt, Artificial Sequence
  Description of Artificial Sequence: Synthetic oligonucleotide
  Antisense strand to SEQ ID NO: 793124
uuacagagcaguuugaucc

SEQ ID NO: 793126 - RNA, 19 nt, Artificial Sequence
  Description of Artificial Sequence: Synthetic oligonucleotide
  Sense strand starting at position 3619 of SEQ ID NO: 587450
aucaaacugcucuguaagu

SEQ ID NO: 793127 - RNA, 19 nt, Artificial Sequence
  Description of Artificial Sequence: Synthetic oligonucleotide
  Antisense strand to SEQ ID NO: 793126
acuuacagagcaguuugau

SEQ ID NO: 793128 - RNA, 19 nt, Artificial Sequence
  Description of Artificial Sequence: Synthetic oligonucleotide
  Sense strand starting at position 3620 of SEQ ID NO: 587450
ucaaacugcucuguaagua

SEQ ID NO: 793129 - RNA, 19 nt, Artificial Sequence
  Description of Artificial Sequence: Synthetic oligonucleotide
  Antisense strand to SEQ ID NO: 793128
uacuuacagagcaguuuga

SEQ ID NO: 793130 - RNA, 19 nt, Artificial Sequence
  Description of Artificial Sequence: Synthetic oligonucleotide
  Sense strand starting at position 3981 of SEQ ID NO: 587450
uguuaugaauaugcucaaa

SEQ ID NO: 793131 - RNA, 19 nt, Artificial Sequence
  Description of Artificial Sequence: Synthetic oligonucleotide
  Antisense strand to SEQ ID NO: 793130
uuugagcauauucauaaca

SEQ ID NO: 793132 - RNA, 19 nt, Artificial Sequence
  Description of Artificial Sequence: Synthetic oligonucleotide
  Sense strand starting at position 3983 of SEQ ID NO: 587450
uuaugaauaugcucaaaga

SEQ ID NO: 793133 - RNA, 19 nt, Artificial Sequence
  Description of Artificial Sequence: Synthetic oligonucleotide
  Antisense strand to SEQ ID NO: 793132
ucuuugagcauauucauaa

SEQ ID NO: 793134 - RNA, 19 nt, Artificial Sequence
  Description of Artificial Sequence: Synthetic oligonucleotide
  Sense strand starting at position 104 of SEQ ID NO: 587451
ugagcuggaccuugggaaa

SEQ ID NO: 793135 - RNA, 19 nt, Artificial Sequence
  Description of Artificial Sequence: Synthetic oligonucleotide
  Antisense strand to SEQ ID NO: 793134
uuucccaagguccagcuca

SEQ ID NO: 793136 - RNA, 19 nt, Artificial Sequence
  Description of Artificial Sequence: Synthetic oligonucleotide
  Sense strand starting at position 213 of SEQ ID NO: 587451
gggaaaugcucugaagaag

SEQ ID NO: 793137 - RNA, 19 nt, Artificial Sequence
  Description of Artificial Sequence: Synthetic oligonucleotide
  Antisense strand to SEQ ID NO: 793136
cuucuucagagcauuuccc

SEQ ID NO: 793138 - RNA, 19 nt, Artificial Sequence
  Description of Artificial Sequence: Synthetic oligonucleotide
  Sense strand starting at position 241 of SEQ ID NO: 587451
ccaguuuccugcuccauca

SEQ ID NO: 793139 - RNA, 19 nt, Artificial Sequence
  Description of Artificial Sequence: Synthetic oligonucleotide
  Antisense strand to SEQ ID NO: 793138
ugauggagcaggaaacugg

SEQ ID NO: 793140 - RNA, 19 nt, Artificial Sequence
  Description of Artificial Sequence: Synthetic oligonucleotide
  Sense strand starting at position 251 of SEQ ID NO: 587451
gcuccaucaggucacaaau

SEQ ID NO: 793141 - RNA, 19 nt, Artificial Sequence
  Description of Artificial Sequence: Synthetic oligonucleotide
  Antisense strand to SEQ ID NO: 793140
auuugugaccugauggagc

SEQ ID NO: 793142 - RNA, 19 nt, Artificial Sequence
  Description of Artificial Sequence: Synthetic oligonucleotide
  Sense strand starting at position 262 of SEQ ID NO: 587451
ucacaaaugcugggaaguu

SEQ ID NO: 793143 - RNA, 19 nt, Artificial Sequence
  Description of Artificial Sequence: Synthetic oligonucleotide
  Antisense strand to SEQ ID NO: 793142
aacuucccagcauuuguga

SEQ ID NO: 793144 - RNA, 19 nt, Artificial Sequence
  Description of Artificial Sequence: Synthetic oligonucleotide
  Sense strand starting at position 448 of SEQ ID NO: 587451
guccuuaaacaacguaaau

SEQ ID NO: 793145 - RNA, 19 nt, Artificial Sequence
  Description of Artificial Sequence: Synthetic oligonucleotide
  Antisense strand to SEQ ID NO: 793144
auuuacguuguuuaaggac

SEQ ID NO: 793146 - RNA, 19 nt, Artificial Sequence
  Description of Artificial Sequence: Synthetic oligonucleotide
  Sense strand starting at position 506 of SEQ ID NO: 587451
ggcuguuucgagggaaggu

SEQ ID NO: 793147 - RNA, 19 nt, Artificial Sequence
  Description of Artificial Sequence: Synthetic oligonucleotide
  Antisense strand to SEQ ID NO: 793146
accuucccucgaaacagcc

SEQ ID NO: 793148 - RNA, 19 nt, Artificial Sequence
  Description of Artificial Sequence: Synthetic oligonucleotide
  Sense strand starting at position 523 of SEQ ID NO: 587451
gugauuagugaaugacuaa

SEQ ID NO: 793149 - RNA, 19 nt, Artificial Sequence
  Description of Artificial Sequence: Synthetic oligonucleotide
  Antisense strand to SEQ ID NO: 793148
uuagucauucacuaaucac

SEQ ID NO: 793150 - RNA, 19 nt, Artificial Sequence
  Description of Artificial Sequence: Synthetic oligonucleotide
  Sense strand starting at position 561 of SEQ ID NO: 587451
ucacuuuaauuuggugaau

SEQ ID NO: 793151 - RNA, 19 nt, Artificial Sequence
  Description of Artificial Sequence: Synthetic oligonucleotide
  Antisense strand to SEQ ID NO: 793150
auucaccaaauuaaaguga

SEQ ID NO: 793152 - RNA, 19 nt, Artificial Sequence
  Description of Artificial Sequence: Synthetic oligonucleotide
  Sense strand starting at position 598 of SEQ ID NO: 587451
uaaguugauuagguacauu

SEQ ID NO: 793153 - RNA, 19 nt, Artificial Sequence
  Description of Artificial Sequence: Synthetic oligonucleotide
  Antisense strand to SEQ ID NO: 793152
aauguaccuaaucaacuua

SEQ ID NO: 793154 - RNA, 19 nt, Artificial Sequence
  Description of Artificial Sequence: Synthetic oligonucleotide
  Sense strand starting at position 601 of SEQ ID NO: 587451
guugauuagguacauuaca

SEQ ID NO: 793155 - RNA, 19 nt, Artificial Sequence
  Description of Artificial Sequence: Synthetic oligonucleotide
  Antisense strand to SEQ ID NO: 793154
uguaauguaccuaaucaac

SEQ ID NO: 793156 - RNA, 19 nt, Artificial Sequence
  Description of Artificial Sequence: Synthetic oligonucleotide
  Sense strand starting at position 651 of SEQ ID NO: 587451
gcauuuauuccaggcuuag

SEQ ID NO: 793157 - RNA, 19 nt, Artificial Sequence
  Description of Artificial Sequence: Synthetic oligonucleotide
  Antisense strand to SEQ ID NO: 793156
cuaagccuggaauaaaugc

SEQ ID NO: 793158 - RNA, 19 nt, Artificial Sequence
  Description of Artificial Sequence: Synthetic oligonucleotide
  Sense strand starting at position 663 of SEQ ID NO: 587451
ggcuuagaagagugcaaac

SEQ ID NO: 793159 - RNA, 19 nt, Artificial Sequence
  Description of Artificial Sequence: Synthetic oligonucleotide
  Antisense strand to SEQ ID NO: 793158
guuugcacucuucuaagcc

SEQ ID NO: 793160 - RNA, 19 nt, Artificial Sequence
  Description of Artificial Sequence: Synthetic oligonucleotide
  Sense strand starting at position 674 of SEQ ID NO: 587451
gugcaaacauuugaaggaa

SEQ ID NO: 793161 - RNA, 19 nt, Artificial Sequence
  Description of Artificial Sequence: Synthetic oligonucleotide
  Antisense strand to SEQ ID NO: 793160
uuccuucaaauguuugcac

SEQ ID NO: 793162 - RNA, 19 nt, Artificial Sequence
  Description of Artificial Sequence: Synthetic oligonucleotide
  Sense strand starting at position 686 of SEQ ID NO: 587451
gaaggaauguaagagaaga

SEQ ID NO: 793163 - RNA, 19 nt, Artificial Sequence
  Description of Artificial Sequence: Synthetic oligonucleotide
  Antisense strand to SEQ ID NO: 793162
ucuucucuuacauuccuuc

SEQ ID NO: 793164 - RNA, 19 nt, Artificial Sequence
  Description of Artificial Sequence: Synthetic oligonucleotide
  Sense strand starting at position 877 of SEQ ID NO: 587451
ucuggugcucauuaacaua

SEQ ID NO: 793165 - RNA, 19 nt, Artificial Sequence
  Description of Artificial Sequence: Synthetic oligonucleotide
  Antisense strand to SEQ ID NO: 793164
uauguuaaugagcaccaga

SEQ ID NO: 793166 - RNA, 19 nt, Artificial Sequence
  Description of Artificial Sequence: Synthetic oligonucleotide
  Sense strand starting at position 885 of SEQ ID NO: 587451
ucauuaacauacgugaaug

SEQ ID NO: 793167 - RNA, 19 nt, Artificial Sequence
  Description of Artificial Sequence: Synthetic oligonucleotide
  Antisense strand to SEQ ID NO: 793166
cauucacguauguuaauga

SEQ ID NO: 793168 - RNA, 19 nt, Artificial Sequence
  Description of Artificial Sequence: Synthetic oligonucleotide
  Sense strand starting at position 917 of SEQ ID NO: 587451
cuagcaugugacugcuuaa

SEQ ID NO: 793169 - RNA, 19 nt, Artificial Sequence
  Description of Artificial Sequence: Synthetic oligonucleotide
  Antisense strand to SEQ ID NO: 793168
uuaagcagucacaugcuag

SEQ ID NO: 793170 - RNA, 19 nt, Artificial Sequence
  Description of Artificial Sequence: Synthetic oligonucleotide
  Sense strand starting at position 963 of SEQ ID NO: 587451
agcugaucaggugacaauu

SEQ ID NO: 793171 - RNA, 19 nt, Artificial Sequence
  Description of Artificial Sequence: Synthetic oligonucleotide
  Antisense strand to SEQ ID NO: 793170
aauugucaccugaucagcu

SEQ ID NO: 793172 - RNA, 19 nt, Artificial Sequence
  Description of Artificial Sequence: Synthetic oligonucleotide
  Sense strand starting at position 973 of SEQ ID NO: 587451
gugacaauucccugguccu

SEQ ID NO: 793173 - RNA, 19 nt, Artificial Sequence
  Description of Artificial Sequence: Synthetic oligonucleotide
  Antisense strand to SEQ ID NO: 793172
aggaccagggaauugucac

SEQ ID NO: 793174 - RNA, 19 nt, Artificial Sequence
  Description of Artificial Sequence: Synthetic oligonucleotide
  Sense strand starting at position 976 of SEQ ID NO: 587451
acaauucccugguccugaa

SEQ ID NO: 793175 - RNA, 19 nt, Artificial Sequence
  Description of Artificial Sequence: Synthetic oligonucleotide
  Antisense strand to SEQ ID NO: 793174
uucaggaccagggaauugu

SEQ ID NO: 793176 - RNA, 19 nt, Artificial Sequence
  Description of Artificial Sequence: Synthetic oligonucleotide
  Sense strand starting at position 1065 of SEQ ID NO: 587451
cugccucacugagaaauuu

SEQ ID NO: 793177 - RNA, 19 nt, Artificial Sequence
  Description of Artificial Sequence: Synthetic oligonucleotide
  Antisense strand to SEQ ID NO: 793176
aaauuucucagugaggcag

SEQ ID NO: 793178 - RNA, 19 nt, Artificial Sequence
  Description of Artificial Sequence: Synthetic oligonucleotide
  Sense strand starting at position 1112 of SEQ ID NO: 587451
auaguuugccauuaucuuu

SEQ ID NO: 793179 - RNA, 19 nt, Artificial Sequence
  Description of Artificial Sequence: Synthetic oligonucleotide
  Antisense strand to SEQ ID NO: 793178
aaagauaauggcaaacuau

SEQ ID NO: 793180 - RNA, 19 nt, Artificial Sequence
  Description of Artificial Sequence: Synthetic oligonucleotide
  Sense strand starting at position 1187 of SEQ ID NO: 587451
ucaucagcgccugaauuaa

SEQ ID NO: 793181 - RNA, 19 nt, Artificial Sequence
  Description of Artificial Sequence: Synthetic oligonucleotide
  Antisense strand to SEQ ID NO: 793180
uuaauucaggcgcugauga

SEQ ID NO: 793182 - RNA, 19 nt, Artificial Sequence
  Description of Artificial Sequence: Synthetic oligonucleotide
  Sense strand starting at position 2944 of SEQ ID NO: 587451
ggacccuccuccuugaauu

SEQ ID NO: 793183 - RNA, 19 nt, Artificial Sequence
  Description of Artificial Sequence: Synthetic oligonucleotide
  Antisense strand to SEQ ID NO: 793182
aauucaaggaggagggucc

SEQ ID NO: 793184 - RNA, 19 nt, Artificial Sequence
  Description of Artificial Sequence: Synthetic oligonucleotide
  Sense strand starting at position 2956 of SEQ ID NO: 587451
uugaauucguuucuuccaa

SEQ ID NO: 793185 - RNA, 19 nt, Artificial Sequence
  Description of Artificial Sequence: Synthetic oligonucleotide
  Antisense strand to SEQ ID NO: 793184
uuggaagaaacgaauucaa

SEQ ID NO: 793186 - RNA, 19 nt, Artificial Sequence
  Description of Artificial Sequence: Synthetic oligonucleotide
  Sense strand starting at position 2957 of SEQ ID NO: 587451
ugaauucguuucuuccaaa

SEQ ID NO: 793187 - RNA, 19 nt, Artificial Sequence
  Description of Artificial Sequence: Synthetic oligonucleotide
  Antisense strand to SEQ ID NO: 793186
uuuggaagaaacgaauuca

SEQ ID NO: 793188 - RNA, 19 nt, Artificial Sequence
  Description of Artificial Sequence: Synthetic oligonucleotide
  Sense strand starting at position 3075 of SEQ ID NO: 587451
ggccuaacuguagagugau

SEQ ID NO: 793189 - RNA, 19 nt, Artificial Sequence
  Description of Artificial Sequence: Synthetic oligonucleotide
  Antisense strand to SEQ ID NO: 793188
aucacucuacaguuaggcc

SEQ ID NO: 793190 - RNA, 19 nt, Artificial Sequence
  Description of Artificial Sequence: Synthetic oligonucleotide
  Sense strand starting at position 3164 of SEQ ID NO: 587451
aacgaugucccaggagaac

SEQ ID NO: 793191 - RNA, 19 nt, Artificial Sequence
  Description of Artificial Sequence: Synthetic oligonucleotide
  Antisense strand to SEQ ID NO: 793190
guucuccugggacaucguu

SEQ ID NO: 793192 - RNA, 19 nt, Artificial Sequence
  Description of Artificial Sequence: Synthetic oligonucleotide
  Sense strand starting at position 3284 of SEQ ID NO: 587451
ccugauaacuuugcauguu

SEQ ID NO: 793193 - RNA, 19 nt, Artificial Sequence
  Description of Artificial Sequence: Synthetic oligonucleotide
  Antisense strand to SEQ ID NO: 793192
aacaugcaaaguuaucagg

SEQ ID NO: 793194 - RNA, 19 nt, Artificial Sequence
  Description of Artificial Sequence: Synthetic oligonucleotide
  Sense strand starting at position 3322 of SEQ ID NO: 587451
guuguuacacgauguagag

SEQ ID NO: 793195 - RNA, 19 nt, Artificial Sequence
  Description of Artificial Sequence: Synthetic oligonucleotide
  Antisense strand to SEQ ID NO: 793194
cucuacaucguguaacaac

SEQ ID NO: 793196 - RNA, 19 nt, Artificial Sequence
  Description of Artificial Sequence: Synthetic oligonucleotide
  Sense strand starting at position 3347 of SEQ ID NO: 587451
ggugaaaugaucugaugca

SEQ ID NO: 793197 - RNA, 19 nt, Artificial Sequence
  Description of Artificial Sequence: Synthetic oligonucleotide
  Antisense strand to SEQ ID NO: 793196
ugcaucagaucauuucacc

SEQ ID NO: 793198 - RNA, 19 nt, Artificial Sequence
  Description of Artificial Sequence: Synthetic oligonucleotide
  Sense strand starting at position 3547 of SEQ ID NO: 587451
gucauuuagcguugugaug

SEQ ID NO: 793199 - RNA, 19 nt, Artificial Sequence
  Description of Artificial Sequence: Synthetic oligonucleotide
  Antisense strand to SEQ ID NO: 793198
caucacaacgcuaaaugac

SEQ ID NO: 793200 - RNA, 19 nt, Artificial Sequence
  Description of Artificial Sequence: Synthetic oligonucleotide
  Sense strand starting at position 3553 of SEQ ID NO: 587451
uagcguugugaugacuaga

SEQ ID NO: 793201 - RNA, 19 nt, Artificial Sequence
  Description of Artificial Sequence: Synthetic oligonucleotide
  Antisense strand to SEQ ID NO: 793200
ucuagucaucacaacgcua

SEQ ID NO: 793202 - RNA, 19 nt, Artificial Sequence
  Description of Artificial Sequence: Synthetic oligonucleotide
  Sense strand starting at position 3556 of SEQ ID NO: 587451
cguugugaugacuagaguu

SEQ ID NO: 793203 - RNA, 19 nt, Artificial Sequence
  Description of Artificial Sequence: Synthetic oligonucleotide
  Antisense strand to SEQ ID NO: 793202
aacucuagucaucacaacg

SEQ ID NO: 793204 - RNA, 19 nt, Artificial Sequence
  Description of Artificial Sequence: Synthetic oligonucleotide
  Sense strand starting at position 3751 of SEQ ID NO: 587451
aauguagaauggcuguaaa

SEQ ID NO: 793205 - RNA, 19 nt, Artificial Sequence
  Description of Artificial Sequence: Synthetic oligonucleotide
  Antisense strand to SEQ ID NO: 793204
uuuacagccauucuacauu

SEQ ID NO: 793206 - RNA, 19 nt, Artificial Sequence
  Description of Artificial Sequence: Synthetic oligonucleotide
  Sense strand starting at position 3866 of SEQ ID NO: 587451
ucaaguuugaggugcucau

SEQ ID NO: 793207 - RNA, 19 nt, Artificial Sequence
  Description of Artificial Sequence: Synthetic oligonucleotide
  Antisense strand to SEQ ID NO: 793206
augagcaccucaaacuuga

SEQ ID NO: 793208 - RNA, 19 nt, Artificial Sequence
  Description of Artificial Sequence: Synthetic oligonucleotide
  Sense strand starting at position 3870 of SEQ ID NO: 587451
guuugaggugcucauaaga

SEQ ID NO: 793209 - RNA, 19 nt, Artificial Sequence
  Description of Artificial Sequence: Synthetic oligonucleotide
  Antisense strand to SEQ ID NO: 793208
ucuuaugagcaccucaaac

SEQ ID NO: 793210 - RNA, 19 nt, Artificial Sequence
  Description of Artificial Sequence: Synthetic oligonucleotide
  Sense strand starting at position 3877 of SEQ ID NO: 587451
gugcucauaagaugaguaa

SEQ ID NO: 793211 - RNA, 19 nt, Artificial Sequence
  Description of Artificial Sequence: Synthetic oligonucleotide
  Antisense strand to SEQ ID NO: 793210
uuacucaucuuaugagcac

SEQ ID NO: 793212 - RNA, 19 nt, Artificial Sequence
  Description of Artificial Sequence: Synthetic oligonucleotide
  Sense strand starting at position 3919 of SEQ ID NO: 587451
aggcgugaacuuuagaaag

SEQ ID NO: 793213 - RNA, 19 nt, Artificial Sequence
  Description of Artificial Sequence: Synthetic oligonucleotide
  Antisense strand to SEQ ID NO: 793212
cuuucuaaaguucacgccu

SEQ ID NO: 793214 - RNA, 19 nt, Artificial Sequence
  Description of Artificial Sequence: Synthetic oligonucleotide
  Sense strand starting at position 122 of SEQ ID NO: 587452
auguaauggugacucagua

SEQ ID NO: 793215 - RNA, 19 nt, Artificial Sequence
  Description of Artificial Sequence: Synthetic oligonucleotide
  Antisense strand to SEQ ID NO: 793214
uacugagucaccauuacau

SEQ ID NO: 793216 - RNA, 19 nt, Artificial Sequence
  Description of Artificial Sequence: Synthetic oligonucleotide
  Sense strand starting at position 147 of SEQ ID NO: 587452
uuguuaaaccaggaugcua

SEQ ID NO: 793217 - RNA, 19 nt, Artificial Sequence
  Description of Artificial Sequence: Synthetic oligonucleotide
  Antisense strand to SEQ ID NO: 793216
uagcauccugguuuaacaa

SEQ ID NO: 793218 - RNA, 19 nt, Artificial Sequence
  Description of Artificial Sequence: Synthetic oligonucleotide
  Sense strand starting at position 160 of SEQ ID NO: 587452
augcuacuccuaggauaac

SEQ ID NO: 793219 - RNA, 19 nt, Artificial Sequence
  Description of Artificial Sequence: Synthetic oligonucleotide
  Antisense strand to SEQ ID NO: 793218
guuauccuaggaguagcau

SEQ ID NO: 793220 - RNA, 19 nt, Artificial Sequence
  Description of Artificial Sequence: Synthetic oligonucleotide
  Sense strand starting at position 342 of SEQ ID NO: 587452
cggagaaacuccuugcucu

SEQ ID NO: 793221 - RNA, 19 nt, Artificial Sequence
  Description of Artificial Sequence: Synthetic oligonucleotide
  Antisense strand to SEQ ID NO: 793220
agagcaaggaguuucuccg

SEQ ID NO: 793222 - RNA, 19 nt, Artificial Sequence
  Description of Artificial Sequence: Synthetic oligonucleotide
  Sense strand starting at position 343 of SEQ ID NO: 587452
ggagaaacuccuugcucug

SEQ ID NO: 793223 - RNA, 19 nt, Artificial Sequence
  Description of Artificial Sequence: Synthetic oligonucleotide
  Antisense strand to SEQ ID NO: 793222
cagagcaaggaguuucucc

SEQ ID NO: 793224 - RNA, 19 nt, Artificial Sequence
  Description of Artificial Sequence: Synthetic oligonucleotide
  Sense strand starting at position 365 of SEQ ID NO: 587452
ucuuguugcagguauggaa

SEQ ID NO: 793225 - RNA, 19 nt, Artificial Sequence
  Description of Artificial Sequence: Synthetic oligonucleotide
  Antisense strand to SEQ ID NO: 793224
uuccauaccugcaacaaga

SEQ ID NO: 793226 - RNA, 19 nt, Artificial Sequence
  Description of Artificial Sequence: Synthetic oligonucleotide
  Sense strand starting at position 383 of SEQ ID NO: 587452
agcucuggguucuuuagga

SEQ ID NO: 793227 - RNA, 19 nt, Artificial Sequence
  Description of Artificial Sequence: Synthetic oligonucleotide
  Antisense strand to SEQ ID NO: 793226
uccuaaagaacccagagcu

SEQ ID NO: 793228 - RNA, 19 nt, Artificial Sequence
  Description of Artificial Sequence: Synthetic oligonucleotide
  Sense strand starting at position 411 of SEQ ID NO: 587452
gugagcacugugcauuaga

SEQ ID NO: 793229 - RNA, 19 nt, Artificial Sequence
  Description of Artificial Sequence: Synthetic oligonucleotide
  Antisense strand to SEQ ID NO: 793228
ucuaaugcacagugcucac

SEQ ID NO: 793230 - RNA, 19 nt, Artificial Sequence
  Description of Artificial Sequence: Synthetic oligonucleotide
  Sense strand starting at position 414 of SEQ ID NO: 587452
agcacugugcauuagaaau

SEQ ID NO: 793231 - RNA, 19 nt, Artificial Sequence
  Description of Artificial Sequence: Synthetic oligonucleotide
  Antisense strand to SEQ ID NO: 793230
auuucuaaugcacagugcu

SEQ ID NO: 793232 - RNA, 19 nt, Artificial Sequence
  Description of Artificial Sequence: Synthetic oligonucleotide
  Sense strand starting at position 452 of SEQ ID NO: 587452
cauuguugucagugagaag

SEQ ID NO: 793233 - RNA, 19 nt, Artificial Sequence
  Description of Artificial Sequence: Synthetic oligonucleotide
  Antisense strand to SEQ ID NO: 793232
cuucucacugacaacaaug

SEQ ID NO: 793234 - RNA, 19 nt, Artificial Sequence
  Description of Artificial Sequence: Synthetic oligonucleotide
  Sense strand starting at position 499 of SEQ ID NO: 587452
uuuguuuacuuccugacuu

SEQ ID NO: 793235 - RNA, 19 nt, Artificial Sequence
  Description of Artificial Sequence: Synthetic oligonucleotide
  Antisense strand to SEQ ID NO: 793234
aagucaggaaguaaacaaa

SEQ ID NO: 793236 - RNA, 19 nt, Artificial Sequence
  Description of Artificial Sequence: Synthetic oligonucleotide
  Sense strand starting at position 501 of SEQ ID NO: 587452
uguuuacuuccugacuugu

SEQ ID NO: 793237 - RNA, 19 nt, Artificial Sequence
  Description of Artificial Sequence: Synthetic oligonucleotide
  Antisense strand to SEQ ID NO: 793236
acaagucaggaaguaaaca

SEQ ID NO: 793238 - RNA, 19 nt, Artificial Sequence
  Description of Artificial Sequence: Synthetic oligonucleotide
  Sense strand starting at position 503 of SEQ ID NO: 587452
uuuacuuccugacuuguca

SEQ ID NO: 793239 - RNA, 19 nt, Artificial Sequence
  Description of Artificial Sequence: Synthetic oligonucleotide
  Antisense strand to SEQ ID NO: 793238
ugacaagucaggaaguaaa

SEQ ID NO: 793240 - RNA, 19 nt, Artificial Sequence
  Description of Artificial Sequence: Synthetic oligonucleotide
  Sense strand starting at position 516 of SEQ ID NO: 587452
uugucauugcuuuccguua

SEQ ID NO: 793241 - RNA, 19 nt, Artificial Sequence
  Description of Artificial Sequence: Synthetic oligonucleotide
  Antisense strand to SEQ ID NO: 793240
uaacggaaagcaaugacaa

SEQ ID NO: 793242 - RNA, 19 nt, Artificial Sequence
  Description of Artificial Sequence: Synthetic oligonucleotide
  Sense strand starting at position 527 of SEQ ID NO: 587452
uuccguuaucuauggaaac

SEQ ID NO: 793243 - RNA, 19 nt, Artificial Sequence
  Description of Artificial Sequence: Synthetic oligonucleotide
  Antisense strand to SEQ ID NO: 793242
guuuccauagauaacggaa

SEQ ID NO: 793244 - RNA, 19 nt, Artificial Sequence
  Description of Artificial Sequence: Synthetic oligonucleotide
  Sense strand starting at position 669 of SEQ ID NO: 587452
ggaagacauuucuguuacu

SEQ ID NO: 793245 - RNA, 19 nt, Artificial Sequence
  Description of Artificial Sequence: Synthetic oligonucleotide
  Antisense strand to SEQ ID NO: 793244
aguaacagaaaugucuucc

SEQ ID NO: 793246 - RNA, 19 nt, Artificial Sequence
  Description of Artificial Sequence: Synthetic oligonucleotide
  Sense strand starting at position 788 of SEQ ID NO: 587452
gacggaguuugcuuaaccu

SEQ ID NO: 793247 - RNA, 19 nt, Artificial Sequence
  Description of Artificial Sequence: Synthetic oligonucleotide
  Antisense strand to SEQ ID NO: 793246
agguuaagcaaacuccguc

SEQ ID NO: 793248 - RNA, 19 nt, Artificial Sequence
  Description of Artificial Sequence: Synthetic oligonucleotide
  Sense strand starting at position 912 of SEQ ID NO: 587452
aguacuuaucacugucaga

SEQ ID NO: 793249 - RNA, 19 nt, Artificial Sequence
  Description of Artificial Sequence: Synthetic oligonucleotide
  Antisense strand to SEQ ID NO: 793248
ucugacagugauaaguacu

SEQ ID NO: 793250 - RNA, 19 nt, Artificial Sequence
  Description of Artificial Sequence: Synthetic oligonucleotide
  Sense strand starting at position 991 of SEQ ID NO: 587452
caaacagggucacuuguau

SEQ ID NO: 793251 - RNA, 19 nt, Artificial Sequence
  Description of Artificial Sequence: Synthetic oligonucleotide
  Antisense strand to SEQ ID NO: 793250
auacaagugacccuguuug

SEQ ID NO: 793252 - RNA, 19 nt, Artificial Sequence
  Description of Artificial Sequence: Synthetic oligonucleotide
  Sense strand starting at position 1078 of SEQ ID NO: 587452
cagcaagagucagugauga

SEQ ID NO: 793253 - RNA, 19 nt, Artificial Sequence
  Description of Artificial Sequence: Synthetic oligonucleotide
  Antisense strand to SEQ ID NO: 793252
ucaucacugacucuugcug

SEQ ID NO: 793254 - RNA, 19 nt, Artificial Sequence
  Description of Artificial Sequence: Synthetic oligonucleotide
  Sense strand starting at position 1193 of SEQ ID NO: 587452
agugaaugcuccucuggau

SEQ ID NO: 793255 - RNA, 19 nt, Artificial Sequence
  Description of Artificial Sequence: Synthetic oligonucleotide
  Antisense strand to SEQ ID NO: 793254
auccagaggagcauucacu

SEQ ID NO: 793256 - RNA, 19 nt, Artificial Sequence
  Description of Artificial Sequence: Synthetic oligonucleotide
  Sense strand starting at position 1206 of SEQ ID NO: 587452
cuggauucuccgcaucuuu

SEQ ID NO: 793257 - RNA, 19 nt, Artificial Sequence
  Description of Artificial Sequence: Synthetic oligonucleotide
  Antisense strand to SEQ ID NO: 793256
aaagaugcggagaauccag

SEQ ID NO: 793258 - RNA, 19 nt, Artificial Sequence
  Description of Artificial Sequence: Synthetic oligonucleotide
  Sense strand starting at position 1244 of SEQ ID NO: 587452
acgcuaaugggaggguaaa

SEQ ID NO: 793259 - RNA, 19 nt, Artificial Sequence
  Description of Artificial Sequence: Synthetic oligonucleotide
  Antisense strand to SEQ ID NO: 793258
uuuacccucccauuagcgu

SEQ ID NO: 793260 - RNA, 19 nt, Artificial Sequence
  Description of Artificial Sequence: Synthetic oligonucleotide
  Sense strand starting at position 1245 of SEQ ID NO: 587452
cgcuaaugggaggguaaau

SEQ ID NO: 793261 - RNA, 19 nt, Artificial Sequence
  Description of Artificial Sequence: Synthetic oligonucleotide
  Antisense strand to SEQ ID NO: 793260
auuuacccucccauuagcg

SEQ ID NO: 793262 - RNA, 19 nt, Artificial Sequence
  Description of Artificial Sequence: Synthetic oligonucleotide
  Sense strand starting at position 1307 of SEQ ID NO: 587452
gcggaagaucucgcuuugu

SEQ ID NO: 793263 - RNA, 19 nt, Artificial Sequence
  Description of Artificial Sequence: Synthetic oligonucleotide
  Antisense strand to SEQ ID NO: 793262
acaaagcgagaucuuccgc

SEQ ID NO: 793264 - RNA, 19 nt, Artificial Sequence
  Description of Artificial Sequence: Synthetic oligonucleotide
  Sense strand starting at position 1443 of SEQ ID NO: 587452
acauuucuccuguguuuaa

SEQ ID NO: 793265 - RNA, 19 nt, Artificial Sequence
  Description of Artificial Sequence: Synthetic oligonucleotide
  Antisense strand to SEQ ID NO: 793264
uuaaacacaggagaaaugu

SEQ ID NO: 793266 - RNA, 19 nt, Artificial Sequence
  Description of Artificial Sequence: Synthetic oligonucleotide
  Sense strand starting at position 1622 of SEQ ID NO: 587452
gcuccagauuuggaaggaa

SEQ ID NO: 793267 - RNA, 19 nt, Artificial Sequence
  Description of Artificial Sequence: Synthetic oligonucleotide
  Antisense strand to SEQ ID NO: 793266
uuccuuccaaaucuggagc

SEQ ID NO: 793268 - RNA, 19 nt, Artificial Sequence
  Description of Artificial Sequence: Synthetic oligonucleotide
  Sense strand starting at position 2229 of SEQ ID NO: 587452
ggagguaucaucugacuca

SEQ ID NO: 793269 - RNA, 19 nt, Artificial Sequence
  Description of Artificial Sequence: Synthetic oligonucleotide
  Antisense strand to SEQ ID NO: 793268
ugagucagaugauaccucc

SEQ ID NO: 793270 - RNA, 19 nt, Artificial Sequence
  Description of Artificial Sequence: Synthetic oligonucleotide
  Sense strand starting at position 2232 of SEQ ID NO: 587452
gguaucaucugacucauca

SEQ ID NO: 793271 - RNA, 19 nt, Artificial Sequence
  Description of Artificial Sequence: Synthetic oligonucleotide
  Antisense strand to SEQ ID NO: 793270
ugaugagucagaugauacc

SEQ ID NO: 793272 - RNA, 19 nt, Artificial Sequence
  Description of Artificial Sequence: Synthetic oligonucleotide
  Sense strand starting at position 2288 of SEQ ID NO: 587452
gggcuauugauugguagac

SEQ ID NO: 793273 - RNA, 19 nt, Artificial Sequence
  Description of Artificial Sequence: Synthetic oligonucleotide
  Antisense strand to SEQ ID NO: 793272
gucuaccaaucaauagccc

SEQ ID NO: 793274 - RNA, 19 nt, Artificial Sequence
  Description of Artificial Sequence: Synthetic oligonucleotide
  Sense strand starting at position 2289 of SEQ ID NO: 587452
ggcuauugauugguagacu

SEQ ID NO: 793275 - RNA, 19 nt, Artificial Sequence
  Description of Artificial Sequence: Synthetic oligonucleotide
  Antisense strand to SEQ ID NO: 793274
agucuaccaaucaauagcc

SEQ ID NO: 793276 - RNA, 19 nt, Artificial Sequence
  Description of Artificial Sequence: Synthetic oligonucleotide
  Sense strand starting at position 2306 of SEQ ID NO: 587452
cuagaugugcgaugacagu

SEQ ID NO: 793277 - RNA, 19 nt, Artificial Sequence
  Description of Artificial Sequence: Synthetic oligonucleotide
  Antisense strand to SEQ ID NO: 793276
acugucaucgcacaucuag

SEQ ID NO: 793278 - RNA, 19 nt, Artificial Sequence
  Description of Artificial Sequence: Synthetic oligonucleotide
  Sense strand starting at position 2369 of SEQ ID NO: 587452
uugauacaguacgauuuaa

SEQ ID NO: 793279 - RNA, 19 nt, Artificial Sequence
  Description of Artificial Sequence: Synthetic oligonucleotide
  Antisense strand to SEQ ID NO: 793278
uuaaaucguacuguaucaa

SEQ ID NO: 793280 - RNA, 19 nt, Artificial Sequence
  Description of Artificial Sequence: Synthetic oligonucleotide
  Sense strand starting at position 2437 of SEQ ID NO: 587452
guugcauuuaguugugucu

SEQ ID NO: 793281 - RNA, 19 nt, Artificial Sequence
  Description of Artificial Sequence: Synthetic oligonucleotide
  Antisense strand to SEQ ID NO: 793280
agacacaacuaaaugcaac

SEQ ID NO: 793282 - RNA, 19 nt, Artificial Sequence
  Description of Artificial Sequence: Synthetic oligonucleotide
  Sense strand starting at position 2493 of SEQ ID NO: 587452
ucuugcuuugucguuauga

SEQ ID NO: 793283 - RNA, 19 nt, Artificial Sequence
  Description of Artificial Sequence: Synthetic oligonucleotide
  Antisense strand to SEQ ID NO: 793282
ucauaacgacaaagcaaga

SEQ ID NO: 793284 - RNA, 19 nt, Artificial Sequence
  Description of Artificial Sequence: Synthetic oligonucleotide
  Sense strand starting at position 2503 of SEQ ID NO: 587452
ucguuaugacuuugacauu

SEQ ID NO: 793285 - RNA, 19 nt, Artificial Sequence
  Description of Artificial Sequence: Synthetic oligonucleotide
  Antisense strand to SEQ ID NO: 793284
aaugucaaagucauaacga

SEQ ID NO: 793286 - RNA, 19 nt, Artificial Sequence
  Description of Artificial Sequence: Synthetic oligonucleotide
  Sense strand starting at position 3833 of SEQ ID NO: 587452
ucacuuacaucagugagca

SEQ ID NO: 793287 - RNA, 19 nt, Artificial Sequence
  Description of Artificial Sequence: Synthetic oligonucleotide
  Antisense strand to SEQ ID NO: 793286
ugcucacugauguaaguga

SEQ ID NO: 793288 - RNA, 19 nt, Artificial Sequence
  Description of Artificial Sequence: Synthetic oligonucleotide
  Sense strand starting at position 3883 of SEQ ID NO: 587452
uguuaccaucugugagagu

SEQ ID NO: 793289 - RNA, 19 nt, Artificial Sequence
  Description of Artificial Sequence: Synthetic oligonucleotide
  Antisense strand to SEQ ID NO: 793288
acucucacagaugguaaca

SEQ ID NO: 793290 - RNA, 19 nt, Artificial Sequence
  Description of Artificial Sequence: Synthetic oligonucleotide
  Sense strand starting at position 3941 of SEQ ID NO: 587452
gcuugaaguacagacaugu

SEQ ID NO: 793291 - RNA, 19 nt, Artificial Sequence
  Description of Artificial Sequence: Synthetic oligonucleotide
  Antisense strand to SEQ ID NO: 793290
acaugucuguacuucaagc

SEQ ID NO: 793292 - RNA, 19 nt, Artificial Sequence
  Description of Artificial Sequence: Synthetic oligonucleotide
  Sense strand starting at position 3965 of SEQ ID NO: 587452
cucauaguucuugagauua

SEQ ID NO: 793293 - RNA, 19 nt, Artificial Sequence
  Description of Artificial Sequence: Synthetic oligonucleotide
  Antisense strand to SEQ ID NO: 793292
uaaucucaagaacuaugag

SEQ ID NO: 793294 - RNA, 19 nt, Artificial Sequence
  Description of Artificial Sequence: Synthetic oligonucleotide
  Sense strand starting at position 195 of SEQ ID NO: 587453
ucaaguugccaucaagaac

SEQ ID NO: 793295 - RNA, 19 nt, Artificial Sequence
  Description of Artificial Sequence: Synthetic oligonucleotide
  Antisense strand to SEQ ID NO: 793294
guucuugauggcaacuuga

SEQ ID NO: 793296 - RNA, 19 nt, Artificial Sequence
  Description of Artificial Sequence: Synthetic oligonucleotide
  Sense strand starting at position 364 of SEQ ID NO: 587453
agcaccaguuuccuuuaga

SEQ ID NO: 793297 - RNA, 19 nt, Artificial Sequence
  Description of Artificial Sequence: Synthetic oligonucleotide
  Antisense strand to SEQ ID NO: 793296
ucuaaaggaaacuggugcu

SEQ ID NO: 793298 - RNA, 19 nt, Artificial Sequence
  Description of Artificial Sequence: Synthetic oligonucleotide
  Sense strand starting at position 365 of SEQ ID NO: 587453
gcaccaguuuccuuuagau

SEQ ID NO: 793299 - RNA, 19 nt, Artificial Sequence
  Description of Artificial Sequence: Synthetic oligonucleotide
  Antisense strand to SEQ ID NO: 793298
aucuaaaggaaacuggugc

SEQ ID NO: 793300 - RNA, 19 nt, Artificial Sequence
  Description of Artificial Sequence: Synthetic oligonucleotide
  Sense strand starting at position 437 of SEQ ID NO: 587453
uggacuacuaagugaaguu

SEQ ID NO: 793301 - RNA, 19 nt, Artificial Sequence
  Description of Artificial Sequence: Synthetic oligonucleotide
  Antisense strand to SEQ ID NO: 793300
aacuucacuuaguagucca

SEQ ID NO: 793302 - RNA, 19 nt, Artificial Sequence
  Description of Artificial Sequence: Synthetic oligonucleotide
  Sense strand starting at position 927 of SEQ ID NO: 587453
ccucguucucagucaacgu

SEQ ID NO: 793303 - RNA, 19 nt, Artificial Sequence
  Description of Artificial Sequence: Synthetic oligonucleotide
  Antisense strand to SEQ ID NO: 793302
acguugacugagaacgagg

SEQ ID NO: 793304 - RNA, 19 nt, Artificial Sequence
  Description of Artificial Sequence: Synthetic oligonucleotide
  Sense strand starting at position 928 of SEQ ID NO: 587453
cucguucucagucaacguu

SEQ ID NO: 793305 - RNA, 19 nt, Artificial Sequence
  Description of Artificial Sequence: Synthetic oligonucleotide
  Antisense strand to SEQ ID NO: 793304
aacguugacugagaacgag

SEQ ID NO: 793306 - RNA, 19 nt, Artificial Sequence
  Description of Artificial Sequence: Synthetic oligonucleotide
  Sense strand starting at position 1004 of SEQ ID NO: 587453
ggauacagccguugcucaa

SEQ ID NO: 793307 - RNA, 19 nt, Artificial Sequence
  Description of Artificial Sequence: Synthetic oligonucleotide
  Antisense strand to SEQ ID NO: 793306
uugagcaacggcuguaucc

SEQ ID NO: 793308 - RNA, 19 nt, Artificial Sequence
  Description of Artificial Sequence: Synthetic oligonucleotide
  Sense strand starting at position 1011 of SEQ ID NO: 587453
gccguugcucaagggagaa

SEQ ID NO: 793309 - RNA, 19 nt, Artificial Sequence
  Description of Artificial Sequence: Synthetic oligonucleotide
  Antisense strand to SEQ ID NO: 793308
uucucccuugagcaacggc

SEQ ID NO: 793310 - RNA, 19 nt, Artificial Sequence
  Description of Artificial Sequence: Synthetic oligonucleotide
  Sense strand starting at position 1060 of SEQ ID NO: 587453
agccuugucuuccugugaa

SEQ ID NO: 793311 - RNA, 19 nt, Artificial Sequence
  Description of Artificial Sequence: Synthetic oligonucleotide
  Antisense strand to SEQ ID NO: 793310
uucacaggaagacaaggcu

SEQ ID NO: 793312 - RNA, 19 nt, Artificial Sequence
  Description of Artificial Sequence: Synthetic oligonucleotide
  Sense strand starting at position 1063 of SEQ ID NO: 587453
cuugucuuccugugaacac

SEQ ID NO: 793313 - RNA, 19 nt, Artificial Sequence
  Description of Artificial Sequence: Synthetic oligonucleotide
  Antisense strand to SEQ ID NO: 793312
guguucacaggaagacaag

SEQ ID NO: 793314 - RNA, 19 nt, Artificial Sequence
  Description of Artificial Sequence: Synthetic oligonucleotide
  Sense strand starting at position 1133 of SEQ ID NO: 587453
ugcaguacuuuggcccaaa

SEQ ID NO: 793315 - RNA, 19 nt, Artificial Sequence
  Description of Artificial Sequence: Synthetic oligonucleotide
  Antisense strand to SEQ ID NO: 793314
uuugggccaaaguacugca

SEQ ID NO: 793316 - RNA, 19 nt, Artificial Sequence
  Description of Artificial Sequence: Synthetic oligonucleotide
  Sense strand starting at position 1134 of SEQ ID NO: 587453
gcaguacuuuggcccaaau

SEQ ID NO: 793317 - RNA, 19 nt, Artificial Sequence
  Description of Artificial Sequence: Synthetic oligonucleotide
  Antisense strand to SEQ ID NO: 793316
auuugggccaaaguacugc

SEQ ID NO: 793318 - RNA, 19 nt, Artificial Sequence
  Description of Artificial Sequence: Synthetic oligonucleotide
  Sense strand starting at position 1136 of SEQ ID NO: 587453
aguacuuuggcccaaauua

SEQ ID NO: 793319 - RNA, 19 nt, Artificial Sequence
  Description of Artificial Sequence: Synthetic oligonucleotide
  Antisense strand to SEQ ID NO: 793318
uaauuugggccaaaguacu

SEQ ID NO: 793320 - RNA, 19 nt, Artificial Sequence
  Description of Artificial Sequence: Synthetic oligonucleotide
  Sense strand starting at position 1174 of SEQ ID NO: 587453
ggcaguuguggcuauguaa

SEQ ID NO: 793321 - RNA, 19 nt, Artificial Sequence
  Description of Artificial Sequence: Synthetic oligonucleotide
  Antisense strand to SEQ ID NO: 793320
uuacauagccacaacugcc

SEQ ID NO: 793322 - RNA, 19 nt, Artificial Sequence
  Description of Artificial Sequence: Synthetic oligonucleotide
  Sense strand starting at position 1187 of SEQ ID NO: 587453
auguaauucuggucagagu

SEQ ID NO: 793323 - RNA, 19 nt, Artificial Sequence
  Description of Artificial Sequence: Synthetic oligonucleotide
  Antisense strand to SEQ ID NO: 793322
acucugaccagaauuacau

SEQ ID NO: 793324 - RNA, 19 nt, Artificial Sequence
  Description of Artificial Sequence: Synthetic oligonucleotide
  Sense strand starting at position 1188 of SEQ ID NO: 587453
uguaauucuggucagaguc

SEQ ID NO: 793325 - RNA, 19 nt, Artificial Sequence
  Description of Artificial Sequence: Synthetic oligonucleotide
  Antisense strand to SEQ ID NO: 793324
gacucugaccagaauuaca

SEQ ID NO: 793326 - RNA, 19 nt, Artificial Sequence
  Description of Artificial Sequence: Synthetic oligonucleotide
  Sense strand starting at position 1526 of SEQ ID NO: 587453
gauccugaacgcugaauga

SEQ ID NO: 793327 - RNA, 19 nt, Artificial Sequence
  Description of Artificial Sequence: Synthetic oligonucleotide
  Antisense strand to SEQ ID NO: 793326
ucauucagcguucaggauc

SEQ ID NO: 793328 - RNA, 19 nt, Artificial Sequence
  Description of Artificial Sequence: Synthetic oligonucleotide
  Sense strand starting at position 1533 of SEQ ID NO: 587453
aacgcugaaugaucuggaa

SEQ ID NO: 793329 - RNA, 19 nt, Artificial Sequence
  Description of Artificial Sequence: Synthetic oligonucleotide
  Antisense strand to SEQ ID NO: 793328
uuccagaucauucagcguu

SEQ ID NO: 793330 - RNA, 19 nt, Artificial Sequence
  Description of Artificial Sequence: Synthetic oligonucleotide
  Sense strand starting at position 1535 of SEQ ID NO: 587453
cgcugaaugaucuggaacu

SEQ ID NO: 793331 - RNA, 19 nt, Artificial Sequence
  Description of Artificial Sequence: Synthetic oligonucleotide
  Antisense strand to SEQ ID NO: 793330
aguuccagaucauucagcg

SEQ ID NO: 793332 - RNA, 19 nt, Artificial Sequence
  Description of Artificial Sequence: Synthetic oligonucleotide
  Sense strand starting at position 1553 of SEQ ID NO: 587453
uauggugacugacugcaaa

SEQ ID NO: 793333 - RNA, 19 nt, Artificial Sequence
  Description of Artificial Sequence: Synthetic oligonucleotide
  Antisense strand to SEQ ID NO: 793332
uuugcagucagucaccaua

SEQ ID NO: 793334 - RNA, 19 nt, Artificial Sequence
  Description of Artificial Sequence: Synthetic oligonucleotide
  Sense strand starting at position 1556 of SEQ ID NO: 587453
ggugacugacugcaaaguu

SEQ ID NO: 793335 - RNA, 19 nt, Artificial Sequence
  Description of Artificial Sequence: Synthetic oligonucleotide
  Antisense strand to SEQ ID NO: 793334
aacuuugcagucagucacc

SEQ ID NO: 793336 - RNA, 19 nt, Artificial Sequence
  Description of Artificial Sequence: Synthetic oligonucleotide
  Sense strand starting at position 2095 of SEQ ID NO: 587453
cuucgaugacgccaucaau

SEQ ID NO: 793337 - RNA, 19 nt, Artificial Sequence
  Description of Artificial Sequence: Synthetic oligonucleotide
  Antisense strand to SEQ ID NO: 793336
auugauggcgucaucgaag

SEQ ID NO: 793338 - RNA, 19 nt, Artificial Sequence
  Description of Artificial Sequence: Synthetic oligonucleotide
  Sense strand starting at position 2930 of SEQ ID NO: 587453
aacggaaucuaagaaguuc

SEQ ID NO: 793339 - RNA, 19 nt, Artificial Sequence
  Description of Artificial Sequence: Synthetic oligonucleotide
  Antisense strand to SEQ ID NO: 793338
gaacuucuuagauuccguu

SEQ ID NO: 793340 - RNA, 19 nt, Artificial Sequence
  Description of Artificial Sequence: Synthetic oligonucleotide
  Sense strand starting at position 2971 of SEQ ID NO: 587453
caaggaaaguuuccuuugu

SEQ ID NO: 793341 - RNA, 19 nt, Artificial Sequence
  Description of Artificial Sequence: Synthetic oligonucleotide
  Antisense strand to SEQ ID NO: 793340
acaaaggaaacuuuccuug

SEQ ID NO: 793342 - RNA, 19 nt, Artificial Sequence
  Description of Artificial Sequence: Synthetic oligonucleotide
  Sense strand starting at position 2973 of SEQ ID NO: 587453
aggaaaguuuccuuugugu

SEQ ID NO: 793343 - RNA, 19 nt, Artificial Sequence
  Description of Artificial Sequence: Synthetic oligonucleotide
  Antisense strand to SEQ ID NO: 793342
acacaaaggaaacuuuccu

SEQ ID NO: 793344 - RNA, 19 nt, Artificial Sequence
  Description of Artificial Sequence: Synthetic oligonucleotide
  Sense strand starting at position 2975 of SEQ ID NO: 587453
gaaaguuuccuuuguguuu

SEQ ID NO: 793345 - RNA, 19 nt, Artificial Sequence
  Description of Artificial Sequence: Synthetic oligonucleotide
  Antisense strand to SEQ ID NO: 793344
aaacacaaaggaaacuuuc

SEQ ID NO: 793346 - RNA, 19 nt, Artificial Sequence
  Description of Artificial Sequence: Synthetic oligonucleotide
  Sense strand starting at position 2982 of SEQ ID NO: 587453
uccuuuguguuuccuuaau

SEQ ID NO: 793347 - RNA, 19 nt, Artificial Sequence
  Description of Artificial Sequence: Synthetic oligonucleotide
  Antisense strand to SEQ ID NO: 793346
auuaaggaaacacaaagga

SEQ ID NO: 793348 - RNA, 19 nt, Artificial Sequence
  Description of Artificial Sequence: Synthetic oligonucleotide
  Sense strand starting at position 2984 of SEQ ID NO: 587453
cuuuguguuuccuuaauau

SEQ ID NO: 793349 - RNA, 19 nt, Artificial Sequence
  Description of Artificial Sequence: Synthetic oligonucleotide
  Antisense strand to SEQ ID NO: 793348
auauuaaggaaacacaaag

SEQ ID NO: 793350 - RNA, 19 nt, Artificial Sequence
  Description of Artificial Sequence: Synthetic oligonucleotide
  Sense strand starting at position 3051 of SEQ ID NO: 587453
ugcacuucgucuuucuaga

SEQ ID NO: 793351 - RNA, 19 nt, Artificial Sequence
  Description of Artificial Sequence: Synthetic oligonucleotide
  Antisense strand to SEQ ID NO: 793350
ucuagaaagacgaagugca

SEQ ID NO: 793352 - RNA, 19 nt, Artificial Sequence
  Description of Artificial Sequence: Synthetic oligonucleotide
  Sense strand starting at position 3056 of SEQ ID NO: 587453
uucgucuuucuagauaaac

SEQ ID NO: 793353 - RNA, 19 nt, Artificial Sequence
  Description of Artificial Sequence: Synthetic oligonucleotide
  Antisense strand to SEQ ID NO: 793352
guuuaucuagaaagacgaa

SEQ ID NO: 793354 - RNA, 19 nt, Artificial Sequence
  Description of Artificial Sequence: Synthetic oligonucleotide
  Sense strand starting at position 3076 of SEQ ID NO: 587453
guacguucccgggagagca

SEQ ID NO: 793355 - RNA, 19 nt, Artificial Sequence
  Description of Artificial Sequence: Synthetic oligonucleotide
  Antisense strand to SEQ ID NO: 793354
ugcucucccgggaacguac

SEQ ID NO: 793356 - RNA, 19 nt, Artificial Sequence
  Description of Artificial Sequence: Synthetic oligonucleotide
  Sense strand starting at position 3122 of SEQ ID NO: 587453
gggcuuaggugcccaguaa

SEQ ID NO: 793357 - RNA, 19 nt, Artificial Sequence
  Description of Artificial Sequence: Synthetic oligonucleotide
  Antisense strand to SEQ ID NO: 793356
uuacugggcaccuaagccc

SEQ ID NO: 793358 - RNA, 19 nt, Artificial Sequence
  Description of Artificial Sequence: Synthetic oligonucleotide
  Sense strand starting at position 3123 of SEQ ID NO: 587453
ggcuuaggugcccaguaaa

SEQ ID NO: 793359 - RNA, 19 nt, Artificial Sequence
  Description of Artificial Sequence: Synthetic oligonucleotide
  Antisense strand to SEQ ID NO: 793358
uuuacugggcaccuaagcc

SEQ ID NO: 793360 - RNA, 19 nt, Artificial Sequence
  Description of Artificial Sequence: Synthetic oligonucleotide
  Sense strand starting at position 3265 of SEQ ID NO: 587453
agccacugagguuauuaau

SEQ ID NO: 793361 - RNA, 19 nt, Artificial Sequence
  Description of Artificial Sequence: Synthetic oligonucleotide
  Antisense strand to SEQ ID NO: 793360
auuaauaaccucaguggcu

SEQ ID NO: 793362 - RNA, 19 nt, Artificial Sequence
  Description of Artificial Sequence: Synthetic oligonucleotide
  Sense strand starting at position 3483 of SEQ ID NO: 587453
ucagcauuacauggugaaa

SEQ ID NO: 793363 - RNA, 19 nt, Artificial Sequence
  Description of Artificial Sequence: Synthetic oligonucleotide
  Antisense strand to SEQ ID NO: 793362
uuucaccauguaaugcuga

SEQ ID NO: 793364 - RNA, 19 nt, Artificial Sequence
  Description of Artificial Sequence: Synthetic oligonucleotide
  Sense strand starting at position 3615 of SEQ ID NO: 587453
ggccaaucucucgaucaau

SEQ ID NO: 793365 - RNA, 19 nt, Artificial Sequence
  Description of Artificial Sequence: Synthetic oligonucleotide
  Antisense strand to SEQ ID NO: 793364
auugaucgagagauuggcc

SEQ ID NO: 793366 - RNA, 19 nt, Artificial Sequence
  Description of Artificial Sequence: Synthetic oligonucleotide
  Sense strand starting at position 3919 of SEQ ID NO: 587453
uaaacuuuggagugaauug

SEQ ID NO: 793367 - RNA, 19 nt, Artificial Sequence
  Description of Artificial Sequence: Synthetic oligonucleotide
  Antisense strand to SEQ ID NO: 793366
caauucacuccaaaguuua

SEQ ID NO: 793368 - RNA, 19 nt, Artificial Sequence
  Description of Artificial Sequence: Synthetic oligonucleotide
  Sense strand starting at position 3929 of SEQ ID NO: 587453
agugaauuguggcuagaag

SEQ ID NO: 793369 - RNA, 19 nt, Artificial Sequence
  Description of Artificial Sequence: Synthetic oligonucleotide
  Antisense strand to SEQ ID NO: 793368
cuucuagccacaauucacu

SEQ ID NO: 793370 - RNA, 19 nt, Artificial Sequence
  Description of Artificial Sequence: Synthetic oligonucleotide
  Sense strand starting at position 3930 of SEQ ID NO: 587453
gugaauuguggcuagaagu

SEQ ID NO: 793371 - RNA, 19 nt, Artificial Sequence
  Description of Artificial Sequence: Synthetic oligonucleotide
  Antisense strand to SEQ ID NO: 793370
acuucuagccacaauucac

SEQ ID NO: 793372 - RNA, 19 nt, Artificial Sequence
  Description of Artificial Sequence: Synthetic oligonucleotide
  Sense strand starting at position 3975 of SEQ ID NO: 587453
uuuaccagaccugaguuau

SEQ ID NO: 793373 - RNA, 19 nt, Artificial Sequence
  Description of Artificial Sequence: Synthetic oligonucleotide
  Antisense strand to SEQ ID NO: 793372
auaacucaggucugguaaa

SEQ ID NO: 793374 - RNA, 19 nt, Artificial Sequence
  Description of Artificial Sequence: Synthetic oligonucleotide
  Sense strand starting at position 95 of SEQ ID NO: 587454
ucaaguugccaucaagaac

SEQ ID NO: 793375 - RNA, 19 nt, Artificial Sequence
  Description of Artificial Sequence: Synthetic oligonucleotide
  Antisense strand to SEQ ID NO: 793374
guucuugauggcaacuuga

SEQ ID NO: 793376 - RNA, 19 nt, Artificial Sequence
  Description of Artificial Sequence: Synthetic oligonucleotide
  Sense strand starting at position 264 of SEQ ID NO: 587454
agcaccaguuuccuuuaga

SEQ ID NO: 793377 - RNA, 19 nt, Artificial Sequence
  Description of Artificial Sequence: Synthetic oligonucleotide
  Antisense strand to SEQ ID NO: 793376
ucuaaaggaaacuggugcu

SEQ ID NO: 793378 - RNA, 19 nt, Artificial Sequence
  Description of Artificial Sequence: Synthetic oligonucleotide
  Sense strand starting at position 265 of SEQ ID NO: 587454
gcaccaguuuccuuuagau

SEQ ID NO: 793379 - RNA, 19 nt, Artificial Sequence
  Description of Artificial Sequence: Synthetic oligonucleotide
  Antisense strand to SEQ ID NO: 793378
aucuaaaggaaacuggugc

SEQ ID NO: 793380 - RNA, 19 nt, Artificial Sequence
  Description of Artificial Sequence: Synthetic oligonucleotide
  Sense strand starting at position 337 of SEQ ID NO: 587454
uggacuacuaagugaaguu

SEQ ID NO: 793381 - RNA, 19 nt, Artificial Sequence
  Description of Artificial Sequence: Synthetic oligonucleotide
  Antisense strand to SEQ ID NO: 793380
aacuucacuuaguagucca

SEQ ID NO: 793382 - RNA, 19 nt, Artificial Sequence
  Description of Artificial Sequence: Synthetic oligonucleotide
  Sense strand starting at position 827 of SEQ ID NO: 587454
ccucguucucagucaacgu

SEQ ID NO: 793383 - RNA, 19 nt, Artificial Sequence
  Description of Artificial Sequence: Synthetic oligonucleotide
  Antisense strand to SEQ ID NO: 793382
acguugacugagaacgagg

SEQ ID NO: 793384 - RNA, 19 nt, Artificial Sequence
  Description of Artificial Sequence: Synthetic oligonucleotide
  Sense strand starting at position 904 of SEQ ID NO: 587454
ggauacagccguugcucaa

SEQ ID NO: 793385 - RNA, 19 nt, Artificial Sequence
  Description of Artificial Sequence: Synthetic oligonucleotide
  Antisense strand to SEQ ID NO: 793384
uugagcaacggcuguaucc

SEQ ID NO: 793386 - RNA, 19 nt, Artificial Sequence
  Description of Artificial Sequence: Synthetic oligonucleotide
  Sense strand starting at position 911 of SEQ ID NO: 587454
gccguugcucaagggagaa

SEQ ID NO: 793387 - RNA, 19 nt, Artificial Sequence
  Description of Artificial Sequence: Synthetic oligonucleotide
  Antisense strand to SEQ ID NO: 793386
uucucccuugagcaacggc

SEQ ID NO: 793388 - RNA, 19 nt, Artificial Sequence
  Description of Artificial Sequence: Synthetic oligonucleotide
  Sense strand starting at position 960 of SEQ ID NO: 587454
agccuugucuuccugugaa

SEQ ID NO: 793389 - RNA, 19 nt, Artificial Sequence
  Description of Artificial Sequence: Synthetic oligonucleotide
  Antisense strand to SEQ ID NO: 793388
uucacaggaagacaaggcu

SEQ ID NO: 793390 - RNA, 19 nt, Artificial Sequence
  Description of Artificial Sequence: Synthetic oligonucleotide
  Sense strand starting at position 963 of SEQ ID NO: 587454
cuugucuuccugugaacac

SEQ ID NO: 793391 - RNA, 19 nt, Artificial Sequence
  Description of Artificial Sequence: Synthetic oligonucleotide
  Antisense strand to SEQ ID NO: 793390
guguucacaggaagacaag

SEQ ID NO: 793392 - RNA, 19 nt, Artificial Sequence
  Description of Artificial Sequence: Synthetic oligonucleotide
  Sense strand starting at position 1033 of SEQ ID NO: 587454
ugcaguacuuuggcccaaa

SEQ ID NO: 793393 - RNA, 19 nt, Artificial Sequence
  Description of Artificial Sequence: Synthetic oligonucleotide
  Antisense strand to SEQ ID NO: 793392
uuugggccaaaguacugca

SEQ ID NO: 793394 - RNA, 19 nt, Artificial Sequence
  Description of Artificial Sequence: Synthetic oligonucleotide
  Sense strand starting at position 1034 of SEQ ID NO: 587454
gcaguacuuuggcccaaau

SEQ ID NO: 793395 - RNA, 19 nt, Artificial Sequence
  Description of Artificial Sequence: Synthetic oligonucleotide
  Antisense strand to SEQ ID NO: 793394
auuugggccaaaguacugc

SEQ ID NO: 793396 - RNA, 19 nt, Artificial Sequence
  Description of Artificial Sequence: Synthetic oligonucleotide
  Sense strand starting at position 1036 of SEQ ID NO: 587454
aguacuuuggcccaaauua

SEQ ID NO: 793397 - RNA, 19 nt, Artificial Sequence
  Description of Artificial Sequence: Synthetic oligonucleotide
  Antisense strand to SEQ ID NO: 793396
uaauuugggccaaaguacu

SEQ ID NO: 793398 - RNA, 19 nt, Artificial Sequence
  Description of Artificial Sequence: Synthetic oligonucleotide
  Sense strand starting at position 1074 of SEQ ID NO: 587454
ggcaguuguggcuauguaa

SEQ ID NO: 793399 - RNA, 19 nt, Artificial Sequence
  Description of Artificial Sequence: Synthetic oligonucleotide
  Antisense strand to SEQ ID NO: 793398
uuacauagccacaacugcc

SEQ ID NO: 793400 - RNA, 19 nt, Artificial Sequence
  Description of Artificial Sequence: Synthetic oligonucleotide
  Sense strand starting at position 1087 of SEQ ID NO: 587454
auguaauucuggucagagu

SEQ ID NO: 793401 - RNA, 19 nt, Artificial Sequence
  Description of Artificial Sequence: Synthetic oligonucleotide
  Antisense strand to SEQ ID NO: 793400
acucugaccagaauuacau

SEQ ID NO: 793402 - RNA, 19 nt, Artificial Sequence
  Description of Artificial Sequence: Synthetic oligonucleotide
  Sense strand starting at position 1088 of SEQ ID NO: 587454
uguaauucuggucagaguc

SEQ ID NO: 793403 - RNA, 19 nt, Artificial Sequence
  Description of Artificial Sequence: Synthetic oligonucleotide
  Antisense strand to SEQ ID NO: 793402
gacucugaccagaauuaca

SEQ ID NO: 793404 - RNA, 19 nt, Artificial Sequence
  Description of Artificial Sequence: Synthetic oligonucleotide
  Sense strand starting at position 1426 of SEQ ID NO: 587454
gauccugaacgcugaauga

SEQ ID NO: 793405 - RNA, 19 nt, Artificial Sequence
  Description of Artificial Sequence: Synthetic oligonucleotide
  Antisense strand to SEQ ID NO: 793404
ucauucagcguucaggauc

SEQ ID NO: 793406 - RNA, 19 nt, Artificial Sequence
  Description of Artificial Sequence: Synthetic oligonucleotide
  Sense strand starting at position 1433 of SEQ ID NO: 587454
aacgcugaaugaucuggaa

SEQ ID NO: 793407 - RNA, 19 nt, Artificial Sequence
  Description of Artificial Sequence: Synthetic oligonucleotide
  Antisense strand to SEQ ID NO: 793406
uuccagaucauucagcguu

SEQ ID NO: 793408 - RNA, 19 nt, Artificial Sequence
  Description of Artificial Sequence: Synthetic oligonucleotide
  Sense strand starting at position 1435 of SEQ ID NO: 587454
cgcugaaugaucuggaacu

SEQ ID NO: 793409 - RNA, 19 nt, Artificial Sequence
  Description of Artificial Sequence: Synthetic oligonucleotide
  Antisense strand to SEQ ID NO: 793408
aguuccagaucauucagcg

SEQ ID NO: 793410 - RNA, 19 nt, Artificial Sequence
  Description of Artificial Sequence: Synthetic oligonucleotide
  Sense strand starting at position 1453 of SEQ ID NO: 587454
uauggugacugacugcaaa

SEQ ID NO: 793411 - RNA, 19 nt, Artificial Sequence
  Description of Artificial Sequence: Synthetic oligonucleotide
  Antisense strand to SEQ ID NO: 793410
uuugcagucagucaccaua

SEQ ID NO: 793412 - RNA, 19 nt, Artificial Sequence
  Description of Artificial Sequence: Synthetic oligonucleotide
  Sense strand starting at position 1456 of SEQ ID NO: 587454
ggugacugacugcaaaguu

SEQ ID NO: 793413 - RNA, 19 nt, Artificial Sequence
  Description of Artificial Sequence: Synthetic oligonucleotide
  Antisense strand to SEQ ID NO: 793412
aacuuugcagucagucacc

SEQ ID NO: 793414 - RNA, 19 nt, Artificial Sequence
  Description of Artificial Sequence: Synthetic oligonucleotide
  Sense strand starting at position 1995 of SEQ ID NO: 587454
cuucgaugacgccaucaau

SEQ ID NO: 793415 - RNA, 19 nt, Artificial Sequence
  Description of Artificial Sequence: Synthetic oligonucleotide
  Antisense strand to SEQ ID NO: 793414
auugauggcgucaucgaag

SEQ ID NO: 793416 - RNA, 19 nt, Artificial Sequence
  Description of Artificial Sequence: Synthetic oligonucleotide
  Sense strand starting at position 2871 of SEQ ID NO: 587454
caaggaaaguuuccuuugu

SEQ ID NO: 793417 - RNA, 19 nt, Artificial Sequence
  Description of Artificial Sequence: Synthetic oligonucleotide
  Antisense strand to SEQ ID NO: 793416
acaaaggaaacuuuccuug

SEQ ID NO: 793418 - RNA, 19 nt, Artificial Sequence
  Description of Artificial Sequence: Synthetic oligonucleotide
  Sense strand starting at position 2873 of SEQ ID NO: 587454
aggaaaguuuccuuugugu

SEQ ID NO: 793419 - RNA, 19 nt, Artificial Sequence
  Description of Artificial Sequence: Synthetic oligonucleotide
  Antisense strand to SEQ ID NO: 793418
acacaaaggaaacuuuccu

SEQ ID NO: 793420 - RNA, 19 nt, Artificial Sequence
  Description of Artificial Sequence: Synthetic oligonucleotide
  Sense strand starting at position 2875 of SEQ ID NO: 587454
gaaaguuuccuuuguguuu

SEQ ID NO: 793421 - RNA, 19 nt, Artificial Sequence
  Description of Artificial Sequence: Synthetic oligonucleotide
  Antisense strand to SEQ ID NO: 793420
aaacacaaaggaaacuuuc

SEQ ID NO: 793422 - RNA, 19 nt, Artificial Sequence
  Description of Artificial Sequence: Synthetic oligonucleotide
  Sense strand starting at position 2882 of SEQ ID NO: 587454
uccuuuguguuuccuuaau

SEQ ID NO: 793423 - RNA, 19 nt, Artificial Sequence
  Description of Artificial Sequence: Synthetic oligonucleotide
  Antisense strand to SEQ ID NO: 793422
auuaaggaaacacaaagga

SEQ ID NO: 793424 - RNA, 19 nt, Artificial Sequence
  Description of Artificial Sequence: Synthetic oligonucleotide
  Sense strand starting at position 2884 of SEQ ID NO: 587454
cuuuguguuuccuuaauau

SEQ ID NO: 793425 - RNA, 19 nt, Artificial Sequence
  Description of Artificial Sequence: Synthetic oligonucleotide
  Antisense strand to SEQ ID NO: 793424
auauuaaggaaacacaaag

SEQ ID NO: 793426 - RNA, 19 nt, Artificial Sequence
  Description of Artificial Sequence: Synthetic oligonucleotide
  Sense strand starting at position 2956 of SEQ ID NO: 587454
uucgucuuucuagauaaac

SEQ ID NO: 793427 - RNA, 19 nt, Artificial Sequence
  Description of Artificial Sequence: Synthetic oligonucleotide
  Antisense strand to SEQ ID NO: 793426
guuuaucuagaaagacgaa

SEQ ID NO: 793428 - RNA, 19 nt, Artificial Sequence
  Description of Artificial Sequence: Synthetic oligonucleotide
  Sense strand starting at position 2976 of SEQ ID NO: 587454
guacguucccgggagagca

SEQ ID NO: 793429 - RNA, 19 nt, Artificial Sequence
  Description of Artificial Sequence: Synthetic oligonucleotide
  Antisense strand to SEQ ID NO: 793428
ugcucucccgggaacguac

SEQ ID NO: 793430 - RNA, 19 nt, Artificial Sequence
  Description of Artificial Sequence: Synthetic oligonucleotide
  Sense strand starting at position 3022 of SEQ ID NO: 587454
gggcuuaggugcccaguaa

SEQ ID NO: 793431 - RNA, 19 nt, Artificial Sequence
  Description of Artificial Sequence: Synthetic oligonucleotide
  Antisense strand to SEQ ID NO: 793430
uuacugggcaccuaagccc

SEQ ID NO: 793432 - RNA, 19 nt, Artificial Sequence
  Description of Artificial Sequence: Synthetic oligonucleotide
  Sense strand starting at position 3023 of SEQ ID NO: 587454
ggcuuaggugcccaguaaa

SEQ ID NO: 793433 - RNA, 19 nt, Artificial Sequence
  Description of Artificial Sequence: Synthetic oligonucleotide
  Antisense strand to SEQ ID NO: 793432
uuuacugggcaccuaagcc

SEQ ID NO: 793434 - RNA, 19 nt, Artificial Sequence
  Description of Artificial Sequence: Synthetic oligonucleotide
  Sense strand starting at position 3165 of SEQ ID NO: 587454
agccacugagguuauuaau

SEQ ID NO: 793435 - RNA, 19 nt, Artificial Sequence
  Description of Artificial Sequence: Synthetic oligonucleotide
  Antisense strand to SEQ ID NO: 793434
auuaauaaccucaguggcu

SEQ ID NO: 793436 - RNA, 19 nt, Artificial Sequence
  Description of Artificial Sequence: Synthetic oligonucleotide
  Sense strand starting at position 3383 of SEQ ID NO: 587454
ucagcauuacauggugaaa

SEQ ID NO: 793437 - RNA, 19 nt, Artificial Sequence
  Description of Artificial Sequence: Synthetic oligonucleotide
  Antisense strand to SEQ ID NO: 793436
uuucaccauguaaugcuga

SEQ ID NO: 793438 - RNA, 19 nt, Artificial Sequence
  Description of Artificial Sequence: Synthetic oligonucleotide
  Sense strand starting at position 3515 of SEQ ID NO: 587454
ggccaaucucucgaucaau

SEQ ID NO: 793439 - RNA, 19 nt, Artificial Sequence
  Description of Artificial Sequence: Synthetic oligonucleotide
  Antisense strand to SEQ ID NO: 793438
auugaucgagagauuggcc

SEQ ID NO: 793440 - RNA, 19 nt, Artificial Sequence
  Description of Artificial Sequence: Synthetic oligonucleotide
  Sense strand starting at position 3819 of SEQ ID NO: 587454
uaaacuuuggagugaauug

SEQ ID NO: 793441 - RNA, 19 nt, Artificial Sequence
  Description of Artificial Sequence: Synthetic oligonucleotide
  Antisense strand to SEQ ID NO: 793440
caauucacuccaaaguuua

SEQ ID NO: 793442 - RNA, 19 nt, Artificial Sequence
  Description of Artificial Sequence: Synthetic oligonucleotide
  Sense strand starting at position 3829 of SEQ ID NO: 587454
agugaauuguggcuagaag

SEQ ID NO: 793443 - RNA, 19 nt, Artificial Sequence
  Description of Artificial Sequence: Synthetic oligonucleotide
  Antisense strand to SEQ ID NO: 793442
cuucuagccacaauucacu

SEQ ID NO: 793444 - RNA, 19 nt, Artificial Sequence
  Description of Artificial Sequence: Synthetic oligonucleotide
  Sense strand starting at position 3830 of SEQ ID NO: 587454
gugaauuguggcuagaagu

SEQ ID NO: 793445 - RNA, 19 nt, Artificial Sequence
  Description of Artificial Sequence: Synthetic oligonucleotide
  Antisense strand to SEQ ID NO: 793444
acuucuagccacaauucac

SEQ ID NO: 793446 - RNA, 19 nt, Artificial Sequence
  Description of Artificial Sequence: Synthetic oligonucleotide
  Sense strand starting at position 3875 of SEQ ID NO: 587454
uuuaccagaccugaguuau

SEQ ID NO: 793447 - RNA, 19 nt, Artificial Sequence
  Description of Artificial Sequence: Synthetic oligonucleotide
  Antisense strand to SEQ ID NO: 793446
auaacucaggucugguaaa

SEQ ID NO: 793448 - RNA, 19 nt, Artificial Sequence
  Description of Artificial Sequence: Synthetic oligonucleotide
  Sense strand starting at position 3937 of SEQ ID NO: 587454
ugugcuaguacaugaugau

SEQ ID NO: 793449 - RNA, 19 nt, Artificial Sequence
  Description of Artificial Sequence: Synthetic oligonucleotide
  Antisense strand to SEQ ID NO: 793448
aucaucauguacuagcaca

SEQ ID NO: 793450 - RNA, 19 nt, Artificial Sequence
  Description of Artificial Sequence: Synthetic oligonucleotide
  Sense strand starting at position 3943 of SEQ ID NO: 587454
aguacaugaugaucuagua

SEQ ID NO: 793451 - RNA, 19 nt, Artificial Sequence
  Description of Artificial Sequence: Synthetic oligonucleotide
  Antisense strand to SEQ ID NO: 793450
uacuagaucaucauguacu

SEQ ID NO: 793452 - RNA, 19 nt, Artificial Sequence
  Description of Artificial Sequence: Synthetic oligonucleotide
  Sense strand starting at position 3951 of SEQ ID NO: 587454
augaucuaguacuucugaa

SEQ ID NO: 793453 - RNA, 19 nt, Artificial Sequence
  Description of Artificial Sequence: Synthetic oligonucleotide
  Antisense strand to SEQ ID NO: 793452
uucagaaguacuagaucau

SEQ ID NO: 793454 - RNA, 19 nt, Artificial Sequence
  Description of Artificial Sequence: Synthetic oligonucleotide
  Sense strand starting at position 245 of SEQ ID NO: 587455
cuaaguaagcucuacuugu

SEQ ID NO: 793455 - RNA, 19 nt, Artificial Sequence
  Description of Artificial Sequence: Synthetic oligonucleotide
  Antisense strand to SEQ ID NO: 793454
acaaguagagcuuacuuag

SEQ ID NO: 793456 - RNA, 19 nt, Artificial Sequence
  Description of Artificial Sequence: Synthetic oligonucleotide
  Sense strand starting at position 256 of SEQ ID NO: 587455
cuacuuguaggucauauua

SEQ ID NO: 793457 - RNA, 19 nt, Artificial Sequence
  Description of Artificial Sequence: Synthetic oligonucleotide
  Antisense strand to SEQ ID NO: 793456
uaauaugaccuacaaguag

SEQ ID NO: 793458 - RNA, 19 nt, Artificial Sequence
  Description of Artificial Sequence: Synthetic oligonucleotide
  Sense strand starting at position 313 of SEQ ID NO: 587455
uuaguuuaacaguaggauu

SEQ ID NO: 793459 - RNA, 19 nt, Artificial Sequence
  Description of Artificial Sequence: Synthetic oligonucleotide
  Antisense strand to SEQ ID NO: 793458
aauccuacuguuaaacuaa

SEQ ID NO: 793460 - RNA, 19 nt, Artificial Sequence
  Description of Artificial Sequence: Synthetic oligonucleotide
  Sense strand starting at position 321 of SEQ ID NO: 587455
acaguaggauucucaaauu

SEQ ID NO: 793461 - RNA, 19 nt, Artificial Sequence
  Description of Artificial Sequence: Synthetic oligonucleotide
  Antisense strand to SEQ ID NO: 793460
aauuugagaauccuacugu

SEQ ID NO: 793462 - RNA, 19 nt, Artificial Sequence
  Description of Artificial Sequence: Synthetic oligonucleotide
  Sense strand starting at position 445 of SEQ ID NO: 587455
aaucgauuucuauguguug

SEQ ID NO: 793463 - RNA, 19 nt, Artificial Sequence
  Description of Artificial Sequence: Synthetic oligonucleotide
  Antisense strand to SEQ ID NO: 793462
caacacauagaaaucgauu

SEQ ID NO: 793464 - RNA, 19 nt, Artificial Sequence
  Description of Artificial Sequence: Synthetic oligonucleotide
  Sense strand starting at position 454 of SEQ ID NO: 587455
cuauguguuggccauauau

SEQ ID NO: 793465 - RNA, 19 nt, Artificial Sequence
  Description of Artificial Sequence: Synthetic oligonucleotide
  Antisense strand to SEQ ID NO: 793464
auauauggccaacacauag

SEQ ID NO: 793466 - RNA, 19 nt, Artificial Sequence
  Description of Artificial Sequence: Synthetic oligonucleotide
  Sense strand starting at position 456 of SEQ ID NO: 587455
auguguuggccauauauaa

SEQ ID NO: 793467 - RNA, 19 nt, Artificial Sequence
  Description of Artificial Sequence: Synthetic oligonucleotide
  Antisense strand to SEQ ID NO: 793466
uuauauauggccaacacau

SEQ ID NO: 793468 - RNA, 19 nt, Artificial Sequence
  Description of Artificial Sequence: Synthetic oligonucleotide
  Sense strand starting at position 517 of SEQ ID NO: 587455
auaauaacugucuguaaug

SEQ ID NO: 793469 - RNA, 19 nt, Artificial Sequence
  Description of Artificial Sequence: Synthetic oligonucleotide
  Antisense strand to SEQ ID NO: 793468
cauuacagacaguuauuau

SEQ ID NO: 793470 - RNA, 19 nt, Artificial Sequence
  Description of Artificial Sequence: Synthetic oligonucleotide
  Sense strand starting at position 559 of SEQ ID NO: 587455
uggguagaguaauuaauau

SEQ ID NO: 793471 - RNA, 19 nt, Artificial Sequence
  Description of Artificial Sequence: Synthetic oligonucleotide
  Antisense strand to SEQ ID NO: 793470
auauuaauuacucuaccca

SEQ ID NO: 793472 - RNA, 19 nt, Artificial Sequence
  Description of Artificial Sequence: Synthetic oligonucleotide
  Sense strand starting at position 581 of SEQ ID NO: 587455
aguacacagucuuucuaga

SEQ ID NO: 793473 - RNA, 19 nt, Artificial Sequence
  Description of Artificial Sequence: Synthetic oligonucleotide
  Antisense strand to SEQ ID NO: 793472
ucuagaaagacuguguacu

SEQ ID NO: 793474 - RNA, 19 nt, Artificial Sequence
  Description of Artificial Sequence: Synthetic oligonucleotide
  Sense strand starting at position 586 of SEQ ID NO: 587455
acagucuuucuagaauugu

SEQ ID NO: 793475 - RNA, 19 nt, Artificial Sequence
  Description of Artificial Sequence: Synthetic oligonucleotide
  Antisense strand to SEQ ID NO: 793474
acaauucuagaaagacugu

SEQ ID NO: 793476 - RNA, 19 nt, Artificial Sequence
  Description of Artificial Sequence: Synthetic oligonucleotide
  Sense strand starting at position 595 of SEQ ID NO: 587455
cuagaauuguuuccagaca

SEQ ID NO: 793477 - RNA, 19 nt, Artificial Sequence
  Description of Artificial Sequence: Synthetic oligonucleotide
  Antisense strand to SEQ ID NO: 793476
ugucuggaaacaauucuag

SEQ ID NO: 793478 - RNA, 19 nt, Artificial Sequence
  Description of Artificial Sequence: Synthetic oligonucleotide
  Sense strand starting at position 683 of SEQ ID NO: 587455
uugguauauuuccuagcua

SEQ ID NO: 793479 - RNA, 19 nt, Artificial Sequence
  Description of Artificial Sequence: Synthetic oligonucleotide
  Antisense strand to SEQ ID NO: 793478
uagcuaggaaauauaccaa

SEQ ID NO: 793480 - RNA, 19 nt, Artificial Sequence
  Description of Artificial Sequence: Synthetic oligonucleotide
  Sense strand starting at position 766 of SEQ ID NO: 587455
agcuuugauucccuugaaa

SEQ ID NO: 793481 - RNA, 19 nt, Artificial Sequence
  Description of Artificial Sequence: Synthetic oligonucleotide
  Antisense strand to SEQ ID NO: 793480
uuucaagggaaucaaagcu

SEQ ID NO: 793482 - RNA, 19 nt, Artificial Sequence
  Description of Artificial Sequence: Synthetic oligonucleotide
  Sense strand starting at position 836 of SEQ ID NO: 587455
gaauauagguuaucagguu

SEQ ID NO: 793483 - RNA, 19 nt, Artificial Sequence
  Description of Artificial Sequence: Synthetic oligonucleotide
  Antisense strand to SEQ ID NO: 793482
aaccugauaaccuauauuc

SEQ ID NO: 793484 - RNA, 19 nt, Artificial Sequence
  Description of Artificial Sequence: Synthetic oligonucleotide
  Sense strand starting at position 842 of SEQ ID NO: 587455
agguuaucagguuaucacu

SEQ ID NO: 793485 - RNA, 19 nt, Artificial Sequence
  Description of Artificial Sequence: Synthetic oligonucleotide
  Antisense strand to SEQ ID NO: 793484
agugauaaccugauaaccu

SEQ ID NO: 793486 - RNA, 19 nt, Artificial Sequence
  Description of Artificial Sequence: Synthetic oligonucleotide
  Sense strand starting at position 1154 of SEQ ID NO: 587455
ggaggucuuccucgacauu

SEQ ID NO: 793487 - RNA, 19 nt, Artificial Sequence
  Description of Artificial Sequence: Synthetic oligonucleotide
  Antisense strand to SEQ ID NO: 793486
aaugucgaggaagaccucc

SEQ ID NO: 793488 - RNA, 19 nt, Artificial Sequence
  Description of Artificial Sequence: Synthetic oligonucleotide
  Sense strand starting at position 1203 of SEQ ID NO: 587455
gcgcuuguucugcuuccau

SEQ ID NO: 793489 - RNA, 19 nt, Artificial Sequence
  Description of Artificial Sequence: Synthetic oligonucleotide
  Antisense strand to SEQ ID NO: 793488
auggaagcagaacaagcgc

SEQ ID NO: 793490 - RNA, 19 nt, Artificial Sequence
  Description of Artificial Sequence: Synthetic oligonucleotide
  Sense strand starting at position 1297 of SEQ ID NO: 587455
agagaccgucuguaacuuu

SEQ ID NO: 793491 - RNA, 19 nt, Artificial Sequence
  Description of Artificial Sequence: Synthetic oligonucleotide
  Antisense strand to SEQ ID NO: 793490
aaaguuacagacggucucu

SEQ ID NO: 793492 - RNA, 19 nt, Artificial Sequence
  Description of Artificial Sequence: Synthetic oligonucleotide
  Sense strand starting at position 1915 of SEQ ID NO: 587455
cggccuacuccagagguua

SEQ ID NO: 793493 - RNA, 19 nt, Artificial Sequence
  Description of Artificial Sequence: Synthetic oligonucleotide
  Antisense strand to SEQ ID NO: 793492
uaaccucuggaguaggccg

SEQ ID NO: 793494 - RNA, 19 nt, Artificial Sequence
  Description of Artificial Sequence: Synthetic oligonucleotide
  Sense strand starting at position 2114 of SEQ ID NO: 587455
ggcuguuuccaagauucuc

SEQ ID NO: 793495 - RNA, 19 nt, Artificial Sequence
  Description of Artificial Sequence: Synthetic oligonucleotide
  Antisense strand to SEQ ID NO: 793494
gagaaucuuggaaacagcc

SEQ ID NO: 793496 - RNA, 19 nt, Artificial Sequence
  Description of Artificial Sequence: Synthetic oligonucleotide
  Sense strand starting at position 2241 of SEQ ID NO: 587455
uguaguucucgguccaguu

SEQ ID NO: 793497 - RNA, 19 nt, Artificial Sequence
  Description of Artificial Sequence: Synthetic oligonucleotide
  Antisense strand to SEQ ID NO: 793496
aacuggaccgagaacuaca

SEQ ID NO: 793498 - RNA, 19 nt, Artificial Sequence
  Description of Artificial Sequence: Synthetic oligonucleotide
  Sense strand starting at position 2563 of SEQ ID NO: 587455
ucuguaaggcauuaauauc

SEQ ID NO: 793499 - RNA, 19 nt, Artificial Sequence
  Description of Artificial Sequence: Synthetic oligonucleotide
  Antisense strand to SEQ ID NO: 793498
gauauuaaugccuuacaga

SEQ ID NO: 793500 - RNA, 19 nt, Artificial Sequence
  Description of Artificial Sequence: Synthetic oligonucleotide
  Sense strand starting at position 2649 of SEQ ID NO: 587455
gcuaaauucuuacuuugga

SEQ ID NO: 793501 - RNA, 19 nt, Artificial Sequence
  Description of Artificial Sequence: Synthetic oligonucleotide
  Antisense strand to SEQ ID NO: 793500
uccaaaguaagaauuuagc

SEQ ID NO: 793502 - RNA, 19 nt, Artificial Sequence
  Description of Artificial Sequence: Synthetic oligonucleotide
  Sense strand starting at position 2936 of SEQ ID NO: 587455
gaaugaagucagugacagu

SEQ ID NO: 793503 - RNA, 19 nt, Artificial Sequence
  Description of Artificial Sequence: Synthetic oligonucleotide
  Antisense strand to SEQ ID NO: 793502
acugucacugacuucauuc

SEQ ID NO: 793504 - RNA, 19 nt, Artificial Sequence
  Description of Artificial Sequence: Synthetic oligonucleotide
  Sense strand starting at position 2943 of SEQ ID NO: 587455
gucagugacagugauguaa

SEQ ID NO: 793505 - RNA, 19 nt, Artificial Sequence
  Description of Artificial Sequence: Synthetic oligonucleotide
  Antisense strand to SEQ ID NO: 793504
uuacaucacugucacugac

SEQ ID NO: 793506 - RNA, 19 nt, Artificial Sequence
  Description of Artificial Sequence: Synthetic oligonucleotide
  Sense strand starting at position 2947 of SEQ ID NO: 587455
gugacagugauguaagagu

SEQ ID NO: 793507 - RNA, 19 nt, Artificial Sequence
  Description of Artificial Sequence: Synthetic oligonucleotide
  Antisense strand to SEQ ID NO: 793506
acucuuacaucacugucac

SEQ ID NO: 793508 - RNA, 19 nt, Artificial Sequence
  Description of Artificial Sequence: Synthetic oligonucleotide
  Sense strand starting at position 2958 of SEQ ID NO: 587455
guaagagugucaguuuaaa

SEQ ID NO: 793509 - RNA, 19 nt, Artificial Sequence
  Description of Artificial Sequence: Synthetic oligonucleotide
  Antisense strand to SEQ ID NO: 793508
uuuaaacugacacucuuac

SEQ ID NO: 793510 - RNA, 19 nt, Artificial Sequence
  Description of Artificial Sequence: Synthetic oligonucleotide
  Sense strand starting at position 3004 of SEQ ID NO: 587455
gaauguagaguuugcuuga

SEQ ID NO: 793511 - RNA, 19 nt, Artificial Sequence
  Description of Artificial Sequence: Synthetic oligonucleotide
  Antisense strand to SEQ ID NO: 793510
ucaagcaaacucuacauuc

SEQ ID NO: 793512 - RNA, 19 nt, Artificial Sequence
  Description of Artificial Sequence: Synthetic oligonucleotide
  Sense strand starting at position 3011 of SEQ ID NO: 587455
gaguuugcuugaguuaaag

SEQ ID NO: 793513 - RNA, 19 nt, Artificial Sequence
  Description of Artificial Sequence: Synthetic oligonucleotide
  Antisense strand to SEQ ID NO: 793512
cuuuaacucaagcaaacuc

SEQ ID NO: 793514 - RNA, 19 nt, Artificial Sequence
  Description of Artificial Sequence: Synthetic oligonucleotide
  Sense strand starting at position 3174 of SEQ ID NO: 587455
ugucaagcauucucauuga

SEQ ID NO: 793515 - RNA, 19 nt, Artificial Sequence
  Description of Artificial Sequence: Synthetic oligonucleotide
  Antisense strand to SEQ ID NO: 793514
ucaaugagaaugcuugaca

SEQ ID NO: 793516 - RNA, 19 nt, Artificial Sequence
  Description of Artificial Sequence: Synthetic oligonucleotide
  Sense strand starting at position 3211 of SEQ ID NO: 587455
aucagugauuggcuagaca

SEQ ID NO: 793517 - RNA, 19 nt, Artificial Sequence
  Description of Artificial Sequence: Synthetic oligonucleotide
  Antisense strand to SEQ ID NO: 793516
ugucuagccaaucacugau

SEQ ID NO: 793518 - RNA, 19 nt, Artificial Sequence
  Description of Artificial Sequence: Synthetic oligonucleotide
  Sense strand starting at position 3214 of SEQ ID NO: 587455
agugauuggcuagacauug

SEQ ID NO: 793519 - RNA, 19 nt, Artificial Sequence
  Description of Artificial Sequence: Synthetic oligonucleotide
  Antisense strand to SEQ ID NO: 793518
caaugucuagccaaucacu

SEQ ID NO: 793520 - RNA, 19 nt, Artificial Sequence
  Description of Artificial Sequence: Synthetic oligonucleotide
  Sense strand starting at position 3219 of SEQ ID NO: 587455
uuggcuagacauuguuaaa

SEQ ID NO: 793521 - RNA, 19 nt, Artificial Sequence
  Description of Artificial Sequence: Synthetic oligonucleotide
  Antisense strand to SEQ ID NO: 793520
uuuaacaaugucuagccaa

SEQ ID NO: 793522 - RNA, 19 nt, Artificial Sequence
  Description of Artificial Sequence: Synthetic oligonucleotide
  Sense strand starting at position 3429 of SEQ ID NO: 587455
gugcuuucucaagagaaau

SEQ ID NO: 793523 - RNA, 19 nt, Artificial Sequence
  Description of Artificial Sequence: Synthetic oligonucleotide
  Antisense strand to SEQ ID NO: 793522
auuucucuugagaaagcac

SEQ ID NO: 793524 - RNA, 19 nt, Artificial Sequence
  Description of Artificial Sequence: Synthetic oligonucleotide
  Sense strand starting at position 3476 of SEQ ID NO: 587455
gcuuuacaugaauaugauu

SEQ ID NO: 793525 - RNA, 19 nt, Artificial Sequence
  Description of Artificial Sequence: Synthetic oligonucleotide
  Antisense strand to SEQ ID NO: 793524
aaucauauucauguaaagc

SEQ ID NO: 793526 - RNA, 19 nt, Artificial Sequence
  Description of Artificial Sequence: Synthetic oligonucleotide
  Sense strand starting at position 3541 of SEQ ID NO: 587455
auggcaggccuucgauuua

SEQ ID NO: 793527 - RNA, 19 nt, Artificial Sequence
  Description of Artificial Sequence: Synthetic oligonucleotide
  Antisense strand to SEQ ID NO: 793526
uaaaucgaaggccugccau

SEQ ID NO: 793528 - RNA, 19 nt, Artificial Sequence
  Description of Artificial Sequence: Synthetic oligonucleotide
  Sense strand starting at position 3594 of SEQ ID NO: 587455
uguccuggugaguaucaga

SEQ ID NO: 793529 - RNA, 19 nt, Artificial Sequence
  Description of Artificial Sequence: Synthetic oligonucleotide
  Antisense strand to SEQ ID NO: 793528
ucugauacucaccaggaca

SEQ ID NO: 793530 - RNA, 19 nt, Artificial Sequence
  Description of Artificial Sequence: Synthetic oligonucleotide
  Sense strand starting at position 3618 of SEQ ID NO: 587455
cucguuugugugcuauguu

SEQ ID NO: 793531 - RNA, 19 nt, Artificial Sequence
  Description of Artificial Sequence: Synthetic oligonucleotide
  Antisense strand to SEQ ID NO: 793530
aacauagcacacaaacgag

SEQ ID NO: 793532 - RNA, 19 nt, Artificial Sequence
  Description of Artificial Sequence: Synthetic oligonucleotide
  Sense strand starting at position 3684 of SEQ ID NO: 587455
gugaguuagcugcucuagu

SEQ ID NO: 793533 - RNA, 19 nt, Artificial Sequence
  Description of Artificial Sequence: Synthetic oligonucleotide
  Antisense strand to SEQ ID NO: 793532
acuagagcagcuaacucac

SEQ ID NO: 793534 - RNA, 19 nt, Artificial Sequence
  Description of Artificial Sequence: Synthetic oligonucleotide
  Sense strand starting at position 12 of SEQ ID NO: 587456
agggaagcuuuccaaucaa

SEQ ID NO: 793535 - RNA, 19 nt, Artificial Sequence
  Description of Artificial Sequence: Synthetic oligonucleotide
  Antisense strand to SEQ ID NO: 793534
uugauuggaaagcuucccu

SEQ ID NO: 793536 - RNA, 19 nt, Artificial Sequence
  Description of Artificial Sequence: Synthetic oligonucleotide
  Sense strand starting at position 47 of SEQ ID NO: 587456
aggagaaacuugucaaugc

SEQ ID NO: 793537 - RNA, 19 nt, Artificial Sequence
  Description of Artificial Sequence: Synthetic oligonucleotide
  Antisense strand to SEQ ID NO: 793536
gcauugacaaguuucuccu

SEQ ID NO: 793538 - RNA, 19 nt, Artificial Sequence
  Description of Artificial Sequence: Synthetic oligonucleotide
  Sense strand starting at position 48 of SEQ ID NO: 587456
ggagaaacuugucaaugca

SEQ ID NO: 793539 - RNA, 19 nt, Artificial Sequence
  Description of Artificial Sequence: Synthetic oligonucleotide
  Antisense strand to SEQ ID NO: 793538
ugcauugacaaguuucucc

SEQ ID NO: 793540 - RNA, 19 nt, Artificial Sequence
  Description of Artificial Sequence: Synthetic oligonucleotide
  Sense strand starting at position 102 of SEQ ID NO: 587456
agacuuaagucagaugucu

SEQ ID NO: 793541 - RNA, 19 nt, Artificial Sequence
  Description of Artificial Sequence: Synthetic oligonucleotide
  Antisense strand to SEQ ID NO: 793540
agacaucugacuuaagucu

SEQ ID NO: 793542 - RNA, 19 nt, Artificial Sequence
  Description of Artificial Sequence: Synthetic oligonucleotide
  Sense strand starting at position 131 of SEQ ID NO: 587456
gcagguugccugcagauua

SEQ ID NO: 793543 - RNA, 19 nt, Artificial Sequence
  Description of Artificial Sequence: Synthetic oligonucleotide
  Antisense strand to SEQ ID NO: 793542
uaaucugcaggcaaccugc

SEQ ID NO: 793544 - RNA, 19 nt, Artificial Sequence
  Description of Artificial Sequence: Synthetic oligonucleotide
  Sense strand starting at position 151 of SEQ ID NO: 587456
aucauucccuaguguuacu

SEQ ID NO: 793545 - RNA, 19 nt, Artificial Sequence
  Description of Artificial Sequence: Synthetic oligonucleotide
  Antisense strand to SEQ ID NO: 793544
aguaacacuagggaaugau

SEQ ID NO: 793546 - RNA, 19 nt, Artificial Sequence
  Description of Artificial Sequence: Synthetic oligonucleotide
  Sense strand starting at position 180 of SEQ ID NO: 587456
uuggaugugccaggcuuaa

SEQ ID NO: 793547 - RNA, 19 nt, Artificial Sequence
  Description of Artificial Sequence: Synthetic oligonucleotide
  Antisense strand to SEQ ID NO: 793546
uuaagccuggcacauccaa

SEQ ID NO: 793548 - RNA, 19 nt, Artificial Sequence
  Description of Artificial Sequence: Synthetic oligonucleotide
  Sense strand starting at position 184 of SEQ ID NO: 587456
augugccaggcuuaagaaa

SEQ ID NO: 793549 - RNA, 19 nt, Artificial Sequence
  Description of Artificial Sequence: Synthetic oligonucleotide
  Antisense strand to SEQ ID NO: 793548
uuucuuaagccuggcacau

SEQ ID NO: 793550 - RNA, 19 nt, Artificial Sequence
  Description of Artificial Sequence: Synthetic oligonucleotide
  Sense strand starting at position 238 of SEQ ID NO: 587456
guauacagaucuggaaagu

SEQ ID NO: 793551 - RNA, 19 nt, Artificial Sequence
  Description of Artificial Sequence: Synthetic oligonucleotide
  Antisense strand to SEQ ID NO: 793550
acuuuccagaucuguauac

SEQ ID NO: 793552 - RNA, 19 nt, Artificial Sequence
  Description of Artificial Sequence: Synthetic oligonucleotide
  Sense strand starting at position 247 of SEQ ID NO: 587456
ucuggaaagucuuggauga

SEQ ID NO: 793553 - RNA, 19 nt, Artificial Sequence
  Description of Artificial Sequence: Synthetic oligonucleotide
  Antisense strand to SEQ ID NO: 793552
ucauccaagacuuuccaga

SEQ ID NO: 793554 - RNA, 19 nt, Artificial Sequence
  Description of Artificial Sequence: Synthetic oligonucleotide
  Sense strand starting at position 249 of SEQ ID NO: 587456
uggaaagucuuggaugaau

SEQ ID NO: 793555 - RNA, 19 nt, Artificial Sequence
  Description of Artificial Sequence: Synthetic oligonucleotide
  Antisense strand to SEQ ID NO: 793554
auucauccaagacuuucca

SEQ ID NO: 793556 - RNA, 19 nt, Artificial Sequence
  Description of Artificial Sequence: Synthetic oligonucleotide
  Sense strand starting at position 279 of SEQ ID NO: 587456
aggauagcuuucuccuaua

SEQ ID NO: 793557 - RNA, 19 nt, Artificial Sequence
  Description of Artificial Sequence: Synthetic oligonucleotide
  Antisense strand to SEQ ID NO: 793556
uauaggagaaagcuauccu

SEQ ID NO: 793558 - RNA, 19 nt, Artificial Sequence
  Description of Artificial Sequence: Synthetic oligonucleotide
  Sense strand starting at position 298 of SEQ ID NO: 587456
acucgaagcucgugugcua

SEQ ID NO: 793559 - RNA, 19 nt, Artificial Sequence
  Description of Artificial Sequence: Synthetic oligonucleotide
  Antisense strand to SEQ ID NO: 793558
uagcacacgagcuucgagu

SEQ ID NO: 793560 - RNA, 19 nt, Artificial Sequence
  Description of Artificial Sequence: Synthetic oligonucleotide
  Sense strand starting at position 549 of SEQ ID NO: 587456
cgagccuuucguugggagu

SEQ ID NO: 793561 - RNA, 19 nt, Artificial Sequence
  Description of Artificial Sequence: Synthetic oligonucleotide
  Antisense strand to SEQ ID NO: 793560
acucccaacgaaaggcucg

SEQ ID NO: 793562 - RNA, 19 nt, Artificial Sequence
  Description of Artificial Sequence: Synthetic oligonucleotide
  Sense strand starting at position 550 of SEQ ID NO: 587456
gagccuuucguugggaguu

SEQ ID NO: 793563 - RNA, 19 nt, Artificial Sequence
  Description of Artificial Sequence: Synthetic oligonucleotide
  Antisense strand to SEQ ID NO: 793562
aacucccaacgaaaggcuc

SEQ ID NO: 793564 - RNA, 19 nt, Artificial Sequence
  Description of Artificial Sequence: Synthetic oligonucleotide
  Sense strand starting at position 552 of SEQ ID NO: 587456
gccuuucguugggaguuca

SEQ ID NO: 793565 - RNA, 19 nt, Artificial Sequence
  Description of Artificial Sequence: Synthetic oligonucleotide
  Antisense strand to SEQ ID NO: 793564
ugaacucccaacgaaaggc

SEQ ID NO: 793566 - RNA, 19 nt, Artificial Sequence
  Description of Artificial Sequence: Synthetic oligonucleotide
  Sense strand starting at position 798 of SEQ ID NO: 587456
uccaguaacuacucaggaa

SEQ ID NO: 793567 - RNA, 19 nt, Artificial Sequence
  Description of Artificial Sequence: Synthetic oligonucleotide
  Antisense strand to SEQ ID NO: 793566
uuccugaguaguuacugga

SEQ ID NO: 793568 - RNA, 19 nt, Artificial Sequence
  Description of Artificial Sequence: Synthetic oligonucleotide
  Sense strand starting at position 830 of SEQ ID NO: 587456
uagugaaugucggucccaa

SEQ ID NO: 793569 - RNA, 19 nt, Artificial Sequence
  Description of Artificial Sequence: Synthetic oligonucleotide
  Antisense strand to SEQ ID NO: 793568
uugggaccgacauucacua

SEQ ID NO: 793570 - RNA, 19 nt, Artificial Sequence
  Description of Artificial Sequence: Synthetic oligonucleotide
  Sense strand starting at position 1513 of SEQ ID NO: 587456
gcaguuggccaauaaguuu

SEQ ID NO: 793571 - RNA, 19 nt, Artificial Sequence
  Description of Artificial Sequence: Synthetic oligonucleotide
  Antisense strand to SEQ ID NO: 793570
aaacuuauuggccaacugc

SEQ ID NO: 793572 - RNA, 19 nt, Artificial Sequence
  Description of Artificial Sequence: Synthetic oligonucleotide
  Sense strand starting at position 2522 of SEQ ID NO: 587456
gaagguucugaacggucaa

SEQ ID NO: 793573 - RNA, 19 nt, Artificial Sequence
  Description of Artificial Sequence: Synthetic oligonucleotide
  Antisense strand to SEQ ID NO: 793572
uugaccguucagaaccuuc

SEQ ID NO: 793574 - RNA, 19 nt, Artificial Sequence
  Description of Artificial Sequence: Synthetic oligonucleotide
  Sense strand starting at position 2895 of SEQ ID NO: 587456
cgcaguuaucgcgcgcaaa

SEQ ID NO: 793575 - RNA, 19 nt, Artificial Sequence
  Description of Artificial Sequence: Synthetic oligonucleotide
  Antisense strand to SEQ ID NO: 793574
uuugcgcgcgauaacugcg

SEQ ID NO: 793576 - RNA, 19 nt, Artificial Sequence
  Description of Artificial Sequence: Synthetic oligonucleotide
  Sense strand starting at position 2896 of SEQ ID NO: 587456
gcaguuaucgcgcgcaaag

SEQ ID NO: 793577 - RNA, 19 nt, Artificial Sequence
  Description of Artificial Sequence: Synthetic oligonucleotide
  Antisense strand to SEQ ID NO: 793576
cuuugcgcgcgauaacugc

SEQ ID NO: 793578 - RNA, 19 nt, Artificial Sequence
  Description of Artificial Sequence: Synthetic oligonucleotide
  Sense strand starting at position 3195 of SEQ ID NO: 587456
guguguugacuugaccaag

SEQ ID NO: 793579 - RNA, 19 nt, Artificial Sequence
  Description of Artificial Sequence: Synthetic oligonucleotide
  Antisense strand to SEQ ID NO: 793578
cuuggucaagucaacacac

SEQ ID NO: 793580 - RNA, 19 nt, Artificial Sequence
  Description of Artificial Sequence: Synthetic oligonucleotide
  Sense strand starting at position 3301 of SEQ ID NO: 587456
gcaguauguuguugggucu

SEQ ID NO: 793581 - RNA, 19 nt, Artificial Sequence
  Description of Artificial Sequence: Synthetic oligonucleotide
  Antisense strand to SEQ ID NO: 793580
agacccaacaacauacugc

SEQ ID NO: 793582 - RNA, 19 nt, Artificial Sequence
  Description of Artificial Sequence: Synthetic oligonucleotide
  Sense strand starting at position 3381 of SEQ ID NO: 587456
gcgauuuguucuugggaac

SEQ ID NO: 793583 - RNA, 19 nt, Artificial Sequence
  Description of Artificial Sequence: Synthetic oligonucleotide
  Antisense strand to SEQ ID NO: 793582
guucccaagaacaaaucgc

SEQ ID NO: 793584 - RNA, 19 nt, Artificial Sequence
  Description of Artificial Sequence: Synthetic oligonucleotide
  Sense strand starting at position 3384 of SEQ ID NO: 587456
auuuguucuugggaacaga

SEQ ID NO: 793585 - RNA, 19 nt, Artificial Sequence
  Description of Artificial Sequence: Synthetic oligonucleotide
  Antisense strand to SEQ ID NO: 793584
ucuguucccaagaacaaau

SEQ ID NO: 793586 - RNA, 19 nt, Artificial Sequence
  Description of Artificial Sequence: Synthetic oligonucleotide
  Sense strand starting at position 3395 of SEQ ID NO: 587456
ggaacagaauucugucuga

SEQ ID NO: 793587 - RNA, 19 nt, Artificial Sequence
  Description of Artificial Sequence: Synthetic oligonucleotide
  Antisense strand to SEQ ID NO: 793586
ucagacagaauucuguucc

SEQ ID NO: 793588 - RNA, 19 nt, Artificial Sequence
  Description of Artificial Sequence: Synthetic oligonucleotide
  Sense strand starting at position 3398 of SEQ ID NO: 587456
acagaauucugucugaagu

SEQ ID NO: 793589 - RNA, 19 nt, Artificial Sequence
  Description of Artificial Sequence: Synthetic oligonucleotide
  Antisense strand to SEQ ID NO: 793588
acuucagacagaauucugu

SEQ ID NO: 793590 - RNA, 19 nt, Artificial Sequence
  Description of Artificial Sequence: Synthetic oligonucleotide
  Sense strand starting at position 3399 of SEQ ID NO: 587456
cagaauucugucugaagua

SEQ ID NO: 793591 - RNA, 19 nt, Artificial Sequence
  Description of Artificial Sequence: Synthetic oligonucleotide
  Antisense strand to SEQ ID NO: 793590
uacuucagacagaauucug

SEQ ID NO: 793592 - RNA, 19 nt, Artificial Sequence
  Description of Artificial Sequence: Synthetic oligonucleotide
  Sense strand starting at position 3400 of SEQ ID NO: 587456
agaauucugucugaaguau

SEQ ID NO: 793593 - RNA, 19 nt, Artificial Sequence
  Description of Artificial Sequence: Synthetic oligonucleotide
  Antisense strand to SEQ ID NO: 793592
auacuucagacagaauucu

SEQ ID NO: 793594 - RNA, 19 nt, Artificial Sequence
  Description of Artificial Sequence: Synthetic oligonucleotide
  Sense strand starting at position 3479 of SEQ ID NO: 587456
ugcaccuaucccugcagaa

SEQ ID NO: 793595 - RNA, 19 nt, Artificial Sequence
  Description of Artificial Sequence: Synthetic oligonucleotide
  Antisense strand to SEQ ID NO: 793594
uucugcagggauaggugca

SEQ ID NO: 793596 - RNA, 19 nt, Artificial Sequence
  Description of Artificial Sequence: Synthetic oligonucleotide
  Sense strand starting at position 3508 of SEQ ID NO: 587456
guacaaauccgguaaccuu

SEQ ID NO: 793597 - RNA, 19 nt, Artificial Sequence
  Description of Artificial Sequence: Synthetic oligonucleotide
  Antisense strand to SEQ ID NO: 793596
aagguuaccggauuuguac

SEQ ID NO: 793598 - RNA, 19 nt, Artificial Sequence
  Description of Artificial Sequence: Synthetic oligonucleotide
  Sense strand starting at position 3525 of SEQ ID NO: 587456
uuucaagacgcgugucaag

SEQ ID NO: 793599 - RNA, 19 nt, Artificial Sequence
  Description of Artificial Sequence: Synthetic oligonucleotide
  Antisense strand to SEQ ID NO: 793598
cuugacacgcgucuugaaa

SEQ ID NO: 793600 - RNA, 19 nt, Artificial Sequence
  Description of Artificial Sequence: Synthetic oligonucleotide
  Sense strand starting at position 464 of SEQ ID NO: 587457
ggcucaccugcacauagau

SEQ ID NO: 793601 - RNA, 19 nt, Artificial Sequence
  Description of Artificial Sequence: Synthetic oligonucleotide
  Antisense strand to SEQ ID NO: 793600
aucuaugugcaggugagcc

SEQ ID NO: 793602 - RNA, 19 nt, Artificial Sequence
  Description of Artificial Sequence: Synthetic oligonucleotide
  Sense strand starting at position 1052 of SEQ ID NO: 587457
caaccugauuuggaguuau

SEQ ID NO: 793603 - RNA, 19 nt, Artificial Sequence
  Description of Artificial Sequence: Synthetic oligonucleotide
  Antisense strand to SEQ ID NO: 793602
auaacuccaaaucagguug

SEQ ID NO: 793604 - RNA, 19 nt, Artificial Sequence
  Description of Artificial Sequence: Synthetic oligonucleotide
  Sense strand starting at position 1091 of SEQ ID NO: 587457
gucuuucugcucugcauaa

SEQ ID NO: 793605 - RNA, 19 nt, Artificial Sequence
  Description of Artificial Sequence: Synthetic oligonucleotide
  Antisense strand to SEQ ID NO: 793604
uuaugcagagcagaaagac

SEQ ID NO: 793606 - RNA, 19 nt, Artificial Sequence
  Description of Artificial Sequence: Synthetic oligonucleotide
  Sense strand starting at position 1093 of SEQ ID NO: 587457
cuuucugcucugcauaagu

SEQ ID NO: 793607 - RNA, 19 nt, Artificial Sequence
  Description of Artificial Sequence: Synthetic oligonucleotide
  Antisense strand to SEQ ID NO: 793606
acuuaugcagagcagaaag

SEQ ID NO: 793608 - RNA, 19 nt, Artificial Sequence
  Description of Artificial Sequence: Synthetic oligonucleotide
  Sense strand starting at position 1104 of SEQ ID NO: 587457
gcauaagugccuugcuugu

SEQ ID NO: 793609 - RNA, 19 nt, Artificial Sequence
  Description of Artificial Sequence: Synthetic oligonucleotide
  Antisense strand to SEQ ID NO: 793608
acaagcaaggcacuuaugc

SEQ ID NO: 793610 - RNA, 19 nt, Artificial Sequence
  Description of Artificial Sequence: Synthetic oligonucleotide
  Sense strand starting at position 1180 of SEQ ID NO: 587457
acacucaugcgcuaagcaa

SEQ ID NO: 793611 - RNA, 19 nt, Artificial Sequence
  Description of Artificial Sequence: Synthetic oligonucleotide
  Antisense strand to SEQ ID NO: 793610
uugcuuagcgcaugagugu

SEQ ID NO: 793612 - RNA, 19 nt, Artificial Sequence
  Description of Artificial Sequence: Synthetic oligonucleotide
  Sense strand starting at position 1297 of SEQ ID NO: 587457
uuauguuccagcgaggaaa

SEQ ID NO: 793613 - RNA, 19 nt, Artificial Sequence
  Description of Artificial Sequence: Synthetic oligonucleotide
  Antisense strand to SEQ ID NO: 793612
uuuccucgcuggaacauaa

SEQ ID NO: 793614 - RNA, 19 nt, Artificial Sequence
  Description of Artificial Sequence: Synthetic oligonucleotide
  Sense strand starting at position 1340 of SEQ ID NO: 587457
auaggcauuugagauugua

SEQ ID NO: 793615 - RNA, 19 nt, Artificial Sequence
  Description of Artificial Sequence: Synthetic oligonucleotide
  Antisense strand to SEQ ID NO: 793614
uacaaucucaaaugccuau

SEQ ID NO: 793616 - RNA, 19 nt, Artificial Sequence
  Description of Artificial Sequence: Synthetic oligonucleotide
  Sense strand starting at position 1348 of SEQ ID NO: 587457
uugagauuguaggugcaca

SEQ ID NO: 793617 - RNA, 19 nt, Artificial Sequence
  Description of Artificial Sequence: Synthetic oligonucleotide
  Antisense strand to SEQ ID NO: 793616
ugugcaccuacaaucucaa

SEQ ID NO: 793618 - RNA, 19 nt, Artificial Sequence
  Description of Artificial Sequence: Synthetic oligonucleotide
  Sense strand starting at position 1389 of SEQ ID NO: 587457
cgagaaguaccgcguggau

SEQ ID NO: 793619 - RNA, 19 nt, Artificial Sequence
  Description of Artificial Sequence: Synthetic oligonucleotide
  Antisense strand to SEQ ID NO: 793618
auccacgcgguacuucucg

SEQ ID NO: 793620 - RNA, 19 nt, Artificial Sequence
  Description of Artificial Sequence: Synthetic oligonucleotide
  Sense strand starting at position 1391 of SEQ ID NO: 587457
agaaguaccgcguggauaa

SEQ ID NO: 793621 - RNA, 19 nt, Artificial Sequence
  Description of Artificial Sequence: Synthetic oligonucleotide
  Antisense strand to SEQ ID NO: 793620
uuauccacgcgguacuucu

SEQ ID NO: 793622 - RNA, 19 nt, Artificial Sequence
  Description of Artificial Sequence: Synthetic oligonucleotide
  Sense strand starting at position 1392 of SEQ ID NO: 587457
gaaguaccgcguggauaau

SEQ ID NO: 793623 - RNA, 19 nt, Artificial Sequence
  Description of Artificial Sequence: Synthetic oligonucleotide
  Antisense strand to SEQ ID NO: 793622
auuauccacgcgguacuuc

SEQ ID NO: 793624 - RNA, 19 nt, Artificial Sequence
  Description of Artificial Sequence: Synthetic oligonucleotide
  Sense strand starting at position 1406 of SEQ ID NO: 587457
auaauaaggucgucuggga

SEQ ID NO: 793625 - RNA, 19 nt, Artificial Sequence
  Description of Artificial Sequence: Synthetic oligonucleotide
  Antisense strand to SEQ ID NO: 793624
ucccagacgaccuuauuau

SEQ ID NO: 793626 - RNA, 19 nt, Artificial Sequence
  Description of Artificial Sequence: Synthetic oligonucleotide
  Sense strand starting at position 1567 of SEQ ID NO: 587457
uugcguuuacuccgaguga

SEQ ID NO: 793627 - RNA, 19 nt, Artificial Sequence
  Description of Artificial Sequence: Synthetic oligonucleotide
  Antisense strand to SEQ ID NO: 793626
ucacucggaguaaacgcaa

SEQ ID NO: 793628 - RNA, 19 nt, Artificial Sequence
  Description of Artificial Sequence: Synthetic oligonucleotide
  Sense strand starting at position 1569 of SEQ ID NO: 587457
gcguuuacuccgagugaga

SEQ ID NO: 793629 - RNA, 19 nt, Artificial Sequence
  Description of Artificial Sequence: Synthetic oligonucleotide
  Antisense strand to SEQ ID NO: 793628
ucucacucggaguaaacgc

SEQ ID NO: 793630 - RNA, 19 nt, Artificial Sequence
  Description of Artificial Sequence: Synthetic oligonucleotide
  Sense strand starting at position 1571 of SEQ ID NO: 587457
guuuacuccgagugagaug

SEQ ID NO: 793631 - RNA, 19 nt, Artificial Sequence
  Description of Artificial Sequence: Synthetic oligonucleotide
  Antisense strand to SEQ ID NO: 793630
caucucacucggaguaaac

SEQ ID NO: 793632 - RNA, 19 nt, Artificial Sequence
  Description of Artificial Sequence: Synthetic oligonucleotide
  Sense strand starting at position 2263 of SEQ ID NO: 587457
ggaggaauugcccagucac

SEQ ID NO: 793633 - RNA, 19 nt, Artificial Sequence
  Description of Artificial Sequence: Synthetic oligonucleotide
  Antisense strand to SEQ ID NO: 793632
gugacugggcaauuccucc

SEQ ID NO: 793634 - RNA, 19 nt, Artificial Sequence
  Description of Artificial Sequence: Synthetic oligonucleotide
  Sense strand starting at position 2378 of SEQ ID NO: 587457
aaggcauugagcgguccua

SEQ ID NO: 793635 - RNA, 19 nt, Artificial Sequence
  Description of Artificial Sequence: Synthetic oligonucleotide
  Antisense strand to SEQ ID NO: 793634
uaggaccgcucaaugccuu

SEQ ID NO: 793636 - RNA, 19 nt, Artificial Sequence
  Description of Artificial Sequence: Synthetic oligonucleotide
  Sense strand starting at position 2551 of SEQ ID NO: 587457
gguuguaugucuguuuauc

SEQ ID NO: 793637 - RNA, 19 nt, Artificial Sequence
  Description of Artificial Sequence: Synthetic oligonucleotide
  Antisense strand to SEQ ID NO: 793636
gauaaacagacauacaacc

SEQ ID NO: 793638 - RNA, 19 nt, Artificial Sequence
  Description of Artificial Sequence: Synthetic oligonucleotide
  Sense strand starting at position 2559 of SEQ ID NO: 587457
gucuguuuaucucuugcca

SEQ ID NO: 793639 - RNA, 19 nt, Artificial Sequence
  Description of Artificial Sequence: Synthetic oligonucleotide
  Antisense strand to SEQ ID NO: 793638
uggcaagagauaaacagac

SEQ ID NO: 793640 - RNA, 19 nt, Artificial Sequence
  Description of Artificial Sequence: Synthetic oligonucleotide
  Sense strand starting at position 2563 of SEQ ID NO: 587457
guuuaucucuugccacuua

SEQ ID NO: 793641 - RNA, 19 nt, Artificial Sequence
  Description of Artificial Sequence: Synthetic oligonucleotide
  Antisense strand to SEQ ID NO: 793640
uaaguggcaagagauaaac

SEQ ID NO: 793642 - RNA, 19 nt, Artificial Sequence
  Description of Artificial Sequence: Synthetic oligonucleotide
  Sense strand starting at position 2613 of SEQ ID NO: 587457
cuauuauuaugugcugcaa

SEQ ID NO: 793643 - RNA, 19 nt, Artificial Sequence
  Description of Artificial Sequence: Synthetic oligonucleotide
  Antisense strand to SEQ ID NO: 793642
uugcagcacauaauaauag

SEQ ID NO: 793644 - RNA, 19 nt, Artificial Sequence
  Description of Artificial Sequence: Synthetic oligonucleotide
  Sense strand starting at position 2640 of SEQ ID NO: 587457
uaucuaggcucagcuagau

SEQ ID NO: 793645 - RNA, 19 nt, Artificial Sequence
  Description of Artificial Sequence: Synthetic oligonucleotide
  Antisense strand to SEQ ID NO: 793644
aucuagcugagccuagaua

SEQ ID NO: 793646 - RNA, 19 nt, Artificial Sequence
  Description of Artificial Sequence: Synthetic oligonucleotide
  Sense strand starting at position 2644 of SEQ ID NO: 587457
uaggcucagcuagauaguu

SEQ ID NO: 793647 - RNA, 19 nt, Artificial Sequence
  Description of Artificial Sequence: Synthetic oligonucleotide
  Antisense strand to SEQ ID NO: 793646
aacuaucuagcugagccua

SEQ ID NO: 793648 - RNA, 19 nt, Artificial Sequence
  Description of Artificial Sequence: Synthetic oligonucleotide
  Sense strand starting at position 2652 of SEQ ID NO: 587457
gcuagauaguuugcacuua

SEQ ID NO: 793649 - RNA, 19 nt, Artificial Sequence
  Description of Artificial Sequence: Synthetic oligonucleotide
  Antisense strand to SEQ ID NO: 793648
uaagugcaaacuaucuagc

SEQ ID NO: 793650 - RNA, 19 nt, Artificial Sequence
  Description of Artificial Sequence: Synthetic oligonucleotide
  Sense strand starting at position 2862 of SEQ ID NO: 587457
guagccuuccaggacaaca

SEQ ID NO: 793651 - RNA, 19 nt, Artificial Sequence
  Description of Artificial Sequence: Synthetic oligonucleotide
  Antisense strand to SEQ ID NO: 793650
uguuguccuggaaggcuac

SEQ ID NO: 793652 - RNA, 19 nt, Artificial Sequence
  Description of Artificial Sequence: Synthetic oligonucleotide
  Sense strand starting at position 2887 of SEQ ID NO: 587457
acaacaugugcaugguauu

SEQ ID NO: 793653 - RNA, 19 nt, Artificial Sequence
  Description of Artificial Sequence: Synthetic oligonucleotide
  Antisense strand to SEQ ID NO: 793652
aauaccaugcacauguugu

SEQ ID NO: 793654 - RNA, 19 nt, Artificial Sequence
  Description of Artificial Sequence: Synthetic oligonucleotide
  Sense strand starting at position 2888 of SEQ ID NO: 587457
caacaugugcaugguauuu

SEQ ID NO: 793655 - RNA, 19 nt, Artificial Sequence
  Description of Artificial Sequence: Synthetic oligonucleotide
  Antisense strand to SEQ ID NO: 793654
aaauaccaugcacauguug

SEQ ID NO: 793656 - RNA, 19 nt, Artificial Sequence
  Description of Artificial Sequence: Synthetic oligonucleotide
  Sense strand starting at position 2972 of SEQ ID NO: 587457
gacagaucugcccaggcuu

SEQ ID NO: 793657 - RNA, 19 nt, Artificial Sequence
  Description of Artificial Sequence: Synthetic oligonucleotide
  Antisense strand to SEQ ID NO: 793656
aagccugggcagaucuguc

SEQ ID NO: 793658 - RNA, 19 nt, Artificial Sequence
  Description of Artificial Sequence: Synthetic oligonucleotide
  Sense strand starting at position 3033 of SEQ ID NO: 587457
ucaauauuagacuguagga

SEQ ID NO: 793659 - RNA, 19 nt, Artificial Sequence
  Description of Artificial Sequence: Synthetic oligonucleotide
  Antisense strand to SEQ ID NO: 793658
uccuacagucuaauauuga

SEQ ID NO: 793660 - RNA, 19 nt, Artificial Sequence
  Description of Artificial Sequence: Synthetic oligonucleotide
  Sense strand starting at position 3066 of SEQ ID NO: 587457
agggaaauguggucugcug

SEQ ID NO: 793661 - RNA, 19 nt, Artificial Sequence
  Description of Artificial Sequence: Synthetic oligonucleotide
  Antisense strand to SEQ ID NO: 793660
cagcagaccacauuucccu

SEQ ID NO: 793662 - RNA, 19 nt, Artificial Sequence
  Description of Artificial Sequence: Synthetic oligonucleotide
  Sense strand starting at position 3068 of SEQ ID NO: 587457
ggaaauguggucugcugca

SEQ ID NO: 793663 - RNA, 19 nt, Artificial Sequence
  Description of Artificial Sequence: Synthetic oligonucleotide
  Antisense strand to SEQ ID NO: 793662
ugcagcagaccacauuucc

SEQ ID NO: 793664 - RNA, 19 nt, Artificial Sequence
  Description of Artificial Sequence: Synthetic oligonucleotide
  Sense strand starting at position 3125 of SEQ ID NO: 587457
ugguuaagcucuccugaaa

SEQ ID NO: 793665 - RNA, 19 nt, Artificial Sequence
  Description of Artificial Sequence: Synthetic oligonucleotide
  Antisense strand to SEQ ID NO: 793664
uuucaggagagcuuaacca

SEQ ID NO: 793666 - RNA, 19 nt, Artificial Sequence
  Description of Artificial Sequence: Synthetic oligonucleotide
  Sense strand starting at position 3128 of SEQ ID NO: 587457
uuaagcucuccugaaagac

SEQ ID NO: 793667 - RNA, 19 nt, Artificial Sequence
  Description of Artificial Sequence: Synthetic oligonucleotide
  Antisense strand to SEQ ID NO: 793666
gucuuucaggagagcuuaa

SEQ ID NO: 793668 - RNA, 19 nt, Artificial Sequence
  Description of Artificial Sequence: Synthetic oligonucleotide
  Sense strand starting at position 3142 of SEQ ID NO: 587457
aagacugaggcaugagagu

SEQ ID NO: 793669 - RNA, 19 nt, Artificial Sequence
  Description of Artificial Sequence: Synthetic oligonucleotide
  Antisense strand to SEQ ID NO: 793668
acucucaugccucagucuu

SEQ ID NO: 793670 - RNA, 19 nt, Artificial Sequence
  Description of Artificial Sequence: Synthetic oligonucleotide
  Sense strand starting at position 3148 of SEQ ID NO: 587457
gaggcaugagagugaguga

SEQ ID NO: 793671 - RNA, 19 nt, Artificial Sequence
  Description of Artificial Sequence: Synthetic oligonucleotide
  Antisense strand to SEQ ID NO: 793670
ucacucacucucaugccuc

SEQ ID NO: 793672 - RNA, 19 nt, Artificial Sequence
  Description of Artificial Sequence: Synthetic oligonucleotide
  Sense strand starting at position 3379 of SEQ ID NO: 587457
gauggagucuuacucugca

SEQ ID NO: 793673 - RNA, 19 nt, Artificial Sequence
  Description of Artificial Sequence: Synthetic oligonucleotide
  Antisense strand to SEQ ID NO: 793672
ugcagaguaagacuccauc

SEQ ID NO: 793674 - RNA, 19 nt, Artificial Sequence
  Description of Artificial Sequence: Synthetic oligonucleotide
  Sense strand starting at position 3818 of SEQ ID NO: 587457
uggguuguccacugacagu

SEQ ID NO: 793675 - RNA, 19 nt, Artificial Sequence
  Description of Artificial Sequence: Synthetic oligonucleotide
  Antisense strand to SEQ ID NO: 793674
acugucaguggacaaccca

SEQ ID NO: 793676 - RNA, 19 nt, Artificial Sequence
  Description of Artificial Sequence: Synthetic oligonucleotide
  Sense strand starting at position 3931 of SEQ ID NO: 587457
ggacgauguuggucuucag

SEQ ID NO: 793677 - RNA, 19 nt, Artificial Sequence
  Description of Artificial Sequence: Synthetic oligonucleotide
  Antisense strand to SEQ ID NO: 793676
cugaagaccaacaucgucc

SEQ ID NO: 793678 - RNA, 19 nt, Artificial Sequence
  Description of Artificial Sequence: Synthetic oligonucleotide
  Sense strand starting at position 3948 of SEQ ID NO: 587457
agccuaagguguccaaagu

SEQ ID NO: 793679 - RNA, 19 nt, Artificial Sequence
  Description of Artificial Sequence: Synthetic oligonucleotide
  Antisense strand to SEQ ID NO: 793678
acuuuggacaccuuaggcu

SEQ ID NO: 793680 - RNA, 19 nt, Artificial Sequence
  Description of Artificial Sequence: Synthetic oligonucleotide
  Sense strand starting at position 2 of SEQ ID NO: 587458
cagguuuccuaagcaagag

SEQ ID NO: 793681 - RNA, 19 nt, Artificial Sequence
  Description of Artificial Sequence: Synthetic oligonucleotide
  Antisense strand to SEQ ID NO: 793680
cucuugcuuaggaaaccug

SEQ ID NO: 793682 - RNA, 19 nt, Artificial Sequence
  Description of Artificial Sequence: Synthetic oligonucleotide
  Sense strand starting at position 363 of SEQ ID NO: 587458
cguuauggacgugauauaa

SEQ ID NO: 793683 - RNA, 19 nt, Artificial Sequence
  Description of Artificial Sequence: Synthetic oligonucleotide
  Antisense strand to SEQ ID NO: 793682
uuauaucacguccauaacg

SEQ ID NO: 793684 - RNA, 19 nt, Artificial Sequence
  Description of Artificial Sequence: Synthetic oligonucleotide
  Sense strand starting at position 429 of SEQ ID NO: 587458
ugaauaccagcauguacuu

SEQ ID NO: 793685 - RNA, 19 nt, Artificial Sequence
  Description of Artificial Sequence: Synthetic oligonucleotide
  Antisense strand to SEQ ID NO: 793684
aaguacaugcugguauuca

SEQ ID NO: 793686 - RNA, 19 nt, Artificial Sequence
  Description of Artificial Sequence: Synthetic oligonucleotide
  Sense strand starting at position 491 of SEQ ID NO: 587458
ccuccuguccugggaugau

SEQ ID NO: 793687 - RNA, 19 nt, Artificial Sequence
  Description of Artificial Sequence: Synthetic oligonucleotide
  Antisense strand to SEQ ID NO: 793686
aucaucccaggacaggagg

SEQ ID NO: 793688 - RNA, 19 nt, Artificial Sequence
  Description of Artificial Sequence: Synthetic oligonucleotide
  Sense strand starting at position 537 of SEQ ID NO: 587458
caaaguugggucggaaguu

SEQ ID NO: 793689 - RNA, 19 nt, Artificial Sequence
  Description of Artificial Sequence: Synthetic oligonucleotide
  Antisense strand to SEQ ID NO: 793688
aacuuccgacccaacuuug

SEQ ID NO: 793690 - RNA, 19 nt, Artificial Sequence
  Description of Artificial Sequence: Synthetic oligonucleotide
  Sense strand starting at position 615 of SEQ ID NO: 587458
cgguguagucaggccaagu

SEQ ID NO: 793691 - RNA, 19 nt, Artificial Sequence
  Description of Artificial Sequence: Synthetic oligonucleotide
  Antisense strand to SEQ ID NO: 793690
acuuggccugacuacaccg

SEQ ID NO: 793692 - RNA, 19 nt, Artificial Sequence
  Description of Artificial Sequence: Synthetic oligonucleotide
  Sense strand starting at position 626 of SEQ ID NO: 587458
ggccaagugccggaauaua

SEQ ID NO: 793693 - RNA, 19 nt, Artificial Sequence
  Description of Artificial Sequence: Synthetic oligonucleotide
  Antisense strand to SEQ ID NO: 793692
uauauuccggcacuuggcc

SEQ ID NO: 793694 - RNA, 19 nt, Artificial Sequence
  Description of Artificial Sequence: Synthetic oligonucleotide
  Sense strand starting at position 725 of SEQ ID NO: 587458
ggugacaacuggucucugu

SEQ ID NO: 793695 - RNA, 19 nt, Artificial Sequence
  Description of Artificial Sequence: Synthetic oligonucleotide
  Antisense strand to SEQ ID NO: 793694
acagagaccaguugucacc

SEQ ID NO: 793696 - RNA, 19 nt, Artificial Sequence
  Description of Artificial Sequence: Synthetic oligonucleotide
  Sense strand starting at position 728 of SEQ ID NO: 587458
gacaacuggucucugucua

SEQ ID NO: 793697 - RNA, 19 nt, Artificial Sequence
  Description of Artificial Sequence: Synthetic oligonucleotide
  Antisense strand to SEQ ID NO: 793696
uagacagagaccaguuguc

SEQ ID NO: 793698 - RNA, 19 nt, Artificial Sequence
  Description of Artificial Sequence: Synthetic oligonucleotide
  Sense strand starting at position 729 of SEQ ID NO: 587458
acaacuggucucugucuaa

SEQ ID NO: 793699 - RNA, 19 nt, Artificial Sequence
  Description of Artificial Sequence: Synthetic oligonucleotide
  Antisense strand to SEQ ID NO: 793698
uuagacagagaccaguugu

SEQ ID NO: 793700 - RNA, 19 nt, Artificial Sequence
  Description of Artificial Sequence: Synthetic oligonucleotide
  Sense strand starting at position 732 of SEQ ID NO: 587458
acuggucucugucuaaagu

SEQ ID NO: 793701 - RNA, 19 nt, Artificial Sequence
  Description of Artificial Sequence: Synthetic oligonucleotide
  Antisense strand to SEQ ID NO: 793700
acuuuagacagagaccagu

SEQ ID NO: 793702 - RNA, 19 nt, Artificial Sequence
  Description of Artificial Sequence: Synthetic oligonucleotide
  Sense strand starting at position 733 of SEQ ID NO: 587458
cuggucucugucuaaagua

SEQ ID NO: 793703 - RNA, 19 nt, Artificial Sequence
  Description of Artificial Sequence: Synthetic oligonucleotide
  Antisense strand to SEQ ID NO: 793702
uacuuuagacagagaccag

SEQ ID NO: 793704 - RNA, 19 nt, Artificial Sequence
  Description of Artificial Sequence: Synthetic oligonucleotide
  Sense strand starting at position 741 of SEQ ID NO: 587458
ugucuaaaguauccagacu

SEQ ID NO: 793705 - RNA, 19 nt, Artificial Sequence
  Description of Artificial Sequence: Synthetic oligonucleotide
  Antisense strand to SEQ ID NO: 793704
agucuggauacuuuagaca

SEQ ID NO: 793706 - RNA, 19 nt, Artificial Sequence
  Description of Artificial Sequence: Synthetic oligonucleotide
  Sense strand starting at position 833 of SEQ ID NO: 587458
ugguaacuuucggcgauuu

SEQ ID NO: 793707 - RNA, 19 nt, Artificial Sequence
  Description of Artificial Sequence: Synthetic oligonucleotide
  Antisense strand to SEQ ID NO: 793706
aaaucgccgaaaguuacca

SEQ ID NO: 793708 - RNA, 19 nt, Artificial Sequence
  Description of Artificial Sequence: Synthetic oligonucleotide
  Sense strand starting at position 895 of SEQ ID NO: 587458
uuucuugcaaagggugaaa

SEQ ID NO: 793709 - RNA, 19 nt, Artificial Sequence
  Description of Artificial Sequence: Synthetic oligonucleotide
  Antisense strand to SEQ ID NO: 793708
uuucacccuuugcaagaaa

SEQ ID NO: 793710 - RNA, 19 nt, Artificial Sequence
  Description of Artificial Sequence: Synthetic oligonucleotide
  Sense strand starting at position 908 of SEQ ID NO: 587458
gugaaaucgaagcaggacu

SEQ ID NO: 793711 - RNA, 19 nt, Artificial Sequence
  Description of Artificial Sequence: Synthetic oligonucleotide
  Antisense strand to SEQ ID NO: 793710
aguccugcuucgauuucac

SEQ ID NO: 793712 - RNA, 19 nt, Artificial Sequence
  Description of Artificial Sequence: Synthetic oligonucleotide
  Sense strand starting at position 1146 of SEQ ID NO: 587458
acugcaagccuccgaaaua

SEQ ID NO: 793713 - RNA, 19 nt, Artificial Sequence
  Description of Artificial Sequence: Synthetic oligonucleotide
  Antisense strand to SEQ ID NO: 793712
uauuucggaggcuugcagu

SEQ ID NO: 793714 - RNA, 19 nt, Artificial Sequence
  Description of Artificial Sequence: Synthetic oligonucleotide
  Sense strand starting at position 1240 of SEQ ID NO: 587458
ggucaagaggauuguaaau

SEQ ID NO: 793715 - RNA, 19 nt, Artificial Sequence
  Description of Artificial Sequence: Synthetic oligonucleotide
  Antisense strand to SEQ ID NO: 793714
auuuacaauccucuugacc

SEQ ID NO: 793716 - RNA, 19 nt, Artificial Sequence
  Description of Artificial Sequence: Synthetic oligonucleotide
  Sense strand starting at position 1242 of SEQ ID NO: 587458
ucaagaggauuguaaauaa

SEQ ID NO: 793717 - RNA, 19 nt, Artificial Sequence
  Description of Artificial Sequence: Synthetic oligonucleotide
  Antisense strand to SEQ ID NO: 793716
uuauuuacaauccucuuga

SEQ ID NO: 793718 - RNA, 19 nt, Artificial Sequence
  Description of Artificial Sequence: Synthetic oligonucleotide
  Sense strand starting at position 1309 of SEQ ID NO: 587458
gccaucuucccgccuguaa

SEQ ID NO: 793719 - RNA, 19 nt, Artificial Sequence
  Description of Artificial Sequence: Synthetic oligonucleotide
  Antisense strand to SEQ ID NO: 793718
uuacaggcgggaagauggc

SEQ ID NO: 793720 - RNA, 19 nt, Artificial Sequence
  Description of Artificial Sequence: Synthetic oligonucleotide
  Sense strand starting at position 1397 of SEQ ID NO: 587458
gugggcgauuucuuuaacu

SEQ ID NO: 793721 - RNA, 19 nt, Artificial Sequence
  Description of Artificial Sequence: Synthetic oligonucleotide
  Antisense strand to SEQ ID NO: 793720
aguuaaagaaaucgcccac

SEQ ID NO: 793722 - RNA, 19 nt, Artificial Sequence
  Description of Artificial Sequence: Synthetic oligonucleotide
  Sense strand starting at position 1433 of SEQ ID NO: 587458
ucaucuuuggguugcacaa

SEQ ID NO: 793723 - RNA, 19 nt, Artificial Sequence
  Description of Artificial Sequence: Synthetic oligonucleotide
  Antisense strand to SEQ ID NO: 793722
uugugcaacccaaagauga

SEQ ID NO: 793724 - RNA, 19 nt, Artificial Sequence
  Description of Artificial Sequence: Synthetic oligonucleotide
  Sense strand starting at position 2713 of SEQ ID NO: 587458
cugugcuaagaguguaaga

SEQ ID NO: 793725 - RNA, 19 nt, Artificial Sequence
  Description of Artificial Sequence: Synthetic oligonucleotide
  Antisense strand to SEQ ID NO: 793724
ucuuacacucuuagcacag

SEQ ID NO: 793726 - RNA, 19 nt, Artificial Sequence
  Description of Artificial Sequence: Synthetic oligonucleotide
  Sense strand starting at position 2724 of SEQ ID NO: 587458
guguaagacggcuauccua

SEQ ID NO: 793727 - RNA, 19 nt, Artificial Sequence
  Description of Artificial Sequence: Synthetic oligonucleotide
  Antisense strand to SEQ ID NO: 793726
uaggauagccgucuuacac

SEQ ID NO: 793728 - RNA, 19 nt, Artificial Sequence
  Description of Artificial Sequence: Synthetic oligonucleotide
  Sense strand starting at position 2786 of SEQ ID NO: 587458
gucuauuaugaagaaagcu

SEQ ID NO: 793729 - RNA, 19 nt, Artificial Sequence
  Description of Artificial Sequence: Synthetic oligonucleotide
  Antisense strand to SEQ ID NO: 793728
agcuuucuucauaauagac

SEQ ID NO: 793730 - RNA, 19 nt, Artificial Sequence
  Description of Artificial Sequence: Synthetic oligonucleotide
  Sense strand starting at position 2881 of SEQ ID NO: 587458
aguccucaaagugauguua

SEQ ID NO: 793731 - RNA, 19 nt, Artificial Sequence
  Description of Artificial Sequence: Synthetic oligonucleotide
  Antisense strand to SEQ ID NO: 793730
uaacaucacuuugaggacu

SEQ ID NO: 793732 - RNA, 19 nt, Artificial Sequence
  Description of Artificial Sequence: Synthetic oligonucleotide
  Sense strand starting at position 2889 of SEQ ID NO: 587458
aagugauguuauucucuug

SEQ ID NO: 793733 - RNA, 19 nt, Artificial Sequence
  Description of Artificial Sequence: Synthetic oligonucleotide
  Antisense strand to SEQ ID NO: 793732
caagagaauaacaucacuu

SEQ ID NO: 793734 - RNA, 19 nt, Artificial Sequence
  Description of Artificial Sequence: Synthetic oligonucleotide
  Sense strand starting at position 2925 of SEQ ID NO: 587458
ggugguguuaaagauaucu

SEQ ID NO: 793735 - RNA, 19 nt, Artificial Sequence
  Description of Artificial Sequence: Synthetic oligonucleotide
  Antisense strand to SEQ ID NO: 793734
agauaucuuuaacaccacc

SEQ ID NO: 793736 - RNA, 19 nt, Artificial Sequence
  Description of Artificial Sequence: Synthetic oligonucleotide
  Sense strand starting at position 3142 of SEQ ID NO: 587458
cgcuaaagauccuccaggu

SEQ ID NO: 793737 - RNA, 19 nt, Artificial Sequence
  Description of Artificial Sequence: Synthetic oligonucleotide
  Antisense strand to SEQ ID NO: 793736
accuggaggaucuuuagcg

SEQ ID NO: 793738 - RNA, 19 nt, Artificial Sequence
  Description of Artificial Sequence: Synthetic oligonucleotide
  Sense strand starting at position 3187 of SEQ ID NO: 587458
caguaucucuggucaaagu

SEQ ID NO: 793739 - RNA, 19 nt, Artificial Sequence
  Description of Artificial Sequence: Synthetic oligonucleotide
  Antisense strand to SEQ ID NO: 793738
acuuugaccagagauacug

SEQ ID NO: 793740 - RNA, 19 nt, Artificial Sequence
  Description of Artificial Sequence: Synthetic oligonucleotide
  Sense strand starting at position 3217 of SEQ ID NO: 587458
gccucagauccugaacacu

SEQ ID NO: 793741 - RNA, 19 nt, Artificial Sequence
  Description of Artificial Sequence: Synthetic oligonucleotide
  Antisense strand to SEQ ID NO: 793740
aguguucaggaucugaggc

SEQ ID NO: 793742 - RNA, 19 nt, Artificial Sequence
  Description of Artificial Sequence: Synthetic oligonucleotide
  Sense strand starting at position 3331 of SEQ ID NO: 587458
uuguuuauuaugggaguga

SEQ ID NO: 793743 - RNA, 19 nt, Artificial Sequence
  Description of Artificial Sequence: Synthetic oligonucleotide
  Antisense strand to SEQ ID NO: 793742
ucacucccauaauaaacaa

SEQ ID NO: 793744 - RNA, 19 nt, Artificial Sequence
  Description of Artificial Sequence: Synthetic oligonucleotide
  Sense strand starting at position 3335 of SEQ ID NO: 587458
uuauuaugggagugacuga

SEQ ID NO: 793745 - RNA, 19 nt, Artificial Sequence
  Description of Artificial Sequence: Synthetic oligonucleotide
  Antisense strand to SEQ ID NO: 793744
ucagucacucccauaauaa

SEQ ID NO: 793746 - RNA, 19 nt, Artificial Sequence
  Description of Artificial Sequence: Synthetic oligonucleotide
  Sense strand starting at position 3412 of SEQ ID NO: 587458
ggaugaagggcaggguuau

SEQ ID NO: 793747 - RNA, 19 nt, Artificial Sequence
  Description of Artificial Sequence: Synthetic oligonucleotide
  Antisense strand to SEQ ID NO: 793746
auaacccugcccuucaucc

SEQ ID NO: 793748 - RNA, 19 nt, Artificial Sequence
  Description of Artificial Sequence: Synthetic oligonucleotide
  Sense strand starting at position 3413 of SEQ ID NO: 587458
gaugaagggcaggguuaua

SEQ ID NO: 793749 - RNA, 19 nt, Artificial Sequence
  Description of Artificial Sequence: Synthetic oligonucleotide
  Antisense strand to SEQ ID NO: 793748
uauaacccugcccuucauc

SEQ ID NO: 793750 - RNA, 19 nt, Artificial Sequence
  Description of Artificial Sequence: Synthetic oligonucleotide
  Sense strand starting at position 3424 of SEQ ID NO: 587458
ggguuauaacaaggcagua

SEQ ID NO: 793751 - RNA, 19 nt, Artificial Sequence
  Description of Artificial Sequence: Synthetic oligonucleotide
  Antisense strand to SEQ ID NO: 793750
uacugccuuguuauaaccc

SEQ ID NO: 793752 - RNA, 19 nt, Artificial Sequence
  Description of Artificial Sequence: Synthetic oligonucleotide
  Sense strand starting at position 3436 of SEQ ID NO: 587458
ggcaguaugaaaugauaga

SEQ ID NO: 793753 - RNA, 19 nt, Artificial Sequence
  Description of Artificial Sequence: Synthetic oligonucleotide
  Antisense strand to SEQ ID NO: 793752
ucuaucauuucauacugcc

SEQ ID NO: 793754 - RNA, 19 nt, Artificial Sequence
  Description of Artificial Sequence: Synthetic oligonucleotide
  Sense strand starting at position 3676 of SEQ ID NO: 587458
agauaaaggcagugauuga

SEQ ID NO: 793755 - RNA, 19 nt, Artificial Sequence
  Description of Artificial Sequence: Synthetic oligonucleotide
  Antisense strand to SEQ ID NO: 793754
ucaaucacugccuuuaucu

SEQ ID NO: 793756 - RNA, 19 nt, Artificial Sequence
  Description of Artificial Sequence: Synthetic oligonucleotide
  Sense strand starting at position 3767 of SEQ ID NO: 587458
uucugaucagggugcagau

SEQ ID NO: 793757 - RNA, 19 nt, Artificial Sequence
  Description of Artificial Sequence: Synthetic oligonucleotide
  Antisense strand to SEQ ID NO: 793756
aucugcacccugaucagaa

SEQ ID NO: 793758 - RNA, 19 nt, Artificial Sequence
  Description of Artificial Sequence: Synthetic oligonucleotide
  Sense strand starting at position 3785 of SEQ ID NO: 587458
uuaucucagcccugugaag

SEQ ID NO: 793759 - RNA, 19 nt, Artificial Sequence
  Description of Artificial Sequence: Synthetic oligonucleotide
  Antisense strand to SEQ ID NO: 793758
cuucacagggcugagauaa

SEQ ID NO: 793760 - RNA, 19 nt, Artificial Sequence
  Description of Artificial Sequence: Synthetic oligonucleotide
  Sense strand starting at position 113 of SEQ ID NO: 587459
aggccuaaucacugaaaga

SEQ ID NO: 793761 - RNA, 19 nt, Artificial Sequence
  Description of Artificial Sequence: Synthetic oligonucleotide
  Antisense strand to SEQ ID NO: 793760
ucuuucagugauuaggccu

SEQ ID NO: 793762 - RNA, 19 nt, Artificial Sequence
  Description of Artificial Sequence: Synthetic oligonucleotide
  Sense strand starting at position 197 of SEQ ID NO: 587459
cagacauacgccugucaau

SEQ ID NO: 793763 - RNA, 19 nt, Artificial Sequence
  Description of Artificial Sequence: Synthetic oligonucleotide
  Antisense strand to SEQ ID NO: 793762
auugacaggcguaugucug

SEQ ID NO: 793764 - RNA, 19 nt, Artificial Sequence
  Description of Artificial Sequence: Synthetic oligonucleotide
  Sense strand starting at position 258 of SEQ ID NO: 587459
gcacguuuccggaagucug

SEQ ID NO: 793765 - RNA, 19 nt, Artificial Sequence
  Description of Artificial Sequence: Synthetic oligonucleotide
  Antisense strand to SEQ ID NO: 793764
cagacuuccggaaacgugc

SEQ ID NO: 793766 - RNA, 19 nt, Artificial Sequence
  Description of Artificial Sequence: Synthetic oligonucleotide
  Sense strand starting at position 288 of SEQ ID NO: 587459
uucugacucuuccagaaag

SEQ ID NO: 793767 - RNA, 19 nt, Artificial Sequence
  Description of Artificial Sequence: Synthetic oligonucleotide
  Antisense strand to SEQ ID NO: 793766
cuuucuggaagagucagaa

SEQ ID NO: 793768 - RNA, 19 nt, Artificial Sequence
  Description of Artificial Sequence: Synthetic oligonucleotide
  Sense strand starting at position 290 of SEQ ID NO: 587459
cugacucuuccagaaagca

SEQ ID NO: 793769 - RNA, 19 nt, Artificial Sequence
  Description of Artificial Sequence: Synthetic oligonucleotide
  Antisense strand to SEQ ID NO: 793768
ugcuuucuggaagagucag

SEQ ID NO: 793770 - RNA, 19 nt, Artificial Sequence
  Description of Artificial Sequence: Synthetic oligonucleotide
  Sense strand starting at position 321 of SEQ ID NO: 587459
ucucucuugcucgugaguu

SEQ ID NO: 793771 - RNA, 19 nt, Artificial Sequence
  Description of Artificial Sequence: Synthetic oligonucleotide
  Antisense strand to SEQ ID NO: 793770
aacucacgagcaagagaga

SEQ ID NO: 793772 - RNA, 19 nt, Artificial Sequence
  Description of Artificial Sequence: Synthetic oligonucleotide
  Sense strand starting at position 326 of SEQ ID NO: 587459
cuugcucgugaguucuuau

SEQ ID NO: 793773 - RNA, 19 nt, Artificial Sequence
  Description of Artificial Sequence: Synthetic oligonucleotide
  Antisense strand to SEQ ID NO: 793772
auaagaacucacgagcaag

SEQ ID NO: 793774 - RNA, 19 nt, Artificial Sequence
  Description of Artificial Sequence: Synthetic oligonucleotide
  Sense strand starting at position 329 of SEQ ID NO: 587459
gcucgugaguucuuaugau

SEQ ID NO: 793775 - RNA, 19 nt, Artificial Sequence
  Description of Artificial Sequence: Synthetic oligonucleotide
  Antisense strand to SEQ ID NO: 793774
aucauaagaacucacgagc

SEQ ID NO: 793776 - RNA, 19 nt, Artificial Sequence
  Description of Artificial Sequence: Synthetic oligonucleotide
  Sense strand starting at position 365 of SEQ ID NO: 587459
agcaaacgaaugggaaauu

SEQ ID NO: 793777 - RNA, 19 nt, Artificial Sequence
  Description of Artificial Sequence: Synthetic oligonucleotide
  Antisense strand to SEQ ID NO: 793776
aauuucccauucguuugcu

SEQ ID NO: 793778 - RNA, 19 nt, Artificial Sequence
  Description of Artificial Sequence: Synthetic oligonucleotide
  Sense strand starting at position 374 of SEQ ID NO: 587459
augggaaauucccacagga

SEQ ID NO: 793779 - RNA, 19 nt, Artificial Sequence
  Description of Artificial Sequence: Synthetic oligonucleotide
  Antisense strand to SEQ ID NO: 793778
uccugugggaauuucccau

SEQ ID NO: 793780 - RNA, 19 nt, Artificial Sequence
  Description of Artificial Sequence: Synthetic oligonucleotide
  Sense strand starting at position 475 of SEQ ID NO: 587459
aauagcaagucgcugagaa

SEQ ID NO: 793781 - RNA, 19 nt, Artificial Sequence
  Description of Artificial Sequence: Synthetic oligonucleotide
  Antisense strand to SEQ ID NO: 793780
uucucagcgacuugcuauu

SEQ ID NO: 793782 - RNA, 19 nt, Artificial Sequence
  Description of Artificial Sequence: Synthetic oligonucleotide
  Sense strand starting at position 476 of SEQ ID NO: 587459
auagcaagucgcugagaag

SEQ ID NO: 793783 - RNA, 19 nt, Artificial Sequence
  Description of Artificial Sequence: Synthetic oligonucleotide
  Antisense strand to SEQ ID NO: 793782
cuucucagcgacuugcuau

SEQ ID NO: 793784 - RNA, 19 nt, Artificial Sequence
  Description of Artificial Sequence: Synthetic oligonucleotide
  Sense strand starting at position 551 of SEQ ID NO: 587459
cagcgauagucacuguauc

SEQ ID NO: 793785 - RNA, 19 nt, Artificial Sequence
  Description of Artificial Sequence: Synthetic oligonucleotide
  Antisense strand to SEQ ID NO: 793784
gauacagugacuaucgcug

SEQ ID NO: 793786 - RNA, 19 nt, Artificial Sequence
  Description of Artificial Sequence: Synthetic oligonucleotide
  Sense strand starting at position 552 of SEQ ID NO: 587459
agcgauagucacuguauca

SEQ ID NO: 793787 - RNA, 19 nt, Artificial Sequence
  Description of Artificial Sequence: Synthetic oligonucleotide
  Antisense strand to SEQ ID NO: 793786
ugauacagugacuaucgcu

SEQ ID NO: 793788 - RNA, 19 nt, Artificial Sequence
  Description of Artificial Sequence: Synthetic oligonucleotide
  Sense strand starting at position 736 of SEQ ID NO: 587459
gacgacucuuaaguaaauc

SEQ ID NO: 793789 - RNA, 19 nt, Artificial Sequence
  Description of Artificial Sequence: Synthetic oligonucleotide
  Antisense strand to SEQ ID NO: 793788
gauuuacuuaagagucguc

SEQ ID NO: 793790 - RNA, 19 nt, Artificial Sequence
  Description of Artificial Sequence: Synthetic oligonucleotide
  Sense strand starting at position 936 of SEQ ID NO: 587459
auuuaagucuucugagagc

SEQ ID NO: 793791 - RNA, 19 nt, Artificial Sequence
  Description of Artificial Sequence: Synthetic oligonucleotide
  Antisense strand to SEQ ID NO: 793790
gcucucagaagacuuaaau

SEQ ID NO: 793792 - RNA, 19 nt, Artificial Sequence
  Description of Artificial Sequence: Synthetic oligonucleotide
  Sense strand starting at position 980 of SEQ ID NO: 587459
gccgaagcucucgcucaau

SEQ ID NO: 793793 - RNA, 19 nt, Artificial Sequence
  Description of Artificial Sequence: Synthetic oligonucleotide
  Antisense strand to SEQ ID NO: 793792
auugagcgagagcuucggc

SEQ ID NO: 793794 - RNA, 19 nt, Artificial Sequence
  Description of Artificial Sequence: Synthetic oligonucleotide
  Sense strand starting at position 982 of SEQ ID NO: 587459
cgaagcucucgcucaaugu

SEQ ID NO: 793795 - RNA, 19 nt, Artificial Sequence
  Description of Artificial Sequence: Synthetic oligonucleotide
  Antisense strand to SEQ ID NO: 793794
acauugagcgagagcuucg

SEQ ID NO: 793796 - RNA, 19 nt, Artificial Sequence
  Description of Artificial Sequence: Synthetic oligonucleotide
  Sense strand starting at position 1320 of SEQ ID NO: 587459
gggaaggugugcucgggaa

SEQ ID NO: 793797 - RNA, 19 nt, Artificial Sequence
  Description of Artificial Sequence: Synthetic oligonucleotide
  Antisense strand to SEQ ID NO: 793796
uucccgagcacaccuuccc

SEQ ID NO: 793798 - RNA, 19 nt, Artificial Sequence
  Description of Artificial Sequence: Synthetic oligonucleotide
  Sense strand starting at position 2418 of SEQ ID NO: 587459
uuugaagcccuuugacuau

SEQ ID NO: 793799 - RNA, 19 nt, Artificial Sequence
  Description of Artificial Sequence: Synthetic oligonucleotide
  Antisense strand to SEQ ID NO: 793798
auagucaaagggcuucaaa

SEQ ID NO: 793800 - RNA, 19 nt, Artificial Sequence
  Description of Artificial Sequence: Synthetic oligonucleotide
  Sense strand starting at position 2504 of SEQ ID NO: 587459
agguuaaucuagucgugug

SEQ ID NO: 793801 - RNA, 19 nt, Artificial Sequence
  Description of Artificial Sequence: Synthetic oligonucleotide
  Antisense strand to SEQ ID NO: 793800
cacacgacuagauuaaccu

SEQ ID NO: 793802 - RNA, 19 nt, Artificial Sequence
  Description of Artificial Sequence: Synthetic oligonucleotide
  Sense strand starting at position 2509 of SEQ ID NO: 587459
aaucuagucgugugggaug

SEQ ID NO: 793803 - RNA, 19 nt, Artificial Sequence
  Description of Artificial Sequence: Synthetic oligonucleotide
  Antisense strand to SEQ ID NO: 793802
caucccacacgacuagauu

SEQ ID NO: 793804 - RNA, 19 nt, Artificial Sequence
  Description of Artificial Sequence: Synthetic oligonucleotide
  Sense strand starting at position 2511 of SEQ ID NO: 587459
ucuagucgugugggaugau

SEQ ID NO: 793805 - RNA, 19 nt, Artificial Sequence
  Description of Artificial Sequence: Synthetic oligonucleotide
  Antisense strand to SEQ ID NO: 793804
aucaucccacacgacuaga

SEQ ID NO: 793806 - RNA, 19 nt, Artificial Sequence
  Description of Artificial Sequence: Synthetic oligonucleotide
  Sense strand starting at position 2549 of SEQ ID NO: 587459
agaagaacaccgugucaau

SEQ ID NO: 793807 - RNA, 19 nt, Artificial Sequence
  Description of Artificial Sequence: Synthetic oligonucleotide
  Antisense strand to SEQ ID NO: 793806
auugacacgguguucuucu

SEQ ID NO: 793808 - RNA, 19 nt, Artificial Sequence
  Description of Artificial Sequence: Synthetic oligonucleotide
  Sense strand starting at position 2628 of SEQ ID NO: 587459
gugacuguguguuuccaca

SEQ ID NO: 793809 - RNA, 19 nt, Artificial Sequence
  Description of Artificial Sequence: Synthetic oligonucleotide
  Antisense strand to SEQ ID NO: 793808
uguggaaacacacagucac

SEQ ID NO: 793810 - RNA, 19 nt, Artificial Sequence
  Description of Artificial Sequence: Synthetic oligonucleotide
  Sense strand starting at position 2630 of SEQ ID NO: 587459
gacuguguguuuccacacu

SEQ ID NO: 793811 - RNA, 19 nt, Artificial Sequence
  Description of Artificial Sequence: Synthetic oligonucleotide
  Antisense strand to SEQ ID NO: 793810
aguguggaaacacacaguc

SEQ ID NO: 793812 - RNA, 19 nt, Artificial Sequence
  Description of Artificial Sequence: Synthetic oligonucleotide
  Sense strand starting at position 2716 of SEQ ID NO: 587459
uggucaccugcuuaacuua

SEQ ID NO: 793813 - RNA, 19 nt, Artificial Sequence
  Description of Artificial Sequence: Synthetic oligonucleotide
  Antisense strand to SEQ ID NO: 793812
uaaguuaagcaggugacca

SEQ ID NO: 793814 - RNA, 19 nt, Artificial Sequence
  Description of Artificial Sequence: Synthetic oligonucleotide
  Sense strand starting at position 2762 of SEQ ID NO: 587459
caguaugagcuacgaucaa

SEQ ID NO: 793815 - RNA, 19 nt, Artificial Sequence
  Description of Artificial Sequence: Synthetic oligonucleotide
  Antisense strand to SEQ ID NO: 793814
uugaucguagcucauacug

SEQ ID NO: 793816 - RNA, 19 nt, Artificial Sequence
  Description of Artificial Sequence: Synthetic oligonucleotide
  Sense strand starting at position 2777 of SEQ ID NO: 587459
ucaaauuugucuuaacgua

SEQ ID NO: 793817 - RNA, 19 nt, Artificial Sequence
  Description of Artificial Sequence: Synthetic oligonucleotide
  Antisense strand to SEQ ID NO: 793816
uacguuaagacaaauuuga

SEQ ID NO: 793818 - RNA, 19 nt, Artificial Sequence
  Description of Artificial Sequence: Synthetic oligonucleotide
  Sense strand starting at position 2841 of SEQ ID NO: 587459
aggguuuccucgccaggga

SEQ ID NO: 793819 - RNA, 19 nt, Artificial Sequence
  Description of Artificial Sequence: Synthetic oligonucleotide
  Antisense strand to SEQ ID NO: 793818
ucccuggcgaggaaacccu

SEQ ID NO: 793820 - RNA, 19 nt, Artificial Sequence
  Description of Artificial Sequence: Synthetic oligonucleotide
  Sense strand starting at position 2842 of SEQ ID NO: 587459
ggguuuccucgccagggaa

SEQ ID NO: 793821 - RNA, 19 nt, Artificial Sequence
  Description of Artificial Sequence: Synthetic oligonucleotide
  Antisense strand to SEQ ID NO: 793820
uucccuggcgaggaaaccc

SEQ ID NO: 793822 - RNA, 19 nt, Artificial Sequence
  Description of Artificial Sequence: Synthetic oligonucleotide
  Sense strand starting at position 3063 of SEQ ID NO: 587459
gacagcuugggcuaaggau

SEQ ID NO: 793823 - RNA, 19 nt, Artificial Sequence
  Description of Artificial Sequence: Synthetic oligonucleotide
  Antisense strand to SEQ ID NO: 793822
auccuuagcccaagcuguc

SEQ ID NO: 793824 - RNA, 19 nt, Artificial Sequence
  Description of Artificial Sequence: Synthetic oligonucleotide
  Sense strand starting at position 3118 of SEQ ID NO: 587459
accuguuuccuagagcaca

SEQ ID NO: 793825 - RNA, 19 nt, Artificial Sequence
  Description of Artificial Sequence: Synthetic oligonucleotide
  Antisense strand to SEQ ID NO: 793824
ugugcucuaggaaacaggu

SEQ ID NO: 793826 - RNA, 19 nt, Artificial Sequence
  Description of Artificial Sequence: Synthetic oligonucleotide
  Sense strand starting at position 3276 of SEQ ID NO: 587459
ccgccaucauauguguaca

SEQ ID NO: 793827 - RNA, 19 nt, Artificial Sequence
  Description of Artificial Sequence: Synthetic oligonucleotide
  Antisense strand to SEQ ID NO: 793826
uguacacauaugauggcgg

SEQ ID NO: 793828 - RNA, 19 nt, Artificial Sequence
  Description of Artificial Sequence: Synthetic oligonucleotide
  Sense strand starting at position 3278 of SEQ ID NO: 587459
gccaucauauguguacaua

SEQ ID NO: 793829 - RNA, 19 nt, Artificial Sequence
  Description of Artificial Sequence: Synthetic oligonucleotide
  Antisense strand to SEQ ID NO: 793828
uauguacacauaugauggc

SEQ ID NO: 793830 - RNA, 19 nt, Artificial Sequence
  Description of Artificial Sequence: Synthetic oligonucleotide
  Sense strand starting at position 3279 of SEQ ID NO: 587459
ccaucauauguguacauau

SEQ ID NO: 793831 - RNA, 19 nt, Artificial Sequence
  Description of Artificial Sequence: Synthetic oligonucleotide
  Antisense strand to SEQ ID NO: 793830
auauguacacauaugaugg

SEQ ID NO: 793832 - RNA, 19 nt, Artificial Sequence
  Description of Artificial Sequence: Synthetic oligonucleotide
  Sense strand starting at position 3357 of SEQ ID NO: 587459
ucagaaguauugcaggaaa

SEQ ID NO: 793833 - RNA, 19 nt, Artificial Sequence
  Description of Artificial Sequence: Synthetic oligonucleotide
  Antisense strand to SEQ ID NO: 793832
uuuccugcaauacuucuga

SEQ ID NO: 793834 - RNA, 19 nt, Artificial Sequence
  Description of Artificial Sequence: Synthetic oligonucleotide
  Sense strand starting at position 3359 of SEQ ID NO: 587459
agaaguauugcaggaaaug

SEQ ID NO: 793835 - RNA, 19 nt, Artificial Sequence
  Description of Artificial Sequence: Synthetic oligonucleotide
  Antisense strand to SEQ ID NO: 793834
cauuuccugcaauacuucu

SEQ ID NO: 793836 - RNA, 19 nt, Artificial Sequence
  Description of Artificial Sequence: Synthetic oligonucleotide
  Sense strand starting at position 3389 of SEQ ID NO: 587459
aguguugccuggguaucau

SEQ ID NO: 793837 - RNA, 19 nt, Artificial Sequence
  Description of Artificial Sequence: Synthetic oligonucleotide
  Antisense strand to SEQ ID NO: 793836
augauacccaggcaacacu

SEQ ID NO: 793838 - RNA, 19 nt, Artificial Sequence
  Description of Artificial Sequence: Synthetic oligonucleotide
  Sense strand starting at position 3971 of SEQ ID NO: 587459
uaugaagccuuaggaagaa

SEQ ID NO: 793839 - RNA, 19 nt, Artificial Sequence
  Description of Artificial Sequence: Synthetic oligonucleotide
  Antisense strand to SEQ ID NO: 793838
uucuuccuaaggcuucaua

SEQ ID NO: 793840 - RNA, 19 nt, Artificial Sequence
  Description of Artificial Sequence: Synthetic oligonucleotide
  Sense strand starting at position 13 of SEQ ID NO: 587460
ggaugcuaccaauagcuuu

SEQ ID NO: 793841 - RNA, 19 nt, Artificial Sequence
  Description of Artificial Sequence: Synthetic oligonucleotide
  Antisense strand to SEQ ID NO: 793840
aaagcuauugguagcaucc

SEQ ID NO: 793842 - RNA, 19 nt, Artificial Sequence
  Description of Artificial Sequence: Synthetic oligonucleotide
  Sense strand starting at position 352 of SEQ ID NO: 587460
agaacucaagcaugcagaa

SEQ ID NO: 793843 - RNA, 19 nt, Artificial Sequence
  Description of Artificial Sequence: Synthetic oligonucleotide
  Antisense strand to SEQ ID NO: 793842
uucugcaugcuugaguucu

SEQ ID NO: 793844 - RNA, 19 nt, Artificial Sequence
  Description of Artificial Sequence: Synthetic oligonucleotide
  Sense strand starting at position 525 of SEQ ID NO: 587460
acacuaugugcuuacuauc

SEQ ID NO: 793845 - RNA, 19 nt, Artificial Sequence
  Description of Artificial Sequence: Synthetic oligonucleotide
  Antisense strand to SEQ ID NO: 793844
gauaguaagcacauagugu

SEQ ID NO: 793846 - RNA, 19 nt, Artificial Sequence
  Description of Artificial Sequence: Synthetic oligonucleotide
  Sense strand starting at position 864 of SEQ ID NO: 587460
uaauauaacguuugggaaa

SEQ ID NO: 793847 - RNA, 19 nt, Artificial Sequence
  Description of Artificial Sequence: Synthetic oligonucleotide
  Antisense strand to SEQ ID NO: 793846
uuucccaaacguuauauua

SEQ ID NO: 793848 - RNA, 19 nt, Artificial Sequence
  Description of Artificial Sequence: Synthetic oligonucleotide
  Sense strand starting at position 1095 of SEQ ID NO: 587460
gucaucucccugcaagaau

SEQ ID NO: 793849 - RNA, 19 nt, Artificial Sequence
  Description of Artificial Sequence: Synthetic oligonucleotide
  Antisense strand to SEQ ID NO: 793848
auucuugcagggagaugac

SEQ ID NO: 793850 - RNA, 19 nt, Artificial Sequence
  Description of Artificial Sequence: Synthetic oligonucleotide
  Sense strand starting at position 1215 of SEQ ID NO: 587460
ugggaauucuacuucuagg

SEQ ID NO: 793851 - RNA, 19 nt, Artificial Sequence
  Description of Artificial Sequence: Synthetic oligonucleotide
  Antisense strand to SEQ ID NO: 793850
ccuagaaguagaauuccca

SEQ ID NO: 793852 - RNA, 19 nt, Artificial Sequence
  Description of Artificial Sequence: Synthetic oligonucleotide
  Sense strand starting at position 1220 of SEQ ID NO: 587460
auucuacuucuaggaugaa

SEQ ID NO: 793853 - RNA, 19 nt, Artificial Sequence
  Description of Artificial Sequence: Synthetic oligonucleotide
  Antisense strand to SEQ ID NO: 793852
uucauccuagaaguagaau

SEQ ID NO: 793854 - RNA, 19 nt, Artificial Sequence
  Description of Artificial Sequence: Synthetic oligonucleotide
  Sense strand starting at position 1259 of SEQ ID NO: 587460
cuagguacaaagugucaua

SEQ ID NO: 793855 - RNA, 19 nt, Artificial Sequence
  Description of Artificial Sequence: Synthetic oligonucleotide
  Antisense strand to SEQ ID NO: 793854
uaugacacuuuguaccuag

SEQ ID NO: 793856 - RNA, 19 nt, Artificial Sequence
  Description of Artificial Sequence: Synthetic oligonucleotide
  Sense strand starting at position 1349 of SEQ ID NO: 587460
gggcuuugcccacaggaca

SEQ ID NO: 793857 - RNA, 19 nt, Artificial Sequence
  Description of Artificial Sequence: Synthetic oligonucleotide
  Antisense strand to SEQ ID NO: 793856
uguccugugggcaaagccc

SEQ ID NO: 793858 - RNA, 19 nt, Artificial Sequence
  Description of Artificial Sequence: Synthetic oligonucleotide
  Sense strand starting at position 1371 of SEQ ID NO: 587460
guugucagucacuacaauu

SEQ ID NO: 793859 - RNA, 19 nt, Artificial Sequence
  Description of Artificial Sequence: Synthetic oligonucleotide
  Antisense strand to SEQ ID NO: 793858
aauuguagugacugacaac

SEQ ID NO: 793860 - RNA, 19 nt, Artificial Sequence
  Description of Artificial Sequence: Synthetic oligonucleotide
  Sense strand starting at position 1822 of SEQ ID NO: 587460
gcagauagcaucugagaac

SEQ ID NO: 793861 - RNA, 19 nt, Artificial Sequence
  Description of Artificial Sequence: Synthetic oligonucleotide
  Antisense strand to SEQ ID NO: 793860
guucucagaugcuaucugc

SEQ ID NO: 793862 - RNA, 19 nt, Artificial Sequence
  Description of Artificial Sequence: Synthetic oligonucleotide
  Sense strand starting at position 1859 of SEQ ID NO: 587460
agaaucucaucccucgauu

SEQ ID NO: 793863 - RNA, 19 nt, Artificial Sequence
  Description of Artificial Sequence: Synthetic oligonucleotide
  Antisense strand to SEQ ID NO: 793862
aaucgagggaugagauucu

SEQ ID NO: 793864 - RNA, 19 nt, Artificial Sequence
  Description of Artificial Sequence: Synthetic oligonucleotide
  Sense strand starting at position 1997 of SEQ ID NO: 587460
guuuaaaugcaacaauuga

SEQ ID NO: 793865 - RNA, 19 nt, Artificial Sequence
  Description of Artificial Sequence: Synthetic oligonucleotide
  Antisense strand to SEQ ID NO: 793864
ucaauuguugcauuuaaac

SEQ ID NO: 793866 - RNA, 19 nt, Artificial Sequence
  Description of Artificial Sequence: Synthetic oligonucleotide
  Sense strand starting at position 2087 of SEQ ID NO: 587460
acgcuaucugaauaaacag

SEQ ID NO: 793867 - RNA, 19 nt, Artificial Sequence
  Description of Artificial Sequence: Synthetic oligonucleotide
  Antisense strand to SEQ ID NO: 793866
cuguuuauucagauagcgu

SEQ ID NO: 793868 - RNA, 19 nt, Artificial Sequence
  Description of Artificial Sequence: Synthetic oligonucleotide
  Sense strand starting at position 2097 of SEQ ID NO: 587460
aauaaacagcugugugaga

SEQ ID NO: 793869 - RNA, 19 nt, Artificial Sequence
  Description of Artificial Sequence: Synthetic oligonucleotide
  Antisense strand to SEQ ID NO: 793868
ucucacacagcuguuuauu

SEQ ID NO: 793870 - RNA, 19 nt, Artificial Sequence
  Description of Artificial Sequence: Synthetic oligonucleotide
  Sense strand starting at position 2114 of SEQ ID NO: 587460
gaauaacuucucugagacg

SEQ ID NO: 793871 - RNA, 19 nt, Artificial Sequence
  Description of Artificial Sequence: Synthetic oligonucleotide
  Antisense strand to SEQ ID NO: 793870
cgucucagagaaguuauuc

SEQ ID NO: 793872 - RNA, 19 nt, Artificial Sequence
  Description of Artificial Sequence: Synthetic oligonucleotide
  Sense strand starting at position 2125 of SEQ ID NO: 587460
cugagacguggucaacaca

SEQ ID NO: 793873 - RNA, 19 nt, Artificial Sequence
  Description of Artificial Sequence: Synthetic oligonucleotide
  Antisense strand to SEQ ID NO: 793872
uguguugaccacgucucag

SEQ ID NO: 793874 - RNA, 19 nt, Artificial Sequence
  Description of Artificial Sequence: Synthetic oligonucleotide
  Sense strand starting at position 2414 of SEQ ID NO: 587460
cgaaaugauuucuagaaug

SEQ ID NO: 793875 - RNA, 19 nt, Artificial Sequence
  Description of Artificial Sequence: Synthetic oligonucleotide
  Antisense strand to SEQ ID NO: 793874
cauucuagaaaucauuucg

SEQ ID NO: 793876 - RNA, 19 nt, Artificial Sequence
  Description of Artificial Sequence: Synthetic oligonucleotide
  Sense strand starting at position 2429 of SEQ ID NO: 587460
aauggcaaaucuucuguga

SEQ ID NO: 793877 - RNA, 19 nt, Artificial Sequence
  Description of Artificial Sequence: Synthetic oligonucleotide
  Antisense strand to SEQ ID NO: 793876
ucacagaagauuugccauu

SEQ ID NO: 793878 - RNA, 19 nt, Artificial Sequence
  Description of Artificial Sequence: Synthetic oligonucleotide
  Sense strand starting at position 2432 of SEQ ID NO: 587460
ggcaaaucuucugugaaca

SEQ ID NO: 793879 - RNA, 19 nt, Artificial Sequence
  Description of Artificial Sequence: Synthetic oligonucleotide
  Antisense strand to SEQ ID NO: 793878
uguucacagaagauuugcc

SEQ ID NO: 793880 - RNA, 19 nt, Artificial Sequence
  Description of Artificial Sequence: Synthetic oligonucleotide
  Sense strand starting at position 2433 of SEQ ID NO: 587460
gcaaaucuucugugaacaa

SEQ ID NO: 793881 - RNA, 19 nt, Artificial Sequence
  Description of Artificial Sequence: Synthetic oligonucleotide
  Antisense strand to SEQ ID NO: 793880
uuguucacagaagauuugc

SEQ ID NO: 793882 - RNA, 19 nt, Artificial Sequence
  Description of Artificial Sequence: Synthetic oligonucleotide
  Sense strand starting at position 2445 of SEQ ID NO: 587460
ugaacaauuccuuggcuau

SEQ ID NO: 793883 - RNA, 19 nt, Artificial Sequence
  Description of Artificial Sequence: Synthetic oligonucleotide
  Antisense strand to SEQ ID NO: 793882
auagccaaggaauuguuca

SEQ ID NO: 793884 - RNA, 19 nt, Artificial Sequence
  Description of Artificial Sequence: Synthetic oligonucleotide
  Sense strand starting at position 2448 of SEQ ID NO: 587460
acaauuccuuggcuaugaa

SEQ ID NO: 793885 - RNA, 19 nt, Artificial Sequence
  Description of Artificial Sequence: Synthetic oligonucleotide
  Antisense strand to SEQ ID NO: 793884
uucauagccaaggaauugu

SEQ ID NO: 793886 - RNA, 19 nt, Artificial Sequence
  Description of Artificial Sequence: Synthetic oligonucleotide
  Sense strand starting at position 2577 of SEQ ID NO: 587460
ucggaaucuaugcaugaca

SEQ ID NO: 793887 - RNA, 19 nt, Artificial Sequence
  Description of Artificial Sequence: Synthetic oligonucleotide
  Antisense strand to SEQ ID NO: 793886
ugucaugcauagauuccga

SEQ ID NO: 793888 - RNA, 19 nt, Artificial Sequence
  Description of Artificial Sequence: Synthetic oligonucleotide
  Sense strand starting at position 2579 of SEQ ID NO: 587460
ggaaucuaugcaugacagu

SEQ ID NO: 793889 - RNA, 19 nt, Artificial Sequence
  Description of Artificial Sequence: Synthetic oligonucleotide
  Antisense strand to SEQ ID NO: 793888
acugucaugcauagauucc

SEQ ID NO: 793890 - RNA, 19 nt, Artificial Sequence
  Description of Artificial Sequence: Synthetic oligonucleotide
  Sense strand starting at position 2649 of SEQ ID NO: 587460
gauacaugacuuuggugau

SEQ ID NO: 793891 - RNA, 19 nt, Artificial Sequence
  Description of Artificial Sequence: Synthetic oligonucleotide
  Antisense strand to SEQ ID NO: 793890
aucaccaaagucauguauc

SEQ ID NO: 793892 - RNA, 19 nt, Artificial Sequence
  Description of Artificial Sequence: Synthetic oligonucleotide
  Sense strand starting at position 2712 of SEQ ID NO: 587460
cguuuaugugacuaaugau

SEQ ID NO: 793893 - RNA, 19 nt, Artificial Sequence
  Description of Artificial Sequence: Synthetic oligonucleotide
  Antisense strand to SEQ ID NO: 793892
aucauuagucacauaaacg

SEQ ID NO: 793894 - RNA, 19 nt, Artificial Sequence
  Description of Artificial Sequence: Synthetic oligonucleotide
  Sense strand starting at position 2830 of SEQ ID NO: 587460
cuuuaagcccaucggauuu

SEQ ID NO: 793895 - RNA, 19 nt, Artificial Sequence
  Description of Artificial Sequence: Synthetic oligonucleotide
  Antisense strand to SEQ ID NO: 793894
aaauccgaugggcuuaaag

SEQ ID NO: 793896 - RNA, 19 nt, Artificial Sequence
  Description of Artificial Sequence: Synthetic oligonucleotide
  Sense strand starting at position 3005 of SEQ ID NO: 587460
uuuccagaucgucaacuaa

SEQ ID NO: 793897 - RNA, 19 nt, Artificial Sequence
  Description of Artificial Sequence: Synthetic oligonucleotide
  Antisense strand to SEQ ID NO: 793896
uuaguugacgaucuggaaa

SEQ ID NO: 793898 - RNA, 19 nt, Artificial Sequence
  Description of Artificial Sequence: Synthetic oligonucleotide
  Sense strand starting at position 3256 of SEQ ID NO: 587460
ggaaucaugggcuagucau

SEQ ID NO: 793899 - RNA, 19 nt, Artificial Sequence
  Description of Artificial Sequence: Synthetic oligonucleotide
  Antisense strand to SEQ ID NO: 793898
augacuagcccaugauucc

SEQ ID NO: 793900 - RNA, 19 nt, Artificial Sequence
  Description of Artificial Sequence: Synthetic oligonucleotide
  Sense strand starting at position 3328 of SEQ ID NO: 587460
ucauauaugcagcagaaau

SEQ ID NO: 793901 - RNA, 19 nt, Artificial Sequence
  Description of Artificial Sequence: Synthetic oligonucleotide
  Antisense strand to SEQ ID NO: 793900
auuucugcugcauauauga

SEQ ID NO: 793902 - RNA, 19 nt, Artificial Sequence
  Description of Artificial Sequence: Synthetic oligonucleotide
  Sense strand starting at position 3381 of SEQ ID NO: 587460
ccagaaguaucaguuauuc

SEQ ID NO: 793903 - RNA, 19 nt, Artificial Sequence
  Description of Artificial Sequence: Synthetic oligonucleotide
  Antisense strand to SEQ ID NO: 793902
gaauaacugauacuucugg

SEQ ID NO: 793904 - RNA, 19 nt, Artificial Sequence
  Description of Artificial Sequence: Synthetic oligonucleotide
  Sense strand starting at position 3433 of SEQ ID NO: 587460
acagcuuguaauggagauu

SEQ ID NO: 793905 - RNA, 19 nt, Artificial Sequence
  Description of Artificial Sequence: Synthetic oligonucleotide
  Antisense strand to SEQ ID NO: 793904
aaucuccauuacaagcugu

SEQ ID NO: 793906 - RNA, 19 nt, Artificial Sequence
  Description of Artificial Sequence: Synthetic oligonucleotide
  Sense strand starting at position 3732 of SEQ ID NO: 587460
ugggaauauuauguaaagu

SEQ ID NO: 793907 - RNA, 19 nt, Artificial Sequence
  Description of Artificial Sequence: Synthetic oligonucleotide
  Antisense strand to SEQ ID NO: 793906
acuuuacauaauauuccca

SEQ ID NO: 793908 - RNA, 19 nt, Artificial Sequence
  Description of Artificial Sequence: Synthetic oligonucleotide
  Sense strand starting at position 3770 of SEQ ID NO: 587460
guuacuugcccacauuaua

SEQ ID NO: 793909 - RNA, 19 nt, Artificial Sequence
  Description of Artificial Sequence: Synthetic oligonucleotide
  Antisense strand to SEQ ID NO: 793908
uauaaugugggcaaguaac

SEQ ID NO: 793910 - RNA, 19 nt, Artificial Sequence
  Description of Artificial Sequence: Synthetic oligonucleotide
  Sense strand starting at position 3913 of SEQ ID NO: 587460
ugugaccacuaauugauau

SEQ ID NO: 793911 - RNA, 19 nt, Artificial Sequence
  Description of Artificial Sequence: Synthetic oligonucleotide
  Antisense strand to SEQ ID NO: 793910
auaucaauuaguggucaca

SEQ ID NO: 793912 - RNA, 19 nt, Artificial Sequence
  Description of Artificial Sequence: Synthetic oligonucleotide
  Sense strand starting at position 3924 of SEQ ID NO: 587460
auugauaugguauagcuca

SEQ ID NO: 793913 - RNA, 19 nt, Artificial Sequence
  Description of Artificial Sequence: Synthetic oligonucleotide
  Antisense strand to SEQ ID NO: 793912
ugagcuauaccauaucaau

SEQ ID NO: 793914 - RNA, 19 nt, Artificial Sequence
  Description of Artificial Sequence: Synthetic oligonucleotide
  Sense strand starting at position 3961 of SEQ ID NO: 587460
caaagagcuuagucacuga

SEQ ID NO: 793915 - RNA, 19 nt, Artificial Sequence
  Description of Artificial Sequence: Synthetic oligonucleotide
  Antisense strand to SEQ ID NO: 793914
ucagugacuaagcucuuug

SEQ ID NO: 793916 - RNA, 19 nt, Artificial Sequence
  Description of Artificial Sequence: Synthetic oligonucleotide
  Sense strand starting at position 3964 of SEQ ID NO: 587460
agagcuuagucacugacua

SEQ ID NO: 793917 - RNA, 19 nt, Artificial Sequence
  Description of Artificial Sequence: Synthetic oligonucleotide
  Antisense strand to SEQ ID NO: 793916
uagucagugacuaagcucu

SEQ ID NO: 793918 - RNA, 19 nt, Artificial Sequence
  Description of Artificial Sequence: Synthetic oligonucleotide
  Sense strand starting at position 3965 of SEQ ID NO: 587460
gagcuuagucacugacuaa

SEQ ID NO: 793919 - RNA, 19 nt, Artificial Sequence
  Description of Artificial Sequence: Synthetic oligonucleotide
  Antisense strand to SEQ ID NO: 793918
uuagucagugacuaagcuc

SEQ ID NO: 793920 - RNA, 19 nt, Artificial Sequence
  Description of Artificial Sequence: Synthetic oligonucleotide
  Sense strand starting at position 100 of SEQ ID NO: 587461
gccauugggagucauggaa

SEQ ID NO: 793921 - RNA, 19 nt, Artificial Sequence
  Description of Artificial Sequence: Synthetic oligonucleotide
  Antisense strand to SEQ ID NO: 793920
uuccaugacucccaauggc

SEQ ID NO: 793922 - RNA, 19 nt, Artificial Sequence
  Description of Artificial Sequence: Synthetic oligonucleotide
  Sense strand starting at position 122 of SEQ ID NO: 587461
cuauuuauaugagaguuac

SEQ ID NO: 793923 - RNA, 19 nt, Artificial Sequence
  Description of Artificial Sequence: Synthetic oligonucleotide
  Antisense strand to SEQ ID NO: 793922
guaacucucauauaaauag

SEQ ID NO: 793924 - RNA, 19 nt, Artificial Sequence
  Description of Artificial Sequence: Synthetic oligonucleotide
  Sense strand starting at position 128 of SEQ ID NO: 587461
auaugagaguuaccgaguu

SEQ ID NO: 793925 - RNA, 19 nt, Artificial Sequence
  Description of Artificial Sequence: Synthetic oligonucleotide
  Antisense strand to SEQ ID NO: 793924
aacucgguaacucucauau

SEQ ID NO: 793926 - RNA, 19 nt, Artificial Sequence
  Description of Artificial Sequence: Synthetic oligonucleotide
  Sense strand starting at position 130 of SEQ ID NO: 587461
augagaguuaccgaguuug

SEQ ID NO: 793927 - RNA, 19 nt, Artificial Sequence
  Description of Artificial Sequence: Synthetic oligonucleotide
  Antisense strand to SEQ ID NO: 793926
caaacucgguaacucucau

SEQ ID NO: 793928 - RNA, 19 nt, Artificial Sequence
  Description of Artificial Sequence: Synthetic oligonucleotide
  Sense strand starting at position 632 of SEQ ID NO: 587461
gaucacucuucuguggaau

SEQ ID NO: 793929 - RNA, 19 nt, Artificial Sequence
  Description of Artificial Sequence: Synthetic oligonucleotide
  Antisense strand to SEQ ID NO: 793928
auuccacagaagagugauc

SEQ ID NO: 793930 - RNA, 19 nt, Artificial Sequence
  Description of Artificial Sequence: Synthetic oligonucleotide
  Sense strand starting at position 633 of SEQ ID NO: 587461
aucacucuucuguggaauc

SEQ ID NO: 793931 - RNA, 19 nt, Artificial Sequence
  Description of Artificial Sequence: Synthetic oligonucleotide
  Antisense strand to SEQ ID NO: 793930
gauuccacagaagagugau

SEQ ID NO: 793932 - RNA, 19 nt, Artificial Sequence
  Description of Artificial Sequence: Synthetic oligonucleotide
  Sense strand starting at position 768 of SEQ ID NO: 587461
ugagauaguccugaugcau

SEQ ID NO: 793933 - RNA, 19 nt, Artificial Sequence
  Description of Artificial Sequence: Synthetic oligonucleotide
  Antisense strand to SEQ ID NO: 793932
augcaucaggacuaucuca

SEQ ID NO: 793934 - RNA, 19 nt, Artificial Sequence
  Description of Artificial Sequence: Synthetic oligonucleotide
  Sense strand starting at position 971 of SEQ ID NO: 587461
ugucacuuacucugggaaa

SEQ ID NO: 793935 - RNA, 19 nt, Artificial Sequence
  Description of Artificial Sequence: Synthetic oligonucleotide
  Antisense strand to SEQ ID NO: 793934
uuucccagaguaagugaca

SEQ ID NO: 793936 - RNA, 19 nt, Artificial Sequence
  Description of Artificial Sequence: Synthetic oligonucleotide
  Sense strand starting at position 973 of SEQ ID NO: 587461
ucacuuacucugggaaaua

SEQ ID NO: 793937 - RNA, 19 nt, Artificial Sequence
  Description of Artificial Sequence: Synthetic oligonucleotide
  Antisense strand to SEQ ID NO: 793936
uauuucccagaguaaguga

SEQ ID NO: 793938 - RNA, 19 nt, Artificial Sequence
  Description of Artificial Sequence: Synthetic oligonucleotide
  Sense strand starting at position 1054 of SEQ ID NO: 587461
cucugaaaguucuuagacu

SEQ ID NO: 793939 - RNA, 19 nt, Artificial Sequence
  Description of Artificial Sequence: Synthetic oligonucleotide
  Antisense strand to SEQ ID NO: 793938
agucuaagaacuuucagag

SEQ ID NO: 793940 - RNA, 19 nt, Artificial Sequence
  Description of Artificial Sequence: Synthetic oligonucleotide
  Sense strand starting at position 1298 of SEQ ID NO: 587461
gagguuuaauguuuacaua

SEQ ID NO: 793941 - RNA, 19 nt, Artificial Sequence
  Description of Artificial Sequence: Synthetic oligonucleotide
  Antisense strand to SEQ ID NO: 793940
uauguaaacauuaaaccuc

SEQ ID NO: 793942 - RNA, 19 nt, Artificial Sequence
  Description of Artificial Sequence: Synthetic oligonucleotide
  Sense strand starting at position 1376 of SEQ ID NO: 587461
uaauuuagaggucgcacuu

SEQ ID NO: 793943 - RNA, 19 nt, Artificial Sequence
  Description of Artificial Sequence: Synthetic oligonucleotide
  Antisense strand to SEQ ID NO: 793942
aagugcgaccucuaaauua

SEQ ID NO: 793944 - RNA, 19 nt, Artificial Sequence
  Description of Artificial Sequence: Synthetic oligonucleotide
  Sense strand starting at position 1393 of SEQ ID NO: 587461
uuacauugacuauggguau

SEQ ID NO: 793945 - RNA, 19 nt, Artificial Sequence
  Description of Artificial Sequence: Synthetic oligonucleotide
  Antisense strand to SEQ ID NO: 793944
auacccauagucaauguaa

SEQ ID NO: 793946 - RNA, 19 nt, Artificial Sequence
  Description of Artificial Sequence: Synthetic oligonucleotide
  Sense strand starting at position 1797 of SEQ ID NO: 587461
ucugaacuggcuugagaug

SEQ ID NO: 793947 - RNA, 19 nt, Artificial Sequence
  Description of Artificial Sequence: Synthetic oligonucleotide
  Antisense strand to SEQ ID NO: 793946
caucucaagccaguucaga

SEQ ID NO: 793948 - RNA, 19 nt, Artificial Sequence
  Description of Artificial Sequence: Synthetic oligonucleotide
  Sense strand starting at position 1961 of SEQ ID NO: 587461
aaggcauauugucuuuaag

SEQ ID NO: 793949 - RNA, 19 nt, Artificial Sequence
  Description of Artificial Sequence: Synthetic oligonucleotide
  Antisense strand to SEQ ID NO: 793948
cuuaaagacaauaugccuu

SEQ ID NO: 793950 - RNA, 19 nt, Artificial Sequence
  Description of Artificial Sequence: Synthetic oligonucleotide
  Sense strand starting at position 2049 of SEQ ID NO: 587461
gccaaaugacgugauagug

SEQ ID NO: 793951 - RNA, 19 nt, Artificial Sequence
  Description of Artificial Sequence: Synthetic oligonucleotide
  Antisense strand to SEQ ID NO: 793950
cacuaucacgucauuuggc

SEQ ID NO: 793952 - RNA, 19 nt, Artificial Sequence
  Description of Artificial Sequence: Synthetic oligonucleotide
  Sense strand starting at position 2070 of SEQ ID NO: 587461
ucaucacuggccuaugaca

SEQ ID NO: 793953 - RNA, 19 nt, Artificial Sequence
  Description of Artificial Sequence: Synthetic oligonucleotide
  Antisense strand to SEQ ID NO: 793952
ugucauaggccagugauga

SEQ ID NO: 793954 - RNA, 19 nt, Artificial Sequence
  Description of Artificial Sequence: Synthetic oligonucleotide
  Sense strand starting at position 2184 of SEQ ID NO: 587461
aaaugaucguguuuaacag

SEQ ID NO: 793955 - RNA, 19 nt, Artificial Sequence
  Description of Artificial Sequence: Synthetic oligonucleotide
  Antisense strand to SEQ ID NO: 793954
cuguuaaacacgaucauuu
